(19) United States
(12) Patent Application Publication
(10) Pub. No.: US 2005/0118625 A1
(43) Pub. Date: Jun. 2, 2005

(54) Nucleic acid arrays for detecting gene expression associated with human osteoarthritis and human proteases

(76) Inventor: William Martin Mounts, Andover, MA (US)

Correspondence Address: NIXON PEABODY, LLP, 401 9TH STREET, NW, SUITE 900, WASHINGTON, DC, 20004-2128, US

(21) Appl. No.: 10/956,157

(22) Filed: Oct. 4, 2004

Related U.S. Application Data
(60) Provisional application No. 60/507,511, filed on Oct. 2, 2003.

(51) Int. Cl. C12Q 1/68; C12M 1/34

(52) U.S. Cl. 435/6; 435/287.2

(57) ABSTRACT

The present invention provides nucleic acid arrays and methods of using the same for expression profiling of human protease and/or osteoarthritis genes. The nucleic acid arrays of the present invention include one or more substrate supports. A substantial portion of all polynucleotide probes that are stably attached to the substrate support(s) can hybridize under stringent or nucleic acid array hybridization conditions to human protease or osteoarthritis genes. In one embodiment, the nucleic acid arrays of the present invention include a plurality of probe sets, each of which can hybridize under stringent or nucleic acid array hybridization conditions to a different respective tiling sequence selected from Attachment C, or the complement thereof.

### RELATED APPLICATIONS

[0001] This application claims benefit and incorporates by reference the entire disclosure of U.S. Provisional Application Ser. No. 60/507,511 filed Oct. 2, 2003.

[0002] All materials on the compact discs labeled “Copy 1” and “Copy 2” are incorporated herein by reference in their entireties. Each of the compact discs includes the following files: Attachment A.txt (48 KB, created Mar. 9, 2004), Attachment B.txt (728 KB, created Mar. 9, 2004), Attachment C.txt (767 KB, created Mar. 10, 2004), Attachment D.txt (97 KB, created Mar. 10, 2004), Attachment E.txt (7,768 KB, created Oct. 3, 2004), Attachment F.txt (1,039 KB, created Mar. 15, 2004), Attachment G.txt (20 KB, created Mar. 15, 2004), Attachment H.txt (11,402 KB, created Oct. 3, 2004), and Sequence Listing.ST25.txt (65,689 KB, created Sep. 27, 2004).

### TECHNICAL FIELD

[0003] This invention relates to nucleic acid arrays and methods of using the same for detecting gene expression associated with human osteoarthritis and human proteases.

### BACKGROUND

[0004] Osteoarthritis is one of the most common diseases of the elderly. It mostly affects the weight-bearing joints such as spine, knees and hips, but thumb and finger joints may also be affected. Osteoarthritis is mainly a disease of “wear and tear.” Repetitive mechanical injury of the cartilage eventually results in loss of cartilage and damage to joint surfaces and adjacent bone. Inflammatory cells then invade the damaged joints, causing pain, swelling and stiffness of the joints. The repetitive mechanical injury also leads to pathological changes that are characterized by the loss of proteoglycans and collagen from the cartilage matrix.

[0005] Cartilage cells, such as chondrocytes, produce proteoglycans and collagen to form the cartilage matrix at joints. Cartilage cells also secrete a number of proteases to degrade the matrix structure. These proteases include collagenase, gelatinase, stromelysin, cathepsin, tissue plasminogen activator, and other metalloproteinases, cysteine proteases, aspartic proteases and serine proteases. The activities of these proteases are regulated by protease inhibitors, such as plasminogen activator inhibitors and numerous tissue inhibitors of metalloproteinase. The imbalance between the levels of the proteases and their inhibitors is believed to contribute to the onset and progress of osteoarthritis.

### SUMMARY OF THE INVENTION

[0006] The present invention provides nucleic acid arrays and methods of using the same for detecting gene expression associated with human osteoarthritis and human proteases. The nucleic acid arrays of the present invention are concentrated with probes for human protease genes and/or genes that are differentially expressed in osteoarthritic human cartilage cells as compared to osteoarthritis-free human cartilage cells. By concentrating probes for these genes on a single array, the present invention facilitates the study on human osteoarthritis and accelerates the drug development process for the treatment of osteoarthritis and other protease-related diseases.

[0007] In one aspect, a nucleic acid array of the present invention comprises one or more substrate supports. A substantial portion of all polynucleotide probes that are stably associated with the substrate support(s) can hybridize under stringent or nucleic acid array hybridization conditions to human protease genes and/or genes that are differentially expressed in osteoarthritic human cartilage cells as compared to osteoarthritis-free human cartilage cells. The differentially expressed genes can include genes whose expression is substantially elevated in osteoarthritic cartilage cells relative to osteoarthritis-free cartilage cells. The differentially expressed genes can also include genes whose expression is substantially reduced in osteoarthritic cartilage cells relative to osteoarthritis-free cartilage cells.

[0008] In one embodiment, a substantial portion of all polynucleotide probes on a nucleic acid array of the present invention comprises one or more first probe sets, and each of these first probe sets is capable of hybridizing under stringent or nucleic acid array hybridization conditions to a gene whose average expression level in osteoarthritic human cartilage cells is higher or substantially higher than that in osteoarthritis-free human cartilage cells. In another embodiment, the substantial portion of all polynucleotide probes further comprises one or more second probe sets, and each of these second probe sets is capable of hybridizing under stringent or nucleic acid array hybridization conditions to a gene whose average expression level in osteoarthritis-free human cartilage cells is higher or substantially higher than that in osteoarthritic human cartilage cells. In still another embodiment, the substantial portion of all polynucleotide probes further comprises one or more third probe sets, and each of these third probe sets is capable of hybridizing under stringent or nucleic acid array hybridization conditions to a human protease gene. As used herein, a probe set can hybridize to a target gene if each probe in the probe set can hybridize to the target gene (e.g., an mRNA, cDNA or codon sequence of the gene, or the complement thereof).

[0009] In one example, a substantial portion of all polynucleotide probes on a nucleic acid array of the present invention comprises (a) at least 2, 5, 10, 100, 500, or more first probe sets, each of which is capable of hybridizing under stringent or nucleic acid array hybridization conditions to a different respective gene whose average expression level in osteoarthritic human cartilage cells is substantially higher than that in osteoarthritis-free human cartilage cells; (b) at least 2, 5, 10, 100, 500, or more second probe sets, each of which is capable of hybridizing under stringent or nucleic acid array hybridization conditions to a different respective gene whose average expression level in osteoarthritis-free human cartilage cells is substantially higher than that in osteoarthritic human cartilage cells; and (c) at least 2, 5, 10, 100, 500, or more third probe sets, each of which is capable of hybridizing under stringent or nucleic acid array hybridization conditions to a different respective human protease gene. By “different respective”, it means that each probe set in a group of probe sets can hybridize to a gene that is different from those to which other probe sets in the group hybridize. Each probe set can include any number of probes, such as 2, 5, 10, 15, 20, 25, or more.

[0010] In yet another embodiment, a substantial portion of all polynucleotide probes on a nucleic acid array of the present invention includes at least 15%, 25%, 35%, 45%, or more of all polynucleotide probes that are stably associated with the substrate support(s) of the nucleic acid array.

[0011] In another embodiment, a nucleic acid array of the present invention includes at least 1, 2, 3, 4, 5, 10, 50, 100, 500, 1,000, 5,000, or more probe sets, each of which can hybridize under stringent or nucleic acid array hybridization conditions to a different respective tiling sequence selected from Attachment C, or the complement thereof. In one example, these probe sets constitutes a substantial portion of all polynucleotide probes that are stably associated with the nucleic acid array. In another example, the nucleic acid array includes at least 5,028 probe sets, each of which can hybridize under stringent or nucleic acid array hybridization conditions to a different respective tiling sequence selected from Attachment C, or the complement thereof. In still another example, the nucleic acid array includes each and every oligonucleotide probe selected from Attachment E. In many cases, the nucleic acid arrays of the present invention include a perfect mismatch probe for each perfect match probe.

[0012] The present invention also features methods of screening for candidate drugs capable of modulating expression of human protease or osteoarthritis genes. In one embodiment, the methods comprise the steps of:
[0013] (a) preparing a first nucleic acid sample from a human affected by osteoarthritis;
[0014] (b) hybridizing the first nucleic acid sample to a first nucleic acid array of the present invention;
[0015] (c) detecting a first set of hybridization signals;
[0016] (d) treating the human with a candidate drug;
[0017] (e) repeating steps (a)-(c) with a second nucleic acid sample from the treated human and a second nucleic acid array identical to the first array to obtain a second set of hybridization signals; and
[0018] (f) comparing the first and second sets of hybridization signals, where any change in expression level of at least one protease gene, and/or one gene differentially expressed in osteoarthritic human cartilage cells as compared to osteoarthritis-free human cartilage cells, identifies the candidate drug as one that modulates expression of human protease or osteoarthritis genes. In many cases, the first and second nucleic acid samples are prepared from cartilage tissues.

[0019] In another embodiment, the methods of the present invention comprise the steps of:
[0020] (a) preparing a first nucleic acid sample from a cell or tissue affected by osteoarthritis;
[0021] (b) hybridizing the first nucleic acid sample to a first nucleic acid array of the present invention;
[0022] (c) detecting a first set of hybridization signals;
[0023] (d) treating the cell or tissue with a candidate drug;
[0024] (e) repeating steps (a)-(c) with a second nucleic acid sample from the treated cell or tissue and a second nucleic acid array identical to the first array to obtain a second set of hybridization signals; and
[0025] (f) comparing the first and second sets of hybridization signals, where any change in expression level of at least one protease gene, and/or one gene differentially expressed in osteoarthritic human cartilage cells as compared to osteoarthritis-free human cartilage cells, identifies the candidate drug as one that modulates expression of human protease or osteoarthritis genes.

[0026] In addition, the present invention features probe arrays for the detection of protein levels of human protease or osteoarthritis genes. Each of these probe arrays includes probes or probe sets that can specifically bind to protein products of respective human protease or osteoarthritis genes. Examples of human protease or osteoarthritis genes include, but are not limited to, those that encode the tiling sequences selected from Attachment C. In one embodiment, a probe array of the present invention comprises a plurality of antibodies, each of which can specifically bind to a protein product of a different respective human protease or osteoarthritis gene.

[0027] The present invention also features polynucleotide collections. In one embodiment, a polynucleotide collection of the present invention comprises a probe set capable of hybridizing under stringent or nucleic acid array hybridization conditions to a tiling sequence selected from Attachment C, or the complement thereof. In another embodiment, a polynucleotide collection of the present invention comprises at least 2, 5, 10, 100, 1,000, or more probe sets, each of which can hybridize under stringent or nucleic acid array hybridization conditions to a different respective tiling sequence selected from Attachment C, or the complement thereof. In yet another embodiment, a polynucleotide collection of the present invention includes at least 1, 2, 5, 10, 50, 100, 1,000 or more tiling sequences selected from Attachment C, or the complements thereof. In still another embodiment, a polynucleotide collection of the present invention comprises at least 1, 2, 5, 10, 100, 500, 1,000 or more sequences selected from SEQ ID NOs: 1-5,235, or the complements thereof.

[0028] Other features, objects, and advantages of the present invention are apparent in the detailed description that follows. It should be understood, however, that the detailed description, while indicating preferred embodiments of the invention, is given by way of illustration only, not limitation. Various changes and modifications within the scope of the invention will become apparent to those skilled in the art from the detailed description.

### BRIEF DESCRIPTION OF THE DRAWING

[0029] The drawing is provided for illustration, not limitation.

[0030] FIGURE 1 represents an Eisen cluster of transcriptional profiling data generated with a nucleic acid array of the present invention.

### DETAILED DESCRIPTION

I. Definitions

[0031] “Nucleic acid array hybridization conditions” refer to the temperature and ionic conditions that are normally used in nucleic acid array hybridization. These conditions include 16-hour hybridization at 45° C., followed by at least three 10-minute washes at room temperature. The hybridization buffer comprises 100 mM MES, 1 M [Na⁺], 20 mM EDTA, and 0.01% Tween 20. The pH of the hybridization buffer preferably is between 6.5 and 6.7. The wash buffer is 6×SSPET. 6×SSPET contains 0.9 M NaCl, 60 mM NaH₂PO₄, 6 mM EDTA, and 0.005% Triton X-100. Under more stringent nucleic acid array hybridization conditions, the wash buffer can contain 100 mM MES, 0.1 M [Na⁺], and 0.01% Tween 20.

[0032] “A substantial portion of all polynucleotide probes” means at least 15% of all polynucleotide probes. For instance, a substantial portion can be at least 20%, 25%, 30%, 35%, 40%, 45%, 50%, or more of all polynucleotide probes. Where a nucleic acid array includes both perfect match probes and perfect mismatch probes, a substantial portion of all polynucleotide probes can include, for example, at least 30% of all perfect match probes. Preferably, a substantial portion of all polynucleotide probes includes at least 50%, 60%, 70%, 80%, 90% or more of all perfect match probes.

[0033] The expression level of a gene is “substantially higher” in one tissue than in another tissue if the molar concentration of the mRNA transcript of the gene relative to the total mRNA in the former tissue is at least 1.5-fold of that in the latter tissue. For instance, the molar concentration of the mRNA transcript of the gene relative to the total mRNA in the former tissue can be at least 2-fold, 5-fold, 10-fold, or 20-fold of that in the latter tissue. In one instance, the mRNA transcript of the gene is detectable in the former tissue but not in the latter tissue. In another instance, the mRNA transcript of the gene is more readily identifiable using 5′ or 3′ sequence reads from a cDNA library prepared from the former tissue than from a cDNA library prepared from the latter tissue.

[0034] “Stringent conditions” are at least as stringent as, for example, conditions G-L shown in Table 1. In certain embodiments of the present invention, highly stringent conditions A-F can be used. Under Table 1, hybridization is carried out under the hybridization conditions (Hybridization Temperature and Buffer) for about four hours, followed by two 20-minute washes under the corresponding wash conditions (Wash Temp. and Buffer).

TABLE 1
Stringency Conditions

| | Poly- | | | |
|---|---|---|---|---|
| Stringency | nucleotide | Hybrid | Hybridization | Wash Temp. |
| Condition | Hybrid | Length (bp)¹ | Temperature and Buffer^{H} | and Buffer^{H} |
| A | DNA:DNA | >50 | 65° C.; 1 × SSC -or- | 65° C.; 0.3 × SSC |
| | | | 42° C.; 1 × SSC, 50% formamide | |
| B | DNA:DNA | <50 | T_{B}*; 1 × SSC | T_{B}*; 1 × SSC |
| C | DNA:RNA | >50 | 67° C.; 1 × SSC -or- | 67° C.; 0.3 × SSC |
| | | | 45° C.; 1 × SSC, 50% formamide | |
| D | DNA:RNA | <50 | T_{D}*; 1 × SSC | T_{D}*; 1 × SSC |
| E | RNA:RNA | >50 | 70° C.; 1 × SSC -or- | 70° C.; 0.3 × SSC |
| | | | 50° C.; 1 × SSC, 50% formamide | |
| F | RNA:RNA | <50 | T_{F}*; 1 × SSC | T_{f}*; 1 × SSC |
| G | DNA:DNA | >50 | 65° C.; 4 × SSC -or- | 65° C.; 1 × SSC |
| | | | 42° C.; 4 × SSC, 50% formamide | |
| H | DNA:DNA | <50 | T_{H}*; 4 × SSC | T_{H}*; 4 × SSC |
| I | DNA:RNA | >50 | 67° C.; 4 × SSC -or- | 67° C.; 1 × SSC |
| | | | 45° C.; 4 × SSC, 50% formamide | |
| J | DNA:RNA | <50 | T_{J}*; 4 × SSC | T_{J}*; 4 × SSC |
| K | RNA:RNA | >50 | 70° C.; 4 × SSC -or- | 67° C.; 1 × SSC |
| | | | 50° C.; 4 × SSC, 50% formamide | |
| L | RNA:RNA | <50 | T_{L}*; 2 × SSC | T_{L}*; 2 × SSC |
| ¹The hybrid length is that anticipated for the hybridized region(s) of the hybridizing polynucleotides. When hybridizing a polynucleotide to a target polynucleotide of unknown sequence, the hybrid length is assumed to be that of the hybridizing polynucleotide. When polynucleotides of known sequence are hybridized, the hybrid length can be determined by aligning the sequences of the | | | | |
| # polynucleotides and identifying the region or regions of optimal sequence complementarity. | | | | |
| ^{H}SSPE (1 × SSPE is 0.15 M NaCl, 10 mM NaH₂PO₄, and 1.25 mM EDTA, pH 7.4) can be substituted for SSC (1 × SSC is 0.15 M NaCl and 15 mM sodium citrate) in the hybridization and wash buffers. | | | | |
| T_{B}*-T_{R}*: The hybridization temperature for hybrids anticipated to be less than 50 base pairs in length should be 5-10° C. less than the melting temperature (Tₘ) of the hybrid, where Tₘ is determined according to the following equations. For hybrids less than 18 base pairs in length, | | | | |
| # Tₘ(° C.) = 2(# of A + T bases) + 4(# of G + C bases). For hybrids between 18 and 49 base pairs in length, Tₘ(° C.) = 81.5 + 16.6(log₁₀Na⁺) + 0.41(% G + C) − (600/N), where N is the number of bases in the hybrid, and Na⁺ is the molar concentration of sodium ions | | | | |
| # in the hybridization buffer (Na⁺ for 1 × SSC = 0.165 M). | | | | |

[0035] Various aspects of the invention are described in further detail in the following sections or subsections. The use of sections and subsections is not meant to limit the invention; each section and subsection may apply to any aspect of the invention.

II. The Invention

[0036] The nucleic acid arrays of the present invention comprise polynucleotide probes for human protease genes and/or human osteoarthritis genes. The osteoarthritis genes are differentially expressed in osteoarthritic human cartilage cells as compared to osteoarthritis-free human cartilage cells. The probes for human protease and/or osteoarthritis genes can hybridize under stringent or nucleic acid array hybridization conditions to the mRNA and/or cDNA sequences of these genes, or the complements thereof. In one embodiment, a nucleic acid array of the present invention includes one or more substrate supports, and a substantial portion of all polynucleotide probes that are stably attached to the one or more substrate supports consists of probes for human protease and/or osteoarthritis genes. In another embodiment, a nucleic acid array of the present invention includes probes which can hybridize under stringent or nucleic acid array hybridization conditions to respective tiling sequences selected from Attachment C, or the complements thereof. The nucleic acid array can also include probes for other genes that are not associated with human osteoarthritis or proteases.

[0037] The nucleic acid arrays of the present invention can be used to detect or monitor the expression profiles of human protease and/or osteoarthritis genes. The nucleic acid arrays of the present invention can also be used to identify new therapeutic targets for the treatment of osteoarthritis and/or protease-related diseases. In addition, the nucleic acid arrays of the present invention can be used to screen for potential drug candidates for treating osteoarthritis and/or protease-related diseases.

[0038] Compared to a typical Affymetrix microarray, the nucleic acid arrays of the present invention are concentrated with probes for human protease and/or osteoarthritis genes. This allows for a more focused, cost-effective study on osteoarthritis and other protease-related diseases. For instance, a typical Affymetrix microarray, such as the Human Genome U133 Set, includes probe sets for approximately 33,000 human genes. The gene expression analysis using this microarray may generate hundreds, if not thousands, of genes which have altered expression in response to an osteoarthritis treatment. Interpretation of this gene expression data is frequently laborious and time-consuming because many of the genes with altered expression are not associated with osteoarthritis. Moreover, microarrays with comprehensive representation of all human genes are expensive, therefore preventing their widespread use in the drug development process. By concentrating probes for human protease and/or osteoarthritis genes on a single array, the present invention eliminates the painstaking process for identifying and removing irrelevant genes. In addition, by using a less number of probes, the present invention reduces the cost associated with the use of traditional arrays, thereby accelerating the drug development process.

[0039] A. Collection of mRNA, cDNA and/or Other Polypeptide Coding Sequences of Human Protease Genes and Human Osteoarthritis Genes

[0040] mRNA, cDNA and/or other polypeptide coding sequences of human protease genes can be collected from a variety of sources, such as GenBank and TIGR (The Institute for Genome Research). These publicly accessible sequence databases frequently include a large number of EST and cDNA sequences. Many of these sequences are annotated. Sequences encoding human proteases can therefore be identified.

[0041] The publicly available sequence databases also contain an enormous amount of human genomic sequences. Open reading frames (ORFs) in these genomic sequences can be predicted or isolated using methods known in the art. Suitable methods for this purpose include, but are not limited to, GeneMark (provided by the European Bioinformatics Institute), Glimmer (provided by TIGR), and ORF Finder (provided by the National Center for Biotechnology Information (NCBI)). The ORFs that encode or have high sequence homology to known proteases can be identified. The function of the polypeptides encoded by the identified ORFs can be further evaluated using standard methods, such as in vitro transcription and translation or the cell culture-based assays.

[0042] Uncontrolled protease activity has been implicated in osteoarthritis and many other diseases, such as arteriosclerosis, muscular dystrophy, amyotrophy, rheumatoid arthritis, autoimmune diseases, inflammation, infection, cancer, and degenerative disorders. Therefore, proteases have been the major targets for drug action and development.

[0043] Proteases are known to be involved in a wide variety of biological processes, including post-translational modifications, blood coagulation, fibrinolysis, complement activation, fertilization, hormone production, degradation of undesirable proteins and invading organisms, tumor metastasis, stress response, wound healing, tissue remodeling, cell proliferation/differentiation, and signal transduction pathways. Protease includes endopeptidases and exopeptidases. Endopeptidases cleave peptide bonds at points within the protein, while exopeptidases remove amino acids sequentially from either N or C-terminus. At least four mechanistic classes of endopeptidases have been recognized: the aspartic, the serine, the metallo, and the cysteine proteinases.

[0044] The aspartic proteinases include at least one active aspartate residue at the catalytic center. Catalysis by aspartic proteases involves the formation of a non-covalent neutral tetrahedral intermediate. Examples of the aspartic proteases include pepsin A, presenilin 1, chymosin, lysosomal cathepsins D, renin, and retropepsin (from human immunodeficiency virus type 1).

[0045] The serine proteinases are a large family of proteolytic enzymes, including trypases (cleaving arginine or lysine), aspases (cleaving after aspartate), chymases (cleaving after phenylalanine or leucine), metases (cleaving after methionine), and serases (cleaving after serine). The serine proteases are so named because of the presence of a serine residue in the active catalytic site of the protease.

[0046] The metallo proteinases differ widely in their sequences and their structures. Many of the metallo proteinases contain a zinc atom in their catalytic sites. Examples of the metallo proteinases include membrane alanyl aminopeptidase, germinal peptidyl-dipeptidase A, collagenase 1, neprilysin, carboxypeptidase A, membrane dipeptidase, and S2P protease.

[0047] The cysteine proteinases contain a cysteine nucleophile at the catalytic site. Like the serine proteinases, catalysis by cysteine proteinases involves the formation of a covalent intermediate between the substrate and the active-site cysteine. Exemplary cysteine proteinases include cytosolic calpains and lysosomal cathepsins.

[0048] The present invention is not limited to proteases that are known to be involved in osteoarthritis. Other protease genes and their mRNA/cDNA sequences can also be identified and used to prepare probes for constructing the nucleic acid arrays of the present invention.

[0049] mRNA, cDNA and/or other polypeptide-coding sequences of human osteoarthritis genes can be obtained through sequencing suitable cDNA libraries. Exemplary cDNA libraries for this purpose include libraries prepared from osteoarthritic human cartilage cells and libraries prepared from osteoarthritis-free human cartilage cells. Preferably, each library is constructed such that the frequency of occurrence of each cDNA clone in the cDNA library is proportional to the relative molar concentration of the corresponding mRNA in the cartilage tissue from which the cDNA library is derived. The frequency of occurrence of each cDNA clone also correlates with the chance of that cDNA clone being detected in the cDNA library. Thus, the readiness of a cDNA clone being detected in the cDNA library can reflect the relative concentration of the corresponding mRNA in the cartilage tissue from which the cDNA library is derived. Accordingly, by comparing the sequence reads obtained from osteoarthritic cDNA libraries to those obtained from osteoarthritis-free libraries, genes that are differentially expressed in these two types of libraries may be determined.

[0050] Methods for constructing cartilage cDNA libraries are well known in the art. Suitable cartilage tissues for this purpose include hyaline cartilage, elastic cartilage, fibrous cartilage, and articular cartilage. Preferably, the cartilage tissues are isolated from the large joints of osteoarthritis-free humans or humans who are affected with osteoarthritis. In one embodiment, osteoarthritic cartilage is obtained from osteoarthritis patients undergoing total knee arthroplasty, and osteoarthritic-free cartilage is collected from the femoral heads of osteoarthritic-free patients who undergo hemiarthroplasty for hip facture. The isolated cartilage samples can be homogenized and then extracted for mRNA. Suitable agents for mRNA extraction include, but are not limited to, guanidine isothiocyanate/acidic phenyl method, the TRIZOL® Reagent (Invitrogen), or the Micro-FastTrack™ 2.0 or FastTrack™ 2.0 mRNA Isolation Kits (Invitrogen). Alternatively, cartilage cells, such as chondrocytes, can be first dissociated from the cartilage samples, and then extracted for mRNA. The extracted mRNA is subsequently purified based on its unique 3′ or 5′ structure.

[0051] In one embodiment, the mRNA in the cartilage cells is purified by virtue of the presence of a polyadenylated (polyA) tail present at the 3′ end of the mRNA. The polyA tail binds to a resin conjugated with oligo-dT (oligo-dT chromatography). The purified mRNA is then copied into cDNA using a reverse transcriptase and a primer under conditions sufficient for the first strand cDNA synthesis to occur. Although both random and specific primers can be employed, in many embodiments the primer is an oligo-dT primer that provides for hybridization to the polyA tail in the mRNA. The oligo-dT primer is sufficiently long to provide for efficient hybridization to the polyA tail. Typically, the oligo-dT primer ranges from 10 to 25 nucleotides in length, such as from 12 to 18 nucleotides in length. Additional reagents, such as dNTPs, buffering agents (e.g. Tris Cl), cationic sources (monovalent or divalent, e.g. KCl, MgCl₂), and sulfhydril reagents (e.g. dithiothreitol), can be included in the reaction.

[0052] A variety of enzymes, usually DNA polymerases possessing reverse transcriptase activity, can be used for the first strand cDNA synthesis. Examples of suitable DNA polymerases include the DNA polymerases derived from thermophilic bacteria, archaebacteria, retroviruses, yeasts, Neurosporas, Drosophilas, primates, or rodents. In one embodiment, the DNA polymerase is derived from Moloney murine leukemia virus (M-MLV), human T-cell leukemia virus type I (HTLV-I), bovine leukemia virus (BLV), Rous sarcoma virus (RSV), human immunodeficiency virus (HIV), Thermus aquaticus (Taq), Thermus thermophilus (Tth), or avian reverse transcriptase. M-MLV reverse transcriptase lacking RNaseH activity can also be used. See, for example, U.S. Pat. No. 5,405,776, which is incorporated herein by reference.

[0053] The order in which the reagents are combined can be modified as desired. In one protocol, all reagents except for the reverse transcriptase are combined on ice, and then the reverse transcriptase is added at around 4° C. Following the addition of the reverse transcriptase, the temperature of the reaction mixture can be raised to 37° C., followed by incubation for a period of time sufficient for the primer extension to form the first strand of cDNA. The primer extension starts at the 3′ end of the mRNA and proceeds towards the 5′ end. The incubation period can take about 1 hour.

[0054] Second strand cDNA synthesis is then performed. Linkers are added to the ends of the double stranded cDNA to allow for its package into virus or cloning into plasmids/vectors. At this stage, the cDNA is in a form that can be propagated. The linkers or the primers can include rare restriction enzyme sites, such as Not I and/or Pac I, to facilitate the cloning of the cDNA into plasmids/vectors. Suitable plasmids/vectors for subcloning cDNA molecules include, but are not limited to, the pT7T3-Pac vector (a modified pT7T3 vector, Pharmacia), the pSPORT 1 vector (Invitrogen), and the lambda vectors (Stratagene).

[0055] In another embodiment, the mRNA in the cartilage cells is purified through its unique 5′-cap structure. The 5′-cap structure of eukaryotic mRNA includes m7 GpppN, where N can be any nucleotide. Resins conjugated with a 5′-cap binding agent can be used to purify mRNA. Suitable 5′-cap binding agents include, but are not limited to, the eIF-4E/eIF-4G fusion protein disclosed in U.S. Pat. No. 6,326,175, which is incorporated herein by reference. The first strand cDNA synthesis can be performed using any conventional protocol. Following the first strand cDNA synthesis, the resultant mRNA/DNA duplex is contacted with an RNase to degrade single stranded RNA but not RNA complexed to DNA. Suitable RNases for this purpose include RNase Ti from Aspergillus orzyae, RNase I, and RNase A. The conditions and duration of incubation during this step can vary depending on the specific nuclease employed. Generally, the incubation temperature is between about 20° C. to 37° C., and the incubation time lasts from about 10 to 60 min.

[0056] Nuclease treatment produces blunt-ended mRNA/DNA duplexes. The mRNA/DNA hybrids that include the unique 5′-cap structure can be isolated using resins conjugated with the eIF-4E/eIF-4G fusion protein. Following isolation, the nucleic acids can be further processed, including release from the resins and production of double stranded cDNA. The double stranded cDNA is then subcloned into appropriate plasmids/vectors to create a cDNA library.

[0057] In one specific example, the cDNA library is prepared using the CloneMiner™ cDNA Library Construction Kit provided by Invitrogen (Carlsbad, Calif.). The CloneMiner Kit uses a modified reverse transcriptase and a biotin-attB-oligo(dT) primer to synthesize the first strand of cDNA. The modified reverse transcriptase has reduced RNAase H activity, thereby decreasing RNA degradation during the first strand synthesis. The second strand of cDNA is synthesized using E. coli DNA polymerase I, and an attB adaptor is added to the 5′ end of the double stranded cDNA. The final cDNA product is therefore flanked by two attB sites.

[0058] The att sites, such as the attB and attP sites, are components of the lambda recombination system. Recombination between the attB and attP sites swaps the sequences located therebetween. The CloneMiner destination vectors contain the ccdB gene flanked by the attP sites. The ccdB gene inhibits the growth of most E. coli strains. Recombination between the attB-flanked cDNA sequence and the destination vectors replaces the ccdB gene with the cDNA sequence, thereby removing the inhibitory effect of the ccdB gene and allowing negative selection of the recombinant vector that contains the cDNA insert. The selected recombinant vectors are then transformed into competent E. coli cells to produce a cDNA library. The cDNA library prepared using the CloneMiner cDNA Library Construction Kit preferably includes at least 5×10⁶, 1×10⁷, 5×10⁷ or more primary clones.

[0059] According to the CloneMiner user's manual, cDNA can be either radiolabeled or non-radiolabeled during its synthesis. Radiolabeling facilitates the measurement of cDNA yield and overall quality of the first strand cDNA synthesis. For instance, if [α-³²P]dCTP is used to monitor the first strand reaction, the percent incorporation of [α-³²P]dCTP preferably is no less than 10%. More preferably, the percent incorporation of [α-³²P]dCTP is about 20-50%.

[0060] In addition, cDNA can be size fractionated before being subcloned into the destination vectors. Suitable methods for size fractionation include, but are not limited to, column chromatography and gel electrophoresis. The final cDNA yield after size fractionation and subsequent ethanol precipitation preferably is no less than 30-40 ng. In some cases, at least 50, 75, 100, 150, 200 ng or more cDNA is used for subcloning.

[0061] During the construction of the cDNA library, the mRNA extraction and purification steps are preferably conducted under conditions where the RNase activities are minimized. The quality of the purified mRNA can be monitored using agarose/ethidium bromide gel electrophoresis. The amount of the purified mRNA can range from 0.5 to 10 μg. Preferably, at least 2 μg of purified mRNA is used for the construction of a cDNA library. In one embodiment, 1 to 5 μg of mRNA is used for preparing a cDNA library containing 10⁶ to 10⁷ primary clones in E. coli.

[0062] cDNA clones in a cartilage library can be readily sequenced using methods known in the art. In standard methods, individual cDNA clones in the library are first isolated, followed by the purification of vectors that contain the cDNA inserts. The cDNA inserts can then be sequenced using primers designed from the common vector sequences adjacent to the 5′ or 3′ end of the cDNA inserts.

[0063] In one embodiment, the 5′ and 3′ sequence reads from an osteoarthritic cartilage library as well as an osteoarthritis-free cartilage library are collected. Both libraries are prepared using oligo-dT primers for the first strand cDNA synthesis. The frequency of occurrence of each cDNA clone in each library is proportional to the relative molar concentration of the corresponding mRNA in the cartilage tissue from which the cDNA library is derived. Therefore, the readiness of a cDNA clone being detected in the cDNA library may represent the relative abundance of the corresponding mRNA in the cartilage tissue from which the library is derived.

[0064] The 5′ and 3′ sequence reads from the cartilage libraries can be edited before being used for other purposes. For instance, the vector sequences at the 5′ end of the 3′ sequence read product can be removed or masked out. This process may be carried out automatically, such as by employing a screening algorithm, or conducted manually. Typically, the quality of the sequence read decreases as it moves towards the distant end of synthesis. Thus, by trimming the distant end, the overall quality and accuracy of the eventual sequence will be improved. In addition to trimming the distant end, the initiation end of synthesis for each sequence read can also be trimmed.

[0065] In a preferred embodiment, the 5′ sequence reads are first mapped to publicly available human gene sequences (such as those from GenBank or NCBI's human RefSeq). These publicly available gene sequences are then used in the nucleic acid array design process as described below. If a 5′ sequence read does not map to any known human gene in the public sequence databases, the 5′ sequence read can be resubmitted for 3′ sequencing.

[0066] The edited 3′ sequence reads from both the osteoarthritic cartilage library and the osteoarthritis-free cartilage library, the sequences derived from the 5′ sequence reads, and the protease sequences obtained from GenBank and other sequence databases, can be clustered to identify highly homologous sequences. Suitable clustering algorithms for this purpose include, but are not limited to, the CAT (cluster and alignment tool) software package provided by DoubleTwist. See Clustering and Alignment Tools User's Guide (DoubleTwist, Inc., 2000).

[0067] The CAT program can reduce the redundancy, as well as mask low-complexity regions of the input sequence set. The resulting sequence set derived from CAT contains two distinct groups of sequences. The first group is a set of consensus sequences derived from multiple sequence alignment produced for CAT sub-clusters containing more than one sequence. These multi-sequence sub-clusters may include single transcripts represented in the input sequence set numerous times. The second group is a set of exemplar sequences that do not cluster with any other CAT sub-cluster. The consensus and exemplar sequences can be generated such that any base ambiguity would be identified with the respective IUPAC (International Union of Pure and Applied Chemistry) base representation, which is identical to the WIPO Standard ST.25 (1998).

[0068] In a small number of cases, the multi-sequence sub-clusters contain a large number of sequences due to clustering artifacts (e.g., highly homologous genes or domains). In these cases, through more stringent clustering parameters, the large sub-clusters are re-clustered. In addition, the consensus sequences can be manually curated to verify cluster membership.

[0069] In a specific example, a set of 47,600 sequences were collected from NCBI's human RefSeq collection. With this set of RefSeq sequences, 5,553 5′ sequence reads from a mild osteoarthritic cartilage cDNA library (“GI_MILD”), 5,332 5′ sequence reads from a severe osteoarthritic cartilage cDNA library (“GI_SEVERE”), as well as 5,224 5′ sequences reads from an osteoarthritis-free cartilage library (“GLAXO_Normal”) and 5,019 5′ sequences reads from an osteoarthritic cartilage library (“GLAXO_OA”), were clustered and aligned to determine which known genes were present in the cartilage libraries. From this 5′ clustering run, most of the 5′ sequence reads were mapped to a known gene. Those that did not map to a known gene were resubmitted for 3′ sequencing. These 3′ sequences were then clustered. The combination of these two cluster collections in addition to a list of known proteases were used to generate probes for constructing nucleic acid arrays.

[0070] Examples of the consensus sequences obtained using the above-described method are illustrated in Attachment A. Examples of the exemplar sequences are shown in Attachment B. Each consensus or exemplar sequence has a respective SEQ ID NO and a header that includes the qualifier (starting with “wyeHumanOAla”) and other information of that sequence. The consensus and exemplar sequences are collectively referred to as the “parent sequences.”

[0071] Attachment F illustrates the source(s) from which each parent sequence is derived. If at least one input sequence for a parent sequence is from the osteoarthritis-free cartilage cDNA library, then the “GLAXO_Normal” column for that parent sequence is selected as “1.” Otherwise, “GLAXO_Normal” is “0.” Likewise, if at least one input sequence for a parent sequence is from the osteoarthritic cartilage library, the mild osteoarthritic cartilage cDNA library, or the severe osteoarthritic cartilage cDNA library, then “GLAXO_OA,” “GI_MILD,” or “GI_SEVERE” for that parent sequence is selected as “1,” respectively. Otherwise, “GLAXO_OA” “GI_MILD,” and “GI_SEVERE” are “0.” If at least one input sequence is derived from a source (such as NCBI's human RefSeq) other than the above-described four cartilage cDNA libraries, then the “Other” column for the parent sequence is “1.” Occasionally, if an input sequence cannot be determinably assigned to either “GI_MILD,” or “GI_SEVERE,” the “Other” column for the parent sequence is selected as “1.”

[0072] In one example, all the input sequences for a parent sequence are derived from the osteoarthritis-free cartilage library and/or non-cDNA library sources (“GLAXO_Normal” or “Other” being “1”). These input sequences were detectable in the osteoarthritis-free cartilage library, but not in the osteoarthritic cartilage libraries. As discussed above, the chance for a sequence being detected in a cDNA library generally correlates with the relative concentration of the corresponding mRNA in the tissue from which the library is derived. Accordingly, the parent sequence can represent an mRNA transcript or a gene whose level of expression in the osteoarthritis-free cartilage tissue is substantially higher than that in the osteoarthritic cartilage tissue. For instance, the level of expression of the mRNA transcript or gene in the osteoarthritis-free cartilage tissue can be at least 1.5-fold, 2-fold, 3-fold, 4-fold, or 5-fold of that in the osteoarthritic cartilage tissue. The level of expression can be determined using standard methods, such as RT-PCR, Northern Blot, microarrays, or immunoassays such as ELISA or RIA.

[0073] In another specific example, all the input sequences for a parent sequence are derived from one of the osteoarthritic cartilage cDNA libraries (“GLAXO_OA,” “GI_MILD,” or “GI_SEVERE” being “1”). These input sequences were detectable in the osteoarthritic cartilage libraries, but not in the osteoarthritis-free cartilage library. The parent sequence therefore can represent an mRNA transcript or a gene whose level of expression in the osteoarthritic cartilage tissue is substantially higher than that in the osteoarthritis-free cartilage tissue.

[0074] In a further example, the input sequences for a parent sequence are derived from both the osteoarthritic cartilage cDNA libraries and the osteoarthritis-free cartilage library. The parent sequence can represent an mRNA transcript or a gene whose level of expression in the osteoarthritic cartilage tissue is substantially the same as that in the osteoarthritis-free cartilage tissue.

[0075] In yet another specific example, all the input sequences for a parent sequence are derived from non-cDNA library sources such as NCBI's human Refseq (“Other” being 1).

[0076] In still yet another specific example, the input sequences for a parent sequence are detectable in the severe osteoarthritic cartilage library, but not in the mild osteoarthritic cartilage library, or vice versa. This suggests that the parent sequence can be differentially expressed in severely affected cartilage tissues as compared to mildly affected cartilage tissues.

[0077] B. Preparation of Polynucleotide Probes for Expression Profiling of Human Protease or Osteoarthritis Genes

[0078] The consensus and exemplar sequences depicted in Attachments A and B can be used to prepare polynucleotide probes that are useful for expression profiling of human protease or osteoarthritis genes. The polynucleotide probes for each parent sequence can hybridize under stringent or nucleic acid array hybridization conditions to that parent sequence, or the complement thereof. Preferably, the probes for each parent sequence are incapable of hybridizing under stringent or nucleic acid array hybridization conditions to other parent sequences, or the complements thereof. If a parent sequence contains one or more ambiguous residues, the probes for that parent sequence can hybridize under stringent or nucleic acid array hybridization conditions to the longest unambiguous segment of that parent sequence, or the complement thereof. In one embodiment, the probe for a parent sequence comprises or consists of an unambiguous sequence fragment of that parent sequence, or the complement thereof.

[0079] The length of each polynucleotide probe can be selected to produce the desired hybridization effects. For example, the probes can include or consist of at least 10, 15, 20, 25, 30, 35, 40, 45, 50, 60, 70, 80, 90, 100, 200, 300, 400 or more consecutive nucleotides. The probes can be DNA, RNA, or PNA. Other modified forms of DNA, RNA, or PNA can also be used. The nucleotide units in each probe can be either naturally occurring residues (such as deoxyadenylate, deoxycytidylate, deoxyguanylate, deoxythymidylate, adenylate, cytidylate, guanylate, and uridylate), or synthetically produced analogs that are capable of forming desired base-pair relationships. Examples of these analogs include, but are not limited to, aza and deaza pyrimidine analogs, aza and deaza purine analogs, and other heterocyclic base analogs, wherein one or more of the carbon and nitrogen atoms of the purine and pyrimidine rings are substituted by heteroatoms, such as oxygen, sulfur, selenium, and phosphorus. Similarly, the polynucleotide backbones of the probes can be either naturally occurring (such as through 5′ to 3′ linkage), or modified. For instance, the nucleotide units can be connected via non-typical linkage, such as 5′ to 2′ linkage, so long as the linkage does not interfere with hybridization. For another instance, peptide nucleic acids, in which the constitute bases are joined by peptide bonds rather than phosphodiester linkages, can be used.

[0080] In one embodiment, the probes have relatively high sequence complexity, and preferably do not contain long stretches of the same nucleotide. In another embodiment, the probes can be designed such that they do not have a high proportion of G or C residues at the 3′ ends. In yet another embodiment, the probes do not have a 3′ terminal T residue. Depending on the type of assay or detection to be performed, sequences that are predicted to form hairpins or interstrand structures, such as “primer dimers,” can be either included in or excluded from the probe sequences. Preferably, each probe does not contain any ambiguous base.

[0081] Any part of a parent sequence can be used to prepare probes. For instance, probes can be prepared from the protein-coding region, the 5′ untranslated region, or the 3′ untranslated region of a parent sequence. Multiple probes, such as 5, 10, 15, 20, 25, 30, or more, can be prepared for each parent sequence. The multiple probes for the same parent sequence may or may not overlap each other, although overlap among different probes may be desirable in some assays.

[0082] In a preferred embodiment, the probes for a parent sequence have low sequence identities with other parent sequences, or the complements thereof. For instance, each probe for a parent sequence can have no more than 70%, 60%, 50% or less sequence identity with other parent sequences, or the complements thereof. This reduces the risk of potential cross-hybridization between the probes and the undesirable RNA transcripts. Sequence identity can be determined using methods known in the art. These methods include, but are not limited to, BLASTN, FASTA, FASTDB, and the GCG program.

[0083] The suitability of the probes for hybridization can be evaluated using various computer programs. Suitable programs for this purpose include, but are not limited to, LaserGene (DNAStar), Oligo (National Biosciences, Inc.), MacVector (Kodak/IBI), and the standard programs provided by the Genetics Computer Group (GCG).

[0084] The polynucleotide probes of the present invention can be synthesized using methods known in the art. Exemplary methods include automated or high throughput DNA synthesizers, such as those provided by Millipore, GeneMachines, and BioAutomation. Preferably, the synthesized probes are substantially free of impurities, such as incomplete products produced during the synthesis. In addition, the probes are substantially free of other contaminants that may hinder the desired functions of the probes. The probes can be purified or concentrated using different methods, such as reverse phase chromatography, ethanol precipitation, gel filtration, electrophoresis, or any combination thereof.

[0085] In one embodiment, the parent sequences with large sizes are divided into shorter sequence segments to facilitate the probe design. These divided sequences, together with the undivided parent sequences, are collectively referred to as the “tiling sequences.”

[0086] Attachment C depicts the tiling sequences and their respective headers. The headers include the qualifiers (starting with “wyeHumanOAla”) and other information of the tiling sequences. The first 321 tiling sequences in Attachment C correspond to, in consecutive order, the consensus sequences in Attachment A. The remaining tiling sequences correspond to, in consecutive order, the exemplar sequences in Attachment B.

[0087] Attachment D shows the location of each tiling sequence in the corresponding parent sequence. The 5′ end of each tiling sequence in the corresponding parent sequence is indicated under “TilingStart,” and the 3′ end of the tiling sequence is shown under “TilingEnd.”

[0088] Polynucleotide probes for each tiling sequence can hybridize under stringent or nucleic acid array hybridization conditions to that tiling sequence, or the complement thereof. Preferably, a probe for a tiling sequence can hybridize under highly stringent conditions to the tiling sequence, or the complement thereof. More preferably, the probes for a tiling sequence are incapable of hybridizing under stringent or nucleic acid array hybridization conditions to other tiling sequences, or the complements thereof. If a tiling sequence contains one or more ambiguous residues, the probes for the tiling sequence can hybridize under stringent or nucleic acid array hybridization conditions to the longest unambiguous segment of that sequence, or the complement thereof.

[0089] Any suitable method can be used to prepare probes for the tiling sequences. In one embodiment, the probes are generated using Array Designer, a software package provided by TeleChem International, Inc (Sunnyvale, Calif. 94089). Examples of the probes thus generated are illustrated in Attachment E. The location of the 5′ and 3′ ends of each probe in the corresponding tiling sequence is shown under “5′ End” and “3′ End,” respectively. Other methods or software programs can also be used to generate hybridization probes for the tiling sequences.

[0090] The parent sequences, tiling sequences, and polynucleotide probes of the present invention can be used to detect or monitor the expression profiles of human protease or osteoarthritis genes. Methods suitable for this purpose include, but are not limited to, nucleic acid arrays (including bead arrays), Southern Blot, Northern Blot, PCR, and RT-PCR. The expression profiles of other genes that are expressed in human cartilage tissues can also be evaluated using the present invention.

[0091] C. Nucleic Acid Arrays for Detecting Expression Profiles of Human Protease or Osteoarthritis Genes

[0092] The polynucleotide probes of the present invention can be used to make nucleic acid arrays. A typical nucleic acid array includes at least one substrate support. The substrate support includes a plurality of discrete regions. The location of each discrete region is either known or determinable. The discrete regions can be organized in various forms or patterns. For instance, the discrete regions can be arranged as an array of regularly spaced areas on the surface of the substrate. Other patterns, such as linear, concentric or spiral patterns, can be used. In one embodiment, a nucleic acid array of the present invention is a bead array which includes a plurality of beads stably associated with the polynucleotide probes of the present invention.

[0093] Polynucleotide probes can be stably attached to their respective discrete regions through covalent and/or non-covalent interactions. By “stably attached” or “stably associated,” it means that during nucleic acid array hybridization the polynucleotide probe maintains its position relative to the discrete region to which the probe is attached. Any suitable method can be used to attach polynucleotide probes to a nucleic acid array substrate. In one embodiment, the attachment is achieved by first depositing the polynucleotide probes to their respective discrete regions and then exposing the surface to a solution of a cross-linking agent, such as glutaraldehyde, borohydride, or other bifunctional agents. In another embodiment, the polynucleotide probes are covalently bound to the substrate via an alkylamino-linker group or by coating the glass slides with polyethylenimine followed by activation with cyanuric chloride for coupling the polynucleotides. In yet another embodiment, the polynucleotide probes are covalently attached to a nucleic acid array through polymer linkers. The polymer linkers may improve the accessibility of the probes to their purported targets. Preferably, the polymer linkers are not involved in the interactions between the probes and their purported targets.

[0094] In addition, the polynucleotide probes can be stably attached to a nucleic acid array substrate through non-covalent interactions. In one embodiment, the polynucleotide probes are attached to the substrate through electrostatic interactions between positively charged surface groups and the negatively charged probes. In another embodiment, the substrate is a glass slide having a coating of a polycationic polymer on its surface, such as a cationic polypeptide. The probes are bound to these polycationic polymers. In yet another embodiment, the methods described in U.S. Pat. No. 6,440,723, which is incorporated herein by reference, are used to attach the probes to the nucleic acid array substrate(s).

[0095] Various materials can be used to make the substrate support. Suitable materials include, but are not limited to, glasses, silica, ceramics, nylons, quartz wafers, gels, metals, and papers. The substrates can be flexible or rigid. In one embodiment, they are in the form of a tape that is wound up on a reel or cassette. Two or more substrate supports can be used in the same nucleic acid array. Preferably, the substrate is non-reactive with reagents that are used in nucleic acid array hybridization.

[0096] The surfaces of the substrate support can be smooth and substantially planar. The surfaces of the substrate can also have a variety of configurations, such as raised or depressed regions, trenches, v-grooves, mesa structures, and other irregularities. The surfaces of the substrate can be coated with one or more modification layers. Suitable modification layers include inorganic and organic layers, such as metals, metal oxides, polymers, or small organic molecules. In one embodiment, the surface(s) of the substrate is chemically treated to include groups such as hydroxyl, carboxyl, amine, aldehyde, or sulfhydryl groups.

[0097] The discrete regions on the substrate can be of any size, shape and density. For instance, they can be squares, ellipsoids, rectangles, triangles, circles, other regular or irregular geometric shapes, or any portion or combination thereof. In one embodiment, each of the discrete regions has a surface area of less than 10⁻¹ cm², such as less than 10⁻², 10⁻³, 10⁻⁴, 10⁻⁵, 10⁻⁶, or 10⁻⁷ cm². In another embodiment, the spacing between each discrete region and its closest neighbor, measured from center-to-center, is in the range of from about 10 to about 400 μm. The density of the discrete regions may range, for example, between 50 and 50,000 regions/cm².

[0098] All of the methods known in the art can be used to make the nucleic acid arrays of the present invention. For instance, the probes can be synthesized in a step-by-step manner on the substrate, or can be attached to the substrate in pre-synthesized forms. Algorithms for reducing the number of synthesis cycles can be used. In one embodiment, a nucleic acid array of the present invention is synthesized in a combinational fashion by delivering monomers to the discrete regions through mechanically constrained flowpaths. In another embodiment, a nucleic acid array of the present invention is synthesized by spotting monomer reagents onto a substrate support using an ink jet printer (such as the DeskWriter C manufactured by Hewlett-Packard). In yet another embodiment, polynucleotide probes are immobilized on a nucleic acid array of the present invention by using photolithography techniques.

[0099] The nucleic acid arrays of the present invention can also be bead arrays which comprise a plurality of beads. Polynucleotide probes can be stably attached to each bead using any of the above-described methods.

[0100] In one embodiment, a substantial portion of all polynucleotide probes on a nucleic acid array of the present invention can hybridize under stringent or nucleic acid array hybridization conditions to human protease genes or human osteoarthritis genes. In one specific example, at least 25%, 35%, 45%, 50%, or more of all polynucleotide probes on the nucleic acid array can hybridize to human protease or osteoarthritis genes. The probes for these human genes can be concentrated on one substrate support. They can also be attached to two or more substrate supports, such as in the bead arrays.

[0101] Any number of polynucleotide probes can be included in a nucleic acid array of the present invention. For instance, the nucleic acid array can include at least 2, 5, 10, 20, 30, 40, 50, 100, 200, 300, 400, 500, 1,000 or more different probes, and each probe can hybridize under stringent or nucleic acid array hybridization conditions to a different respective gene selected from human protease genes and human osteoarthritis genes. In one embodiment, a nucleic acid array of the present invention includes a first set of probes which are capable of hybridizing under stringent or nucleic acid array hybridization conditions to different respective human osteoarthritis genes. The expression level of each of these osteoarthritis genes is substantially higher (such as at least 1.5-fold, 2-fold, 5-fold, or greater) in osteoarthritic human cartilage cells than in osteoarthritis-free human cartilage cells. In another embodiment, a nucleic acid array of the present invention includes a second set of probes which are capable of hybridizing under stringent or nucleic acid array hybridization conditions to different respective human osteoarthritis genes, and the expression levels of these osteoarthritis are substantially higher in osteoarthritis-free human cartilage cells than in osteoarthritic human cartilage cells. In yet another embodiment, a nucleic acid array of the present invention includes a third set of probes which are capable of hybridizing under stringent or nucleic acid array hybridization conditions to different respective human protease genes. Each of the above-described probe sets can include at least 2, 5, 10, 50, 100, 200, 300, 400, 500, or more different probes.

[0102] In yet another embodiment, a nucleic acid array of the present invention includes at least 2, 5, 10, 20, 30, 40, 50, 100, 200, 300, 400, 500, 1,000, 2,000, 3,000, 4,000, 5,000, or more different probes, and each probe can hybridize under stringent or nucleic acid array hybridization conditions to a different respective tiling sequence selected from Attachment C, or the complement thereof. In one example, the nucleic acid array includes at least 2, 5, 10, 20, 30, 40, 50, 100, or more probes for different respective tiling sequences derived from “GLAXO_OA,” “GI_MILD” or “GI_SEVERE”, but not “GLAXO_Normal.” See Attachment F. In another example, the nucleic acid array includes at least 2, 5, 10, 20, 30, 40, 50, 100, or more probes for different respective tiling sequences derived from “GLAXO_Normal,” but not “GLAXO_OA,” “GI_MILD” or “GI_SEVERE.” See Attachment F.

[0103] In still another embodiment, a nucleic acid array of the present invention includes at least 5,028 probes, and each probe can hybridize under stringent or nucleic acid array hybridization conditions to a different respective tiling sequence selected from Attachment C, or the complement thereof. In a further embodiment, a nucleic acid array of the present invention comprises at least one probe for each tiling sequence selected from Attachment C.

[0104] Multiple probes can be included in the nucleic acid arrays of the present invention for detecting the same tiling sequence. For instance, at least 2, 5, 10, 15, 20, 25, 30 or more different probes can be used for detecting the same tiling sequence selected from Attachment C. In one embodiment, a nucleic acid array of the present invention includes at least 30, 40, 50, or 60 different probes for each tiling sequence of interest. In another embodiment, a nucleic acid array of the present invention includes 25-39 probes for each tiling sequence of interest.

[0105] Each probe can be attached to a different respective discrete region on a nucleic acid array. Alternatively, two or more different probes can be attached to the same discrete region. The concentration of one probe with respect to the other probe or probes in the same region may vary according to the objectives and requirements of the particular experiment. In one embodiment, different probes in the same region are present in approximately equimolar ratio.

[0106] Preferably, probes for different tiling sequences are attached to different discrete regions on a nucleic acid array. In some applications, probes for different tiling sequences are attached to the same discrete region.

[0107] As discussed above, the length of each probe on a nucleic acid array of the present invention can be selected to achieve the desirable hybridization effects. For instance, each probe can include or consist of 15, 20, 25, 30, 35, 40, 45, 50, 60, 70, 80, 90, 100 or more consecutive nucleotides. In one embodiment, each probe consists of 25 consecutive nucleotides. In another embodiment, a nucleic acid array of the present invention includes each and every oligonucleotide probe selected from Attachment E.

[0108] The nucleic acid arrays of the present invention can also include control probes which can hybridize under stringent or nucleic acid array hybridization conditions to respective control sequences, or the complements thereof. Suitable control sequences for the present invention are illustrated in Attachment G. Like the parent sequences, each control sequence in Attachment G has a respective SEQ ID NO and a header that includes the qualifier (starting with “wyeHumanOAla”) and other information of the control sequence.

[0109] In a preferred embodiment, the nucleic acid arrays of the present invention comprise a perfect mismatch probe for each perfect match probe on the nucleic acid arrays. A perfect mismatch probe has the same sequence as the perfect match probe except for a homomeric substitution (A to T, T to A, G to C, and C to G) at or near the center of the perfect mismatch probe. For instance, if the perfect match probe has 2n nucleotide residues, the homomeric substitution in the perfect mismatch probe is either at the n or n+1 position, but not at both positions. If the perfect match probe has 2n+1 nucleotide residues, the homomeric substitution in the perfect mismatch probe is at the n+1 position. The center location of the mismatched residue is more likely to destabilize the duplex formed with the target sequence under the hybridization conditions. Each perfect match probe and its perfect mismatch probe can be stably attached to different discrete regions on a nucleic acid array of the present invention.

[0110] D. Applications

[0111] The nucleic acid arrays of the present invention can be used to detect or monitor the expression profiles of human protease or osteoarthritis genes. The nucleic acid arrays of the present invention can also be used to identify or evaluate compounds that can modulate the expression or function of human protease or osteoarthritis genes. In addition, the nucleic acid arrays of the present invention can be used to screen for drug candidates capable of modulating expression of human protease or osteoarthritis genes.

[0112] Protocols for conducing nucleic acid array analysis are well known in the art. Exemplary protocols include those provided by Affymetrix in connection with the use of its GeneChip arrays. Samples amenable to nucleic acid array hybridization can be prepared from human cartilage or other tissues. As used herein, “tissue” includes any cell preparations. Thus, a cartilage cell preparation is also considered a cartilage tissue in the present invention.

[0113] The sample for hybridization to a nucleic acid array can be either RNA (e.g., mRNA or cRNA) or DNA (e.g., cDNA). Various methods are available for isolating RNA from tissues. These methods include, but are not limited to, RNeasy kits (provided by QIAGEN), MasterPure kits (provided by Epicentre Technologies), and TRIZOL (provided by Gibco BRL). The RNA isolation protocols provided by Affymetrix can also be used.

[0114] The isolated RNA preferably is amplified and/or labeled before being hybridized to a nucleic acid array. Suitable RNA amplification methods include, but are not limited to, reverse transcriptase PCR, isothermal amplification, ligase chain reaction, and Qbeta replicase method. The amplification products can be either cDNA or cRNA. In one embodiment, the isolated mRNA is reverse transcribed to cDNA using a reverse transcriptase and a primer consisting of oligo d(T) and a sequence encoding the phage T7 promoter. The cDNA is single stranded. The second strand of the cDNA can be synthesized using a DNA polymerase, combined with an RNase to break up the DNA/RNA hybrid. After synthesis of the double stranded cDNA, T7 RNA polymerase is added to transcribe cRNA from the second strand of the doubled stranded cDNA. In one embodiment, the originally isolated RNA is hybridized to a nucleic acid array without amplification.

[0115] cDNA, cRNA, or other nucleic acid samples can be labeled with one or more labeling moieties to allow for detection of hybridized polynucleotide complexes. The labeling moieties can include compositions that are detectable by spectroscopic, photochemical, biochemical, bioelectronic, immunochemical, electrical, optical or chemical means. The labeling moieties include radioisotopes, chemiluminescent compounds, labeled binding proteins, heavy metal atoms, spectroscopic markers, such as fluorescent markers and dyes, magnetic labels, linked enzymes, mass spectrometry tags, spin labels, electron transfer donors and acceptors, and the like.

[0116] Nucleic acid samples can be fragmented before being labeled with detectable moieties. Exemplary methods for fragmentation include, for example, heat and/or ion-mediated hydrolysis.

[0117] Hybridization reactions can be performed in absolute or differential hybridization formats. In the absolute hybridization format, polynucleotides derived from one sample are hybridized to the probes in a nucleic acid array. Signals detected after the formation of hybridization complexes correlate to the polynucleotide levels in the sample. In the differential hybridization format, polynucleotides derived from two samples are labeled with different labeling moieties. A mixture of these differently labeled polynucleotides is added to a nucleic acid array. The nucleic acid array is then examined under conditions in which the emissions from the two different labels are individually detectable. In one embodiment, the fluorophores Cy3 and Cy5 (Amersham Pharmacia Biotech, Piscataway, N.J.) are used as the labeling moieties for the differential hybridization format.

[0118] Signals gathered from nucleic acid arrays can be analyzed using commercially available software, such as those provided by Affymetrix or Agilent Technologies. Controls, such as for scan sensitivity, probe labeling and cDNA or cRNA quantitation, are preferably included in the hybridization experiments. Hybridization signals can be scaled or normalized before being subject to further analysis. For instance, hybridization signals for each individual probe can be normalized to take into account variations in hybridization intensities when more than one array is used under similar test conditions. Hybridization signals can also be normalized using the intensities derived from internal normalization controls contained on each array. In addition, genes with relatively consistent expression levels across the samples can be used to normalize the expression levels of other genes. In one embodiment, probes for certain maintenance genes are included in a nucleic acid array of the present invention. These genes are chosen because they show stable levels of expression across a diverse set of tissues. Hybridization signals can be normalized and/or scaled based on the expression levels of these maintenance genes.

[0119] In a preferred embodiment, probes for certain exogenous transcripts are included in a nucleic acid array of the present invention. These transcripts can be chosen such that they show no similarity to eukaryotic transcripts. In one specific example, eleven exogenous transcripts at different known concentrations are spiked in to each sample. The array is first scaled to a trimmed-mean target value of 100. Based on the scaled hybridization signal of these eleven probe sets, a standard curve can be drawn such that all transcripts present in the sample can be converted from a signal value to a more meaningful concentration value. In another specific example, a standard curve correlating the signal value read off of the array and known frequency (molarity) can be generated when the array image is read and the probe set expression values are generated. From this standard curve, each signal value can then be converted to a parts per million or picomolarity value. The exogenous controls spiked into each sample can include, for instance, E. coli BioB-5, E. coli BioB-M, E. coli BioB-3, E. coli BioC-5, E. coli BioC-3, E. coli BioD-3, Bacteriophage P1 Cre-5, Bacteriophage P1 Cre-3, E. coli Dap-5, B. subtilis Dap-M, and B. subtilis Dap-3. These transcripts can be monitored by control probe sets as discussed below.

[0120] The nucleic acid arrays of the present invention can be used to identify compounds that are capable of modulating the expression of human protease or osteoarthritis genes. High-throughput screen methods can be employed. Typically, a compound of interest is first contacted with a cell preparation, such as a cartilage cell preparation. mRNA is extracted from the cell preparation and then hybridized to a nucleic acid array of the present invention. Hybridization signals are compared before and after the treatment with the compound to determine if the compound can modulate the expression of any human protease and/or osteoarthritis genes.

[0121] The compound thus identified can be any type of gene modulators. In one embodiment, the compound can bind to the promoter sequence of a human protease or osteoarthritis gene, thereby suppressing or enhancing the transcription of the gene. In another embodiment, the compound modulates the activity of a transcription factor, which in turn controls the expression of the human protease or osteoarthritis gene(s). In yet another embodiment, the compound regulates the degradation, splicing or other modifications of the RNA transcript of the human protease or osteoarthritis gene(s). In a further embodiment, the compound affects the expression or function of another protein which is involved in a cascade regulation of the human protease or osteoarthritis gene(s).

[0122] Any in vitro or in vivo assay system can be employed to identify modulators of human protease or osteoarthritis genes. Exemplary assay systems include, but are not limited to, in vitro transcription and translation systems, cell lines, primary cell cultures, and tissue cultures.

[0123] Any type of compounds can be evaluated using the present invention. For instance, the compound can be a small molecule, an antibody, a toxin, or a naturally-occurring factor or an analog thereof. Exemplary naturally-occurring factors include, but are not limited to, endocrine factors, paracrine factors, autocrine factors, intracellular factors, and factors interacting with cell receptors. In one embodiment, the compound of interest is an antisense RNA or a double stranded RNA having RNA interference effect (RNAi). Once a lead compound is identified, its derivatives or analogs can be further screened or tested for the optimal modulation effect.

[0124] The effect of a compound of interest on the expression of human protease or osteoarthritis genes can also be evaluated in humans or animal models. For instance, the compound of interest can be administered to a human or an animal model. A nucleic acid sample is prepared from the human or animal model, and then hybridized to a nucleic acid array of the present invention. Hybridization signals are analyzed to determine the effect of the compound on the expression of human protease or osteoarthritis genes. Preferably, the animal models are selected such that the false negative and false positive rates are relatively low. Exemplary animal models include primates.

[0125] The compound can be administered to the human or animal model via any route of administration. Exemplary routes of administration include parenteral, intravenous, intradermal, subcutaneous, oral, inhalation, transdermal, transmucosal, and rectal administration. The compound can be formulated in a pharmaceutical solution or suspension compatible with the intended route of administration. For instance, solutions or suspensions suitable for parenteral, intradermal, or subcutaneous application can include the following components: a sterile diluent such as water and saline solution, a synthetic solvent such as propylene glycol, antibacterial agents such as benzyl alcohol or methyl parabens, antioxidants such as ascorbic acid or sodium bisulfate, chelating agents such as ethylenediaminetetraacetic acid, buffers such as acetates, citrates or phosphates, and/or agents for the adjustment of tonicity such as sodium chloride or dextrose. pH can be adjusted with acids or bases, such as hydrochloric acid or sodium hydroxide. The parenteral preparation can be enclosed in ampoules, disposable syringes, or multiple dose vials made of glass or plastic.

[0126] In addition, the nucleic acid arrays of the present invention can be used to evaluate the effect of a compound on the function of human protease or osteoarthritis genes. For instance, a human protease or osteoarthritis gene may be involved in the regulation of the expression of another human protease or osteoarthritis gene. By monitoring the expression level of the latter gene, the modulation effect of a compound on the function of the former gene can be determined.

[0127] Furthermore, the nucleic acid arrays of the present invention can be used to evaluate the effect of a drug candidate on treating osteoarthritis. The drug candidate can be administered to a human affected with osteoarthritis via any suitable route. A tissue of interest, such as a cartilage tissue, is then isolated from the human. A nucleic acid sample is prepared from the tissue and hybridized to a nucleic acid array of the present invention. Hybridization signals are analyzed to determine the effect of the drug candidate on the gene expression profiles in the tissue of interest. Preferably, the drug candidate can return the expression levels of osteoarthritis genes to their normal levels.

[0128] The present invention also features protein arrays for expression profiling of human protease and/or osteoarthritis genes. Each protein array of the present invention includes probes which can specifically bind to protein products of respective human protease or osteoarthritis genes. Examples of human protease or osteoarthritis genes include those that encode the tiling sequences of Attachment C.

[0129] In one embodiment, the probes on a protein array of the present invention are antibodies. Many of these antibodies can bind to the corresponding target proteins with an affinity constant of at least 10⁴ M⁻¹, 10⁵ M⁻¹, 10⁶ M⁻¹, 10⁷ M⁻¹, or stronger. Suitable antibodies for the present invention include, but are not limited to, polyclonal antibodies, monoclonal antibodies, chimeric antibodies, single chain antibodies, synthetic antibodies, Fab fragments, or fragments produced by a Fab expression library. Other peptides, scaffolds, antibody mimics, high-affinity binders, or protein-binding ligands can also be used to construct the protein arrays of the present invention.

[0130] Numerous methods are available for immobilizing antibodies or other probes on a protein array of the present invention. Examples of these methods include, but are not limited to, diffusion (e.g., agarose or polyacrylamide gel), surface absorption (e.g., nitrocellulose or PVDF), covalent binding (e.g., silanes or aldehyde), or non-covalent affinity binding (e.g., biotin-streptavidin). Examples of protein array fabrication methods include, but are not limited to, ink-jetting, robotic contact printing, photolithography, or piezoelectric spotting. The method described in MacBeath and Schreiber, SCIENCE, 289: 1760-1763 (2000), which is incorporated herein by reference, can also be used. Suitable substrate supports for a protein array of the present invention include, but are not limited to, glass, membranes, mass spectrometer plates, microtiter wells, silica, or beads.

[0131] The protein-coding sequence of a human protease or osteoarthritis gene can be determined by a variety of methods. For instance, the protein-coding sequences can be extracted from the corresponding tiling or parent sequences by using an open reading frame (ORF) prediction program. Examples of ORF prediction programs include, but are not limited to, GeneMark (provided by the European Bioinformatics Institute), Glimmer (provided by TIGR), and ORF Finder (provided by NCBI). Many protein sequences can also be obtained from Entrez or other sequence databases by BLAST searching the corresponding tiling or parent sequences against these databases. The protein-coding sequences thus obtained can be used to prepare antibodies or other protein-binding agents.

[0132] In addition, the present invention contemplates collections of polynucleotides. In one embodiment, a polynucleotide collection of the present invention comprises at least one set of probes capable of hybridizing under stringent or nucleic acid array hybridization conditions to a tiling sequence selected from Attachment C, or the complement thereof. In another embodiment, a polynucleotide collection of the present invention comprises at least 2, 5, 10, 50, 100, 500, 1,000 or more sets of probes, and each probe set is capable of hybridizing under stringent or nucleic acid array hybridization conditions to a different respective tiling sequence selected from Attachment C, or the complement thereof. In yet another embodiment, a polynucleotide collection of the present invention includes at least 1, 2, 5, 10, 50, 100, 500, 1,000, 5,000, or more tiling sequences selected from Attachment C, or the complements thereof. In still yet another embodiment, a polynucleotide collection of the present invention contains at least 1, 2, 5, 10, 50, 100, 500, 1,000, 5,000, or more sequence selected from SEQ ID NOs: 1-5,235, or the complements thereof.

[0133] It should be understood that the above-described embodiments and the following examples are given by way of illustration, not limitation. Various changes and modifications within the scope of the present invention will become apparent to those skilled in the art from the present description.

### E. EXAMPLES

### Example 1

### Nucleic Acid Array

[0134] The tiling sequences depicted in Attachment C were submitted to Affymetrix for custom array design. Affymetrix selected probes for each tiling sequence using its probe-picking algorithm. Non-ambiguous probes with 25 bases in length were selected. Thirty-nine probe-pairs were requested for each tiling sequence with a minimum number of acceptable probe-pairs set to twenty-five. The final array was directed to 5,028 human transcripts and contained 198,286 perfect match probes and 198,286 mismatch probes, including 102 exogenous and endogenous control probe sets. These probes are shown in Attachment H.

[0135] The probes in Attachment H are perfect match probes and correspond to SEQ ID NOs: 5,338-203,623, respectively. Each probe in Attachment H has a qualifier (“Header”) which is identical to the qualifier of the corresponding tiling sequence from which the probe is derived. The strandedness of each probe (“Target Strandedness”) is also demonstrated.

[0136] FIGURE 1 shows an Eisen cluster of transcriptional profiling data generated using the above-described custom array. Data was scale frequency normalized. Only those qualifiers with at least 1 present call in any sample were used for the cluster analysis. Data were log transformed, and hierarchical clustering was done using the average linkage clustering function on the arrays. Levels of all expressed genes strongly segregate samples affected by osteoarthritis (OA) from unaffected cartilage samples.

### Example 2

### Nucleic Acid Array Hybridization

[0137] 10 μg of biotin-labeled sample DNA/RNA is diluted in 1×MES buffer with 100 μg/ml herring sperm DNA and 50 μg/ml acetylated BSA. To normalize arrays to each other and to estimate the sensitivity of the nucleic acid arrays, in vitro synthesized transcripts of control genes are included in each hybridization reaction. The abundance of these transcripts can range from 1:300,000 (3 ppm) to 1:1000 (1000 ppm) stated in terms of the number of control transcripts per total transcripts. As determined by the signal response from these control transcripts, the sensitivity of detection of the arrays can range, for example, between about 1:300,000 and 1:100,000 copies/million. Labeled DNA/RNA are denatured at 99° C. for 5 minutes and then 45° C. for 5 minutes and hybridized to the nucleic array of Example 1. The array is hybridized for 16 hours at 45° C. The hybridization buffer includes 100 mM MES, 1 M [Na⁺], 20 mM EDTA, and 0.01% Tween 20. After hybridization, the cartridge(s) is washed extensively with wash buffer (6×SSPET), for instance, three 10-minute washes at room temperature. The washed cartridge(s) is then stained with phycoerythrin coupled to streptavidin.

[0138] 12×MES stock contains 1.22 M MES and 0.89 M [Na⁺]. For 1000 ml, the stock can be prepared by mixing 70.4 g MES free acid monohydrate, 193.3 g MES sodium salt and 800 ml of molecular biology grade water, and adjusting volume to 1000 ml. The pH should be between 6.5 and 6.7. 2× hybridization buffer can be prepared by mixing 8.3 ml of 12×MES stock, 17.7 ml of 5 M NaCl, 4.0 ml of 0.5 M EDTA, 0.1 ml of 10% Tween 20 and 19.9 ml of water. 6×SSPET contains 0.9 M NaCl, 60 mM NaH₂PO₄, 6 mM EDTA, pH 7.4, 05% Triton X-100. In some cases, the wash buffer can be replaced with a more wash buffer. 1000 ml stringent wash buffer can be prepared by mixing 83.3 ml of stock, 5.2 ml of 5 M NaCl, 1.0 ml of 10% Tween 20 and 910.5 ml of water.

[0139] The foregoing description of the present invention provides illustration and ion, but is not intended to be exhaustive or to limit the invention to the precise one d. Modifications and variations are possible consistent with the above teachings or acquired from practice of the invention. Thus, it is noted that the scope of the n is defined by the claims and their equivalents.

1. A nucleic acid array comprising one or more substrate supports which are stably associated with polynucleotide probes, wherein a substantial portion of all polynucleotide probes that are stably associated with said one or more substrate supports is capable of hybridizing under stringent or nucleic acid array hybridization conditions to human genes, and each said human gene is selected from the group consisting of protease genes and genes that are differentially expressed in osteoarthritic human cartilage cells as compared to osteoarthritis-free human cartilage cells.

2. The nucleic acid array according to claim 1, wherein the substantial portion of all polynucleotide probes comprises one or more first probe sets, and each said first probe set is capable of hybridizing under stringent or nucleic acid array hybridization conditions to a gene whose average expression level in osteoarthritic human cartilage cells is higher than that in osteoarthritis-free human cartilage cells.

3. The nucleic acid array according to claim 2, wherein the substantial portion of all polynucleotide probes further comprises one or more second probe sets, and each said second probe set is capable of hybridizing under stringent or nucleic acid array hybridization conditions to a gene whose average expression level in osteoarthritis-free human cartilage cells is higher than that in osteoarthritic human cartilage cells.

4. The nucleic acid array according to claim 3, wherein the substantial portion of all polynucleotide probes further comprises one or more third probe sets, and each said third probe set is capable of hybridizing under stringent or nucleic acid array hybridization conditions to a human protease gene.

5. The nucleic acid array of claim 4, wherein the substantial portion of all polynucleotide probes comprises at least 10 first probe sets, each of which is capable of hybridizing under stringent or nucleic acid array hybridization conditions to a different respective gene whose expression level is substantially higher in osteoarthritic human cartilage cells than in osteoarthritis-free human cartilage cells, wherein the substantial portion of all polynucleotide probes further comprises at least 10 second probe sets, each of which is capable of hybridizing under stringent or nucleic acid array hybridization conditions to a different respective gene whose expression level is substantially higher in osteoarthritis-free human cartilage cells than in osteoarthritic human cartilage cells, and wherein the substantial portion of all polynucleotide probes further comprises at least 10 third probe sets, each of which is capable of hybridizing under stringent or nucleic acid array hybridization conditions to a different respective human protease gene.

6. The nucleic acid array of claim 4, wherein the substantial portion of all polynucleotide probes comprises at least 100 first probe sets, each of which is capable of hybridizing under stringent or nucleic acid array hybridization conditions to a different respective gene whose expression level is substantially higher in osteoarthritic human cartilage cells than in osteoarthritis-free human cartilage cells, wherein the substantial portion of all polynucleotide probes further comprises at least 100 second probe sets, each of which is capable of hybridizing under stringent or nucleic acid array hybridization conditions to a different respective gene whose expression level is substantially higher in osteoarthritis-free human cartilage cells than in osteoarthritic human cartilage cells, and wherein the substantial portion of all polynucleotide probes further comprises at least 100 third probe sets, each of which is capable of hybridizing under stringent or nucleic acid array hybridization conditions to a different respective human protease gene.

7. The nucleic acid array of claim 4, wherein the substantial portion of all polynucleotide probes includes at least 25% of all polynucleotide probes that are stably associated with said one or more substrate supports.

8. The nucleic acid array of claim 4, wherein the substantial portion of all polynucleotide probes includes at least 45% of all polynucleotide probes that are stably associated with said one or more substrate supports.

9. The nucleic acid array according to claim 1, wherein the substantial portion of all polynucleotide probes comprises at least one probe set, and each said probe set is capable of hybridizing under stringent or nucleic acid array hybridization conditions to a tiling sequence selected from Attachment C, or the complement thereof.

10. The nucleic acid array according to claim 1, wherein the substantial portion of all polynucleotide probes comprises at least 10 probe sets, each of which is capable of hybridizing under stringent or nucleic acid array hybridization conditions to a different respective tiling sequence selected from Attachment C, or the complement thereof.

11. The nucleic acid array according to claim 1, wherein the substantial portion of all polynucleotide probes comprises at least 1,000 probe sets, each of which is capable of hybridizing under stringent or nucleic acid array hybridization conditions to a different respective tiling sequence selected from Attachment C, or the complement thereof.

12. The nucleic acid array according to claim 1, wherein the substantial portion of all polynucleotide probes comprises each and every polynucleotide probe selected from Attachment E.

13. The nucleic acid array according to claim 12, comprising a perfect mismatch probe for each polynucleotide probe selected from Attachment E.

14. A method of screening for candidate drugs capable of modulating expression of human protease or osteoarthritis genes comprising the steps of:
(a) preparing a first nucleic acid sample from a human affected by osteoarthritis;
(b) hybridizing the first nucleic acid sample to a first nucleic acid array as in any one of claims 1-4;
(c) detecting a first set of hybridization signals;
(d) treating the human with a candidate drug;
(e) repeating steps (a)-(c) with a second nucleic acid sample from the treated human and a second nucleic acid array identical to the first array to obtain a second set of hybridization signals; and
(f) comparing the first and second sets of hybridization signals,
wherein any change in expression level of at least one protease gene, and/or one gene differentially expressed in osteoarthritic human cartilage cells as compared to osteoarthritis-free human cartilage cells, identifies the candidate drug as one that modulates expression of human protease or osteoarthritis genes.

15. The method according to claim 14, wherein the first and second nucleic acid samples are prepared from cartilage tissues of the human.

16. A method of screening for candidate drugs capable of modulating expression of human protease or osteoarthritis genes comprising the steps of:
(a) preparing a first nucleic acid sample from a cell or tissue affected by osteoarthritis;
(b) hybridizing the first nucleic acid sample to a first nucleic acid array as in any one of claims 1-4;
(c) detecting a first set of hybridization signals;
(d) treating the cell or tissue with a candidate drug;
(e) repeating steps (a)-(c) with a second nucleic acid sample from the treated cell or tissue and a second nucleic acid array identical to the first array to obtain a second set of hybridization signals; and
(f) comparing the first and second sets of hybridization signals,
wherein any change in expression level of at least one protease gene, and/or one gene differentially expressed in osteoarthritic human cartilage cells as compared to osteoarthritis-free human cartilage cells, identifies the candidate drug as one that modulates expression of human protease or osteoarthritis genes.

17. The method according to claim 16, wherein the cell or tissue is prepared from a human cartilage tissue.

18. A nucleic acid array comprising a plurality of probe sets, wherein each said probe set is capable of hybridizing under stringent or nucleic acid array hybridization conditions to a different respective tiling sequence selected from Attachment C, or the complement thereof.

19. The nucleic acid array according to claim 18, wherein said plurality of probe sets comprises at least 100 probe sets.

20. The nucleic acid array according to claim 18, wherein said plurality of probe sets comprises at least 5,028 probe sets.

21. The nucleic acid array according to claim 18, wherein for each tiling sequence selected from Attachment C, said plurality of probe sets comprises at least one probe set capable of hybridizing under stringent or nucleic acid array hybridization conditions to that tiling sequence, or the complement thereof.

22. The nucleic acid array according to claim 18, wherein said plurality of probe sets comprises a substantial portion of all polynucleotide probes that are stably associated with the nucleic acid array.

23. A polynucleotide collection comprising a probe set capable of hybridizing under stringent or nucleic acid array hybridization conditions to a tiling sequence selected from Attachment C, or the complement thereof.

24. A polynucleotide collection comprising at least one tiling sequence selected from Attachment C, or the complement thereof.

25. A polynucleotide collection comprising at least one sequence selected from SEQ ID NOs: 1-5,235, or the complement thereof.

26. A probe array comprising one or more substrate supports, wherein a substantial portion of all probes that are stably associated with said one or more substrate supports is capable of specifically binding to protein products of human protease or osteoarthritis genes.

The application's sequence listing, which the Patent Office published only in electronic form, follows.

SEQUENCE LISTING (319805 sequences)

SEQ ID NO: 1 - DNA, 737 bp, Homo sapiens
ttttttttttttttttttttatagaaaaaatatacactttattttcaactagaaaggtgcaaacatgtaacttttggtcacactctcaacaaataaactgtccgaaaaacagtcatatcaaagtagaaacaaatgcttccaggtgaaaaaactgatcagctatatagagtcactcagtttttaataaaggccatttgttcattaaaagtgaggctaccacatttcctacctagaaatcagcctgccaaggacactgatgcctcccctttgcaaacaatctgttttgacggactgtcattctatctgagcagaatttccatataagtatccatttcatgctttgaacgatcagacaagctttacattctacctatggtgttcagaaattgaggctaacattgaaatatcaaagcattaaaaacaaaaataaaaaggcacaaacaactttaaattaacttagawwactgtacatatatatatatatacacacacacacacacacacaatatttacmatataaattttaaaaaatctggcttgttacaggcaaattcacttgccacaagctgtccagtctaatcgacaggattccgattcctgaacagtgtcattcgaatcagaatgtcacgagctgagtctgctgttctagacttaaggaacaacttgtactcagtctcttgatggctggagaawtgcacattcctarctgtcactggggcctacagggcaggtcagga

SEQ ID NO: 2 - DNA, 1066 bp, Homo sapiens
tggacgtatgttcgccatagtaaccgcccatagggactttccattgacgtcaatgggtggagtatttacggtaaatctgcccacttggcagtacatcaagtgtatcatattgccaagtacgccccctattgacgtcaatgacggtaaatggcccgcctggcattatgcccagtacatgaccttatgggactttcctacttggcagtacatctacgtattagtcatcgctattaccatggtgatgcgcttttgtcagctacatcctactgtgcgtgtatatacgcgtgtgtacatctaccgcgggagatttcccaattstyccacccccattgasgtcaatgggagtttgttttggcacccaaaatccaacgggactktccaaaatgtcgtaacaactccgccccattgacgcaaatgggcggtaggcgtgtacggtgggaggtctatataagcagagctcgtttagtgaaccgtcagatcgcctggagacgccatccacgctgttttgacctccatagaagacaccgggaccgatccagcctccggactctagcctaggccgcgggacggataacaatttcacacaggaaacagctatgaccattaggcctatttaggtgacactatagaacaagtttgtacaaaaaagcaggctggtaccggtccggaattcccgggatgtcgctcgggctgagattgcatcattgcactccagcctgggcaacagagcgagactccatctcaaaaaaaaaaaaaaaaaaaaaaaaagcccaggcgccgcggctcacacttgtaatcctagcacttgtgggagctgaggcaggtggattacctgatgatgggagttcaagaccagcctggccaacatggtgaaacctcgtctctaccagatatacaaaaaattagccatgtgcagtggtgcacacctgtaatcctagctactctggaagctgaggcaggagaatcacttgaacccaggaggcggaggctgcgatgagccgagatcacgccactgcactctagcctgggctacagagtgagacttcatctcaaaaaaaaaaaaaaa

SEQ ID NO: 3 - DNA, 921 bp, Homo sapiens
aaatgccagtacgccccctatgacgtcatgacggtaaatggcccgcctggcataatgcccagtacatgacttatggactttctacttggcagtacatctacgtattagtcatcgctattaccatggtgatgcggttttggcagtacatcaatgggcgtggatagcggtttgactcacggggatttccaagtctccaccccattgacgtcaatgggagtttgttttggcaccaaaatcaacgggactttccaaaatgtcgtaacaactccgccccattgacgccaaatgggcggtaggcgtgtacggtgggaggtctatataagcagagctcgtttagtgaaccgtcagatcgcctggagacgccatccacgctgttttgacctccatagaagacaccgggaccgatccagcctccggactctagcctaggccgcgggacggataacaatttcacacaggaaacagctatgaccattaggcctatttaggtgacactatagaacaagtttgtacaaaaaagcaggctggtaccggtccggaattcccgggatgtsttstccwacctysrtwgaagytktykccwwmtakctagctakgaatyaaraacatytwwggccrggtrcrgtggctcaygcctrtaatcccrgcaytttrgraggcygaggcrggmrgatcacttgagstcaggagttygagaccagyctgrscaacatrgyraraccyygtctytrytaaaaawamaaaaawwagctgggcatggtggcatgcacctgtaatcccagctacacaggaggctgaggcaggagaatcgcttgaacccgggagatggaggttgtagtcagctgagatcgcgccattgcacactccagcctgggcaacaagagcgaaacgccatctcaaaacaaaaaaaaaaaaaaaaaa

SEQ ID NO: 4 - DNA, 796 bp, Homo sapiens
caggactatggacttctactcgcagtacattacgtattagtcatcgctattaccatggtgatcgtttttgccagtacatcaatgggcgtggataacggtgtgactcacggggatttccragtctccaccccatgacgtcaatggragtttgttttggcaccaaaatcaacgggactttccaaaattgtcgtaacwactccgccccattgacgcaaatgggcggtaggcgtgtacggtgggaggtcctatataagcagagctcgtttagtgaaccgtcagatcgcctggagacgccatccacgctgttttgacctccatagaagacaccgggaccgatccagcctccggactctagcctaggccgcgggacggataacaatttcacacaggaaacagctatgaccattaggcctatttaggtgacactatagaacaagtttgtacaaaaaagcaggctggtaccggtccggaattcccgggatcgccaggaggagcgcgcgggcacagggtgccgctgaccgaggcgtgcaaagactccagaattggaggcatgatgaagactctgctgctgtttgtggggctgctgctgacctgggagagtgggcaggtcctgggggaccagacggtctcagacaatgagctccaggaaatgtccaatcagggaagtaagtacgtcaataaggaaattcaaaatgctgtcaacggggtgaaacagataaagactctcatagaaaaaamaaamraaragcgcaagacactgctcagcaacctagaagaagccaaaaaaaaaaaaaaa

SEQ ID NO: 5 - DNA, 794 bp, Homo sapiens
atttccagtctccaccccattgacgtctatgggtgtttgttttggcaccgtcgatctacgggatctttccattatgtcgttacttmtccgccccgwtgacgcwtatgggcggtaggcgtktacggtgggaggtctatataagcagagctcgtttagtgwaccgtcagatcgcctggagacgccatccacgctgttttgacctccatagaagacaccgggaccgatccagcctccggactctagcctaggccgcgggacggataacaatttcacacaggaaacagctatgaccattaggcctatttaggtgacactatagaacaagtttgtacaaaaaagcaggctggtaccggtccggaattcccgggatgccgctkyytywktywtkysgaakcayraswwytcwgykkamwtsmcctgtggaggctgtgctgaagctgtctctcgggtcctcaataagcttggaggagttaagtatgacattgacctgcccaacaagaaggtctgcattgaatctgagcacagcatggacactctgcttgcaaccctgaagaaaacaggaaagactgtttcctaccttggccttgagtagcaggggcctggtccccacagcccacaggatggaccaaagggggcaggatgctgatcctcccgctggcttccagacagacctgggacttggcagtcatgccgggtgatggtgttcctgcggagaccctcagttgtcctattccttcctagcttccctgcaataaaatcaagctgcttttgttggaaaaaaaaaaaaaaaaaaa

SEQ ID NO: 6 - DNA, 784 bp, Homo sapiens
agccawamcgaagttaytarkctatactamccycrggtkgtcawttcgtgccagccaccgcggtcacacgattaacccmaktcaatagwagccggcgtaargagtgttttagatcaccccctccccratwaagctaaractcacctgagtkgtaaaaaactccagttgacacraratagactacgaaagtggctttaacatatctgaacacacaatagctaagacccaaactgggattagataccccactatgcttagccctaaacctcaacagttaaatcaacaaaactgctcgccagaacactacgagccacagcttaaaactcaaaggacctgkcggkgcttcakatccctctagaggagcctgttctgtaatcgatwaaccccgatcaacctcaccacctcttgctcarcctatataccgccatcttcagcaaaccctgatgaaggctacaaagtaagcgcaagtacccacgtawagacgttagstcaaggtgtagcccatgaggtggcaagaaatgggctacattttctaccccagaaaactamrawarmmmwwawraaacttaagggtcgaaggtggatttagcagtaaactgagagtagagtgcttagttgaacagggccctgaagcgcgtacacaccgcccgtcaccctcctcaagtatacttcaaaggacawwwaamwaaaammmctacgcatttatatagaggagacaagtcgtaacatrrdwaavwgdamwrraaarwrmamwwrgamraasaaaaaraaaaaaaaaaaaaaa

SEQ ID NO: 7 - DNA, 754 bp, Homo sapiens
  misc_feature (139)..(142): n is a, c, g, or t
taaccgggttgactccggggattccagttcccccctggactcatgggatttcgtttggcaccagtcacgggactttcccaaatgtcgtagcaactcccgccccattgacgctaatggctgtaaggcgtttacggtggannnnggtctatataagcagagctcgtttagtggaaccgtcagatcgcctggagacgccatccacgcttgttttgacctccatagagaccccgggaccgatccaagcctccggactctagcctaggccgcgggacggataacmatttcacacaggaaacagctatgaccmttaggcctatttaggtgacatctatagwacaagtttgtaccaaaaaagcaggctggtaccggtccggaattcccgggatggccgcccttttttttttttttttttwtywytttwwtttytttttttttttagggcgcagactgctgcgaacagagtggtgatagcgcctaagcatagtgttagagtttggattagtgggctattttctgctagggggtggaagcggatgagtaagaagattcctgctacaactatagtgcttgagtggagtagggctgagactggggtggggccttctatggctgaggggagtcaggggtggagacctaattgggctgatttgcctgctgctgctaggaggaggcctagtagtggggtgaggcttggattagcgtttagaagggcgatcgcgagcggcaaaaaaaaaaagggcggcaaaaaaaaaaa

SEQ ID NO: 8 - DNA, 914 bp, Homo sapiens
ggcccccgcccatgacgtcaataatgaacgtatgttccccatagtgacgccaataggactttccgttgacgtcaatgtggtggagtatttacggtaaactgcccacttggcagtacatcaagtgtatcatatgccaagtacrccccctatgacgtcaatgacsgtaaatggcccgcctggcattatgcccagtacatgaccttatgggactttcctacttggcagtacatctacgtattagtcatcgctattaccatggtgawkcggttttggcagtacatcaatgggcgtggatagcggtttgactcacggggatttccaagtctccaccccattgacgtcaatgggagtttgttttggcaccaaaatcaacgggactttccaaatgtcgtaacaactccgccccattgacgcaaatgggcggtaggcgtgtacggtgggaggtctatataagcagagctcgtttagtgaaccgtcagatcgcctggagacgccatccacgctgttttgacctccatagaagacaccgggaccgatccagcctccggactctagcctaggccgcgggacggataacaatttcacacaggaaacagctatgaccattaggcctatttaggtgacactatagaacaagtttgtacaaaaaagcaggctggtaccggtccggaattcccgggatsrysrmtcgckrygwtgtckgaccawrmaraaawwmmaactcatggtttcatttagcagactttactaagaaaggactgttgttatctttaaagagctaagaaaaatatatatgtatatatacatattttttccacatgcaggaaaatttcatagatcatgtattttctactcaataaaatttcagtgaacacacccctataaccatcattctgattaataaaaaaaaaaaa

SEQ ID NO: 9 - DNA, 851 bp, Homo sapiens
  misc_feature (824)..(824): n is a, c, g, or t
gtaactgcccaacttggcagtaacatcaaagtgtatcatatgccaagtacgcccccttattgacgtcaatgacggtaaatggcccgcctggcattatgcccagtacatgaccttatgggactttcctacttggccagtacatctacgtattagtcatcgctattaccatggtgatgcggttttggcagtacatcaatgggcgtggatagcggtttgactcacggggatttccaagtctccaccccattgacgtcaatgggagtttgttttggcaccaaaatcaacgggactttccaaaatgtcgtaacaactccgccccattgacgcaaatgggcggtaggcgtgtacggtgggaggtctatataagcagagctcgtttagtgaaccgtcagatcgcctggagacgccatccacgctgttttgacctccatagaagacaccgggaccgatccagcctccggactctagcctaggccgcgggacggataacaatttcacacaggaaacagctatgaccattaggcctatttaggtgacactatagaacaagtttgtacaaaaaagcaggctggtaccggtccggaattcccgggatcamkykcywtgttkacwtsmtgctksraaskksrggtgmscawcwsyawaccccmctscattyagggccagcagtggtctttgaagcacctgtggtgccctgacccaaaaagccatgattgtcctggtgcagtggctcacgcctgtaatcccagcactttgggaggttgaggcaggcagattgctttgagcttaggagtttgaggccaaccttgacaacatggtgaaanccctgtctctgcaaaaaaaaaaaaaaa

SEQ ID NO: 10 - DNA, 749 bp, Homo sapiens
ttttttttttttttttttttttttttttttttttwkttgctgttcataagtttattatctatatcttgaaaaaatcatagaaaattgctgggtttagctctcagcagcccgctcctgagctctgaggaagcttgccttcttttgagctacccgatccttcttctgagcaagggacattttgggacggttccacctcttctttttaacttctttcttgggcttcttttcatagactggattctctcgtatagcagcatgagctttcttatacatctcctccatcatgtctggagttacgctgttctttatgtattgagagaactgtttcttgtaagcatcttcatcttcttccattaagtagcgcatgtaatctgcaacattctggcccatgatgtgcttccgatgtacttctgcattaaattccttgctttcagaatcataaccagggaatccgttggtactgtgagggatagacaagcctccatccacagctcccctttcagggcaccaaaaactttattgcccagtggtagttctgggcaaggcctgcatccaaatagcaggtgaaggcaccctggytgaccatcaatgcttttccacattgtattcatccaccagtcacctccacttggcttcatagatcttgtccatgccaaaacstatgagaagcctgcgggccagcagcaggccagtacaatatgctgcagcataattgtcagccaacttcacaccatatttgggcagtcgtg

SEQ ID NO: 11 - DNA, 731 bp, Homo sapiens
tttttttttttttttktwtwwwwwykkywtwttytttattttgcatactttaatttcagaacaaaatgaagaaaataaaataaaccacaatacacaacatccaatcctgctgtcaagagtagagagggaatggggcttgacacccttagtttactgccttcaacacaaggacaggagagggaaaaaaacactagacaccagcagggggagccaggtgggacaggggcactcgaggctgcagtgggagcccatggggacactatacaagggcacaagttttccaactatgaactcctaacctaatcgacttcttccatgcgagacgcatcctcatcgccctcgagaggggggatctcatcaggaactgcagcattgggttcctctgctgccacttcatcttcatcaatacctagacctagcttgatcatgcgatagatgcggttggagtgggtctggggatcctcaagggaaaagccagaagatagcagggcggtttcaaacagcagcaccaccaggtccttaactgccttatcattcttgtcggcctcagccttctgccgcagcagtctccacaatggggtggtcagggattgatctccaggtgcttttggccatcatatagcccatgggtggagttggtcccgaaaatgcctgggctttcatgatcccgctccatatggctgtccagccgtagtgctggtcacaattgcagcaggtgaaacacacgtgta

SEQ ID NO: 12 - DNA, 732 bp, Homo sapiens
tgcggacttagcctagccgcgggacggaaacatttcacacaggaaacagctatgagccatagcctatttaggtgacactatagaacaagttgtacaaaaagcaggctggtaccggtccggaattcccgggatccgcccttttttttttgttttttcccacccgcgagcgccgccctttgttttataacctggcaaaaatcttgttaatgtcattgctaaaaaataaataaaagctagatactggaaacctaactgcaatgtggatgttttacccacatgacttattatgcataaagccaaatttccagtttaagtaattgcctacaataaaaagaaattttgcctgccattttcagaatcatcttttgaagctttctgttgatgttaactgagctactagagatattcttwtyycactaaatgtaaaatttggagtaaatatatatgtcmatatcttagtaaagcccttttcctctgtctttaatttccccacggaaacaaaactaacaaacggagtactgagtcttctgtaacttcacttgacgcacgttagctccactttgagataaagtccaaatgccaacacactagctctgtattaatccccatcattactggtaaagcctcatttgaatgtgtgaattcaatacaggctatgtaaaatttttactaatgtcattattttgaaaaaataaatttaaaaatacattcaaaawwaaaaaaaaaaaaaaa

SEQ ID NO: 13 - DNA, 732 bp, Homo sapiens
ttttttttttttytkttttttccccatctttgtggttttatctacttttggtctttgatgatggtgatgtacagatgkgttttyggtgyggatgtcctttctgtttgttagttttccttctaacagacaggaccctcagctgcaggtctgttggartaccctgccgtgtgaggtgtcagtstgcccctgmtgkggggtgyctcccagttaggctgctcgggggtcagggggtcagggcacccacttgaggaggcagtctgccygttctcagatctccagctgygtgctgggagaaccactgctstcttcaaagctgtcagacagggacayttaagtctgcagaggttactgctgtcttttystttgtctgtgccctgcccccagaggtggagcctacagaggcaggcaggcctccttgagctgtggtgggctccrcccagttcgagcttcccrgctgctttgtttacctaakcaagccygkrcaatgwcgggcgcccctcccccagcctcgctgccgccttgcagtttgatctcagactgctgtrctagmaatcagcgagactccgtgggcgtaggaccctccragccaggtgyrggatataatcycatggtkcgccrytttttaagccsgtckgagamagcgcartattcgggtggggagtgacycgatttmcaggtgctgtcytgtcaccctttcttgaatcggaaagggaactcctgaacccttgcgct

SEQ ID NO: 14 - DNA, 757 bp, Homo sapiens
ttttttttttttttttttttttaaacgacaggktctcactctgtcacccaggctggtgtgactacagctcactgtagcctcgacttcccgagctcaggtgatcctcctgcctcagcctcccaagtagatgggactacaggtacatgccaccatgcctggctaattttttaaattttttgtacagatgggggtctcagtttgatgcccacgctggtcttaaactcttgggctcaagcaatctgccctccttggcctcccaaagtgctggaattacaggcgtgaatcactgaacccagccacttcattttttaagaacaaataaatctccaattcattccaccttccttgcaacagtttcttaaaacttgtctataacacatccctaagaacactcaaacatgcctgaaataactaaaaggaaaaaaaaggccatgttttataacctcaaaaaggaaactgttcaataaaggggaaacagttaagctttttaatatgaacaatttatgtaaagacaaagatgcagacatttttacacagattatttcttttcttsggttactttcacattaagtagttataatcaaatgaagccactttkgagttgcaaaagagacgtcaggtgatgtgtttgtaaactcaggcccaaattygkggctgctgmamtgggttaagactctgctctgctacagatttatccttaaccagggaaattccaccctcaaaaggcccagaaagatcactgacagaatacaaagct

SEQ ID NO: 15 - DNA, 719 bp, Homo sapiens
tacctgtgatccggttttgccagtacatcaatggcgtggataccggtttgactcacgggatttccaagtctccaccccatgacgtcaatgggagttcgttttggcaccaaaatcacgggactttccaaaatgtcgtaacaactccgccccattgacgcaaatgggcggtaggcgtgtacggtgggaggtctatataagcagagctcgtttagtgaaccgtcagatcgcctggagacgccatccacgctgttttgacctccmtwkwwswcmccgggaccgawmmarmctccggactctagcctagsmcgcgggacggataacaatttcacacaggaaacagctatgaccattaggcctatttaggtgacactatagaacaagtttgtacaaaaaagcaggctggtaccgggtccgggaattcccgggatctcctactgtgaagaacagaccctgggtcccacactgaaatcccctctagtcacccattcccaccccccagggagctgcctcccaggcagggggtgcagaaaatgattgatgggctggggaaccctggagagcctcgactccggaagtctcaaggtgcctcctcctctccttagctggcccgttggttttctgagcagggggctgaactgtgaacaagtcagacaaataaagcaagggtctgcaccaaaaaaaaaaaaaaaaaaaaaaaaaaaaaaaaaaaaaaaaaaaaa

SEQ ID NO: 16 - DNA, 772 bp, Homo sapiens
ttttttttttttttttttttttttttttttttttcactcaacaaacatttattgagtacctgatkggcgccaagcaatctggaattacaggacttatcctataaatctcggaaaaaatggtttttctgcatcatgaacttkgggcaacctgcttctaactccaaaggactggagttaggaactggggacttggtggtgaataagcccaagtctctgtcctcatgaagttcatgttctagcaggagagaaagacaagaaatagtcaatatgtattgttctgtataaaaatgtgtgtaattttcatgacacattagatgtgattaaacatccctccctaggagcaagtcaacttcccctcctccaccacacacacttagagactgcagagcatttttccattcatgagtaagaatkgcttttccttagaaagtagaagagacggtgaactgatctccagatttagtttkgaataatttatggctgtaccccatatatatgtmcatgtwtmtatatatgtatatatatatacacctactattagtatatacccacaaattttaaatttaaaaaaagcagacaataacaagtatcggcarggatgtgaaaatgtggaacccttacacattactkgggaaaacagtctagcartttctcaaaagattyaagcamtacmgttaccatatgactagcaactctactctagatatctaccrgagaatgaaaccttgtcctgaaggtcatagccattagtctgtggcaaagatggataccc

SEQ ID NO: 17 - DNA, 701 bp, Homo sapiens
tttttttttttttttgtttaatactatatctacttactagtaggtacttattaagtatagttcagggagttaaaacacttaatctgtgccttcggggaattcccagactggtaaccaggtcactccagggcagcgtggttgagttattgctaaagctgtgtttaggtgtgacgctgacgtagagggggacacttgctctgacaagggggtttggagacatttcctggggcaggtgacgtgttaattgaattctgaagaacagctaggagagcaaggatagagttagggagaatattcctgtcagcagaaacagactatgcaaagtatggtggtgagaaagcaaacgtattcagggaactgtgggtacttaagtgtgcctggaacttggggttttgtggagttggtgatgaagcatgaagccagagagaccagcaagcacagtccttgcatatgactatwgaaggtttttatcttgatgacagtggggcmgccaccagagtatttaaaacagagaaatcatgcctgggcgcggtggctcatgccccagcactttgggaggscagsgtgggcagatcatgacgtcaggagatcaaaaccatcctggctaacatggtgaaaccttgtctctactwaaaatacmaaaaattagccaggaatggtggcacgtgcctgtactctcagctactagggaggctgaggca

SEQ ID NO: 18 - DNA, 741 bp, Homo sapiens
gcagtacatcagtgtatcatawgccadgtmvsscccytattgacgtcaatgacggtaakggsccgcctggcawtatgcccagwacatgacstwatgggactktymtacytgkcagkacatctacgtattagtcatcgctattaccatggtgatgcggttttkgcagtacatcaatgggcgtggatagcggtttgactcacggggatttccaagtctccaccccattgacgtcaatgggagtttgttttggcaccwaaatcaacgggactttccaaaatgtcgtaacaactccgccccattgacgcaaatggkcggtaggcgtgtacggtgggaggtctatataagcagagctcgtttagtgaaccgtcagatcgcctggagacgccatccacgctgttttgacctccatagaagacaccgggaccgatccagcctccggactctagcctaggccgcgggacggataacaatttcacacaggaaacagctatgaccattaggcctatttaggtgacactatagaacaagtttgtacaaaaaagcaggctggtaccggtccggaattcccgggatsrygasscggtgrgggcgagccccgaggggctctcgcttctggcgccaagcgcccggccgcgcgccggccgggcgcgacccgctccggggacagtgccaggtggggagtttgactggggcggtacacctgtcmaacggtaacgcaggtgtcctaaggcgagctcaggg

SEQ ID NO: 19 - DNA, 733 bp, Homo sapiens
ttgtcaaattcgctcttaagatttatgcatgttagatcagaaaacatgcctactgtgccagagaaaccacaccagtaaaaaaaggagcaggagagaattagggggatcaagaacaaaaatatcaagtaagttcataaatgagatagccactcaaaaaaggttaattacctttagcttgcatgtggatagcaactgccttagattagcatatctctacacttattttaaacacatttataccaagaaaaagatacgaatagggtcagcctcctttaaaacagaaagttaatgaaggaacagtttaattaaacaaatcagccctataagcattaagattccaagatatctgacaagaagttgattagattataagatccatgatgacaggctgtaatctctgttatttacctaactctcaaatgtccatctaaataagaagtagttwgtggggagaaacatttctttcaggaaagagtagaagtgtcacgatcacaaaaggagggaacaacttcatttcatattcctatctgtcggagaataatttctatgattaytgttggaaagtaaamaaaaaattytgatttcatgaaaataatagcaaatcaatcctttaraatttaaatcaskgacaccammaaaaaaataaagttatcactaattaactacaatatcaywtatacttatcccattcaaatttgcatttctccctttatwttacacctccaaaaactgt

SEQ ID NO: 20 - DNA, 760 bp, Homo sapiens
gatttccggaacgccactgggcagtacatcaagtgtatcatakccmagtacgccccmtwkgacgtcaatggacggtaaatgsccscytggcattatgcccagwacatgacttatggactttctacttgcagtacatctacgtattagtcatcgctattaccatggtgatgcggttttggcagtacatcaatgggcgtggatagcggtttgactcacggggatttccaagtctccaccccattgacgtcaatgggagtttgttttggcaccaaaatcaacgggactttccaaaatgtcgtaacaactccgccccattgacgcaaatgggcggtaggcgtgtacggtgggaggtctatataagcagagctcgtttagtgaaccgtcagatcgcctggagacgccatccacgctgttttgacctccatagaagacaccgggaccgatccagcctccggactctagcctaggccgcgggacggataacaatttcacacaggaaacagctatgaccattaggcctatttaggtgacactatagaacaagtttgtacaaaaaagcaggctggtaccggtccggaattcccgggatccatcaaccaagtgggaggtctgagactcaggagagactcacccagtcacttgcaaccgtggaggagccagaggggctcaaaaggcccgttttggtactaaggtgctcagtccttgcaatgttctaggtgaccctgggctgtctgctctgagtcctatctggggtgccatg

SEQ ID NO: 21 - DNA, 870 bp, Homo sapiens
  misc_feature (171)..(171): n is a, c, g, or t
gcccactggcagacatcarkgtatcatawgccaagtacgccccctattgacgtcaatgmcggtaaatggcccgcctggcaytawgcccagtacakgacytwatgggmctttcctactkggcagwacatctacgtaytagtcatcgctatwaccatggtgatscggttttgncagwamatcwatgggcktgkatarcggtttgactcacgggratttccaagtsycmaccccakbgacgtmwatgggastttgtttkgscaccawwwtcwmygggactttycmrwatgtsgtamyawctccgcccmatkgacgcwaatggkcggtaggcgtgtacggtgggagktytatataagcagagctcgtttagtgaaccgtcagatcgcctggagacgccatccacgctgttttgacctccatagaagacaccgggaccgatccagcctccggactctagcctaggccgcgggacggataacaatttcacacaggwaacagctatgaccattaggcctatttaggtgacactatagaacaagtttgtacaaaaaascaggctggtaccggtccggaattcccgggatmrarartcggaggwtmgaaracgawcagatamcgtcgtagttccgaccataaacgatgccgaccggcgatgcggcggcgttattcccatgacccgccgggcagcttccgggaaaccaaagtctttgggttccggggggagtatggttgcaaagctgaaacttaaaggaattgacggaagggctctgcacccagccccaaggggtggccgtcctgagggggaagtgagaagggctcagagaggacaaaataaagtgtgtgtgcagggaaaaaaaaaaaaaaaaaaaaaaa

SEQ ID NO: 22 - DNA, 707 bp, Homo sapiens
tttttttttttttttttttgagatggagtctcgctcggtcacccaggctggagtgcaatcttgactcactgcaacctctgcctcccgggttcaagcaattctctgcctcagcctgccgagtagctgggattacaggtgcctgccaccatgcctggctaatatttttgtatttttagtagaggcaggatttcaccatcttggccaggctagtcttgaactggtgatctacccgcctcagcctcccaaagtgctgggattacaggggtgagccactgcaccccgccgatatttcttaaattttaagtgctagcaaccaattcaaaatttaaaaaacaaaataccatccaagccaaataaaacacatctgcaagccaggtgcagtctgtgagccatcagtttacaacagctggtatagagatttgcatcatctacctactgtaaatatyttaaatagaagctttaaaattactctgggctgacagtmaaaatccaraaccttggataggttgactgtttttatctcctctgcrgktaggtgaatacttggagctgttgtactacccctctgggcatctgggagtgggactagccaaaagcaatcmaggtagcctgctaagtgccaacttccagttcaggatatcctgagggagaatcwttctgarcagactccacagaagacattgggccctgagtcagcttaggtgggc

SEQ ID NO: 23 - DNA, 687 bp, Homo sapiens
tttttttttttttttttgcatttaaatcttttaattcacttcatcctgtattttaaaataaatgttttccatatagattttccccttgggggggaaaagaattcagggtcttaggttccaggcagttcaaaaacagccacgcggttcttttttctccaccagaataccacaatagcagaacttaagaatcgggatatgaaaagggaggcgtggtcctggcagtggcccctggccggcaggaatacacagcaacacccaggcaggggcagcggctgcccccatgccagcctgcccatccctgtaatgacagcagggcaggagatgcagctgtggccctgggggcaggtgggctctgaggctgcaaacaccctgagtgccagtggtcccagagggggtgaggcctctatctgtacctttattccagccagcctcctggcacagggctgggcccacatcctggcctctgcatctggatcagggctggtgctggtcagcctggtcactctggccagtgctcacactggaagtccatcacaggcgaagtcacctccttcccgtgttaaataacaagaatgccaacaccccacgcacgtgtcatctccagtgagcagacgtccaggcttcccgaaagcttcctggctggaaaccgcgcagggcsgsagcgccctctccaccaagggacacagc

SEQ ID NO: 24 - DNA, 760 bp, Homo sapiens
ttttttttttttcatttacatgaattcaaactgatcagacttacctactgcaaatctgatgctaatttaaaaatacaatgccatagtctggtatacatccctaaatcccagacttactgaggcctcttggaaaggctgatttctttgtcaggtcaggatattccacgagttatcatcattactaagttaggagagagctatttcaatcaagagagatcaccttaagaaggtgattacagtattgaaaaagggtaatgttwtctgtgtmcttgtctctgacttcaagaacactataagtttacaaggagtttctatcatctaaaasagaggaatggttttgctatgatagttttcaataaaatgcaaaggttaatatmaactgaatcagcaactacacagatmttaaaaaacaaaacgacagttgagctgaagtgtttagctcttgtggaatgagcgtgaattaggctatatcaaatgattttacatccgtatttctgaataaataaaaaagataagatagacatcaaaaatgaaattgacaatgtctatcaatgttgatmacaaactaaatttcagtgaagaatcaaattgcatttaagtctccatattcagctatagtagtaaacgtgttaaaaaatttgccatccatcaaaaattgcggtgatccttggactgaacatcataataacattttcttkacaaacaragaggatggcttgtgctctcccatctccaccagtcttcctcctgtggcctacta

SEQ ID NO: 25 - DNA, 760 bp, Homo sapiens
ttttttttttttttattgagatggagttttgctctgttgcccaggctggagtgcagtggcaagatcttagctcactgcaacctctgccaaccaggttcaagcaattctcctccctcagcctctggggtagccaggattacaggaatgcaccaccacacccagctcatttttgtatttttagtagagacggggtttcgccatgttggtcaggctggtcttgaacccctgacctcaggtaatccacctgcctcagcctcccaaagtgttgggattacaggcataagccagagaacccggccagtctgttcctttttattgctgagtagtatttcattttgttagccactcttcagctgatgaatgtttaagttgttcccaatttttgcctgttatagataaagcagctatgaacattcatatacaagtctgtgtagaacatgagcttaatttcctttgggtaaacaatagtgaggagcaaactaataggttatatggtamatatttaattctagaagaaactgccaaactgttttccaaagtggctgtaccagtttgctctagttgctgtgcatcttcaacaccacttagtattgtctttttaatctcattgatatgtagtggtgtctcratgtgacttttaattaagysgtagtkaayycamwccmtatmakyctycamttaataacttacagctgatcttgctgtrmgaatawgagcatctttccctgttaacattcaggtctatgggcattgctcacct

SEQ ID NO: 26 - DNA, 698 bp, Homo sapiens
taaataagcaaactggttccaatattgaagcttgtgacatttggccagtcactcatctctagcgctgagttgcttccttaccctctgtgccttagccaggctattgctatcatatcaaaggatcttatcctttagtccatatttattaaccttctgggtaaattctttatatagtgtttaatcagcagccttttgtaaagtgtaagtaaattcacagaccacttatctgggggcaatcatctgccatttttcagaggaaaccaattggatttcttttaagaattccgttggtagaatgggcccatacaggatacacttaatttaatcgcctatttttggttgttcttttattacaagtatgaactagaatttctagactgctatatactttcctttctgctgatgacttgactagtggtctgaaaagcatgcatttggtgagggtcagtcatgaaatagtgcctcctaatttctatactcacagaaagcacttggcaattaaattccttggaaagtctttaaacctctcctctgtttcacaggtcactgtgtcattcaacagaagaaaagcactgtagcagttytataggatggcagaggaaggagccacctcttacaggggaagagagcagagaacattgggctaaagcmaatgttaatggcttaatggaggtttatacactcaacacctttgggta

SEQ ID NO: 27 - DNA, 905 bp, Homo sapiens
  misc_feature (51)..(51): n is a, c, g, or t
  misc_feature (161)..(161): n is a, c, g, or t
  misc_feature (635)..(635): n is a, c, g, or t
  misc_feature (638)..(638): n is a, c, g, or t
  misc_feature (683)..(683): n is a, c, g, or t
  misc_feature (698)..(698): n is a, c, g, or t
  misc_feature (721)..(721): n is a, c, g, or t
  misc_feature (723)..(723): n is a, c, g, or t
  misc_feature (732)..(732): n is a, c, g, or t
  misc_feature (744)..(744): n is a, c, g, or t
  misc_feature (786)..(786): n is a, c, g, or t
ccaatagggactttccattgaacgtcaatgggtggagtatttacggkarmnsscmrctggcagdacatymarkgkatcawaksccamktwcsssccctakkgasgtcwawsmsggkwwmtksccsksykkgcatwatgcsmdgdacrkgrcbktatggranybtyhtacytgbcagtamatytacgtattagtyatcgctatdrccrtgkkgatbcgkwtttkscagtacatchatgkgcgtggatadcggtttgactcacggggatttcmraktctcmaccccwtkrrcgtcaatgsgagttkgttttggcmccvwrrtbaacsggmhttyscvaawtktsgtawcmactccgccccmktgacgcmaawkggcgstaggcgtgtacggtgggagktctatataagcmgagctcgtttagtgrmccgtcagatcgcytggagacgccatccacgctgttttgacctycatagaagacaccgggaccgatccagcctccggactctagcctaggccgcgggacsgataacwatttcacacaggaawcagctatgaccmttaggcctatttaggtgacactatagawcaagtktgtachmaaaakcaggctggtaccggtccggaattcccgggatnmdnwaamdwavvhdddhdyvdydshrkssscdkkvrtmbmwsytryyndgravrcwgagrydnravrrybrydbrrrbhydsvrrnbnvdrbhtgcndkrvdsbvwsrnhvbdbbryyryabkbyvdychkvkhrrhrvwdbvardbyyynbythwddaammawaaaaaaraaaammwrwmawwwmmwmwrwmwaaawrawawrrmwawwtagagctagtttgttgtggtagtggttttaataagtcctttatataaaaaaaaaaaaaaa

SEQ ID NO: 28 - DNA, 685 bp, Homo sapiens
tttttttttttggtgtagaaagaaacacaattctcagatcagttttccagctccttactctgttagtgagtttctccagtcccgtctggactcttgaatttgctgtgatttcctgccctattgacttctcttgctgatggtgagaattgataggtaagtgttctctggaagagaaggaatgatgaatttgaccttcttttctctcagactctgttatactctccacatctacatccctttgagttttcttctccatgcaggatacacctgcatcttaattctgttgtgattcatcacatgttctttgggaaatataataacataggttataactgggcttatgtacatacctatatagtttgaaaacagatcaagcctttaggaaattaaatcttttaaaaagctataccctcaatgagatagtttcagaatgtatatattaaacaaaacaaaaaaaaagaaaaccatgaccaaaaatggatccctgggttgccttgtttttacataagagtggctgttcttttycctgaacgttgtgagcccaactgaaaattyyaaaacagatggtctaattttagacctttgacagtcatataagtgtttctcttgaatgtwtacaactggattttgcatcatgtaacttacatttcctattttgctgtctagttwyattcctttwacttct

SEQ ID NO: 29 - DNA, 693 bp, Homo sapiens
tttttttttttttttgtttgtttatttattttgagatggagtctcgctttgtcacccaggctggaatgcagtggcaccatctcgactcactgcatcctccacctcctgggttcaagcgattctcctgcctcagcctttcaagtagctgggactacaggtgtgtgccagcacgcccagctaatttttgtgtttttagtaaagacggagtttctccatgtggaactcctgacttcaagagagcctcccaaagtgctgggattacaggcatgaaccactgtgcccagtcccagcccaatttttacctttgatgaagctttctctgaactttagtatggtagttttccaaactatttgtcttcttgttcatgctcttatgttttaaatcctwattgtttctagtagatkgtaaactcctttggaatwatgtcrgtrkgtwatactttgktactwatccargcrgtmcrggmcwctcarmgtkgatwagctgrtgkggawtagwtwtgtgtcccawtttgtgtwdgaywgttttctytcyyyttttgagagagagtcttgccctatwgcccaggctagagcacagtggccatgatctgggatcactgcaagcttctgmctctcaggctcaacgatcctmccacctcagcctcctgaatagctgggaccacaggcgcatgacmcatgcctgactaatct

SEQ ID NO: 30 - DNA, 710 bp, Homo sapiens
tacttcctcccaccargtaycagtgaaataattgaaaaagagacctgtgktagggctaattaaggaaagaatggaaatgtcgactatatgagattgtatccaratttcacaattagttaacttattcaattgagacctttagctaacttagtgcaaacataactttaaacatgtaattttgatagctgttttagtttcagagtaagatttcaggtgacaagtagggcatgtaaaagaaaaaggaggccgggcacggtggctcacgcctgtaatcccagcactttgggggccaacgcgggaagatcacgaggtcaggagatcgagaccatcctggccaacatggtgaaaccccatctctactaaaaatacaaaaaaattagctggggccgggcacagtagctcatgcctgtaatcccagcactttgggaggccaaggcaggtggatcatgaggtcaggagatcgagaccatcctggctaacacggtgaaaccccatctctactaaaaaatacaaaaaaaattagccaggctgacggtgggcgcctgtagtcccagctactcaggaggctaagacaagagaattgcttgaactcgggagggggaggttgcagtaagctgagatctcaccactgcactccagcctgggtgatagagtgagactccatctcaaaaacaaagaaaaaaaaaaaaaaaaaaaaaaaaaaaaaaaaa

SEQ ID NO: 31 - DNA, 688 bp, Homo sapiens
tggsccgcctgggcmttawgscccagkacakgaccgttatgggactktcctactkgkcagtacatyyacgtattagtcatcgctattaccatggtgatkcggttttggcartacatcaatgggcgtggatagcggtttgactcacggggatttccaagtctccaccccattgacgtcaatgggagtttgktttggcaccaaaatcaacgggactttccaaaatgtcgtaacaactccgccccattgacgcaaatgggcggtaggcgtgtacggtgggaggtctatataagcagagctcgtttagtgaaccgtcagatcgcctggagacgccatccacgctgttttgacctccatagaagacaccgggaccgatccagcctccggactctagcctaggccgcgggacggataacaatktcacacaggaaacagctatgaccattaggcctatttaggtgacactatagaacaagtttgtacaaaaaagcaggctggtaccggtccggaattcccgggatmgcgrscggccgccctttttttttttttttttttttttttttttttttttamaaammmwwrwrtcgagggctgactttcaatagatcgcagcgagggagctgctctgctacgtacgaaaccccgacccagaagcaggtcgtctacgaatggtttagcgccaggttcccca

SEQ ID NO: 32 - DNA, 681 bp, Homo sapiens
ttttttttttttattccattatttttcaatgcgtttggaaggggccaacttaaatcagtgttagttatgctcttaggtggctgctctgacacaaatgaaatcatagaaaaatgtcgagccaatagaaaccatctgggactttcatatatttaaaactcaaaatctttgtggatcctgccaatacatttcaggtcatttgaattgaaccaaggaaaaaaatggtgttggtctaggtcactttkttttttgttttaaattacaaatagttgggttaggatatttgtccctgatgtaactcttactcacttctatactgcctttgagcaactgcacaattaagcatggggatatgctttaaaacttgagagaaagtaaatgacaatataaattcatactagtagttattagcgatatttctaattctaatgggcagcagttcttcttggaatttatctcgctacttgggacctagaagagtaagacttctcctttgatatccagatacccaggttgacttcaraatagtacacaaaagtgtagatggaagggtacagccatgcaacttcaaagaatcaactaacttggtatacttaatgcccaggtcataagatacttcacrgaggatttattcggatgcttaccgcacagcmcactctccacttctttycttgctgagactgt

SEQ ID NO: 33 - DNA, 715 bp, Homo sapiens
ttttttttttttttgttttaagtcattatattttgggggtggtttgaacacagcaataaataactgaaatactactaaaagcataaagaatgtataacaacctaattgttacaagggagtggaattaataatctacaagaaggcacaaaaggacagaaaagaaacagaacaaatgagaaaaatagaaagccaacagtaatatggtaaactcaaatattagcttctaggcaattctatgtatgagtagacactgaccaagatcttgtctcaataagattttaaatgtaaagattttcatcttttacctatwgtcctctgaattccgcaccatatcattctcaccttagtttaatggaccctgccttgatgcaattatgaaataagctgctaaggagatcaacacccttaatctattcatygctggtgcgacttacccagtctggtwtagaaccgtttaacaacaggcttacgaagtcactaatgtctcatgattatatacctcttagctcctagatakttactgacttccatgtctggaatataccagcacttctwyywcgwacatatggatyatatgaactamatgtattgtwtcttccctcaccactgaaaatctattcaatatatggagttacaattcaaagtattttacaacccagaaaatatggccattccgtatgtggtgtgtatttcagaagtgctctgcaagctccat

SEQ ID NO: 34 - DNA, 711 bp, Homo sapiens
tttttttttttttttttttttttttttttttttttttttagtagagacggggtttcaccatgttggccaggctggtctcaaactcctgacctcgtgatccacccaccttggccttccaaagtgccgtgattacaagcatgagccaccacgccaggccctattttttttgaaacaagatctcgctccgtcacccaggctggagtacaatggtacaatcttggctcactgcaacctctgcctcccaggctcaagtgattctcctgtgtcaacctcccaagtagctgggactgcagacgcacaccaccacacgggctaatttttgtatttttaatagagatggagttttgccatgttggccaggctggtcttgaactcctgacctcaagtaatccaccccccaacttggcctcccaaagcactgagattgcaggcgtgagccaccacaccccaggctaataatggatgaaatttagatagattgggattccatttgtacctaattgttcttaaattttattactcattattattattattattattatgacagagtctcactctgtcccccaggcttgagtgtagtggaacgaactcggctcactgtaacctctacctcttaggttcaagtgattctcctgcctccaccttcagratatactgggattacacggtgtgcaccaccacacaccggstawtttgymtttagtagag

SEQ ID NO: 35 - DNA, 696 bp, Homo sapiens
ttttgccacaaggggcacaaaatgtscrggacttggttagtaactggcagcctccstrattttggttctcacttccaacttaggaccaacctgagaaagccaattatatgcccccagccaatcacacgggatgccccacttcgtcaatagacactttgcagsttccccctgccaacagcctgcagtcagggcamacctgaagccttgtgtttcccctcactatgaagcttttctgctcctctgcctgccttgtagtctctgccaaamataaggtgatggtggctgacttccttgctacagcaagctctggataaatagcttctgcttttctcatttagttggtctttgtttatttccacaacccaggctgggtgcagtggctcacaacctgtaatcccaacactttgggaggccaaagggggaggatcccttgagtcccggagttcgagaccagcctgggcaatgtaggggtactccacctctacaaaacaaacaaacaaaaaattagctgggtgtggtggcatgcacctgtgctcccagctgcttgggaggctgaggcagaagaattgttcgagcctgggagtttgagcctgcagtgagccataatcccgccactgcactccagcctgggcgacagagcgagaatccgtctcmaaaaaaaaaaaaaaaaaaaaaaaaaaaaaaaaaaaaaaaaaa

SEQ ID NO: 36 - DNA, 1007 bp, Homo sapiens
cccccgcccattgacgttcaataatacgtaggttcccatagttacgtccaatagtgacttgtcgcatgaacggtcaaatgggtgggagtattttacgggtaactgcccaacttggcagtacattccaagggtgatcataatgccaagtacgccccctattgacgtcaatgacggtaaaattggcccgcccttggcattatgcccaagtaacatgaccttatgggactttcctactgtcagtaaatctacgttatttagtcatcgctattaccatgctgattgcggtttttgcagtacatcaatgggcgtggtatagcgtttgactcacsgggatttccaagtctccacccmmttgacgtcaatgggagtttgttttggcaccaaaatcaacgggactttccgaaaatgtctgtaacaactccgccccattgacgcaaatgggcggtaggcgtgtacggtgggaggtctatataagcagagctcgtttagtgaaccgtcagatcgcctggagacgccatccacgctgttttgacctccatagaagacaccgggaccgatccagcctccggatctctagctctaggccgtcgggacggataacaatttcacatcatggaaacagtctatgaccmttaggcctatttaggtgacactatagaacaagtttgtaccaaaaaagcaggctggtaccggtccggaattcccgggatggcmgmmmkttttttttttttttttttttttttttttttttttttttgggcaaatttaaagttgaactaagattctatcttggacaaccagctatcaccaggctcggtaggtttcgagcagaaagagggcgacacgaaggacaagaaggacgaagaggaggacatgagcctggactgagccacgcgccgtcctccgaggaactgggcgcttgcagtgcgttgcacaccctcacctcccacccactgattattaataaagtcttttcttttacctgccaaaaaaaaaaaaaaaaaaaa

SEQ ID NO: 37 - DNA, 732 bp, Homo sapiens
cggaacactccgccccatggacgcaaatggccggtagggcgtgtacggtgcgagttctatataagcagagctcgtttagtgaaccgtcagatcgcctggagacgccatccacgctgttttgacctccatagaagacaccgggaccgatcctagcctccggacttctagcctaggccgcgggacggataacaatttcacacaggaaacagctatgaccattaggcctatttaggtgacactatagaacaagtttgtacaaaaaagcaggctggtaccggtccggaattcccgggatgyywkkawrrmatcstgtytkrccmtgckmrtkrykctgmtgctggtctccggggttctggcccctgcggtgctcacagacgatgttccacaggagcccgtgcccacgctgtggaacgagccggccgagctgccgtcgggagaaggccccgtggagagcaccagccccggccgggagcccgtggacaccggtcccccagcccccaccgtcgcgccaggacccgaggacagcaccgcgcaggagcggctggaccagggcggcgggtcgctggggcccggcgctatcgcggccatcgtgatcgccgccctgctggccacctgcgtggtgctggcgctcgtggtcgtcgcgtctgagaaagttttctgcctcactgaagcgaataaaggggccgcgcccggccgcggcgcgactcggctgcaaaaaaaaaaaaaaaaaaa

SEQ ID NO: 38 - DNA, 618 bp, Homo sapiens
  misc_feature (8)..(8): n is a, c, g, or t
  misc_feature (86)..(88): n is a, c, g, or t
  misc_feature (142)..(142): n is a, c, g, or t
  misc_feature (176)..(177): n is a, c, g, or t
  misc_feature (199)..(199): n is a, c, g, or t
  misc_feature (205)..(205): n is a, c, g, or t
  misc_feature (229)..(230): n is a, c, g, or t
  misc_feature (240)..(241): n is a, c, g, or t
  misc_feature (267)..(268): n is a, c, g, or t
  misc_feature (270)..(270): n is a, c, g, or t
  misc_feature (298)..(298): n is a, c, g, or t
cggggatngttcgcaagtctccaccccattgacgtcaatgggagtttgttttggcaccaaaatcaacgggactttccaaaatgtcnnngtaacaactccgccccattgacgcaaatgggcggtaggcgtgtacggtgggagngtctatataagcagaggctcgtttagtggaaccnngtcagattcgcctggagaacgnccatcncacgctgttttgacactccatagnnaagacaccgnnggaccgatccagcctccggactctanngncctaggcacgcgggacggataacaagtnttcaacacmggaaacasgctatgaccasttaggcctatttaggtgacactatagaacaagtttgtacaaaaaagcaggctggtaccggtccggaattcccgggatsgckakyrggmgrygctygmrgmmctcaacaaaatcccaatccaagtcaaactttgcacatatttatatttatattcagaaaagaaacatttcagtaatttataataaagagcactattttttaatgaaaaaaaaaaaaaaagggcggccattgcactgtccatccctggcccaccatggttttcttcaagatatctttaaaaaaaaaaaaaaaa

SEQ ID NO: 39 - DNA, 1002 bp, Homo sapiens
gggtgggagaattacgggaaactgccccacttggcagtacatcaagtgtatcaatgccaagtacgccccctatgacgtcaatgacggtaaatggcccgcctggcatatgcccagtacaggaccttatgggactttcctacttggcagtacatctacgtattagtcatcgctattaccatggtgatgcggttttggcagtacatcaatgggcgtggatagcggtttgactcacggggatttccaagtctccaccccattgacgtcaatgggagtttgttttggcaccaaaatcaacgggactttccaaaatgtcgtaacaactccgccccattgacgcaaatgggcggtaggcgtgtacggtgggaggtctatataagcagagctcgtttagtgaaccgtcagatcgcctggagacgccatccacgctgttttgacctcsawagaaracrcsgggaccgatccagcctccggactctagcctaggccgcgggacggataacaatttcacacaggaaacagctatgaccattaggcctatttaggtgacactatagaacaagtttgtacaaaaaagcaggctggtaccggtccggaattcccgggatcgcgagcggccrtcawmgcwgtggwcwmsmaggctgctggagctggcarrgwcmccawstctgmmmarraagmtyaraarrmwaaawraawawwatccctaatacctgccaccccactcttaatcagtggtggaagaacggtctcagaactgtttgtttcaattggccatttaagtttagtagtaaaagactggttaatgataacaatgcatcgtaaaaccttcagaaggaaaggagaatgttttgtggaccactttggttttcttttttgcgtgtggcagttttaagttattagtttttaaaatcagtactttttaatggaaacaacttgaccaaaaatttgtcacagaattttgagacccattaaaaaagttaaatgagaaaaaaaaaaaaaaaa

SEQ ID NO: 40 - DNA, 731 bp, Homo sapiens
gtatgcctgtacggtttgcagacatcaatggcgtgatacgtttgactccgggatttccagtctccacccccatgacgtcaatgggagtttgtttgggcaccaaatcaacgggactktccaaaatgtcgtwacawctccgccccattgacgcaaatgggcggtaggcgtgtacggtgggaggtctatataagcagagctcgtttagtgaaccgtcagatcgcctggagacgccatccacgctgttttgacctccatagaagacaccgggaccgatccagcctccggactctagcctaggccgcgggacggataacwatttcacacaggaaacagctatgaccattaggcctatttaggtgacactatagaacaagtttgtacaaaataagcaggctggtaccggtccggaattcccgggatcacggtgaagagacatgagaggtgtagaataagtgggaggcccccggcgcccccccggtgtccccgcgaggggcccggggcggggtccgccggccctgcgggccgccggtgaaataccactactctgatcagttttttcactgacccggtgaggcgggggggcgagccccgaggggctctcgcttctggcgccwagcgcccggccgcgcgccggccgggcgcgacaccgctccggggacagtgccaggtggggagtttgactggggcggtacacctgtcaaacggtaacgcaggtgtcctaaggcgagctc

SEQ ID NO: 41 - DNA, 1173 bp, Homo sapiens
agtgcagcggtatgctgttcgaccagcggcaggtgtacaggacgtctggtgaccattgatgccccagggcagctgccggcgcgtggccgtcagcggactcctttcgggattacctgacccggcaccccccaccggtgcccgcggaggacccagctgccttctccatgctggcccccctagaccctctgggccacaactatggctgtctacactgtctactgaccagagcccacgcttggccaaggagatcgccattggccgtctgtctttgatggttcctctgacggcttctccagagagatgaaggctgatgccggcacagccgtcaccttccagtgccgggagccaccggccggacgacccagcctcttccagaggctgctggagtccccggcgacagcacttggtgacatccgcagggagatgagcgaggcggcgcaggcacaggcccgggcctcaggtcscctccgcacccgccgggktagggtccggcagtgacctgggcaggggccctsgctttcccacstccctccagactcstttgaccscaggaagttttgcccctccttyttctccagacagccccctccbcaggtgtctgggtcccctgtkcscgcccctttccagwactcagagtcagacaagaacccagagcatccgatggtagaaacaccarraarammawwrwwrmwrwrwrgtatggaatggagtttgcggtgactctggggccagcacccaggggacgacgttcaaccctagcctgaagggacccgctcccagctcagaagccgtctctgacttctcgtgcgtattttgaccctgatttcaatcttctacccttgggagttctggcgtttggcacaaagtcccctctgcctgtttggakctcagtgctagaccaggtcccctgccccgagctttgtttttggggttatttattgaaacamagtgtggggagctggttgtgggtgtgagtgggggtgtggggtccaggctgggcccagtgaaaaggaggaaggggttcccatgcgggggaggctctggggctgaggggaacaattctcacgtgtttggtgcttagagacctgcccggggcgttgggcaggccctccgggggctgaattaaaaatgctttatttccmaaaaaaaaaaaaaaaaaaaaaaaaaaaaaaa

SEQ ID NO: 42 - DNA, 1143 bp, Homo sapiens
agaaccctatttcgccgtcctataataggctttagagcctttcacctaatcatgtctacataactttcgtaatggcccgcctgttggaccgcccacgacccccgcccatgacgtcattaatgacgtatgttcccatagtaackccataggractttccatgacgtcaatggtkgagtatttacggtaaactgtcccacttgcagtacatcaagtgtatcatatgccaagtacgccccctattgacgtcaatgacggtaaatggcccgcctggcattatgcccagtacatgaccttatgggactwtcctatcttggcagtacatctacgtattagtcatcgctattaccatggtgatgcggttttggcagtacatcaatgggcgtggatagcggtttgactcacggggatttccaagtstccacsccrttgacgtcaatgggaktttgttttggcaccaaaatcaacgggactttccaaatgtcgtwacaastccgccccattgacgcaaatgggcggtaggsgtgtacggtgggaggtctatataagcagagctcgtttagtgaaccgtcagatcgcctggagacgccatccacgctgttttgacctccatagaagacaccgggrccgatccagcctccggactctagcctagkccgcgggacggataacratttcacacaggaaacagctatgaccattaggcctatttaggtgacactatagaacaagtttgtacmaaaaagcaggctggtaccggtccggaattcccgggatrahhvwwwdadkkyyctrarmwrrwrrmmramarmaamrwrrwmwwrgacacaaccatgcggggtggccgcctgggggtcttctgcttctcccaggagaacatcatctgggccaacctgcgttaccgctgcaatgacaccatcccagaggactatgagacccatcagctgcggcaagcctagggaccagggtgaggacccgccggatgacagccaccctcaccgcggctggatgggggctctgcacccagccccaaggggtggccgtcctgagggggaagtgagaagggctcagagaggaccaaaataaagtgtgtgtgcagggaaaaaaaaaaaaaaaaaaaaaaaaaaaaaaaaaaaaaaaaaaaa

SEQ ID NO: 43 - DNA, 796 bp, Homo sapiens
tagttcccctgtaccccatagggactttccttgacgtcatgggtggagtatttaccggtgtgctgcccacttgccggtacatacaagtggtatcatatgcccagtacgccccctattgacgtcaatgacggtaatggcccgcctggcattatgccccgtacatgaccttatgggactttcctacttggccagtacatctacgtattagtcatcgctattaccactggtgatgcggttttggcagtacatcaatgggcgtggatagcggtttgactcacggggatttccacagtctccaccccacttgacgtcaatgggagtttgttttggcacccaaatcaacgggactttcccaaatgtcgtataccactccgccccacttgacgscaatgggcggtaggcgtgtacgktgggaggtctatataagcagagctcgtttagtgaaccgtcagatcgcctggagacgccatccacgctgttttgacctccatagaagacaccgggaccgatccagcctccggactctagcctaggccgcgggacggataacmatttcacacaggaaacagctatgaccmttaggcctatttaggtgacactatagaacmagtttgtacmaaaaagcmggctggtaccggtccggaattcccgggataaaaaaaaaaaaaaaaaaaaaarrrmrrmmrwrrmrammmrmwraawwwaarmawawwarwmagcggaggagaagaaactaaccaggattccctcagtaacggcgagtgaacagggaagagcccagcgccgaatccccgcc

SEQ ID NO: 44 - DNA, 903 bp, Homo sapiens
  misc_feature (775)..(775): n is a, c, g, or t
  misc_feature (786)..(786): n is a, c, g, or t
aatggcccgctggctgaccrcccmrcgacccccgcccattgacgtcaatwatgacgtatgttccccatagtaacsccmatagggactttccatkgacgtcaatgggtggagtatttacggtaaactgcccacttggcagtacatcaagtgtatcatatgccaagtacgccccctattgacgtcaatgacggtaaatggcccgcctggcattatgcccmgtacatgaccttatgggactttcctacttgscagtacatctacgtattagtcatcgctattaccatggtgatgcggttttkgcagtacatcaatgggcgtggatagcggtttrractcacggggsatyttccaagtctccamcccayytgacgtcmaatgggagtttgttttggccacccaaamtcaacgggactttcccaaamtgtcgtgatamcaactccgccccccacttgacgscammatggagysggtagggysgtgtacggtcggggagggtctratataaatrcagacgstgcgtckttagtgakrccgctcatgcawtgcgtcstggwarrmcrccamtmcamacyrsctytgktkwgsaccctcccatagaagacacmcgcggggmccgcagwwccagcctctcsgagaytytascytaggccysccggraccggataacaatttcacacaggaaacagctatgaccmttaggcctatttaggtgacactatagaacaagtttgtmcmaaaaagcmggctggtaccggtccggaattcccgggatrwnmrmrrhhmwanddhrrmmrmmawraaraaarmmamaaararwarmwrarwwamwrrrmccagaggctgggccctggacatgtacctgcagaataataaagtcatcaatacctcaaaaaaaaaaaaaaa

SEQ ID NO: 45 - DNA, 623 bp, Homo sapiens
tttttttttttttttaacttcccaggatggtttattccaaagctgtggacggtgaacattaagacgaaagaggtgactcgcgtggaacctgaaacacrgacgcctttcttccaagaagggctgtggcgatcaggccactcaaggcagccagcccctcagcagggcacgatggctaatgctgcctggaccgcagggactttttgttcgatttcaagacaccagactccctctccttctcagggtcgaagacttwtgggatctcgtggggccagtagtcgttgcagtgggggcagcgcggttcagcattcgactggaagtacttggccacgcagggtaagtgcatcctgatcccacaggtttcgcagctttgaccctggatgaggaggctgtgacagatatygcagatcttcaccgcgtcggggtacgtctcccggatgtattgytccatctccaggatggcccggccgtgcagggtgaactccccttccttctcaatcagccacttgtttggaacaaacttctgcagcacctgctccgcttccttcttcctcatcttcttgcctttaagtgatcaacaggttcaatatgttgtggaagacgcaaagccggtgtctgagtcaaga

SEQ ID NO: 46 - DNA, 1119 bp, Homo sapiens
caatggcgtaggcttttcggtggagttcctatataagcagagctcgtttagtgaaccgtcagatcgcctggagacgccatccacgctgttgtggacctccatagaagacaccgggaccgatcccagcctccggactctagcctaggccgcgggacggataacaatttcacacaggaaacagctatgaccattaggcctatttaggtgacactatagaacaagtttgtacacaaaagcaggctggtaccggtccggaattcccgggattgcctatcatatagtaaaacccascccmtgrcccctaacaggggccytctcagccctcytaatgmccybcggsctwrccwtgtgattycacttccactccataacgctcctcatactaggcctwytwaccvacachstaaccatatacchatgwtrrcgcgatgtwacrcgagwwagcwcataccaagscmaccacacaccacckgtccrwwaaggccttcgatacgggataatcctakttatkacctcagarrtktttttcttcgcaggatttktctgagcctktkaccactccagcctagcccctacccycsmattaggaggkcactggcccccwwcaggcatcaccccgctaaatcccctagaagtcccactcckddrcacatccgtattactcgcatcaggagtatcartcacctgagctcaccatagtctratagradamdammrraammmartarttcaagcactgcttatkacmattttactgggtctctattttaccctcctacaagcctcagagtacttcgagtctcccttcaccatttccgacggcatytacggctcaacatyytttgtagccacaggcttccacggacttcacgtcattattggctcaactttcctcactatctgcttcatccgccmactaatatttcactttacatccmaacatcactttggsttcgaagccgccgcctgatactggcattttgtagatgtggtttgactatttctgtatgtctccatctattgatgagggtyttaammmmaaaaaaaaaraaaawraaaarawwamwaaaaaawraaaraaaaawaaaaaaaaaaaaaaaaaaaaaaaaaaaaaaaaaa

SEQ ID NO: 47 - DNA, 731 bp, Homo sapiens
cgctcgcrscgcssgaggcccggccgtccccycccggtcsccccggccgcgttcccgccgssytcgmkmrcmgkyksmyarmagccrrcytagwacygktscggaccmgggratccgactgtttaawtwawacwagcatcgcgaaggcccgcgkcgggtgttgacgcgatgtgatttctgcccagtgctctgaatgtcaaagtgaagaaattcaatgaagcgcgggtaaacggcgggagtwactatgactctcttaaggtagccmaatgcctcgtcatctaattagtgacgcgcatgaatggatgaacgagattcccmctgtccctacctactatccagcgaaaccacagccaagggaacgggcttggcggaatcagcggggaaagaagamcctgttgagcttgactytagtctggcacggtgaagagacatgagaggtgtagaataagtgggaggcccccggcgcccccccggtgtccccgcgaggggcccggggcggggtccgccggccctgcgggccgccggtgaaataccactactctgatcgttttttcactgacccggtgaggcgggggggcgagccccgaggggctctcgcttctggcgccawgcgcccggccgcgcgccggccgggcgcgacccgctccggggacagtgccaggtggggagtttgactggggcggtacacctgtcaaacggtaacgcaggtgtcctaaggcgagctcagggag

SEQ ID NO: 48 - DNA, 991 bp, Homo sapiens
  misc_feature (111)..(111): n is a, c, g, or t
cacttgacgcatgaagtttcgcaacatggagacggcgagactgcgtcaaccccgatccagcaacgttccctagaagaactggtggagcagtcaagagccaaggagaaaganacacatctggtttggagaaaccatcaatggtggcttccatttcagctatggagatgacaatctggctcccaacactgccaacgtccagatgaccttcctacgcctgctgtccacggaaggctcccagaacatcacctaccactgcaagaacagcattgcctatctggrcgaagcagctagcamcctcaagraggccctgctcatccagggctccaatgacgtggagatccgggcagagggcaatagcaggttcacgtacactgccctgaaggatggctgcacgaaacataccggtaagtggggcaagactgttatcgagtaccggtcacagaagacctcacgcctccccatcattgacattgcacccatggacataggagggcccgagcaggaattcggtgtggacatagggccggtctgcttcttgtaaaaacctgaacccagaaacaacacaatccgttgcaaacccaaaggacccaagtactttccaatctcagtcactctaggactctgcactgaatggctgacctgacctgatgtccattcatcccaccctctcacagttcggacttttctcccctctctttctaagagacctgaactgggcagactgcaaaataaaatctcggtgttctatttawwwawwrwmwwmmwrtaagaccttcgggtcaaggcagaggcaggaaactaactggtgtgagtcaaatgccccctgagtgactgcccccagcccaggccagaagacctcccttcaggtgccgggcgcaggaactgtgtgtgtcctacacaatggtgctattctgtgtcaaacacctctgtattttttaaaacatcaattgatattaaaaatgaaaagattattggaaaaaaaaaaaaaaaa

SEQ ID NO: 49 - DNA, 991 bp, Homo sapiens; identical to SEQ ID NO: 48
  misc_feature (111)..(111): n is a, c, g, or t

SEQ ID NO: 50 - DNA, 799 bp, Homo sapiens
tttttttttttttttttttttttttttttttttttttttttttttttttttttattctgtattttattactgaaatatgttgtcctactcatcccaccccacaataaaaatctgacccaggccccccatttctttccctcatcccctcttccaccacaccatcccggaacaagtgctccaggattccctgcccackggccatttkggagtgtgtccatkgggtagcaakgtggaaaccaccagggccttkgtggagaaaatggagggggttgagggagtcccaggaggggctatatttgagggcctttgccacttgctcataggcgagctcgatctcctacatcatctggacaggtggaagcgaattcttcccgggcgtaggcattgctcaagtaccgatgcactccccggaaggcctcggggatggtgaatccccggtacttcttacacaccacctgtactatgtgctaacttkggacaacaggttgcagwcagccagcgatgagctcgttgccatccaaaaactwcctctgagagacaccttcatcwwcagcackggtttcatccacttcttctgggaggggggatgttaagtaattgtctaaaaccttcagggctttcaggagtcccttctccagattgtcattgagtgctgggtttgaattcttgattgtaggcacgacaaattcggcaaatatgtccagccagctgtgttggactcagttcagagctggcagttggggtacctgcgagggcacacactgctcagaaattctcaatcttgttggttctggtgcct

SEQ ID NO: 51 - DNA, 799 bp, Homo sapiens; identical to SEQ ID NO: 50

SEQ ID NO: 52 - DNA, 1069 bp, Homo sapiens
ccgggccgcatgacggtcaataaggacgtatgttcccatagtaacgcccataagggactgtccattgacgtcaatggggtggagtattttacggtaaactgcccactggcagtacatcaagtgtatcatatgccaagtacgccccctattgacgtcaatgacggtaaatggcccgcctggcattatgcccagtacatgacttatgggactttcctacttggcagtacatctacgtattagtcatcgctattaccatggtgatcggttttggcagtacatcaatgggcgtggatagcggtttgaytcacggggatttccaagtctccaccccattgacgtcaatgggagtttgttttggcaccamaatcaacgggactttccaaaatgtcgtaacaactccgccccattgacgcaaatgggcggtaggcgtgtacggtgggaggtctatataagcagagctcgtttagtgaaccgtcagatcgcctggagacgccatccacgctgttttgacctccatagaagacaccgggaccgatccagcctccggactctagcctaggccgcgggacggataacaatttcacacaggaaacagctatgaccattaggcctatttaggtgacactatagaacaagtttgtacaaaaaagcaggctggtaccggtccggaattcccgggatgctttaaaagatgaatcaatcattgccctaactataggagtttctctcagattctttgattattctcaagagttcttctctgaaattgatagaactaatgccagaaagaggatatatatggccacactatctacacttggagaccctacacaaaatgcaattccttgtatagtgagctcaagatgcccaggaaagagtctatgcaaaaatggtacttctacagtctaatcgtcataggttactgctagaacattaaggtgtaggttaaatttatttaaatatctgaagctgaagatctgagaaattaaaatcttagttaaccaatgacaatacttttttgtgacaaggagctcttattcataattgtagcaaaaaaaaaaaaaaaaaa

SEQ ID NO: 53 - DNA, 831 bp, Homo sapiens
  misc_feature (72)..(72): n is a, c, g, or t
  misc_feature (129)..(129): n is a, c, g, or t
tccacgacgtcaatggtggagtatttacggtaactgcccaactggccagtacatcacagtgtatcatatgcncaagtacgccccctatgacgtcaatgacgggtaaatggcccgcctgggcattatgcncagtacatgaccttatgggactttcctacttggcagtacatctacgtattagtcatcgctattaccatggtgatgcggttttggcagtacatcaatgggcgtggatagcggtttgactcacggggatttccaagtctccaccccattgacgtcaatgggagtttgtttggcaccaaaatcaacgggactttccaaaatgtcgtaacaactccgccccattgacgcaaatgggcggtaggcgtgtacggtgggaggtctatataagcagagctcgtttagtgaaccgtcagatcgcctggagacgccatccacgctgttttgacctccatagaagacaccgggaccgatccagcctccggactctagcctaggccgcgggacggataacaatttcacacaggaaacagctatgaccattaggcctatttaggtgacactatagaacaagtttgtacaaaaaagcaggctggtaccggtccggaattcccgggatccgccctttttytttgttcgtctgggctkccmwcatcwtyywgmctsaggwagamycsrwmasttwksskccmcstccamatgactgtgtacctccagctgctcaggactttggaggtgggggcggggcctggggatctacccttctaaaaaactctccaagtaattctgataccaataaagtgggagacctccaaaaaaaaaaaaaaa

SEQ ID NO: 54 - DNA, 741 bp, Homo sapiens
ttttttttttttttgtttgagacagagtctcactctgtcacccaggctggagtgcaatggcgcaatctgggctcactgcaacctccgtctcctggagttcaagcaattctctcacctcagcctcctgagtagctgggactacaggtgcgcgccaccacacctggcattaattttttagtatttatagtagagatggggtttcaccatgttagccaggatggtctcgaactccttgaacttcatgatcctcccgccttggtctcccaaagtgctgggattacaggtgtgagccacggtgcccggccctagaacattaatcttatctcctgctgtgtcaacatctattgttaagttaatcctgtttagttaattttcattctttgtttttcatctttagaatgattacttgattcttttctttccttaaatagtttccattctctggtaaaacttcttatttttgtttatttttgactattttctacattcattatcttgaacaaattacacagttactataaggctttttctggctaatccaaatatcctgaccatattyggatatgtycctatttwtttctcttgtttytaagktgtytygtyatatatttccgtggcataatatttttgtaaataaatgctasgagytgtatattacacamwtyygtagtatccaaatgatggsttctctamatagtargagykcctcsttctattctcgcaggaagacaatattgtctc

SEQ ID NO: 55 - DNA, 771 bp, Homo sapiens
tttttttttttttttttttttttcgatgatttggcctaaaaactcttagtcttcaatgtgttcctgccaagctctttgcatactcttgaattattatgatttattttgtgagcgtaaaacttcaatttattttatttatctctatttaaaaataatttcttatttacagtcacttttttccctttttcttttcctttttttttttttcatatatctgctatgtatgtcagtcactgggcttgtcagtggagcagtaagaagataatgttgaattcagtatcaaggggccaaattttcagtgcttataatctaagggagacaaaaagaagtcactattttgtcaattacaaattattgtaatgaggattctaaagggacaactaagggcaactaaggaggtaggacaaggagaactttctggactaagtggcacctgagttaaggagttagcaatatgaaggagaagaggaggagaaattcaagtagagagatttcttatataaagttctagacaggagaataagcatggtgttttctaagactcatagagaagcaataggtggggcttttacatagagtaagaggtaaaccttaaggagaaatgattctaggaatataaataatttccaaatcatgaagaactttgtattaaaacctgsaaggaattgttyggcatttgaacgagtttgatgggagggagtgatgtgattatcttggtattcwtagaaaaaatccactttggtgcctgtgacataatttctgtctcaaatg

SEQ ID NO: 56 - DNA, 787 bp, Homo sapiens
ccactggcagtacatcaagtgtatcatatgccaagtacgcccctattgacgtcaatgacggtaaatggcccgcctggcataatgcccagtacatgacyttatgggactttcstacttggcagtacatctacgtaktagtcatcgctaktaccatggtgatkcggttttggcagtacatcaatgggcgtggatagcggtttgactcacggggatttccaagtctccaccccattgacgtcaatgsgagtttgttttggcaccraaatcaacgggactttccraaatgtcgtaacaactccgccccattgacgcaaatggsmggtaggcgtgtacggtgggaggtctatataagcagagctcgtttagtgaaccgtcagatcgcctggagacgccatccacgctgttttgacctccatagaagacaccgggaccgatccagcctccggactctagcctaggccgcgggacggataacaatttcacacaggaaacagctatgaccattaggcctatttaggtgacactatagaacaagtttgtacaaaaaagcaggctggtaccggtccggaattcccgggatsgcmgcsccsycgycykyywsgcmyygcmgyyyktgksswwcytggcgcyamrccmttcgtagrcgwcckgcttctgggkcgggstttygtmcgkmgcmgrgcagcyscckcgcygcgatctattgaaagtcagccctcgacacaagggtttgtaaawraararraarargggaaagaaaaggggggaaaagaaaaaaaaaaaaaaa

SEQ ID NO: 57 - DNA, 791 bp, Homo sapiens
tttttttttttttttttttttttttttttttttttttttttttttttttkywwtgtgtaagaagtactttaatagctcaaactcagagtcatcgkgctcccaattccaaagagattcctaaaagaggcaacttcggccgttkgagaagccagcgctcacccacccggggtctctgtgcattgaccttkgggtgctgactkggagaaaagcacaaacacgaccagtcccatcctggctcccgkggggcttcttctatctacgcatkgtatcgactgcattagtkggactaagatgatgactcagttaaaggaggagacaaatgctgackgkctaagcaagaakggcccaagckggcaagaaaaagcacackgcatacataggatacagaagggcagagcttckgcctgcggatctgcaacattacatwbkkttbgcctgcmaactatcaagaaggattctgtdggccagsgagtctccactgaacaaacaaaadggcagtcaamagtctwgagtgtcctattccagcagcccagagtcctcatccgtcatccacgggagagtcttygagggaaacatgaagtccagctcatgcctctgcctakgggtcaatttcttcgggaatcactgkgatcatgatatctkcatwaccccbgcggacmaccatgttcagsgtgcttycccttttawtgacgtcgctgacatcmtkggcggagrmcmmggactgtcmatygatgcygatyatgacgtystttcctkragamcmmcagttctgckggggtatccggaatact

SEQ ID NO: 58 - DNA, 653 bp, Homo sapiens
ttttttttttttttgttgagatgaggtctcactgtgtttcccaggctggtcttgaactcctgaactcaagccatccgcctgccttggcctcctaaagtgctaggattacaggcatgagccactgtgcccagccagtgcttgaactttagtatctatctagtggaatagatacagatacatgaaactgtgtatctatagagaaagcaggttcaggcacagacagggtttacttcttgctgctcttgtctctcctgtccttccccagaggtctctaattcatttgtccctcaatcagagatctttttcaggtgtttttctatatgacatatgtgggtggtgtattttctgagtatccatacatacacttttttttcaggacaagtgacagatgttgtgtywggggtttgctacttttctcttagtattttgctagagccattgctatggcttccattgtcgcgggtgagaagtctgatgcctctgatttkkttttcctgaagtactatgttctacctacctgtaagcttgtaaaaatattttcttacagagtcaggaatttagtaggatgtgtcaagatctgtgtgtagaataacatgagctcttttaatcggcagaccaaggtctttctttggccccagccaattttcttctgc

SEQ ID NO: 59 - DNA, 754 bp, Homo sapiens
tttttttttttttttwwyywwkktywytwywgagcgtcataatctttatttccagcttgcttttcatgatggcatatccctacatggaactttttagtggattttgtttgttttttgtatttttgtgtgctgtagaggatgtggaaagaagggcttcaggaaggaagtctgggttggggtgaggttagtttccctcagtacatgtgggcacagttttcttcagcttaagggaaatcttaggagagggacattgatacttttacttgcctttaatttgtttacattactgcccaagcagatgaaaataaagtagatgggatgaatgccccaaaaggccaaactgggaactctagccgtggtccaggagacggagggaacagagaccactggaaggagtcagataggtatgcttgttctctttctcatctttcctctgatccacatgtttgtgtaattaagaaattaagttcttggttctcagagcactgccagatcgctcattgtgagcaaactaaagtcagccaacgtagacagttaagattctgaaaatctagaagtaatacatcatccagacaacaaggactgttgactagaggtgcctgttcagtgccttgaaactgcatgcatacacatgtttgtattaggcgagtcctttcctaaagacatggttttatgcttacgtctctgccagggaaagatgggcgaaaaggatccaggactccagattctggcwcctgagccaaagaaacctgaa

SEQ ID NO: 60 - DNA, 832 bp, Homo sapiens
gggacagagccaacctgcagcgagagagaagaggacccaagagagcacagtcccaccaccagagagatcggtgaagtcttgagaaactggccgccactgcaccagctttgccccwacctccctcwacccccagagccaccacccttcctcctgccycagccacwacwgtgactctggtccacgtcccgggcggtatacagttgctgcaagacctatgaccaccactgcctttcccaccacgcagaggcyctggaccccctcaccctcccacaggccccctacaaccactgaggtgatcactgtccaggagaccctcagtttcagagaatctttaccctccatcccggaaggatcagcacagggagaggtccacagacaatccaggaggtcccagcaaggccaccagcttggagagcttcacaaatgcccctcccaccaccatctcagaacccagcacaagggctgctggcccaggccgtttccgggacaaccgcatggacaggcgggaacatggccaccgagacccaaatgtggkgccaggtcctcccaagccagcaaaggagaaacctcccwaaaagaaggcccaggacaaaattcttagtaatgagtatgaggagaagtatgacctcagccggcctactgcctctcagctggaggacgagctgcaggtggggaatgttccccttaaaaaagcaaggagtctaaaaagcatgaaaagcttgagaaaccagagaarraraaraaaaaaaaratgaagaatgagacgcagacaagtactaagagtgaaagcaaatgaagaagtctgagaaaagagcaagcaaaaaaaaaaaaa

SEQ ID NO: 61 - DNA, 832 bp, Homo sapiens; identical to SEQ ID NO: 60

SEQ ID NO: 62 - DNA, 809 bp, Homo sapiens
tttttttttttttttaatggttaaaataactttattaaggaaacaagtggattttcaaatcaggatttttcaaaaactcatacctgacctgtgttgttttgctatttccatgctcatgttctttctatcatactttctctttaggaattaatatgatgtgaattcaaatcccattctatttacattttttgattagggcattgaatttgtttacatatcaatgacattttgtttactttgctctgatagtaacttcagcagttaattgtaattccaattctaatttttatacacatcaaagaatagaaatatagaatactcaaacatcttaattttctcagctaataactttgctttgcacagactacaatgctgagcacaacaaatcggggatcaaaagaattttaaatccgacatacattaagaattcacgttgttttaacttgctagtgtcattcgtgcagtttagtaacatgactacttcagtacagagaactgttttaaagttgtaaccaggctacagtgggccttcaataaggtgggacaggtttgcatgagagagaaattattttccaaggtggttgtcaaaagagggatacaaactaatggttcacaaatagaagctgtgatgaaatctaggmatctaaggctgcccmmcataccatgggggtggaattycttmaaaggagtgtatacggckwaaatacaagccattgktccctgagttctaaaatatacactggmttccaagargtataaatacaaacaatatccccttwatttagcgktatagacaccttctttttctc

SEQ ID NO: 63 - DNA, 684 bp, Homo sapiens
gtacaggacttatggggactttcgtacttggcagtaccatctacgtattagtcatcgctattaccatgatgatgcggttttgacagtacatcaatgggcgtggataacggtttgactcacggggatttccaagtctccaccccatcgacgtcaatgggagtttgttttggcacccaaatcaacgggactttccgaaatgtcgtaacaactccgccccattgacgcaaatgggcggtaggcgtgtacggtgggaggtctatataagcagagctcgtttagtgaaccgtcagatcgcctggagacgccatccacgctgttttgacctccatagaagacaccgggaccgatccagcctccggactctagcgctagcgccgcgggacggataacaatgttcacacaggaaacagctatgaccattaggcctatttaggtgacactatagaacaagtttgctacgaacaaaacgcagcgcatggtaccaggtccggaattcccgggatmwwwmammrmwacacgaccagggggtatactacggtcaatgctcgtgaaatctgtggagcaaaccacagtttcatgcccatcgtcctagaattaattccccttaaaaatcctttgaaatagggcccgtatttaccctatagcaccccctctaccccctctagagccaaaaaaaaaaaaaaa

SEQ ID NO: 64 - DNA, 807 bp, Homo sapiens
tgcagcgcaartaggtctacaagacgcttacttcccctatcatagaagagcttatcacctttcatggatcacgccctcataatcattktyccttatctgcttcytagtcctgtatgcccttttcctwacactcacwwcraamytaactaatactaacatytcagacgctcaggaaatagaarccgtstgrastatcctgcccgccatcatcctagtcctcatcgccctcccatccctacgcatcctktacataacagaygaggtcwacgatccctcccttaccatcaaatcaattggccaccmatggkactgaacctacgagtacaccgaytacggcggactaatcttcaactcctacatacttcccccmywattystasaammargcrrsctgsgwmwcckkkmcgkwrwcmmksgagtagtactcccgattgaagcccccattcgtataataattacatcacaagacgtcttgcactcatgagctgtccccacattaggcttaaaaacagatgcmattcccggacgtctaaaccmaaccactttcaccgctacacgaccgggggtatactacggtcaatgctctgaaatctgtggagcmaaccacagtttcatgcccatcgtcctagaattaattcccctaaaaatctttgaaatagggcccgtatttwccckrwavcaymmmytywwhhhmmkbdrravmmmmmaaaaaaaaaaaaaaaaaaaaaaaaaaaaaaaaaaaaaaaaaaaaaaaaaaaaaaaaaaaaaaaaaaaaaaaaaaaaaaaaaaaaaaaaaaaaaaaaaaaa

SEQ ID NO: 65 - DNA, 723 bp, Homo sapiens
ttttttttttttttttttwgatgatgaaatattttaattcaaggtttatttcaatagcaaaaatgacttcaagattttgcatgaattattttttaaacaaaactatatgaaaaatatgtacaaatcagtcatcaatgtcattgacatttttatgaacaagtttcaaatgaaaaatatcccatcataacaaaggtacataaataaataaatgctgacaatactggccctaaagtctaacacaactgttagactaatcaggataccgctttctactacgttgaggagcacataatcaatgtttccagcaaaaggcaagtactggtttgtgtaggtttatttaggccagttgacagccacattattttgaggtgtggctacttgtttctcttcatagtgttgaatggcacagtgcaaggcattgggcaccagaagcatgagcataggcagagccatttccaccatgctgacggcagggcaaagaagaagacaaaawtgaacccctttcatgcttgtctagaaatgtgacggctargcgcagttggctcacgcctgtaaatcacmagcacttttgtggaggccaaygcaggcagatcacytgagtgtcaggagytcgagaacagsctgaccwacatggtgaaaaccccatctctaactaaagataccaaattagctgtgctgtggtggtgcatgcctgtaatccccagtactcacgacgctgagcag

SEQ ID NO: 66 - DNA, 1043 bp, Homo sapiens
acccatagggccttccatgacgtcaatgggtggagtatttacggtaactgcccacttgccagtacatcaagtgtatcatatgcccagtacgcccccctattgacgtcaatgacggtaaatggcccgcctggcattatgccccgtacatgcccttatgggactttcctacttggccgtacatctacgtattagtcatcgctattaccctggtgatgcggttttggccgtacatccatgggcgtggatagcggtttgactcccggggatttcccagtctccccccccgttgacgtccatgggagtttgttttggcacccaaatcaccgggactttcccaaawgtcgtaaccactccgcccccwtgacgcmaatgggcggtaggcgtgtacggtgggaggtctatataagcmgagctcgtttagtgaaccgtcagatcgcctggagacgccatccacgctgttttgacctccatagaagacaccgggaccgatccagcctccggactctagcctaggccgcgggacggataacaatttcacacaggaaacagctatgaccattaggcctatttaaggtgacactatagaacacagtttgtagcaaaaaaagcaaggctggtaaccggttccggaaatttcccgggaatcaattccccgttaatggagcggggcgccagtgaattaataaggccttttcgctttaaaggattaaaaaatggcccctagcccacttcttaccacaaggcacacctacaccccttatccccatactagttattatcgaaaccatcagcctactcattcaaccaatagccctggccgtacgcctaaccgctaacattactgcaggccacctactcatgcacctaattggaagcgccaccctagcaatatcaaccattaaccttccctctacacttatcatcttcacaattctaattctactgactatcctagaaatcgctgtcgccttgatccaagcctacgttttcacacttctagtaagcctctacctgcacgacaacacataaaaaaaaaaaaaaaa

SEQ ID NO: 67 - DNA, 729 bp, Homo sapiens
gataccgttttactcacgggatttccmagtctccaccccatggacgtcaatgggagttkttttggcaccaaatcacgggactttccamaatgtcgtaacaactccgccccattgacgcaaatggscgstaggcgtgtacgstgggaggtctatataagcagagctcgtttagtgaaccgtcagatcgcctggagacgccatccacgctgttttgacctccatagaagacaccgggaccgatccagcctccggactctagcctaggccgcgggacggataacaatttcacacaggaaacagctatgaccattaggcctatttaggtgacactatagaacaagtttgtacaaaaaagcaggctggtaccggtccggaattcccgggatrrtcaacrccctcctagcsttactactaataattattacattttgactaccacaactcaacggctacatagaaaaatccaccccttacgagtgcggcttcgaccctatatcccccgcccgcgtccctttctccataaaattcttcttagtagctattaccttcttattatttgatctagaaattgccctccttttacccctaccatgagccctacaaacaactaacctgccactaatagttatgtcatccctcttattaatcatcatcctagccctaagtctggcctatgagtgactacaaaaaggattagactgaaccgaataaaaaaaaaaaaaaaaaaaa

SEQ ID NO: 68 - DNA, 711 bp, Homo sapiens
ttttttttttttttttttttttttttttttttttttttttttggagacagagtcatctcactctgtgacccaggctggagtgcagtagtgtgatcacagctcactgaaccttccgcctcccgggttcaagtgatccttccacctcaactttccaagtaggcagggctacaggcgtgcgccaccaagcctggctaattttkgtatttctagtagagacggtggtcttgccatgttggccaggctggtcttgaactcctgacctcaggtgatccgcctgcattagcctcccaaagtgctaggattacaggcatgagccaccgcgtccaatctgaagctgggctttaaaggatgggcaggattatcaattgtgtgaccctgggtgatttgccaatctctgccaccttcagttccttcatctgccaaatgggcatgatagtagaactaccttactattattattatgactgggaagtagccaggaatggcaaaaagaaaagtggagaaattcggaacaattatggcaatatcacacactaataataacagctaacacttttaaaggccctatgcttcaggcaataaatttttactataacgctagaaggtaaattctgttacgagcccatttcatagaggagaagtctcggtgtgarrattamagtaaactgtaccggttatgcacctaggaagaagcgggtgagactcaaaccc

SEQ ID NO: 69 - DNA, 932 bp, Homo sapiens
ggtggagtattacggtaactggcccactgggcaggacatcaagtgtatcatatgccaagaacgccccctatgacgtcaatgacggtaaatggcccgccggcatttatgccccagtacatgaccttatgggactttcctacttggcagtacatctamgkattagtcatcgctattaccatggtgatgcggttttggcagtacatcaatgggcgtgraymgsgktttgactcacgggratttccaagtctccaccccatgacgtcaatgsgagtttgttttggcaccaaaatcaacggrmctttccraaatgtcgwaacaactccgccccattgacgcaaatgggcggtaggcgtgtacggtgggaggtctatataagcagagctcgtttagtgaaccgtcagatcgcctggagacgccatccacgctgttttgacctccatagaagacaccgggaccgatccagcctccggactctagcctaggccgcgggacggataacaatttcacacaggaaacagctatgaccattaggcctatttaggtgacactatagaacaagtttgtacaaaaaagcaggctggtaccggtccggaattcccgsgrwrrargaaactaaccaggattccctcagtaacggcgagtgaacagggaagagcccagcgccgaatccccgccccgcggcggggcgcgggacatgtggcgtacggaagacccgctccccggcgccgctcgtggggggcccaagtsmwwmwrawmraggcccagcccgtggacggtgtgaggccggtagcggcccccggcgcgccgggcccgggtcttcccggagtcgggttgcttgggaatgcagcccaaagcgggtggtaaactccatctaaggctaaataccggcacgagaccgatagtcaacaagtaccgtaagggaaagttgaaaa

SEQ ID NO: 70 - DNA, 723 bp, Homo sapiens
  misc_feature (717)..(717): n is a, c, g, or t
tttttttttttttttttaaaaaaagcttttagtagaatatattatgcacgtgagatatataagaatatattatacatataaattaagatgtagaataaagtaaagaatatataccttttaaagtataaaaaacaattaaagggccaggcatggtagctcacatctgtaatcctagcactttgggaggctgaggtgagaggatggcttgaggccaggagcttcagaccagcctgggcaacacagggagatcccccatctctaccagaaaagacaaaaaaaaaaaaaattagccaggcgtggtggtgtgtgtctgtggtcccagctacttgtgaggtggaggtggggggatcgcttgagcccaggagtttaaggctgcagcgagccatgatcatgccactgcactccagcctgggtgacagagtaagaccctgtctcaaaatagtaataataataaataataataataataataacatagaatgataaagactaaaaagcagactgggggtttgcctttgggccagggtgggatggggatgacagtgacaatgggaacaaaggaccttctggggtgatgaatgctctgaagttgtgcccagctgtgaatatactaaaacttaccaaactgttatcttacaatgagtgaatcatatggaatctaamawtatgcctcawwaaagygtktaamaaacatkaaaagcatgagacatcacatcnaagccc

SEQ ID NO: 71 - DNA, 811 bp, Homo sapiens
acaccaaaatttacagtaggaatagacgtagacacacgagcatatttcacctccgckwccatwatcatcgctatccccaccggcgtcaaagtatktakctgactcgccacaytccvcgswagcaatatgramrtgatctgctgcagtgctctgagccctaggattcatcttyskkttcaccgtaggtggcytgwctggcattgtatkagcwaactcatcactagacatcgtrytacmygacacgtrctacgttgtagcccacttccactatgtcctatcwataggagctgtattkgccatcataggaggcttcattcactgatktcccckattctcaggctacaccctagacchaacctacgccmaaatccatttcactatcatattcatcggcgtaaatctaactttcttcccacracactttctcggcctatccggaatgccccgacgttactcggactaccccgatgcatacaccacatgaaacatcctatcatctgtaggctcattcatttctctaacagcagtaatattaataattttcatgatttgagaagccttcgcttcgaagcgaaaagtcctaatagtagaagaaccctccataaacctggagtgactatatggatgccccccaccctaccacacattcgaagaacccgtatacataaaatctagacaaaaarrraarraawmraammmmmmmaarmwrrtttcaagccaaccccatggcctccatgactttttmmaaaaaaaaaaaaaaaaaaaaaaaaaaaaaaaaaaaamaaaaaaaaaaaaaaaaaaaaaaaaaaaa

SEQ ID NO: 72 - DNA, 742 bp, Homo sapiens
tttttttttttttgtttctaaatcaatacaatatccaattctctaccaatcggaataaaagagaaaacatatttcgcccataatactgctgtcctatcacaaccataacattctggtgtatttctttttagtgtattttcctgaggatgcatttttccatagctataactttattattattattttacttaaatctgcaaaggttttttctgtatctttagttttatttctcttttctaaaactattgtctttaatagcttcataatatgtatatgccacagtttatctttttaaattcattattgctagatagtaggttatttccaattcttaataatacttctatgaacatctttgtgcatgcccatttatcatatctgtgagagtccttagcttagttttctttggtccctagcttggattycttatttctactactcactctcatttatattccgaaacaagcagtattctttttcaaatggttgaattattgaaaatatttgatatttygccaaaattctgtctgctgtttcctcagtaatgaccttggcctwaatgaaaggcagtttcggtttcgcacatttacatgtgggggccaaatttcctataaagacaacagacagtgcttagatcttccttcaaggctccgatgacmttataggtacacactcctttgtgctggtggccccagcacggacatcactgaaagctgctgaacataaatggccttatgccttg

SEQ ID NO: 73 - DNA, 1067 bp, Homo sapiens
ctccttgggagacccggcccgatccatgctccggacttagctagtccgcgggacggataacgattttcacacaggaaacagctatgaccattaggcctatttaggtgacactatagaacaagtttgtacaaaaaagcaggctggtaccggtccggaattcccgggatgctgcagctggtttcttcaaggctcctgcttaaagtccacacgttattatggccgaaagcaacctggtgcttcggcctggataagagccccttctgcatcttattcacagcttgcagcctcagcccctttgatgaggccctcaggggagaggtcattaccttgatcctgcaaacccagactcgttgagcagcaacgcaatcaccaycatcccactgcccaatctagaatatgtctgctctcctktgctctctgcagctgtaagcccagaggggattcmaggtaaataggctttacaggctcccctcctccaaacacacacagaatgggctggtttctttcaagtttaaaaaaagcccccttctccatgcacaagttcattccctccatgctgtcgtcatcgacatatacaggtgtgtacgtaggtgtatgtgtgtactctgcacgtatatctcttctgtcttgaagaccctgttaactttgtgaaataacttccacatgttcaacacacttcacagtacaggaaataaagtaatatgaaaaacammmwrmrwraamwcaacggtgtgaacaggtcaagaataacacttcaaagtcatcttgccagccaggcgtggtggatcacgcctgtaatcccagcactctgggaggccaaggcgggcagatcacctgaggtcaggagttcaagaccagcctggccaacatagtgaaaccccttgtttactcaaaatacaaaaattggctgggtgcggtggtacatgcctgtagtcccagctacttgggaggctgaggcaggagaattgcttgaaccctggaggcagaagttgcagtgagccgagatcgcaccactgcactccagcctaggagacaaaacgagacttcatttaaaaaaaaaaaaaaaa

SEQ ID NO: 74 - DNA, 882 bp, Homo sapiens
  misc_feature (738)..(738): n is a, c, g, or t
  misc_feature (743)..(743): n is a, c, g, or t
  misc_feature (746)..(746): n is a, c, g, or t
  misc_feature (751)..(751): n is a, c, g, or t
tcgttacawacttacggtaatgsccgcctggctgaccgcccmacgaccccsscccakkacgtcaataakgacgtakgktcccawagwaacgscaatagggacttyccatkgacgtcaatgggtggagwatttacggtaaactgcccactkggcagtacatcaagtgtatcatatgccaagtacgccccctatkgacgtcaakgacggtaaatggcccgcckggcawwatgcccagtacakgaccttatgggactttcctacttggcagtamatctacgtattagtcatcgctattaccatggtgatgcggttttggcagtacatcaatgggcgtggatagcggtttgactcacggggatttccaagtctccaccccattgacgtcaatgggagtttgttttggcaccarratcwacgggactytccwwwrtgtcgtaacaactccgccccattgacgcaawtgggcggtaggcgtgtacggtgggaggtctatataagcagagctcgtttagtgaaccgtcagatcgcctggagacgccatccacgctgttttgacctccatagaagacaccgggaccgatccagcctccggactctagcctaggccgcgggacggataacaatttcacacaggaaacagctatgaccattaggcctatttaggtgacactatagaacaagtttgtacaaaaaagcaggctggtaccggtccggaattcccgggatrrvdvvvvmrrnvvvmndhnwrrdnwrwvrmmdrhrhmwmmgcctcatcctcagcacctctgcagccccacttacaaacccgagggagctgctgctgctgcagtgatgtctgtgccattaaagtcacgctgggaacctgctaaaaaaaaaaaaaaa

SEQ ID NO: 75 - DNA, 954 bp, Homo sapiens
atagctattcggccttcacgcataaaggcagtcgtacatactacgtaatggccggctgtctgaccgccccacgacccccgcccatgacgtcatgaatgacgtatgtgcccatagtaacgccatagggactttycatgaacgtcaatgggtggagtatttmcgkkaactgcccacttggcagtacatcaagtgtatcatatgcsmagtacgccccctaktgacgtcaatgacggtaaatggcccsgcctggcatwatgcccmagtacatgaccttatgkgactttcstacttggcagtacatctrcgtawtagtcatcgctattaccatggtgatgcggttttggcagtacatcaatgggcgtggatagcggtttgactcacggggatttccragtctccaccccattgacgtcaatgggagtttgttttggcaccrraatcaacgggactttccraratgtcgtaacarctccgccccattgacgcaaatgggcggtaggcgtgtacggtgggaggtctatataagcagagctcgtttagtgaaccgtcagatcgcctggagacgccatccacgctgttttgacctccatagaagacaccgggaccgatccagcctccggactctagcctaggccgcgggacggatracaatttcacacaggaaacagctatgaccattaggcctatttaggtgacactatagaacaagtttgtacaaaaaagcaggctggtaccggtccggaattcccggkawgttcsatgtgamcagcmgtkgaacatgggtcagtcggtcctgagagatgggcgagcgccgttccgaagggacgggcgatggcctccgttgccctcggccgatcgaaagggagtcgggttcagatccccgaatccggagwrrmrrarawrrrmrccgcgaggcgtccagtgcggtaacgcgaccgatcccggagaagccgg

SEQ ID NO: 76 - DNA, 704 bp, Homo sapiens
tttttttttttttttttatttttactattttgataaccactttctgtgaaataatagtttttttttttcaaaacttggctcatatctccttttatgttagcagtcatggcatagaaaagctgcccacagaatgacatacatcaaaaacagttttctgtttagacggatagctttaagtgtgtgcaaacaggtgcctctatgtgtggaaggaagacatgctagattatttggggtccacctgcagaggaatgagctaatttacagaagagtgaagcaggctctgcactgaaggccagggttaaggcatatagctaatgataaaataacatgaatgtgactttctaaaaatgtcatgggggagaacgaaacatgaggaggaagggaaaactggcctctataatcttgtaatgttacaaatagaattgccatgtgactcagatcttctcagaggttagagggcataaggtcacttttttagtggtgcatcttctgtcattagacgaagaataattgggaggaaatgatttcaccccagagtttaaattcctcggtcactgcctcattttcttccatagatccataggaatctcctgggagtgaagtggagcctgtgcatttcctagagttgggcttargggktcaggtctggatctatggtgttgctctctkgggaccgacaagtttggacagggcacggcgccgag

SEQ ID NO: 77 - DNA, 700 bp, Homo sapiens
tttttttttttttttttatgaagaaaagaggtttaattcactcacggttctgcaggctctacaggtagcatgactgggaaggcctcaggaaacttacagtcatagtggaaggcgaaggggaagcaagcacagctgaccattgcagatcacggagagagcgtgcagggggaggtgctacacgcttttaaaccatcagatcttgtgagaactcactcactatcacgagaacagccagggggaaatccacccccacgatccaatcaccttccaccaggtccctcccccaacactgggaattacaattcaacatgagttytgggtggggacacagagctaaaccatatcaggcagctttctaaacattcctgtcttcagtttcttcatctgtgaaatggagttagtgagactccctacctcatagggtgattagtsaggtctagttgaagcgcatagcacaaggcctgstaggcagtaaagagctcaatcaagtgtwaccctacmagggamgaaaatcctgacactatgccgcaatatgactgaaacctgsaacgacatgatgctaagctgactaagccaatcgcaaaaagacaaatytggcgctaatccacttacatamggtactgacagtagttaaattcatagagacacaaagtagaatggtggtggctacggcagaggtaggggtcattcggaattctca

SEQ ID NO: 78 - DNA, 756 bp, Homo sapiens
  misc_feature (186)..(186): n is a, c, g, or t
tcccatattcggcctgtgaagtggccaaagaatattccgggcacgcagtccacacaatgtcatcccggatctgtaaccgaccgtgtaagggtggtctcttccagaattggaagctgttaagctagcaaatagttcgttcaaagtggagccccagatgcagtccatgactaaatcttccgcagaccnctggaytggcctgctagcctgkgctccaatgttaatgacatcaaaggcwaccctgyccaagggaatctcaactgcactaacccctastatgcccccattcagcaggaagcagttagagcggtcgttggccaacctcccctracagcacttgagttktcctgttgagaggggggactaagagacaggacgtagctggatttcctaggccaactatcgaatccctaagcctagctgggaaggtgaccacttccaccctttaaacacggggcttgcaacttagctcacacctgaccagtcagatagtaaagagagctcactwaaatactaattaggcaaaaacaggaggtaaagaaatagccmatcatctattgcctaagagcacaacgggagggacaatgatcaggatataaacccagacattcgagctggcaatggctaccctctttgggtcccctccctttgtatgggagctctgttttcactctactaaatcttgcaactgctaaaaaaaaaaaaaaaaaaaaaaaaaaaaaaaaaaaaaaaaaaaaaaaaaaaaaaaaaaaaaaaaaa

SEQ ID NO: 79 - DNA, 707 bp, Homo sapiens
ttttttttttttttttttgagaccaagtcttgctctgttgccaggctgaagtgcagtggtgcgatctcggctcactgcaacctctgcctcctcggttcaagtgattcttctgcctcggcctcccgagtagctgggactacaggcgcgtgccaccacgcccagctaatttttgtgtttttagcagagatagggtttcactatgttggccaggatggtctccatctcttaaccttgtgatccatcgcttcccaaagtgctgggattataggcatgagctaccgtgctgggcccttatttttcttttacctccagcctcctactgggtccttccttacttctggtcttggtggggtatgcmtwcttgggtccctggttagccmtttcgcaaggggccgaaagaagagggcctgtgactttctcttatttttagagttgstgtgacmtttggtakatcctcggttacatwatakatwaagatcctgggccacactcwcgcgtttctcttataatccccaagagacrggccctcaaatctgtgcccagggtwaaaactmtaactctacrggsaaagggrmcacaatctcatagcatatttctctaatctcctattccccasrgggctgayatyctccaaagtgtacatttccagtctggacctcttccagaamttymgactctgstgtmtastgcctayttgcccttccttt

SEQ ID NO: 80 - DNA, 687 bp, Homo sapiens
gcccagtacatgmcytatgggactctyctacytgscagtacatctacgtattagtcatcgctattaccatggtgatgcggttttgcagtacatcaatgggcgtggatagcggtttgactcacggggatttccaagtctccaccccattgacgtcaatgggagtttgttttggcaccaaaatcaacgggactttccaaaatgtcgtaacaactccgccccattgacgcaaatgggcggtaggcgtgtacggtgggaggtctatataagcagagctcgtttagtgaaccgtcagatcgcctggagacgccatccacgctgttttgacctccatagaagacaccgggaccgatccagcctccggactctagcctaggccgcgggacggataacaatttcacacaggaaacagctatgaccattaggcctatttaggtgacactatagaacaagtttgtacaaaaaagcaggctggtaccggtccggaattcccgggatctcaacagttaaatcaacaaaactgctcgccagaacactacgagccacagcttaaaactcaaaggacctggcggtgcttcatatccctctagaggagcctgttctgtaatcgataaaccccgatcaacctcaccacctcttgctcagcctatataccgccatcttcagcaaacccaaaaaaaaaaaaaaaaa

SEQ ID NO: 81 - DNA, 766 bp, Homo sapiens
ttttttttttttttctctgctagaatttaaactccttgaaaataaggatcttgttttgttcactgatttatcccaatcatccaaaatactgtctgacacataataaatattcaattaacaatgactaaatgtttgttaaatgcatggatgaacaatatatttcatttccaaacagttctattactttttctttatttctagccagaatcttcttacagtttccatgcattgaaactgaactctttgttttaccaaaaaagctgattctttttctaagtgaaagcactataaataatgcaagatggaagcgtgctagtcccttcaaaacatagtgttactcttccttccacagggaggcagatcaagttttggaacaagattagcctaggcttgaattccatcactatcacgtcttagatgtgtgaccaaataagctagttaacctctctagattttgtgtcttctaatgtctgtaaaatggggtgaatgatgtcacctttccaagttgtgagcatgaggaaggatttcccacctcagatggtggctggcacatagtagatcactatcctccagccccacacatttgacctgagctgaccacagtgctcaggtgtgcgcatatctgtgccaagcagaatgaccccatcacaacagagctattcagaacargagttcattgccgttggcacaatctcaactcttggsccmactaaatctatcaacaaaattctccatgtgtgcactgtgctttccctcattctaaagg

SEQ ID NO: 82 - DNA, 705 bp, Homo sapiens
gcggcggcgaggcccgcggggggacagtgccgggcgcctggctgtgcctgatggcgctgctgcagctgctgggctcggcgccgcggggatcggggctggcgcacggccgccgcctcatctgctggcaggcgctgctgcagtgccagggggagccggagtgcagctacgcctacaaccagtacgccgaggcgtgcgcgccggtgctggcgcagcacggcgggggcgacgcgcccggggccgccgccgccgctttcccggcctcggccgcctctttctcgtcgcgctggcgctgcccgagtcactgcatctcggccctcattcagctcaaccacacgcgccgcgggcccgccctggaggactgtgactgcgcgcaggacgagaactgcaagtccaccaagcgcgccattgagccgtgcctgccccggacgagcggcggcggcgcgggcggccccggcgcgggcggggtcatgggctgcaccgaggcccggcggcgctgcgaccgcgacagccgctgcaacctggcgctgagccgctacctgacctactgcggcaaagtcttcaacgggctgcgctgcacggacgaaatgccgcaccgttcattgaggacatgctggctatgcccaaggcggcgctgctcaamgactgcgtgtgcgacggcctcgaagcggscaatctgcgagtccggtcaggagaacatggccgctg

SEQ ID NO: 83 - DNA, 682 bp, Homo sapiens
ttttttttttttttttaaactaggagaaccaaatctggaagccaaaatgtaggcttagtttgtgtgttgtctcttgagtttgtcgctcatgtgtgcaacagggtatggactatctgtctggtggccccgtttctggtggtctgttggcaggctggccagtccaggctgccgtggggccgccgcctctttcaagcagtcgtgcctgtgtccatgcgctcagggccatgctgaggcctgggccgctgccacgttggagaagcccgtgtgagaagtgaatgctgggactcagccttcagacagagaggactgtagggagggcggcaggggcctggagatcctcctgcagaccacgcccgtcctgcctgtggcgccgtctccaggggctgcttcctcctggaaattgacgaggggtgtcttgggcagagctggctctgagacgcctccatccaaggccaggttctccgttagctcctgatggccccaccctggagccctggagctggaatcaggaatattttccaaagagtgatagtcttttgcttttggcaacaactctacttaatccaatgggtwtttccctgtacagtasattttccaaatgtmataaacttkaatatamagtagtcctgwgaatgccamtgccttcgcttcttgcctctgtgctgtgtgtgacgtgaccgga

SEQ ID NO: 84 - DNA, 694 bp, Homo sapiens
tttttttttttttttttttttttttttttttttgagaataaaattccttattttatttcaaaacgcccttttttttttttttttacaagatttagaatctgcacaaggtagttctgagaaaggaaaattcaagagaggaaatcagaagctatctatgaggggaaaaaaaaaacctcaataaatggcaaagttacacaattaacaaaccagaaagcaatcattccagaagccaactattgaacccaggccaccactgtcgaaagataaagccttagctgctgagctctacagcattgagcagtttctattggcttttcctagaagagcctagagaagccaatttctagcttgcaaggcttttaactgctcacagaaaaatytttagggctaactatgacatgaactcccaaaattcctgtcctctgggtggtggaaaccaaaagaatgtatccccacatggtcataaggttaagctcttaaaacaccaaaacaagacagagcaaattttataaatacagtattktgtttcagggacccatagcaaagtttgtaactgaccaayttgccaaactgacttgaaaagcaggattataggggccctatacccacattctatcctgtgatacctctctctccattacagaacacagaaagacmgattcttagcmcaragtacaccagatttctacagcct

SEQ ID NO: 85 - DNA, 705 bp, Homo sapiens
tttttttttttttttcctttttccacgaaattgcacactgtgtgcatgctactgtgctaggtattttttttataggagtgttttgtgaaatccacatctgtttacatacatggttaccttttttttaaatcaccttcagaagattaaaagacatctgaggcttcaatttgtttcattagaaaggcagtaatataatgttttgcattgttaagtccatgcaacatcttaaacatacaacagaggacatatatacatctgttagtggacatataatgcaaatttataaggtatgcttagttagaaaatgtaatctttcaaatgaaccctcaaagactttgatggagtgaacagatkggcgcaatataagcccatttgtatgtaacaaaaaagaagcatgcattcatttttttagagtttttatttgtcagaataaaacgttttgcattttgaagacagaaccattatcaagcattaaaatgtttatagtattaaggttcttagcttccatggaacttgcaaagaaagaaacattcatcttttcattcttaaggaaatacaaagggacattcatttgcttttgtaagcataatgaaataaaaatattgaacatagagtcctgactggtgggggamatacatgtcacarttycgtgtcccagtatattttattctgctgtaacctttgatcaccaccagtttctttcca

SEQ ID NO: 86 - DNA, 974 bp, Homo sapiens
  misc_feature (788)..(800): n is a, c, g, or t
  misc_feature (802)..(804): n is a, c, g, or t
  misc_feature (806)..(806): n is a, c, g, or t
  misc_feature (808)..(808): n is a, c, g, or t
  misc_feature (810)..(810): n is a, c, g, or t
  misc_feature (819)..(821): n is a, c, g, or t
  misc_feature (842)..(842): n is a, c, g, or t
  misc_feature (845)..(845): n is a, c, g, or t
  misc_feature (860)..(860): n is a, c, g, or t
  misc_feature (878)..(878): n is a, c, g, or t
  misc_feature (930)..(930): n is a, c, g, or t
agaacatatatcagacatgaccataaatagcgtatacgagccttcacgcataagaggcagtgcgaacaaactmcggtaaatggcccgcctggctgrccgcycaacgaccccsscccatracgkcaawaatgacgtakgkycscatagdwacsccmwtaggractttccmkkgacstcawwkgktggagtatykwcsgtamactgcccmcykgscrgwacatcaagkgtatcatatgccaagtacgccccckakkgacgtcaakgacgktaaatggcccgcctgscwttatgcchagtacakgacbkdakgggactbycytactkgvcagtacatctacgtattagtcatcgctattaccatggtgatscgkttttgscagtacatcaatgggcgtggatarcggtttgactcacggggatttccaagtctccaccccattgacgtcaatgggagtttgttttggcaccaaaatcaacgggactttccmaaatgtcgtaacaactccgccccattgacgcaaatggkcggtaggcgtgtacggtggkaggtctatataagcmgagctcgtttagtgaaccgtcmgatcgcctggagacgccayccmcscygktttgacctccatwgaaracaccggghcygatccagcctccggactctagcctagkccgcgggacggataacaatttcacacaggaaacagctatgaccattaggcctatttaggtgacactatagaacaagtttgtacwaaaaagcaggctggtaccggtccggaattcccgggatnnnnnnnnnnnnnhnnndnhnknhhrrbdrmnnnvvardvwdrrvhrvvrrrrdnvhnhravhyyrrsdgdynsavbhtdyrgtgrrshrnrsatyryrcmaytgyastysrgybhvdsyrrcrraryrwrayysyryykmmnrvawamamamaaaaaaaaaaawaaaaaaaaataaaaaaaaaaaa

SEQ ID NO: 87 - DNA, 865 bp, Homo sapiens
caccaacacggaatgtaaaggaaagttaaaaagttaaggactcgcaatctacccsgctgktkayymmarcwdywcytstrgcwtcaccagtatwrgaggcacckcskgcscarkracacatgktkwrcggcsgcggtaccctamcsgkgcwdwrstdrywydrtcwvbkrktccbkrddtvgsrascygbmygdmyggctcsmygagggttcdgctgtctctwastttdaascagtgawrttgacctgcccgtgwagargcgggcatwacacagcwagacgagragaccctatggagctkkaatkkakwratgcmwmcagtacctwacvaacccacaggtcctwwactwccvaacctgcattaaaawtttcgkttgggkcgacctcggagcagwacccaacctccgagcagtacatgstaagacttcaccagtcaaagcgaactactayactcaattgatccmatracttgaccaacggaacaagttaccctagggataacagcgcaatcctattctagagtccawatcaacaatagggtttacgacctcgatgttggatcaggacatcccratggtgcarccgswattaaaggttcrtttgttcaacgattaaagtcctacgtgatctgagttcagaccggagtaatccaggtcggtttctatytacttcaaattcctccctgtacgaaaggacaagagaaataaggcctacttcacaaagcgccttcccccgtaaawrawawmawmwmwamwwarwawwawammmamacccacccaagaacagggtttrwwaadaaaaaaaaaaaaaaaaaaaaaaaaaaaaaaaaaaaaaaaaaaaaaaaraaramaaaaaaaaaaaaaaaa

SEQ ID NO: 88 - DNA, 702 bp, Homo sapiens
  misc_feature (631)..(631): n is a, c, g, or t
  misc_feature (690)..(690): n is a, c, g, or t
tttttttttttttttttttttttttttttgcagtaatttaatttaataaaataaaattataagagcaaaaagttacatttctaaagtaccaaaacctgcaacaggctcatggaacagagcctagggatccaggagcataggaggtggtggtgctgggcagggctctgcatcccctttcctcagcacagcaccatcttcaccctcctgggaaagcagcattggagcctacaccgcttgtgcttttctcaccaggggtaagaaatgcaggtatttgcagaggggagtgagtctggaaggtggcagagcacagctagggcaagacttaagggaacttgtgggaagagtaactgtggaacctacctatgcctctcttgaccccaaamtccccaaaaacmcctcactgaggactgtmtacccccggggctcagaataaactgcttacctggaagatgggtgacttcaaggcaamagggaasgctgcctcctggggstacccmaatcccmtgaytgsagagctggtctcgtgatactggaacraaaamacctgcaatttwgcccatttcagamcagmtccctcagaggttacagcarmagggsatggtgggagggtcctatttcacttcacccctcnaggcctttccaccctcaaacttctgcacaggagactcaacaggcacagcctcttcccgntgctttagacgg

SEQ ID NO: 89 - DNA, 717 bp, Homo sapiens
tgtattacacgttcgttgtcaacattatagtaatttctttttatgatgtaatagagtcacgctttgattcacagactcaacttgttacaaattacagtagtattttctgtgttacacatatattgtcagaatttagacattgagaatcattttttaactgagctcaattgttctgatagcactattcaaagatatctttggaaatccctcctcactttttgggtagtctatwacatggttcccacaatcataggtatcagcgtattacccaagatggatatcacagaggaagagtwaaagttattagtaattaaattctgggcatttgaggctgccatatgagtaactctggtagtaggatggaattgatgctgggccaaattatgtgtctagtaactagaagggatactgcttttaaaaagagtatgacgcctgtaatcccagcactttgggaggccgaggcgggcggatcatgaggtcaggagatcaagacaatcctggctaacatggtgaaaccccgtctctactaaaaatacaaaaaaaaaaaaaaaattagctgggcgtggtggcgggcgcctgtagtcccagctactcgggaggctgaggcaggagaatagcgtgaacccgggaggcggagcttgcattgagcagagatcgcgccactgcacttcagcctgggcaacagagcgagactctgtctcaaaaaaaaaaaaaaaa

SEQ ID NO: 90 - DNA, 582 bp, Homo sapiens
ttttttttttttttttttttttttttttttttttggacattttttggttttgtctgttttgttaaaaaaaagaaaaagaagaaaagacatywtkkyywwytkktaggttcctaagtctccttccatccagtcaagccagaagatgcccaggggagtagggaggtgtggggagggaggtgtaggggaaggagatatggagagggaggcagagctacagggagcgagccactggaaggataggttcatcccggtgacttcatggctgtgaccacaaatggggtaggaacaggacccagaagcacactcatccccatagcacgtgggtcttctccattaggcacattcagtaccacatcttgcattacttatcttcccaccctgactgctcagagaaatgtaccccaactccctagccctctgtgcttcaagtctatccttatgaccccctacgcatctcccacaagacagggacatcatacagctgccagccaaccaaagcagatggatgaaaaaaaccagacctaacaggaaggaccatgggaagaagagaaagggagcctgaccagtcatgagcatagagag

SEQ ID NO: 91 - DNA, 582 bp, Homo sapiens; identical to SEQ ID NO: 90

SEQ ID NO: 92 - DNA, 702 bp, Homo sapiens
tttttttttttttttttttttttttttgggccaatwcaatctcactttatgaacatggatgcaaaaattctgaacaaatattaccaaaccagatccagcaatgaaaaataaaagatgatacatcatgatcaagttgggtttattccagcaatttgactattagaattgttattaataaaattcaccttagtaacagatttaaaaggaaaacttagtaaagaaaaaaatagaattaaacatccatataacatatgacatttaaaaagtcttagcatatttttagaaggaaatttttttaatttgaaaaaggacatctagaaaaaaaaaatctagcaagtatagttaaggaggaacatagaaagcagtccctttaagataaggaatgaagcaaagatgtcctccatcacccacttcactcctctttaagattgcatcgggatttgagccagctcagtatagtcaagaaaacataaacaaaagtgttacagggtgggaactgtaacatggtatgctgctgtagaaaacagcatggaggattcctcaaaattttttaaacacaaaaacgagatggagtcttgttctgttgcccaggctggaagtgcaggtggcgcaatgttggtccactaaacctcttgctcctgggttcaagcgattctcctgattcagcctccctggtagctcggattagagggcccaccacat

SEQ ID NO: 93 - DNA, 898 bp, Homo sapiens
gtaatggcccgcctgctgaccgcccaacgaccccgcccakkracgtcaataatgasgwatgktsccatagtaacgccmatagggactttccatkgacgtcaatgggtggagtatwtwcggtaaacygcccacttggcagtacatcaagtgwatcatatgccaagtacgccccykatkgacgtcaatgacggtaaatggcccgcctggcattatgcccagtacatgaccttatgggactttcctacttggcagtacatctacgtattagtcatcgctattaccatggtgatgcggttttggcagtacatcaatgggcgtggatagcggtttgactcacggggatttccaagtctccaccccattgacgtcaatgggagtttgttttggcaccaaaatcaacgggactttccaaaatgtcgtaacaactccgccccattgacgcaaatgggcggtaggcgtgtacggtgggaggtctatataagcagagctcgtttagtgaaccgtcagatcgcctggagacgccatccacgctgttttgacctccatagaagacaccgggaccgatccagcctccggactctagcctaggccgcgggacggataacaatttcacacaggaaacagctatgaccattaggcctatttaggtgacactatagaacaagtttgtacaaaaaagcaggctggtaccggtccggaattcccgggatrvaaamddwwmaawmwmwvwawaraarawrawrwmcgccagtatgttgtaagaaagcccttaaataaagaaggtaagaaacctaggaccaaagcacccaagattcagcgtcttgttactccacgtgtcctgcagcacaaacggcggcgtattgctctgaagaagcagcgtaccaaaaaaaaaaaaaaa

SEQ ID NO: 94 - DNA, 712 bp, Homo sapiens
aaatgccagtacgcccctatgacgtcaaggacggtaatggcccgcctgtcattatgcccagtacatgacttatgggactttctacttggcagtacatctacgtattagtcatcgctattaccatgktgatscgsttktggcagtacatcaatgggcgtggatagcggtttgactcacggggatttccaagtctccaccccattgacgtcaatgggagttttgttttggcaccaraatcaacgggactttccaaaatgtcgtaacaactccgccccattgacgcaaatggtgcggtaggcgtgtacggtgggaggtcttatataagcagagctcgtttagtgaaccgtcagatcgcctggagacgccatccacgctgttttgacctccatagaagacaccgggaccgatccagcctccggactctagcctaggccgcgggacggataacaatttcacacaggaaacagctatgaccattaggcctatttaggtgacactatagaacaagtttgtacaaaaaagcaggctggtaccggtccggaattcccgggatcgaggcccagcccgtggacggtgtgaggccggtagcggcccccggcgcgccgggcccgggtcttcccggagtcgggttgcttgggaatgcagcccaaagcgggtggtaaactccatctaaggctaaataccggcacgagaccgatagtcaacaagtacc

SEQ ID NO: 95 - DNA, 760 bp, Homo sapiens
aataggacttccatgacgtcaaggtggagtatttacggtaamctgcscacttgscagkactcaagtgtatcaatatgscmagtacgccccctatkgacgtcaakracggtaaawggcccgcckggcattatgcccagtacatgaccttatgggactttcctacttggcagtacatctacgtattagtcatcgctattaccatggtgatgcggttttggcagtacatcaatgggcgtggatagcggtttgactcacggggatttccaagtctccaccccattgacgtcaatgggagtttgttttggcaccaaaatcaacgggactttccaaaatgtcgtaacaactccgccccattgacgcaaatgggcggtaggcgtgtacggtgggaggtctatataagcagagctcgtttagtgaaccgtcagatcgcctggagacgccatccacgctgttttgacctccatagaagacaccgggaccgatccagcctccggactctagcctaggccgcgggacggataacaatttcacacaggaaacagctatgaccattaggcctatttaggtgacactatagaacaagtttgtacaaaaaagcaggctggtaccggtccggaattcccgggatggaaatagagaagtaacttaaaggtcacactgacagaatttctggttctgagcgtcaactctccagctgtgatggcggaactgactgcttgctgcctttaattgtcttgctctctatgggaaaaaaaaaaaa

SEQ ID NO: 96 - DNA, 704 bp, Homo sapiens
tttttttttttttttttttttccatgggctcttttccccctctggaaaccttcctatacccctctgcctatggcacttgcagtttcttttgcatttatttaagcagagaaggactaggctgatgctctgatggtaattattaagctgattattcatcttaggtgaagtatttttgactgagaagttgctgtgtgctcaatgctgtgatgtatttaatcaatagcttctgggactagcctcacagctggagatagaagggatgtttctgctatctttagtgtaaagtatttctaaaactctagggcttcaggcacttgagtcatgctctaggaaaggatttctgtgatccagattgttgagatactactttccaacactttaaaaaagttatgatgatacatattctaatgttcttaatgttttgagggacttaggctttaccttcctgcccgcaatgggaagaaattctgatatgcatttaagatgaaatggagtccttgaggacccactgtgactggttacactagagaggtgagcttctggaggtagtgccaggttgtgtgcccagsgamaggggccatagaataagttgttcaacctgtctatcatctggaccatttgataaagtccagsraamcattatttaasggktgggamcctatgatggtmaggtctggaggactcgyttagcaagattctcccat

SEQ ID NO: 97 - DNA, 736 bp, Homo sapiens
ttattgacgtcaatgacgggtaaaatggcccgcctggcattatgcccagtacatgaccttatgggactttcctactttggcagtacatctacgtaktagtcatcgctattaccatggtgatgcggttttggcagtacatcaatgggcgtggatagcggtttgactcacggggatttccaagtctccaccccattgacgtcaatgggagtttgttttggcaccawaatcwacgggactttccgaaaatgtcgtgaacaactccgccccattgacgcaaatggkcggtaggcgtgtacggtgggaggtctatataatgcagagtctcgtttagtgaaccgtcagatcgcctggagacgccatccacgctgttttgacctccatagaagacaccgggaccgatccagcctccggactctagcctaggccgcgggacggataacaatttcacacaggaaacagctatgaccattaggcctatttaggtgacactatagaacaagtttgtacaaaaaagcaggctggtaccggtccggaattcccgggatctctgtaaaataatctgggacgacaggttcatctctatttaaaggaacgaaatgtgagcaaagtggttagtggaaaacttaaaaaaaaaaaagtaaaagtttttttctttacatttttgttggttccagctggcaacacgtttgcaaaggttttatttaaccaaatcttaatgttgaaaaaaaaaaaaaaa

SEQ ID NO: 98 - DNA, 1145 bp, Homo sapiens
  misc_feature (1113)..(1113): n is a, c, g, or t
tgccaaccgcttaagagagaaagtcttagatagaacatggatcagggagatttattttttcagagacaggggtctcactctgttgcccagctggagtgcagcagtgccctcatagcccactgtaacctcaaacttctgggctcacatggtcctcctgccttggcctacaaaagtgctgggattacaggcatgagccactgtgcgtggcctccggatttttttttttcttttaaagggagacttgagcttgtttaaatgctgctggatagggaaatgggccactttatatactgtaagagaatggataaattggtagactcttttggagggtaatttggtagaatctgtcaaacttaaaatatgtaattccattattaggtaactattctattgaaatacttgcatacatacattaagatatttactcaaggcaaggtgcggtggctcacgcctgtaatcccagcactttgggaggccragstggkyggatcaygaggtcaggagatcgagaccatcctggctaacarrgtgaaacyccgtctctactagaaatacmwwwaattagtccrggykyggtggcgggcgcctrtagtcccagctactygggaggctgaggcaggagaatggcgtgaacccgggargyggagcttgcagtgagccgagawygygccactgcagtccgcagtccagcctgrgtgacasagcgagactctgtctcaaaaaaaaaaaaaaaaaaaaaaaawrmmaarmwmacccagaaataaccccgtgcatatatggtcaacagatctttgacaaggccatcaaggatatacaatgtagattcttttattcctttactttcttaatagacttgctttcactgtactgtaaaaaaaaaaaaggcaccaagtaaggaagggaactcttttccaatggaatggtgttggggaaagtgcatgaaaaagaatgaaattgcacacttgttttacatcatatacagaaaattagctcaaagtggattaaagatttaaatgtaatatctgaaaccatgtaaatcctggaagtaaacatagggaaaaatctcctcgacattggtcataattggcaatattttttttgatgtaacaccanagcacaggcaacaaagtgaaaaaaaaaaaaaa

SEQ ID NO: 99 - DNA, 847 bp, Homo sapiens
gcagggagtaaaagcctgccgggcccggggaggtcatccgtagcgaatattcccccttctcagcgtgcgtcctgatgaggatgtgaatcccaagcgtgttatatcaacgacgtctgtgttcttaatatgtctctatccagctcggtaaagaaatagcgtcttaacacacttcctcacctagtctgggagcaacactcgtagcgagcaacatgttaaacatgtggtgttctccccgggtgtgcgcaacacctctacagccgacgaggcgcaggaagcccacgaagatcacatattctcgcgggtgctacaccccagcggggtgggttctccccccaaccatctttcgagatcctcggagcagcgttctctcttctccgcgtgttgtacatctagagtgtgttctgtgaagtcttctttgatctcgagatcccatcacttgtgccggtcccctgtagaaktyywcmrsgragwaccctrwatttwatggakwccstkkycggagaaagcygctgccakgaataccygcywaaawgccaccgggaggagtgagatgtggatgttgcttttgcacytacgggggcatctgagtccagcyccccccmagatgagctgcagccccccagagagagctctgcacgtcaccmagtaaccaggccccagcctccaggcccccmactccgcccagcctctccccgctctggatcctgcactctaacactcgactctgctgctcatgggaagaacagaattgctcctgcatgcaactaattccaataaaactgtcttgtgarmwraaaaaaaaaaaaaaaaaaaaaaaaaaaaaaaaaaaaaaaaaaaaaaaaaaaaa

SEQ ID NO: 100 - DNA, 726 bp, Homo sapiens
tttttttttttttttttattttttttatgcactagcatgtcaattttattagtatggataagtacatgcataattaagacatgcccaattatctagttaaatgttgataaattctaaaaatgtagatatttagcattattgaagaccaaatatttttgttagtttttttacattttggtgagttggagtatctaaaggttctatcttgattctatagaaaatttgagagtttaatgaattgcctcttcaagaggggaaatatatcacatattgttttagtgtagaaaaaggaaaaattgtcagtaaaacaatttattacctcaatacagggaywagaagctatggaaatgaaatctatatttwtktcttcatttgcttacattgaaatccagttttaaacmaaaaaaatccttttgamtggtycagytgkymmgaaattctataagcactttgtcagctaaatgtataggcttctcaattcaaaatgaatgctgaactttgagaatcaaagaaaatgcccttaaatatgcttgaattctgaacactgtgacatatgatggctcccaattccctgtcttaggttatgcttgaaaccaagaagtcctttgaaaagtggtgtctctgcttctggtcctaacagacctttcttyagagtactttgtgcaatattttagacatccatcattctgtcagcaaatgatcgtcacaggaagttaggcacacgtt

SEQ ID NO: 101 - DNA, 760 bp, Homo sapiens
tttttttttttttttwwwkttwwwyttttaaagttaaaagtgaaatttattacaatacaataaatgcaagtgtcattattaaaaatgccggttaaaattataaagtatctaaataatttttctaatataaatattggaaatgacaactttaacaattctatatgtacacaggacactgaaaacataaaatcatgaacaaggccaaaaaataacgttgcacattaaccctttagttattactttctattttccagtcccagcatcatacctgctaattactcagatcacaagcctcaaggattaagtgttttgaatgtatttcagtttcatactttaacaatgcttaaagactattggttgtattctgatcaaatggttctccttcccatatttccctttctcaatagatcttagacaaaaaggtgagcagggaaaactgtgattacaggatccaacatgacaggtatacccaatgattcatttaagggtggcataaagttatatagaaaagacctacaagacggaagacaagtacatcaacatgtagtgaaattaagcagttcacccactgcgtgcttacatggctcctatatctcttcgggaagaagccagcagccgtagagaagtcagggcaaacccagaactgttgaggagtaggggtgggggggcagagggraaggagctggggagaagtgccagatcataaaggaatgtcaacagagttactatctgttctccccctctgttaacgcagggctgg

SEQ ID NO: 102 - DNA, 664 bp, Homo sapiens
aggcattccgtaggggacctgctattctctgaggggacccctattcttcgagggacctgctattcttcgaggcagtggccccgtttgctgatggtcaacactctggccctgtctgccccaagtccctgtggagaagtgtgaaggacgggtgcctttaacccacactttcagggagcccttcagcacaggtcctgcctgttcccctggtgcttctcaccctggaccctcagagctacagccagggatagagcagatgagcagtgagctggtgttccaccctctggggcaggaggggcttgggcttccctttgaccctcttccttcctttcccagatcttcaataatttgttgtgatgtaacagccataagagctgtaagaggaactgtgggctttgggagctttcttgggttgtaaagaggggtggggggaggggatgcatgcaggggtatgaaggccagccccaggtctcccagaggctcgggagggaacccytttggaaaacatgtgttattgttgcattactgtgttgtgaagataagaagctgctctgtatggctaaagctttytytcctccaataaaaatataaagggtgtgtaaaaaaaaaaaaaaaaaaaaaaaaaaaaaaaaaaaaaaaaaaaaaaaaaaaaaaaaaaaaaaaaaaa

SEQ ID NO: 103 - DNA, 697 bp, Homo sapiens
tttttttttttttttttttttttttwkwtttttaaaaactattttaatacaagattaatagcaattttctatccaaatcagaaatgaaaaatcttaacccaaataatattcatttgacagtcacataaaattttagatttgattggtgcacacatttatcctgcatatatattatgtatatgcacagagagacctcactattatgccattgttaggggtctttttttggaagtacctcattacaaggcaatgtcaaaggttccagtaactactcaactttgaatgaagttcaaaatgtccccatgctaagctgagtctgtgccatagcaaaccatgatatagcaagtctccagaatgtgtacaaatcaatactctgtttgtataagttggtctaaaactaaacactggctaatgtctccaacaaggaggaacacattacaaatttataagttatggtttcctttactcttctgttggcaaagctaaattgtgtttttaaataaaaatcaggtctgttcgttagtaagtaaatggaacatgtgtttaaatttctgcaagtttyaggtaaaacttgcatttcctaatgcgtctaggtttaatcaaatcatttgataattagctttgcaaaaagcaagtaatmamagaatcacatctcaggaatatgtcaaggtcttttcctccttagggactttagttc

SEQ ID NO: 104 - DNA, 727 bp, Homo sapiens
ttttttttttttttttttttttttttttttttttcgggtgaaattacttttattgatggtgagcgcaagcaggtgtgagtgactgcacctctttcagaggacacaggactgggcttaaggaagggagggccagagcgcccgcctkggtggatgtaggattcgctccttattagggcgtgagtgctacattctgaaaggatttattttgggacaaggcacaagcacaggggaggcaggcaacaccagccctcaggctacactctccatttggagcagagacttcttcggcagccccaggtcatcccgggatctwcctcggtgtcctgcggaggctctggctccagcgtgggctccagcgcaggctgggcttccggctgggcttctgcgctccggccaggcccaaggcgaggcggcttgaccggggtgggcggtggcgctgcagggcctttccggcccgaaagggcccttcggaggctctgtaccttctgcaatccggtgcgccgcagccgctgggccctggactccaccggctcctcgtccgagctctctccaacttcggcctccagctgctctgggcccagctcggactggtccgccgggcccaagggctctggtgccttctggaaagcgctggctgggacttcaccctcctccttgaagagcagaacgtggagcttcccgcgcgccacagcagtccgtggtgggctccagccgtgccctgtgctgc

SEQ ID NO: 105 - DNA, 727 bp, Homo sapiens; identical to SEQ ID NO: 104

SEQ ID NO: 106 - DNA, 1457 bp, Homo sapiens
  misc_feature (394)..(394): n is a, c, g, or t
  misc_feature (404)..(404): n is a, c, g, or t
ccgccctacgaccccgcccattgacgtcaataatgacgtatgttcccatagtaacgcccatagggactttccattgacgtcaatgggtggagtatttacggtaaactgcccacttggcagtacatcaagtgtatcatatgccaagtacgccccctattgacgtcaatcgacggtaaatggcccgcctggcattatgcccagtacatgaccttatgggactttcctacttggcagtacatctacgtattagtcatcgctattaccatkgtmgatgcggttttgscakkacatcaatgggcgtkgawarcgktttgactcaccggggatttccaagtctccaccccmwtgacgtcaatgkgagtttgttttgkcaccaaatcwacgggmctttccnaratgtcgtnacdactccgccccattgacgcwwatggkcggtaggcgtgtwckgtkggaggtctatatawgcagagctcgtttagtgaaccgtcagrtcgsctggagacgccatccacgctgttttgacctccatagragacaccgggwccgatccagcctccggactctagcctagkccgcgggacggataacdatttcacacaggaaacagctatgaccattaggcctatttaggtgacactatagaacaagtttgtacawaaaagcaggctggtaccggtccggaattcccgggatccvaghrdhcgyggwaatthmrrctccmatascsyawawwwaarwwdmwrmhdttwrwawgctygtakktggatcttgggagcgggcgggcggtccgcckcgaggmgagccaccgcccgtccccgccccttgcctctcggcgccccctcgatgctcttagctgagtgtcccgcggggcccgaagcgtttactttkwmwwmwttwkrktsttcaargymggcccgagccgcctggataccgcagctaggaataatggaataggaccgcggttctattttgttggttttcggaactgaggccatgattaagagggacggccgggggcattcgtattgcgccgctagaggtgaaattcttggaccggcgcaagacggaccagagcgaaagcatttgccaagaatgttttcattaatcaagaacgaaagtcggaggttcgaagacgatcagataccgtcgtagttccgaccataaacgatgccgaccggcgatgcggcggcgttattcccatgacccgccgggcagcttccgggaaaccaagtctttgggttccggggggagtatggttgcagagctgaaacttaaaggaattgacggaagcgcactcctcccctgcccaagcctactgcctcccgctgccgccagtaccccctccagccccacacctgggcctccccctgccactcccctcccttgctcccctctgtccccagggatcaacagaagcagccgtgggcaaaatacgatttcatttaacaaaaaaaaaa

SEQ ID NO: 107 - DNA, 1069 bp, Homo sapiens
  misc_feature (791)..(792): n is a, c, g, or t
  misc_feature (871)..(871): n is a, c, g, or t
  misc_feature (876)..(876): n is a, c, g, or t
cggtaattgcccgcctgctgacccccccaacgaccccgcccattgacgtcaataatgacgtatgttcccatagtaacgccaatagggactttccattgacgtcaatgggtggagtatttacggtaaactgcccacttgcagtacatcaagtgtatcatatgccaagtacgccccctattgacgtcaatgacggtaawtkgcccgcstggcattatgcccagkacakvmcstwrkgggactttcbtactkgcagwayatctacgtaktagtcatcgctatwaccatggtgatscsgtttygscagwacatcaatgggcgtggatassksttwgmctcayggggaytyscaastckccaccccatkgacgtcaatgggagtttgttttggcaccaaaatcwacgggactttccmaaatgtcgtaacaactccgccccattgacgcaaatggbcggtaggcgtgtacggtgggaggtctatataagcagagctcgtttagtgmaccgtcagatcgcctggagacgccatccacgctgttttgacctccatagaagacaccgggaccgatccagcctccggactctagcctaggccgcgggacggataacaatttcacacaggaaacagctatgaccattaggcctatttaggtgacactatagaacaagtttgtacamaaaagcaggctggtaccggtccggaattcccgggatvkhgrrbyraayvagycwgrbcmacawrrhvrdamhyyrtcycyrywhwarwwwbhwdmwattagyyrggyrtkkyrrynnrhdycygtrrtccyrbcwwytyrggagdcbgakrydgrasrmyhdybwgadyhyrggarvyvgrgsytdyartrrgchnwkaynryrchaytgcaytcbrdhytgkryvvcaradhvavamhcyrwmwmaawdaamraaaaammmmaawmwwrwmwraarararrwaaaaawwaaarwwarawmwmtaatcccatgagttatttcctattctgtggtttttccagcttgtcaaggagaaggaatgggaccttctaatctctcatgaatgtctttcct

SEQ ID NO: 108 - DNA, 744 bp, Homo sapiens
  misc_feature (46)..(46): n is a, c, g, or t
acagcctagggacttctacttgcagtacattacgtattagtcatcntattamcakgtkatcggttttgcagtacatcawkggcgtggawwcggttkactcacgggatttccaagtctccaccccattgacgtcaatgggagttttgttttggcaccaaaatcaacgggactttccaaaatgtcgtaacaactccgccccattgacgcaaatgggcggtaggcgtgtacggtgggaggtctatataagcagagctcgtttagtgaaccgtcagatcgcctggagacgccatccacgctgttttgacctccatagaagacaccgggaccgatccagcctccggactctagcctaggccgcgggacggataacaatttcacacaggaaacagctatgaccattaggcctatttaggtgacactatagaacaagtttgtacaaaaaagcaggctggtaccggtccggaattcccgggatctttttccaaatgatcctagtaattgcctagaaatatctttctcttacctgttatttatcaatttttcccagtatttttatacggaaaaaattgtattgaaaacacttagtatgcagttgataagaggaatttggtataattatggtgggtgattattttttatactgtatgtgccmaagctttactactgtggaaagacaactgttttaataaaagatttacattccacaaaaaaaaaaaaaaaaaaaaaaaaaaaaaaaaaaaaaaa

SEQ ID NO: 109 - DNA, 739 bp, Homo sapiens
  misc_feature (652)..(652): n is a, c, g, or t
tttttttttttttttttttttcacgcttagaaatgtaatcgggggatctagaaattctacacaatgagaagctcaaaaacagccccaaagctgccaacaaccagagccgactggggcccaccccagcccagcccggcccggcccacccagggctaagttgggaccccccagtccctttccaggacgaatgggcccaactatgccgcctgcagcctggcccgcatcccaggccggaatcgttcatagaaaaccagccccggctcagggcgcagcctcagccaggcgggccaggccctcacgcagctcactcagcatcaaacagcctgacgtccagcagctgcgctgcccggcccacctcagcccgcgcccgctcccgctctgcccgtgcctcctccaggctgcgctccatcgcccgcagcatggtgctccaactccgacattgcgggtctccaggtcctgcaccttctgctgagtctcctcacagcatcgagcagcctccagggcctcgacggggcccccacagatctgactctatcagggtctgaatctccatgrtccttggwwtgcaccagagacttccagctgttccagcgamtggmcctggcccagcccctccttctcacmggtgggggtcacctctgaagctgctgancctccagctcagccaccgtgccgcagccgtcggctctgcacgctgagcctccagctgtgctccactggctgggggcgtggctctcgc

SEQ ID NO: 110 - DNA, 739 bp, Homo sapiens; identical to SEQ ID NO: 109
  misc_feature (652)..(652): n is a, c, g, or t

SEQ ID NO: 111 - DNA, 736 bp, Homo sapiens
ttttttttttttttttttttaaagatcataatgctatcatttattgaagaaagaaagcaaaaaaaactaacaattgtgatgggggaggagagacagcttggcaacattccttttaaagttaagttagcataaagaaaacaatatttagtaaatgaaatagattttcaaggtaggaaaagtagtactcaagaatgtatttttggatacaaaaattcagttacacaatcagtagcattcaaaattagttatgagtatttatacaattacaaaaatggattcatgttttaacaaagtattttaaaagctcaaacattttaaaacaggcacaatattctaaaggcatatgcattcaccatgggcttttgaatgtcctcactcccaacttcacaatcaaaatctacagaagcggcaaaagatcagagttcagagggctattttttttttccctttccttacttaaggttgcaaacacattgacagaggcaaaataaacacgtttcatagcagaaagaccaaaaaattgaatgtaaaccatagctctcccttgggagattacacaaatacaaggttcatctgtacttagaacaaggctcataacttcttgtagcatggacattcaacaggcacagagcaacaacattcacccaaataccagctggcattttgtccttaaggatgcctcacaggkatattatgtccaggtagctagtccatttatatcggggagcagttgtct

SEQ ID NO: 112 - DNA, 704 bp, Homo sapiens
ggcaagtacatcaatgggccgtggattacggtttgactcacggggatttccaaagtctccaccccattgacgtcaatgggatttgtttttggcaccaaaatcaacgggactttccaaaatgtcgtaacaactccgccccattgacgcaaatgggcggtaggcgtgtacggtgggaggtctatataagcagagctcgtttagtgaaccgtcagatcgcctggagacgccatccacgctgttttgacctccatagaagacaccgggaccgatccagcctccggactctagcctaggccgcgggacggataacaatttcacacaggaaacagctatgaccattaggcctatttaggtgacactatagaacaagtttgtacaaaaaagcaggctggtaccggtccggaattcccgggatcgcgagcggcccatagccaccatcaccctccttaacctctacttctacctacgcctaatctactccacctcaatcacactactccccatatctaacaacgtaaaaataaaatgacagtttgaacatacaaaacccaccccattcctccccacactcatcgcccttaccacgctactcctacctatctccccttttatactaataatcttawaaaaaaaaaaaaaaaaaaaaaaaaaaaaaaaaamaaaaaaaaaaaaagaagtaaaaagaaataaaaaaaaaaaaaaaa

SEQ ID NO: 113 - DNA, 940 bp, Homo sapiens
tgggcggaatacattcacacagtaacagctatgaccattaggcctatttaggtgacacttatagaacaaskkgtrysarwwwtgcaggcyygkwccrgtcsggarwtmcmgssatccaccttcagatgtgtctacgtgcgctctggccattcaactcggaaactataagtaattctcaagaaagccctcatgtttgtgataaccgtggcgaaagtcttgttaatgtcattgctagagaaaatawaktagaagctagatagctggraacctgarctgcaagtgtggatgttttacccacatgacttagttagtgcataaagccaaatttccagtttaagtaattgcctacaataaaaagaaattttgcctgccattttcagaatcmtcttktgaagctttctgttgatgttaactgagctactagagatattcttatttcactaaatgtmamatttggagtaaatatatatgtcmatatttagtaaagcttttctkttttmatttccaggamamwatwaawagagtatgagtcttctgtaattcmttgagcagttagctcatttgagataaagtcwaatgccraacactagctctgtattaatccccatcattactggtaaagcctcatttgaatgtgtgaattcmatacaggctatgtaaaatttttactaatgtcattattttgaaaaaataacatttaaaaatacattcaaaawwamwawwrwawamaarmwwaawwrwtaatattccctaaacacaattttatgaagggagaagacattggtttgttgacaataacagtacatcttttcaagttctcagctatttcttctacctctccctatcttacatttgagtatggtaacttatgtcatctatgttgaatgtaagcttataaagcacaagcatacatttcctgactggtctagagaactgatgt

SEQ ID NO: 114 - DNA, 681 bp, Homo sapiens
ttttttttttttttttttttttttttttgattccaaaatagagatttatttattaaggattatttagtttctgcataaaaatctccaattgtcctcattgggttttttcttttaaaacacacatcaactcttttggggttgctttgtttgccccagcactttaaaaaatacagctctttttagcgccaggaagaacagttaaggttaaggcagtgaggcgttttcttggatcttagcagctgaagggttcatctctccccgtcaagagaatacacacggtaggtagtttcttaggttggaaaatctgtccctgaaggaaactaattctgcagaagaatgcaaacggagtcatctatggtcaattgtttgtgccctatagctttgaaagaaacgcctcttggtcatcaagggcttgctggttggtttcagctgtawaacaacaacaacaacaacaaaaaaacaaaccagaaaaaagaaaacaaacwaaaaaatctgtctagcgagacagaaagagcagggtttacaatagtgctgtgaggctgggctgtgcaaaccacatgagaatacacaccagtttgctttttaaaaaatcccacataggggccctrcataattttaaatcaaactctttatagtccttaaataacatacagcgagagcctcataaaggtccgtgctttt

SEQ ID NO: 115 - DNA, 683 bp, Homo sapiens
tttttttttttttttttttttwttctcatgggtcactgaggctttttattttgagcacaaaaccaccggggatctagcctgtggccaccccggagatgacacgaggctcacatgactctagacacttggtggaaagtgaggcgagaaaaacaatgacttgggccaattacacgactgcaaagctagagctgccaacagggctccagggagcttggcttctgtagaagttctaaggaagcggtacgaactccacggcggtggggcgctaactagcagggacccctgcaagtgttggtcgggggcctcgagctgcctgagctgacacgaggggaggggtctgtgtagccaacaggtgacccgaagggcttgcctgccccacaagcttacttggccaaggggttttctgaagttccctgccggcaaacttagcctttgctgccccagcttcctcttcaattctgagagagcttggttgttacttggccaagcgctcaggatcgggcaaggggcaccagtcttgatctgcccagtgcacaggcccacaascagggtcagcgatgaaggtatcttcaggtctccccccgagacgatgagaccaccatgasgcccmaamcattggcctgggccagcttgcrcgsctgaagagactcggktcacggagccaatctaggttgactttgacg

SEQ ID NO: 116 - DNA, 1001 bp, Homo sapiens
  misc_feature (55)..(55): n is a, c, g, or t
aatgacgtaggttcccatagtaaccccaatagggactttccattgacgtcaatgnggtggagtatttacggtaactgcccacttggcagtacatcaagtgtatcatatgccaagtacgccccctattgacgtcaatgacggtaaatggcccgcctggcattatgcccagtacatgaccttatgggactttcctacttggcagtacatctacgtattagtcatcgctattaccatggtgatgcgttttggcagkacatcaatgggcgtggatagcggtttgactcacggggatttccaagtctscaccccattgacgtcaatgggagtttgttttggcaccaaaatcaacgggactttccaaatgtcgtaacaactccgccccattgacgcaaatgggcggtaggcgtgtacggtgggaggtctatataagcagagctcgtttagtgaaccgtcagatcgcctggagacgccatccacgctgttttgacctccatagaagacaccgggaccgatccagcctccggactctagcctaggccgcgggacggataacaatttcacacaggaaacagctatgaccattaggcctatttaggtgacactatagaacaagtttgtacaaaaaagcaggctggtaccggtccggaattcccgggatkgyamaktkmkcarrtmwggmtwkcmsarrysrwrwmaaramarawrggtaggccaggcacagtggctcacacctataatcccagcaatttggaaggccaaggcaggcagatcagttgaagtcaagagctcgagaccagcctggccagcatagcgaaaccccgtctctactaaaactacaaaaattagccaggcatggtggtgcatgcctacagtcctagctacttgggaggctgaggcaccagaattgcttgaactggggaggcagagtgagccaagatggtgctactgcactccagcctgggtgacagtgagactatctccaaaaaaaaaaaaaaaaaaaa

SEQ ID NO: 117 - DNA, 1031 bp, Homo sapiens
  misc_feature (61)..(61): n is a, c, g, or t
  misc_feature (181)..(181): n is a, c, g, or t
  misc_feature (778)..(785): n is a, c, g, or t
  misc_feature (788)..(788): n is a, c, g, or t
  misc_feature (791)..(792): n is a, c, g, or t
  misc_feature (795)..(797): n is a, c, g, or t
  misc_feature (802)..(802): n is a, c, g, or t
agcgctyagcmtahaaatdrvtdtwmgvsscyttcacgcataradgcadgwckbrsawamndryrkkaadkgcccgsykgbkkdccssycmdsgrvcccsgscsadbrmsgtcrwwaawracgkakgktsccatagkaacscchhwagdrvctkbcmakkgacgtcratgsgbggagkatntvcggkrdamkgsccvcbtgscagdamatcmagtgtatcawatgcchagwacgccccckatkracgtcaatgacggtraatggcccgcctggcattatgccmagkacatgaccttatgkgactttcctacttggcagtacatctacgtattagtcatcgcwattaccatggtgatgcggttttggcagwacatcaatgggcgtggatagcggtttgactcacggggatttccaagtctccaccccattgacgtcaatgggagtttgttttggcaccmaaatcracgggactttycmaaatgtcgtwacaactccgccccattgacgcaaatggkcggtaggcgtgtacggtgggaggtctatataagcagagctcgtttagtgaaccgtcagatcgcctggagacgccatccacgctgttttgacctccatagaagacaccgggaccgatccagcctccggactctagcctaggccgcgggacggataacaatttcacacaggaaacagctatgaccattaggcctatttaggtgacactatagaacaagtttgtacaaaaaagcaggctggtaccggtccggaattcccgggatvnnnnnnnnvhnddnndvnnndhwvnvdhrrvmhwwrmwarhawhvvmrwwmmagtgagttcaccctytaaatcaccacgatcaaaagggacaagcatcaagcacgcagcaatgcagctcaaaacgcttagcctagccacacccccacgggaaamarmarwrawwaammwwwarmaawaaamraaarwwwaamwaarmwawactaaccccagggttggtcaatttcgtgccagccaccgaaaaaaaaaaaaaaaa

SEQ ID NO: 118 - DNA, 934 bp, Homo sapiens
gtgacgtgagccttatgggagcgtttcctactgggcagtagtatttacgtggttagtcatcgcgtagtagccatggtgatcggttttggcagtacagtcatgggcgtggatagcggtttgactcgacggggatttccgagtctccaccccattgacgtcatatgggagtttgttttggcaccgagagatcgtacgggactttcccagatgtcgtgaccactgycgccccsmkttgamcgccwaatgggtcggtaggcgtgtacgktgggagggtctatataagcagagctcgtttagtgaaccgtcagatcgcctggagacgccatccacgctgttttgacctccatagaagacaccgggaccgatccagcctccggactctagcctaggccgcgggacggataacaatttcacacaggaaacagctatgaccattaggcctatttaggtgacactatagaacaagtttgtacaaaaaagcaggctggtaccggtccggaattcccgggatrwaawwrwwwwwrrwrrawrwrmmaamaamwwrmttgtccatcacagagctgcacacagtaatgaaatactaatattttcagttcaaccaaaatctcttgtacggctaagcttagaagcagtcatttgctttaaagaaatgttagccaactcatggaactgccttccaaaacacttacttcacagtgttaatcagaggtttggtagtaacaacacttctggatcttaaggcttcataaataatgcctatgatcaccttgcatggacagcaatcctgtaaacatcacagagtggcatcatttgtataattatatgcattgttgtagtttgcacctgttggttttaatgtgcatgtgaatggcctagagaacctatttttgtgtctaaagtttacaataaatgtatttaacaccaaaaaaaaaaa

SEQ ID NO: 119 - DNA, 682 bp, Homo sapiens
ttttttttttttttttttttataatacattattattttaatatattgcttgttaatagctttaaaaatactacattctatggtagattattggttatataaaaggtagaaatgtcataagtattataatttccagtctgtaaaacctgtcagttgagtgctttgaaggtactcaatatactcaatagctagttaccctaatttagtttctccacacggtggaggctttaacactctgtgcttctcaggttgctgggtagtttgatgttttatcttatgattcttttatgctgtgatcctgtactttgaatggtaagaaaaagttgcattctttttcactgcttcctttctctattttgttcacacttttggcattgattagatagttggcttctattagggggacttccacacactctcaaattattgtctttattaccaaaatgttgttaaatataccaaaatcttgttaaaatactattaattagtcattcattgaattaatattcaatgaattaatctaacattaaatgaattcattgaatattcaattaatattgaacttaatatttggaaaactttaamwtttcgtttgatattagaggaagtagatttgacctctagcttagggttagctgattmaacttattgagaaggggattacatkgtaatcttaaaaatta

SEQ ID NO: 120 - DNA, 781 bp, Homo sapiens
ttttttttttttttttttttcagaagaaacgttttattatttttttgtcgaagaaaaaaagccatataaatattagagtataaaacttgcgtgagacacaggaagagggtggggtgggagctacgtgactatgcgaagagaagcgcttataggagaagtcagtacgggggagggggtcgccttagcgcgtggacacagcacaaaacacaacacgggccgccgcgggcagatcaaggacagacggctgcgcggagcccgccgcccgctgcccacccgccatcacgtaaaagcacaccgcactacactactggctattctacaccagccgaaagagggagggggcgctacactactgtaagggcaggtctggggttctctggcagccccgctggatggccggggacccaggggcagaagggggtgggagaagaaggtctatgcacaaggaggcactggggaactttaaccaggctatggccactagggggcgcactggggacctggtgcagtggccttcacggaagagaaacggcacctggcaaggtgaaggactgaggcttcaggagggcaggkgccctgttgaagaagccccatcctgrgctgagactttctgttcatttggtccctgccctagctccctgactccccaacccagggactaagaatggscttgrctggcccaccttctgctggggctcsgtgaccytycacagtggcctctggagtcccagcaccaagaggcctctgactctcagggaccgtctaacctgttcgatctttg

SEQ ID NO: 121 - DNA, 1932 bp, Homo sapiens
gccaaggaccccgcccaggacgtcaatatgacgtaggttcccatagaacgccaatagggactttccatggacgtcaatgggtggagtatttacggtaaactgcccacttggcagtacatcaagtgtatcatatgccaagtacgccccctattgacgtcaatgacggtaaatggcccgcctggcattatgcccagtacatgaccttatgggactttcctacttggcagtacatctacgtattagtcatcgctattaccatggtgatgcggttttggcagtacatcaatgggcgtggatagcggtttgactcacggggatttccaagtctccaccccattgacgtcaatgggagtttgttttggcaccaaaatcaacgggactttcccaaaartgtcgtaacaaactccgccccaattgracgccaaaatgggcggttaagggcgttgttaacgggtggggaggtctatataagcagagctcgtttagtgaaccgtcagatcgcctggagacgccatccacgctgttttgacctccatagaagacaccgggaccgatccagcctccggactctagcctaggccgcgggacggataacaatttcacacaggaaacagctatgaccattaggcctatttaggtgacactatagaacaagtttgtacaaaaaagcaggctggtaccggtccggaattcccgggatcrmrarmrrmmmctgaaaggactgaataatttggctaagtkgggatkraktttcaacagcatctctgctgttgacaatggctctctggccaacacgcctcattctgagggagctttcacttgggacaacaacaagcttaccagagtacctggtggkctggcagagcataagtacatscaggtygtctaccktcatmacvacaatatctctgtagktwggatcaagtgacttctgcccacstggacacaacaccaaaaaggcttcttattcgggtgtgagtcttttcagcaacccggtccagtactgggagatacagccatccaccttcagatgtgtctacgtgcgctctgccattcaactcggaaactataagtaattctcaagaaagccctcatttttataacctggcaaaatcttgttaatgtcattgctaaaaaawaaawaaaagctagatactggaaacctaactgcaatgtggatgttttacccacatgacttattatgcataaagccaaatttccagtttaagtaattgcctacaataaaaagaaattttgcctsccawwwwmaraawmawmwwttgaasctttctgktgatgttaactgagctactagagatattcttatktcactaaatgtmaaatttggagtaaatatatatgtcmatatttagtaaagcttttcttttttaatttcccrggawawawtawawagagtatgagtcttctgtaawwmrmwwrarmmrwwagctcactttgagataaagtccaatgcccaacactagctctgtatttaatccccctccattactggtaaagcctcatttgaatgtgtgaattccaataccggctatgttaaatttttactaatgtccattattttgaaaaaataaattttaaaataccattccaaattactattgtataccagcttaattgttaatattccctaaacaccattttatgaagggagaagacacttggtttgttgaccataaccgtacatcttttcaagttctcagctatttcttctacctctccctatcttacatttgagtatggtgaacttatgtcatctatgttgagatgtaagcttataaagcaccaagcatacatttcctgactggtttagagaactgatgtttcaatttacccctctgctaaataaatattaaaactatcatgtgaaaaaaaaaaaaaaaaaaaaaaaaaaaaaaaaaaaaaaaaaaaaaa

SEQ ID NO: 122 - DNA, 791 bp, Homo sapiens
ccccccatgcaatttgtccccccctttctgccatgagccacctgagtctggtctgggcttttascksgrgatcacmckgactkgcarcgggatggggaggaccaagacccaggacacggagcttcgtggagaccaggcctgcaggggatggmmcttccagaagtgggcggctgtggtggtgccttctggagaggagcagagatacacctgccaatgtgcagcatgagggtctgcccaagcccctcaccctgagatgggagctgtcttcccagcccaccatccccatcgtgggcatcattgctggcctggttctccttggagctgtgatcactggagctgtggtcgctgccgtgatgtggaggaggaagagctcagatagaaaaggagggagttacactcaggctgcaagcagtgacagtgcccagggctctgatgtgtctctcacagcttgtaaagtgtgagacagctgccttgtgtgggactgagaggcaagagttgttcctgcccttccctttgtgacttgaagaaccctgactttgtttctgcaaaggcacctgcatgtgtctgtgttcgtgtaggcataatgtgaggaggtggggagaccaccccaccccgatgtccaccatgaccctcttcccacgctgacctgtgctccctctccaatcatctttcctgttccagagaggtggggctgaggtgtctccatctctgtctcaacttcatggtgcactgagctgtaacttcttccttccctattaaaattagaacctgarwawaaaaaaaaaaaaaaa

SEQ ID NO: 123 - DNA, 1186 bp, Homo sapiens
acctttatgcgtttctgggccttcacgctagatgcatttcgctacatacttcgttaatgccgcctggctgccgcccacgccccgcccttgacgtcataatgacgtatgttcccatagtgacgccatagggactttccattgacgtcaatgggtggagtatttacgtaaactgcccacttgcagtacatcaagtgtatcatatgccaagtacgccccctattgacgtcaatgacggtaaatggcccgcctggcattatgcccagtacatgaccttatgggactttcctacttggcagtacatctacgtattagtcatcgctattaccatggtgatgcggttttggcagtacatcaatgggcgtggatagcggtttgactcacggggatttccaagtctccaccccattgacgtcaatgggagtttgttttggcaccmaaatcmacgggactttccaaatgtcgtaacaactccgccccattgacgcaawkggcsgtaggcgtgtacggtgggaggtctatataagcagagctcgtttagtgaaccgtcagatcgcctggagacgccatccacgctgttttgacctccatagaagacaccgggaccgatccagcctccggactctagcctaggccgcgggacggataacaatttcacacaggaaacagctatgaccattaggcctatttaggtgacactatagaacaagtttgtacaaaaaagcaggctggtaccggtccggaattcccgggatggtttaaaaaaaaaaaaaaaaaaaaagattggttgcctctgcctttgtgatcctgagtccagaatggtacacaatgtgattttatggtgatgtcactcacctagacaaccagaggctggcattgaggctaacctccaacacagtgcatctcagatgcctcagtaggcatcagtatgtcactctggtccctttaaagagcaatcctggaagaagcaggagggagggtggctttgctgttgttgggacatggcaatctagaccggtagcagcgctcgctgacagcttgggaggaaacctgagatctgtgttttttaaattgatcgttcttcatgggggtaagaaaagctggtctggagttgctgaatgttgcattaattgtgctgtttgcttgtagttgaataaaaatagaaacctgaatgaaaaaaaaaaaaaaa

SEQ ID NO: 124 - DNA, 882 bp, Homo sapiens
ttttttttttttttkywwwtktttatggtttttatttttcaatttttattttggttttcttacaaaggttgacattttccataacaggtgtaagagtgttgaaaaaaaaattcaaatttttgggggagcgggggaaggagttaatgaaactgtattgcacaatgctctgatcaatccttctttttctcttttgcccacaatttaagcaagtagatgtgcagaagaaatggaaggattcagctttcagttaaaaaagaagaagaagaaatggcawwkwkwwwkttttttcaaatttctttcttttttaatttagattgagttcatttatttgaaacagactgggccaatgtccacaaagaattcctggtcagcaccaccgatgtccaaaggtgcaatatcaaggaagggcaggcgtgatggcttatttgttttgtattcaatgattgtctttccccattcatttgtctttttagagcagccatctacaagaacagtgtaagtgaacctgctgttgccctcagcaacaagttcaacatcattagagccctgtagaatgacagcctttttcaggttgccagtctcctcatccatgtatgcaatgctgttcttgcagtggtaggtgatgtwctgagaggcatagttggscagcmrgcgcwtgaargcmagtygggtagccattycyttggaagtcactccttctacattwtwttcmaactggctgcmagcattgatagtttctcctagccagacgtgttcttgtccttggagctcctataccagttcttggctgggatgtttccaggtagggcccggatacaggtttcgccagctagagaaatcacagtatacttttgatacgcatccaatagtgcatccttgcgc

SEQ ID NO: 125 - DNA, 882 bp, Homo sapiens; identical to SEQ ID NO: 124

SEQ ID NO: 126 - DNA, 618 bp, Homo sapiens
tttttttttttttttactaacactgttcctttttttccttgttacaatccattctttatgaacatacagaaatgaccaaagtcactgcaagtagctgtttttattttttgtgatctgttgcaagagtccaaccttgtttcctctgctgctgtttgtgtagcatctggttttgtaatgagcatctggatttgtaatgagcatctgattttgttatgtgcatgtgtgtatatatgcacatatacacacctatacatgtataatatatacactatatatatgtggatacatataggaagtgtgtatacatttatacataatatagtgtatatcgtttcaactggagataaactgaactgggttcagacactagcacatgcttaactttcccctgctccctctgtatattttaaacagtctggagctttaatttattttttaaagtgcattttcaatgcagaaaaactgtaatccactgattccttggaaaacatttttgatgagaaaaatctgacagttctcagccccaagcaagagaaacctgggtttggtcatgctgggggctgacgtggcagtgccaggctcgtgcctgaggtgattactgggcatttctgggactcc

SEQ ID NO: 127 - DNA, 702 bp, Homo sapiens
ttgtcatcggtattacccatgtgtgatscgkytttggcagtacatcaatgggcgtggattatgcgggtttgactcacggggatttccaagtytccaccccattgacgtgcaatgggagtttgttttggcacctmraatcwacgggactttccmaaatgtcgtwacatactccgccccattgtacgcacaatgggcggtaggcgtgtacggtgggaggtctatataagcagagctcgtttagtgaaccgtcagatcgcctggaggatcgccatccacgctgttttgacctccatagaagacaccgggaccgatccagcctccggactytagcctaggccgcgggacggataacmatttcacacaggwaacagctatgaccattaggcctatttaggtgacactatagracaagtttgtacaaaaaagcaggctggtaccggtccggaattcccggsmwcggacttcacgtcattattkgstcaactttcctcactatctgcttcatccgccarctaatatttcacttkacatccmaacatcactttggsttygaagccgccgcctgatactggcattttgtagatgtggtttgrctatttctgtatgtytccatytattgatgagggtyttaaaaaaaaaaaaaaaaaaaaaaaaaaaaaaaaawaaaaaaaaaaaaaaaaaaaaaaaaaaaaaaaaaaaaaa

SEQ ID NO: 128 - DNA, 713 bp, Homo sapiens
tttttttttttttttaaagcagccagcagtcaatgaaataaggtgtgaaaaggagaaacttcctatattctttcatagagcttttttctctcctaacaccaggagcacacacacaaaaggatcagcttcatgaaatatataagctctttaagttcacttggagctggattttgatggccaaaattctctttwccttctgacattgacattcatcgttcatccacagcatttatctggtcaaatcgccactgctggcgggcttttccatcacacggacgcaggtacaaatctttattgtwttcttgcaccacagcttccatgcatttcccagaaagaatgtggacaatcatcccattctcctggaagtcccagwgctgctggctggatggmcaggccttcctccgkgcarktctgaagaatcamctgmtcctgcctgacarcaaagcacaggtgctgtgggctgccaaagtgaatctccttcctgctggtgtgctgcaggtactgttgctgccggctgtcactgcaaggagccaacaccatgggacagcccaggatgtccccttctgcctggcagtctgcacagagcccaagtccagtgttgtggagctttccagagaaacctgggcctgggttcagatgggtacagctcagggtagacatagacagaaaccagtggaatgtcccgacaaccagtctctttgcagtgaagcggt

SEQ ID NO: 129 - DNA, 1071 bp, Homo sapiens
ggacgttccatgacgtcatggtggagtatttccgtaaactgcccacttgcagtacatcaagtgtatcatatgccaagtacgccccctattgacgtcaatgacggtaaatggcccgcctggcattatgcccgtaccatgacttatgggactttcctacttgcagtacatctacgtattagtcatcgctattaccactggtgatcggttttggcagttacatcaatgggcgtgggatacggttttgactcacgggggatttccaagtctccaaccccatttgacgtcaatgggagtttgttttggcaccaaatcaacgggactttcccaaatgtcgtaacarytcsgccccattgacgcaaatggccggtaggcgtgtacggtgggagktctatataagcagagctcgtttagtgaaccgtcagatcgcctggagacgccatccacgctgttttgacctccatagaagacaccgggaccgatccagcctccggactctagcctaggccgcgggacggataacaatttcacacaggaaacagctatgaccattaggcctatttaggtgacactatagaacaagtttgtacaaaaaagcaggctggtaccggtccggaattcccgggatmcragrwcgcackcrtgmsmcwtstcyrmcrcagacgccgccgcgatgcgctacgtcgcctcctacctgctggctgccctagggggcaactcctcccccagcgccaaggacatcaagaagatcttggacagcgtgggtatcgaggcggacgacgaccggctcaacaaggttatcagtgagctgaatggaaaaaacattgaagacgtcattgcccagggtattggcaagcttgccagtgtacctgctggtggggctgtagccgtctctgctgccccaggctctgcagcccctgctgctggttctgcccctgctgcagcagaggagaagaaagatgagaagaaggaggagtctgaagagtcagatgatgacatgggatttggcctttttgattaaattcctgctcccctgcaaataaagcctttttacacatcaaaaaaaaaaaaaaa

SEQ ID NO: 130 - DNA, 1071 bp, Homo sapiens; identical to SEQ ID NO: 129

SEQ ID NO: 131 - DNA, 761 bp, Homo sapiens
ccatgacgtcaagggatttgtttggcaccaaatcacgggacttccaagatgtsgtacraytcsgccccatgacgcaaatggssggtaggcgtgtacggtgggrmggtctatataagcagagctcgtttagtgaaccgtcagatcgcctggagacgccatccacgctgttttgacctccatagaagacaccgggaccgatccagcctccggactctagcctaggccgcgggacggataacaatttcacacaggaaacagctatgaccattaggcctatttaggtgacactatagaacaagtttgtacaaaaaagcaggctggtaccggtccggaattcccgggattcaggtcttcctctttcctgagactggatctgttcaaacagcaaacgcccacagatggcccagaggtggtggtagtcagggtgtgtgggtgtttttagggttctttagtgttgtttctttcacccaggggtggtggtcccagccagtttggtgctgacggtgagaggaaattagaatctgtttgcaaattgtccaacccaccccctcaacatgaggggcttccattttctgtgttttgtaagggaactgtttccttcatgccgccatgttcctgatattagttctgatttctttttaacaaatgttatcatgattaagaaaatttccagcactttaatggccaattaactgagaatgtaagaaaattgatgctgtacaaggcaaataaagctgtttattaaccttgaaaaaaaaaaa

SEQ ID NO: 132 - DNA, 708 bp, Homo sapiens
tttttttttttttttttttttttttttgagactttgccttgtgtttatttgccattcttccacagccacccttgtcctsggggggtctgcaacatacccatgcacctcccggaatcccctgaccaccccatagctggtctctttgctcacaccaccagctttcaccctgttcctacagcttcaccccaacattctgggccccatctttagggacaacgggtctggtctcaactttttctggcttggttgctgcttgtgggaggcctccagagcggtgtcaggccagatgcctgccagcggtgccaggcagggttctcgtcttctgaagaagttgagggtccagctgctgctcagaattctatgcatagatgtccttgacttgcaccamctgccagcatttttcctgcaaagaaggcgagactgtaccmtcactcgctccttggggacgaatatcccgcatctcaggctgaaggctgagcagctccaggaagtcctctgggagactcttataccaggacttgagtcaggtatagtgatggcttggacccttcctgtgaatmamcamcccagctgtccaggcaacccagagtgcatattctcttggtgctcaaggcacaaaatccaaataaagaggctcagggtccgagagggatcacttgacaaaattcttcacagaaactaggtcgagctacagcctctcagtatttc

SEQ ID NO: 133 - DNA, 759 bp, Homo sapiens
ttttttttttttttgttcatggagtttttgtgattgtggggataaagccaagaccaggaaagggctatagaattgggtcctagagctgagtcaaaacagggttggacatcttaagagatggaaaagtctttaataaaagtcagcacacattcatggttttaaacaaaagtgtagaaaaacagaatagaagataattttcttaaactaataaaggatatctaccaaatgccttccacagatatactttgctgagtttacaagatcactagacaaagggtgaatatacaaaaatcaattatatggccaatcaccgtggctcacacctgtaatcccagcactttgggaraccgaggtaggkggatcacctcaagtcgggagttkgagaccagcctggccaacatggtgaaaccctgtctccactaaagacacaaaaattagckgggcgtggtggtccacgtctgtaatcccagctacctgggaggctgaggcatgagaattgtttgaacctgggaggcagaggttacagtgagctgagatcatgccactgtactccagcctgggtgacaaagtaagaccctgtctcaaaaaatatatatatataatagcaacaaacaaaagacaacattttaaaaagaatactatttactatagcaaatcgaacacatasgaataatctwatgaaatatgtmtaagacttacactgatarcacgaaatwtwcgggaaattaagagactaacatacgtcagaatgaagtccag

SEQ ID NO: 134 - DNA, 745 bp, Homo sapiens
ttttttttttttttttagtgaatcacattttattgtcaacaatcaaaattattgctatatcctatacagacaggagaatgaagaaaatcatgatagtttttttctccctgatccatatgacttaagtatgaaaaacaaatcacaaaatactaaatagagtaatttttgcaccacctaggcatagcacatgcacaggtctgctttgcctgaatacaaatctaaatagctcagaacaaaacggtaatcmaaaaagggtwaggtcctttggtcmaacagaaaagamttggctcaaaccmaatgtggatatactcccatctcttkggggatwataactcggtgcccttcggtctcctcatatatkggttatataagaggagaaccagcgtgtaattcactctcctatccttttcatgtgggtaaatccccttaggacaggtttactgaaatttagctggaggactatgaagcactggagtaataataatcaggsgacaactgaactggcgctccaatattgaggccatttttcatccacattatygtcamatggaacaaggcattgammatatgggaaatttccaccaatatgagataactgacaaccccaccctgtgagatgagggaaggagatcattgcttggggcctttcctctcagactaattttctagacattttcccaaacattatgtmattaatcttatagaacwtagcgttaattaaaactcattagatcgcgagcggccg

SEQ ID NO: 135 - DNA, 741 bp, Homo sapiens
ttttttttttttttgtaaagacaggktcttgctatgttgtccaggctgatctcaaactcctgggctcaagtaatcctcttgcctcagtctcccaaagtgctgggattactggcatgagcccccacatccagcccaaatcatgtatcttataagggattagtatccagtttatatagagaactccaaacactcaacagcagcaacaacaacaaaaaaacctgattcaaaaatgggcaaaaggagttgaatagacatttctccaaagaagatatataaatggccaataagcacatgaaaagatgctcaatatcactgatcatcaggggagtgcaaatcaaaaccacaatgagattccatcccacacatattaggatgactactattaaacaagaaacaggaaataacaagtgctggctaggatgaacaaaagttgaaatccttgtgcactgtttgtggaaatgtaaaatggtgcagctgctgtggaaaactgtatggtggttcctcaaaaaattagaaatagaattgccacatgatccagtaattccactgctggatatataccaacaagaattgaaagcagggtcttgaaataaatatttgtggacccatatttatagcagcattattcacattagcaactcaaaatgtccctcaacagatgaacggaaaaacacatgtggtgcmtcmtwaatggaacactattaggcagaaaaragatgagtctgatctactacgggtgaa

SEQ ID NO: 136 - DNA, 711 bp, Homo sapiens
tttttttttttttttttttttttttttttttttactttaggttgggaggtacaaatgcaggcttttggtctaggtaaacttgtgtcacaggaatttgttgtacagattattttgtcacccaagtactaagcctagtacccaakggttattttttctgctcctctccctcctcccaccctcaagtagaccccagtgtctgtcgtacccttctttgcgtccatgagtccttgtcatttagctcccacttaggagaacatgtggtatttggctttctgttcctgtgttagtttgctaaggctgatggcctccagctccatccacgtgcctgtaaaaggaatgatctcattcttttttatggctgcatagtattccaagggtgtatatgtaccacattttctttgtccaatctgtcattgatgggcatttacgttggttccatgcctttgctatkgtgactagtgctgcaatgaacattcacgtgcatgtatctttatggtagaatgatttatatttctctaggtgtatacccagtaatgggatkgttaggccaaagtggtagttctgcttttagctctttgaggaatkgccatactacttttcacaagtggttgaactaatttatacttcccattaacagtgtataagtgttctcttttcttacaaacctcaccagcatctgtattttggacttytaggaatagttggttccct

SEQ ID NO: 137 - DNA, 710 bp, Homo sapiens
atggcccgcctggcattatgcccagtacatgaccttatgggactttcctacttgccagtacatctacgtattagtcatcgctattaccatggtgatgcggttttgccagtacatcaatgggcgtggatagcggtttgactcacggggatttccaagtctccaccccattgacgtccatgggagtttgttttggcacccaaatcaacgggactttcccaaatgttgtaaccactccgcccccattgaccgccaattgggccggttaagggcgttgttaaccggttggggaaggttcctaataattaaagcagaagcttcgttttagtgaaccgtcagatcgcctggagacgccatccacgctgttttgacctccatagaagacaccgggaccgatccagcctcckgactctagcctagrccgcgggacggataacaatttcacacaggawacagctatgaccattaggcctatttaggtgacactatagaacaagtttgtacaaaaaagcaggctggtaccggtccggaattcccgggatctttttcttcataaaatcctcaaaactgctgcatggataacatgctgacataggcttaacagaaatacttttgtaagcagctgtttaaaacattatcaacttgaaattataaatgtcccttgttacataaacaaacattttatatctgttcctttwaaaaaaaaaaaaaaa

SEQ ID NO: 138 - DNA, 748 bp, Homo sapiens
ttttttttttttttktgacaatttgattttactttattgaatactatcacacacataatatttacagatgtaattaaacagaatttataagattaccatgtggaatatttttcaaagttaatctgaaactcttaatgaaaatcatcaattacatgtgtgcttacaatacaataatagaatgtagaacttttcagccaatatcatgatggttcatttaatacaaaactctcttttcaaaaagaggtaagtcggaggaaatataaaaaaaaattcagaaaaaatatttccatatctagtcataatcttccagcttttctgtaaaataaattatagactttctcaattgcatacatgactattttcttaaataccatatttaacttttagcatattggagttgtttttcttttatcgtattttcagcataggtttaaatgtttttcttatgtttcaaaaggaatacataatctaaatttaaaaccacatctgaatattactttaaaaatagcaacgaggcacgtggccaccatcactaccttggctctttattacggstggtccacggaagggaaccacatggacaacaaaagtgagggagtcctctaaccagttctaagtgtgattctattgtagatgccagttgctttccagacattagaagacctccgaaatatggatctacaccgsgttgtctgagagatacacgcatcttggggctaatggtctaacttcatctataccatatctt

SEQ ID NO: 139 - DNA, 732 bp, Homo sapiens
ggtgagagatgagttaggaagttgtgacagctctctatacctaccgctaatgtagaggattatttattttcatttcattaccattcgtgtaaggtgtgtgkgtgkgtgkgkgkgkggtgkgkggtgtgtgtgtatatgctagatttctctatagaaattatatggagagagtaagaaggstkcactttaaaattacatgtwtktaatgagagtatkttctgaatatgagatcamtwamcctcatytgtttggtccagrctgatgggagttggammtcrrcsaatagagkcatkggattcatggattmyggttycscgattcgtagaatagtkgagcattgaaatgactatcaaatgcagtyacgtatgcagaagatgtatcggtatctccctttgmcaagccatcctggtatgtttgattcctctaatgccatcccaacaaatgaaagttctttgtgcaagatcttcaaggagaagagttgacttatgtatctataacatctkaatatgtaaagagttaagtttaatcatmwtatggtgtaatactkcatgagtamacttgaactttcackggtgaaamtctactcagtgagttctctagctgaaaatactaggtacatkwwtcaacataaagtcatggamacatywagtcwycccaagrcataamttcagcagcaagatatactagtgttcccctaggtagatagacatcgrggtcaccgcagtaatatgc

SEQ ID NO: 140 - DNA, 656 bp, Homo sapiens
ttttttttttttttttaggtttgagggggaatgctgggtgctgtcattctggtggctgctaagccagccctgggaagctcatcaccacctcctgtgaggttggcagtgccctctgggaccccacccccgcctgctgctttcttgccttgctaggccgcattctgtggccttatctcagtccatccagaagccgctgcatgtgtcccttgctctcccagaatgctccctggccccttcgccctcagacacagtgggtgcccccctccctttatcagaattctgctcacttgtcacttcctccaggaagactgctggcacctctttttcctatactaggtcaaggcctcctgttaaacactttccaatgtctggtgcwttttattcttacagtttattgcggtwtgtaatgamacgtttacttacaggatgagttgcttaacatccatctttgtcattaggctgtatgccccaccagtgcaggcgccgtgcctgstgttgcttacagtgatatctccasagccttcctcamcactgggcacatagtagctttgactaaacaactcttcctctccaccccctgrrgctgatttacagttcccattttatgacatgtggaggctcgaggagttcattgaccctgaggtcacaccgtcaaa

SEQ ID NO: 141 - DNA, 1141 bp, Homo sapiens
ctcgggacaactgtcccacggtgcctaacagtgcccaggaggactcagaccacgatggccagkgtgatgcctgcgacgacgacgacgacaatgacggagtccctgacagtcgggacaactgccgcctggtgcctaaccccggccaggaggacgcggacagggacggcgtgggcgacgtgtgccaggacgactttgatgcagacaaggtggtagacaagatcgacgtgtgtccggagaacgctgaagtcacgctcaccgacttcagggccttccagacagtcgtgctggacccggagggtgacgcgcagattgaccccaactgggtggtgctcaaccagggaagggagatcgtgcagacaatgaacagcgacccaggcctggctgtggkttacactgccttcaatggcgtggacttcgagggcacgttccatgtgaacacggtcacggatgacgactatgcgggcttcatctttggctaccaggacagctccagcttctacgtggtcatgtggaagcagatggagcaaacgtatyggcaggcgaaccccttycgtgctgtggccgagcctgrcatscaactcaaggctgtgawgtcttccacaggccccsggggaaacagctgcsggaaacgcctctgtggcatacaggagacacagagtccmrrgtsacggctgctgtggaaggacccrscgcaaacgtagcggttggataggaacagagcaagtcactctcgattggttcctccagcaccgcccccccactgggtgcgtgacaatccaatgccgagtggctgactgtacttactgaaggagccccgagatgtggtcccccaccgccacgttctctgtacacacaccccatcgcgggtgtgcccgctctggggttcttctgcttctcccaggagaaccatcatctggcccaacctgcgttaccgctgcaatgacaccatcccagaggactatgagacccatcagctgcggcaagcctagggaccagggtgaggacccgccggatgacagccaccctcaccgcggctggatgggggctctgcacccagccccaggggtgccgtcctgagggggaagtgagaagggctcagagaggacaaaataagtgtgtgtgcagggaaaaaaaaaaaaaa

SEQ ID NO: 142 - DNA, 725 bp, Homo sapiens
ttattctacatacaccctgtgctgccttctgttcaacaaacagaaatacctcgtcttttataaaaccccattttatttcaaagtaggatgagtgaagcctatgttctgtagtcttgaaatgttaacttcttctcgtaccaaaagttaatgattctttcttgtgaagataaaccacgactaaagctagtcaagaaactgtatgtgaagtttacagtggtatwtatattcaagtgagttcaagtaaggagaataaaccaagctaattcttgttactacttcatatwwgggatcctatactaatactgggtagttgaaagagtcaaagatttcggacatatgatcttcctaattaagaatccttgctccatcatttwgccaatcattataacttktagtattacatgtgatcagaacttayatgtatyatgtccaaatacattatacatgattatacaatcttctaaatgtctatwygaactcayaggatgggggtytaccttgcaaaagagtagtctagtgcagkgtccagcagaaagtagcttgtacaatatctggcaraaaatwgaaactcattaatagttgggagagccactactcatatgtgactttttagactttaacatgtaacattacttacatgaaatgatattaaacatctaggtgttttcatatgttcctataacaagtgctcagtactacacatagctgtgatatcacattgggtt

SEQ ID NO: 143 - DNA, 672 bp, Homo sapiens
actgaagttgcatccacatggcattcatgctctagtagttcctggcaaactgcgttcccccgagagtkckaattwgwwactctggatgacttgctgttcctgctagaaattggcmgtgcgttgcacctagraatwaatgtgactggaggtgtggtttatctagttgaggctcacaagttgctctttctcactgtttgratctcackttttagtccctgttcagagataattctaraattaccataatgtcatgaactgaattgatttagcccactcctctcatgtttatagaccacggggaactgaggctcagggagaggaaatwatgtgcccacaggaatgtataaagttkttgaactggaatgttcatctaggttctcatgccatattccagatgagccctagcctcataaccacctggggtgaggagccctgacatggtgaccagagcccaagagaatccaggaaagatttctctgatatgagaatgaaggtgatcctgtaaccctctgttgtccttttccccatgatatttggcacactccatccctccctctccccagcctccccgtgcccaaaaatcttttcattaaagaatgttttggaactttaaaaaaaaaaaaaaaaaaaaaaaaaaaaaaaaaaaaaaaaaaaaaaaaaaaaaaaaaaaaa

SEQ ID NO: 144 - DNA, 992 bp, Homo sapiens
tgtcgtaacataacttacggtaaatggcccgctggctgaccgcccaacgacccccgcccattgacgtcaataatgacgtatgttcccatagtaacgccaatagggactttccattgacgtcaatgggtggagtatttacggtaaactgcccacttggcagtacatcaagtgtatcatatgccaagtacgccccctattgacgtcmatgmcggtaaatggcccgcctggcattatgcccagkacatgaccttatgggactttcctacttgscagtacatctacgtattagtcatcgctattaaccatggtgaatgcgkttttggcagtacatcaatgggcgtggatagcggtttgactcacggggatttccaagtctccaccccattgacgtcaatgggagtttgttttggcaccaaaatcaacgggactttccaaaatgtcgtaacaactccgccccattgacgcaaatgggcggtaggcgtgtacggtgggaggtctatataagcagagctcgtttagtgaaccgtcagatcgcctggagacgccatccacgctgttttgacctccatagaagacaccgggaccgatccagcctccggactctagcctaggccgcgggacggataacaatttcacacaggaaacagctatgaccattaggcctatttaggtgacactatagaacaagtttgtacaaaaaagcaggctggtaccggtccggaattcccgggatctttcttctcccccacttctgtatttgaagggagcagatgctgaggtgaaagatgattatgcagatgacactgactctgagcagccaccctgtgataattgttattaatagtcatgcttcatctctaaccctaagaccattcgcatggccaaattctggcctgctgtgtacatctgagcatcccaaaacctcttccagaaagccaagcacttgcagcagcctggctggaaagaaaaatataaattaaaaaaaaaaaaaa

SEQ ID NO: 145 - DNA, 656 bp, Homo sapiens
ttttttttttttttttttttttttttttttttttttttttttttggagamaggagtctcrctctgtcgcccaggcgggagtgcarkrgcryratcwtggctcactgcaasctcsacctcccrggytcawgysatkctccyrcctcagcctccmgagtagckgggaaccacaggagcatgccaccagggctggctattttttttttctttttcttttctttttttttttttttttttttttttggagacggagtttcactctgggtggcccaggccggaaagcaggggggcaatctcgggctcacgtggagcctcgggcctccgggggttcaagcgattctccgtggtctcagtctcccgagtagctggggtttacggggcacagtggccaccacactcgaatcccgggaaattccggaccgggtaccagccgggctttttgggtacaaactgggttctataggggtcacctaaataggcctaaggggtcatagcgtgtttccgggtggtgaaatgtgttatccggtcccggcgggcctagggctaaagtccggagggctggatcggtcccgggtgtcttctatgggaggtcaaaacagcggggatggggtctccaggcgatctgacgggttcactaaacgagactcggttatatag

SEQ ID NO: 146 - DNA, 988 bp, Homo sapiens
gccccgggcccccagacccccccttgacttcatatgacgtatgtcccatgagaacccataggacttccatgactcaatgggtggagattttacgttaactggcccacttgggcagtacatcaagtgtatcatatgccagtacgccccctattgacgtcaatgacggtaaatgcccgcctggcattatgcccagtacatgaccttatgggactttcctacttggcagtacatctacgtattagtcatcgctattaccatggtgatcggttttgccgtacatcaatgggcgtggatagcggtttgactcacsgggatttccaagtctccaccccattgacgtcaatgggagtttgttttggcaccmaaatcaacgggactttccmaaatgtcgtaacaactccgccccattgacgcaaatgggcggtaggcgtgtacggtgggaggtctawataagcagagctcgtttagtgaaccgtcagatcgcctggagacgccatccacgctgttttgacctccatagaagacaccgggrccgatccagcctccggactctagcctaggccgcgggacggataaacaatttcacaccaggaaacagctatgaccattaggcctatttaggtgacactatagaacmagtttgtwmcaaaaaagcmggctggtaccggtccggaattcccgggatckmgakyggctmcmrmakmrrcykcakkgmwwaawawmaaawwamaaarwwwaracttggagggaaatgggctttttagaagcaaacaattttaaattaatattttgttcttcaaataaatagtgtttaaacattgaatgtgttttgtgaacaatatcccactttgcaaactttaactacacatgccttgggattaagttttagctgttttcattggctcaataataaagcctgaatttctgatcaataaaaaaaaaaaaaaaaagaaaaaaaaaaaaaaaaaaaaaaaaaaaaaaaaaaaaa

SEQ ID NO: 147 - DNA, 712 bp, Homo sapiens
tttttttttttatagcaatgcctttagcacctggatctcagtaggtgcctcataagtgcttggcgtctgaaggaaggtacctccctgttgcccagcacccaaatgtgggctctatattgttctctcttctccccgttaaaggtctgtggatggcccagcgtgtggcttatgcctgtaatcccagcacttggggaggctgaggcagaggggtttgcgaccagcctggccaacatggtgaaaccccatctctactaaaatacaaaaattagcctgggatgtggtgggtaggtggccttataggtccctgctacttgggaggctacaacaggagaattgcttgracccaggaggtggaggttgcagtaagctgagattgcaccactgcactccagcctaggggacagaacaagactctgcctcaaaaaaaaaaaaaaaaaaaaaaaaaagtctgtggaaagagttaagcagctcattcatactaaagtgtaaatggttgatgggccacataactctaacagacaccattgacctcacatctgtccctccctaaacttttgcccaaaccatgagaggagctcacaaaactccttcctgtcctgaaacctggccagtcacagagtcaccaactggccagtagaaccctcaacagacctggtagcaaagctgtccctgatgctggccccggggggatggactgatcggaaaatggatc

SEQ ID NO: 148 - DNA, 749 bp, Homo sapiens
ttttttttttttttcttcttcatcgacccattgtggttgaagttgatagttacccgattcaattttgtcgacatcaaggatttcaccaattaagccgaggagtgattgtccggtggcgtaggcaagtgaaatcgcctccacccgattgctccttgctaagaccagaacccgacagaagttccaggaagcccataatagagcttatyggtgttcttatttcgtgactcatcgttgccagaaactgactttttgctacggtagcctttatcgctttatttttttctacctcgagtgcattaattagatcacgcgtttcagtaatatcttgccaaccacaaatatatactgcattgtcacttgcaggaagattgcataatgtatgccagtgattaatgcatcttttctcgatgccattatcaatttcaaatacctgtgtgtatatgttcgattttctttcgtttctgctgtgacttcatgcgcattagaaaaaacatctttaaagggtgagtcactgttttctaatggtaacattgcatttttgtagtaatccgcagtgaaataatgttcaaaagcactattatgactaatgacattaccttgccagtttacaacataagttggattcggtaaaggaatccgagagtgcttttcggaactgatattcggtttctaaatcaccctgaatgacttacgacgacgaactgagcgtacaggtagaatcccataaaggtatgcaataataaacggta

SEQ ID NO: 149 - DNA, 765 bp, Homo sapiens
ttttttttttttttttttttttttttttttttttttttttkgaaggaaaatttgtattatttcaattatttttatgtacagaaaactcaacagtgtacatttaacccagtttagtggcaagttctttagmcytkgccttttcgagcttggcgatacgagccacagacttaggacccaggacattgccaccccagtgacggcggatctcatcgtatctgtcattgtaattggtcctgatagcttccaccagcttagccaaagcgccttkgtcttccgagttcacctgtgtgaaggcgacagtggtgcaggtcttcctgtggactagacgtcccagtcttgcctttcccttgataatgcagtaagggacccccattttacgacacagggcaggcaagaagacaaccagctcgatgggatccacgtcgtgtgcaatcaccaccagctgagctttcttgttctccaccaaggtggtgacggtgttaactcctgctcgaaggacaggtggtctcttcgtwgggacgtcccctttgccagcagccttcttctcggcccgggccaacagtctctgcttcttctcttgctttgtctctggtctgtacttgtgggccarmtwwagcagctgagtagctgtttggcggtccaggvccykggtgaamtggttaatcgcaggaggcamyttcagccssttatagaggatggctctctgmcgykgcaacctgatatmgcggggcatttcacaaagcgggtgacgtctcttkggcggag

SEQ ID NO: 150 - DNA, 688 bp, Homo sapiens
tagacgttggggagcgggaaggcaacggcagcgggatcgggatgaacagcggcggcggcttcggtttgggcttaggcttcggcctcacccccacgtcggtgattcaggtgacgaatctgtcgtcggcggtgaccagcgagcagatgcggacgcttttttccttcctaggagaaatcgaggagctgcggctctaccccccggagtaagtgctggagctcggctgggggaggggcgcgggcgccatagagacctcgggagccgaggcgtggaggagagcgcggacgcgggcgcgcggtgcatgtcacgtgatcgcgccggcttaccttggtgcccatatttgattagggcacccgggttccgccgtcctgctctccttagtcggatttggggggttaactactgcacggagcccttaccaaggatttagaatggttgccctttctgtgcctccgggacttgtgttcgctgctgggtcttcgaattccgtgcccccaccctcttatttccccccgaacttaagatggccgcaggtgggcccggaacagccctcatggcaaacgtctcagagcgtttttccactctgaaaaatcgcggagaccgcgcctgagccacagtccagtttttaaggcctkggtgtcagcgccgttttgctracgagaaaagcctgctgctggtgacagatggcact

SEQ ID NO: 151 - DNA, 1316 bp, Homo sapiens
  misc_feature (184)..(184): n is a, c, g, or t
  misc_feature (204)..(204): n is a, c, g, or t
  misc_feature (231)..(231): n is a, c, g, or t
  misc_feature (322)..(322): n is a, c, g, or t
  misc_feature (354)..(354): n is a, c, g, or t
  misc_feature (368)..(368): n is a, c, g, or t
  misc_feature (565)..(565): n is a, c, g, or t
cctcctggatgaacgcgggtcgcagccgtgacagcacttgccggccggctgccgatccgcctccgattctatcgatgtcmcgatgycgsctgtgyssggratccbcmcaactbcmggsykcyybsgdatgargaccmktgkraymrkkbccggvwgakhybgtykgkggrskkkkccrscvwcnvmvscyybmarbbywwdstnybbsksdwdytykdcddrtccctbmdnbbckytgmgasbktgwymddrdddhhvhwcgagytgykvwrgtccyaccvbtggvagatgctcdacacmkccycsbkgctrgascabckdndcgmkchkykywwctgkbtstcccskckgkcnwacytmwmkcmhgncgadgrscmgtactatytbcggktcmcmmygktgsctyycchcmyktbkgrswcgkmcgkycckyccsgkktmhykragkkkkbybygaarcycttbrmmtckratcccatmmckgkgacggtyccygwagmaktytycaggaakaaccctdartttatggagrccstgkcggagaaagcgctgcaggwatasygcnwwrmscmccgggaggagtgagatgtggatgktgcttktgcacykmcgggggcatctgwgwycmgstcycyhcvrgatgakstkcagccycccmgagagagctctgcacgtcacchagtwwycaggccscagcytbcaggsccccmwctccgcccagcctbtcsccgytctggatcytgcactctdacactcgactctgctgctcatgggaagwacagwattgctcctgcatgchactaattcvataaaactgtcttgtgarmwrawmrmwwrrarrrwmmwmwwwwwawrwwrarwwrmwrmwwmmmrrmawrmmwtcattttgctatgggggkcakgcasgggggdtggaaaatwagtagawacmwawaagcagtggctaagatggtatagggactgtcataccagtgaagaatmaaagggtgaagaataaaarrkawawrawrammarrwwrawmmamwwmaaraawwrmwwrctttcaggaagagagatgtgtttcaacmagccmactwaaatatattgctgcmaawrraarmhwwwmwrhwmwawwawaaaamwrwmrawrwawwmtgacccaggtgcgaccatctcctaaaggaataccctgaaagttaaggagaagaatcagtaagtgtaaggtgtacttggtattataatgcataattgatgttttcgttatgagaaacatttggtgcccagaagtcccaaattatcagttttatttgtaagagctattgcttttgcagcggtt

SEQ ID NO: 152 - DNA, 902 bp, Homo sapiens
cccatagtaaccccataggactttyccatgacgtcmatgggtggaagtattttwcsggtaaactgccccacktggcagyacatcaagtgtatcatatgccaagtacgccccctatgacgtcaatgacggtaaatggcccgcctggcattatgcccmgtacatgaccttatgggactttcctacttggcmgtacatctacgtattagtcatcgctatwmccctggwgatsyggttttggcagwacatcmatgggcgtggatagcggtttgactcacggggatttccmagtctccaccccattgacgtcmatgggagtttgttttggcaccmaaatcaacgggactttccmaaatgtcgtaacaactccgccccattgacgcaaatgggcggtaggcgtgtmcggtgggaggtctatataagcagagctcgtttagtgaaccgtcagatcgcctggagacgccatccacgctgttttgacctccatagaagacaccgggaccgatccagcctccggactctagcctaggccgcgggacggataacaatttcacacaggaaacagctatgaccmttaggcctatttaggtgacactatagaacaagtttgtaccaaaaaagcacggctggtaccggtccggaattcccgggatrwavarwaaaaaaaaaaaaarmmraaaaaaaaaaaaaaaamammwraawrmrraararmwmrrmwmmmrwwwarmattttgtacttaaggaaataaaaaaccaacaaaggatctcacattttcttaaaaagtgaagattgctgtatactatttattcaacttataatttatgttactccttgatctttgtcttttgtcatgacaaagcatttatttaataaagttatgcattcagttaaaaaaaaaaaaaaa

SEQ ID NO: 153 - DNA, 941 bp, Homo sapiens
  misc_feature (195)..(195): n is a, c, g, or t
ccgcccgtggacgtcataatgacgtatgttcccatagtaacgccaatagggactttccatgacgtcaatgggtggagtatttacggtaaactgcccactttggcagtacatcaagtgtatcatatgccaagtacgccccctattgacgtcaatgacggtaaatggcccgcctggcattatgcccagtacatgacnttatgggactttcctacttggcagtacatctacgtaktagtcatcgctattaccatggtgatgcggttttgcagtacatcaatgggcgtggatagcggtttgactcacggggatttccaagtctccaccccattgacgtcaatgggagtttgttttggcaccaaaatcaacgggactttcccaaatgtcgtaacaactccgccccattgacgcaaatgggcggtaggcgtgtacggtgggaggtctatataagcagagctcgtttagtgaaccgtcagatcgcctggagacgccatccacgctgttttgacctccatagaagacaccgggaccgatccagcctccggactctagcctaggccgcgggacggataacaatttcacacaggaaacagctatgaccmcttaggccctatattatggtgacacctatatgaacacagtttgtacacaaaaagcmggctggtaccgcgtccggaattcccgggatccaccattgggtttacgaaccttcgaatggttggaattccaggaaccattccccaatggtgccagcccgctattaaaggttcgtttgttcaacgattaaagtcctacgtgatctgagttcagaccggagtaatccaggtcggtttctatctacttcaaattcctccctgtacgaaaggacacgagaaataaggcctacttcacaagcgccttcccccgtaaatgataaaaaaaaaaaaaacaaaaaaaaaaaaaaa

SEQ ID NO: 154 - DNA, 749 bp, Homo sapiens
tttttttttttttttttttccgggtacctcagtttctcctttattgctcccgtacgaacccctcccctcccccctgtaaacacagtgctgcgagatcgctggcagagaaggcttcctccagcggctgggtggtgaaggaccctggctcttctctcggggcgacccctcagtgctcggcagtcatactggggtgcgagagaggtgggcagcagctcagcctccccccgctggggagcgaaagtttcttggtctcagcttcatttccgtgaagggcaccgagaactcgaagcccttccagtggtaccagctcactccctgatggtccactgtgctcccgtagagcccgttgaggttggcgtagtggcagttcctgtaccaccaggcccctcggtaggagacagcgcaggagatgagcaagctgttggggtcccgatcacgggcagagaagacactgccgctgtggtagctcatggagtcccctgcggtgccgtggtagccctccaagtggaggcggtagtactccgcagccgagtctacgtggaaggagtcgtactgggcgaacacagcctcgtccccagcccgcaggtccacgcgcatggagtagtcacctgcctgtgtcaggctgtgcagggcctcattgcccagcagaactctccagagatgttcccaaaacatgggcattgtcctccagtcctcccgaagtctgtctgtccatcatgcgggctggacaacagcaggcgcccaatagt

SEQ ID NO: 155 - DNA, 729 bp, Homo sapiens
ttttttttttttttttttttttttttytgcaaatataagaagtaattttattgcaatatactgtggctagagtggtctggggagaacgggacacattttgaagttcagtacaaattataacaactttgaagggaccacagaggaagaaaatgacaggagaaaaggacaaattggatgggatgagaaatgaaaacagaatcacatgacctagacgcagtccacgggggtcgcgggacagtcctcggctatggctttycttytgaagagatgaaggtgacagtcattggcacatgctggcatcctgggctccagagactctccaagccagacttttctttggcaagagcgagacttactttccagggcaaatttggaaaatccacgctggcggtgtytgttcctcctgggtggcttgttatgtggcttcctaagctggaactgcattctggtggtggtgggggtcggggcacagcaccagagccccgcaggctcaccaccaagggcccagcctgcattttcccatggtagaacggaaaaggcgctgcacccgggcaacttttcacaagtgaagagatcgcctttcctggctgcccctcgggtcctcctgmccacagacggcagmccccgatctcgatggccaggaaagggttccccaaggggacctcacccgcccgagctccggagccgctgaagctcgctcccaggacattgagaagggaatccaatagg

SEQ ID NO: 156 - DNA, 746 bp, Homo sapiens
tttttttttttttttttttttttttttttttttttttkgcaatagagagaatttaataccagtcagttgcaaagatgttgacaaagttgtaagggcaaactggagacagggaaataactcagagaataccaacatcaggaagttgatgcctccctaggagtagagaaaccaaggaggaaagtggagttataagagtttaggaatagtgggagctagggccatgcaggagggcttgcctggtggtgacttaactacagaggaagtgcattcatgctagagatgttgcccagagcaaagacaggggaaagtactctggcttttcctctcctactgactgcggtcttttgccagtgtcttccattggccaaactttcccagaggccagtkggcaaggaagcttgggagatgtagtttgtgtgggtcaaccttgcacaccccactctcctggtagcacctcatcctcaagccatacagagtagagcatgaaagagcaggaaatgaatcagagtgccaacaggcaaatgaacactaacactacccctaaattagtatctccagttccaagagaggacctcttctctgagttcgattctgacatttaatcgttcacttgacayctccacttggttgtctaatagtcctctctaatgtaacatgggccaatagamaacytggtttagcagccaatwccccatggtattccttctmagaacatgattcacccactatcaggcaaaatgccatgc

SEQ ID NO: 157 - DNA, 955 bp, Homo sapiens
  misc_feature (576)..(577): n is a, c, g, or t
tcgacggtatatggcccgcctggcattatgcccagtacagtgacacttatggggactttcttacttgggcagtacatcgtaggtattagtcatcgctataccatggtgatgcggttttgtcagtacatcaatgggcgtggatatcggtttgactcacgggattttccaagtctccaccccattgacgtcaatgggagtttgttttggcaccttatcaacgggactttccaaaatgtcgtatacaactccgccccattgacgcaaatgggcggtaggcgtgtacggtgggaggtcttatataagcagagctcgtttagtgaaccgtcagatcgcctggagacgccatccacgctgttttgacctccatagaagacaccgggaccgatccagctccggactctagctagsycgcgggacggataacaatttcacacaggaaacagctatgaccattaggcctatttaggtgacactatagaacaagtttgtacaaaaaagcaggctggtaccggtccggaattcccgggatcgccctttttgtagatgagggaactgacaagtgacttgtccaaggcnnatatagctgtgagaaaacccatgcattctcttttcagagttcatgctatcactcaactttaaagtaggccaagattaatgttggtaagggtttgtaatctgtaagaatgctaaaaacgtaagtatatatatcattttagatttgacattttgtatcttgccagtttttaggagaacttttcattttgtaagtatgcatgaatatagttgagtatatgagtaactggttcttatgctgctgttttgtatttttaccagcaggaagattgcaaaagttgatgtatgtaaatcttgaaatatttctaagtttatgtataacaaaatatgtattttaataaactccttttgatattttaaaaaaaaaaaaaaaaaaaaaaaa

SEQ ID NO: 158 - DNA, 1011 bp, Homo sapiens
aatctgcccacttgcagttacatcaagtgtatcaaaagccaagtacgccccctattgacgtcaatagacggtaaatggcccgcctggcattatgcgccacgtacatgaccttatgggactttcctacttggcagtacatcctacgtattagtcatcgctattaccatggtgatgcggttttggcagtacatcaatgggcgtggatagcggtttgactcacggggatttccaagtctccaccccattgacgtcaatgggagtttgttttggcaccaaaatcaacgggactttcccgaaatgtcgtaacaactccgccccattgacgcaaatgggcsgtaggcgtgtacggtgggaggtctawataagcagagctcgctttagtgaaccgtcagatcgcctggagacgccatccacgctgttttgacctccatagaagacaccgggaccgatccagcctccggactctagcctaggccgcgggacggataacaatttcacacaggaaacagctatgaccattaggcctatttaggtgacactatagaacaagtttgtacaaaaaagcaggctggtaccggtccggaattcccgggatrmaaawrwramwwwawwwgraaawarrrmmwwwrmarawawgatcaagttaaggatctttagatgagatcacgctggatttagggtaggtcctaaatctaatgactgataccttagaagagaaaggacagagatttaagccacagacacacaagggagcaggctatgggaagacggagatgcatgaaaggaagaccatgtgaagacaaaggtagagattggagtgatgcagccacatggcaaggcatgccagaggtcgctggcagctcccagaagctggaagaggcagattctccctcaaagtccccagaaaaaaacaactgttgacaccttgcttttggacttccggcctctataactgtgagtgaatacactcctgttgttttaagccaaaaaaaaaaaaaaaaaaaaaaaaaa

SEQ ID NO: 159 - DNA, 989 bp, Homo sapiens
  misc_feature (696)..(697): n is a, c, g, or t
cctgacgcataatgacgtatggtccatagtacccattaggacttccatgacgtcatggtggagtatttacggtaactgcccacttgcagtacatcaagtgtaatcatatgcccagtacgccccctatgacgtcaatgacgtaaatggcccgcctgcattatgcccagtacatgaccttgatgggactttcctacttggcagtacatctacgtattagtcatcgctattaccatggtgatcggttttgcagtacatcaatgggcgtggatagcggttttgactcacggggatttccaagtctccaccccattgacgtcaatgggactttytttggcaccaaatcaacgggactttccaaatgtcgtaacaactccgccccattgacgcaaatggscggtaggcgtgtacggtgggaggtctatataagcagagctcgtttagtgaaccgtcagatcgcctggagacgccatccacgctgttttgacctccatagaagacaccgggaccgatccagcctccggactctagcctaggccgcgggacggataacaatttcacacaggaaacagctatgaccattaggcctatttaggtgacactatttagaacaagtttgtaccaaataaagcaggctggtaaccggtccggaattcccgggatsgctaaaatgaagkatwagwtsycgtaatacctgcnngcaccccactcgtgtaagcagtttggtggaagaacggtctcagaactgtttgtttcaattggccatttaagtttagtagtaaaagactggttaatgataacaatgcatcgtaaaaccttcagaaggaaaggagaatgttttgtggaccactttggttttcttttttgcgtgtggcagttttaagttattagtttttaaaatcagtactttttaatggaaacaacttgaccaaaaatttgtcacagaattttgagacccattaaaaaagttaaatgagaaaaaaaaaaaaaaa

SEQ ID NO: 160 - DNA, 970 bp, Homo sapiens
acgcccttgacgtcaagccgtaaggcccgccggcatagcccaggacagactatggactttctactggcagaacatctacgtatagtcatcgctattaccatgggatgcggttttgcagtacatcaatgggcgtggatagcggtttgactcacggggatttccaagtctccaccccattgacgtcaatgggagtttgttttgscaccaaaatcaacgggactttccaaratgtsgtaacawtccgscccmktgacgcaaatggscgktaggcgtgtacgtgggagktctatataagcagagctcgtttagtgaaccgtcagatcgcctggagacgccatccacgctgttttgacctccatagaagacaccgggaccgatccagcctccggactctagcctaggccgcgggacggataacaatttcacacaggaaacagctatgaccattaggcctatttaggtgacactatagaacaagtttgtacaaaaaagcaggctggtaccggtccggaattcccgggatskyykccykttymtttcttywttcmtytttyytytttmtytttmytttytgrwgragwcttgctctgtcwcccaggctggagtwcagtggyrtrrtctsggctcactgcaacctcyrcctccyggrttcaartgattctcctrcytcagcctcccwagtagctgggatyrcaggyrcsyrccaccrcrccykgctartttttgtatttttrgtagagatggggcttcaccagcctgaccaacatggagaaaccctgtctctactaataatacaaaaattagccgggcgtggtggtgcatgcctgtaatcccagctactcgggaggctgaggcaggagaatcgcttgaacccgggaggcggaagttgcagtgagccaaaattgagccactgcactccagcctgggcaacaagaacaaactccatctcaaaaaaaaaaaaaaaaaaaaa

SEQ ID NO: 161 - DNA, 764 bp, Homo sapiens
  misc_feature (627)..(627): n is a, c, g, or t
  misc_feature (641)..(642): n is a, c, g, or t
  misc_feature (645)..(645): n is a, c, g, or t
gtctgttagaaataattggttgaccaataaatttatgactactgtgatgtcccgtagacaagactaaaggcaccccgggattattatcagatattttggaaaataggatatatataattaggtgaccacagacatttacgctacagtagaatacccctgttaaggtggtagataataagtggtagactagggacatagtattggaaggaaagttctatgtattaatacttggttaagaggaaatgatataatagtgatgtagaagcaaggtaatgtataaccaaaatagcatgtctatccttctttgaaagtatattgggaagtgggaaatattaaagcatcaacacggcctggcaccagtgggtcaatgcctgtaatccgaaaactttggcaggcctggagggagcagatcactttagccacagtgtttgaggccagcctcggtaacaggatgagaaccctgtctgccaggggttatatatatatacataagtgagctgacatggtggtgcatgcctgtggttccaactactttggaggctgaggtgtgaggattgcctgagccgggagacgaaggttgcagatgagctgagattgyacymctgcamtccsgmctkgrkvamrdanhdwbhbbbykydbnndvnmmmhmmamrrawaaaaarraaaaaaaaaaaaaaaaaaaaaaaaaaaaaaaaaaaaaaaaaaaaaaaaaaaaaaraaaaaaaaaaaaaaaaaaaaaaaaaaaaaaaaaaaaaaaaaaaaa

SEQ ID NO: 162 - DNA, 876 bp, Homo sapiens
cggcatatgccagacagactagggacttctattgcagtacattacgtatagtatgtatacctggtgatcgttttgcagacatcatggcgtggaacggtttgactcacggggatttccaagtctccaccccattgacgtcaatgggagtttgtttggcaccaaatcacggactttccaatgtcgtammactccgccccatgacgcaaatgggcggtaggcgtgtacggtgggaggtctatataagcagagctcgtttagtgaaccgtcagatcgcctggagacgccatccacgctgttttgacctccatagaagacaccgggaccgatccagcctccggactctagcctaggccgcgggacggataacaatttcacacaggaaacagctatgaccattaggcctatttaggtgacactatagaacaagtttgtacaaaaaagcaggctggtaccggtccggaattcccgggatcysaksgtgygastccgcmgcgatggtgacccggttcctgggcccacgctaccgggagctggtcaagaactgggtcccgacggcctacacatggggcgctgtgggcgccgtggggctggtgtgggccaccgattggcggctgatcctggactgggtaccttacatcaatggcaagtttaagaaggataattaattacacaaacccttcacagactgctctggtgcctggtggtgctagctcctcccacctcagcacctgctgcatctggagcagcccaagcctcaggatggacaagaggaaacccacagctcagcttcaggcttcttatgtttctgaaaacagcttggatattttaatgcacgttgcattaaacctcactgaaacctgaaaaaaaaaaaaaaaa

SEQ ID NO: 163 - DNA, 765 bp, Homo sapiens
tcagaacatgcctggraktaytctgcyttaawgtrdrcarsctgaacattttgaagctkgctyybkgtggsmtbkkggacgtttyygcatkkggactgaaagtgctkycsggaagttagatgaattgtacggcacttggcgtawaccgcttccytcaagagtaactacratckkycccatgcacaagatgattratacagatcttagcagaatcttgwaaagcycagrgatccmargagcccttcgagcaccacgcaagaagatccatcgcagagtcctawagaagamcccrctgraaaacttgagaatcatgttgaagctaaacccatatgcaaagaccatgcgccggracaccattcttcgccaggccaggaatcacaagctccgggtggataaggcagctgctgcagcagcggcactacaagccmaatcagatgagaaggcggcggttgcaggcmagaagcctgtggtaggtaagaaaggaaagaaggctgctgttggtgttaagaagcagaagaagcctctggtgggaaaaaaggcagcagctaccaagaaaccagcccctgaaaagaagcctgcagagaagaaacctactacagaggagaagaagcctgctgcataaactyttaaatttgattattccataaaggtcaaatcattttggacagcttcttttgaataaagacctgattatacaggcrrwraraaamawraaaaaaaaaaaaaaaaaaaaaaaaaaaaaaaaaaaaaaaaaaaaaaaaaaaa

SEQ ID NO: 164 - DNA, 689 bp, Homo sapiens
ttttttttttttttttaagtcattactttttattttggaaagatttgtgaaactcttcacatcatggtgagagtttgtatgattaataagaagcagctttttcatgaaatgcttggaggtgaacgagttctcagcctgtgagatccgaccatcccattaactttgaagtttctcttgattaatagaagaamaaaggggagggtgaagaaaaggaggaacatgctaaaaaccttatgacaatcatccaaatgtgaggaaagaacaaccgattcaccaactccactttttctattttacaactttctacatctcactcttgattttggccttcctggctgaaacagcctggcagtccctagagcccctgagaagagccctggttctccaaaagacagaggaggagaagccctgcaggatgcgctgaccacttcccagagaactgacagtccgtgctcccaaaagtttgaaccaacagcctaatgtgaaaagaaactgcactgaaaggtaaaggaggaaatggtgatgaactgggcttatgtgagaatgtctatattttcataagacagccccagaatctttctctcagttacagcctcaggcaaaccacgttctggttggtgggtwctgcagggatctctcccaacactgagcctctagtcccaraaccatmcttgaacaacatcgtgtgt

SEQ ID NO: 165 - DNA, 689 bp, Homo sapiens; identical to SEQ ID NO: 164

SEQ ID NO: 166 - DNA, 739 bp, Homo sapiens
tttttttttttttttttttttacttcaggtttctcttttaataaacaaaaccatccaaggtacagttccaaagtacaaaatcaaccaggtctgaactgattggtgataagagcacacagatcagtccttccttaaggaaacagtttcctccctgatgccctctttggtcactatgcagatccggagtgcgtccccagtgtacacatctctctcagccgcagaaatgaagacatctttcaccagccgcatggctctgtccaaggacagcggaacatgctccacattctgcatgttcttaaaaccaacctggttgtcaagcaggggctgtagcatggcacttgctgagcctccagccttgaaggagtctctctggtaagaccctactggatcmaagctgtatacagccccctttccttcttcatcaagtccaccgatgatgttgtaaacatagtatggaaagaagcgccttgaatacaggattgtagacagctrttgcagcaatttgcccccgtagtcatggccttattattggaatgcttatacatctttagtcttgcttcaataatctttgtcagcgtaagacagtctccatgaaaaccgctgcatccawtgactgttwygtctgttaatttggtaacatttggggctatcccgcgtattgaattgaaaacccttcactccatccgagtatccaaagcaccattggcaaatcttctcccagccaattggcagtataggt

SEQ ID NO: 167 - DNA, 739 bp, Homo sapiens; identical to SEQ ID NO: 166

SEQ ID NO: 168 - DNA, 751 bp, Homo sapiens
ttttttttttttttttcaatgttcagtttcctttaatgacccccatctccctgaagggcaggtgcaggcagctaggtgatggcaagagatgttcacttgaagatcttgccctgattgaaggctttgcccacatgctggaaggccccctcccaggaaaagtactctcgaaccagcgtctgggtctcctcgctgccaggatccagtttccgccatgtgtatgactcgtagtccacctgccaatctggactcagcggaaaggcaagctcctggcctcggaagacccagactccagaaatggagctgctattgttggttccaaaarggatgacactggcgaaggcattcttcctcagcttgtccagtcgctggaacattccmgwgatgwgattgmagmtcatgaaggtctgagtgagttcttcagggaagcgatactctgagtaccacagggaccagccgtccttatcaaagtgctcccagaaatatggcagtgccacagagagtgtgtcctcattggagtacttgcgcttaaattcatccaacacaaaggtactcttgggcaggtgagcgaaggggtccttggccttgggctcagcagccagcgcctgctcacattcatccatctcctcctcaggagcagggcagccgcctttttctcctccttccgctcagcctgggsacttctggtttctcttcccgtgaaacccttctcttccgtggtgtgtctctyttcagtgggtctctgcaactttta

SEQ ID NO: 169 - DNA, 827 bp, Homo sapiens
cccatagtaccccataggactttccagtgacgtcaatgggtggagtatttacgttaactgcccacttggcagtacatcaagtgtatcatatgcctagtacgccccctartgacgtcaatgacgktaaakgcccgcctggcatwatgcccagwacatgaccttatgggactttcctacttgscagtacatctacgtattagtcatcgctattaccatggtgatgcggttttggcagtacatcaatgggcgtggatagcggtttgactcacggggatttccaagtctccaccccattgacgtcaatgggagtttgttttggcaccawaatcaacgggactttccaaaatgtcgtaacaactccgccccattgacgcaaatgggcggtaggcgtgtacggtgggaggtctatataagcagagctcgtttagtgaaccgtcagatcgcctggagacgccatccacgctgttttgacctccatagaagacaccgggaccgatccagcctccggactctagcctaggccgcgggacggataacaatttcacacaggaaacagctatgaccattaggcctatttaggtgacactatagaacaagtttgtacmaaaaagcaggctggtaccggtccggaattcccgggatcaarsctaggsmcsagssgyswggawmccgcmgkakgamakssamymksaccgcggctrkwtkgkkgstytgcacccagccccaaggggtggccgtcctgagggggaagtgagaagggctcagagaggacmaaataaagtgtgtgtgcagggaaaaaaaaaaaaaaaaaaaaaaaaaaaaaaaaa

SEQ ID NO: 170 - DNA, 733 bp, Homo sapiens
ttttttttttttttttaagctaaaatttgataggcatttatgatgaactaggcaactgggctaagccttttatctatttttaatcctcaaaacaaattcatgtataagcccaattattgttcccattttacagacgagaaatggaatcactgagaggttgagtaatctgcctaacatcacagctcacaagtggtcaagccaggaggcccaaggtgactgcaagcccaagacatggctgtgtcacaggcatttgaggtggtctcctcagaggagatgacctactattctgccacacatgaaaagagagctgagattggggctagatttttagcatgaagggtttacatcagatctaagtaagactgtcttcatggaaaggataatttgacattaaaatgagaggttaagggagttctggaaacttctttggaatctgatggtgtggaaacctggcaacagaggaacaggccattctagttctcttctcttctagaaccagaggatctttgaggattctctgattccgtaggggtgagacagactgatgttaaaaaggagagtcagagacctgtctcttgatgcacaatggagtggactctgctggctcttgaggccaggaaaagcacaatccctggtgatccaagtacaacaaaggcctctctgtggcagaaccgmaamctcccccgcagggacaggtgcttttcctaaaccctctttggaaaacgggtaaatg

SEQ ID NO: 171 - DNA, 681 bp, Homo sapiens
ttttttttttttttttttttgtcaaaactgagtctgttatttatttcagatagcagaacttgtagcaactgaattttttgatcaaggagacagagagagaaaagaactcaacatagaacccactgtaagtatgaaaccttgttggtaggaattattcaaattgttttttttttaattgtagactcctttttatggctctatgggatctttccttaggaccacaatttctcattttattttttaaaacttttttctcattggaagaattatacatgttcattacagaaagcaaaaccaataaaaggcataataaagactcttgggttcatcatattgtatcagtgttctttgtaatttgtttttttccgcttaagtattagaaaccacttttcattttaacaaatattcttatgtattatcatgattacatgaaatcgatgtaaccataatttacctacgtcccttggtgtaatatttgcagtgtgcactattacaaacagcactgtgataaacatccatcatagatgtttcactcctactccttggttctcgccatcaaaagaatttaatagagaagctgtggctgacagagaaaggaaggagagataccaaacagaaacatggaggacagatgacccagatgtcatgccacaaccaaagttctccccaatttatcagaat

SEQ ID NO: 172 - DNA, 725 bp, Homo sapiens
ccacccatacgtcaatgggattttgtttggcaccaaatcacgggactttccaaaatgtcgtacaactccgccccattgacgcaaatgggccggtaggcgtktacgktggragktctatataakcagagytcgtttagtgwaccgtcagatcgyytgtgagactgccatcctacgctgtttttgaccgtccatagaagacwccgggaccgatccagcctccggactctagcctaggccgcgggacggataacaatttcacacaggaaacagctatgaccattaggcctatttaggtgacactatagaacaagtttgtacaawaaagcaggctggtaccggtccggaattcccgggatgtctctccctaacccaggaacagcaggaggctgaactacaggaatctctggtcactcattgacagggctggccttagcaggggaccccccacggctggagactgaagctgaccggggccaagcagcagacaaggagggggaggggagaggccgccctttgctgccacctgctatagctaatggaggtggaacactcaagatccagaatatgctgtgggtaccaggaagtcctaggatttgaggagcgagactctagtttttcctctcttcatactgtttgaagtcatgaaagtaattctgatgaaccttcatgaggcagatcacaacagtaatattcaggctattctgggtatgtaaaaaaaaaaaaaa

SEQ ID NO: 173 - DNA, 671 bp, Homo sapiens
  misc_feature (595)..(595): n is a, c, g, or t
tttttttttttttttttttttttttttttttgctgggaggagctgtttaatcgttcagggaggctgatagctgctgggactcactgggctcatgcgggaagggatggggtcacaattcatatttacagtgaccaaagggcattttcctaaagtacccacaaatagaagtatatatatatatttatatatatatttatatatatatatagagtacttcattaaagtgttctgttgaaggaatgcagaaacttccagtctcctccccagacaggctctggttccatccaatcacagaaacccttagagacgcaacagcccggagaccgctggcgcttgcctgtggctggagagagattgggcaaaagacgtggggcccgcggatgccagmacaggctcattcgasctcccccagacagrsgccgttttgtsccctcctctctcccctggactcctgtctcggatgaycacgcctcccagagcacaggccccacttcccctctctcctgaaacgccaggccaggcagagggtcctgcaatcctgctacctgcagtcggtctgccaggggctcaggagagggcgctcttggtgtcctgnggaagggaggcagagggagggagggagcttcctgaagcaggtgctcccacagggcagcgggtccgaaggtgcctgg

SEQ ID NO: 174 - DNA, 1101 bp, Homo sapiens
cgatggtcccatagtaacgccataggacttttccttgacgtcaatgtgttgtagtatttccgtattcctgctcacttgcaagtacaatcaagggtatcatatgcgcaagtacgcccccctatgtgacgtgcaatggacgggtataaagccccgcctgcaattatgcccccgtaaccatggacccttaatggggactttcctacctttggcagtacaatctaccgtaattagtcatcgctattaacccatggtgattccggtttttgtcagtacatctatgggcgtggatagcggttttgactcacgggggatttccaagtctccacccccattgacgtcaatgggagtttgttttkggcaccaaaatcaacgggactttccraaatgtcgtaacwactccgccccattgacgcaaatggtcsgtaggcgtgtacggtgggaggtctatataagcagagctcgtttagtgaaccgtcagatcgcctggagacgccatccacgctgttttgacctccatagaagacaccgggaccgatccagcctccggactctagcctaggccgcgggacggataacaatttcacacaggaaacagctatgaccattaggcctatttaggtgacactatagaacaagtttgtacaaaaaagcaggctggtaccggtccggaattcccgggatakykgattcagctgccagtatgtgctttgctggctaatgtttcttcagcatttccacattttcataggctagcggccaagttgtccgacagtctggtacctcttgggggtggaagtgggtgtgtatatgtggagctggtagcactagcatgctcctgtatgtcgccagttggcatatggtagaactggcagaagctggccccgccaacctggaagcatatagatactaacaagcttcttcagcctgcccaaaatggctcgaggaagctcactcagatcctctgtgacactgatcccaggaagtcagaactcttagagcagttttctcagctatgtcggatctgaggtaatcaagacagtacatctgaactggagtatgccatcattgcactaagacatattgtgattaaaaaaaaaaaaa

SEQ ID NO: 175 - DNA, 712 bp, Homo sapiens
tttttttttttttttgtattttgtgatccgcccgcctcggcctcccaaagcgttgggattacaggcgtgagccaccgcgcccggccaagagctatcttttaaaaactgagggttttttgttggttggttggttggttggtgttgctgttttgagcctgtcactttcatgcttaaaaattttccacgaccttcccattcccttcagaatgaagttcacattcttttgcatggcagttcagagcaccggaggttaattactaggaaggactctggagttagacaaacccaagtttgattcctagccttgtccatgtaaacaggtgcatgacttcaggaagcaaatctcaacaggtttaacttttcccatttgtaaaacaacgagtaacttgctcgttgttttgttggaaatcatgaaagtgacaatttctgtaaattgcggtgctcatgcctgtaatcccagcgactcaggaggctgaggcaagaggattgcttgaggccagaagttcgaggctgtggtgagctgtgactgtgaccactgcacttcagcctcggcaacagcagtgagaccccatgtctaaaaaaacaaaggacctagcacagtagtagcacagatatctggtccagaamamgcaccccaattmatttgtgctactcwattaatagttactaatttamaaamaaactgaaawtattatacatctagttctttatg

SEQ ID NO: 176 - DNA, 765 bp, Homo sapiens
tttttttttttttttttcagaccaagtgaaataaaggtttttactctgtcctaaagatgaagtaaatccacattcttatcgaattaaatttgcatccttaaaggactactgactctgggatagataaaagacataccaattaggaggactgagaagtccataccacagatggttgaggagttagactaaattggcagtgaattaagtgcataaaagtgtcaaaggcaggcctaaaataactcgaattctccaaggcaattcatttttttgttactacaaccatctgtcaatctgaaatcaatcctacgaatccttacgtgcaaactaaaaactggagaattgcagacgtttgcaacatttaatgtgaaattagtttcatactgtttcctgaagatgctgatggtgtaggtcaaatgaaacatcatagaagcaggcagtatatgtatatcctttagtatatcttttaccttcagaaacttttttttggagacagagtgttgtcctggctaaataaagtgcagtggcacgatcctggctcactgcaacccccgcctcgtaggttcaagcgattcctgtgcctgagcctccaaagtagctgggaccacagtgccagatccccacagctcgtctcttcatcttggttttgccacagamagagcagtgtacttggcgtgctggctgattcaatttctycaccatttccggaggggaggcccatagcgggtyccgwatttaccgaacgatccgacttcttggtacgttatc

SEQ ID NO: 177 - DNA, 790 bp, Homo sapiens
tttttttttttttttttttttttttttttttttkgtgttcaaatccactttatttaaattatttggtaattttagcagtacaaaatctttgactatgaccatgggacacagacatgagtttatgttttggtttgttgtggtctggggatcatgtacttttctaaatcctctgcacttcctttcattaacaaatggcagagtgccgtaagttcctctattattcatagaaaagaaatttgtaaggtaagactgaaaaaataaaatctacagattcacaaaattatcttccaatattaagaacatacaaagtatactaaagacatctacatttagtcctccaggtaacaaagcaaacatttgacgtttgacgtttctgtttttacttctkgctaattacagttcagagaccaaagtatttccaaaagctatgaaaaccctcactgacgctcctagtatggatttaatggaattagaggatagaactatgagagcacttgaaaacttgcctttaaaaatcacaagactttcttttcctcagtgggacttttcttctgcagtagctgagggcactatttgcttacttaatgccttataattagcatctgccttacagtagatctaagtatkggcttatttaagtatattactggatagcacgtggtaggtagcctttttgtscaaggcaaacatacagcgaaycttwaagtaaaactcagaggttyggtgccccttagtgtctccagcgagccgmagtgcwttggagtctgrtccaamttmtwggsatgctggg

SEQ ID NO: 178 - DNA, 716 bp, Homo sapiens
agttagawtttggtgatggctgcacatctctgtgaatatactaaaaacctctgaattctgcaactttcaatggctgaaatgtatagtatgtgaatgatagctcaataaagccgttttttgaagaagagtaagatggaattgactaagttagccaccaatacacagaaaaaattaggcacaagatttatttcaagcaaacaagtacttttagtgtagttgtccaattaagaaataaacatttgaccacttaaaaagttgaataataagtaattactttcttatctgtggaacagaaatttgattttcattgccactgtcatataactgtgtatatttcaggcaggtgcaaaataaaaagtataacttgaccattccaactgttcaagtctgttcaaataccataggattcaaaatggatgcatttaccaatttaactgatagacggatagatagatagatagatagatagataacataggtacataggatcaaccaaaataaaaaggagtgcctatgtaatcaatcctaaagtatcatytwgagatccctctgaattctaattttatyyaatatgtytattttamactgctctgwaggaaatatctccattgtcacatggattcmctttatcagcatagaatatcaggctgatgtaaatctktgagacatatgtatctgacaccatgtaatataggttaaaaggaaaacccttctca

SEQ ID NO: 179 - DNA, 954 bp, Homo sapiens
gggatgcggttttggcagtacatcaatgggcgtggatacggttgactcacggggatttccaagtctccaccccatgacgtcaattgggagtttgttttggcaccaaaatcaacgggactttccaaaatgtcgtaacaactccgccccatgacgcaaatgggcggtaggcgtgtacggtgggaggtctatataagcagagctcgtttagtgaaccgtcagatcgcctggagacgccatccacgctgttttgacctccatagaacaccgggaccgatccagcctccggactctagcctaggccgcgggacggataacaatttcacacaggaaacagctatgaccattaggcctatttaggtgacactatagaacaagtttgtacaaaaaagcaggctggtaccggtccggaattcccgggatggccgcccttttttttttttttttttgatgtgtaaaaaggctttatttgcaggggagcaggaatttaatcaaaaaggccaaatcccatgtcatcatctgactcttcagactcctccttcttctcatctttcttctcctctgctgcagcaggggcagaaccagcagcaggggctgcagagcctggggcagcagagacggctacagccccaccagcaggtacactggcaagcttgccaataccctgggcaatgacgtcttcaatgttttttccattcagctcactgataaccttgttgagccggtcgtcgtccgccctcgaatacccaacgcctggtccaaggaatccttccttggaatggtcccttgtgcgcctgtggggargagattggccccctatagggccagcacascaggtakagaaggcamgtakacgccgactckcggcgrgcgcgywctgtgcggssgagagcgcgcgcgagaaaatctctcagcgctgtggcagaccctcgtggtgagtctcccccgggagatatc

SEQ ID NO: 180 - DNA, 760 bp, Homo sapiens
ttttttttttttttttttttttttttytggaaggttctcaggtctttatttgctctctcammttccaggaattgacttatttaattaatccatcaaccyytcatagcaaatatttgagaaaacaaatktatattcagrttcttawyttcaktagggaagtaagaagttgcagctcagyrcacsatraagttgagacagagatggagacatccagcccacytctctggaacargaaagatgayyggggaggraacacaggtcagyrtgggracaggggtcacrgtggacacrrgggtgggctgtctctccacctcctcacattatgctaacaggaacgcagacacattcagrtgcctttgcagaaagagatgccagaggctcttgaagtcacaaaggrgaggwgtgaagaaatcctgcatctcagtcccwcacagrcagctgtctcaggctttwcaagckrtgagagacwcatcagagccctgggcactgtygctggacgcagcctgagagyagctccctccttttccacctgagctcttcctcctacacatcacaryagcsaycayagctcckakgacmrctaggacwgcyaggacagccaggccagcaacratgcccacgatggggatggtggrctgggaagayggctyccatctcagggtgaggggctycggcagcccctcrtgctgacmtgcmygtgtwtctctgstcttctccaggaaggacaccacartgccactctggaggtcactctggggcg

SEQ ID NO: 181 - DNA, 1294 bp, Homo sapiens
ggcagtacatcaaggctggatacggttgacttcacggggattccagtctccaccccattgacgtcaatgggatttgttttggcaccaaaatcaacggggactttccacaatgtcgtaacaactccgccccattgacgcaaatgggcggtaggcgtgtacggtgggaggtctatataagcagagctcgtttagtgaaccgtcagatcgcctggagacgccatccacgctgttttgacctccatagaagacaccgggaccgatccagcctccggactctagcctaggccgcgggacggataacaatttcacasaggaaacagctatgaccattaggcstatttaggkgacactatagaacaagtttgtacaaaaaagcaggctggtaccggtccggaattcccgggatcaaacccactccaccttastaccagacaaccwwatttacccaaataaagtatagscgatagaaattgaamcctggcscaatagatatagtaccgcaagggaaagatgaaaarttataaccaagcataatatagcaaggactaacccctataccttctgcataatgaattaactagaaataactttgcaaggagagccaaagctaagacccccgaaaccagacgwgctacytawrwamrrhwwaaararmamammvrwmwawrwarmaaaawarwrvraarawwwawarvwagaggcgacwwacctaccgagcctggtgatagctggttgtccaagatagwatcttagttcaactttaaatttgcccacagaaccctctaaatccccttgtaaatttaactgtwagtccaaagaggaacagctctttggacactaggaaaaaaccttgtagagagagtamaaaatttarcacccatagtaggcctaaaagcagscascaattaagaaagcgtycaagctcaasasccastasctaarraatcccaaacatataactgaactcctcamacccaattggaccaatctatcaccctatagaagaactaatgttagtataagtaacatgraaacattctcctccgcataagcctgcgtcagattaaaacactgaamwramaawwaamagcccaatatctacaatcaaccaacaagtcattattaccctcactgtcaacccaacacaggcatgctcataaggaaaggttaaaaaaarwaaaarraactcggcaaatcttaccccgcctgtttaccaaaaacatcacctctagcatcaccagtattararrmammrmmwrmmmagtgacacatrwwrwraaaaaaaaaaaaaaaa

SEQ ID NO: 182 - DNA, 832 bp, Homo sapiens
  misc_feature (115)..(117): n is a, c, g, or t
tcacgggattccaagtctccaccccatgacgtcaatgggattttgtttggcaccaaatcaacgggactttccaaaatggtggtaacaacttccgcccccaatggacgcaaatggnnngcggtaggcgtgtaacggtgggaggttctawwataagcagagctcgtttagtgaaccgtcagatcgcctggagacgccatccacgctgttttgacctccatagaagacaccgggaccgatccagcctccggactctagcctaggccgcgggacggataacaatttcacacaggaaacagctatgaccattaggcctatttaggtgacactatagaacaagtttgtacaaaaaagcaggctggtaccggtccggaattcccgggatggaggaagacaaggaggcagcccggctgtgggagaagtggctgaggtggtatgtggagaagaaggccaagaagactgcgttggtggtcaagtcctccatcccgctggacatcaagccttgggacaatgagaccaatatagcccaattggaggcctgtatgcgcttcatccagctggacgggctggtctaggggggcctccaagctggtgcccatgggctacggtatccggaagctgcagattcagtgtgtggtgggggacgacaaggtggggacaaactttctggaagaggagattaccaagtttgagagcgtgtgtagagtgtcgatgttgcagctttcaacaaggtctgaagccttagagtgtgtgtgcgtgcatgcgcacgtgtgcaagtgtgtgaggccctgccactattaaaaactgagaccaaccaaaaaaaaaaaaaaaaaaa

SEQ ID NO: 183 - DNA, 744 bp, Homo sapiens
gttacgccccgagtgacgtcaatgacggtaaatggcccgcctgccataagccgcaagacatgacgttagggactttcctactggcagtacatctacgtattagtcatcgctattaccatgktgatcggttttgcagtacatcaatgggcgtggatakcggtttractcacggggatttccaagtctccaccccagttgacgtcaatgggagtttgttttggcaccaaaatcaacgggactttccwaaatgtcgtaacaactccgccccattgacgcaaatgggcggtaggcgtgtacggtgggaggtctatataagcagagctcgtttagtgaaccgtcagatcgcctggagacgccatccacgctgttttgacctccatagaagacaccgggaccgatccagcctccggactctagcctaggccgcgggacggataacaatttcacacaggaaacagctatgaccattaggcctatttaggtgacactatagaacaagtttgtacaaaaaagcaggctggtaccggtccggaattcccgggatcgggcggtccgccgcgaggcgagccaccgcccgtccccgccccttgcctctcggcgccccctcgatgctcttagctgagtgtcccgcggggcccgaagcgtttactttgaaaaaattagagtgttcaaagcaggcccgagccgcctggataccgcagctaggaataatggaataggaccgcggttctattttgttggttt

SEQ ID NO: 184 - DNA, 739 bp, Homo sapiens
tttttttttttttccaagctgtaactactagaaataatatatttttaaaattgtactttaaaaaaattttatttttaatttttgtgggtatatagtaggtgtatataaatatacactgagacacttgatacaggcacgcaatgggtaatattcacatcacggtaaatggagtatccatcccctcaagcatttattctttgtgttacaaacaatccaatcatacactttttgtttttwaaaaatgtracrgtgtacttttkgtgcaaaaagcytttawyttatttttgattattttcttagaataaattcataatagtaagatgtctagatcaaagggcttaaatattttttggttctcacagtgtggtaccaaattgcactttcaagggcctttgccaatttacgctgggaatatcaatgtaagagtgatatatttgtgttatatcctttcaaatactgtcatttgaagatgagatttttccactctctggtcaccattccacattcaaaggcaagggttctcaggaattctgtttcagtggccagggtattccaaggctatgaagaagctggattataatggcctatgcaaaggtcccatctcccatctgttagcgaaatcccctttaattctaccattaggtactcttccytttggcttaaggcttaragtgttctaaaatgccctctggaasgtgttctttaaaaggctggtgcaataatggctcttgtgaaatgc

SEQ ID NO: 185 - DNA, 714 bp, Homo sapiens
tttttttttttttttttttttttttttttttttttttttttttttttgagagcatgatcatttattgcgcaaaagaaaattacaaattccactaccaacactgacaaataaatattatttaagtcaattttattattgatattagaattgaggacacgagcattagtttatttacttaattttacaaatatattaagaatcttctaaatgcaggccttgtgtggggtgcaaggaatctagtagtgaagaaagttagtatacgttggaaattctcagcatacatatactacttacattcaataacctctctatataagtagcactctggaactgataaaatttggcactactttattatatattaattgaatatttgaaattaagaggcttgctcagttccaataaaaatctgtgttacgaatgcattgcctcaaggcaaaatttgacagtatcatctaaaacaccaaaaatgtcattccaagaggacaaggtttgaagcatcagggacatcaaagtatacatttacaaaactagctgaataggcaaaataattgtatactataattttcagcatataatttcagtacctggcccatattcccttcaaatacstwgaaacaatctctgaccacggaggcatagtaccatgcattattaaaccagatctgacactatatttaggtatcgaattctatgtgtgtagatgatctctga

SEQ ID NO: 186 - DNA, 736 bp, Homo sapiens
gggaagggtgagggaataaagaactacaaattkggtgcagcatatactgccttcaggakatgggtgcaccwaaaccctcrcaawtcrscrstgtargactttactgcatgtaaccrwatacttatctggttccgscrrwacctatagaaatgrwrrawwttrrwwwracacacatcgtccacgttatcstccacgttcccgcattacccttaccagcctgtgtaaccagtccttcgtattctcgtatctgccatgagttcaattgttttaatttttagctcccccaaacaagtgagaacatacattaacaaatgtagtctaaaacaatraatagaacaatatatgcaaaaaattatagtttctctggcctgaggtattgtgaagattagttcatgtttaaaaggaacttattgcaaagcactgggccgggcgcggtggctcacgcctgtaatcccagcactttgggaggccgaggcgggtggatcacgaggtcaggagatcgagaccatcccggctaaaacggtgaaaccccgtctctactaaaaatacaaaaaattagccgggcgtrgtggcgggcgcctgtagtcccagctrcttggraggctgaggcaggagaatggcgtgaaccygggaggcggagcttgcagtgagccgagatcscgccactrcactccagcctgggcgacagagcgagactccgyctcaaaaaaaaaaaaaaaaaaaaaaaaaaaaaaaa

SEQ ID NO: 187 - DNA, 737 bp, Homo sapiens
tttttttttttttttttactaccacatggccaggctgcaaatttttcaaatgttaatgctcgtgtcccttttaattatagattcttcctttaggtgattccattgtggacataatttagtgtaagctgttaaaagtaacaatgccacttcttgagcactttgctgcttagaatttttttcttccagatactctaggtcatcgctcttaagattagccttccataatgcagccaaattctctgctacagtgcaacaatgcagccaggttctttgctacagtgcaacaatggggatatttgctccagttccaataagttcctaatttctgtctgagacctcattagcatagccttttctgcccatatttctgtcagtattttggtcacaactacttaaccaatctctaagaagttccaaactttccctcatctttttatcttctgagctctccaaactcttccaacctctacccatcactcatttctaaagtgcttccacaatttcagttatctttatagcaacaccgcgctccttagtactaattttctgtcttagtctgtttkgtgttactaaaaggaatacctgaagctagtaatttatttttttttcaaaaaaaatgtttatttkgtttaccagattgggcatctgtatgtggtgagaacctgagctgttttcactcctggtgaccggtgacgcgggctgagctgttgtgtgccgagatactgatgacgcagaac

SEQ ID NO: 188 - DNA, 742 bp, Homo sapiens
tttttttttttctctagggcatcttagttttgctcataaagtctttctcatttcctatattttattctagtatcttcatagttttatttatttccatgtttaattctttaactggaatttatttttgtgtgggtatgacaaaattttaagaatctttaatgaaaaacctttcactttcaaatctgtaagtaatatcgatgttataaaaagatgaaccaggtttatccagtggtgccctctgagtacactttcaggggcacaagtgaggaaccaaaagacacatttaaacttcctaatagtgccttgaaagctctccataatctgtctccaaacatttttttccaatttcttcctaacctgccacctccttcagaaagccttttgagatttctcagcttgcatggatgctttttaatcactcagagcactttaataagttatgcctcctggtggttttgctttattattattattgttattattattagtagcagtatattttaaggaagcttttttatctaatcagtcaaccagcttcttggaggcagtttttatgtgtcccaattcagtgtccctgtacacaataggtattcaaaagcatttctctaaaataaatgagaatatgctgccattttcagagtctggggttaagatacatgagaagatggcmgaacatctgtkktgtktkggsccrgmatgggaactggatcctttgctgctcttgacgaagagggctgcagag

SEQ ID NO: 189 - DNA, 766 bp, Homo sapiens
ttttttttttttttttgcaatcataaaataactttattggtcaggttagccaccactcatgcttttcctgtaataaggatcctttataaaggcatgatggtgttcacatgcagatgctttctgaagagccctggggcagggggcagccttgcccctcacatcggagctcctttgttgaaatgagctggtttggcttwtgtggattccaggtctggagccaagaacstagtccaaagatcccctcttcccttctcagggaaggtgcttcaaagcatacacagtatcagggatgtgatggcatctgggcagagcctatacttgggctaactctcctccaacagtccttgcccctgactgcccagatggcttwgtcccaaccttgcccaagagggcaggtgggttaagccccaggcaacattacctttkgaaatgggaagaattaagtgctccccagccaaactataaagcaaaagccaccttcactaatgaggatatagctcagagatgtgaacagcagagggtygtatgcccagcacaggcaagatyyggctgcctggcctgggcttcacggaccccagccagagctggtacttyywagctatggccttaggacaaaccaggtgaaacaggattaaccacatcctccytctttgggctagccaagtccaggattcttccatctaccacaattgctgtcctggaaaagagtgagctactggctaatgtctcaaaagaaggtgctgtcctgaattgcccataaccacta

SEQ ID NO: 190 - DNA, 706 bp, Homo sapiens
agtaagaagcagatccaccattcatgctaaatttggctccaaatcttttgctcttttcactatcgcaatatatgtactgattatacttcagaaattgttttaaggtcccttgcttgttattatcacagggaagataggaaagaaacatgttttataaaacctatgtgttcagtctcttatcatggtttcagattcaataaaggcattttctagttgtcttttaaccatattttttttccttgtaaaacaaatgaaacaagtagtgctctgagtatttgttggtacaggtgcagcttgccctgttgtatatgcgctggccatttctgtgtcactcaccattggcattgtgctactcctacatcttgtccttttgggctcataataggattccctatacctgctgtattgctctgggtaccacaggatgctgctgcttttgcaaacatcttagcttagtcctctattggaagataatctagcccctttagggttagcccttttgaggcacattatatttactgcccagggatagaagtacagacagaaagatgtaccaccagtgagtwwactgataatgaaaatagttgaacattgtgaagtgatgcccaaatagaaaaccttggcgtcaatctctccagccactagcaaaagtacttmagggatgaagaatatgttctatgtycttycttmmtgaatgccatgtwct

SEQ ID NO: 191 - DNA, 739 bp, Homo sapiens
tttttttttttttttaacggagaggagccaagagacactgttgaaagttggcagatcaagaactagggccctgaacatattatttagagctatgaaaaccatggcccgaaaaagtaaaagcagaaactttggaaagttattaccctkggcaagaagggtgggagggaaagggagggttttattctataagttacagcattgtttggatttttactactaagggtattactgttaaaaaattaattaattcattcagaatggagcaattcccacaaattaagaaaaacaaaaaaatgcactcaagtaatattttctagaacttacaattaccacttctctaacacttatttgttaattatcttatactattcacagctaacggtggctacataattgcctggtatggcagcaatgtacggtaactatgaatacatgcatcttcttwtaggctggatgatgaacgtgtgccatctctatctagttgtgcatcaamacagctaascattgtasttctgtgttgcttcaaagtaagaccaactagtctcaaattcaagttatggttttgtagacaatcctcatcccaagaggtttacaaacaaagatttgtttaaataaatcatttcactaaaaatttgctttctcgaagttcaaactgtgaagttgcttctggagatcttggattgggataacttaactgatttcacttacttctgaaattcccagataaaagcgattgtgt

SEQ ID NO: 192 - DNA, 752 bp, Homo sapiens
tttttttttttttttattgccctagatgatagtggcttgcttttcaaagttytgaggaaggaacttcagcataaccacttgctctaccctgagaaagctccaaattaggtaaaacaaaattaagcaccttgtgtcagttcttcagggaacccccaaacagatcaaaacagacaaacactattctgctctgctgaaacactttctgctctgattgaaacaatatctgctcttctcccttcagaaccaggtgcccacaatcagaatgaagaattctgtctgaagatcactgtcccactgagaaggagtggggtggaacaaaagtaaaatgccgacaaagctatcatgttgtgctttctcctggttgagcattcacttagttgctgtaaacctttcattatcttccagggtcctgagaagtttcatcctgattgcttttttcacagatttktcaatggtctctggggatatacaggcccctagatttccttactccacctgtatgactattaggcagctcaggctgccataacagagttaccagagacttggtggcttaaacaacaaaaaatyasgattatyggattasgactccacctttatgacctcatttaaaccttaattacctccttaaaagatcctgtctccaattacmgtgacacagaggattaggtcttcaacaaatgggtgtgargagamarggacmattacattgtcttttttgctgacatcatcttgacttcatcattattaat

SEQ ID NO: 193 - DNA, 764 bp, Homo sapiens
tttttttttttttttttgattaaaagattaataatatgctgtttagagaatttagaaaatgcagataaaattgtatatacattatatatacagttgattatgttctttgtatgtagcaggcaatgagataatacacacactttttttttttttttacaataaccttatgaagtaattgttttatcccaattcctttgcagttgcataactggggcttaaagagaaagagaaaacaatttgcctaaggtcatgtgacggtaggcagaggcacaaagacttgaagtaaagtcttctaataccaagtccaaagatttctgccttctatcatttgtttgtcttgaaatctgtgagtgtcagaacatagaaaatcaaaggtcccaggaatatgctcaacaccaactacaagcaggaatattagggcactgatctggcatctgttcccatcaaaactgtgaattactgttgctaatcccacatattwwwctgtcctcaacttacttgactttwttctcagtagttwwgctgctgttacctctctcccctaattgaacactctcatctmmcagcttccataatatctcactctgccgttcacttctcttcctawttttgtggcctgtcctgccttctcaccatgacaagtwtgcyttcttscacccagtcatgaatgccaaamktctcagggtcagtcctcccatctcttgtgtgactccctaatctcaccattcattggttggatttctattatccattgtggctccaag

SEQ ID NO: 194 - DNA, 774 bp, Homo sapiens
tttttttttttttgccctctttctctcccttcctccatccattcttctgtactttacgtacatcatttcttctgtactttctttccttctttatttcttaatgacaagaagacaggggttggagctagcagagtctttcatttgttgagtgcctacttgatatcaggcacctggctaagcacacgggggcttttgtagcattcagatcagactaaatttggcatgtttatccacaccaagtgttgatttttcctgtagtacaaaatattgcaaactggtagctgaaaggcatttggaaccttatctgaggaattcagacatccttctttctctgactcatccccagcaaggataaaaaaaagagatagttccacgtttccatgtgcacttattctcaatgcacctgaaatgacttatctttaataggtccaagcagctcacacatttgctttcattactgacattacagctctagcactaccttgggtcctttaaatagtaaaaagtaccaggccctgtacagttccactcaagcctccttaaaggcaaagtaatagcatctgtcctccaaagggttcctagctgattattagtatcccagtcctcctttctcctcaaaatkgtaaatgtgccagtgtcaggstytgtgtgcaatcgttccccctcagtgagatwcacmacctttttyctctctctyctgcmactctacmcagttatgtttgcacagaatcacccgtwktcggtcmtycmcagatcttcggmgacccctttttt

SEQ ID NO: 195 - DNA, 731 bp, Homo sapiens
ttttttttttttttttttttttttttttttttttttttttttkgggtgagaagccaackgttttacttcccagaatgaaagttaagtgcatgcatttgaaataagatatcctaaaaaccggggtggagagaaattttcatcagttagatcaggagttagcagctttatctgtaaaaggtcagatagtcatgtattttkggctttgtgggcccttcagtgtctgtcacaattccacagtgacactgtgaaagaagccataaactagtatgtaaatgaatgggcattgctgtttcaataatattttacttatgaacactgaaatttgaatttcatattattttcacgtatcacaaaacagtatcctcctttggatttttttcaagcatttaacaaatgtgaaaaccatkgttagcttgagaacctcagacaaataggggtcatgggtcacagttggctgactcctgagttagaaaacaattatcatctcttkgattatcatcagatcacatccaakgttatttcaaagctgtytctgtgagtgaaacactcttccttagccttttagagaamcrsaatgtactttgtagcccgcttattggcaatatktmaacacacgccataaatatgggaggtmacaatcgaatgcacttaatcctatatagtaatcctccccccagkgwtagtyacygaacagttgcgarrattamcatcctagagacgcamttccscaa

SEQ ID NO: 196 - DNA, 731 bp, Homo sapiens; identical to SEQ ID NO: 195

SEQ ID NO: 197 - DNA, 799 bp, Homo sapiens
ttttttttttttttttttttttttttkkgggcaaaaaagctttttattttcccccacattccagctcttcactttttctaaaaccttttccaactcagagccaaggcccaagaagttgattcacacctgagaaacaagtcgggaactaggccagtgccctcagagccgggttctagaccagtgggactcccggcgcgggtggaagcacatagcagtgacacagcagagaaggccacagaagagaagcaggaaggagcccaagaccagcagcctggagccacacagagccagctcctccgaggtgagcagcttggtcagcacaaggccttcatggctccagacactaacacattcctcacccattctagggctcagggtggcatttccagccccctcctctgagcaggatatgggtggctggctggagggtaggattcctggaacagcactaaaatataggcaggttcctgcagtcctttctgtggtcaccctggctgtgataaggaccagttgtcctgcagaagatcctttcaatcccatctgacttcccaggactgtggcctggaatgtccgggtcttgttcctgtctggaccgtctccgaagttcaaggtggtcagcaagcccacgacgtgagaccctcgccacttccctgtgactgtcccattcctgkgacacagggtcagctggcaaaagatctcaaaaagagaccagtctgggggatgtcagggctgcgcaggccagtctgtgggtgaagaagaagctgcaaggcccagcagaaggccagagcagcagacaagt

SEQ ID NO: 198 - DNA, 710 bp, Homo sapiens
ttttttttttttttttttttttttttttttttttttttttttttggtaatatttttctgtaatctattaattggtttaagactatggtatttaatttccacatatttgtgtwttttaaaaaatgtctcckgctactgatttctagtttcctgcatggggatgcaaaaaatatttgataccattccagtcctctcaaggttgttaagatttgtttkgtgccctaacatgtgatctatcctggagaacgtttgtgtgcacttcagaacaatgtgtatttggctgctgtcgggtggaatgtttggtatatttctgttaggtctactkggtcgaaggtgtaattcaaatccaatgtttccgtattgattttctctgtagataattggtctatggttgaaatgggggaattgaggtaatctactattatatattagggtctatcttctcccttcagatcattgtaataatggtttcagtgtattgtaggtactccaatatggtgcacatacggtatttaagtgctccatatsgctgttgtgttyacaatatatttacaattttatatattctgggcgaattagccaagaatacattttagmaattctatgtttatgtaaacwkatagttttgaaagacatcattccctcaataragatactggaarrcactattactcagatctgactaatctattgctaaggcaatatcaggag

SEQ ID NO: 199 - DNA, 698 bp, Homo sapiens
ttttttttttctctaagcctcagttttctcatctacaaaagaggggcttgtattgaagtaaggccctttcaactctgaaatcctggggtctggggactaattgaagggtgcacatatgtggtgatttaaaagcaccttccaagcaggggaggctcatgggccaactagtgaggctgctgccaaaatagaacatgcaggtcaggagcagggatgtcctcccattgggaatctagggaagtcagtcttcttggcaccatcctggtaatatagaatacctggctttaaatgtaagtcactctaagaactctgttttccatctggagtgcagggtctgccattttgagaatttcatagtgtgcactaacacattttgttttctttagagcaatcggttataataatacatccaccaattgttacttttttggtgcaagatggattagaactctgacagtctggacacaagatacacagtgcaggaacttctcagaattgagccacctggcttacagacatttctcaagggaaggaactatgtggctttaaaatgtaattgtttgtgaagtagattatygttttaataagccactatgtcagcmggggctatttttctcctaattgttcaggtcatagtgagctgtgggaaaatagatagagactaatttgactaaaagagggttgatatactctagattccc

SEQ ID NO: 200 - DNA, 729 bp, Homo sapiens
actcaagagtgatgatggttgcccaacatggtgaacatcctgaatgtcacagaattgtacacattaaatggttaatttttttttttttttttttgagacagagtcttggtatgtcaccaggcctggagtgcagaggcacgatctcggctcactgcaacctccacctcccggattcaagatgattcccctgcctcagcctcccgagtagctgggattacaggcacgcaccaccattcccggcataattttatwtwwttwgtattttagtagacacagagrtttcaccatgttggccaggatggtctcgaactcctggccttgtgatccacctgcctcggcactcccaaagtgctgggattacagacgtcagaccamcgmgcccggmctaaaatggttcatttawatgttatgtgacttatatwtccwtttwmwwtwwwwgagaataggggtactccctctgttgcccaagctggaattgcagakggtgcaaatcccagctttaccgmagacytmtayctcctgggctcgagggatcctccmacctmagcctcmatagatagtwggacttcaggtacatgccamcacatytaatwgtktwwwaataagamatgargtctccactgkgtrgttgccccaggactygwtcatcmaaactcmstgrgactcaarcaatacmcctactmtttgggccyycccamaatgttggggmwtacargrmtgwrmcacwgg

SEQ ID NO: 201 - DNA, 768 bp, Homo sapiens
tttttttttttccgccctttttttttttttttagatctgtgttcttttaaagcataaacaccaccatttgctagtcatgtatgaagaagagtagacaagccattagagtggtagattggagtaatgtgaagggtattaaggctacattttctaaagtttgtactggggacacaagccctgtaagatgttccaagaaaagacagctttatgattaagtatgcatggtaaacaccgaatattatgtcttaccatagagattcacaaggtgggtttgcattttaaaggctctgacaggctggttctgtcagtaaacctgtttaattttgtttggcccaaatttcataaacttattgatcaatgtataccctatctgaggaatatcctttgaacatctcaaggagctggtgttccattgaacatgttttagaaaatgcttctttggagtttcctcatttagtattcttttttagtatctactgtttgcacaaattaaaggctaatacccatacaagagaaatttttacagtacttaatatgcattgtaggaaaatctatattttaccatttaataccgtaaaggtgaagatggcttccattaaaaattcccagtgaatgcaaaggtgaaagaaaaacttgaagttaggcattgaattttctgcttaggaaactcaattatggataatttggmcgatgatggttcctgagtgagatmtcyttckgttaagtctaactcagtttgagacactcttagtgggggtctttggtcga

SEQ ID NO: 202 - DNA, 789 bp, Homo sapiens
cgcgaaacgcccctggcaaacatcaggtatataccagacccccttgacgtcatgcggaatgccgcctgcattatgcccggaacagascttakggactttctactgcmrkacatctacgtattagtcatcgctattaccmtggtgaykcgtttygscagtacatcaatgggcgtggatagcggtktgactcacggggatttccaagtctccaccccattgacgtcaatgggagtttgttttggcaccaaaatcaacgggactttccaaatgtcgtaacaactccgccccattgacgcaaatgggcggtaggcgtgtacggtgggaggtctatataagcagagctcgtttagtgaaccgtcagatcgcctggagacgccatccacgctgttttgaccyccmtagargacaccgggrccgatccmgcctccggactctascctagsccgcgggrcggataacaatttcacacaggaamcagctatgmccatkagscctatttaggtracactatagaacaagtttgtmcaaaaaagcaggctggtaccggtccggaattcccgggatgccgggggggctccagccaggtgggctccagcgttcccactgtaaaaaactcttctattggtggatgagatctgatttgtgagggcctggcaccctgcaagtaatcaacacatattagctgtgatcatccacaagccaaagaacacggaggattaccagtaaccaccagaacaacctaaaaaagactggcttgcagaggagaaaatgcwaaaaaaaaaaaaaaaa

SEQ ID NO: 203 - DNA, 742 bp, Homo sapiens
ttttttttttttttttctgagaaagaaataatcatttatttatgatattgaaaatttctacagtaaacactcaaaaccaagcaaaaaacatttgtaagatacacggtatctatttggagcaacggtttttgtaactaatgtgtttcattttttaaataaagacaactaaaaataatctctttctgcaatgatttttatagcagaaattgacttatctggagtgttctagcaatttttaggtcatttagcagaacagtaagcttccagaggaaacctacacttctatcctttgggcctggcctgttctgtttctggattctttccgcagtaaagtacaccgagtaacaggttaaagaatggcagtttcacctggcctttacagggacacttacttctttcagaagtcattaagtcggcttttattattcctaaacaaaagagctttattttctcatgagtaggttttagragttttaattgttgacaatttttcagttactaatagaaccccagtcatttcattttatttttccaagggacaagagtctattaagggaaccattaactattcagtacagtgaattactttcagattactaaggaaaaggaaagtgagcagttataagatgccaaacacctatctatctgcctgaaatatgcacctttcaggttggactaatacmttcactccccttgmtgaaaagcttccaamaccmcgagacatctcagtttcagctacttc

SEQ ID NO: 204 - DNA, 744 bp, Homo sapiens
ttttttttttttttgattaattatttttatttttctatattttatgctctataagcttaaaatttatacttaccaagaccagcttggtcatggagaccctaacccagcagcgctagaggaattaaagacacacagaaatatagagtgtggagtgggaaatcaggggtctcacagccttcagagctgagagcctggagcagagatttacccacatatttattgacaacaagccagtgataagcattatttctatagattgtggattaactaaaagtattccttacaggaaataaagggatgggccmmagtgaagagatgggctgtggctakttwtctgcrgcaggarcatgtccttawggcrcagatcactcwtgctmttgtktgtggctyakgaasacctttwrgcggttttctgccctggktgrgccwgktgttccttgccctcatkccagtamacccacaaccttsagkgtgggtgtcatggccatcacawryatgtcacagtgctgcagggattttgttkatggccagtwctggagccagtktatggccagatttkgggggcctattcccagtgatactctattactatcacagagattcccctagaaatttcaaaatgcttctcratttatccaaagtctaacatcagtccgcatttttaccctttatatgammraggaaatgsctctagracattctggtgtgtaggtatgtagtggcttcagtccttagtattccaca

SEQ ID NO: 205 - DNA, 728 bp, Homo sapiens
catggtcttaaacaggtcttattttcatcggagttaatccaaaactccagtatatgacgagtgcmgttactgaaagatgtcagttaacagtttgcagatttcgaatatagctatcattgtgattagatcagcagatatggtggcttkgaggaacaagaaagattttttaggtttagaatagtataaacagtgatatagctgtggagctggcaattgcaagcagtaagatgtgctgtacctgacaacttcaagtaaatatagaagctctgasatatttgaagaaagctgttgtctaaaaagtcatttgtcaatcacttacacaagaagtagttatkgaactcctatttgccaagccttgctagtcattaacagaaatacaaaaaacaaarcacagcaatagcaatagtattgtaatagacaacatctatcccctttaaggatatagtctggttggggaaatgacaatatggagacstacagcaattagcaagcattataaaataatgtaaagtcctaattatataacaaaatgaaaccccgtctstactaaaaatacaaaaattagccgggcgtggtggcaggcacctgtaatcccagccacttgagaggctgaagcaggagaattgcttgggcccgggaggcggaggttgcagtgagctgagatcgcgccactgcactccagcctgggtgacaagagtgaaactccgtctaamaaaaaaaaaaaaaaa

SEQ ID NO: 206 - DNA, 724 bp, Homo sapiens
ttttttttttttttttttttttttttttttttagagaaaaaggtttatttattacttacagcaatagcagkgggcagagtatcagcattttkgtgctagcttgacaagtcgcaattcctacaaggkgacattaaggaagcaagatgacatctgtgtgtgcacacgacagaactctgagcttaggaaacttgaatcttttatgatgggcaatgcacatacctgtccttcttttaggaggcagacccgtgaaagctgtaagcaaacctgtccttgctccaagggggatactatctctgtcttccatggctgttttaaatgcaagcatccttagaaaaataggctagaaaaaagacagtgccttkgctcacaagttctacagaaacgtgagataccacagagaatkgtctcccaatatagtttagcagatatagaaagttatttcttaatatatgagatataaaaatcaatgagaaaatattaagaatctataatctttggtaatatatgtaaacatttcatatacagagaaagtggtaattaagttaggtgktttktggtattaccagactatgtacttcamcttattttctagatgcactgaacttattaagtgccactaatgtaatatgtmagatctttaatcctaagtgatcaaattggyttaactwtwtmtrtgcttatccactaagttaatatctaagtttcatgtttctaatgtcgtata

SEQ ID NO: 207 - DNA, 743 bp, Homo sapiens
aggggtgacccgaagcctcctgggcagaagggtggacctgccttactcgcatgtgccgcatccccctgcascggaaggccctccctggacacatctgtgcaggttcccataaccagtcacacgggagcgtttgggcgcagcattaaaaaaatgctccgagttaatttcctgggcccagctcctttccactctggatttcagcctcttaggagaataagccagcgaagtggggttgggccgcagacacaggagtgggagaaaagtggaggggagggtccatgtagtcagaccaatactcccactgaaaccagatcatatggtggactcagtgttttaatgctgtgtttttggccaggcatggtgtctcccatctgtaatcctgacactttgggaggctgaggcaggagaatggtgtgaacctgggaggcagagcttgcagtgagccgagattgtgccactgcactccagcctgggtgacagagcgagactcagtctcaaaaaaaaaaaaaaaaaaaaaaaagaaaaggagaagtctaaaaataagtgatctcgttatgcacctcaagaagttagaagaacaagttactccaaagacagtaggcaatagcaaaaaataagcacaaaaccaaaacttaagtagcaacaaactcacagcagaaataattagcaagccaaacctgggtctttgaaatgcttaataaaatggataggtcaagcaagactgatcaagaaaaaaaaaaaaa

SEQ ID NO: 208 - DNA, 731 bp, Homo sapiens
ttttttttttttttytttttttaaaatgctggtttccactgcatttattactaatataaaaaaagttaaaaagaaaaaaaaaaaaaaaacctcattctcagttctccaacagctctcacccctccctcttgycaatacaactcctgacccatttcctcagggccagttcaaaactgaacctgttcactgctgttttcacagaaaacaaccagtgccagggatgtaggggaagaggattggaagagggcaacagtactgtccagcttctacccaaagataggcaaggtggagattcacagaattcaaatgaatggactggtggcctcacaatgacatagtctaattaaaatgggctggaagggatctaggtaggataaagccattggaggctttataagacatgtcatgggtctgtgtcagactcagaataaccaacaggagaagaatggggagggccagggaggcagtctgatggaaagttcacaattctcccatgttgggaagtgggaaagtccagagggcaccaagcgcctcactcatttgggcaggaaaacttattctagtgctgggaagtcacaaaaatgccacggacactgagaaaggctacaagggggatgcacagtttcacaaagcacggtgatcatagatagaccatagcggtggggatcatgctactgacagagaaactatgaaatccaaggcaggcacagtggcttaggaagtactctgca

SEQ ID NO: 209 - DNA, 821 bp, Homo sapiens
ctcaatggtggatattacgtaacttgccccttggcagaacatcaagtgtatcataksccagtacgccccctaktgacgkcaatgacggtaaatgcccgcctggcatwatgcccagtacatgacttatgggactttcctacttggcagdasmatstacgwattagtcatcgctattaccatggtgatcgbttttggcagtacatcaatgggcgtggatagcggtttgactcacggggatttccaagtctccaccccattgacgtcaatgggagtttgttttggcaccaaaatcaacgggactttccaaatgtcgtaacaactccgccccattgacgcaaatgggcggtaggcgtgtacggtgggaggtctatataagcagagctcgtttagtgaaccgtcagatcgcctggagacgccatccacgctgttttgacctccatagaagacaccgggaccgatccagcctccggactctagcctaggccgcgggacggataacmatttcacacaggaaacagctatgaccattaggcctatttaggtgacactatagaacaagtttgtacaaaaaagcaggctggtaccggtccggaattcccgggatsysagwcwcmrwktmrmcagrccsymgcyycsargsmsscamctccgycmagcctstccycgmtctkkaksytgcasymtaacwskmgactctgctgctymtgkgaagaacagaattgctcctgcatgcaactaattcaataaaactgtcttgtgagctgaaaaaaaaaaaaaaaaaaaaaaaaaaaaaaaaaaaaaaaaaaaaaaaaaaaaaaaaa

SEQ ID NO: 210 - DNA, 753 bp, Homo sapiens
ccaagtgtacactcccccttacgcaatggcgtagctttcgtggagttctatatwamcagmgctctttaggamcgtcrgwtcgcctgkagacgccatccacgctgttttgacctccatagaagacaccgggaccgatccagcctccggactctagcctaggccgcgggacggatmacaatttcacacaggaaacagctatgaccattaggcctatttaggtgacactatagmacaagtttgtacaaaaaagcaggctggtaccggtccggaattcccgggatcwmwrawwamwcctgccatcatgacccttggccataatatgatttatctccacactagcagagaccaaccgaacccccttcgaccttgccgaaggggagtccgaactagtctcaggcttcaacatcgaatacgccgcaggccccttcgccctattcttcatagccgaatacataaacattattataataaacaccctcaccactgcaatcttcctaggaacaacatatgacgcactctccccctgaactctacacaacatattttgtcaccaagaccctacttctaacctccctgttcttatgaattcgaacagcatactccccgattccgctacgaccaactcatacacctcctatgaaaaaacttcctaccactcaccctagcattacttatatgatatgtctccatacccattacaatctccagcattccccctcaaacctaaaaaaaaaaaacaaaaaaaaaaaaaaa

SEQ ID NO: 211 - DNA, 737 bp, Homo sapiens
ttttttttttttttttattctccaaagtaaatattttcacttggtagcactgagttgtattatatctatcattgtattttaataactttatgtaagcaagtttcaaatgaaaagatttccaaagaagaatgctaggccgggggcggtggctcatgcctataatcccagcactttgggaggctgaggcaggtggatcacatgaggtaaggagtttgaaatcagcctgcccaccatggtgaaaccacgtctctactaaaaatacaaaaactagccgggtgtagtagctgtaattccagctattctggaggttgaggcaggagaatcacttgaactcaggaggtggaggttgcagtgagccgagatcgtgccactgcactccagcctgggtaacagagtgagactccatctcaaaaaaagaaagaagagtgctagtgacagctaaatagaaagttgctytgggggtgtggagaaaaagggagaaaggggagaggagctggccttgcaggttctcgaggggacagcaactcggttgctaataccttcactatagaaatgtgtgtaactcttgggaaaatatctacatttatggcagaaatttatgcccatgcaatctgcaggtawagggttwamagaaactcttccttaagtaagttgcatwtagcatgtccttcawccatggtaaggtatcatctcttgattaaaaaaaaaaaaagggcattttctgtgagacaattagt

SEQ ID NO: 212 - DNA, 760 bp, Homo sapiens
atacagacttagggacttctactgccagtmatctacgtattagttcatccgctatyaccatkgtgaatgcgtttttgssaagtacatcaatggcgtgratascgkttgactcacggggatttccaagtctccaccscatgacgtcaatgsgagtttgttttggcaccraatcaacgggactttccmaaatgtcgtracaactccgccccattgacgcaaatgggcggtaggcgtgtacggtgggaggtctatataagcagagctcgtttagtgaaccgtcagatcgcctggagacgccatccacgctgttttgacctccatagaagacaccgggaccgatccagcctccggactctagcctaggccgcggsacggataacawtttcacacagsamacagctatgaccattaggcctatttasrtgacastatagaacaagtttgtacaaaaaagcwggctgstaccggtccgswaytcmskgkatkcccagggatccccgccccgcggcgsggcgcggsacatgtggcgtacggaagacccgctccccggcgccgctcgtggggggcccaastccttctgatcgaggcccagcccgtggacggtgtgaggccggtagcggcccccggcgcgccgggcccgggtcttcccggagtcgggttgcttgggaatgcagcccaaagcgggtggtaaactccatctaaggctaaataccggcacgagaccgatagtcaacaagtaccgtaagggaaagttgaaaag

SEQ ID NO: 213 - DNA, 725 bp, Homo sapiens
ccacatcttattcagcttcggtgtcactgatccctcgagagcatctggaagagccaaagcccaggagattaccagttatacaccatcactgcttkgcctkgaagcgggatggctcacggctctgtgtgggcacactatgtggtggggtggmacagtttgactgctgcctccgaaggagtatttacaagaacaagtttgagttgacgtatgtgggacctagccaggtaagcaggatggtagcctactgcactgagaacttgcgtggctcattcctccttataacatttccctgccttctggccacagccatagttcaaatttaatcttcatccctctggaagagctgttctgggcaacagaatatgtcagggcaacaccgtggtaactttcctgctgtagttcttgcagcttattataagaaaagttttggctggacacagtggctcatgcctgtaatcccagcactttgggaggccgaggcgggcggatcacaaggtcaggagattgagaccatcctggctaatatggtgaaaccccgtctctactaaaaatacaaaaaaattagccgggcgtggtggcgggtgcctgtagtcccagctacttgggaggctgaggcaggaaaatggcatgaacccaggaggcggagcttgcagtgagctgagattgcaccactgcactccatcctgggtgacagagcaagactctgtctcaaaaaaaaaaaaaaa

SEQ ID NO: 214 - DNA, 728 bp, Homo sapiens
tggaggtctatataagcagagctcgttttagtgaaccgtcagatcgcctggagacgccatcccacgctgttttgacctccctagaagacaccgggmccgatccagctccggactctagcctaggccgcgggaccggataacaatttcacacaggaaacagctatgaccattaggcctatttaggtgacactatagaacaagtttgtacaaaaaagcaggctggtaccggtccggaattcccgggatmgcswmaayrgcrstctrtswmtwcttaadtagyramwgcsgcatmkrrwtaggagyakgammwgarsgawyycccackgtccctacctactayccagsgaamccmcagccaagggamcgggcttggcggaatcassggggaaagaagaccctgttgagcttgactmtagtctggcacggtgaagagacatgagaggtgtagaataagtgggaggcccccggcgcccccccggtgtccccgcgaggggcccggggcggggtccgccggccctgcgggccgccggtgaaataccactactctgatcgttttttcactgacccggtgaggcgggggggcgagccccgaggggctctcgcttctggcgccaagcgcccggccgcgcgccggccgggcgcgacccgctccggggacagtgccaggtggggagtttgactggggcggtacacctgtcaaacggtaacgcaggtgtcctaaggcgagc

SEQ ID NO: 215 - DNA, 743 bp, Homo sapiens
ttttttttttttttttacttcatcagctttggtaccatctctcaattctctattttgaaagataaagctgttatctcctctcttctccaccttccatatccaccatttttcatgtaaatgtttactttttattttgtcttgaagttgcaaccaagtttccatgacacatctatagaccgattgcatcatgcattagaaatacattcttttcaatgagtctaacatcatgactgctgggtggatcaaagtttccagaatcaaggttcaatggaattattcctctttgtttttataccttaatattgctgcattttagtttgcttcgtataggaattattgccttataatacacttgggggttttttgaaacagaatctcgctctgttgcccaggctagggtgcaatggcgcgatcttggctcaactccctgcaccctttgcctcctgggttcaagtgattctcctaccctcagctcctgaggagctgggactacaggcgtgcgcccccaagcctggctaatttttgtatttttagtaagagacggggtttcgccatgttggccaagctggtctcgaactcctgacctcaggtaatctgcccggcttggcctcccaaagtgctgggattacaggtgtgagccactctacccagccacatttgggtttattatacatttcctccacctgattgtcatgttgttattttaactgcattatttgccstgtgattatwatccacaagct

SEQ ID NO: 216 - DNA, 765 bp, Homo sapiens
agatcacagaggagaagccactgttgccaggacagmygcmkgaggygcagmtcamrgaggmkragyyagytgccmgaakmckcctggassmggsmmagactcactctgtggagacaccatacggctctgtcactttcactgtctatggcacccccaaacccaaacgcccagcgatccttacctaccacgatgtgggactcaactataaatcttgcttccagccactgtttcagttcgaggacatgcaggaaatcattcagaactttgtgcgggttcatgtggatgcccctggaatggaagagggagcccctgtgttccctttgggatatcagtacccatctctggaccagcttgcagacatgatcccttgcgtcctgcagtacctaaatttctctacaataattggagtwggtgttggagctggagcctacatcctggcgagatatgctcttaaccacccggacactgttgaaggtcttgtcctcatcaacattgatcccaatgccaagggttggatggattgggcagcccacaagctaacaggcctcacctcttccattccggagatgatccttggacatcttttcagccaggaagagctctctggaaattctgagttgatacaaaagtacagaaatatcattacacattgcacccaacctgrataaccatygaattgtmctggaacagctacgacaaaccgcgagacctgaaactttgagcgtggaggtgatatcaccccttcagggtgtccctgtgatgctg

SEQ ID NO: 217 - DNA, 746 bp, Homo sapiens
tttttttttttttttttwwytccatctttgagaaacatttaataatgtaatgtgtttgtggtacagggtgagtacagatgcacaggaggccatagggtttaggcaaaggggagcacaaaagttgaagatgaggcgctgccatcaatgctgggacttcaggccaagggcaggaactgaggaagccacaagggaggacattttctgcagttgctgaaccagtagcaactaggtcctgagaaagccctctctcgtggaagaataacagccaggcgggaaagcttttcatcctgcaaagctggggaagaagattcttccttaaattgtcatctgcacttcagctcaggaatcctgttggctgaagtccagagtgtcctttctgattcctgaagtagatgaacagcccggccccaaggaagagcaggcccagcacaaagcccccgactccactcagcatcttgctctgtgcagattcagaccgtgcactccattccactgtgagagggcttgtcacgcttgggtgctccacttggcaggtgtaaacctctccactccgaggaactgtttccagcatcaccaggggtctggaaggtccagtctccattgtggatcaggcctgtggacaccaccccagtcttctcttcctggccattccggaaccacctgacttcaatgctgcctggatwgaaaccactcaacagaacagaccagasgttgtggttgctgccagggcctggtcttgaaagata

SEQ ID NO: 218 - DNA, 762 bp, Homo sapiens
  misc_feature (649)..(649): n is a, c, g, or t
agggctttccatgacgtcaatgggtggagtattacggtaaactgcccactgccagwacatcaagtgtatcatatgccaagkacgcsccctatkgacgtcaatgacggtaaatggcccgcctggcattatgcccagtacakgaccttatgggactttcctacttgkcagtamwtctacgtattagtcatcgctatwaccatggtgatgcggttttggcagtacatcaatgggcgtggatagcggtttgactcacggggatttccaagtctccaccccattgacgtcaatgggagtttgttttggcaccaaaatcaacgggactttccaaaatgtcgtaacaactccgccccattgacgcaaatgggcggtaggcgtgtacggtgggaggtctatataagcagagctcgtttagtgaaccgtcagatcgcctggagacgccatccacgctgttttgacctccatagaagacaccgggaccgatccagcctccggactctagcctaggccgcgggacggataacaatttcacacaggaaacagctatgaccattaggcctatttaggtgacactatagaacaagtttgtacaaaaaagcaggctggtaccggtccggaattcccgggatbsccsdybsgmbrkgssmgkgknbtbcckgmsyyskgywgcttgksamwscwkyybwaarmggswrsyawactmcawmwaarrmwaaawaccggcacgagaccgatagtcaacaagtaccgtaagggaaagttgaa

SEQ ID NO: 219 - DNA, 718 bp, Homo sapiens
atatacagccgacggcgctgacccyttccgggggatgcggcattatcagwtcmtarccaaccsgtcagcccctctccgkcccsgccggggkcgkgcgccgcgkctttggtgactstagakaacctcggsccgatcgcacgccccccgtgkcgsykacgacccattcghacgtctgccctatcaactttcgatkktaktcgccgtgcctaccatggtgaccacgggtgacggggaatyagggttcgattccggwgagggagcctgagwwwcggctaccacatccargkaagkcagcaggcgcgcaaattacccactcccgacccggggaggtagtgaygawwaatwacwatacaggactytttygagkccctgtawttggaatgagtccactttawatcctttawcgaggwtccattggagggcaagtctggtkccagcakccgcggtaattscagckccamtagcgtatattaawgttgctgcagttmwaaagctcgtagttggatcttgggagcgggckgkcgktccgccgcgaggcgagccaccgcccgtccccgccccttgcctctcggcgccccctcgatgctcttagctgagtgtcccgcggggcccgaagcgtttactttgaaaaaattagagtgttcaaagcaggcccgagccgcctggataccgcagctaggaataatggaataggaccgcggttctattttgttggttt

SEQ ID NO: 220 - DNA, 1056 bp, Homo sapiens
agtgacgccaatagggactttccattgacgtcaatggtggagtatttacggaaactggcccacttggcagtacatcaagtgtatcaatattgccaagtacgccccctatgacgtcaatgacgggtaaatggcccgcctggcatatgcccagtacatgaccttatgggactttcctacttgcaagtacatctacgtatttagtcatcgctattaccaatggtgatgcggttttggcagtacatcaatgggcgtggatagcggtttgactcacggggatttccaagtctccaccccattgacgtcaatgggagttttgttttsgcaccmaaatcaacggkactttccaaaatgtcgtaacaaytcsgccccattgacgcaaatgggcggtaggcgtgtacggtgggaggtctatataagcagagctcgtttagtgaaccgtcagatcgcctggagacgccatccacgctgttttgacctccatagaagacaccgggaccgatccagcctccggactctagcctaggccgcgggacggataacaatttcacacaggaaacagctatgaccattaggcctatttaggtgacactatagaacaagtttgtacaaaaaagcaggctggtaccggtccggaattcccgggatckswmgkmtcarcacagsrwgaggccacagacaaccaggaggcccagcaaggccaccagcttggagagcttcacaaatgcccctcccaccaccatctcagaacccagcacaagggctgctggcccaggccgtttccgggacaaccgcatggacaggcgggaacatggccaccgagacccaaatgtggtgccaggtcctcccaagccagcaaaggagaaacctcccaaaaagaaggcccaggacaaaattcttagtaatgagtatgaggagaagtatgacctcagccggcctactgcctctcagctggaggacgagctgcaggtggggaatgttccccttaaaaaagcaaaggagtctaaaaagcatgaaaagcttgagaaaccagagaaggagaagaaaaaaaaaaaaaaa

SEQ ID NO: 221 - DNA, 752 bp, Homo sapiens
  misc_feature (57)..(57): n is a, c, g, or t
gcttccaaatgttgtaacactcggccccattgacgcaaatggtcgtagtcttaccgngggaggtctatataacagagctcttttagtgaacgtcagatcgcctggagacgccatccacsctgtttgacctccatagwagwcwccggkaccgatccagcctccggactctagcctaggccgcgggacggataacaatttcacacaggaaacagctatgaccattaggcctatttagktgacactatagtawcwagtttgtacaaatawagcagkctggtaccggtccggaattcccgggatkawaaagcttgtggtgaaggggggcttawwwaawagaagcaagttctgaagttcactcttgattgcacccaccctgtagaagatggaatcatggatgctgccwattttgagcagtttttgcaagaaaggatcataagtgaacggaaaagctgggaaccttggtggaggggtggtgaccatcgaaaggagcaagagcaagatcaccgtgacatccgaggtgcctttctccaaaaggtatttgaaatatctcaccaaaaaatatttgaagaagaataatctacgtgactggttgcgcgtagttgctaacagcaaagagagttacgaattacgttacttccagattaaccaggacgaagaagaggaggaagacgaggattaaatttcatttatctggaaaattttgtatgagttcttgaataaaacttgggaaccaaaaaaaaaaaaaaaaaaaa

SEQ ID NO: 222 - DNA, 752 bp, Homo sapiens; identical to SEQ ID NO: 221
  misc_feature (57)..(57): n is a, c, g, or t

SEQ ID NO: 223 - DNA, 899 bp, Homo sapiens
ttttttttttttttttttgagacaggttctcattctgtctccctggctggagtgcagtggcacaatctcagctcactgcaacctctgccccccgggttcaagtgatcctcctgcctcagcctcccaagtagctgggattaaaggtgcatgctaccacgcccagctactttttktwttttttgtagagatggggttttgccatgttggccaggctacaacctttttgatgttactcatggctgttggatgtacaagctcactttatgtcctgttctggttccacctggctgccccgagtctccagtttggcctgtgtccttttgaggtcttgttctggctctaccccaagccatgtccactgttcttcacaggtggggtgcattccagccatcttcaaccttaaatcagggaactgggggaggagggcagcctccctggggagaatccagctatttctcaagcccaagtgactgggtataaacgggtcccactgcttgttcattcagatgagtaaatgtgtccttagtgaaggctgtcacctgcacctttcatctgtgttactgctgtgctcctgctagggatwaggggctgccattmwtaaatgctgacctcatttggaactgmcaagagttggaagtacattgtggctttgctgggtyaatcyttagtattggaattagctacggcattgggcaggtttttctgatagatgtctggtcttctgtaacgagcagttccattcagcacagccatgcccctttctattaatctcactttgggtctgtgtattagtctgttctcacactgctataaagaactgcccagactgggtaatttatagagaaaagagcttaactgacttcacaggtccaaatggtgggagggctcagaaactttat

SEQ ID NO: 224 - DNA, 817 bp, Homo sapiens
  misc_feature (191)..(191): n is a, c, g, or t
gtcaaccgggaaggagtctgkcagacaatgamcassgacsmgscykkctkkkggywacckcbktcvwkgscgtkgactysgagskcacgttcsdkgdgdmmmsgktchykbakgacgwckatgsgrsbttmrtcwkkgbctascaggacagctccagstkcyasgkggtcatgtggaagcwgatkgagshnacktattgkcaggckdaccccttccgtsytgtggccgagcctggcatccvrctcraggctgtgaagtsktccacaggccccggggdacakctkcggwackctctgtggcatacaggagacasmgwgtyccagktgcskctbctgtggaagkacccgcgdwacstggkttggwagrmcawgaagtccwatcgttggttcctscagcaccggccccamgtgggctacatcagggtgcgattctatgaggsccctgagctggtgsccgacagcaacgtggtcttggacacaaccatgcgggktgsycgcctggggktcttctgcttctcycaggagwacatcatctgggccaacctgcgttaccgstgcaatgacaccatcccagaggactatgagacccatcagctgcggcaagcctagggaccagggtgaggacccgccggatgacagccaccctcaccgcggctggatgggggctctgcacccagccccaaggggtggccgtcctgagggggaagtgagaagggctcagakwgrayaawwtaaartktgtgtgcagggraaaaaaaaaaaaaawwwaaaaaaaaawaaaraaaaaaaaaaaaaaaaaaaaaaaaaaaaaaaaaaaa

SEQ ID NO: 225 - DNA, 786 bp, Homo sapiens
aagaacccaggcccaccccccaagttaggatggaaaaaagttccagagttttttaagaaaattggattaaagctgggtccctaacttcaagraattcccattwrtgctccttctcacctttcgtkktytgctaagttatggaawatagggcccakttcatcatagcctccttcccccgtgctccactacratcgccgcattctttctagctgcagctggtttcttcaaggctcctgcttaaagtccacacgttattatggccgaaagcaacctggtgcttcggcctggataagagccccttctgcatcttattcacagcttgcagcctcagcccctttgatgaggccctcaggggagaggtcattaccttgatcctgcawacccagactcgttgagcagcracgcwatcaccaycatcccactgcccaatctagaatatgtctgctctcctttgctctctgcagctgtaagccagaggggattcaaggtaaataggctttacaggctcccctcctccaaacacacacagaatgggctggtttctttcaagtttaaaaaaagcccccttctccatgcacaagttcattccctccatgctgtcgtcatcgacatatacaggtgtgtacgtaggtgtatgtgtgtactctgcacgtatatctcttctgtcttgaagaccctgttaactttgtgaaataacttccacatttcaacacacttcacagtacaggaaataaagtaatatgaaamwmaaaaaaaaaaaaaaaaaaaaaaaaaaaaaaaaaaaaa

SEQ ID NO: 226 - DNA, 827 bp, Homo sapiens
ttttttttttttttttttttttttttttttttttttttttttttttttttwkwtgcaatcataaaataactttattggtcaggttagccaccactcatgcttttcctgtaataaggatcctttataaaggcatgatggtgttcacatgcagatgctttctgaagagccctggggcagggggcagccttgcccctcacatcggagctcctttgttgaaatgagctggtttggcttttgtggattccaggtctggagccaagaacstagtccaaagatcccctcttcccttctcagggaaggtgcttcaaagcatacacagtatcagggatgtgatggcatctgggcagagcctatacttgggctaactctcctccaacagtccttgcccctgactgcccagatggctttgtcccaaccttgcccaaagggcaggtgggttaagccccaggcaacattaccttttgaaatgggaagaattaagtgctccccagccaaactataaagcaaaagccaccttcactaatgaggatmtagctcagagatgtgaaagcagagggttgtatgcccagcacaggcaagatttggctgcctggcctgggcttcamggacccmagccagarctggtactttytaactatggccttaggacaaaccaggtgaaacagattaaccacatcctccttctttgggctagcaagtccmvggctgsctgragtctgtctctwccatcmsgwtatwraatcttcctgcttggatmaacasgagaggacaactgtgttctcatactttaaaaacmtgtkgcgtactttgtgrtwaaaccccgtgga

SEQ ID NO: 227 - DNA, 827 bp, Homo sapiens; identical to SEQ ID NO: 226

SEQ ID NO: 228 - DNA, 790 bp, Homo sapiens
gaaatcaaggtgtatcaagccaagtacgcccctatgacgtcatgacggtaattggcccgcctggcattatgccgcagtacatgaccttatgggactttcctactgcaagtacaatctacgtattagtcatcgctattaaccatggtgatgcggttttggcagtacatcaatggcgtggatagcggttttgwctcacgggatttccmagtctccaccccrttgacgtcwatgggaktttgttcttggcaccaatawtcwwcgtggactgttyccaaaatgtgcgtwacwactgccgccccatwgacgcaaaatgggcggtaggcgtgtacggtgggaggtctatataatgcagagctcgtttagtgaaccgtcagatcgcctggatgacgccatccacgctgttttgacctccatagaagacaccgggaccgatccagcctccggactctagcctaggccgcgggackgataacwatttcacacaggaaacagctatgaccattaggcctatttaggtgacactatagaacaagtttgtacaaaaaagcaggctggtaccggtccggaattcccgggatgataacaatgcatcgtaaaaccttcagaaggaaaggagwatgttttgtggaccactttggttttcttttttgcgtgtggcagttttaagttattagtttttaaaatcagtactttttaatggaaacaacttgaccaaaaatttgtcacagaattttgagacccattaaaaaagttaaatgagaaaaaaaaaaaaaaaaawaaaaaaaaaaaa

SEQ ID NO: 229 - DNA, 865 bp, Homo sapiens
ctacggtactggtcccactgtgcagtacatcaaggtgtatcatatgccaagtacgccccctattgacttctatgtcggtataatggcccgcctggcatkawgcccagtacatggacytwatgagactttcctacttggcagtamattacgtattatgtyatcgctattaccatggtgatcggttttggcagtacatcaatgggcgtggatacggtttgactcacggggatttccaagtctccaccccattgacgtcaatgggagtttgttttggcaccaaaatctacgggactttccmaaatgtcgtaacaactccgccccattgacgcaaatgggcggtaggcgtgtacggtgggaggtctatataagcagagctcgtttagtgaaccgtcagatcgcctggagacgccatccacgctgttttgacctccatagaagacaccgggaccgatccagcctccggactctagcctaggccgcgggacggataacaatttcacacaggaaacagctatgaccattaggcctatttaggtgacactatagaacaagtttgtacaaaaaagcaggctggtaccggtccggaattcccgggatctagagccyawwaaaaaaaaaaaaarrrmrrmmaraaaaaaaaaaaarrrmrrmmrrmmarwrtggtgaaaccctgtctctactaaagatacaaaaaattagttgggcgtggtgctgtgtgcctgtaatcccagctactcaggagtctgaggcaggagaattgcttgaactggggaggtggaggttgcagtgagccaagatcacgccagagtgatggggcgagactccatctcaaaaaaaaaaaaaaaaaaaaaaaaaaaaaaaaaaa

SEQ ID NO: 230 - DNA, 725 bp, Homo sapiens
gtacaggacctgatgggactttcctacttgcagtacatctacgtattagtcatcgctattaccatggtgatcgkttttgcgcagtacatcaatgggcgtggatagcggtttgactcacggggatttccaagtctccaccccattgacgtcaatgggagtttgttttggcaccaaaatcaacgggactttccaaaatgtcgtaacaactccgccccattgacgcaaatggkcggtaggcgtgtacggtggtgaggtctatataagcagagctcktttagtgaaccgtcagatckcctgkagacgccatmcacagctgttttgacactctcactatgagagagcacacggggrcacgatatccarccttcsgaagatytytascytagsccssgggmcgggataacaatttmacaaccagggaaacagcttatgacccattaggcctatttaggtgacactatagaacaagtttgtacaaaaaagcaggctggtaccggtccggaattcccgggatggccgccctttttttttwtttgycaaaatgtttggaaacagtataatttgacaaagaaaaatgatacttctctttttttgctgttccaccaaatacaattcaaatgctttttgttttatttttttaccaattccaatttcaaaatgtctcaatggtgctataataaataaacttcaacactctttatgataamaaaaaaaaaaaaaaaaaa

SEQ ID NO: 231 - DNA, 974 bp, Homo sapiens
cccgcccagtgacgtcaagaaatgacgtaggttcccatagtaacgccaataggggactttccatgacgtcaatgggtggagtatttacggtaaaactgcgccacttggcagtacatcaagtgtatcatatgccaaagtacgccccctattgacgtcaatgacggtaaatggcccgcctggcattatgcccagtacatgaccttatgggagctttcctacttggcagtacatctacgtattagtcatcgctatttaccatggtgatgcggttttggcagtacatcaatgggcgtggatagcggtttgactcacggggagtttccaagtctccaccccattgacgtcaatgggagtttgttttggcaccaaaatcaacgggactttccaaaatgtcgtaacaactccgccccattgacgcaaatgggcggtaggcgtgtacggtgggaggtctatataagcagagctcgtttagtgaaccgtcagatcgcctggagacgccatccacgctgttttgacctccatagaagacaccgggaccgatccagcctccggactctagcctaggccgcgggacggataacaatttcacacaggaaacagctatgaccattaggcctatttaggtgacactatagaacaagtttgtacaaaaaagcaggctggtaccggtccggaattcccgggatcrwwwarwwrmwwmtttttccttcccgctttcctgcactaacattttgccgcagtacactatacgatcgtagtacatcttacaactccgcataccgcgtcgccaaaaatttacttcgccaaccattccatatctgttaagtatacatgtatatatattgcactggctattcatcttgcacttttcctctttcttcttcccagtagcctcatcctttcacgctgcctctctggaacttgccatcatcattccctagaaactgccatttacttaaaaaaaaaaaaaaaaa

SEQ ID NO: 232 - DNA, 710 bp, Homo sapiens
ttttttttttttttttywtgatttgctaattgctttattcagaagagaccccccggagtacagcttctttggttaagcacggagttgaggtggaggagagcagtagaaggctggaaatctgctggatgtctcattctgggtgggtatagaagggctcctgcctggcctctaggatgggtgagggatgctttctgcatggccaaggaacttggttagggtagggagggagggtatgagagagggaaattcagcactgggtggaaggtttccagggcaagaggggactcagcaacgaggggtgctccctctgcacgtgtttattggaatagtactggtactttttatkgtaggtcgtctygtttctagcaaaaacaggtggcagcagccttatcacactcacacagttgacttctgcaggagtcctgtttkgcacaggtgattctgctccccgagtkgctaaactgtgtagctcagaaattkggtgccacatccacgtttctccagacgwtrgtagcaacagtcatgagtgacacagmagcgawccgwtgcatcctygggggatcctctgmcamccacgccacagkggcagccgtagaagccataactgagtgcggcttcctgtcctgtcgtcaacttgatcattctgtggaaaatcaccaaattcccatgggcctgcaggtaggccaaagatcctgatcactggcaacagt

SEQ ID NO: 233 - DNA, 710 bp, Homo sapiens; identical to SEQ ID NO: 232

SEQ ID NO: 234 - DNA, 1241 bp, Homo sapiens
ctttaaactgttgtgccagtgcttaggctttggaagtggtcatttcagatgtgattcatctagatggtgccatgacaatggtgtgaactacaagattggagagaagtgggaccgtcagggagaaaatggccagatgatgagctgcacatgtcttgggaacggaaaaggagaattcaagtgtgaccctcatgaggcaacgtgttatgatgatgggaagacataccacgtaggagaacagtggcagaaggaatatctcggtgccatttgctcctgcacatgctttggaggccagcggggctggcgctgtgacaactgccgcagacctgggggtgaacccagtcccgaaggcactactggccagtcctacaaccagtattctcagagataccatcagagaacaaacactaatgttaattgcccaattgagtgcttyatgcctttagatgtacaggctgmcagagaagwttcccgagagkwadtcatbkkbccrrtccrgrkrrmcavscadgtctstckgcymrgatcmatctrvwctggarkgatgttasmagacccagcttagagttcttyykbbkktctkaasccctttgytctgraggaagttctccagctycagytcdaytcacagsbkctccmagcatcascykgggakkytcctgaggktkttctcawaaatgaggkctgcacmtkgccygktytgcttcgaagtathcmwtmccgctcmgtawtttaaawgragtgrttctaagatttgktttgggatcmataggraagcawawgmwgcchmccmrratgmmaatgttttgraatgatatgaccmmaattttaagtaggraagtcaccchdacacttctgcttycacttaagtgtctggcccgcmatactgtaggracmagcatgatcttgttactgtgatattttaaatatccmcmgtactcactttttccmaatgatcctagtaattgcctagaaatatctttctcytacctgttatttatcmatttttcccagtatttttatacggaaaaaattgtattgaaaacacttagtatgcmgttgataagaggaatttggtataattatggtgggtgattattttttatactgtatrwkccmwagmtttwstactgykraaakacmmmtrwtttaataaargatttrmaywccvvmhaaaaaaaaaaaaaaaaaaaaaaaaaaaaaaaaaaaaaaaaaaaaaaaaaaaaaaaaaaaaaaaaaaaaaa

SEQ ID NO: 235 - DNA, 841 bp, Homo sapiens
ttamcggtaackgcccactggccagkacatcaagtgtatcawaatgccaagtacgccccctatggacgtcaatgacggtaaatggcccgcctggcattatgcccagtacatgaccttatgggactttcctacttgscagtacatctacgtattagtcatcgctatwaccatggtratgcggttttkgcagtacatcaatgggcgtggatagcggtttgactcacggggatttccaagtctccaccccattgacgtcaatgggagtttgttttggcaccaaaatcaacgggactttccaaaatgtcgtaacaactccgccccattgacgcaaatgggcggtaggcgtgtacggtgggaggtctatataagcagagctcgtttagtgaaccgtcagatcgcctggagacgccatccacgctgttttgacctccatagaagacaccgggaccgatccagcctccggactctagcctaggccgcgggacggataacaatttcacacaggaaacagctatgaccattaggcctatttaggtgacactatagaacaagtttgtacaaaaaagcaggctggtaccggtccggaattcccgggatcwkkgsgmrdmykaskcsrgcksmycmcrrgrksagswgcadmhvmcmakasagrrctctkyacgwsrccmwgtaaycaggccccagcctccaggcccccaactccgcccagcctctccccgctctggatcctgcactctaacactcgactctgctgctcatgggaagacagaattgctcctgcatgcaactaattcaataaaactgtcttgtgagctgaaaaaaaaaaaaaaaaaaaaaaaaa

SEQ ID NO: 236 - DNA, 750 bp, Homo sapiens
tttttttttttttwttwtttttwtttttwttttttttttttttttkkytwttaatcckgccacaatatttttaattacgtacaaagatctgacatgtcacccagggacccatttcacccackgctctgtwkggccgccagtcttykgtctctctcttcagcaatggtgaggcggataccctttcctcggggaagagaaatccatggtykgttgcccttgccaataacaaaaatgttggaargtcgagtggcaaagctgwtgccaykggcatctttcacgtgaaccacgtcaaaagatccagggktgcctctctctgtdggtgatcacaccaattcttcctaggttagcacctccagtcaccatacacaggttaccagtgtcgaacttgatgaaatcagtaatcttgccagtctcyaaatcaatctgaatggtatcattcaccttgatgaggggatcggggtascggatggtgcgggcatcatgagtcaccagatgagggattcctttkgtgcccacaaagatctttctcacttkgcacaactkgtacttggcctcctcaggtgtaatacgatgtacagcaaagcgacccttggkgtcatagatcagacggaaattctctcccgtcwkgtcaatgctgatgacrtccatgaatcmagcagkrwmsgkyatatcagtycggaccttrccatcsattwwaatgaacccgytgsatgcaaatcttcttwacwhcatctsctgtcaggcatacct

SEQ ID NO: 237 - DNA, 829 bp, Homo sapiens
gtccaagacccataggacttccatacgtcaatgggtggagtattwacggtaaactgccactggcagtcatcaagtgtatcatatgccagtacgccccykatgacgtcaatgacggtaaatgsccgcctggcatatgcccagkacakgaccttatgggactttcctacttgscagtacatctacgtattagtcatcgctattaccatggtgatgcggttttggcagtacatcaatgggcgtggatagcggtttgactcacggggatttccaagtctccaccccattgacgtcaatgggagtttgttttggcacchawaatcaacgggactttccmaaatgtcgtaacwactccgccccattgacgcaaatgggcggtaggcgtgtacggtgggaggtctatataagcagagctcgtttagtgaaccgtcagatcgcctggagacgccatccacgctgttttgacctccatagaagacaccgggaccgatccagcctccggactctagcctaggccgcgggacggataacaatttcacacaggaaacagctatgaccattaggcctatttaggtgacactatagaacaagtttgtacaaaaaagcaggctggtaccggtccggaawkcyygsgmtvmvwdmdvmmrmyckcgaggcmgssmwwwkyywtytwttyttytkywkyytywkkwkygagacttcaaggactcagtttggttccacccagttgaaagacacccagtgcacacccaaactcctggccttctgtggtttccctttgctccagaaacacagatgtgtctaaagaaaaaaaaaaaaaaaaaaaaaaaaa

SEQ ID NO: 238 - DNA, 785 bp, Homo sapiens
tttttttttttttttctaaatttgaattttaatatttcagcaaaacgaactaataaaaggcagtttcctagcaacgtctgtattcaaaggaacaacaacaaagcttaatcgcaaacaccttattttctccaaagktwattcccggtctttggagggaagtkagcagggtagcaatataamgcarggtggcaaacagaggctctgtgtaggagaggttggcacagactcacttggctttttctttctgggcattgaaaggtaggaaggttagaacttcagctaagccagtctttcccaagtggttgcagtcagagattgatacaaaamcccagaactggttkgstattttatccattctctggctggagatgtsmgattgaytggyggaagggamcaggtgaactwggaaggccmggttgktggrwtcctaggttaaytcttmacaytaaccsgsgaaaacttggaagcaggccyyctttwtctggggckgkgtatccaaatgggsggttactctagaaggaacataagtgamrggtccttctcagcagctcaaamsggtctaccaagtaaccgggkctytyywaytktytaactwaaggcttaaatgggcattgkgyttamtcaataatacmgtttcactaagaactaatgcctgsatccccagaaagagcatcactttaggaaattaaacagctggstgtcttccagggaacgtgtccctgtgtcctgscttcctgagattttggctgcacgcgggccaagcggccgaagatggagtgacttac

SEQ ID NO: 239 - DNA, 769 bp, Homo sapiens
ttttttttttttttttttttttttttttttytgaggggtgtacattttattggaaaccttaaatactgttcagaaagaatatatcttcaatcaaggctcttgtgcagcctacacagaaaaatgaagcttttkgggttaggggcaaggagagagacagtacagaggacaaagacccctcacgatgaatgctcttcagccagcttatcagcttttgccacagcttcttcaattgggtcccaccatatagaaggsctggttctggggagatgggtcatattccacctggccaaaaatctgstgggaaaatccttkgawgggtctycttcagaggggtaccaggcttccccataatgtamcygkgtagagamctctagmgaamcygtgaataggstcgagaacacagaagaacagckcgtgatwttccgyggcgacggggagcaccggkgcacaaatctgtggtctctcctctcaagaaagagctatctactcactactaccacagagggakggcaawgatcactccgtgggaggggatkwgatacgctcgctgcgaggcatctttgttgcaccaccgasggggcaaacagtcgatagagtgcatcasgtgccaacagatkttggggatccagtgatacgagaggtggagtctacgaggatccacagctggatagatgcccagctcagcaatggcacgcgacagtacagtggtagcatccaaakgggcaaamcgtagtagcaggggcagggtcagtcaaagtcatcagcaggc

SEQ ID NO: 240 - DNA, 769 bp, Homo sapiens; identical to SEQ ID NO: 239

SEQ ID NO: 241 - DNA, 773 bp, Homo sapiens
tttttttttttttttttttttttttaatgctctgaaaacactttattacacaaattacattcagattctgaaaatagtgttctaacagtgtaaccatctaaaaataagacatcccaaaaacacaccaactgaagaaaatttaaaaaagaatttaaatagagacttttttatttccttcattgcaatataatgttagtgattttaaaaaaataggagatttagcagctttgtcgtcatgtagcacaaagtttctctttaytgccacaggctaagaatgctgaacaggaaaggcaccaaagaaagacactggcaatgaaagtgctattgggaaaatactgtgttcaagcaaagaatggggttatttacatccaccaaaaagtctcaaaagtgtaaatgggcaaatcttccattgttagattagaattatgatggaaaaagaggacggtttctctagtctatgttcatataaagacaatggcactgttatgaacttttaggaaactcctcaactagaaacagaagccaacttaaccaaaacgaagtaaataaagtgtgtacagtcccacacagactagtacagtttacaattaaatacacagaactttaaaccgtgctamagggaacaggaattctgacattctgggtaaactcttactcaatctaaatcaaagcttggttttcasgacgaggacrgtgcgarcgsargcagagtgctgaatactcctctttctgattcactyccatcatcctcttctctggtcacggcctcagtg

SEQ ID NO: 242 - DNA, 773 bp, Homo sapiens; identical to SEQ ID NO: 241

SEQ ID NO: 243 - DNA, 888 bp, Homo sapiens
ttttttttttttttttttttttttttttttcgggtgtatcactttattggctttggagagcaatggaggggattaatacctcatctttccaagttaaaagactaagactgtttccaaaagactccaaataagaaacttctcctcaaagtacaaggataatctgaatcatcttaaayywkywwtwwwwwwktaaaatataaatttttatttagaattaaagcaaatacttcagtatcacaaacacaatattaaacttcaagaaatacaccgctaattcggagtgagcgtttatttgcacgattacaacatgcggacaaacccaggcgagatgagcgagtctacggttcctacccacccggctgacaaggggtggccccaggggccggatgcccagccccgaggcggccctactcctcctcctctcccgaagactctctctcgaacgtktaggccwtgaagcmagcgtcgggtctcttggggacaaggggatgccccggtctcacaatctcaaagcccaaaaagctgaaggttcggagcaaggcggmtctgtcctcgcggttcttgtggaagcaaatgaagacatggtcggctcgcagctgctcctcagcgaactccaggagaactgcaaagctgtccttgstcccctcgggcagcgcgccgsccgggatctcgatgtaraggctgccgccactcagcactgttcgccagttaatgcgtttggcgtctgtgagcctggactggacgttgagaatcctcgtcttgtcgttggacgttagttcctctgttacattcagmcgatcatcggagtagaataagttaagctgaaagattgtgatccctctgactattccctcgcccmmctggggatcttcmsggkkggtgaggggc

SEQ ID NO: 244 - DNA, 888 bp, Homo sapiens; identical to SEQ ID NO: 243

SEQ ID NO: 245 - DNA, 785 bp, Homo sapiens
cagtacatctacgtattagtcatccgctattaccatggtaatccgttttgccagtacatcaatgggcgtggatagcggttgactcaasggggatttccaagtctccaccccattgacgtcmaatgggagtttgttttggcaccaaaatcaacgggactttccaaraatgtcgtracaaactgccgccccattgacgcacaatggtcgttaaggcgtgtacggtggtgaggtctatataagcagagctcgtttagttgaaccgtcagatcgcctggagacgccatccacgctgttttgacctccatagaagacaccgggaccgatccagcctccggactctagcctagkccgcgggacggataacaatttcacacaggaaacagctatgaccattaggcctatttaggtgacactatagaacaagtttgtaccraaaaagcaggctggtaccggtccggaattcccgggataaaccatcagcctactcattcaaccmatagccctggccgtacgcctaaccgctaacattactgcaggccacctactcatgcacctaattggaagcgccaccctagcaatatcaaccattaaccttccctctacacttatcatcttcacaattctaattctactractatcctagaaatcgctgtcgccttaatccaagcctacgttttcacacttctagtaagcctctacctgcacgacaacacataaaaaaaaaaaaaaaaaaaaaaaaaaaaaaaaaaaaaaaaaaaaaaaaaaagcgaaataaaaaaaaaaa

SEQ ID NO: 246 - DNA, 731 bp, Homo sapiens
gaccctaatgggactttccaacttggcagtaaatctacgtattagtcatcgctatttaccatgtgatgcggtttwggcagtacatcaatgggcgtggatagcggtttgactcacggggatttccaagtctccaccccattgacgtcaatgggagtttgttttggcaccaaaatcaacgggactttccaaaatgtcgtaacaactccgccccattgacgcaaatgggcggtaggcgtgtaccggtgggaggttctataataagccatgagcttcgttctacgtgaacccgtcagatcgcactggagacgcccatgccacggctgtttttgacctgccatagaagacaccgggaccgatccagcctccggactctagcctaggccgcgggacggataacaatttcacacaggaaacagctatgaccattaggcctatttaggtgacactatagaacaagtttgtacaaaaaagcaggctggtaccggtccggaattcccgggatstggsattayatgsctgaawcaccacatcyagcymcmmmtaaatwywwwwagttagccaagtcatggwgscacryacctrtggtsycagctaytcmasaggctkasgttgggaggatcrcytgagcccmaggaggtcaaggctgtagtgagcygtgawtgwgycactgcactcyrrtctgkgyracagaryaagaccyygtctcwwaaamaawmaaaaaaaaaaaaaaa

SEQ ID NO: 247 - DNA, 775 bp, Homo sapiens
  misc_feature (523)..(523): n is a, c, g, or t
  misc_feature (529)..(529): n is a, c, g, or t
  misc_feature (531)..(531): n is a, c, g, or t
  misc_feature (595)..(595): n is a, c, g, or t
tttttttttttttttttywwtwkwwwyyktkytwytttattaaaatactgagttttatttcacatgtatatttttgtctccccaccatttccatgtctgaccaccgctactactatgtcctatcataacattccatacatacttaaaaccaagcaaagggtggagttccatctttaaaaactaaacaggcattttggacaacacattcttggcaatagaacctggacaacatttatcaaacacggtagggaaagttctcactctgcattataaaaaggacagccagatatcaactgttacagaaatgaaataagacggaaaatwttttaacaaathgtktaaactatwttcttaaagagacttcctccactgccagagatcttgaatagcctctwggtcagtcatccggaagcaattcttcacataatwgatgaatwtggcttccacttwgggaagagaaccacctttwtctatactwgctwgcatkwykgcttkaatgtctkctacagaactaggtccktynggtgtnynaggagtwwdwycctgtwtcttgaargattctygtcctthtgatctkggkgyygatgatggtyynragtctwthccmttctgatttgacttttgtgcmtwtttggctggagtatctcgtatagatwycttcactggcgctttttctttcagmttccycatcatcaaaatcmtcatcatcatcatcttcmtcatcatcctcttcatcatcmtcgtctcatcytctccgcgcaagtttccttttctc

SEQ ID NO: 248 - DNA, 716 bp, Homo sapiens
ttttttttttttttttataatttcaaaggatactttttattctgctttagtttaaggtgacaagaagctatttaagtgattacatttgaccaaatgtagcactaatagccattgtaatcttctccgccaacaaaataagacaatttagaaacattgttttacttgtcttcacactttggaggtagaaatcatgaaacattaatctcatgattaccataattatgctctcaaacagcccaagtgaaagaacaatcattctcacaaaatggtgccataatggttaaagcttaatgtcttgctaatgatcaagatgtatacacaacataaaataaatagaattgcttgttgtctgctgaagttcttggcaatgctaaggtaagttatcattttactctttccagttctcaatagccagccctcaaagagcaaggggtggtaggacaacaggaatgagtggaaatggtcttctctgtcggatccctcctaactgcagtcactcagtctagcaggctcagcttccactgggttcttctgttgatctttggtggtataaaaagctcagcatcaagaacaggaaccgaagtcttctgttgctgataagatgccatgatactatttgcagtagaattgggacctagaaccggggtagctgaattctgctggtaagtaagagttccaawttctgggaaagtggaacctttccatcaactgcacgg

SEQ ID NO: 249 - DNA, 769 bp, Homo sapiens
tttttttttttttttttttttttttttttttttttttacatgaaaacatgtttattgcctgaataataaaacttagctaaggagttattagaattasgattccccctacttgaagtacaagtttccaataaacagacagacagaagcaaaaccccaaatgagaaagaatacatkggtaacctaaatcataggcatttgtgggtatgttcatacaatctacctatttcttkgtaatttactatagcactgatgacaaagcatagacatacaatgagaaagagcaaatcagcatatcagtgtgactgtgcaaccactacaaagctkggccttcttaaatgtggccactttaacttacacacacccacagaggcatcagaaatctccctgcaaacacgatttgcctatagtttkgtggcaatackgttacatagaacaaaaacaactctcagaccakggttaataaataagagagamaagaagtmagaaacaacttccatgggttggcaggcatgcaaagcagcaccttgaacctcatttgaaaaacaggcaackgggatagcttttggagcccaggagtgaaggctagaggctgaaaggagctatgcactatwatctwgggtatttccacataatctgcaggatggggaaskttaattccgmamcacataaackgtgsycytttarratgyggstgrammwsgggtsttcctctggccagaatttagraacccatcyctgraaatgamcttcgcttwamatkgttcttccc

SEQ ID NO: 250 - DNA, 851 bp, Homo sapiens
  misc_feature (678)..(678): n is a, c, g, or t
ccmakaggaacgccmataggggacttccagtgacgtcaatgggtggagatttmcggtwactkgcscrcttgscagtacatcaagtgtatcatatgccaagymcgccccctatgaskycmawgamcggtaaatggcccgcckggcatwawgcscagwacawgacctkakggractttcctactkgscagtacatctacgtattagtcatcgctattaccmtggtgatgcsgttttgscagtacatcmatgggcgtggatascggtttgactcacggggatttccaagtctccaccccattgacgtcaatgggagtttgttttggcaccaaaatcaacgggactttccmaaatgtcgtaacaactccgccccattgacgcaaatggscggtaggcgtgtacggtgggaggtctatataagcagagctcgtttagtgaaccgtcagatcgcctggagacgccatccacgctgttttgacctccatagragacarccgggrscsgatccagcctccggactctagcctaggccgcgggacggataacaatttcacacaggaaacagctatgaccattaggcctatttaggtgacactatagaacaagtttgtacaaaaaagcaggctggtaccggtccggaattcccgggatvwvvrhwwwwdmmwrvrwmadawdmmmmvnmwbwamhrmmmvwhwaswkmccartwwmtamaawmaammaammarwmawwawwammmwmactgtcaacccaacacaggcatgctcataaggaaaggttaaaaaaarwaaaarraactcggcaaatcttaccccgcctgtttaccaaaaacataaaaaaaaaaaaaaaaaaaaa

SEQ ID NO: 251 - DNA, 734 bp, Homo sapiens
ttttttttttttttttttttttttttgagatcatctactcaaagtttattggactgaacaaaggctgaatacagagatccaagccatgaggagtacatgaggtgtggtgcctataagccagggtcggaaactttccagacaaacctagatagctctactaggagggagtcaacgacctattgtrtcaattagatcccagcctggacaagggcatgactattgctgtttggggacacgtggctctgtgttgaaggcaatgactgtgtggctgttgccatgtggcctgttctcccctaagccctgaaccaaaggttccaggcccagatgagaaggccactgggaatgcatgccataggggttgatgctggacattccccagccttccattaaatgaaaacattttctataaacttactgctttaaaaaaatgttttaaccaacaaacctaagaactgcaaatgagtttggtatagtataaatattgtcaaatataaaattccaagaaacccatttgagactgatctgatgatctgaagttctaactaatctatcaaactttctaagaaaaggcataggtcaagaaatcttttctaaagcaaacattatgcttctgctatagcagagtggagattggctgagctggtaagaacctcagtgacaaggtgtcttagcaatgaagggctgaatccgaggatcctctagatgaaaacaggggaatggcaagtaaatccggg

SEQ ID NO: 252 - DNA, 703 bp, Homo sapiens
ttttttttttttttttgaattatcaaactttattggcttgttaaaaatgattgaattcagcaagtacatttatgatctatctacattgttaaaacagcactaaaaataaaattcttttaataatgattatccattatttacagaaaatgtggaaaagatggcttttaaacccagaacattataggaaaagaaaaaaaaaaaaacagggcatgagaaatgattcacaggctgcctctggcattacagcaaactggttgaacwtgaagtgccgtgaaactcaaggcatttgcgtttmtcttaggaattctcttgttactattgtatgtgtttatactcaattcataaattggactgtcttacaataaaggtgataaaaaatctctgttcctttcttwwtgctwttcacactttwtttccccataaaaacccactgcagtcatagtcagtagttaggggtgggggttggttcaacacatwctgggtgctcamtcatgaacatgccaaagctatactgcaacactagcctgaattcaacttagagttacctcaccatcaaaatcaggtggctgggacgtacttttgtctctgaagaccaaaacttgaaaatggactgactttagtgggaaattccttctgcgacagtcatggtcatggaactttcctgggctgggagttctgtcaaccaaatcagtctgcagcacct

SEQ ID NO: 253 - DNA, 763 bp, Homo sapiens
ggcgccggattttaaatagcgtattgtatatacgcctcacactcattttcaaccycckgmmwacacatwgccktaccccttscytgtgactatccctatgaggcatmatgtataacaagctccatgctgcstagcgacawacagacctagaatcgctcattgcatactsttcaatcagccacatagccctcgtagtaacagccagttstcatccaaccccctgaagcttcaccggcgcagtcattctcataatcgcccacgggcttacatccttcgattactattcgtgcctagcaaactcwaactacgaacgcactcacagtcgcatcataatcctctctcaaggacttcaaactctactcccactaatagctttttgatgacttctagcaagcctcgctaacctcgccttaccccccactagttaacctactgggagaactctctgtgctagtaaccacgttctcctgatcaaatatcactctcctacttacaggactcaacatactagtcacagccctatactccctctacatatttaccacaacacaatggggctcactcacccaccacattaacaacataaaaccctcattcacacgagaaaacaccctcatgkkcwkryacckrtccsssattcycsksmtatccctcaaccccgacatcattaccgggttttcctyttaaaaaaaraaaaaaaaaaaaaaaaaaaaaaaamaaaaaaaaaaaaaaaaaaaaaaaaaaaaaaaaaaaaaaaaaaaaa

SEQ ID NO: 254 - DNA, 774 bp, Homo sapiens
cataactgatgtctgttgcccaccatggaaattaaagagtkgaagcagatgtatggcctgacattccmaractctgaattgggttttattagcacaaatgttgtgttcatttkttgagccatatctcagaagaaggaaagggagctacagaaaggagktttaggattgcacgagaargatggccaagaggcacctttggcccacattctccagctcaacccagcagctgaaaagcttcaagagatctaggaaaagacattgttcatgttaatgagaatttccaccattgtagagaatttccttcctactgagaatctacctctattccccctgccctagctcttctctaacttggttaaccataaccataaccagattcccttgcaatcgatttctctttagtcgttggtgttagaagtaccagcacaatttgagcattcccattaacaaaggtgttgcacagttgagaaactctcctgccgggcgcggtggctcatgcctgtaattccagcactttgggaggcagagttgggaggatcacctgatgtcaggggtttgagaccagcctggtcaacattgcaaaaccttgtctctactaaaaatacaaaaattagctgggcatggtggcgcatacctgtaatcccagctacttgggaggctgaggcaagagaatcgcttgaacccaggaggcagaggttgcagtgagctgagatcatgccattgcactccamcctgggtgacagagtgagactmcatctcaaaaaaaaaaaaaaa

SEQ ID NO: 255 - DNA, 764 bp, Homo sapiens
ttttttttttttttttttttttttttttttkkywwttaaattcagtcttttatttaattatattaatttatcccagcaacttcaaagacccacaatgccaatgataaagttcagttaaaaaacagaggtcttgaaaaattttttttcttcagccgctaataccatttacacggtcgccatctgagaatttgtagctccrtctcagtctcaggatttagggaaatttgttttaaatatagatgggtctgaagcaagaagacagtgactaaagtctcttctctagatgggataatgaatctatctagatkggtccaacagaactgtgatgaaatgttctatatccatgctcgccaatacagtagaagtagaccctagccacaggtgggtmgtgagcatttgaaatgtggccagcccaattgaggaattgagttttaaattttctttgattttaatggatttccatcaaaatggccacatttkgttagtggctaccatattagacagcacaggtccagagtgtattctgaggaaggagaaatgcagtgaacccttgacttagcaggtagacaatgaatacgymgtkatgmwasswaysyywsrmaacactgcacttcccactcagtttttcttatytgaaggatactgtgttctgagacagsccaaaggagattagcatctttaggggaagattctaagctgacatgtggaaaggtayggttagctccattctkgggaaaatgacttgatgctgttattaatagaga

SEQ ID NO: 256 - DNA, 764 bp, Homo sapiens; identical to SEQ ID NO: 255

SEQ ID NO: 257 - DNA, 762 bp, Homo sapiens
tttttttttttttttttgcaatgaaaataaatgttttttattaggcagaatccagatgctcaaggcccttcataatatcccccagtttagtagttggacttagggaacaaaggaacctttaatagaaattggacagcaagaaagcgagcttagtgatactgtgggccagggcattagccacaccagccaccactttctgataggcagcctgcactggtggggtgaattctttgccaaagtgatgggccagcacacagaccagcacgttgcccaggagcctgaagttctcaggatccacgtgcagcttgtcacagtgcagctcactcagtgtggcaaaggtgcccttgaggttgtccaggtgagccaggccatcactaaaggcaccgagcactttcttgccatgagccttcaccttagggtwgcccataacagcatcaggagtggacagatccccaaaggactcaaagaacctctgggtccaagggtagaccaccagcagmctgcccagggcctcaccamcaacttcatccacgttcaccttgccccacagggcagtaacggcagacttctcctcaggagtcaggtgcaccayggtgtctgtttgaggttgctagtgaacacagttgtgatcccgggaattccggaccggtaccagctgcttttgtwcaaacttgttctatagkgtcacywaataggctaatggcatagctgttysygkgtgaaatgtatcskccgcgscwagtaratcggaggggatggccg

SEQ ID NO: 258 - DNA, 762 bp, Homo sapiens; identical to SEQ ID NO: 257

SEQ ID NO: 259 - DNA, 725 bp, Homo sapiens
tgctgtggctgatagcccccagcagggcctggcacctgtgtcccrccccacccacakcgbcttctgcaattccgacctcgtcatcaggkccaagttcgtggggacaccagwagtcwaccagaccaccttataccagcgttatgagatcaagatgaccaagatgtataaagggttccaagccttaggggatgccgctgacatccggttcgtctacacccccgccatggagagtgtctgcggatacttccacaggtcccacaaccgcagcgaggagtttctcattgctggraaactgcaggatggactcttgcacatcactacctgcagtttygtggctbccctggracagcctgagcttagctcagcgccggggcttcaccaagacctacactgttggctgtgaggaatgcacagtgtttycctgtttatccatcccctgcaaactgcagagtggcactcattgcttgtggacggaccagctcctccaaggctctgaaaagggcttccagtcccgtcaccttgcctgcctgcctcgggagccagggctgtgcacctggcagtccctgcggtcccagatagcctgaatcctgcccggagtggaagctgaagcctgcacagtgtccaccctgttcccactcccatctttcttccggacaatgaaataaagagttaccacccagcaraaaaaaaaaaaaaaamaaaaaaaaaaaaaaaaaaaaaaaaaa

SEQ ID NO: 260 - DNA, 725 bp, Homo sapiens; identical to SEQ ID NO: 259

SEQ ID NO: 261 - DNA, 967 bp, Homo sapiens
actgcccacctggcagtacatcaagtgtatcatatgccaagtacgccccttatggacgtcaatgacggtaaatggcccgccgggcattatgcccagtacaggaccttatgggactttcctacttggcagtacatctacgtaatagtcatcgctattaccatggtgatcggtttgccagtacatcaatgggctggatagccggtttgactcacggggatttccaagtctccaccccatttgacggtctatgggatgtttgtttttggcaccamartcaacgggactttccraaaykgtcgtaacaactccgccccatkgacgcaaaatgggcggtaggcgtgtacggtgsgaggtctatataagcagagctcgtttagtgaaccgtcagatcgcctggagacgccatccacgctgttttgacctccatagaagacaccgggaccgatccagcctccggactctagcctaggccgcgggacggataacaatttcacacaggaaacagctatgaccattaggcctatttaggtgacactatagaacaagtttgtacaaaaaagcaggctggtaccggtccggaattcccgggatccsagctactcaggakgctsaggcassagrmkgscaysamcmcagkmksyaswmcwysccasrgacgwgatccscctccctcccccacagaatacccaggccccagtccccctcaccctaggcccctgtgccaagtttgtctgccgcttcttgcccaggatcctgggggtcgtggctaccccctcctctggccggctccttgctgctcctgtcatagtgagcttgtgccgtccccctaggatggggggcatggcccctggctgccagatgcccacagcaccctggcatgacctgccacctctgcttccacaccggagccagctacctctcctgtgcctgccactcaataaacagtgtctgcgccccaaaaaaaaaa

SEQ ID NO: 262 - DNA, 749 bp, Homo sapiens
caggtaaaacctccagrattactggccaggaggctgttgctgaagttttgctgctgccactggagcccactccaaktgctggccgcttcactcctgggamsttcactaaccagatccaggcagcyctccgggagccacggcttcttgtggttactgaccccagggctgaccaccagcctctcacggaggcatcttatgtkaacctacctaccattgcgctgtgtaacacagattctcctctgcgctatgtggacattgccatcccatgcaacaacaagggagctcactcagtgggtttgatgtggtggatgctggctcgggaagttctgcgcatgcgtggcaccatttcccgtgaacacccatgggaggtcatgcctgatctgtacttctacagagatcctgaagagattgaaaaagaagagcaggctgctgctgagaaggcagtgaccaaggaggaatttcagggtgaatggactgctcccgctcctgagttcactgctactcagcctgaggttgcagactggtctgaaggtgtacaggtgccctctgtgcctattcagcaattccctactgaagactggagcgctcagcctgccacggaagactggtctgcagctcccactgctcaggccactgaatgggtaggagcaaccactgactggtcttaagctgttcttgcataggctcttaagcagcatggaaaaatggttgatggaaaataaacatcagtttctaaaaaaaaaaaaaaa

SEQ ID NO: 263 - DNA, 775 bp, Homo sapiens
tttttttttttttttttttttttttwwwktgaaaaacagatgcttttatttattgtattggaaacaacttaataatttgcatctctacatatagaaagctgctttgaataactgggaaaacaactattgcataggaaaacatatgcaaactagcatcattgtctctagactaggttcttcttattgatctcacgtcatcacaaagcagcaacagcagcttctagaaaatggagaaacagtaaagtcctgcaatgaagctataattaaggttgaaccatacattccgctaatcctgcaactttcctacaatcatttttctgcctatacaatcctgcttcttataggatgaacacctagcaaaacaatataaatttgctgaaaaacaaaattacaaacaaatgaaagaacttaacagaacacacagcattaaaaggactaggaagagcaaggtcttaatacccagtacaataaagccaagaattttctaatgctgaccagtctgaagactgaaattaaatatcagttctttttacttctctaggagtgattctagctcctcttgcaaagagctgagttgctccttttctcggtcttcctttgtttgagctcatccagtacagcctgaaatctgttcttgagagccagattttccactttcatgatgagatcctcttgtcgtwgtgccctgtmcygggtctcttggagctgctttcatgtgtcatctggttctgattccatacagtgatggtcctcatttccgggtgtcactgattat

SEQ ID NO: 264 - DNA, 775 bp, Homo sapiens; identical to SEQ ID NO: 263

SEQ ID NO: 265 - DNA, 750 bp, Homo sapiens
ttttttttttttttttttttttttccattttactctttttattctgctcattaatgatctgaaagaagaagatggggaaaaggggattccaccacaaggctccaaagaaccaagagtgcaaatcagtccatttcactttcactgtctgagatagggtctctaagacccaggatacaagggtggaatgtagctatatggactcgatttgcttccggaccttttccagagcctttctgtccaattgtcgctgacgaatgatgacaagacaagcgaagatcagggccacacacacgacagccccttcgaacttccaaaataagcgttgttccatcaaagctgagcggcagcttttgaactcatttctcttagatgagctgcatgtgattttctctacatatcctgtgggaccacactcaggggtagttttagcccggaaattagagcatggagagcactcttctgctaccacaaactcttccaccagccagcatggcaaatttgaggtgcttgctgacagcttctcttcctgcacgggagcctctgcttggcagagctttaaggtgaaagcacagagcaaccagcagaggtggcggccctgggggaggccaggcctcccggacacccgcaagcatggagcgccaagtgtcgcaccgtgtcggaaccagagggacctactccacaggcctcgtgcctccgatcggagacgcaaaggcggcacttactctgcagacctcccagaggttccaggta

SEQ ID NO: 266 - DNA, 1178 bp, Homo sapiens
ccagttgacgttcaattgggtggagtatttacggttaaactgcccacttgccagttatcatcaaagtgtatcatagtgccaagtacgccccatgattcgacgtccaatcgtcggtaaatccggcaccgcgctcggcattaggtggctccaagtaccatagaaccttagtcgggactgtggcacttatttctgggaccatgtgaccatgttaacattcatatcatgtattttactggcttattgatcaacttatagcttcatatggtcgattctggttctagggaccaattaacaatgcgggatgtgggcagtaggatatgcggatcttgactgagcggtgactcttacgtaagtcatcccaccactccgattggttacgatcgaagtaggtgatgtttttttgtctaggcaccataatcgarcagggayttctccaaaaattgtcgtcaacatacctgccgcccccatatcgacgcataatgcggcgggtaggcgtgtacggtgggaggtmtatataagcagagtctcgtttagtgacaccgctccagatcgccgtggagacgccatccacgctgttttgacctccatagaagacaccgggaccgatccagcctccggactctagcctaggccgcgggacggataacaatttcacacaggaaacagctatgaccattaggcctatttaggtgacactatagaacaagtttgtrmmwwwaagcaggctggtaccggtccggrattcccgggatcgscakhkdyykvkmgwcmdcwgyrscrtragrgmcaagtkgargaagaatkygaatgmgcaggytrakagsygywaawaraaraawaratgatgkcatgaggtccaagtaaaccgctagcttgttgcaccgtggaggccatcatggagcagaaacatggaatgccagacgctggggatgctggtacaagttgtgggactgcatgctactgtctagagcttgtctcaatggatctagaacttcatcgccctctgatcgccgatcacctctgagacccaaccttgctcataaacaaaatgcccatgttggtcctctgccctggacctgtgacattctggactatttctgtgtttatttgtggccgagtgtaacaaccatataataaatcacctcttccgctgttttagctgaaraaaaaaaaaaaaa

SEQ ID NO: 267 - DNA, 1178 bp, Homo sapiens; identical to SEQ ID NO: 266

SEQ ID NO: 268 - DNA, 727 bp, Homo sapiens
tttttttttttttttkaaagaaaaacactcgtatttggatccaacaacagacacagagagtgaatggtcagcaaagaaacaaaaggaatcagagtggaacagagaggggctcccgaaaaacccctggcaggcaagaggcgacggcgggaagttaacctcatgatggtgagcatgaggcatggaaatgccactgctccacttttttttaaggtagtgtgttgattgagctttatttcagcaaacaaaaaatatttctaagaacttgcataggttctgtcgttagcataccctccctaactcagtttgctcaagaactgtgaattgtcctgccagtggggtgatcagaaatgggacctgcatggtatgaggaccagttatccccatcattgtatgttcactcacaaagacagaacaatcccctccggtgtcacaggcactgttctgtaagatcactttggcattttattgaatactttctggtgaggttctctttccctgcacacaggcttttcttccctaaaggcctctaacctgctggaagatagggaccaagttgagtattttatttcttctgtctacagcatccagcatagttctaattaaatacaattagkcaagtactcaaataagtctgcctaattatatttacagtaagtatcctgcttaagtgagagaaattcttggcagatcttacctctagtactattgtttagtgcccgatggaagg

SEQ ID NO: 269 - DNA, 743 bp, Homo sapiens
tttttttttttttttttttytyywwwttcctggtttaataaggacttgtttattttgaggaaaaaaggtcccaaacatcaggctgttcacaaaaataacccacagtatcaactttagaaaacaaatcttaagactataacactaattatttttctagaggatgcatttgacatgccaactctcattcacaaaaatacatkgttacattkgtgttgaactgccccacacagcacactaatgtgagggtgtaacacacatacttctaactcaaagctgctttcaagagctactcaactaaatgagatkgcctttgcagttagggaagcaactactgaacttatgtatgaatgaaaagaactgtactccctgcataacaagagattattttggagacagttgataaaaaccatacatcctttttaktgttaagtcataaagaggtatcaaaattaaaagcaaaaattacagggtaagacttaacaaaactactaggagcgtcaaaggaagtgaaaatgggactaggcgcggggcaatatgaattaatgaacatgggaaggacaaggatggggagaacagtgagcatgtgctgaagatactaggggagaggatctggtgamaaaattkgatcttagacaagcgcctaggtaaagamataatgggataagatytctaaacccactatgtgcttaagagtcatcctcgmcattggcgctgtctctgtcatcctctccttyactcaracc

SEQ ID NO: 270 - DNA, 743 bp, Homo sapiens; identical to SEQ ID NO: 269

SEQ ID NO: 271 - DNA, 759 bp, Homo sapiens
tttttttttttttttttttttttcataactgagattttattggttgaggatcagtacagacatttcaatttgtacacaaatcttaacatacgtaacgaaattctaaaaagccatgtattgtaattcttttttaaagttattccagtgactttccagcttaaaatttggaagcaaattttccttaagaggctatcaagtaccagtatcttcacgttggtcagctgttacatacggcccaccagttcacaactcaatagcacgtacactacatgttcaaatctgtaatctttcacagcacagtaacaaagttattaggaaaacaggactaccacaaccaaagatgttacagagtgcacacaattctggcagagagagccatgatcaaagagtggttttctttaggaaacaattctactaaaaaacaacgtggtaatagaagtaatttaacaatgttcaagacattaaatgcaggactgactccatattgcccatttaatatgctttgtattataggatataaaacactaaccccccatctgtggaatgttaagctgacacccgaracmgysagagcctcccataattcmatatcccamamtattttcyggttgtaccaaaaaataaacaaccagcaaatgawttcacctcttaaaaaaaagcattacacttaaaaaatgggatgaggtgggaatcccctccttcttaaaaatgttctagagctactaaaaaactgcatttacacaatagtgataaaaaatc

SEQ ID NO: 272 - DNA, 705 bp, Homo sapiens
atctacgtattagtcatcgctattaccatggtgatssgttttgscagtacatcaakgggcgtggatagcggtttgactcacggggatttccaagtctccaccccatkgacgtcaatgggagtttgttttggcaccaaaatcaacgggactttccaaaatgtcgtaacaactccgccccattgacgcaaatgggcggtaggcgtgtacggtgggaggtctatataagcagagctcgtttagtgaaccgtcagatcgcctggagacgccatccacgctgttttgacctccatagaagacaccgggaccgatccagcctccggactctagcctaggccgcgggacggataacaatttcacacaggaaacagctatgaccattaggcctatttaggtgacactatagaacaagtttgtacaaaaaagcaggctggtaccggtccggaattcccgggatccgcgaggggcccggggcggggtccgccggccctgcgggccgccggtgaaataccactactctgatcgttttttcactgacccggtgaggcgggggggcgagccccgaggggctctcgcttctggcgccaagcgcccggccgcgcgccggccgggcgcgacccgctccggggacagtgccaggtggggagtttgactggggcggtacacctgtcaaacggtaacgcaggtgtcctaaggcgagctcaggga

SEQ ID NO: 273 - DNA, 784 bp, Homo sapiens
tttttttttttttttaagttagagacagcaccttgctttcttgcccaggctagagtgccgtggcatgatactagctttctggagccttaacctcctggactcaagtgatcctcccaccctggcctcccaaagtgctgggattacagatgtgagccactgcatctggcctgaagtaggttttaaccctcatttctcagatgagaaaacagagactcagagagactaagtgacttgtccaggtcacctggctagcaactggcagagctaggagtctgtttgactctaacgtgtatgttcccaatcaacaagctatttaaagctacaaaaaaatttaaagctctgtttattaatatccttcgtaagtaccaccttttgggtgtgggccctttacttacatcaaatccccaagaamagagcagaactgtcttgtctgggaagggttttctgaaggagttataatggaataggcaggaaggagaactttagttctgtatagcgctttttatattataggaatttacgaacagtagaaaaactgtttgaggtacaggcaggggtttagatygagattttaacaaaacagaaaggaacagttttggsaagagtytcaaattaactctggtttaaatywatarcttaaataagccataattttcaccamaaaatcttaatctytcttttacattaatartktcatttcgaacaatatttattgagcaccggttataaggcgctgagaaccataaaagacactaggggttccgcaaggaataattaaaacggc

SEQ ID NO: 274 - DNA, 1036 bp, Homo sapiens
tacatcaaggtagtcatatgtccaagtacgccccctatgacgtcaatgacggtaatggcccgcctggcatatgcccagtacatgaccttatgggactttcctacttggcagtacatctacgtattagtcatcgctattaccatggtgatctgttttggcagtacatcaatgggcgtggatatcgcgtttgactcacggggatttctcaagtctccaccccacttgacgtcacatgggagatttgttttggcacccaaatccacgggactttcccaaaagtcgttaccacttccgcccccaatgaagccaaatgggccgttaagggccgttgttaccgttggggagttctatataagcagagctcgtttagtgaaccgtcagrtcgcctggagacgccatccacgctgttttgacctccatagaagacaccgggaccgatccagcctccggactctagcctaggccgcgggacggataacaatttcacacaggaaacagctatgaccattaggcctatttaggtgacactatagatactaagtttgtacaaaaaagcaggctggtaccggtccggaattcccgggatcgcgagcggccgccctttttttttttttttttctcaagccgtttttattacacttagtgtattaagacaagtacaaaataaccttgtaattaagatactgtatcagtcaaaaaagaagtcactattgtatgaagagatttacaaatgactaaaatatacaggctgtgacagaattaacagtttgaaagagggttgcttttttcttttagaaatgctaaattttcttaacaagacaaaaatacagtgctctaaatatgcattaccatgaaaacgttaaagaaaagcagtcttaacacttaactactattaacagcctttgccaacacatgcctgcctactccctttcctaactttaaagaactgtttcctctaaggaatactagtgcagcataacccttaaataatttcatttatttttaaagttacaacctacagagaaattaacatctt

SEQ ID NO: 275 - DNA, 730 bp, Homo sapiens
tttttttttttttttattcccatgatatactttgtctttttagatccttcgacactaatgaaaattctgtgtattattaatattacctcaaaaacagcattccctattttccatgttttatattttatagaaaaaaaatttatcctattttttaaaaacttgtttggaggaagaaagtaatacttaagatttgtattcctaaataatgctgggtcaaccatacattacatacacttgcattttcactactggttgaaaataacgtgcatagaagtcgtgattgtgaagaatgactaaaattctagttttwgtgttttttccactggttttcacatataataggtaaatcaggtagcttctctcacattwtgtttttaaatgcatatatgtagttcacaaccccccaaagatggggaaactctactgataacaattaaacaaatatttctccaaaatccatgattcaggsaaataacggaatacsacaaatttaacatgttatggtgcaaagtagggtaagttctamamtaattgtggaasktttcctatwamctgtggatgaagtgcagatcctcctgaaagaaaatgaggcagwtaagacctgctgagatgtggttccttgggggaaacagaakaaamgtggggattcttgtaacactgtctgaggcagatggataaagggcattgagacgtcagagccaaaaggtgcagttgctccccctgtacgggg

SEQ ID NO: 276 - DNA, 1189 bp, Homo sapiens
cgtacataactgcggtaatgcccgcctgctgaccgcccacgacccccgcccattgacgtcaataatgacgtatgttcccatagtaacgccaatagggactttccattgacgtcaatgggtggagtatttacggtaaactgcccmcttggcagtacatcaagtgtatcatatgccaagtacgccccctattgacgtcaatgacggtaaatggcccgcctggcattatgcccagtacatgaccttatgggactttcctacttggcagtacatctacgtattagtcatcgctattaccatggtgatcgcggttttgkcagtacatcaatgggctgtggatakcggtttgactcacggggatttccaagtctccaccccattgacgtcaatgggagtttgttttggcaccaaaatcaacgggactttccaaaatgtcgtaacaactccgccccatkgacgcawatggkcsgtaggcgtgtacggtgggaggtctatataagcagagctcgtttagtgaaccgtcagatcgcctggagacgccatccacgctgttttgacctccatagaagacaccgggaccgatccagcctccggactctagcctaggccgcgggacggataacwatttcacacaggaaacagctatgaccattaggcctatttaggtgacactatagaacaagtttgtacaaaaaagcaggtctggtaccggtccggaattcccgggatgcaakgkggmkgwkktwsccasatgasyyawkatgcrymawkscaaatttccagtttaagtaattgcctacaataaaaagaaattttgcctgccattttcagaatcatcttttgaagctttctgttgatgttaactgagctactagagatattcttatttcactaaatgtaaaatttggagtaaatatatatgtcaatatttagtaaagcttttcttttttaatttccaggaaaaaataaaaagagtatgagtcttctgtaattcattgagcagttagctcatttgagataaagtcaaatgccaaacactagctctgtattaatccccatcattactggtaaagcctcatttgaatgtgtgaattcaatacaggctatgtaaaatttttactaatgtcattattttgaaaaaataaatttaaaaatacattcaaaaaaaaaaaaaaaaaaaaaaaaaaaaaaa

SEQ ID NO: 277 - DNA, 1225 bp, Homo sapiens
cacgaagaatgcccagaaaagccaaactcttcaggactgcgtgcccatgagaatgagatcaccaaggtsygaagagttactttcaatggactgaaccagatgattgtcatagaactgggcaccmatccgctgaagagctcaggaattgaaaatggggctttccagggaatgaagaagctctcctacatccgcattgctgataccaatatcaccagcattcctcaaggtcttcctccktcccttacggaattacatcttgatggcaacaaratcagcagagttgatgcagctagcctgaaaggactgaataatttggctaagttgggattgagtttcwacagcatctctgctgttgacaatggctctctggccaacacgcctyatctgagggagcttcacttggacmacmacaagcttaccagagtacctggtgggctggcagascataagtacatccaggttgtctaccttcrtaacracmatatctckktaghkkgatcaagkgacttctgcccacskgracacwacaccmwwwaggcttywtattcgggtgtgagtyttttcagcracccggtccagtactgggagatacagccatccacyttcagatgtgtywacgtgcgctctgccattcractcggdractataagtwattctcaagrarsccctcatttttataacctggcmaaatcttgttaatgtcattgctmwwawatwrataraagctagatactggvaammwaamwrmwawrwrrawrwwwwammcacatgacttatkatgcatamagccvaatttccagtytaagtaattgcctacaatwaaaagaaattttgcctgccawwwwmaraawmawmwwwhraarmtttctgytgatgttaactgagctactagagatattcttatttcactaaatgtaaaatttggagtamatatatatgtcaatatttagtaaagcttttcttttttaatttccaggaaaaaataaaaagagtatgagtcttctgtaattcattgagcagttagctcatttgagataaagtcaaatgccaaacactagctctgtattaatccccatcattactggtaaagcctcatttgaatgtgtgaattcaatacaggctatgtaaaatttttactaatgtcattattttgaaaaaataaatttaaaaatacawwmaaaawwaaaaaaaaaaaaaaaaaaaaaaaaaaaaaaaaaaaaaaaa

SEQ ID NO: 278 - DNA, 1225 bp, Homo sapiens; identical to SEQ ID NO: 277

SEQ ID NO: 279 - DNA, 752 bp, Homo sapiens
ttttttttttttttttttttttttttttggcattaaaagtttttatttagtatttgatccacaatctatacaagttatttacaaggcatgaaaatggaaaacagcacaaaatacaattgaggtataagctcagagcacagtatgtcatgtttcaataaatataattcaaaatttgtaaactaggtgaccagatacatgagtcttatttttagtaaaaccatataaaatatttatttcacgtgaggtagaggacagttttctgtgtcatgtaatgcaaccaaccacagcaactttaaccataaaactgtacatcattggcaaaattttaactttaattatggtcaatgtagccaattatttgtttcaacagttgcagaacagatatttcatttactgccttcacagattagaaattcaaaagtaatttaagactactatgttggcttaaacattatcaggatacaacaaatacttctaacaggatagtaaaaacaagtaaaatttyatttctcatamactaattcctcaaaagatgtcctacatttagcaactgtttyctaggacatgtgtactagaactactttaagtatgctgtgcttwcttwtcaagtgaggtatctatacttgaggaaaaaaaatcttataaatcccttttacattaaactaatttaatacactattctgttttctgggctgaattttaaatttttcttccatttgatcctttctatcaaatgtgcctactggacttat

SEQ ID NO: 280 - DNA, 802 bp, Homo sapiens
tttttttttttttttttttttttttktggattttattttgcaatatttattatatattcaattcaaatgtactcactattgtgctaggcaattgaaagtaaaaagtataaagctgcattttgcgctctcagtgaggtttaagtcagggaaatgaggcatgcacacaaaataacgagaaagtagtataatagctgtgatcattagttatcaaaataagtgaatgagctaataatcattgttagaataataattgtgttcttagatctcagatgctttaatgaaaaatgttatcttgaggtcaactttgacaaatggggagataactgaaaaacatctgacattctaggtagggaaaacagaagcaaatgcttaaaaatgggaataagtatgtattctgtacacagagacaacttgatttcaatacatactttatggtggaaataatgtytgtacttttacttacacagtccggactcatgtttctaaaacactgataawttkgtgttwaacttcaatgtaatgtgtagtctaatacttttagtggggtacaagtgagaggaatgttattywagaaactttactctggcaccactgagtcatcatamatkattactctcagatagaagatttaattcttgcagttagccatgtcagtttatcatgagtaatcagamagtgttactcagaagctttattgtgaatatycmgttgttacagtgaacmtkgatgttgtatgggtgggmaggtstgtgcactggcaccacagaatattctgttyatcwwarmwwraamwawwatgata

SEQ ID NO: 281 - DNA, 1330 bp, Homo sapiens
  misc_feature (701)..(701): n is a, c, g, or t
  misc_feature (708)..(708): n is a, c, g, or t
  misc_feature (717)..(717): n is a, c, g, or t
  misc_feature (719)..(720): n is a, c, g, or t
  misc_feature (732)..(732): n is a, c, g, or t
  misc_feature (734)..(734): n is a, c, g, or t
  misc_feature (737)..(737): n is a, c, g, or t
  misc_feature (747)..(747): n is a, c, g, or t
  misc_feature (757)..(757): n is a, c, g, or t
  misc_feature (767)..(767): n is a, c, g, or t
  misc_feature (777)..(777): n is a, c, g, or t
  misc_feature (919)..(919): n is a, c, g, or t
  misc_feature (973)..(973): n is a, c, g, or t
  misc_feature (975)..(975): n is a, c, g, or t
cccgccggctgcccgccacggaccccccgcccactgacgtcawawgacgtatgktcccatagkaacgccmataggactttccatgacgtcmawkggtggaktatttacggtaaactgcccacttggcagtacatcaagtgtatcatatgccaagtacgccccctaktgacgtcmatgasgktaaawkgcccgcctggcawtawgcccmgtacawgaccytatgggrctttcctacttggcagtacwtctacgtattagtyatcgcwattaccatgktgahbcggtttksscagtacatcmatgggykkggatavcgkttkgaytcacggggrtttccaagtyyccaccccakkgacgtcaatgggarkttbtttkgscaccawawtcaacggracttyccdamwtktcgtrmcwwctccgcyccatkgvcgcwaatggkcgktaggcgtgtacgktggraggtcwatataagcagagctcgtttagtgaaccgtcagatcgcctggagacgccatccacgctgttttgacctccatagaagacaccgggaccgatccagcctccggactctagcctagsyckcsggacsgathacmatttcacacagkaamcagctatgaccattaggcctayttaggtgacactatagaacaagtttgtacawhawmscaggstgrkacmgstcygkaatwycmkgrwwndvbdrdnryrhddhwnannvvdrhwwyybmngnrsnytsvkhrghnraddhdgvhndrwbhbgrrnbhddrmshtnravhybadchykvshadyryrdhvvrryyybrbstywmmwdaaamhdhmadrmwwakcyrrrhrhrrtrryrbkyrcctgtdrtbcmrgchdckhdgrakdytgarrhrbvrsrrybrbkbgarcyyrgrardhvragswtnyagwgagyyrwkawbrydcyrhygcaykycdgcmtrrgbramabaryvaramhnhnhhwhwaaaaaaaaawaaaaarrawwawwwwwrwmwwwrrmwmarwwaraaawwwraraagcaagaattcagttctgttatctgtgctctgctgtcatcccttcactgaggctgtgaaagtgtagctgctgcaatgaggagaagctgaggtgtagatggaacgctaaaaggagaagcgtgacttctaaactttatcccatcgctttgattattgttgctattgttttgtctcccatcaaatgtaaggtctatgaaaacaggggctttacttgcttccattgtgtctgaaactgtctgacataaaaaggactcgatatatttaaaaaaagattaataagtaagtaaaaaaaaaaaaa

SEQ ID NO: 282 - DNA, 1030 bp, Homo sapiens
tgaggctctggactgcatcctaccaccaactcgtccaactgacaagcccttgcgcctgcctctccaggatgtctacaaaattggtggtattggtactgtctcctgttggccgagtggagactggtgttctcaaacccggtatggtggtcacctttgctccagatcaacgttacaacggaagtaaaatctgtcgaaatgcaccatgaagcttcgagtgaagctcttcctggggacaatgtgggcttcaatgtcaagaakgtgtctgtcaaggatktygtcgtggcaacgktgctggtgacagcaaaratgacccmccawkggaascagctggyttcactgctcaggtgattatcstgaaccwtmcaggyyaawtamrsgchsdmtatgcscctswaktkratyscsacacggctcacattgcatgcaagtttgctgagctgaaggaaaagattgatcgccgttctggtaaaaagctggaagatggccctaaattcttgaagtctggtgatgckgccattgttgatatggttcctggcaagcccatgtgtgttgagagcttctcagactatccacctttgggtcgctttgctgttcgtgatatgagacagacagttgcggtgggtgtcatcaaagcagtggacaagaaggctgctggagctggcaaggtcaccaagtctgcccagaaagctcagaaggctaaatgaatattatccctaatacctgccaccccactcttaatcagtggtggaagaacggtctcagaactgtttgtttcaattggccatttaagtttagtagtaaaagactggttaatgataacaatgcatcgtaaaaccttcagaaggaaaggagaatgttttgtggaccactttggttttcttttttgcgtgtggcagttttaagttattagtttttaaaatcagtactttttaatggraacaacttgaccaaaaatttgtcacagaattttgagacccattaaaaaagttaaatgagaaaaaaaaaaaaaaaaaaaaaaaaaaaaaaaaaa

SEQ ID NO: 283 - DNA, 793 bp, Homo sapiens
  misc_feature (81)..(81): n is a, c, g, or t
catcaaggcgtkgatagcggttractcasggatttccaagtctccaccccattgacgtcmawggrryttktktkggcacmnaratcracgggactttccaraakgtsgtrrcaamtccgccccattgacgcaaatggcggtaggcgtgtacggtgggaggtctatataagcagagctcgtttagtgaaccgtcagatcgcctggagacgccatccacgctgttttgacctccatagaagacaccgggrccgatccagcctccggactctagcctaggccgcgggacggatracmatttcacacaggraacagctatgaccmttaggcctatttaggtgacactatagracmagtttgtacmaaaaagcaggctggtaccggtccggaattcccgggatcgacywacgcacacgagracatgcctctcgcaaaggatctccttcatccctctccagaagaggagaagaggraacacaagaagawacgcctggtgcagagccccmattcctacttcatggatgtgaaatgcccaggatgctataaaatcaccacggtctttagccatgcacaaacggtagttttgtgtgttggctgctccactgtcctctgccagcctacaggaggaaaagcaaggcttacagaaggatgttccttcaggaggaagcagcactaaaagcactctgagtcaagatgagtgggaaaccatctcaataaacacattttggataaaaaaaaaaaaaaaaaaaaaaaaaaaaaaaaaaaaaaaaaaaaaaaaaaaaaaaaaaaaaaaaaa

SEQ ID NO: 284 - DNA, 771 bp, Homo sapiens
ttttttttttttttttttttttttttttttttttttttttcaaataaaccttttatttacaggcaaaggatatagtacaagaagaaaaagagaatacagatgacatcgggggtccaagagacattccatatttmrgcttcataatgtccttatttgcacacatataccacactgccttcattttctccagctgatagattkgtgtaaraaatcttgactttgagagttcaatgtcattcccaacagggtctttatgtctgtctggtcatgttatcagccagtcttacttaatgtatyaggccagttggaaaccatcattaacagaaactgaccctggtgatcaccagagtagtttcagactataaacaacacatcataaatcccactgcccttatcttggcccaaagacaaaactggacattctgatgaccccagagattatgacagtgtktwcatggtctaattaaaccattagtcttcatataacmtttaccacgcctcctttcctccaaattaggaagctaagtgggtaagaaagaaacaaatacaaggcacgagcataaccgatgtcacccatcttwggcctcttagccggagctgatccttacmtgggcagtagactataagtgtgtcamtyatwwwccctacttgcagagctwcttcacgttggcacwtggtgaataggtacacatttctcamagctcaagtgcagtctasgtatatctctagtwcaacaytsgtgaaattcttcctatgaattcctactttcag

SEQ ID NO: 285 - DNA, 737 bp, Homo sapiens
ttttttttttttttttttttttttttttttttttttttttttttttycccatcatcaatatttattgagcatttacagtgtactaggcacaataraacatacagaaaacattgtccctgctcttgaggagcttacattctaaaaraaaaaatacaccttttttaaaatggcattttgkttgggtgttttctgcaaagtactgaggaaatattttgtaaagtgagcttggggtataacttagccccatcattatttagagaatagaggaggaagaaagaggaaggattttaaaggcagacaatgacagaccattcaggataggtagggttttaaagggagataaacacagtctcatcaactaaggaaagatttgctgcagtaaataggatgagggaaatagtctgtgggatgcaagcaaaggaagcagggtgtgccttaaacactgagttggagccagaaagatcatgcggccttttcccaagttacttggccaccaacgtaagaatggttggtgacaagacagaaggctaaaacaggaaggtaatcttgtgcacctgacaattagaaagaataagggatcaaaattgaaggcaggctataagagtttcaagaaattcttaaaaaccaaaaagtgattgggaagcacaaaatcttacagttaatgctacccaatgtcatgatgggcccagaaccttgtgggcttcctaagttagaaaatgccatatgccaaattttta

SEQ ID NO: 286 - DNA, 653 bp, Homo sapiens
tttttttttttttttwwttgatgcattcaaatatttattgagcagctaaggagatacaaaggcgatttaaaacattgtcaggtgaggcaaatgcacaagtaatagaaagcaaagggcaaggttcactgaatcacagcagtcagaagaaagtgctttagggaaccaagagattgtttccagcctgaagaggcatgggtggcaaatcagaaaaggggattgagattaaaatagaagacttcagtctggattgttgatgacactcagtatggactatatttgtctctccttttcctttctccccatmtttgggcttaatttacatgtagtgcccaggactgttcaatgcgctttttctatacttgcttgcatttttgctttaatgtcttctacagaactaggtccttttggtgttttaggagttttttcctgtttcttgaaggattcttgtccttttgatcttggtgttgatgatggkttkragtcttttccattctgatttgacttttgtgcatttttggstggagtatctcgtatagatttcttcactggcgcttttcttcagcttcctcatcatcaaaatcatcatcatcatcatcttcatcatcatcctcttcatcatcatcgtcatcatcttcatcagcagcaagtcttta

SEQ ID NO: 287 - DNA, 1059 bp, Homo sapiens
  misc_feature (49)..(49): n is a, c, g, or t
gggcctttcagcattagatgcaggtcgtacataacttccggtaaatgcnccgcctggctggaccgcccaacgacccccgcccattgacgtcataattgacgtatgttcccatagtaacgccaatagggacttttcccattgacgtacaatgggtggagtatttacggtaaactgcccacttggcagtacatcaagtgtatcatatgccaagtacgccccctattgacgtcaatgacggtaaatggcccggcctggccaataatgccccagaaccaggacccttaatgggactttcctacttgscagtamatctacgtattagtcatcgctattaccmtggtgatscggttttkgccagtacatcaatgggcgtggatascggkktgactcacggggatttccaagtctccaccccattgacgtcaatgggagtttgttttggcaccaaaatcaacgggactttccaaaatgtcgtaacaactccgccccattgacgcaaatgggcggtaggcgtgtacggtgggaggtctatataagcagagctcgtttagtgaaccgtcagatcgcctggagacgccatccacgctgttttgacctccatagaagacaccgggaccgatccagcctccggactctagcctaggccgcgggacggataacaatttcacacaggaaacagctatgaccattaggcctatttaggtgacactatagaacaagtttgtacaaaaaagcaggctggtaccggtccggaattcccgggatggaatgcacagtgtttccctgtttatccatcccctgcaaactgcagagtggcactcattgcttgtggacggaccagctcctccaaggctctgaaaagggcttccagtcccgtcaccttgcctgcctgcctcgggagccagggctgtgcacctggcagtccctgcggtcccagatagcctgaatcctgcccggagtggaagctgaagcctgcacagtgtccaccctgttcccactcccatctttcttccggacaatgaaataaagagttaccacccagcaaaaaaaaaaaaaaaa

SEQ ID NO: 288 - DNA, 758 bp, Homo sapiens
agtatttctgtttttgccctctggcagtacatcaagtgtatcatatrycmagtacscccctmtrtgacgtsmatgrcgkwaaatggccccgcctggcatttatgcccagtacatgrccttatgggactttcckacttggcagtacatctacgtaktagtcatcgctattaccatggtgatcsgttttgcagtacatcaatgggcgtggatascggtttgactcacggggatttccaagtctccaccccattgacgtcaatgggagtttgttttggcaccaaatcaacgggactttccwraatgtcgtaacaactccgccccattgacgcaaatggcggtaggcgtgtacggtgggaggtctatataagcagagctcgtttagtgaaccgtcagatcgcctggagacgccatccacgctgttttgacctccatagaagacaccgggaccgatccagcctccggactctagcctaggccgcgggacggataacaatttcacacaggaaacagctatgaccattaggcctatttaggtgacactatagaacaagtttgtacaaaaaagcaggctggtaccggtccggaattcccgggatggccgcccttttttttttttttttkttttkrgmthasabctgbamtsyyrkcacyywggswggmkvasscwggyskatcmcwtgagcycakrasytyragaycarcctrggcarcawggtragatcytgtctctmcwaaaaartactaaaaaaaaaaaaaaa

SEQ ID NO: 289 - DNA, 879 bp, Homo sapiens
caataaagtatttttaaaataaaacatgtacatttttggacataaagctattatacacttaatagactactaaagagtgtaaacataacttttatatgcactgagaaaccaaaaatttktktkwytywyttwwtgcgatatccactttaattatggtggtctggaactgatcctgtaatatctccatggtatgcctgtgctgtacagggggtaaagtgtgaggggtcaagaattttcatgccagaaattccatagcagcctactagaactctggaagtatcgcctttggctgcagtgccagattctggtgaggatttcctggaccccgatttatatctgaaaaaacactaaagaataacagaagcagggcaggaagtggctatgataacaaagctgggcttggtactttctctggcttttgtggccaatattactggactcccgtggtatcaagtttcataaaagaaactcatacaaagcagagatatcttaattattttcagactggcatttcaaaaagtgctcaatttaagtaagtattataagttatttgttacttygttctyatcttttcagatgtttcttgaaaacatygtggtgtgatctttaacagagttttcacttaccaattaatacaaaaaataagaaaaagctttaratacatattttataaaattttatatgccaaataaggtccttcatatarsamaaggaaacataatatcaattttcagtactattatttagcactagagcccctccagttagaaaaacawtctyttaaatgtctwatgatygaggtttcaataatactcatgaataggtgaagttgtatattagtctaaaaacctgaagaaaggcggaagtgtcgcggtgaat

SEQ ID NO: 290 - DNA, 787 bp, Homo sapiens
tttttttttttttttkktatgccaagtgtttaagctttacttaaagtaaaattagagtatgaaacctatttgacaatatatgaatacaaatccataaaccctgaaacaaagcatatataaatgctcttaccaatgcaaaaacttccatctgttagatacataaagagcacttccttaaaagcgacatgtattttatactgaccgctgtagtcaattttaatcaaaaactacacaaatattttatttgtattttagagacggggttttgctctgtkgctcaggctggattccaactcctgtgcttaagcgatcctcctgcctcagacctcccaagtagctgggactacagatgcacaccactgtgcccagctaaatattttaatgtgattggtttcaacagtttatacccacagttttgatgtgaaactgacaaasctatgggctgacagccacagcccatgtagaggaatgactctaagcaacacttaattttggtttaaaaaaaaaaaaaaaatctagatcastgctaagtgttcagatctgaaatgaagaatgaggtgatttyattcttccatkgtaggatctcatacgacgttctaaawyctagatcatacaacagaatgttagatcagggaasggggccttagcaataatggctcaagcctcccatkggacagatgagcaaygtgaggccaagaagcgtgagtgawatggaarsctcmagtgaatacacttcttcaatgaatgagtgtcgctggacaaatcacgtgcgtggtctgtccattcc

SEQ ID NO: 291 - DNA, 787 bp, Homo sapiens; identical to SEQ ID NO: 290

SEQ ID NO: 292 - DNA, 760 bp, Homo sapiens
gaggccacagtatcaactttatcgcakyccawyatkggacagactagttcaatgaatctgagaggctactcagtagacagtcccaccctcacacgattctkkacskktsackkbmatsbkscccttcakkatkgcagccytagcagcactccacctcstawtsktgcacgwdacgggatcdwdcdmccccctaggwrtcacctcscrttccgrtdddwtsacckkccaccctkdbtmyacdwkcdrwgacgccctcggbtkactkctskkccktctctcckkdwatgacaktdacactatkctcrccrgacctcytaggcgacccagacdattataccytwgccwhcccyktwwmcacccctccccacatcwagcccghrtgatattycctatkygcctacacrattstccgatccgtccctaacaawctaggaggcgtcctygcccwattactakmcmycctyatcctascrwtawtccccatcctccawatatccaammaacwaagcataatatttcgcccactaagccmatcactttattgactcctagccgcagacctcctcattcyaacctgaatcggaggacmaccagtaagctacccttttaccatcattggacmagtagcatccgtactatacttcacmacmatcctaatcctaataccmactatctccctaattgaaaacmaaatactcmaatgggcctaaaaaaaaaaaaaaraaaaaaaaaawaamrmaaaamaaaaaaaaaaaaaaaa

SEQ ID NO: 293 - DNA, 794 bp, Homo sapiens
agcatggcaattattgccccagtacatgacctgtatgggactttcctatcttggcagtacatctacgtattagtcatcgctattaccatggtgatgcggttttgsmagtacatgcaatgggcgtggatagcggtttgactcacggggatttccaagtctccaccccattgacgtcaatgggagtttgttttggcaccaaaatcaacgggactttccraaatgtcgtaacaactccgccccattgacgcaaatgggcggtaggcgtgtacggtgggaggtctatataagcagagctcgtttagtgaaccgtcagatcgcctggagacgccatccacgctgttttgacctccatagaagacaccgggaccgatccagcctccggactctagcctaggccgcgggacggataacaatttcacacaggaaacagctatgaccattaggcctatttaggtgacactatagaacaagtttgtacaaaaaagcaggctggtaccggtccggaattcccgggatcawkygcyrtryttcmctgtggcaygtyamcakggrrgyygykccmrkstskrtmmssstscaagctgctggtgaggtttggaagcatcaggctcacgggtgttcatgtgtgttcgtgcgtgtgtgtgcgtacgtgtatataactgaagtgtctgtacggaatgccctttgctagccatgggctggtcaccagattgttttgtaatgcccgccccttgcctcgatattgccagtttcttgtgcaataaacaatcagcagctgaaaaaaaaaaaaaaaa

SEQ ID NO: 294 - DNA, 777 bp, Homo sapiens
gcaagtacgcccccttattggacgttcatggacgggtaaatggcccgcctgggcatgatgccccacgtacatgaccttatgggactttcctacttggcagtacatctacgtattagtcatcgctattaccatggtgatgcggttttggcagtacatcaatgggcgtggatatcggtttgactcacggggatttccaagtctccaccccattgacgtcaatgggagtttgttttggcaccaaaatcaacgggactttccaaaatgtcgtaacaactccgccccattgacgcaaatgggcggtaggcgtgtacggtgggaggtctatataagcagagctcgtttagtgaaccgtcagatcgcctggagacgccatccacgctgttttgacctccatagaagacaccgggaccgatccagcctccggactctagcctaggccgcgggacggataacaatttcacacaggaaacagctatgaccattaggcctatttaggtgacactatagaacaagtttgtacaaaaaagcaggctggtaccggtccggaattcccgggatctagtcacagccctatactccctctacatatttaccacaacacaatggggctcactcacccaccacattaacaacataaaaccctcattcacacgagaaaacaccctcatgttcatacacctatcccccattctcctcctatccctcaaccccgacatcattaccgggttttcctcttaaaaaaaaaaaaaaaaaaaamaaaaaaaaaaaaaaaaaaaa

SEQ ID NO: 295 - DNA, 656 bp, Homo sapiens
tttttttttttttttatgtttctttggttttattattacaaacacaccatggctctgtcacaatagggaaatctaagctctacataccatttcttttctacctggacagggccccataaaagcctccaagccacgtgtagatgtgagacacatttgacagaacatttcaactcatagcttataatgatgccatttctccagctgtgcaagggctttacaaaaactgtgccaggacttcccatgaggctggattgcttgattcatgttttatgagccccacaatactgaagctccttttccagggacttggcataggcagtcaattccacatttgggataggtcctctctggaagtgaatgtcaggcagtgacatccaagtttctgcatgcagtgggttaacagccatgtttagggggaacatgatttaaaaagtacatctctctccctcctcccccacatgcacaaggctcacatctcattatggtgcggcccatgtacattaaagtgtgatactctggttttgaaaaaccattcaaacagtctctgttggaaaatctgagagaaattgggsggagagctgccgtggtgattcctcctgtagtgcttcarsctaatgcttcatcctctctaataacttttgatagacaggggctag

SEQ ID NO: 296 - DNA, 734 bp, Homo sapiens
acaagcstwatgggactttcctacttggcartacatctacgtattagtcatcgctattaccatggtgatgcggttttggcagtacatcaatgggcgtggatagcggtttgactcacggggatttccaagtctccaccccattgacgtcaatgggagtttgttttggcaccaaaatcaacgggactttccaaaatgtcgtaacaactccgccccattgacgcaaatgggcggtaggcgtgtacggtgggaggtctatataagcagagctcgtttagtgaaccgtcagatcgcctggagacgccatccacgctgttttgacctccatagaagacaccgggaccgatccagcctccggactctagcctaggccgcgggacggataacaatttcacacaggaaacagctatgaccattaggcctatttaggtgacactatagaacaagtttgtacaaaaaagcaggctggtaccggtccggaattcccgggatmmwrrrrmmaaagggmgggttcargacsrgsctrgsmaacatgryraaayccygsctctacwmaaaatacraaaattrgcykggcgtsgtggygcrcwcctgtmatcccagctactygggtggctgaggyrrgarraymrcttgrrcccrggaggymsaggwtgyagtgagmtgagatsrtgccactgcaywycrgcctgggyrasaragtgagaccctwtctcaaaaaaaaaaaaaaaaaaaaa

SEQ ID NO: 297 - DNA, 801 bp, Homo sapiens
  misc_feature (799)..(799): n is a, c, g, or t
tttttttttttttttcttgtaaatttgtttgagttcattgtagattctggatattagccctttgtcagatgagtaggtcgtgaaaattttctcccattttgtaggttgcctkttywytytkwtkktwktttyttttkytgtgcagaagctctttagtttaattagatcccatttgtcaattttggcttttgttgccaytgcttttgrtgttttagayatgaagtycttgcccatgcctrtgkcctgaatggtattscytaggttttcttctagggtttttatggttttaggtctaacrtttaagtctttaatccatcttgaattaawttttgtataaggtrtaaggaagggatccagtttyagctttctacatatgwstagccagttttcccagcaccatttwttaaatagggartcctttccycattkcttrtttttstcaggtttgtcaaagatcagrtrgttgtagatrtgtggyrttatttctraggkytctgttctgttccattgrtctatatctctgtttyggtaccagtaccatgctgttttggttactgtagccttktartatastttgacagtcmkgtagccatgatgcctcyagctttgttctytkgtcttaggattgwcttggcratgcgggctcttttttggtkccatatramcttyaamrtmgtttcttctgattctgtgaagaaagtcattggtagcttgatggggatggcattgaatccataaattaccttgggcagtatggccattttcatgatattgattcttcctaaccatgagcatggantt

SEQ ID NO: 298 - DNA, 783 bp, Homo sapiens
tttttttttttttttgttactcagaagctttattgtgaatattcagtttgttacagtgaacatggatgtgtatgggtgggaaggtagtgtgcactggcaccacagaatattctgttttcatcttatgcttgaactaatttattgatgagattctcatttctgtagtataaaaggaaaatattttgcagttatctcgtatttgaaagactttgccatagagaactttatcagaaatggatgaacttttcattatttcttataagcatattggttttggcctgcttgagtttaaaactttttttggtagacttagaatgttaatatttagataaagaaaatattttactgawkwywttwyywkwwwktwwwwtwwyttkwwywtttytktwttagctctttatcagagaataacatttattttatttggaaagttttcctaaatatgagactatctgctatttctcagactaagtgaaaaatttaatacacaatagctgccttgataggaggaaaacaaagttcttactttataaggaataaygtatgaatcataaaagaagaatgagcgatcatgggaaacatttagcttttcaacagtwtwctggaacatgtaccttaaatgcttgygggactccagtaaaggccaggaaaggcaamgagttgaaagtktcttggatttactcctcgtacttacatcattagtaataggaataatgcatctcaaaatttggcgcactttatataaaaacatgattttcacatggtagtctagttataaactag

SEQ ID NO: 299 - DNA, 673 bp, Homo sapiens
tttttttttttttttttttttttttttttttttttttttttttttttttttttttttttgcacgggtgtttctttaatggaaagacagccaccgacctcagaagcagcccctcctkgcgctggaccagaaggataaggggagacctagccaccagtgggccagtgggggtgaggggcttctaggaaaaccggtgtctgggactctggcggttgatggtgtcatctgcgcgggatgctgggcctccacctcccaacctcctccgggacagtacaggttkgggggcaaggcctgagcagggcaggctggggagaccgctgtccctggggtttkgtgggcaggggctgggtgcaggccggacagacagaaagcagtcccagctcaaggcagaaggccagagggtgtggagtgaaagggacaggcgaagccaggttcggagagatggagggaacaggccaccaagctcagaagcgagaaaggtctgaggaagcacaagacacacacacacacacacacacacamacmcamacmcacacasamararagmgmgagagagagagagagagagaggaaggacggggaaagcagagaacagaagggaggactggtcgaagggccagtggagcaggggtctgggagggaccggccatgaacttgcacgggggctgaagggac

SEQ ID NO: 300 - DNA, 766 bp, Homo sapiens
tacccatggtggcaggtaggagaagagtgagagctgagtgaagtggatgccccttgatgggaacatcagatctcgtgagactgactgatgcactagtatagcatggggaaccaccccatgattcagttacctgcccccaggtctctgccaccacacatggggattatgggaactacaactcaagatgagatttgggtggggacacaggcaaattatatcagctgttgtgctcattagtttgtatatcatccttggctcctttagcactataagggcaggattgagtccttgcaacagaaaccattcagcctgcaaagctgaacctatttactttctgaccctttatggaaawktttwytkwtytytrsamyagacastkwtytamaaawrwywtmwwatgagccgggcgcrgtgrctcacgcctgtaatcccagcactttgggaggcsrargcrggcrgatcatgaggtcaggagatcragaccatcctggctaacacggtgaaaccccgtctctactaaaaatacaaaaaattagccgggygwggtggygggcrcctrtartcccagctactcgggaggctgaggcaggagaatggcgtgaascygggrggkcggagcttgcaagtgagccgagatcacrccactgcacatccagcctgggcracaragccaagactctcaaaaaaaraaaaaaawarccatacaaatgagctgaggtgtacaggcatgcactcatgcgggacccagctaacttggaaaggcagg

SEQ ID NO: 301 - DNA, 869 bp, Homo sapiens
  misc_feature (2)..(3): n is a, c, g, or t
annccgcatccataatccttctaatagccatcctcttcacaatatactctccggacatgaaccataaccatactaccatcaatactcatcattaataatcataatggctatagcaataaaactaggratagccccckktcacttstgagtcccagaggttacccaaggcacccctstgacatccggcctgcttyttctcacatgacrrawwytagcccccmtstcrakycatatacsmrratskkctccctcaytkdamsgtaagccttctcstcactstctcratssttatccatsmatagcaggcagttgaggtggattwaaccraacccagctacgcdraatcytagcatactcckcaattacccacataggatgwataatagcagttctaccgtacwaccytwacataaccattcttaatttaactakttatattatcctaactactaccgcattcctastactcaacttaaactccagcaccacgaccctactactatctcgcacctgaaacaagctaacatgactaacacccttaattccatccaccctcctctccctaggaggcctgcccccgctaaccggctttttgcccaaatgggccattatcgaagaattcacaaaaaacaatagcctcatcatccccaccatcatagccaccatcaccctccttaacctctamwwmwammwamrmmtaatctactccacctcaatcacactactccccatatctaacaacgtaaaaataaaatgacagtttgaacatacaaaacccaccccattcctccccacactcatcgcccttaccacgctactcctacctatctccccttttatactaataatcttataaaaaaaaaaaaaaa

SEQ ID NO: 302 - DNA, 700 bp, Homo sapiens
tttttttttttttttaaagacaagagatacaattcttcattactactgataaatcaatgtagctaattaaaatcatcatcctagtttttgccaggacaacataaaggtcttaattcacccaagatgcttaagacagaaacctaagaagcatcctgaacttgttctctctcacccatcacttttaattaatgaccaagttgtatccattctattgctgaatatctcttgaatccacttttctctatccttccgccccagttagggcggcctacacctgaggccaacaaacttattctgtaaagagtcaagtagtaaatcttttaggtgctgtgacaaaattgaagatgtaatatacgtacttacataatgagagaaagcaaatttccacaaaaaaatttttattgaagaaatgttaaatatgctaatactaataattagatataatcttttataagtttaccactaagaatagaattattttggagggagataacagttcatttaattggggttcaaagttagtgttccctatcattaaaactgagagcaactgttcatctataaatgctgatctgcaatgacattttatgtattttaactgaaaacgcttttcacagatgaagaggttgaacgactcaaagctagacmgaataactctagagtacmmtatkgtaagaamgctamttttycyawaggaaga

SEQ ID NO: 303 - DNA, 711 bp, Homo sapiens
ttatgggactctcctactggcagtacatgtacgtattagtcatcgctattaccatggtgatgcggttttggcagtacatcaatgggcgtggatagcggtttgactcacggggatttccaagtctccaccccattgacgtcaatgggagtttgttttggcaccaaaatcaacgggactttgccaaaatgtcgtaacaactccgccccattgacgcaaatgggcggtaggcgtgtacsgtgggaggtctatataagcagagctcgtttagtgaacccgtccagatccgccttggagaccgcmcatccaccsctggtttttgaccctcccatagaagacacccgggacccgactccagccctccggactctagcctaggcccgcgggacggataacaaatttcacacaggaaacagctatgaccattaggcctatttaggtgacactatagaacaagtttgtacaaaaaagcaggctggtaccggtccggaattcccgggatcagckstgcyggckgcsggrgcggsgaaggrcscgggmkcgrgckacsgmggmcgmrcgcgscggccaccgsctcgcamcgcccttcmgcycrccgckccgcggacckcasmcctgcgsrkcyccctccwcccacyycccactccgggttggttttgtgtttgcttttccggaccccactctgccctccaaaaagacaaaaaaaaaaaaaaa

SEQ ID NO: 304 - DNA, 794 bp, Homo sapiens
gaactggccccaccttgcagtacattcaagtgtatcatattgcscagtacgcccccctattggacgtcratgacggtwaatggcccgcctggcattatgcycagtacatgactwatgggactktcctacttggcagtacatctacgtattagtcatcgctattaccatggtgatcggttttggcagtacatcaatgggcgtggatagcggtttgactcacggggatttccaagtctccaccccattgacgtcaatgggagtttgttttggcaccwaaatcaacgggactttccaaaatgtcgtaacaactccgccccattgacgcaaatgggcggtaggcgtgtacggtgggaggtctatataagcagagctcgtttagtgaaccgtcagatcgcctggagacgccatccacgctgttttgacctccatagaagacaccgggaccgatccagcctccggactctagcctaggccgcgggacggataacaatttcacacaggaaacagctatgaccattaggcctatttaggtgacactatagaacaagtttgtacaaaaaagcaggctggtaccggtccggaattcccgggatgrktrarswcctcgtrrtcysagytcmkacyggagtrakscasgtcgswytctakcywskkcaaattcctccctgtacgaaaggacaagagaaataaggcctacttcacaaagcgccttcccccgtaaatgatatcatctcaacttagtattatacccacacccacccaagaacaggrwwwrwwaaaaaaaaaaaaaaaaa

SEQ ID NO: 305 - DNA, 716 bp, Homo sapiens
ttttttttttttttttttttcttttttaggtttttacttttttatcataaagataacacatgcttatttttacaagtgatacaatacagagttccattaagagaaaattaatctgccttctccgagtccgttactctgaagcaacccttttagcagtttgatgaatatccttcaatacttttatgttcatacaaatacatgaaaatgtatatgtatatatacatcattgttacaaattgcaaccgctcatattcagtcctaagcaagtttttcttttccttttaacctaaaaaggtgtcacagatgggcctccaggtaagtggaggcagttttaactcctttaatagctgcagaatatttcaccatctgaatgcaccagcatttgttgagtggcagtgctgggcttctcaaactatctgtggcaaaatctcttattaaatttctaatcccatagcagactcacacatttgtaaaatatgataaagtgcaactattagaaacaagagaatcaaggctgggcgtggttggctcacacctgtaatcccagcattttgggaggccaaggcgggcagatcacgagatcaggagattgagaccatcctggctaaacatggtgaaaccccggtctctattaaaaatacgaaaaaattagctgggcgaggcggcaggcgcctgrcagtccccagctacttggggasgatgasscaggagratgg

SEQ ID NO: 306 - DNA, 1010 bp, Homo sapiens
  misc_feature (98)..(99): n is a, c, g, or t
  misc_feature (283)..(283): n is a, c, g, or t
  misc_feature (294)..(294): n is a, c, g, or t
  misc_feature (355)..(355): n is a, c, g, or t
  misc_feature (359)..(359): n is a, c, g, or t
  misc_feature (361)..(361): n is a, c, g, or t
  misc_feature (397)..(397): n is a, c, g, or t
  misc_feature (456)..(457): n is a, c, g, or t
  misc_feature (499)..(499): n is a, c, g, or t
  misc_feature (556)..(556): n is a, c, g, or t
  misc_feature (667)..(667): n is a, c, g, or t
ttcttttttttttttttttttttttttttcttttttttttttttttttctttttttttttctttttttctctttttttttcttcttttttttttcttnngccccccccggggaaacacagaatcagacaagacttctgcatccttcctttgttaggtccctgacttcctccgtttctccctctgttttattgtctatwtcgctktcsggrayscmccamtycvkgstsctckwtgwdrgmcmvtktdacarkbccggrratctkktyygkggrckgtycmmmnamvmvvcshcnmrggytwrdywbsbbbskgakyysdrcbdatcccyycrrktcbytkwgarkktgaccmrgndwwncndcgagctkbyadwgycstacyhgkgkwwgatgytcnacrcctcstscytgctggakcabctgdhcgabcmgkytdmctgggtgtcccgsytgscnnrcstcamgcwdgdcgddgayyhgtdctatywbsggstyhymncggtgscttcccmcvckkytgwhbmssrcghyccyycbgbygtcaywgwrgtkbtynwgmagywcbdhgwctmwgwtmcyatchctgtvhcsstycchstagragtcyymdsgrdgvmccctdwrtttatrkrgavcskkbcgsrgrmagcgcbscmkgdatwccshnwhaascmccssgagraddgwdrwkkgdatrtkgctytkgcacyyassggggcatckgagtccmgctccccccmwratgrbctscagccccccmgagagagctctgcacgtcaccmagwawmcaggccccmgcctycaggcccccmrctccgccymgcctctccccgctytggatcctgcactytaacactcgactytgctgctcmtgggaagaacagaattgctcctgcawgcmactaattmmatwaaactgtyttgtgarmwrrwaaaawaaaraaarwmaaaarwrradraraaraarwrraarararaaaaaaaaaaaaaaaaaaaaaaaaaaaaaaaaa

SEQ ID NO: 307 - DNA, 792 bp, Homo sapiens
catggttttttagtgggaccccctscccatacccaaccccgtggtcaacgtcaactagcctcstattwwttctagccacctctagcctagccgttaactcaatcctctgatcagggtgagcatcaaactcwaactacgccctgatcggcgcactgcgagcagtwgcccmwacratctcatatgaagtcaccctagccatcattcktackatcdacwdktrstrwtaagtggctccttkaacctkctccaccctwrtcdcracacwwgdacacctytgattactcctgccatcrtgacccttggccatratatgatttatctccacactagcagagacchaccgaacccccttcgaccttgccgaaggggagtccgaactagtctcaggcttcaacatcgwatacgccgcaggccccttcgccctaktcttcatagccgaatacayaaacattattataataaacaccctcaccactrcaatcttcctaggracmacatatgacgcactctcccctgaactctacacaacatattttgtcaccaagaccctacttctaacctccctgttcttatgaattcgaacagcatacccccgattccgctacgaccmactcatacacctcctatgaaaaaacttcctaccactcaccctagcattacttatatgatatgtctccatacccattacmatytccagcattccccctcaaacctaaaaaaaaaaaaaaaaaaaaaaaaaaaaaaaaaaaaaaaaaaaaraaaaaaaaaaaaaaagaaaaaaaaaaaaaaaaa

SEQ ID NO: 308 - DNA, 778 bp, Homo sapiens
cctgagctcttcagcggattgtgcccagttctatgacatcatctggttcagtccacttgaaagtaacttttcgcactttggtgatctcattctcatgggcacgcagctcctgaagagttttgggcattttttctggcaattccttcagctgattcttggacagataaagtcgttccaacttcaccaaaggtgtaaatgctccaggactaactttgctaattttattgttgacaagaatcaatgcgtgaaggttcttcaggttcttaaagtctccatctttgatttcggttattttgttgttttgcaggtctagcagagttgtgtcagggggaagatcctttggcactttgtccagacccaaatcagaacactggaccactcgaagatggcattgacagcggaaggggcacactgggcctagggagggctcgaagtcgcggtcatcaggaacttctgggcctatcccagaagcctcatcttctagcataaagtcaaataagcctctctgttgaaacggtccagcccaggaaacttgtgcaagcagaaggaggatgatagtggccttcatgatttatctcatgtattttcacaaccagggaaccttkyaatccgrgarttkkmmasakkarmyswsawagctgrgmtkyaattacactaaatattcagcccaagtaaaagagtttgcaggtgtggaaaggaggagggggtaggtgctgctctgtgactaggttgaaaacctcctgcttctactccatagcacagttaaaaaaaaaaaaaa

SEQ ID NO: 309 - DNA, 778 bp, Homo sapiens; identical to SEQ ID NO: 308

SEQ ID NO: 310 - DNA, 773 bp, Homo sapiens
atcaatgggctgtggatagcggtttgactcacgggggatttccrrgtctcmrwccccmytgacgtcaatgrgagtttgttttggcaccmawatcaacgggactktccaaawtgtcgtaacaactccgccccattgacgcaaatggcggtaggcgtgtacggtgggaggtctatataagcagagctcgtttagtgaaccgtcagatcgcctggagacgccatccacgctgttttgacctccatagaagacaccgggaccgatccagcctccggactctagcctaggccgcgggacggataacaatttcacacaggaaacagctatgaccattaggcctatttaggtgacactatagaacaagtttgtacaaaaaagcaggctggtaccggtccggaattcccgggatmrrrmwdrrmrrrrrrkcrgcsgggaaagaagaccctgttgagcttgactctagtctggcacggtgaagagacatgagaggtgtagaataagtgggaggcccccggcgcccccccggtgtccccgcgaggggcccggggcggggtccgccggccctgcgggccgccggtgaaataccactactctgatcgttttttcactgacccggtgaggcgggggggcgagccccgaggggctctcgcttctggcgccaagcgcccggccgcgcgccggccgggcgcgacccgctccggggacagtgccaggtggggagtttgactggggcggtacacctgtcaaacggtaacgcaggtgtcctaaggcgagct

SEQ ID NO: 311 - DNA, 736 bp, Homo sapiens
atgaaacatcagcgagttcacactggtgagcggccttatgaatgcaatgmatgtgggaagttatttagccagagctccagcctcaatagccatcggagacttcacactggtgaacggccttaccagtgcagtgaatgtgggaaattctttaaccaaagctccagcctcaataaccaccggagacttcacaccggcgagcggccttatgagtgcagcgaatgtgggaaaaccttcaggcagaggtccaatctgaggcagcacctgaaagttcacaaaccagacaggccttacgaatgcagcgaatgtgggaaagccttcaaccaaaggcctaccctcattcggcatcagaagattcacatcagagaaaggagcatggagaatgtgctccttccctgttcacagcacacaccagagataagctctgagaacagaccttatcagggcgctgtcaactacaagttgaaacttgttcatccaagtacccaccctggggaggttccctaggaatgctagctgtgttggaagctttctggagacaagttacattctcttactgtagagtttatcagcgttttttcactgctggggttgtgatagaagccatgtcagcaccacacactgcagtctccmaagagtgttgtccaccactcccactgtgctcagggaaggcagacctctctctctctttccatccctaagggaattaggagtastcggaactgggaagatgtcatcc

SEQ ID NO: 312 - DNA, 661 bp, Homo sapiens
tttttttttttttacttattctgataatgtggtgaatgtaatgattgattttagattttaaatcaatgatatagtttcaggtaaatttcatttggttataatgataattatttacaaatagctggttttaatttcttaaaattttgttaaggttgtgatatagtttaaacgttttgtcccctccaaaactcatgttgaaatgtgatcaccaatgttgcgggtagggctttgtggaaggtgtttgggtcactgggggtggattcctcatgaatcacttggtgctgtcctcatggtaatgagagagttctcatcgatgagttcacgcaagatctggttgtttaaaattatctgggatctcccccttctctcttgctcttttatgaagtgtgacatacttgctcccttttcaccttccatcatgattgtragcttcctgagaccttatcagaagctgagcagacatgggtgccmtgtwtgcacattctgtggaaccataaagctgcataaacctctttttgagtaataaattacacagtctcaggttattccttctatagcaatgcaaacaggatgaagacmgaaaattggtattgagagtggggtwwtgmcmtgaagatgctgataatgtggmagcaagctttggmackgagrcaaaggcgaa

SEQ ID NO: 313 - DNA, 738 bp, Homo sapiens
tttttttttttttttatgataaagggtggaccctgtatagtggagagagctggattggaatttaggagttgcactaacaagtgctgtgaacttcagcaagttttatcgcttctttgagccttggtttccatgcccatagaagtgagggagaaatcagatctatgtctcaaggttggtatgggaattaaatgcaatgacacatgaaaattgccagacacaaagcactattcaatacatgttattactacccactgcagtgggttgatttgtgccctccccaaaaaagatatgtctaagtcctaacccctaacgcctgtgaatgtgatcttatttaaagttggatctttgcagatgtaatgagattaaggatcttgagataaggttatcctgggtttagggagggctctgcacccagcgactggggtccttgtaagaggaagaagagggagatccaagacacagagaataaggtcttgtgaagacaaaggcagagacgggagtgatgccaccctggccaaggaacacagggcactcccaaaagctagaagaggcaaggaaggatagttccctagaatcagcagagggagcgcggacctgctgacaccttgattttggactctggcctccggaaccataaagagaattaaatyccacctgtttttaaaccaaacataagctgtcgtggtcatttgttatggtagccccggaaaattaatacaccccatcactcacgaacta

SEQ ID NO: 314 - DNA, 756 bp, Homo sapiens
tttttttttttttttttttwttttgtataacattattaaaatccttgtgtgtttcacgtatgtcaagggaaaccacaccagcagacaagggaattgtccactggttcttcccagataatgaatcactattcctgactgctgccatgatggttgattggatccttgagcagacacgcctcacctccccgctagaaggttgtcctgctgtatccttgatgttgtctccagagcatgcttcagcatctttwgtaatatggataggatgagaattttccaaatcattaagtgctgcttccctttttgttaatggttccttctttaatttatctctttcttctcacaatttattataagcagcaaggagaaacagaccacaccttatatacttwgcttggaaacctcctccactaagtagccaagtttgtcacttacaagttcttccttcttcacaatagtaatgcagctatwcagccacattttctacaactwtataatgaggattgcatttccactgctatccaataatatgtwcatwgtwtctttctgggaccttaccaggagcattatwaatgctgctatwtctaccaacattatgttwgtaaagacacaggtaccactaagactacagaagccttctctacacttgcagtmtctttkgactcctcttccaaagtgtcttactgtccctatttctaccaacgattcatctaaggatctaggcgtttcctttatatgctcagaatgctttcacctcat

SEQ ID NO: 315 - DNA, 986 bp, Homo sapiens
atagggactttccaggacgtcaagggtggagatttacggtaaacggcccactgggcagtacatcaagtgtatcaatatgcsmagkacgccccstatgacgtcwatgacggtaaatggcccgcgctggcwtwatgcccagtacatgaccttatggggactktccgtacttksgcaggtacatctacgtattagtyatcgytattaccatggtgatgcggttttgkcagtacatcrmtgggcgtggatascggtttgactcacggggatttccaagtcyccaccccattgacgtcaatgggagtttgttttggcaccaaaatcaacgggactttccwaaatgtcgtaacaactccgccccattgacgcaaatgggcggtaggcgtgtacggtgggaggtctatataagcagagctcgtttagtgaaccgtcagatcgcctggagacgccatccacgctgttttgacctccatagaagacaccgggaccgatccagcctccggactctagcctaggccgcgggacggataacaatttcacacaggaaacagctatgaccattaggcctatttaggtgacactatagaacaagtttgtacaaaaaagcaggctggtaccggtccggaattcccgggatamradarrmamrrhagtacaagtwyykyaarkkwcagaattcaagggcccaggcatggtggctcatgcctgttatctcagcacactgagaggccaaggtgggaggatcgcttgagcctaagagttcgagaccagccctggcaacgtagtgaaaccccatctgtataaaaaacagttaaaaaaaatcagctgggcatcctggtgcatgcctgtggtcccatctactcgggagactgggaggtggattccttgtgcccaggaggttgagggtgcagtgagccctggtcgcgccattgcactccagtctgggtgacagagcaagatgctgtctcaaaaaaaaaaaaaaaaaaaaa

SEQ ID NO: 316 - DNA, 741 bp, Homo sapiens
tttttttttttttttaaactatcaccatccttgaacaagaaaacacaaaagtggtacagttatagaagagggagaatgggaatggttttgggtaggagaagatcttgcggcaggggaagatccagagagaccacagacacaagatgaacaaactgagaatcacctgccaaagcccacaggtagggttgcaatgtgggtgcctgtgcagggcaacgggagaacaggaggagagggaaggggacaggcctcatcttctctcccatccagctgtggtggcgatagcccggcagtcaacactgctgagcctgctgagtccctgaaggtagaagttccctacgggaactgagcctcccggtaagttaactgaggggtctagtattgkctggctkgkcktctgttctaagatgaaagatatggaagcagctcaaaacacccaaagaaaaaaatacgtacagcatcatcaaaaagcttgctacctggagaatgtggtagaaggtcttttttttttaaatggcccccaaagatgtccaggccctaatatctggagcctgtgcatgtcactttatatggcagaacagactttgcaggtgtgattaaggaagcttgaaatgggaggcttattctggaatatccaggtggacctaatgcatcacaagggtccttattatagggaagcagaagaggagaaggcgaagaatggcagcagccccaagaaactggagaagggaatgggtttacccc

SEQ ID NO: 317 - DNA, 713 bp, Homo sapiens
gcccagaacatgccttagggactttcctactgggcagtaatctacgtattagtcatcgctattaccatgtgatcggttttggcagtacatcaatgggcgtggatagcggtttgactcacggggatttccaagtcttcccccccattgacgtcaatgggagtttgttttggcacccaaatcaacgggactttcccaaatgtcgtaacaactccgccccattgacgcaaatgggcggtaggcgtgtacggtgggaggtcaaaataagcagagctcgtttagtgaaccgtcagatcgcctggagacgccatccacgctgttttgacctccggatagaagacaccgggaccgatccagcctccggactctagcctaggccgcgggacggataacaatttcacacaggaaacagctatgacccttaggcctatttaggtgacactatagaacaagtttgtacaaaaaagcaggctggtaccggtccggaattcccgggattgcatctgggcttaaacccataggtagtcaggaaccaggaaaagtttttgattgtatactgagtgtccaaacactgcagagtgaactacagcagtgatctgggcaagctccccagcttamattttaktwwwywwsymmscawmawmaaaaaaaaaaaaaaaaaaaaaaaaaaaaaaaaaaaaaaaaaaaaaaaaaaaaaaaaaaaaaaaaaaaaaaaa

SEQ ID NO: 318 - DNA, 968 bp, Homo sapiens
tgacgtcaatggtggagtatttaccgctaactgcccacttggcagtacatcaagtgtatcatatgccaagtacgcccccctattgacgtcaatgacggtaaatggcccgcctggcattatgccccagtacaatgaccttatgggacttttcctactttggcagtacatctacgtattagtcatcgctattacccattggtgattcggtttttggcmgtacatcaatgggcgtkgatascgttttgactcacggggatttccaagtctccaccccatttgacgtcaatgggagtttgttttggcaccaaaatcaacgggactttccaaatgtcgtaacaactccgccccattgacgcaaatgggcggtaggcgtgtacggtgggaggtctatataagcagagctcgtttagtgaaccgtcagatcgcctggagacgccatccacgctgttttgacctccatagaagacaccgggaccgatccagcctccggactctagcctaggccgcgggacggataacaatttcacacaggaaacagctatgaccattaggcctatttaggtgacactatagaacaagtttgtacaaaaaagcaggctggtaccggtccggaattcccgggatgwtagasgyggtcwaaagacaaaattacaacaaatttagcttaaagatgtattggttttacttgcaattgtagaattgggcaacaccttgttctataaaatagtatgttctgatgagctgggcaaggtgttgtctgactttatggacagaaaaggactgaagaaagcagaaacaaaatgagaagtagacgggttgtttcaacatttccttctttctaggctttaagcagagggtactttcttatgctggatcaggtaaagggccccttctgcttggttgctatgaatctcctgtttaaaaaaaaaaaaaaaaaaaaaaaaaaaaaaaaaaaaaaaaaaaaaaaa

SEQ ID NO: 319 - DNA, 1065 bp, Homo sapiens
cagtcgtacatacttacgtaatgcccgcctggctgaccgcccacgacccccgcccatgacgtcaataatgacgtatgttcccatagtaacgccaatagggactttccatgacgtcaatgggtrgrgkatwtacggtaaactgcccacttggcagtacatcaagtgtatcatatgccaagtacgscccctattgacgtcaatgacggtaaakggcccgcctggcattatgcccagtacawgaccytatgggactttcctacttggcagtacatctacgtattagtcatcgctattaccatggtgatgcggttttggcagtacatcaatgggcgtggatagcggtttgactcacggggatttccaagtctccaccccattgacgtcaatgggagkwtkttttggcaccmcaaatctmacgggasatttcysvraatgtygtaacaactccgccccattgacgcmaatgggcggtaggcgtktacggtgggaggtctawataagcagagctcgtttagtgaaccgtcagatcgcctggagacgccatccacgctgttttgacctccatagaagacaccgggaccgatccagcctccggactctagcctasgccgcgggacggataacaatttcacacaggawacagytatgaccwytasgcctatttasgtgacastatagaacaagttygtacmamaaagcaggmtggtaycggtscggaaktyccgggatmwgmgmmwgvvmwywdaawmawrrmrwwvytgysrccrgghgyrgtggctcmtgcctgtaatcmcagyrctttgggaggcygaggwggrmggryyrcytgassycrggagkttgaagacyagcctgrscvacatgrwgarascywrtctctacwraarawamaraaaagttagccaggcgtggtggcacatgcctgtaatcccagctgctcaggaggctgaggcaggagaattgcttgaacccaagaggcggaggttgtggtgagccgagattgcacctttgtactccagcctgggcaacgagcaaaaaactctgtctcaaaaaaaaaaaaaaaaa

SEQ ID NO: 320 - DNA, 1324 bp, Homo sapiens
cgctagatgcatgtcgttacatcactgacggtaatgcccgctggctgccgcccttcgacccccgcccgtggacgtcataatgacgtatgttgcccatagtacgccataggggactttccattgacgtcaatgggtggagtatttacggtaaactgcccacttggcagtacatcaagtgtatcatatgccaagtacgccccctattgacgtcaatgacggtaaatggcccgcctggcattatgcccagtacatgaccttatgggactttcctacttggcagtacatctacgtattagtcatcgctattaccatggtgatgcggttttgcagtacatcaatgggcgtggatagcggtttgactcacggggatttccaagtctccaccccattgacgtcaatgggagtttgttttggcaccaaatcaacgggactttccaaaatgtcgtaacactccgccccattgacgcaatgggcggtaggcgtgtacggtgggaggtctatataagcagagctcgtttagtgaaccgtcagatcgcctggagacgccatccacgctgttttgacctccatagaagacaccgggaccgatccagcctccggactctagcctaggccgcgggacggataacattkcacacaggaaacagctatgaccattaggcctatttaggtgacactatagmacaagtttgtacaaaaagcaggctggtaccgtccggaattcccgggatmaaawawmwmatcaacaaccgactaatcaccacccacattgactaatccaactaacctcaaacaaatgataaccatacacaacactaaaggacgaacctgatctcttatactagtatccttaatcatttttattgccacaactaacctcctcggactcctgcctcactcatttacaccaaccacccaactatctataaacctagccatggccatccccttatgagcgggcgcagtgattataggctttcgctctaagattaaaaatgccctagcccacttcttaccacaaggcacacctacaccccttatccccatactagttattatcgaaaccatcagcctactcattcaaccaatagccctggccgtacgcctaaccgctaacattactgcaggccacctactcatgcacctaattggaagcgccaccctagcaatatcaaccattaaccttccctctacacttatcatcttcacaattctaattctactaactatcctagaaatcgctgtcgccttaatccaagcctacgttttcacacttctagtaagcctctacctgcacgacaacacataaaaaaaaaaaaaaaaa

SEQ ID NO: 321 - DNA, 678 bp, Homo sapiens
tttttttttttttttacgttaataataaaacagttgtatgatttttgttataagtcaagaaaataagattktatgaaatatgaataatcaaaaagtatgtctgatactaaaccctagtctttcttctgaactcatattcttttctacttgttgggtactaaataatcttatttctagccasgaaattctagcggaaaatacacacgtggtagtttttctttgttttgcaattcttttacagcgaagaaccatactgagggggcaaacttttagtyttgtagttaactgctctaggatattcaagtctcttccttgggaatctcatggcaggtcagtttcaaattgaggcagataaccatctccccatgttctctaaaccctcacttcagaaggcactctgccatctgtttaactctacattgggaagccaacttwtacttttaaaagccaagactgacacctctgtgtctgccacctgagcccccatgtaggtgaactcatcattgtgtgtcaagatccccctctgcctcctgctttcagccttgtgctrsctctgtwgctacaacttggcatgatgtgtgttcccagtaagtaagagagagtttcttttyttttctccaaggtgaaggaaacaacaggaatgctaattacattaatggaactgggccaatttctcag

SEQ ID NO: 322 - DNA, 530 bp, Homo sapiens
ttttagtagggctttttattgtttttaggccattgcctgctcagtcccgacagcattcccccttcttgaaacttcactatagctgctgacactccaaatttttgtccacaacaatatgcatttcaatatatcgagggaataacttaataaagtcagttttttctgaactttttctgacttgatactctgaattaaaccaagtataagtgtcattttcttctaagagaatattagtgtcagcatatttttcttcataaatcttgtgtataaatcctgatacagcctccatcggttcaattccatatgagatgtttttcagctgcattgttcccctgagtcctgaacatacgctgagagtcacaagagaatttggaatacccgcaacatatccattataattgcaatccatctgaactagcagaggtttggaatgacggatgtcattttcgtcataagaattaataacagaagctgaagataaaattgatattatgtttcggaatcgtttttgcatccgatgatgaaatctt

SEQ ID NO: 323 - DNA, 492 bp, Homo sapiens
  misc_feature (450)..(450): n is a, c, g, or t
tttttgtttttgaagatttatttcagagtgagcatcagcgacctacaagaacctgggacagaagccaatgcctcccgtttccctgtgatgtgaaacaggaccctgtgcttcctgtggacttcaagaaatgtggacttgagctttgccatcccttcccctgatcctgtttcatagattttgctgttatattctctgtatctttacagggatcgggaggctgaattagtgttattcagggttagtaactgtcccttccttaacggtggtggtcctgatagttcgcacatttttggctgtcccaaagagcagtgcaattatgaaggcgtaaatacgaccaaagaccactctcagatacatcactgattgctggctttgtttgacggaacgtgttctttttggaggtggcccgctgttgacactcccaccagcacctcttcttaggcacagtgnaggatcccagcctatatggcaatggcagttccttctgttgtg

SEQ ID NO: 324 - DNA, 3022 bp, Homo sapiens
ggagggggcgtcgggaaagccccgacttcgcagccttacactcttcgtgggcggcgaccgcggccccactgacatcattcctcatgagggaggaggcacaaacagttctgggccgaccagaaaaaggacgactgggacttgactctgaatcgcaggatttgaagagatttctcctggcttcccaacgaggctggtgggaagcggtcctcctcccatacacgacctcccaccctcgcgaggcgtaaaaaccagttctgactgtacagtaaagcgagggccagggctgaggtctggaagctaatgaaagcacagaaagtgtcgaaactggatgagcaggaagcgagtggcctcccctgtcatctgacgttttcccaggatgtaatttgcctgactgaaacagatcaggaccaacagggagagttttcgatttagtgtgaggaaaagagcactaaattgtagcaaaagaccttattgctcaaggcccagtcagaagatttcataaggaagctgtagaaagtcttaagaggaaatcagccgggcgtggtggcgggcacctgtaatcccagctactccggaggctgaggcaggagaatcgcttgaacccggggagcagaggttgcagtgagccgagatcgcgccactgtacgccagcctgggcgaaagaacgaaactccgtctccaaaaaaaaaaaaaacgaagaaaaagtccaaagagggtaaaggctgttctccccttaaaaaacagctaaagacctttgggggcgctgctccttgtaaatgtcaactacttccgcgggaaagaacgcgcaggcacttggccttgtgggcgctcacttgccccggaagtactgttgagttagcgcctcgccttccggggcggattgtctgtcgttgcagtagctgtaggaaggggaggccattttccgtttctgggaggagtgaggggcaacgggtcggagaaaaaggaaaaaagaagggctcagcgcctccccgccgggccgtggacagaggggcacagtttcggcaggcgggtgaggtcgctgagggcccgccggagatgttttccttgtcgagcacggtgcaaccccaggttacagttcctctgagtcatctcatcaatgccttccatacaccaaaaaacacttctgtttctctcagtggagtgtcagtttctcaaaaccagcatcgagatgtagttcctgagcatgaggctcccagcagtgagtgtatgttcagtgacttcctgacgaagcttaacattgtttcaattggcaaaggaaaaatattcgaagggtacagatccatgttcatggagccagcaaaaaggatgaagaagagcttggacacaaccgataactggcacatccgtccagaacccttctccctctcaatccctgtacactgcgggtttctccaaatgcctattgtctatgatttgttttgtccatcgttcttagtcacggcttagttcaggttcttgccatctttcacttgttccatcagccttctctctcatccagtctagttgctttgtttgtttgttttatcatttttaaattttttgtaaagacagggtcttgctttcttcaccaggctgatctcgaactcctggcctgaagcagtcctcccacctcagcctctcaaaagtgttgggattacaggctcgagccaccatgctaggccagtctatcttccttagttctccattttcttctataagacagaactaatcatgttacttagagaattaaattcaaacatggctcttcacagtttggccataacctatctctttaattttttctttccttgaattttttgagatattccagacccttggatggctttttgtttgcccccgtccctaagccgccttgatcatttttaatagcttaaaaagtacttttaagtattttatttcatcatgcctttaactgtcttttactatgtgctgtcatgttgtatgctaggatacgtagatgagtaaggcatgatctctgcctttgatccttactattaggaaataaggtgtattttatagttatgttagtattgagaaaatgaattctaagaatatgagttatagctaatttaaaaagtaccgtattcccagacatcagtccagagctatataatccgtgtccatgcctcttttaaaaaaaactttatttttagagacagggtctcccctttgtagcccaggctgaagtgcagtgatgctgtcatagctcactgcaacctccagctcctgggctcaaacatttctcctgagtagctggtgctgcgggtgcataccaccatgcccagctaatttttaaatttttcatcaagatgatgtcttaccatgttgctcaggctggtctcaaactcctggcctcaaacgatcttcccaccttagctgttttgggtttgagtaacatgtaattgttacttgcctttaagtgcctctctttcagctcatgtggacaagaaaataatccctatcctgttgtttaaaagtgggtatacacacatttttgtgatttttagacttttttgcctgattttcacacagttttgactttaattttcttctttattagaagatatgggtaactttagaacctctgagttcaaggaaggatctaagcaatgaggccagaggagtgagatgtcctatggtaaccaagcataccatttctttgtcaagtgggcttttgtttatggctgcttaggggcttaaaagctccatggactggtgaggattatcatttgaatggaatttccccaattcaagaaccttactattatcctccaatcagttctacactgttggggaaaatcccctggaccttatataacatactttgtaaccatgcagttagttactcttacactcttgtcattataaatgcttgatcaatagttgatagactagctcttgatcagagtacccttgtatggagagaaggaaaaaatgccatacatttcacttgattctgtgaaccataatgcttaggacagtagtggtttgggtttgattt

SEQ ID NO: 325 - DNA, 2862 bp, Homo sapiens
cagccgatggggtgcgactgcttcgtccaggaggtgttctgctcagatgaggagcttgccaccgtcccgctggacatcccgccatatacgaaaaacatcatctttgtggagacctcgttcaccacattggaaaccagagcttttggcagtaaccccaacttgaccaaggtggtcttcctcgacactcagctctgccagtttaggccggatgcctttggggggctgcccaggctggaggacctggaggtcacaggcagtagcttcttgaacctcagcaccaacatcttctccaacctgacctcgctgggcaagctcaccctcaacttcaacatgctggaggctctgcccgagggtcttttccagcacctggctgccctggagtccctccacctgcaggggaaccagctccaggccctgcccaggaggctcttccagcctctgacccatctgaagacactcaacctggcccagaacctcctggcccagctcccggaggagctgttccacccactcaccagcctgcagaccctgaagctgagcaacaacgcgctctctggtctcccccagggtgtgtttggcaaactgggcagcctgcaggagctcttcctggacagcaacaacatctcggagctgccccctcaggtgttctcccagctcttctgcctagagaggctgtggctgcaacgcaacgccatcacgcacctgccgctctccatctttgcctccctgggtaatctgaccttcctgagcttgcagtggaacatgcttcgggtcctgcctgccggcctctttgcccacaccccatgcctggttggcctgtctctgacccataaccagctggagactgtcactgagggcacctttgcccacctgtccaacctgcgttccctcatgctctcatacaatgccattacccacctcccagctggcatcttcagagacctggaggagttggtcaaactctacctgggcagcaacaaccttacggcgctgcacccagccctcttccagaacctgtccaagctggagctgctcagcctctccaagaaccagctgaccacacttccggaggcatcttcgacaccaactacaacctgttcaacctggccctgcacggtaacccctggcagtgcgactgcacctggcctacctcttcaactggctgcagcagtacaccgatcggctcctgaacatccagacctactgcgctgccctgcctacctcaaaggccaggtggtgcacgccttgaatgagaagcagctggtgtccgtcacccgggaccacttgggcttccaggtcacgtggccggacgaaagcaaggcagggggcagctgggatctggctgtgcaggaaagggcagcccggagccagtgcacctacagcaaccccgagggcaccgtggtgctcgcctgtgaccaggcccagtgtcgctggctgaacgtccagctctctcctcggcagggctccctgggactgcagtacaatgctagtcaggagtgggacctgaggcgagctgcggttctctgcggctcaccatgtctatcgaggctcgggcagcagggccctagtagcagccatacaggagctggggaagggggcctctggggctgaccaggcgacaggtaggggcgaggggagctgagtctccgaagccttgcttttcacatgcaagggacagggttacatccccaaggtgagggggtggagtctggtctgctccactaaccagggtctcctcctcctcttccttcatcgcttctcctggagtgtgcgcctaataaggccatccttatgccttgcaaagcaccctcaaaagctgcaccacagcctggagaataaaatatcctcagccctgatgcctccccattatgtaacacccaaccgctctcacctacaccctgaggtctattcactgcatcccagtgatactaagtggaggccactgccttctgacatctggctcaaaagcccagtgtctgtttccatttatttccctggaatttcatttaaaattggtatagagaaaaaaaggatgtgacagaagcagagatgaccagaaagcacaggggcagggttctgactggcgtgtgggagaccctgtggccggcacccacctccacacgaggactaagctcttattttttaatcttgcccaaattcctacctaaggggtctagggagtcgcgccttacaaatcataaattttcatcagatgggttttataagaccctgtatatcatgacttatttttaatctgactatggcataacattacaagacgaggcaaaaatattgaacccccaaatatatttcctggccctaccttgaactggccctgcagagtctcttgtgaggagaatccacatcctataaagaagcccctttcccctttgttttccttcctttctttccagtccaggagatcatcaactaagagccaggcaccccttttaagtcgataagaaacagtttacaacctgctctctctctctctgaagtctgctgagagcttcccctgcacaataaaacttggcctccacgatcctttatcttaacctgaacattcctttccattgatcccaggtcttcagctgagctgaaccaattgtcaaccagaaaatgtttgaatttacctacagcctggaagcacccacccccgctgcttcgagttgtcctgcctttctgaactcaaccaatgtatttcttaaatgtatttgattgatgcctcagtcctccctaaaatgtataaaaccaagctgtacctcgaccaccttgggcacatgttcccaggccctcctgaggtctgtgtcacgggccatggccgctcatatttggctcagaataaatctcttcaaaaacccc

SEQ ID NO: 326 - DNA, 501 bp, Homo sapiens
  misc_feature (14)..(14): n is a, c, g, or t
  misc_feature (17)..(17): n is a, c, g, or t
  misc_feature (24)..(24): n is a, c, g, or t
  misc_feature (29)..(29): n is a, c, g, or t
  misc_feature (40)..(40): n is a, c, g, or t
ttcataatctaaanacnatcttantaaanacttctacaanccaaatccaagccaaaaacaaccgaatccctggacactaagccaggaaactcctccttcgacgtccttacaactggacaggcggccctggatgtttatcacccaagcctatcacgcgtgaatcggtgtcccagctccacttttattctccttttctccagagcgaggggagctgcatcagtggcttccagggcatgaacctccccaccgaatctggagagctttggatcctgggtgatgtcttcatccgccagtactttaccgtcttcgagagggcaaacaaccaggtcggcctggcccccgtggcttaagcctaagtctcttcagccacctcccaggaagatctggcctctgtcctgtgcccactttagatgtatctaattctcctgactgttcttcccaggggagtgtggaggtcttggccctgttccctgtcctaccaataacgtagaataaaaacat

SEQ ID NO: 327 - DNA, 4577 bp, Homo sapiens
gctacaatccatctggtctcctccagctccttctttctgcaacatggggaagaacaaactccttcatccaagtctggttcttctcctcttggtcctcctgcccacagacgcctcagtctctggaaaaccgcagtatatggttctggtcccctccctgctccacactgagaccactgagaagggctgtgtccttctgagctacctgaatgagacagtgactgtaagtgcttccttggagtctgtcaggggaaacaggagcctcttcactgacctggaggcggagaatgacgtactccactgtgtcgccttcgctgtcccaaagtcttcatccaatgaggaggtaatgttcctcactgtccaagtgaaaggaccaacccaagaatttaagaagcggaccacagtgatggttaagaacgaggacagtctggtctttgtccagacagacaaatcaatctacaaaccagggcagacagtgaaatttcgtgttgtctccatggatgaaaactttcaccccctgaatgagttgattccactagtatacattcaggatcccaaaggaaatcgcatcgcacaatggcagagtttccagttagagggtggcctcaagcaattttcttttcccctctcatcagagcccttccagggctcctacaaggtggtggtacagaagaaatcaggtggaaggacagagcaccctttcaccgtggaggaatttgttcttcccaagtttgaagtacaagtaacagtgccaaagataatcaccatcttggaagaagagatgaatgtatcagtgtgtggcctatacacatatgggaagcctgtccctggacatgtgactgtgagcatttgcagaaagtatagtgacgcttccgactgccacggtgaagattcacaggctttctgtgagaaattcagtggacagctaaacagccatggctgcttctatcagcaagtaaaaaccaaggtcttccagctgaagaggaaggagtatgaaatgaaacttcacactgaggcccagatccaagaagaaggaacagtggtggaattgactggaaggcagtccagtgaaatcacaagaaccataaccaaactctcatttgtgaaagtggactcacactttcgacagggaattcccttctttgggcaggtgcgcctagtagatgggaaaggcgtccctataccaaataaagtcatattcatcagaggaaatgaagcaaactattactccaatgctaccacggatgagcatggccttgtacagttctctatcaacaccaccaacgttatgggtacctctcttactgttagggtcaattacaaggatcgtagtccctgttacggctaccagtgggtgtcagaagaacacgaagaggcacatcacactgcttatcttgtgttctccccaagcaagagctttgtccaccttgagcccatgtctcatgaactaccctgtggccatactcagacagtccaggcacattatattctgaatggaggcaccctgctggggctgaagaagctctccttttattatctgataatggcaaagggaggcattgtccgaactgggactcatggactgcttgtgaagcaggaagacatgaagggccatttttccatctcaatccctgtgaagtcagacattgctcctgtcgctcggttgctcatctatgctgttttacctaccggggacgtgattggggattctgcaaaatatgatgttgaaaattgtctggccaacaaggtggatttgagcttcagcccatcacaaagtctcccagcctcacacgcccacctgcgagtcacagcggctcctcagtccgtctgcgccctccgtgctgtggaccaaagcgtgctgctcatgaagcctgatgctgagctctcggcgtcctcggtttacaacctgctaccagaaaaggacctcactggcttccctgggcctttgaatgaccaggacgatgaagactgcatcaatcgtcataatgtctatattaatggaatcacatatactccagtatcaagtacaaatgaaaaggatatgtacagcttcctagaggacatgggcttaaaggcattcaccaactcaaagattcgtaaacccaaaatgtgtccacagcttcaacagtatgaaatgcatggacctgaaggtctacgtgtaggtttttatgagtcagatgtaatgggaagaggccatgcacgcctggtgcatgttgaagagcctcacacggagaccgtacgaaagtacttccctgagacatggatctgggatttggtggtggtaaactcagcaggggtggctgaggtaggagtaacagtccctgacaccatcaccgagtggaaggcaggggccttctgcctgtctgaagatgctggacttggtatctcttccactgcctctctccgagccttccagcccttctttgtggagcttacaatgccttactctgtgattcgtggagaggccttcacactcaaggccacggtcctaaactaccttcccaaatgcatccgggtcagtgtgcagctggaagcctctcccgccttccttgctgtcccagtggagaaggaacaagcgcctcactgcatctgtgcaaacgggcggcaaactgtgtcctgggcagtaaccccaaagtcattaggaaatgtgaatttcactgtgagcgcagaggcactagagtctcaagagctgtgtgggactgaggtgccttcagttcctgaacacggaaggaaagacacagtcatcaagcctctgttggttgaacctgaaggactagagaaggaaacaacattcaactccctactttgtccatcaggtggtgaggtttctgaagaattatccctgaaactgccaccaaatgtggtagaagaatctgcccgagcttctgtctcagttttgggagacatattaggctctgccatgcaaaacacacaaaatcttctccagatgccctatggctgtggagagcagaatatggtcctctttgctcctaacatctatgtactggattatctaaatgaaacacagcagcttactccagaggtcaagtccaaggccattggctatctcaacactggttaccagagacagttgaactacaaacactatgatggctcctacagcacctttggggagcgatatggcaggaaccagggcaacacctggctcacagcctttgttctgaagacttttgcccaagctcgagcctacatcttcatcgatgaagcacacattacccaagccctcatatggctctcccagaggcagaaggacaatggctgtttcaggagctctgggtcactgctcaacaatgccataaagggaggagtagaagatgaagtgaccctctccgcctatatcaccatcgcccttctggagattcctctcacagtcactcaccctgttgtccgcaatgccctgttttgcctggagtcagcctggaagacagcacaagaaggggaccatggcagccatgtatataccaaagcactgctggcctatgcttttgccctggcaggtaaccaggacaagaggaaggaagtactcaagtcacttaatgaggaagctgtgaagaaagacaactctgtccattgggagcgccctcagaaacccaaggcaccagtggggcatttttacgaaccccaggctccctctgctgaggtggagatgacatcctatgtgctcctcgcttatctcacggcccagccagccccaacctcggaggacctgacctctgcaaccaacatcgtgaagtggatcacgaagcagcagaatgcccagggcggtttctcctccacccaggacacagtggtggctctccatgctctgtccaaatatggagccgccacatttaccaggactgggaaggctgcacaggtgactatccagtcttcagggacattttccagcaaattccaagtggacaacaacaatcgcctgttactgcagcaggtctcattgccagagctgcctggggaatacagcatgaaagtgacaggagaaggatgtgtctacctccagacctccttgaaatacaatattctcccagaaaaggaagagttcccctttgctttaggagtgcagactctgcctcaaacttgtgatgaacccaaagcccacaccagcttccaaatctccctaagtgtcagttacacagggagccgctctgcctccaacatggcgatcgttgatgtgaagatggtctctggcttcattcccctgaagccaacagtgaaaatgcttgaaagatctaaccatgtgagccggacagaagtcagcagcaaccatgtcttgatttaccttgataaggtgtcaaatcagacactgagcttgttcttcacggttctgcaagatgtcccagtaagagatctcaaaccagccatagtgaaagtctatgattactacgagacggatgagtttgcaatcgctgagtacaatgctccttgcagcaaagatcttggaaatgcttgaagaccacaaggctgaaaagtgctttgctggagtcctgttctctgagctccacagaagacacgtgtttttgtatctttaaagacttgatgaataaacactttttctggtc

SEQ ID NO: 328 - DNA, 2765 bp, Homo sapiens
tgggacaggcagctccggggtccgcggtttcacatcggaaacaaaacagcggctggtctggaaggaacctgagctacgagccgcggcggcagcggggcggcggggaagcgtatacctaatctgggagcctgcaagtgacaacagcctttgcggtccttagacagcttggcctggaggagaacacatgaaagaaagaacctcaagaggctttgttttctgtgaaacagtatttctatacagttgctccaatgacagagttacctgcaccgttgtcctacttccagaatgcacagatgtctgaggacaaccacctgagcaatactgtacgtagccagaatgacaatagagaacggcaggagcacaacgacagacggagccttggccaccctgagccattatctaatggacgaccccagggtaactcccggcaggtggtggagcaagatgaggaagaagatgaggagctgacattgaaatatggcgccaagcatgtgatcatgctctttgtccctgtgactctctgcatggtggtggtcgtggctaccattaagtcagtcagcttttatacccggaaggatgggcagctaatctataccccattcacagaagataccgagactgtgggccagagagccctgcactcaattctgaatgctgccatcatgatcagtgtcattgttgtcatgactatcctcctggtggttctgtataaatacaggtgctataaggtcatccatgcctggcttattatatcatctctattgttgctgttctttttttcattcatttacttgggggaagtgtttaaaacctataacgttgctgtggactacattactgttgcactcctgatctggaattttggtgtggtgggaatgatttccattcactggaaaggtccacttcgactccagcaggcatatctcattatgattagtgccctcatggccctggtgtttatcaagtacctccctgaatggactgcgtggctcatcttggctgtgatttcagtatatgatttagtggctgttttgtgtccgaaaggtccacttcgtatgctggttgaaacagctcaggagagaaatgaaacgctttttccagctctcatttactcctcaacaatggtgtggttggtgaatatggcagaaggagacccggaagctcaaaggagagtatccaaaaattccaagtataatgcagaaagcacagaaagggagtcacaagacactgttgcagagaatgatgatggcgggttcagtgaggaatgggaagcccagagggacagtcatctagggcctcatcgctctacacctgagtcacgagctgctgtccaggaactttccagcagtatcctcgctggtgaagacccagaggaaaggggagtaaaacttggattgggagatttcattttctacagtgttctggttggtaaagcctcagcaacagccagtggagactggaacacaaccatagcctgtttcgtagccatattaattggtttgtgccttacattattactccttgccattttcaagaaagcattgccagctcttccaatctccatcacctttgggcttgttttctactttgccacagattatcttgtacagccttttatggaccaattagcattccatcaattttatatctagcatatttgcggttagaatcccatggatgtttcttctttgactataaccaaatctggggaggacaaaggtgattttcctgtgtccacatctaacaaagtcaagattcccggctggacttttgcagcttccttccaagtcttcctgaccaccttgcactattggactttggaaggaggtgcctatagaaaacgattttgaacatacttcatcgcagtggactgtgtccctcggtgcagaaactaccagatttgagggacgaggtcaaggagatatgataggcccggaagttgctgtgccccatcagcagcttgacgcgtggtcacaggacgatttcactgacactgcgaactctcaggactaccggttaccaagaggttaggtgaagtggtttaaaccaaacggaactcttcatcttaaactacacgttgaaaatcaacccaataattctgtattaactgaattctgaacttttcaggaggtactgtgaggaagagcaggcaccagcagcagaatggggaatggagaggtgggcaggggttccagcttccctttgattttttgctgcagactcatcctttttaaatgagacttgttttcccctctctttgagtcaagtcaaatatgtagattgcctttggcaattcttcttctcaagcactgacactcattaccgtctgtgattgccatttcttcccaaggccagtctgaacctgaggttgctttatcctaaaagttttaacctcaggttccaaattcagtaaattttggaaacagtacagctatttctcatcaattctctatcatgttgaagtcaaatttggattttccaccaaattctgaatttgtagacatacttgtacgctcacttgcccccagatgcctcctctgtcctcattcttctctcccacacaagcagtctttttctacagccagtaaggcagctctgtcrtggtagcagatggtcccattattctagggtcttactctttgtatgatgaaaagaatgtgttatgaatcggtgctgtcagccctgctgtcagaccttcttccacagcaaatgagatgtatgcccaaagcggtagaattaaagaagagtaaaatggctgttgaagc

SEQ ID NO: 329 - DNA, 2150 bp, Homo sapiens
tgtattgaaacaatttaatgaaaatattaaatatttggtttcaaaaggcagatttatcttctcccaacattctgttatttctgatacttttgaaaaactaataaaaacaattgttcggcgatcgctggctgccgggacttttctcgcgctggtctcttcggtggtcagggatggcgcggaagtcgaacttgcctgtgcttctcgtgccgtttctgctctgccaggccctagtgcgctgctccagccctctgcccctggtcgtcaacacttggccctttaagaatgcaaccgaagcagcgtggagggcattagcatctggaggctctgccctggatgcagtggagagcggctgtgccatgtgtgagagagagcagtgtgacggctctgtaggctttggaggaagtcctgatgaacttggagaaaccacactagatgccatgatcatggatggcactactatggatgtaggagcagtaggagatctcagacgaattaaaaatgctattggtgtggcacggaaagtactggaacatacaacacacacacttttagtaggagagtcagccaccacatttgctcaaagtatggggtttatcaatgaagacttatctaccagtgcttctcaagctcttcattcagattggcttgctcggaattgccagccaaattattggaggaatgttataccagatccctcaaaatactgcggaccctacaaaccacctggtatcttaaagcaggatattcctatccataaagaaacagaagatgatcgtggtcatgacactattggcatggttgtaatccataagacaggacatattgctgctggtacatctacaaatggtataaaattcaaaatacatggccgtgtaggagactcaccaatacctggagctggagcctatgctgacgatactgcaggggcagccgcagccactgggaatggtgatatattgatgcgcttcctgccaagctaccaagctgtagaatacatgagaagaggagaagatccaaccatagcttgccaaaaagtgatttcaagaatccagaagcattttccagaattctttggggctgttatatgtgccaatgtgactggaagttacggtgctgcttgcaataaactttcaacatttactcagtttagtttcatggtttataattccgaaaaaaatcagccaactgaggaaaaagtggactgcatctaatccatctttactgtcaacatctgtatttaaagaagaaagaaacaaaggctgaaaaggctgctcactctcatcatctagtgttcctcatgtgttctaaagtctttttgtaaaataaacacaaaaataaatttatgttgaattggcactttctatatctgaaattgtattatctatttttatttaacctttcttatattatctgaagatgaatatgtatgtggctgtattttgtatatatttaagttttaagtgacacttggatttctgatcagtgttgcaaaaaattgctactttgagatttatttccacagtgatatattaaacccaaaaggaatcatcatatttggatgcttaaaatagagtatacaagttttttagacccaaagaaaaaaacatgcagagtctcagcatgatcagtcctgattgaatttcattatgtcacagtgatgcatgtcttagcactgattattggttttacttaatatcccctaaaaacttgaggaaggaagatgatagaacatgagatactctttgttttgtacatactagaaaatacagctatctcctgatgagcaattgtgttgattttctttgcttttttcctcttatggagctctcagtgtgtgaaagttctaaagccacaagaatcaatgatgttttagctgctaatatttagtattgatcgtttcttttaaaaatgatttggggaacttgatctgtactgtaattttactaattccttgtgcagaggtgggtatggcaattagaagtcaagaaatgggttgtttagcttggtttgtttccctaacttctgattaactctctgtatgacaactctacagaagttgtgcgcgtgctttctcagcagcatttttccttcaaaatcatctttttaatcaacagtcattaataaatgtacatgtacgatattcaaacttt

SEQ ID NO: 330 - DNA, 2099 bp, Homo sapiens
aagaagctgccgttgttctgggtactacagcagaagggtatgcggaagcgagcaccccagtctgagatggctcctgccggtgtgagcctgagggccaccatcctctgcctcctggcctgggctggcctggctgcaggtgaccgggtgtacatacaccccttccacctcgtcatccacaatgagagtacctgtgagcagctggcaaaggccaatgccgggaagcccaaagaccccaccttcatacctgctccaattcaggccaagacatcccctgtggatgaaaaggccctacaggaccagctggtgctagtcgctgcaaaacttgacaccgaagacaagttgagggccgcaatggtcgggatgctggccaacttcttgggcttccgtatatatggcatgcacagtgagctatggggcgtggtccatggggccaccgtcctctccccaacggctgtctttggcaccctggcctctctctatctgggagccttggaccacacagctgacaggctacaggcaatcctgggtgttccttggaaggacaagaactgcacctcccggctggatgcgcacaaggtcctgtctgccctgcaggctgtacagggcctgctagtggcccagggcagggctgatagccaggcccagctgctgctgtccacggtggtgggcgtgttcacagccccaggcctgcacctgaagcagccgtttgtgcagggcctggctctctatacccctgtggtcctcccacgctctctggacttcacagaactggatgttgctgctgagaagattgacaggttcatgcaggctgtgacaggatggaagactggctgctccctgatgggagccagtgtggacagcaccctggctttcaacacctacgtccacttccaagggaagatgaagggcttctccctgctggccgagccccaggagttctgggtggacaacagcacctcagtgtctgttcccatgctctctggcatgggcaccttccagcactggagtgacatccaggacaacttctcggtgactcaagtgcccttcactgagagcgcctgcctgctgctgatccagcctcactatgcctctgacctggacaaggtggagggtctcactttccagcaaaactccctcaactggatgaagaaactgtctccccggaccatccacctgaccatgccccaactggtgctgcaaggatcttatgacctgcaggacctgctcgcccaggctgagctgcccgccattctgcacaccgagctgaacctgcaaaaattgagcaatgaccgcatcagggtgggggaggtgctgaacagcattttttttgagcttgaagcggatgagagagagcccacagagtctacccaacagcttaacaagcctgaggtcttggaggtgaccctgaaccgcccattcctgtttgctgtgtatgatcaaagcgccactgccctgcacttcctgggccgcgtggccaacccgctgagcacagcatgaggccagggccccagaacacagtgcctggcaaggcctctgcccctggcctttgaggcaaaggccagcagcagataacaaccccggacaaatcagcgatgtgtcacccccagtctcccaccttttcttctaatgagtcgactttgagctggaaagcagccgtttctccttggtctaagtgtgctgcatggagtgagcagtagaagcctgcagcggcacaaatgcacctcccagtttgctgggtttattttagagaatgggggtggggaggcaagaaccagtgtttagcgcgggactactgttccaaaaagaattccaaccgaccagcttgtttgtgaaacaaaaaagtgttcccttttcaagttgagaacaaaaattgggttttaaaattaaagtatacatttttgcattgccttcggtttgtatttagtgtcttgaatgtaagaacatgacctccgtgtagtgtctgtaataccttagttttttccacagatgcttgtgatttttgaacaatacgtgaaagatgcaagcacctgaatttctgtttgaatgcggaacaatagctggttatttctcccttgtgttagtaataaacgtcttgccac

SEQ ID NO: 331 - DNA, 1464 bp, Homo sapiens
agtaccgggtacgcaggggtgcctcaaccacactccgtccacggactctccgttattttaggaggtccctggccaaagatttatttctcttgacaaccaagggcctccgtctggatttccaaggaagaatttcctctgaagcaccggaacttgctactaccagcaccatgccctaccaatatccagcactgaccccggagcagaagaaggagctgtctgacatcgctcaccgcatcgtggcacctggcaagggcatcctggctgcagatgagtccactgggagcattgccaagcggctgcagtccattggcaccgagaacaccgaggagaaccggcgcttctaccgccagctgctgctgacagctgacgaccgcgtgaacccctgcattgggggtgtcatcctcttccatgagacactctaccagaaggcggatgatgggcgtcccttcccccaagttatcaaatccaagggcggtgttgtgggcatcaaggtagacaagggcgtggtccccctggcagggacaaatggcgagactaccacccaagggttggatgggctgtctgagcgctgtgcccagtacaagaaggacggagctgacttcgccaagtggcgttgtgtgctgaagattggggaacacaccccctcagccctcgccatcatggaaaatgccaatgttctggcccgttatgccagtatctgccagcagaatggcattgtgcccatcgtggagcctgagatcctccctgatggggaccatgacttgaagcgctgccagtatgtgaccgagaaggtgctggctgctgtctacaaggctctgagtgaccaccacatctacctggaaggcaccttgctgaagcccaacatggtcaccccaggccatgcttgcactcagaagttttctcatgaggagattgccatggcgaccgtcacagcgctgcgccgcacagtgccccccgctgtcactgggatcaccttcctgtctggaggccagagtgaggaggaggcgtccatcaacctcaatgccattaacaagtgccccctgctgaagccctgggccctgaccttctcctacggccgagccctgcaggcctctgccctgaaggcctggggcgggaagaaggagaacctgaaggctgcgcaggaggagtatgtcaagcgagccctggccaacagccttgcctgtcaaggaaagtacactccgagcggtcaggctggggctgctgccagcgagtccctcttcgtctctaaccacgcctattaagcggaggtgttcccaggctgcccccaacaactccaggccctgccccctcccactcttgaagaggaggccgcctcctcggggctccaggctggcttgcccgcgctctttcttccctcgtgacagtggtgtgtggtgtcgtctgtgaatgctaagtccatcaccctttccggcacactgccaaataaacagctatttaaggggg

SEQ ID NO: 332 - DNA, 1590 bp, Homo sapiens
cgagcccgagtggttcactgcactgtgaaaacagattccagacgccgggaactcacgcctccaatcccagacgctatgtccagcaaaggctccgtggttctggcctacagtggcggcctggacacctcgtgcatcctcgtgtggctgaaggaacaaggctatgacgtcattgcctatctggccaacattggccagaaggaagacttcgaggaagccaggaagaaggcactgaagcttggggccaaaaaggtgttcattgaggatgtcagcagggagtttgtggaggagttcatctggccggccatccagtccagcgcactgtatgaggaccgctacctcctgggcacctctcttgccaggccctgcatcgcccgcaaacaagtggaaatcgcccagcgggagggggccaagtatgtgtcccacggcgccacaggaaaggggaacgatcaggtccggtttgagctcagctgctactcactggccccccagataaaggtcattgctccctggaggatgcctgaattctacaaccggttcaagggccgcaatgacctgatggagtacgcaaagcaacacgggattcccatcccggtcactcccaagaacccgtggagcatggatgagaacctcatgcacatcagctacgaggctggaatcctggagaaccccaagaaccaagcgcctccaggtctctacacgaagacccaggacccagccaaagcccccaacacccctgacattctcgagatcgagttcaaaaaaggggtccctgtgaaggtgaccaacgtcaaggatggcaccacccaccagacctccttggagctcttcatgtacctgaacgaagtcgcgggcaagcatggcgtgggccgtattgacatcgtggagaaccgcttcattggaatgaagtcccgaggtatctacgagaccccagcaggcaccatcctttaccatgctcatttagacatcgaggccttcaccatggaccgggaagtgcgcaaaatcaaacaaggcctgggcttgaaatttgctgagctggtgtataccggtttacggcctagccctgagtgtgaatttgtccgccactgcatcgccaagtcccaggagcgagtggaagggaaagtgcaggtgtccgtcctcaagggccaggtgtacatcctcggccgggagtccccactgtctctctacaatgaggagctggtgagcatgaacgtgcagggtgattatgagccaactgatgccaccgggttcatcaacatcaattccctcaggctgaaggaatatcatcgtctccagagcaaggtcactgccaaatagacccgtgtacaatgaggagctggggcctcctcaatttgcagatcccccaagtacaggcgctaattgttgtgataatttgtaattgtgacttgttctccccggctggcagcgtagtggggctgccaggccccagctttgttccctggtccccctgaagcctgcaaacgttgtcatcgaagggaagggtggggggcagctgcggtggggagctataaaaatgacaattaaaagagacactagtcttttatttctaaaaaaaaaaaaaaaaaaaaaaaa

SEQ ID NO: 333 - DNA, 9886 bp, Homo sapiens
gcgagaggagtcgggatctgcgctgcagccaccgccgcggttgatactactttgaccttccgagtgcagtgaggcatacatcacaatttggaattatgcattggtttatcaatttacttgtttattgtcaccctgctgcccagatatgacttcatgaggacagtgatgtgtgttctgaaattgtgaaccatgagtctagtacttaatgatctgcttatctgctgccgtcaactagaacatgatagagctacagaacgaaagaaagaagttgagaaatttaagcgcctgattcgagatcctgaaacaattaaacatctagatcggcattcagattccaaacaaggaaaatatttgaattgggatgctgtttttagatttttacagaaatatattcagaaagaaacagaatgtctgagaatagcaaaaccaaatgtatcagcctcaacacaagcctccaggcagaaaaagatgcaggaaatcagtagtttggtcaaatacttcatcaaatgtgcaaacagaagagcacctaggctaaaatgtcaagaactcttaaattatatcatggatacagtgaaagattcatctaatggtgctatttacggagctgattgtagcaacatactactcaaagacattctttctgtgagaaaatactggtgtgaaatatctcagcaacagtggttagaattgttctctgtgtacttcaggctctatctgaaaccttcacaagatgttcatagagttttagtggctagaataattcatgctgttaccaaaggatgctgttctcagactgacggattaaattccaaatttttggactttttttccaaggctattcagtgtgcgagacaagaaaagagctcttcaggtctaaatcatatcttagcagctcttactatcttcctcaagactttggctgtcaactttcgaattcgagtgtgtgaattaggagatgaaattcttcccactttgctttatatttggactcaacataggcttaatgattctttaaaagaagtcattattgaattatttcaactgcaaatttatatccatcatccgaaaggagccaaaacccaagaaaaaggtgcttatgaatcaacaaaatggagaagtattttatacaacttatatgatctgctagtgaatgagataagtcatataggaagtagaggaaagtattcttcaggatttcgtaatattgccgtcaaagaaaatttgattgaattgatggcagatatctgtcaccaggtttttaatgaagataccagatccttggagatttctcaatcttacactactacacaaagagaatctagtgattacagtgtcccttgcaaaaggaagaaaatagaactaggctgggaagtaataaaagatcaccttcagaagtcacagaatgattttgatcttgtgccttggctacagattgcaacccaattaatatcaaagtatcctgcaagtttacctaactgtgagctgtctccattactgatgatactatctcagcttctaccccaacagcgacatggggaacgtacaccatatgtgttacgatgccttacggaagttgcattgtgtcaagacaagaggtcaaacctagaaagctcacaaaagtcagatttattaaaactctggaataaaatttggtgtattacctttcgtggtataagttctgagcaaatacaagctgaaaactttggcttacttggagccataattcagggtagtttagttgaggttgacagagaattctggaagttatttactgggtcagcctgcagaccttcatgtcctgcagtatgctgtttgactttggcactgaccaccagtatagttccaggagcggtaaaaatgggaatagagcaaaatatgtgtgaagtaaatagaagcttttctttaaaggaatcaataatgaaatggctcttattctatcagttagagggtgacttagaaaatagcacagaagtgcctccaattcttcacagtaattttcctcatcttgtactggagaaaattcttgtgagtctcactatgaaaaactgtaaagctgcaatgaattttttccaaagcgtgccagaatgtgaacaccaccaaaaagataaagaagaactttcattctcagaagtagaagaactatttcttcagacaacttttgacaagatggactttttaaccattgtgagagaatgtggtatagaaaagcaccagtccagtattggcttctctgtccaccagaatctcaaggaatcactggatcgctgtcttctgggattatcagaacagcttctgaataattactcatctgagattacaaattcagaaactcttgtccggtgttcacgtcttttggtgggtgtccttggctgctactgttacatgggtgtaatagctgaagaggaagcatataagtcagaattattccagaaagccaactctctaatgcaatgtgcaggagaaagtatcactctgtttaaaaataagacaaatgaggaattcagaattggttccttgagaaatatgatgcagctatgtacacgttgcttgagcaactgtaccaagaagagtccaaataagattgcatctggctttttcctgcgattgttaacatcaaagctaatgaatgacattgcagatatttgtaaaagtttagcatccttcatcaaaaagccatttgaccgtggagaagtagaatcaatggaagatgatactaatggaaatctaatggaggtggaggatcagtcatccatgaatctatttaacgattaccctgatagtagtgttagtgatgcaaacgaacctggagagagccaaagtaccataggtgccattaatcctttagctgaagaatatctgtcaaagcaagatctacttttcttagacatgctcaagttcttgtgtttgtgtgtaactactgctcagaccaatactgtgtcctttagggcagctgatattcggaggaaattgttaatgttaattgattctagcacgctagaacctaccaaatccctccacctgcatatgtatctaatgcttttaaaggagcttcctggagaagagtaccccttgccaatggaagatgttcttgaacttctgaaaccactatccaatgtgtgttctttgtatcgtcgtgaccaagatgtttgtaaaactattttaaaccatgtccttcatgtagtgaaaaacctaggtcaaagcaatatggactctgagaacacaagggatgctcaaggacagtttcttacagtaattggagcattttggcatctaacaaaggagaggaaatatatattctctgtaagaatggccctagtaaattgccttaaaactttgcttgaggctgatccttattcaaaatgggccattcttaatgtaatgggaaaagactttcctgtaaatgaagtatttacacaatttcttgctgacaatcatcaccaagttcgcatgttggctgcagagtcaatcaatagattgttccaggacacgaagggagattcttccaggttactgaaagcacttcctttgaagcttcagcaaacagcttttgaaaatgcatacttgaaagctcaggaaggaatgagagaaatgtcccatagtgctgagaaccctgaaactttggatgaaatttataatagaaaatctgttttactgacgttgatagctgtggttttatcctgtagccctatctgcgaaaaacaggctttgtttgccctgtgtaaatctgtgaaagagaatggattagaacctcaccttgtgaaaaaggttttagagaaagtttctgaaacttttggatatagacgtttagaagactttatggcatctcatttagattatctggttttggaatggctaaatcttcaagatactgaatacaacttatcttcttttccttttattttattaaactacacaaatattgaggatttctatagatcttgttataaggttttgattccacatctggtgattagaagtcattttgatgaggtgaagtccattgctaatcagattcaagaggactggaaaagtcttctaacagactgctttccaaagattcttgtaaatattcttccttattttgcctatgagggtaccagagacagtgggatggcacagcaaagagagactgctaccaaggtctatgatatgcttaaaagtgaaaacttattgggaaaacagattgatcacttattcattagtaatttaccagagattgtggtggagttattgatgacgttacatgagccagcaaattctagtgccagtcagagcactgacctctgtgacttttcaggggatttggatcctgctcctaatccacctcattttccatcgcatgtgattaaagcaacatttgcctatatcagcaattgtcataaaaccaagttaaaaagcattttagaaattctttccaaaagccctgattcctatcagaaaattcttcttgccatatgtgagcaagcagctgaaacaaataatgtttataagaagcacagaattcttaaaatatatcacctgtttgttagtttattactgaaagatataaaaagtggcttaggaggagcttgggcctttgttcttcgagacgttatttatactttgattcactatatcaaccaaaggccttcttgtatcatggatgtgtcattacgtagcttctccctttgttgtgacttattaagtcaggtttgccagacagccgtgacttactgtaaggatgctctagaaaaccatcttcatgttattgttggtacacttataccccttgtgtatgagcaggtggaggttcagaaacaggtattggacttgttgaaatacttagtgatagataacaaggataatgaaaacctctatatcacgattaagcttttagatccttttcctgaccatgttgtttttaaggatttgcgtattactcagcaaaaaatcaaatacagtagaggacccttttcactcttggaggaaattaaccattttctctcagtaagtgtttatgatgcacttccattgacaagacttgaaggactaaaggatcttcgaagacaactggaactacataaagatcagatggtggacattatgagagcttctcaggataatccgcaagatgggattatggtgaaactagttgtcaatttgttgcagttatccaagatggcaataaaccacactggtgaaaaagaagttctagaggctgttggaagctgcttgggagaagtgggtcctatagatttctctaccatagctatacaacatagtaaagatgcatcttataccaaggcccttaagttatttgaagataaagaacttcagtggaccttcataatgctgacctacctgaataacacactggtagaagattgtgtcaaagttcgatcagcagctgttacctgtttgaaaaacattttagccacaaagactggacatagtttctgggagatttataagatgacaacagatccaatgctggcctatctacagccttttagaacatcaagaaaaaagtttttagaagtacccagatttgacaaagaaaacccttttgaaggcctggatgatataaatctgtggattcctctaagtgaaaatcatgacatttggataaagacactgacttgtgcttttttggacagtggaggcacaaaatgtgaaattcttcaattattaaagccaatgtgtgaagtgaaaactgacttttgtcagactgtacttccatacttgattcatgatattttactccaagatacaaatgaatcatggagaaatctgctttctacacatgttcagggatttttcaccagctgtcttcgacacttctcgcaaacgagccgatccacaacccctgcaaacttggattcagagtcagagcactttttccgatgctgtttggataaaaaatcacaaagaacaatgcttgctgttgtggactacatgagaagacaaaagagaccttcttcaggaacaatttttaatgatgctttctggctggatttaaattatctagaagttgccaaggtagctcagtcttgtgctgctcactttacagctttactctatgcagaaatctatgcagataagaaaagtatggatgatcaagagaaaagaagtcttgcatttgaagaaggaagccagagtacaactatttctagcttgagtgaaaaaagtaaagaagaaactggaataagtttacaggatcttctcttagaaatctacagaagtataggggagccagatagtttgtatggctgtggtggagggaagatgttacaacccattactagactacgaacatatgaacacgaagcaatgtggggcaaagccctagtaacatatgacctcgaaacagcaatcccctcatcaacacgccaggcaggaatcattcaggccttgcagaatttgggactctgccatattctttccgtctatttaaaaggattggattatgaaaataaagactggtgtcctgaactagaagaacttcattaccaagcagcatggaggaatatgcagtgggaccattgcacttccgtcagcaaagaagtagaaggaaccagttaccatgaatcattgtacaatgctctacaatctctaagagacagagaattctctacattttatgaaagtctcaaatatgccagagtaaaagaagtggaagagatgtgtaagcgcagccttgagtctgtgtattcgctctatcccacacttagcaggttgcaggccattggagagctggaaagcattggggagcttttctcaagatcagtcacacatagacaactctctgaagtatatattaagtggcagaaacactcccagcttctcaaggacagtgattttagttttcaggagcctatcatggctctacgcacagtcattttggagatcctgatggaaaaggaaatggacaactcacaaagagaatgtattaaggacattctcaccaaacaccttgtagaactctctatactggccagaactttcaagaacactcagctccctgaaagggcaatatttcaaattaaacagtacaattcagttagctgtggagtctctgagtggcagctggaagaagcacaagtattctgggcaaaaaaggagcagagtcttgccctgagtattctcaagcaaatgatcaagaagttggatgccagctgtgcagcgaacaatcccagcctaaaacttacatacacagaatgtctgagggtttgtggcaactggttagcagaaacgtgcttagaaaatcctgcggtcatcatgcagacctatctagaaaaggcagtagaagttgctggaaattatgatggagaaagtagtgatgagctaagaaatggaaaaatgaaggcatttctctcattagcccggttttcagatactcaataccaaagaattgaaaactacatgaaatcatcggaatttgaaaacaagcaagctctcctgaaaagagccaaagaggaagtaggtctccttagggaacataaaattcagacaaacagatacacagtaaaggttcagcgagagctggagttggatgaattagccctgcgtgcactgaaagaggatcgtaaacgcttcttatgtaaagcagttgaaaattatatcaactgcttattaagtggagaagaacatgatatgtgggtattccggctttgttccctctggcttgaaaattctggagtttctgaagtcaatggcatgatgaagagagacggaatgaagattccaacatataaatttttgcctcttatgtaccaattggctgctagaatggggaccaagatgatgggaggcctaggatttcatgaagtcctcaataatctaatctctagaatttcaatggatcacccccatcacactttgtttattatactggccttagcaaatgcaaacagagatgaatttctgactaaaccagaggtagccagaagaagcagaataactaaaaatgtgcctaaacaaagctctcagcttgatgaggatcgaacagaggctgcaaatagaataatatgtactatcagaagtaggagacctcagatggtcagaagtgttgaggcactttgtgatgcttatattatattagcaaacttagatgccactcagtggaagactcagagaaaaggcataaatattccagcagaccagccaattactaaacttaagaatttagaagatgttgttgtccctactatggaaattaaggtggaccacacaggagaatatggaaatctggtgactatacagtcatttaaagcagaatttcgcttagcaggaggtgtaaatttaccaaaaataatagattgtgtaggttccgatggcaaggagaggagacagcttgttaagggccgtgatgacctgagacaagatgctgtcatgcaacaggtcttccagatgtgtaatacattactgcagagaaacacggaaactaggaagaggaaattaactatctgtacttataaggtggttcccctctctcagcgaagtggtgttcttgaatggtgcacaggaactgtccccattggtgaatttcttgttaacaatgaagatggtgctcataaaagatacaggccaaatgatttcagtgcctttcagtgccaaaagaaaatgatggaggtgcaaaaaaagtcttttgaagagaaatatgaagtcttcatggatgtttgccaaaattttcaaccagttttccgttacttctgcatggaaaaattcttggatccagctatttggtttgagaagcgattggcttatacgcgcagtgtagctacttcttctattgttggttacatacttggacttggtgatagacatgtacagaatatcttgataaatgagcagtcagcagaacttgtacatatagatctaggtgttgcttttgaacagggcaaaatccttcctactcctgagacagttccttttagactcaccagagatattgtggatggcatgggcattacgggtgttgaaggtgtcttcagaagatgctgtgagaaaaccatggaagtgatgagaaactctcaggaaactctgttaaccattgtagaggtccttctatatgatccactctttgactggaccatgaatcctttgaaagctttgtatttacagcagaggccggaagatgaaactgagcttcaccctactctgaatgcagatgaccaagaatgcaaacgaaatctcagtgatattgaccagagtttcaacaaagtagctgaacgtgtcttaatgagactacaagagaaactgaaaggagtggaagaaggcactgtgctcagtgttggtggacaagtgaatttgctcatacagcaggccatagaccccaaaaatctcagccgacttttcccaggatggaaagcttgggtgtgatcttcagtatatgaattaccctttcattcagcctttagaaattatattttagcctttatttttaacctgccaacatactttaagtagggattaatatttaagtgaactattgtgggtttttttgaatgttggttttaatacttgatttaatcaccactcaaaaatgttttgatggtcttaaggaacatctctgctttcactctttagaaataatggtcattcgggctgggcgcagcggctcacgcctgtaatcccagcactttgggaggccgaggtgagcggatcacaaggtcaggagttcgagaccagcctggccaagagaccagcctggccagtatggtgaaaccctgtctctactaaaaatacaaaaattagccgagcatggtggcgggcacctgtagtcccagctactcgagaggctgaggcaggagaatctcttgaacctgggaggtgaaggttgctgtgggccaaaatcatgccattgcactccagcctgggtgacaagagcgaaactccatctcaaaaa

SEQ ID NO: 334 - DNA, 8478 bp, Homo sapiens
gccgcagccgcagctactgtgacttctccgattgtgtgagctttgttggagcctgcgtacgtggatttatcgctgccacggtctgcgtagttccagaggtttaaccataggatagagaaaccaggaatgtaatgaggaaatcaaaatggatccaagtatgggtgtgaattctgttaccatttctgttgagggtatgacttgcaattcctgtgtttggaccattgagcagcagattggaaaagtgaatggtgtgcatcacattaaggtatcactggaagaaaaaaatgcaactattatttatgaccctaaactacagactccaaagaccctacaggaagctattgatgacatgggctttgatgctgttatccataatcctgaccctctccctgttttaactgacaccttgtttctgactgttacggcgtcactgactttgccatgggaccatatccaaagcacattgctgaagaccaagggtgtgacagacattaaaatttaccctcagaaaagaactgtagcagtgacaataatcccttctatagtgaatgccaatcagataaaagagctggttccagaactcagtttagatactgggacactggagaaaaagtcaggagcttgtgaagatcatagtatggctcaagctggtgaagtcgtgctgaagatgaaagtggaagggatgacctgccattcatgtactagcactattgaaggaaaaattgggaaactgcaaggtgttcagcgaattaaagtctccctggacaatcaagaagctactattgtttatcaacctcatcttatctcagtagaggaaatgaaaaagcagattgaagctatgggctttccagcatttgtcaaaaagcagcccaagtacctcaaattgggagctattgatgtagaacgtctaaagaacacaccagttaaatcctcagaagggtcacagcaaaggagtccatcatataccaatgattcaacagccactttcatcattgatggcatgcattgtaaatcatgtgtgtcaaatattgaaagtactttatctgcactccaatatgtaagcagcatagtagtttctttagagaataggtctgccattgtgaagtataatgcaagctcagtcactccagaatccctgagaaaagcaatagtggctgtatcaccggggctatatagagttagtatcacaagtgaagttgagagtacctcaaactctccctccagctcatctcttcagaagattcctttgaatgtagttagccagcctctgacacaagaaactgtgataaacattgatggcatgacttgtaattcctgtgtgcagtctattgagggtgtcatatcaaaaaagccaggtgtaaaatccatacgagtctcccttgcaaatagcaatgggactgttgagtatgatcctctactaacctctccagaaacgttgagaggagcaatagaagacatgggatttgatgctaccttgtcagacacgaatgagccgttggtagtaatagctcagccttcatcggaaatgccgcttctgacttcaactaatgaattttatactaaagggatgacaccagttcaagacaaggaggaaggaaagaattcatctaagtgttacatacaggtcactggcatgacttgcgcttcctgtgtagcaaacattgaacggaatttaaggcgggaagaaggaatatattctatacttgtggccctgatggctggcaaggcagaagtaaggtataatcctgctgttatacaacccccaatgatagcagagttcatccgagaacttggatttggagccactgtgatagaaaatgctgatgaaggagatggtgttttggaacttgttgtgaggggaatgacgtgtgcctcctgcgtacataaaatagagtctagtctcacaaaacacagagggatcctatactgctccgtggccctggcaaccaacaaagcacatattaaatatgacccagaaattattggtcctagagatattatccatacaattgaaagcttaggttttgaagcttctttggtcaagaaggatcggtcagcaagtcacttagatcataaacgagaaataagacaatggagacggtcttttcttgtgagtctgtttttctgtattcctgtaatggggctgatgacatatatgatggttatggaccaccactttgcaactcttcaccataatcaaaacatgagtaaagaagaaatgatcaaccttcattcttctatgttcctggagcgccagattcttccaggattgtctgttatgaatttgctgtcctttttattgtgtgtacctgtacagtttttcggaggctggtacttctacattcaggcttataaagcactgaagcataagacagcaaatatggacgtactgattgtgctggcaaccaccattgcatttgcctactctttgattattcttctagttgcaatgtatgagagagccaaagtgaaccctattactttctttgacacaccccctatgctgtttgtgtttattgcactaggccgatggctggaacatatagcaaagggcaaaacatcagaggctcttgcaaagttaatttcactacaagctacagaagcaactattgtaactcttgattctgataatatcctcctcagtgaagaacaagtggatgtggaacttgtacaacgtggagatatcattaaagtagttccaggaggcaaatttccagtggatggtcgtgttattgaaggacattctatggtagatgagtccctcatcacaggggaggcaatgcctgtggctaagaaacctggcagcacagtgattgctggttccattaaccagaacgggtcactgcttatctgcgcaacacatgttggagcagacacaaccctttctcaaattgtcaaacttgtggaagaggcacaaacatcaaaggctcctatccagcagtttgcagacaaactcagtggctattttgttccttttattgtttttgtttccattgccaccctcttggtatggattgtaattggatttctgaattttgaaattgtggaaacctactttcctggctacaatagaagtatctcccgaacagaaacgataatacgatttgctttccaagcctctatcacagttctgtgtattgcatgtccctgttcactgggactggccactccaactgctgtgatggtgggtacaggagtaggtgctcaaaatggcatactaataaaaggtggagagccattggagatggctcataaggtaaaggtagtggtatttgataagactggaaccattactcacggaaccccagtggtgaatcaagtaaaggttctaactgaaagtaacagaatatcacaccataaaatcttggccattgtgggaactgctgaaagtaacagtgaacaccctctaggaacagccataaccaaatattgcaaacaggagctggacactgaaaccttgggtacctgcatagatttccaggttgtgccaggctgtggtattagctgtaaagtcaccaatattgaaggcttgctacataagaataactggaatatagaggacaataatattaaaaatgcatccctggttcaaattgatgccagtaatgaacagtcatcaacttcgtcttccatgattattgatgcccagatctcaaatgctcttaatgctcagcagcataaagtcctcattggtaaccgggagtggatgattagaaatggtcttgtcattaataacgatgtaaatgatttcatgactgaacatgagagaaaaggtcggactgctgtattagtagcagttgatgatgagctgtgtggcttgatagccattgcagacacagtgaagcctgaagcagaactggctatccatattctgaaatctatgggcttagaagtagttctgatgactggagacaacagtaaaacagctagatctattgcttctcaggttggcattactaaggtgtttgctgaagttctaccttctcacaaggttgctaaagtgaagcaacttcaagaggaggggaaacgggtagcaatggtgggagatggaatcaatgactccccagctctggcaatggctaatgtgggaattgctattggcacaggcacagatgtagccattgaagcagctgatgtggttttgataaggaatgatcttctggatgtagtggcaagtattgacttatcaagaaagacagtcaagaggattcggataaattttgtctttgctctaatttataatctggttggaattcccatagctgctggagtttttatgcccattggtttggttttgcagccctggatgggatctgcagcaatggctgcttcatctgtttctgtagtactttcttctctcttccttaaactttacaggaaaccaacttacgagagttatgaactgcctgcccggagccagataggacagaagagtccttcagaaatcagcgttcatgttggaatagatgatacctcaaggaattctcctaaactgggtttgctggaccggattgttaattatagcagagcctctataaactcactactgtctgataaacgctccctaaacagtgttgttaccagtgaacctgacaagcactcactcctggtgggagacttcagggaagatgatgacactgcattataaaaggccatggagagtgctgccagtttaacttgtcatgcactgacacagcattcatgatgttaccttcacttttcaaaatattgtagaaggatttttctcatgctcttatattagggattctatttgagttgcgtttatctgttggcaaaaatatctttttcaaggcatcagctctgaacctagctttatttaaactgaatttccagtatatttttgttttttcactaacaacagataaggtagagcagtgaggtttacaacaagccctacaattagagattgctgaactgctgctaaagtgattttttttttatttgaccaaaaaaaaaaaggcccaagaagaagaaaatgaaaaatttgaagatttgagagcatgaagatattcatgcttttgaactcaaaatattgaagatactctcaagcctgtatccctgcccactggggagcaatgactttcaaagcactgtgtataaaacatctagttttagaagggaaacagttgaaactgtttaaaaatagatgtgccttatttattgcaggctttctttcccccattctccctgcatccttgtccttgcaggtgcttttttagatgctccaatatgtcttcttttgttattttctttcgagctaaccagtttagggtggtttttcattgattaaaaataactgacaactgttctaatattttgctcctttttaaattttgtagctcaaaagaccttaaaggtctgtagggttccctgcctcccatctttccactgttgtaaaaagtatatcaaattattccttcaagtttcctagctctgtgctcagtttcagttcactcctgccaagttggactctaagttattcttcatgtagtctgctgatctcagtctggaaacttaacattatgagccttttctgctcaaaaaattttcaaagattaaaactattatacatatacaggtcatataaaattacctggattcactaaatttgtttgttgttgttgttgttgttgttgttgttgttgagacagagtcttgttttgcagcccaggctggagtgcagtggcaccatcttggctcactgcaacctctgcctaccggattcaaggaattctccctgcctcagcctcctgagtagctaggattacaggtgcctgccaccacacccggctaattttcatatttttcagtagagacggggtttcgccatgttggctagcctggtcttaaactcctaacctcaggtgatccacccgccttggcctcccaaagtgctgggattacaggtgtgagcctccatgcccagcctaaatttgtattttttgaattgagtataacactttgctagtatatataatttaatagattttatttatctttttagtgtttcagataacctctcaaaaagactttaaaataatgctattacacaaaagctgcatttaccaaaaaatacaagtaaaatcataatacagaaactaaaatttccctaggttatgacgctttttagctaaatatatactcttctctagtttaaaacatttgaacttgcctagttagtgtggttggcaaatttaggagcttgttcccattgccaaatggatttagaaattcccttgtgagtgcctggtagctaatacactggtcagagatctggtacttgtaagactatttaaatttctttgttagttgcaagatggatttcatatgcagaatatgtaaatgaagaggactcataagtaaattcctaacattttgttcccattaccagaagcaaagctgctgctaacccaacatctggcacataggatttgtactcggtaaatgttagttcttttctccccttgaggtcagtaataaatacaaaaaaaaaatcatttttctagagcagagtcttaaaatcaggtgggggtaggggatggacttcttcctttcctaccccttttctcttttatcctttcatatatacacatgcaaagtttacaaccttattccatgctgtctttcagatttagaaaagatctaatttctgtctcagctgtcttaaagagagatccaagcttttgatgaaggtgctattaatctagaaaggcaaacccatttcactgaaatatcaatgggtttgcatatctaggccctttttttagaccaatgcctatgccatcctccatgctttcagtttgagttttattatttattattttaattccagtggcccatcttataatacaacttgtttcttctagaagacagagctgatagggtaaatgttgaaaaaagaagcatgcctccttctccctcccacccacctcaagcagttgaacacagccagttattcttccattattatgtgtaccttggagtcatcctcttggtcttgtattcatattgtgggacagtgggaatagcagcttgtagtattgaaataatcaaagagataatttcagctcttacaacaagaacagaaaacatgctaattagaaaaagtcctgctttaagtaatatgtagccacatttgaatcctctaccacaagtctttttggcaatcttgaactttcattagcttcaaagagaagctgtctttacaggagaaagaggtgattatggagggaatcaaaattactgctttcagctagtagctagcttttagtcaggagttagtaatgagaaattttataaatgtgtatttctgtgtattcacatacatatatatatacacacatatatatgtacatacacatacatacatattaccatactgaagggaaatggatttatatttgaatttgatatttgaatatttgaagttctctatttatatttcatttatcactcttctgtattcactcagcaaccatgcccttagtctgaagataacaaggatactttaatatccagtgccggttcagactcacctatgtggcaccttaaacttaaatatccaaagagcccttttgaatttcaaagattaaaacacagctagagtagtagtattgtagtctcaagatgtatggtgtgtcatttgtgaaaatagaaacgttatttttcctagtttagtatcaacattttagaatgtcaaatttgatgccttgtgaacaagtaattttatattgtgctttaattttttaaaaagtattctttattcatatgtatagaatgcttaaaatagcactgtagacaagatgtttccaaaactttaagtgcgcatatcttttctgtatacaggcttaaaatcaaaaatgtatgttaagagaattttttctattacttatggatcatgctttaaaatgatttttcttgatatttattttactccattttgtttttttctctgggtgaggcatctggttactggttattttaaaaagaataaagacattcctggaatcactccttttgggtttttgtttgttttgtttcttttctacatttttaagtattattttacaaaatagaaaaaatatagattcatgccaaattattacctatttttacactaactttctgcagtccctccatctggtatgagtaaccagatagagcacaagcatgagttcttgttcttcagttaaaagagcttctttcacagtgttgataacaaatgccttttgtagccaaaaccaggcgtctcaaccttacgtttttagttaaagaaatgtttagctaaacgctgttgaacattgattgtttggtaccgaaaacagcagtggacgatgttgtgcaatatccatctactgtagttaagatattcagtagtttgtttttcataagcatgtaattgatcatatttctgccaaggatgtgccttcaactttataattatagtgttgtaaaata

SEQ ID NO: 335 - DNA, 2016 bp, Homo sapiens
gccagctggagcgttttcggggctgtaaagggagaatggcgcatgcgcatattcagggcggaaggcgcgctaagagcagatttgtggtctgcattatgtctggagccagaagtaagcttgctcttttcctctgcggctgttacgtggttgccctgggagcccacaccggggaggagagcgtggctgaccatcacgaggctgaatattatgtggctgccgtgtatgagcatccatccatcctgagtctgaaccctctggctctcatcagccgccaagaggccttggagctcatgaaccagaaccttgacatctatgaacagcaagtgatgactgcagcccaaaaggatgtacagattatagtgtttccagaagatggcattcatggattcaactttacaagaacatccatttatccatttttggacttcatgccgtctccccaggtggtcaggtggaacccatgcctggagcctcaccgcttcaatgacacagaggtgctccagcgcctgagttgtatggccatcaggggagatatgttcttggtggccaatcttgggacaaaggagccttgtcatagcagtgacccaaggtgcccaaaagatgggagataccagttcaacacaaatgtcgtgttcagcaataatggaacccttgttgaccgctaccgtaaacacaacctctactttgaggcagcattcgatgttcctcttaaagtggatctcatcacctttgataccccctttgctggcaggtttggcatcttcacatgctttgatatattgttctttgaccctgccatcagagtcctcagagactacaaggtgaagcatgttgtgtacccaactgcctggatgaaccagctcccactcttggcagcaattgagattcagaaagcttttgctgttgcctttggcatcaacgttctggcagctaatgtccaccacccagttctggggatgacaggaagtggcatacacacccctctggagtccttttggtaccatgacatggaaaatcccaaaagtcaccttataattgcccaggtggccaaaaatccagtgggtctcattggtgcagagaatgcaacaggtgaaacggacccatcccatagtaagtttttaaaaattttgtcaggcgatccgtactgtgagaaggatgctcaggaagtccactgtgatgaggccaccaagtggaacgtgaatgctcctcccacatttcactctgagatgatgtatgacaatttcaccctggtccctgtctggggaaaggaaggctatctccacgtctgttccaatggcctctgctgttatttactttacgagaggcccaccttatccaaagagctgtatgccctgggggtctttgatgggcttcacacagtacatggcacttactacatccaagtgtgtgccctggtcaggtgtgggggtcttggcttcgacacctgcggacaggaaatcacagaggccacggggatatttgagtttcacctgtggggcaacttcagtacttcctatatctttcctttgtttctgacctcagggatgaccctagaagtccctgaccagcttggctgggagaatgaccactatttcctgaggaaaagtaggctgtcctctgggctggtgacggcggctctctatgggcgcttgtatgagagggactaggaaaagtgtgtggtctgtggggcggactctggccatcatgttgacagccttgcacttccacaggctacaagccctgggaccatctttctgccttaagggcaggagcccacttctgtggcaccagattccaccctgggaactgtggaaaaagtaggagaggcagattccctcagtgtcttcctcttaaacctcaatcatcgagacattagggggtattttctgttcacatttatctttttcaagccacatcttcctctaacaaatctctcagtatgcgattggtctcaagctaaaacaaaaataaatgtcagtttatattttacacatccaaaaaaaaaaaaaaaaaaaa

SEQ ID NO: 336 - DNA, 2591 bp, Homo sapiens
ctcagactgtccttcctctctggactgtaagaatatgtctccagggccagtgtctgctgcgatcgagtcccaccttccaagtcctggcatctcaatgcatctgggaagctacctgcattaagtcaggactgagcacacaggtgaactccagaaagaagaagctatggccgcagtgattctggagagcatctttctgaagcgatcccaacagaaaaagaaaacatcacctctaaacttcaagaagcgcctgtttctcttgaccgtgcacaaactctcctactatgagtatgactttgaacgtgggagaagaggcagtaagaagggttcaatagatgttgagaagatcacttgtgttgaaacagtggttcctgaaaaaaatcctcctccagaaagacagattccgagaagaggtgaagagtccagtgaaatggagcaaatttcaatcattgaaaggttcccttatcccttccaggttgtatatgatgaagggcctctctacgtcttctccccaactgaagaactaaggaagcggtggattcaccagctcaaaaacgtaatccggtacaacagtgatctggttcagaaatatcacccttgcttctggatcgatgggcagtatctctgctgctctcagacagccaaaaatgctatgggctgccaaattttggagaacaggaatggaagcttaaaacctgggagttctcaccggaagacaaaaaagcctcttcccccaacgcctgaggaggaccagatcttgaaaaagccactaccgcctgagccagcagcagcaccagtctccacaagtgagctgaaaaaggttgtggccctttatgattacatgccaatgaatgcaaatgatctacagctgcggaagggtgatgaatattttatcttggaggaaagcaacttaccatggtggagagcacgagataaaaatgggcaggaaggctacattcctagtaactatgtcactgaagcagaagactccatagaaatgtatgagtggtattccaaacacatgactcggagtcaggctgagcaactgctaaagcaagaggggaaagaaggaggtttcattgtcagagactccagcaaagctggcaaatatacagtgtctgtgtttgctaaatccacaggggaccctcaaggggtgatacgtcattatgttgtgtgttccacacctcagagccagtattacctggctgagaagcaccttttcagcaccatccctgagctcattaactaccatcagcacaactctgcaggactcatatccaggctcaaatatccagtgtctcaacaaaacaagaatgcaccttccactgcaggcctgggatacggatcatgggaaattgatccaaaggacctgaccttcttgaaggagctggggactggacaatttggggtagtgaagtatgggaaatggagaggccagtacgacgtggccatcaagatgatcaaagaaggctccatgtctgaagatgaattcattgaagaagccaaagtcatgatgaatctttcccatgagaagctggtgcagttgtatggcgtctgcaccaagcagcgccccatcttcatcatcactgagtacatggccaatggctgcctcctgaactacctgagggagatgcgccaccgcttccagactcagcagctgctagagatgtgcaaggatgtctgtgaagccatggaatacctggagtcaaagcagttccttcaccgagacctggcagctcgaaactgtttggtaaacgatcaaggagttgttaaagtatctgatttcggcctgtccaggtatgtcctggatgatgaatacacaagctcagtaggctccaaatttccagtccggtggtccccaccggaagtcctgatgtatagcaagttcagcagcaaatctgacatttgggcttttggggttttgatgtgggaaatttactccctggggaagatgccatatgagagatttactaacagtgagactgctgaacacattgcccaaggcctacgtctctacaggcctcatctggcttcagagaaggtatataccatcatgtacagttgttggcatgagaaagcagatgagcgtcccactttcaaaattcttctgagcaatattctagatgtcatggatgaagaatcctgagctcgccaataagcttcttggttctacttctcttctccacaagccccaatttcactttctcagaggaaatcccaagcttaggagccctggagcctttgtgctcccactcaatacaaaaaggcccctctctacatctggggatgcacctcttctttgattccctgggatagtggcttctgagcaaaggccaaaaaattattgtgcctgaaatttcccgagagaattaagacagactgaatttgcgatgaaaatattttttaggagggaggatgtaaatagccgcacaaaggggtccaacagctctttgagtaggcatttggtagagcttgggggtgtgtgtgtgggggtggaccgaatttggcaagaatgaaatggtgtcataaagatgggaggggagggtgttttgataaaataaattctagaaagcttaaaaaaaaaaaaaaaaaaa

SEQ ID NO: 337 - DNA, 1826 bp, Homo sapiens
agtctgcactggagctgcctggtgaccagaagtttggagtccgctgacgtcgccgcccagatggcctccaggctgaccctgctgaccctcctgctgctgctgctggctggggatagagcctcctcaaatccaaatgctaccagctccagctcccaggatccagagagtttgcaagacagaggcgaagggaaggtcgcaacaacagttatctccaagatgctattcgttgaacccatcctggaggtttccagcttgccgacaaccaactcaacaaccaattcagccaccaaaataacagctaataccactgatgaacccaccacacaacccaccacagagcccaccacccaacccaccatccaacccacccaaccaactacccagctcccaacagattctcctacccagcccactactgggtccttctgcccaggacctgttactctctgctctgacttggagagtcattcaacagaggccgtgttgggggatgctttggtagatttctccctgaagctctaccacgccttctcagcaatgaagaaggtggagaccaacatggccttttccccattcagcatcgccagcctccttacccaggtcctgctcggggctgggcagaacaccaaaacaaacctggagagcatcctctcttaccccaaggacttcacctgtgtccaccaggccctgaagggcttcacgaccaaaggtgtcacctcagtctctcagatcttccacagcccagacctggccataagggacacctttgtgaatgcctctcggaccctgtacagcagcagccccagagtcctaagcaacaacagtgacgccaacttggagctcatcaacacctgggtggccaagaacaccaacaacaagatcagccggctgctagacagtctgccctccgatacccgccttgtcctcctcaatgctatctacctgagtgccaagtggaagacaacatttgatcccaagaaaaccagaatggaaccctttcacttcaaaaactcagttataaaagtgcccatgatgaatagcaagaagtaccctgtggcccatttcattgaccaaactttgaaagccaaggtggggcagctgcagctctcccacaatctgagtttggtgatcctggtaccccagaacctgaaacatcgtcttgaagacatggaacaggctctcagcccttctgttttcaaggccatcatggagaaactggagatgtccaagttccagcccactctcctaacactaccccgcatcaaagtgacgaccagccaggatatgctctcaatcatggagaaattggaattcttcgatttttcttatgaccttaacctgtgtgggctgacagaggacccagatcttcaggtttctgcgatgcagcaccagacagtgctggaactgacagagactggggtggaggcggctgcagcctccgccatctctgtggcccgcaccctgctggtctttgaagtgcagcagcccttcctcttcgtgctctgggaccagcagcacaagttccctgtcttcatggggcgagtatatgaccccagggcctgagacctgcaggatcaggttagggcgagcgctacctctccagcctcagctctcagttgcagccctgctgctgcctgcctggacttgcccctgccacctcctgcctcaggtgtccgctatccaccaaaagggctcctgagggtctgggcaagggacctgcttctattagcccttctccatggccctgccatgctctccaaaccactttttgcagctttctctagttcaagttcaccagactctataaataaaacctgacagaccat

SEQ ID NO: 338 - DNA, 2609 bp, Homo sapiens
ggctctctacctctcgccgcccctagggaggacaccatgggcccactgatggttcttttttgcctgctgttcctgtacccaggtctggcagactcggctccctcctgccctcagaacgtgaatatctcgggtggcaccttcaccctcagccatggctgggctcctgggagccttctcacctactcctgcccccagggcctgtacccatccccagcatcacggctgtgcaagagcagcggacagtggcagaccccaggagccacccggtctctgtctaaggcggtctgcaaacctgtgcgctgtccagcccctgtctcctttgagaatggcatttataccccacggctggggtcctatcccgtgggtggcaatgtgagcttcgagtgtgaggatggcttcatattgcggggctcgcctgtgcgtcagtgtcgccccaacggcatgtgggatggagaaacagctgtgtgtgataatggggctggccactgccccaacccaggcatttcactgggcgcagtgcggacaggcttccgctttggtcatggggacaaggtccgctatcgctgctcctcgaatcttgtgctcacggggtcttcggagcgggagtgccagggcaacggggtctggagtggaacggagcccatctgccgccaaccctactcttatgacttccctgaggacgtggcccctgccctgggcacttccttctcccacatgcttggggccaccaatcccacccagaagacaaaggaaagcctgggccgtaaaatccaaatccagcgctctggtcatctgaacctctacctgctcctggactgttcgcagagtgtgtcggaaaatgactttctcatcttcaaggagagcgcctccctcatggtggacaggatcttcagctttgagatcaatgtgagcgttgccattatcacctttgcctcagagcccaaagtcctcatgtctgtcctgaacgacaactcccgggatatgactgaggtgatcagcagcctggaaaatgccaactataaagatcatgaaaatggaactgggactaacacctatgcagccttaaacagtgtctatctcatgatgaacaaccaaatgcgactcctcggcatggaaacgatggcctggcaggaaatccgacatgccatcatccttctgacagatggaaagtccaatatgggtggctctcccaagacagctgttgaccatatcagagagatcctgaacatcaaccagaagaggaatgactatctggacatctatgccatcggggtgggcaagctggatgtggactggagagaactgaatgagctagggtccaagaaggatggtgagaggcatgccttcattctgcaggacacaaaggctctgcaccaggtctttgaacatatgctggatgtctccaagctcacagacaccatctgcggggtggggaacatgtcagcaaacgcctctgaccaggagaggacaccctggcatgtcactattaagcccaagagccaagagacctgccggggggccctcatctccgaccaatgggtcctgacagcagctcattgcttccgcgatggcaacgaccactccctgtggagggtcaatgtgggagaccccaaatcccagtggggcaaagaattccttattgagaaggcggtgatctccccagggtttgatgtctttgccaaaaagaaccagggaatcctggagttctatggtgatgacatagctctgctgaagctggcccagaaagtaaagatgtccacccatgccaggcccatctgccttccctgcacgatggaggccaatctggctctgcggagacctcaaggcagcacctgtagggaccatgagaatgaactgctgaacaaacagagtgttcctgctcattttgtcgccttgaatgggagcaaactgaacattaaccttaagatgggagtggagtggacaagctgtgccgaggttgtctcccaagaaaaaaccatgttccccaacttgacagatgtcagggaggtggtgacagaccagttcctatgcagtgggacccaggaggatgagagtccctgcaagggagaatctgggggagcagttttccttgagcggagattcaggttttttcaggtgggtctggtgagctggggtctttacaacccctgccttggctctgctgacaaaaactcccgcaaaagggcccctcgtagcaaggtcccgccgccacgagactttcacatcaatctcttccgcatgcagccctggctgaggcagcacctgggggatgtcctgaattttttacccctctagccatggccactgagccctctgctgccctgccagaatctgccgcccctccatcttctacctctgaatggccacccttagaccctgtgatccatcctctctcctagctgagtaaatccgggtctctaggatgccagaggcagcgcacacaagctgggaaatcctcagggctcctaccagcaggactgcctcgctgccccacctcccgctccttggcctgtccccagattccttccctggttgacttgactcatgcttgtttcactttcacatggaatttcccagttatgaaattaataaaaatcaatggtttccac

SEQ ID NO: 339 - DNA, 2466 bp, Homo sapiens
atgccgaccgtcattagcgcatctgtggctccaaggacagcggctgagccccggtccccagggccagttcctcacccggcccagagcaaggccactgaggctgggggtggaaacccaagtggcatctattcagccatcatcagccgcaattttcctattatcggagtgaaagagaagacattcgagcaacttcacaagaaatgtctagaaaagaaagttctttatgtggaccctgagttcccaccggatgagacctctctcttttatagccagaagttccccatccagttcgtctggaagagacctccggaaatttgcgagaatccccgatttatcattgatggagccaacagaactgacatctgtcaaggagagctaggggactgctggtttctcgcagccattgcctgcctgaccctgaaccagcaccttcttttccgagtcataccccatgatcaaagtttcatcgaaaactacgcagggatcttccacttccagttctggcgctatggagagtgggtggacgtggttatagatgactgcctgccaacgtacaacaatcaactggttttcaccaagtccaaccaccgcaatgagttctggagtgctctgctggagaaggcttatgctaagctccatggttcctacgaagctctgaaaggtgggaacaccacagaggccatggaggacttcacaggaggggtggcagagttttttgagatcagggatgctcctagtgacatgtacaagatcatgaagaaagccatcgagagaggctccctcatgggctgctccattgatgatggcacgaacatgacctatggaacctctccttctggtctgaacatgggggagttgattgcacggatggtaaggaatatggataactcactgctccaggactcagacctcgaccccagaggctcagatgaaagaccgacccggacaatcattccggttcagtatgagacaagaatggcctgcgggctggtcagaggtcacgcctactctgtcacggggctggatgaggtcccgttcaaaggtgagaaagtgaagctggtgcggctgcggaatccgtggggccaggtggagtggaacggttcttggagtgatagatggaaggactggagctttgtggacaaagatgagaaggcccgtctgcagcaccaggtcactgaggatggagagttctggatgtcctatgaggatttcatctaccatttcacaaagttggagatctgcaacctcacggccgatgctctgcagtctgacaagcttcagacctggacagtgtctgtgaacgagggccgctgggtacggggttgctctgccggaggctgccgcaacttcccagatactttctggaccaaccctcagtaccgtctgaagctcctggaggaggacgatgaccctgatgactcggaggtgatttgcagcttcctggtggccctgatgcagaagaaccggcggaaggaccggaagctaggggccagtctcttcaccattggcttcgccatctacgaggttcccaaagagatgcacgggaacaagcagcacctgcagaaggacttcttcctgtacaacgcctccaaggccaggagcaaaacctacatcaacatgcgggaggtgtcccagcgcttccgcctgcctcccagcgagtacgtcatcgtgccctccacctacgagccccaccaggagggggaattcatcctccgggtcttctctgaaaagaggaacctctctgaggaagttgaaaataccatctccgtggatcggccagtgaaaaagaaaaaaaccaagcccatcatcttcgtttcggacagagcaaacagcaacaaggagctgggtgtggaccaggagtcagaggagggcaaaggcaaaacaagccctgataagcaaaagcagtccccacagccacagcctggcagctctgatcaggaaagtgaggaacagcaacaattccggaacattttcaagcagatagcaggagatgacatggagatctgtgcagatgagctcaagaaggtccttaacacagtcgtgaacaaacacaaggacctgaagacacacgggttcacactggagtcctgccgtagcatgattgcgctcatggatacagatggctctggaaagctcaacctgcaggagttccaccacctctggaacaagattaaggcctggcagaaaattttcaaacactatgacacagaccagtccggcaccatcaacagctacgagatgcgaaatgcagtcaacgacgcaggattccacctcaacaaccagctctatgacatcattaccatgcggtacgcagacaaacacatgaacatcgactttgacagtttcatctgctgcttcgttaggctggagggcatgttcagagcttttcatgcatttgacaaggatggagatggtatcatcaagctcaacgttctggagtggctgcagctcaccatgtatgcctga

SEQ ID NO: 340 - DNA, 5921 bp, Homo sapiens
agcagacgggagtttctcctcggggtcggagcaggaggcacgcggagtgtgaggccacgcatgagcggacgctaaccccctccccagccacaaagagtctacatgtctagggtctagacatgttcagctttgtggacctccggctcctgctcctcttagcggccaccgccctcctgacgcacggccaagaggaaggccaagtcgagggccaagacgaagacatcccaccaatcacctgcgtacagaacggcctcaggtaccatgaccgagacgtgtggaaacccgagccctgccggatctgcgtctgcgacaacggcaaggtgttgtgcgatgacgtgatctgtgacgagaccaagaactgccccggcgccgaagtccccgagggcgagtgctgtcccgtctgccccgacggctcagagtcacccaccgaccaagaaaccaccggcgtcgagggacccaagggagacactggcccccgaggcccaaggggacccgcaggcccccctggccgagatggcatccctggacagcctggacttcccggaccccccggaccccccggacctcccggaccccctggcctcggaggaaactttgctccccagctgtcttatggctatgatgagaaatcaaccggaggaatttccgtgcctggccccatgggtccctctggtcctcgtggtctccctggcccccctggtgcacctggtccccaaggcttccaaggtccccctggtgagcctggcgagcctggagcttcaggtcccatgggtccccgaggtcccccaggtccccctggaaagaatggagatgatggggaagctggaaaacctggtcgtcctggtgagcgtgggcctcctgggcctcagggtgctcgaggattgcccggaacagctggcctccctggaatgaagggacacagaggtttcagtggtttggatggtgccaagggagatgctggtcctgctggtcctaagggtgagcctggcagccctggtgaaaatggagctcctggtcagatgggcccccgtggcctgcctggtgagagaggtcgccctggagcccctggccctgctggtgctcgtggaaatgatggtgctactggtgctgccgggccccctggtcccaccggccccgctggtcctcctggcttccctggtgctgttggtgctaagggtgaagctggtccccaagggccccgaggctctgaaggtccccagggtgtgcgtggtgagcctggcccccctggccctgctggtgctgctggccctgctggaaaccctggtgctgatggacagcctggtgctaaaggtgccaatggtgctcctggtattgctggtgctcctggcttccctggtgcccgaggcccctctggaccccagggccccggcggccctcctggtcccaagggtaacagcggtgaacctggtgctcctggcagcaaaggagacactggtgctaagggagagcctggccctgttggtgttcaaggaccccctggccctgctggagaggaaggaaagcgaggagctcgaggtgaacccggacccactggcctgcccggaccccctggcgagcgtggtggacctggtagccgtggtttccctggcgcagatggtgttgctggtcccaagggtcccgctggtgaacgtggttctcctggccccgctggccccaaaggatctcctggtgaagctggtcgtcccggtgaagctggtctgcctggtgccaagggtctgactggaagccctggcagccctggtcctgatggcaaaactggcccccctggtcccgccggtcaagatggtcgccccggacccccaggcccacctggtgcccgtggtcaggctggtgtgatgggattccctggacctaaaggtgctgctggagagcccggcaaggctggagagcgaggtgttcccggaccccctggcgctgtcggtcctgctggcaaagatggagaggctggagctcagggaccccctggccctgctggtcccgctggcgagagaggtgaacaaggccctgctggctcccccggattccagggtctccctggtcctgctggtcctccaggtgaagcaggcaaacctggtgaacagggtgttcctggagaccttggcgcccctggcccctctggagcaagaggcgagagaggtttccctggcgagcgtggtgtgcaaggtccccctggtcctgctggaccccgaggggccaacggtgctcccggcaacgatggtgctaagggtgatgctggtgcccctggagctcccggtagccagggcgcccctggccttcagggaatgcctggtgaacgtggtgcagctggtcttccagggcctaagggtgacagaggtgatgctggtcccaaaggtgctgatggctctcctggcaaagatggcgtccgtggtctgaccggccccattggtcctcctggccctgctggtgcccctggtgacaagggtgaaagtggtcccagcggccctgctggtcccactggagctcgtggtgcccccggagaccgtggtgagcctggtccccccggccctgctggctttgctggcccccctggtgctgacggccaacctggtgctaaaggcgaacctggtgatgctggtgccaaaggcgatgctggtccccctgggcctgccggacccgctggaccccctggccccattggtaatgttggtgctcctggagccaaaggtgctcgcggcagcgctggtccccctggtgctactggtttccctggtgctgctggccgagtcggtcctcctggcccctctggaaatgctggaccccctggccctcctggtcctgctggcaaagaaggcggcaaaggtccccgtggtgagactggccctgctggacgtcctggtgaagttggtccccctggtccccctggccctgctggcgagaaaggatcccctggtgctgatggtcctgctggtgctcctggtactcccgggcctcaaggtattgctggacagcgtggtgtggtcggcctgcctggtcagagaggagagagaggcttccctggtcttcctggcccctctggtgaacctggcaaacaaggtccctctggagcaagtggtgaacgtggtccccccggtcccatgggcccccctggattggctggaccccctggtgaatctggacgtgagggggctcctgctgccgaaggttcccctggacgagacggttctcctggcgccaagggtgaccgtggtgagaccggccccgctggaccccctggtgctcctggtgctcctggtgcccctggccccgttggccctgctggcaagagtggtgatcgtggtgagactggtcctgctggtcccgccggtcccgtcggccccgtcggcgcccgtggccccgccggaccccaaggcccccgtggtgacaagggtgagacaggcgaacagggcgacagaggcataaagggtcaccgtggcttctctggcctccagggtccccctggccctcctggctctcctggtgaacaaggtccctctggagcctctggtcctgctggtccccgaggtccccctggctctgctggtgctcctggcaaagatggactcaacggtctccctggccccattgggccccctggtcctcgcggtcgcactggtgatgctggtcctgttggtccccccggccctcctggacctcctggtccccctggtcctcccagcgctggtttcgacttcagcttcctgccccagccacctcaagagaaggctcacgatggtggccgctactaccgggctgatgatgccaatgtggttcgtgaccgtgacctcgaggtggacaccaccctcaagagcctgagccagcagatcgagaacatccggagcccagagggaagccgcaagaaccccgcccgcacctgccgtgacctcaagatgtgccactctgactggaagagtggagagtactggattgaccccaaccaaggctgcaacctggatgccatcaaagtcttctgcaacatggagactggtgagacctgcgtgtaccccactcagcccagtgtggcccagaagaactggtacatcagcaagaaccccaaggacaagaggcatgtctggttcggcgagagcatgaccgatggattccagttcgagtatggcggccagggctccgaccctgccgatgtggccatccagctgaccttcctgcgcctgatgtccaccgaggcctcccagaacatcacctaccactgcaagaacagcgtggcctacatggaccagcagactggcaacctcaagaaggccctgctcctcaagggctccaacgagatcgagatccgcgccgagggcaacagccgcttcacctacagcgtcactgtcgatggctgcacgagtcacaccggagcctggggcaagacagtgattgaatacaaaaccaccaagtcctcccgcctgcccatcatcgatgtggcccccttggacgttggtgccccagaccaggaattcggcttcgacgttggccctgtctgcttcctgtaaactccctccatcccaacctggctccctcccacccaaccaactttccccccaacccggaaacagacaagcaacccaaactgaacccccccaaaagccaaaaaatgggagacaatttcacatggactttggaaaatatttttttcctttgcattcatctctcaaacttagtttttatctttgaccaaccgaacatgaccaaaaaccaaaagtgcattcaaccttaccaaaaaaaaaaaaaaaaaaaaaagaataaataaataagtttttaaaaaaggaagcttggtccacttgcttgaagacccatgcgggggtaagtccctttctgcccgttgggttatgaaaccccaatgctgccctttctgctcctttctccacaccccccttggcctcccctccactccttcccaaatctgtctccccagaagacacaggaaacaatgtattgtctgcccagcaatcaaaggcaatgctcaaacacccaagtggcccccaccctcagcccgctcctgcccgcccagcacccccaggccctggggacctggggttctcagactgccaaagaagccttgccatctggcgctcccatggctcttgcaacatctccccttcgtttttgagggggtcatgccgggggagccaccagcccctcactgggttcggaggagagtcaggaagggccacgacaaagcagaaacatcggatttggggaacgcgtgtcatcccttgtgccgcaggctgggcgggagagactgttctgttctgttccttgtgtaactgtgttgctgaaagactacctcgttcttgtcttgatgtgtcaccggggcaactgcctgggggcggggatgggggcagggtggaagcggctccccatttttataccaaaggtgctacatctatgtgatgggtggggtggggagggaatcactggtgctatagaaattgagatgcccccccaggccagcaaatgttcctttttgttcaaagtctatttttattccttgatattttttctttctttttttttttttttgtggatggggacttgtgaatttttctaaaggtgctatttaacatgggaggagagcgtgtgcgctccagcccagcccgctgctcactttccaccctctctccacctgcctctggcttctcaggcctctgctctccgacctctctcctctgaaaccctcctccacagctgcagcccatcctcccggctccctcctagtctgtcctgcgtcctctgtccccgggtttcagagacaacttcccaaagcacaaagcagtttttccctaggggtgggaggaagcaaaagactctgtacctattttgtatgtgtataataatttgagatgtttttaattattttgattgctggaataaagcatgtggaaatgacccaaacataa

SEQ ID NO: 341 - DNA, 5086 bp, Homo sapiens
  misc_feature (27)..(27): n is a, c, g, or t
  misc_feature (46)..(46): n is a, c, g, or t
agcaccacggcagcaggaggtttcggnctaagttggaggtactggnccacgactgcatgcccgcgcccgccaggtgatacctccgccggtgacccaggggctctgcgacacaaggagtctgcatgtctaagtgctagacatgctcagctttgtggatacgcggactttgttgctgcttgcagtaaccttatgcctagcaacatgccaatctttacaagaggaaactgtaagaaagggcccagccggagatagaggaccacgtggagaaaggggtccaccaggccccccaggcagagatggtgaagatggtcccacaggccctcctggtccacctggtcctcctggcccccctggtctcggtgggaactttgctgctcagtatgatggaaaaggagttggacttggccctggaccaatgggcttaatgggacctagaggcccacctggtgcagctggagccccaggccctcaaggtttccaaggacctgctggtgagcctggtgaacctggtcaaactggtcctgcaggtgctcgtggtccagctggccctcctggcaaggctggtgaagatggtcaccctggaaaacccggacgacctggtgagagaggagttgttggaccacagggtgctcgtggtttccctggaactcctggacttcctggcttcaaaggcattaggggacacaatggtctggatggattgaagggacagcccggtgctcctggtgtgaagggtgaacctggtgcccctggtgaaaatggaactccaggtcaaacaggagcccgtgggcttcctggtgagagaggacgtgttggtgcccctggcccagctggtgcccgtggcagtgatggaagtgtgggtcccgtgggtcctgctggtcccattgggtctgctggccctccaggcttcccaggtgcccctggccccaagggtgaaattggagctgttggtaacgctggtcctgctggtcccgccggtccccgtggtgaagtgggtcttccaggcctctccggccccgttggacctcctggtaatcctggagcaaacggccttactggtgccaagggtgctgctggccttcccggcgttgctggggctcccggcctccctggaccccgcggtattcctggccctgttggtgctgccggtgctactggtgccagaggacttgttggtgagcctggtccagctggctccaaaggagagagcggtaacaagggtgagcccggctctgctgggccccaaggtcctcctggtcccagtggtgaagaaggaaagagaggccctaatggggaagctggatctgccggccctccaggacctcctgggctgagaggtagtcctggttctcgtggtcttcctggagctgatggcagagctggcgtcatgggccctcctggtagtcgtggtgcaagtggccctgctggagtccgaggacctaatggagatgctggtcgccctggggagcctggtctcatgggacccagaggtcttcctggttcccctggaaatatcggccccgctggaaaagaaggtcctgtcggcctccctggcatcgacggcaggcctggcccaattggcccagctggagcaagaggagagcctggcaacattggattccctggacccaaaggccccactggtgatcctggcaaaaacggtgataaaggtcatgctggtcttgctggtgctcggggtgctccaggtcctgatggaaacaatggtgctcagggacctcctggaccacagggtgttcaaggtggaaaaggtgaacagggtcccgctggtcctccaggcttccagggtctgcctggcccctcaggtcccgctggtgaagttggcaaaccaggagaaaggggtctccatggtgagtttggtctccctggtcctgctggtccaagaggggaacgcggtcccccaggtgagagtggtgctgccggtcctactggtcctattggaagccgaggtccttctggacccccagggcctgatggaaacaagggtgaacctggtgtggttggtgctgtgggcactgctggtccatctggtcctagtggactcccaggagagaggggtgctgctggcatacctggaggcaagggagaaaagggtgaacctggtctcagaggtgaaattggtaaccctggcagagatggtgctcgtggtgctcatggtgctgtaggtgcccctggtcctgctggagccacaggtgaccggggcgaagctggggctgctggtcctgctggtcctgctggtcctcggggaagccctggtgaacgtggcgaggtcggtcctgctggccccaacggatttgctggtccggctggtgctgctggtcaaccgggtgctaaaggagaaagaggagccaaagggcctaagggtgaaaacggtgttgttggtcccacaggccccgttggagctgctggcccagctggtccaaatggtccccccggtcctgctggaagtcgtggtgatggaggcccccctggtatgactggtttccctggtgctgctggacggactggtcccccaggaccctctggtatttctggccctcctggtccccctggtcctgctgggaaagaagggcttcgtggtcctcgtggtgaccaaggtccagttggccgaactggagaagtaggtgcagttggtccccctggcttcgctggtgagaagggtccctctggagaggctggtactgctggacctcctggcactccaggtcctcagggtcttcttggtgctcctggtattctgggtctccctggctcgagaggtgaacgtggtctacctggtgttgctggtgctgtgggtgaacctggtcctcttggcattgccggccctcctggggcccgtggtcctcctggtgctgtgggtagtcctggagtcaacggtgctcctggtgaagctggtcgtgatggcaaccctgggaacgatggtcccccaggtcgcgatggtcaacccggacacaagggagagcgcggttaccctggcaatattggtcccgttggtgctgcaggtgcacctggtcctcatggccccgtgggtcctgctggcaaacatggaaaccgtggtgaaactggtccttctggtcctgttggtcctgctggtgctgttggcccaagaggtcctagtggcccacaaggcattcgtggcgataagggagagcccggtgaaaaggggcccagaggtcttcctggcttaaagggacacaatggattgcaaggtctgcctggtatcgctggtcaccatggtgatcaaggtgctcctggctccgtgggtcctgctggtcctaggggccctgctggtccttctggccctgctggaaaagatggtcgcactggacatcctggtacggttggacctgctggcattcgaggccctcagggtcaccaaggccctgctggcccccctggtccccctggccctcctggacctccaggtgtaagcggtggtggttatgactttggttacgatggagacttctacagggctgaccagcctcgctcagcaccttctctcagacccaaggactatgaagttgatgctactctgaagtctctcaacaaccagattgagacccttcttactcctgaaggctctagaaagaacccagctcgcacatgccgtgacttgagactcagccacccagagtggagcagtggttactactggattgaccctaaccaaggatgcactatggatgctatcaaagtatactgtgatttctctactggcgaaacctgtatccgggcccaacctgaaaacatcccagccaagaactggtataggagctccaaggacaagaaacacgtctggctaggagaaactatcaatgctggcagccagtttgaatataatgtagaaggagtgacttccaaggaaatggctacccaacttgccttcatgcgcctgctggccaactatgcctctcagaacatcacctaccactgcaagaacagcattgcatacatggatgaggagactggcaacctgaaaaaggctgtcattctacagggctctaatgatgttgaacttgttgctgagggcaacagcaggttcacttacactgttcttgtagatggctgctctaaaaagacaaatgaatggggaaagacaatcattgaatacaaaacaaataagccatcacgcctgcccttccttgatattgcacctttggacatcggtggtgctgaccatgaattctttgtggacattggcccagtctgtttcaaataaatgaactcaatctaaattaaaaaagaaagaaatttgaaaaaactttctctttgccatttcttcttcttcttttttaactgaaagctgaatccttccatttcttctgcacatctacttgcttaaattgtgggcaaaagagaaaaagaaggattgatcagagcattgtgcaatacagtttcattaactccttcccccgctcccccaaaaatttgaatttttttttcaacactcttacacctgttatggaaaatgtcaacctttgtaagaaaaccaaaataaaaattgaaaaataaaaaccataaacatttgcaccacttgtggcttttgaatatcttccacagagggaagtttaaaacccaaacttccaaaggtttaaactacctcaaaacactttcccatgagtgtgatccacattgttaggtgctgacctagacagagatgaactgaggtccttgttttgttttgttcataatacaaaggtgctaattaatagtatttcagatacttgaagaatgttgatggtgctagaagaatttgagaagaaatactcctgtattgagttgtatcgtgtggtgtattttttaaaaaatttgatttagcattcatattttccatcttattcccaattaaaagtatgcagattatttgcccaaagttgtcctcttcttcagattcagcatttgttctttgccagtctcattttcatcttcttccatggttccacagaagctttgtttcttgggcaagcagaaaaattaaattgtacctattttgtatatgtgagatgtttaaataaattgtgaaaaaaatgaaataaagcatgtttggttttccaaaagaacatat

SEQ ID NO: 342 - DNA, 5489 bp, Homo sapiens
ggctgagttttatgacgggcccggtgctgaagggcagggaacaacttgatggtgctactttgaactgcttttcttttctcctttttgcacaaagagtctcatgtctgatatttagacatgatgagctttgtgcaaaaggggagctggctacttctcgctctgcttcatcccactattattttggcacaacaggaagctgttgaaggaggatgttcccatcttggtcagtcctatgcggatagagatgtctggaagccagaaccatgccaaatatgtgtctgtgactcaggatccgttctctgcgatgacataatatgtgacgatcaagaattagactgccccaacccagaaattccatttggagaatgttgtgcagtttgcccacagcctccaactgctcctactcgccctcctaatggtcaaggacctcaaggccccaagggagatccaggccctcctggtattcctgggagaaatggtgaccctggtattccaggacaaccagggtcccctggttctcctggcccccctggaatctgtgaatcatgccctactggtcctcagaactattctccccagtatgattcatatgatgtcaagtctggagtagcagtaggaggactcgcaggctatcctggaccagctggccccccaggccctcccggtccccctggtacatctggtcatcctggttcccctggatctccaggataccaaggaccccctggtgaacctgggcaagctggtccttcaggccctccaggacctcctggtgctataggtccatctggtcctgctggaaaagatggagaatcaggtagacccggacgacctggagagcgaggattgcctggacctccaggtatcaaaggtccagctgggatacctggattccctggtatgaaaggacacagaggcttcgatggacgaaatggagaaaagggtgaaacaggtgctcctggattaaagggtgaaaatggtcttccaggcgaaaatggagctcctggacccatgggtccaagaggggctcctggtgagcgaggacggccaggacttcctggggctgcaggtgctcggggtaatgacggtgctcgaggcagtgatggtcaaccaggccctcctggtcctcctggaactgccggattccctggatcccctggtgctaagggtgaagttggacctgcagggtctcctggttcaaatggtgcccctggacaaagaggagaacctggacctcagggacacgctggtgctcaaggtcctcctggccctcctgggattaatggtagtcctggtggtaaaggcgaaatgggtcccgctggcattcctggagctcctggactgatgggagcccggggtcctccaggaccagccggtgctaatggtgctcctggactgcgaggtggtgcaggtgagcctggtaagaatggtgccaaaggagagcccggaccacgtggtgaacgcggtgaggctggtattccaggtgttccaggagctaaaggcgaagatggcaaggatggatcacctggagaacctggtgcaaatgggcttccaggagctgcaggagaaaggggtgcccctgggttccgaggacctgctggaccaaatggcatcccaggagaaaagggtcctgctggagagcgtggtgctccaggccctgcagggcccagaggagctgctggagaacctggcagagatggcgtccctggaggtccaggaatgaggggcatgcccggaagtccaggaggaccaggaagtgatgggaaaccagggcctcccggaagtcaaggagaaagtggtcgaccaggtcctcctgggccatctggtccccgaggtcagcctggtgtcatgggcttccccggtcctaaaggaaatgatggtgctcctggtaagaatggagaacgaggtggccctggaggacctggccctcagggtcctcctggaaagaatggtgaaactggacctcaaggacccccagggcctactgggcctggtggtgacaaaggagacacaggaccccctggtccacaaggattacaaggcttgcctggtacaggtggtcctccaggagaaaatggaaaacctggggaaccaggtccaaagggtgatgccggtgcacctggagctccaggaggcaagggtgatgctggtgcccctggtgaacgtggacctcctggattggcaggggccccaggacttagaggtggagctggtccccctggtcccgaaggaggaaagggtgctgctggtcctcctgggccacctggtgctgctggtactcctggtctgcaaggaatgcctggagaaagaggaggtcttggaagtcctggtccaaagggtgacaagggtgaaccaggcggcccaggtgctgatggtgtcccagggaaagatggcccaaggggtcctactggtcctattggtcctcctggcccagctggccagcctggagataagggtgaaggtggtgcccccggacttccaggtatagctggacctcgtggtagccctggtgagagaggtgaaactggccctccaggacctgctggtttccctggtgctcctggacagaatggtgaacctggtggtaaaggagaaagaggggctccgggtgagaaaggtgaaggaggccctcctggagttgcaggaccccctggaggttctggacctgctggtcctcctggtccccaaggtgtcaaaggtgaacgtggcagtcctggtggacctggtgctgctggcttccctggtgctcgtggtcttcctggtcctcctggtagtaatggtaacccaggacccccaggtcccagcggttctccaggcaaggatgggcccccaggtcctgcgggtaacactggtgctcctggcagccctggagtgtctggaccaaaaggtgatgctggccaaccaggagagaagggatcgcctggtgcccagggcccaccaggagctccaggcccacttgggattgctgggatcactggagcacggggtcttgcaggaccaccaggcatgccaggtcctaggggaagccctggccctcagggtgtcaagggtgaaagtgggaaaccaggagctaacggtctcagtggagaacgtggtccccctggaccccagggtcttcctggtctggctggtacagctggtgaacctggaagagatggaaaccctggatcagatggtcttccaggccgagatggatctcctggtggcaagggtgatcgtggtgaaaatggctctcctggtgcccctggcgctcctggtcatccaggcccacctggtcctgtcggtccagctggaaagagtggtgacagaggagaaagtggccctgctggccctgctggtgctcccggtcctgctggttcccgaggtgctcctggtcctcaaggcccacgtggtgacaaaggtgaaacaggtgaacgtggagctgctggcatcaaaggacatcgaggattccctggtaatccaggtgccccaggttctccaggccctgctggtcagcagggtgcaatcggcagtccaggacctgcaggccccagaggacctgttggacccagtggacctcctggcaaagatggaaccagtggacatccaggtcccattggaccaccagggcctcgaggtaacagaggtgaaagaggatctgagggctccccaggccacccagggcaaccaggccctcctggacctcctggtgcccctggtccttgctgtggtggtgttggagccgctgccattgctgggattggaggtgaaaaagctggcggttttgccccgtattatggagatgaaccaatggatttcaaaatcaacaccgatgagattatgacttcactcaagtctgttaatggacaaatagaaagcctcattagtcctgatggttctcgtaaaaaccccgctagaaactgcagagacctgaaattctgccatcctgaactcaagagtggagaatactgggttgaccctaaccaaggatgcaaattggatgctatcaaggtattctgtaatatggaaactggggaaacatgcataagtgccaatcctttgaatgttccacggaaacactggtggacagattctagtgctgagaagaaacacgtttggtttggagagtccatggatggtggttttcagtttagctacggcaatcctgaacttcctgaagatgtccttgatgtgcagctggcattccttcgacttctctccagccgagcttcccagaacatcacatatcactgcaaaaatagcattgcatacatggatcaggccagtggaaatgtaaagaaggccctgaagctgatggggtcaaatgaaggtgaattcaaggctgaaggaaatagcaaattcacctacacagttctggaggatggttgcacgaaacacactggggaatggagcaaaacagtctttgaatatcgaacacgcaaggctgtgagactacctattgtagatattgcaccctatgacattggtggtcctgatcaagaatttggtgtggacgttggccctgtttgctttttataaaccaaactctatctgaaatcccaacaaaaaaaatttaactccatatgtgttcctcttgttctaatcttgtcaaccagtgcaagtgaccgacaaaattccagttatttatttccaaaatgtttggaaacagtataatttgacaaagaaaaatgatacttctctttttttgctgttccaccaaatacaattcaaatgctttttgttttatttttttaccaattccaatttcaaaatgtctcaatggtgctataataaataaacttcaacactctttatgataacaacactgtgttatattctttgaatcctagcccatctgcagagcaatgactgtgctcaccagtaaaagataacctttctttctgaaatagtcaaatacgaaattagaaaagccctccctattttaactacctcaactggtcagaaacacagattgtattctatgagtcccagaagatgaaaaaaattttatacgttgataaaacttataaatttcattgattaatctcctggaagattggtttaaaaagaaaagtgtaatgcaagaatttaaagaaatatttttaaagccacaattattttaatattggatatcaactgcttgtaaaggtgctcctcttttttcttgtcattgctggtcaagattactaatatttgggaaggctttaaagacgcatgttatggtgctaatgtactttcacttttaaactctagatcagaattgttgacttgcattcagaacataaatgcacaaaatctgtacatgtctcccatcagaaagattcattggcatgccacagggattctcctccttcatcctgtaaaggtcaacaataaaaaccaaattatggggctgcttttgtcacactagcatagagaatgtgttgaaatttaactttgtaagcttgtatgtggttgttgatcttttttttccttacagacacccataataaaatatcatattaaaattc

SEQ ID NO: 343 - DNA, 9272 bp, Homo sapiens
gggctggaggggcgctgggctcggacctgccaaggccaccgcaggggggagcaagggacagaggcgggggtcctagctgacggcttttactgcctaggatgacgctgcggcttctggtggccgcgctctgcgccgggatcctggcagaggcgccccgagtgcgagcccagcacagggagagagtgacctgcacgcgcctttacgccgctgacattgtgttcttactggatggctcctcatccattggccgcagcaatttccgcgaggtccgcagctttctcgaagggctggtgctgcctttctctggagcagccagtgcacagggtgtgcgctttgccacagtgcagtacagcgatgacccacggacagagttcggcctggatgcacttggctctgggggtgatgtgatccgcgccatccgtgagcttagctacaaggggggcaacactcgcacaggggctgcaattctccatgtggctgaccatgtcttcctgccccagctggcccgacctggtgtccccaaggtctgcatcctgatcacagacgggaagtcccaggacctggtggacacagctgcccaaaggctgaaggggcagggggtcaagctatttgctgtggggatcaagaatgctgaccctgaggagctgaagcgagttgcctcacagccaacctccgacttcttcttcttcgtcaatgacttcagcatcttgaggacactactgcccctcgtttcccggagagtgtgcacgactgctggtggcgtgcctgtgacccgacctccggatgactcgacctctgctccacgagacctggtgctgtctgagccaagcagccaatccttgagagtacagtggacagcggccagtggccctgtgactggctacaaggtccagtacactcctctgacggggctgggacagccactgccgagtgagcggcaggaggtgaacgtcccagctggtgagaccagtgtgcggctgcggggtctccggccactgaccgagtaccaagtgactgtgattgccctctacgccaacagcatcggggaggctgtgagcgggacagctcggaccactgccctagaagggccggaactgaccatccagaataccacagcccacagcctcctggtggcctggcggagtgtgccaggtgccactggctaccgtgtgacatggcgggtcctcagtggtgggcccacacagcagcaggagctgggccctgggcagggttcagtgttgctgcgtgacttggagcctggcacggactatgaggtgaccgtgagcaccctatttggccgcagtgtggggcccgccacttccctgatggctcgcactgacgcttctgttgagcagaccctgcgcccggtcatcctgggccccacatccatcctcctttcctggaacttggtgcctgaggcccgtggctaccggttggaatggcggcgtgagactggcttggagccaccgcagaaggtggtactgccctctgatgtgacccgctaccagttggatgggctgcagccgggcactgagtaccgcctcacactctacactctgctggagggccacgaggtggccacccctgcaaccgtggttcccactggaccagagctgcctgtgagccctgtaacagacctgcaagccaccgagctgcccgggcagcgggtgcgagtgtcctggagcccagtccctggtgccacccagtaccgcatcattgtgcgcagcacccagggggttgagcggaccctggtgcttcctgggagtcagacagcattcgacttggatgacgttcaggctgggcttagctacactgtgcgggtgtctgctcgagtgggtccccgtgagggcagtgccagtgtcctcactgtccgccgggagccggaaactccacttgctgttccagggctgcgggttgtggtgtcagatgcaacgcgagtgagggtggcctggggacccgtccctggagccagtggatttcggattagctggagcacaggcagtggtccggagtccagccagacactgcccccagactctactgccacagacatcacagggctgcagcctggaaccacctaccaggtggctgtgtcggtactgcgaggcagagaggagggccctgctgcagtcatcgtggctcgaacggacccactgggcccagtgaggacggtccatgtgactcaggccagcagctcatctgtcaccattacctggaccagggttcctggcgccacaggatacagggtttcctggcactcagcccacggcccagagaaatcccagttggtttctggggaggccacggtggctgagctggatggactggagccagatactgagtatacggtgcatgtgagggcccatgtggctggcgtggatgggccccctgcctctgtggttgtgaggactgcccctgagcctgtgggtcgtgtgtcgaggctgcagatcctcaatgcttccagcgacgttctacggatcacctgggtaggggtcactggagccacagcttacagactggcctggggccggagtgaaggcggccccatgaggcaccagatactcccaggaaacacagactctgcagagatccggggtctcgaaggtggagtcagctactcagtgcgagtgactgcacttgtcggggaccgcgagggcacacctgtctccattgttgtcactacgccgcctgaggctccgccagccctggggacgcttcacgtggtgcagcgcggggagcactcgctgaggctgcgctgggagccggtgcccagagcgcagggcttccttctgcactggcaacctgagggtggccaggaacagtcccgggtcctggggcccgagctcagcagctatcacctggacgggctggagccagcgacacagtaccgcgtgaggctgagtgtcctagggccggctggagaagggccctctgcagaggtgactgcgcgcactgagtcacctcgtgttccaagcattgaactacgtgtggtggacacctcgatcgactcggtgactttggcctggactccagtgtccagggcatccagctacatcctatcctggcggccactcagaggccctggccaggaagtgcctgggtccccgcagacacttccagggatctcaagctcccagcgggtgacagggctagagcctggcgtctcttacatcttctccctgacgcctgtcctggatggtgtgcggggtcctgaggcatctgtcacacagacgccagtgtgcccccgtggcctggcggatgtggtgttcctaccacatgccactcaagacaatgctcaccgtgcggaggctacgaggagggtcctggagcgtctggtgttggcacttgggcctcttgggccacaggcagttcaggttggcctgctgtcttacagtcatcggccctccccactgttcccactgaatggctcccatgaccttggcattatcttgcaaaggatccgtgacatgccctacatggacccaagtgggaacaacctgggcacagccgtggtcacagctcacagatacatgttggcaccagatgctcctgggcgccgccagcacgtaccaggggtgatggttctgctagtggatgaacccttgagaggtgacatattcagccccatccgtgaggcccaggcttctgggcttaatgtggtgatgttgggaatggctggagcggacccagagcagctgcgtcgcttggcgccgggtatggactctgtccagaccttcttcgccgtggatgatgggccaagcctggaccaggcagtcagtggtctggccacagccctgtgtcaggcatccttcactactcagccccggccagagccctgcccagtgtattgtccaaagggccagaagggggaacctggagagatgggcctgagaggacaagttgggcctcctggcgaccctggcctcccgggcaggaccggtgctcccggcccccaggggccccctggaagtgccactgccaagggcgagaggggcttccctggagcagatgggcgtccaggcagccctggccgcgccgggaatcctgggacccctggagcccctggcctaaagggctctccagggttgcctggccctcgtggggacccgggagagcgaggacctcgaggcccaaagggggagccgggggctcccggacaagtcatcggaggtgaaggacctgggcttcctgggcggaaaggggaccctggaccatcgggcccccctggacctcgtggaccactgggggacccaggaccccgtggccccccagggcttcctggaacagccatgaagggtgacaaaggcgatcgtggggagcggggtccccctggaccaggtgaaggtggcattgctcctggggagcctgggctgccgggtcttcccggaagccctggaccccaaggccccgttggcccccctggaaagaaaggagaaaaaggtgactctgaggatggagctccaggcctcccaggacaacctgggtctccgggtgagcagggcccacggggacctcctggagctattggccccaaaggtgaccggggctttccagggcccctgggtgaggctggagagaagggcgaacgtggacccccaggcccagcgggatcccgggggctgccaggggttgctggacgtcctggagccaagggtcctgaagggccaccaggacccactggccgccaaggagagaagggggagcctggtcgccctggggaccctgcagtggtgggacctgctgttgctggacccaaaggagaaaagggagatgtggggcccgctgggcccagaggagctaccggagtccaaggggaacggggcccacccggcttggttcttcctggagaccctggccccaagggagaccctggagaccggggtcccattggccttactggcagagcaggacccccaggtgactcagggcctcctggagagaagggagaccctgggcggcctggccccccaggacctgttggcccccgaggacgagatggtgaagttggagagaaaggtgacgagggtcctccgggtgacccgggtttgcctggaaaagcaggcgagcgtggccttcggggggcacctggagttcgggggcctgtgggtgaaaagggagaccagggagatcctggagaggatggacgaaatggcagccctggatcatctggacccaagggtgaccgtggggagccgggtcccccaggacccccgggacggctggtagacacaggacctggagccagagagaagggagagcctggggaccgcggacaagagggtcctcgagggcccaagggtgatcctggcctccctggagcccctggggaaaggggcattgaagggtttcggggacccccaggcccacagggggacccaggtgtccgaggcccagcaggagaaaagggtgaccggggtccccctgggctggatggccggagcggactggatgggaaaccaggagccgctgggccctctgggccgaatggtgctgcaggcaaagctggggacccagggagagacgggcttccaggcctccgtggagaacaaggcctccctggcccctctggtccccctggattaccgggaaagccaggcgaggatgggaaacctggcctgaatggaaaaaacggagaacctggggaccctggagaagacgggaggaagggagagaaaggagattcaggcgcctctgggagagaaggtcgtgatggccccaagggtgagcgtggagctcctggtatccttggaccccaggggcctccaggcctcccagggccagtgggccctcctggccagggttttcctggtgtcccaggaggcacgggccccaagggtgaccgtggggagactggatccaaaggggagcagggcctccctggagagcgtggcctgcgaggagagcctggaagtgtgccgaatgtggatcggttgctggaaactgctggcatcaaggcatctgccctgcgggagatcgtggagacctgggatgagagctctggtagcttcctgcctgtgcccgaacggcgtcgaggccccaagggggactcaggcgaacagggccccccaggcaaggagggccccatcggctttcctggagaacgcgggctgaagggcgaccgtggagaccctggccctcaggggccacctggtctggcccttggggagaggggcccccccgggccttccggccttgccggggagcctggaaagcctggtattcccgggctcccaggcagggctgggggtgtgggagaggcaggaaggccaggagagaggggagaacggggagagaaaggagaacgtggagaacagggcagagatggccctcctggactccctggaacccctgggccccccggaccccctggccccaaggtgtctgtggatgagccaggtcctggactctctggagaacagggaccccctggactcaagggtgctaagggggagccgggcagcaatggtgaccaaggtcccaaaggagacaggggtgtgccaggcatcaaaggagaccggggagagcctggaccgaggggtcaggacggcaacccgggtctaccaggagagcgtggtatggctgggcctgaagggaagccgggtctgcagggtccaagaggcccccctggcccagtgggtggtcatggagaccctggaccacctggtgccccgggtcttgctggccctgcaggaccccaaggaccttctggcctgaagggggagcctggagagacaggacctccaggacggggcctgactggacctactggagctgtgggacttcctggaccccccggcccttcaggccttgtgggtccacaggggtctccaggtttgcctggacaagtgggggagacagggaagccgggagccccaggtcgagatggtgccagtggaaaagatggagacagagggagccctggtgtgccagggtcaccaggtctgcctggccctgtcggacctaaaggagaacctggccccacgggggcccctggacaggctgtggtcgggctccctggagcaaagggagagaagggagcccctggaggccttgctggagacctggtgggtgagccgggagccaaaggtgaccgaggactgccagggccgcgaggcgagaagggtgaagctggccgtgcaggggagcccggagaccctggggaagatggtcagaaaggggctccaggacccaaaggtttcaagggtgacccaggagtcggggtcccgggctcccctgggcctcctggccctccaggtgtgaagggagatctgggcctccctggcctgcccggtgctcctggtgttgttgggttcccgggtcagacaggccctcgaggagagatgggtcagccaggccctagtggagagcggggtctggcaggccccccagggagagaaggaatcccaggacccctggggccacctggaccaccggggtcagtgggaccacctggggcctctggactcaaaggagacaagggagaccctggagtagggctgcctgggccccgaggcgagcgtggggagccaggcatccggggtgaagatggccgccccggccaggagggaccccgaggactcacggggccccctggcagcaggggagagcgtggggagaagggtgatgttgggagtgcaggactaaagggtgacaagggagactcagctgtgatcctggggcctccaggcccacggggtgccaagggggacatgggtgaacgagggcctcggggcttggatggtgacaaaggacctcggggagacaatggggaccctggtgacaagggcagcaagggagagcctggtgacaagggctcagccgggttgccaggactgcgtggactcctgggaccccagggtcaacctggtgcagcagggatccctggtgacccgggatccccaggaaaggatggagtgcctggtatccgaggagaaaaaggagatgttggcttcatgggtccccggggcctcaagggtgaacggggagtgaagggagcctgtggccttgatggagagaagggagacaagggagaagctggtcccccaggccgccccgggctggcaggacacaaaggagagatgggggagcctggtgtgccgggccagtcgggggcccctggcaaggagggcctgatcggtcccaagggtgaccgaggctttgacgggcagccaggccccaagggtgaccagggcgagaaaggggagcggggaaccccaggaattgggggcttcccaggccccagtggaaatgatggctctgctggtcccccagggccacctggcagtgttggtcccagaggccccgaaggacttcagggccagaagggtgagcgaggtccccccggagagagagtggtgggggctcctggggtccctggagctcctggcgagagaggggagcaggggcggccagggcctgccggtcctcgaggcgagaagggagaagctgcactgacggaggatgacatccggggctttgtgcgccaagagatgagtcagcactgtgcctgccagggccagttcatcgcatctggatcacgacccctccctagttatgctgcagacactgccggctcccagctccatgctgtgcctgtgctccgcgtctctcatgcagaggaggaagagcgggtaccccctgaggatgatgagtactctgaatactccgagtattctgtggaggagtaccaggaccctgaagctccttgggatagtgatgacccctgttccctgccactggatgagggctcctgcactgcctacaccctgcgctggtaccatcgggctgtgacaggcagcacagaggcctgtcacccttttgtctatggtggctgtggagggaatgccaaccgttttgggacccgtgaggcctgcgagcgccgctgcccaccccgggtggtccagagccaggggacaggtactgcccaggactgaggcccagataatgagctgagattcagcatcccctggaggagtcggggtctcagcagaaccccactgtccctccccttggtgctagaggcttgtgtgcacgtgagcgtgcgagtgcacgtccgttatttcagtgacttggtcccgtgggtctagccttcccccctgtggacaaacccccattgtggctcctgccaccctggcagatgactcactgtgggggggtggctgtgggcagtgagcggatgtgactggcgtctgacccgccccttgacccaagcctgtgatgacatggtgctgattctggggggcattaaagctgctgttttaaaaggcaaaaaa

SEQ ID NO: 344 - DNA, 2439 bp, Homo sapiens
cagcacccagctccccgccaccgccatggtccccgacaccgcctgcgttcttctgctcaccctggctgccctcggcgcgtccggacagggccagagcccgttgggctcagacctgggcccgcagatgcttcgggaactgcaggaaaccaacgcggcgctgcaggacgtgcgggactggctgcggcagcaggtcagggagatcacgttcctgaaaaacacggtgatggagtgtgacgcgtgcgggatgcagcagtcagtacgcaccggcctacccagcgtgcggcccctgctccactgcgcgcccggcttctgcttccccggcgtggcctgcatccagacggagagcggcggccgctgcggcccctgccccgcgggcttcacgggcaacggctcgcactgcaccgacgtcaacgagtgcaacgcccacccctgcttcccccgagtccgctgtatcaacaccagcccggggttccgctgcgaggcttgcccgccggggtacagcggccccacccaccagggcgtggggctggctttcgccaaggccaacaagcaggtttgcacggacatcaacgagtgtgagaccgggcaacataactgcgtccccaactccgtgtgcatcaacacccggggctccttccagtgcggcccgtgccagcccggcttcgtgggcgaccaggcgtccggctgccagcgcggcgcacagcgcttctgccccgacggctcgcccagcgagtgccacgagcatgcagactgcgtcctagagcgcgatggctcgcggtcgtgcgtgtgtcgcgttggctgggccggcaacgggatcctctgtggtcgcgacactgacctagacggcttcccggacgagaagctgcgctgcccggagccgcagtgccgtaaggacaactgcgtgactgtgcccaactcagggcaggaggatgtggaccgcgatggcatcggagacgcctgcgatccggatgccgacggggacggggtccccaatgaaaaggacaactgcccgctggtgcggaacccagaccagcgcaacacggacgaggacaagtggggcgatgcgtgcgacaactgccggtcccagaagaacgacgaccaaaaggacacagaccaggacggccggggcgatgcgtgcgacgacgacatcgacggcgaccggatccgcaaccaggccgacaactgccctagggtacccaactcagaccagaaggacagtgatggcgatggtataggggatgcctgtgacaactgtccccagaagagcaacccggatcaggcggatgtggaccacgactttgtgggagatgcttgtgacagcgatcaagaccaggatggagacggacatcaggactctcgggacaactgtcccacggtgcctaacagtgcccaggaggactcagaccacgatggccagggtgatgcctgcgacgacgacgacgacaatgacggagtccctgacagtcgggacaactgccgcctggtgcctaaccccggccaggaggacgcggacagggacggcgtgggcgacgtgtgccaggacgactttgatgcagacaaggtggtagacaagatcgacgtgtgtccggagaacgctgaagtcacgctcaccgacttcagggccttccagacagtcgtgctggacccggagggtgacgcgcagattgaccccaactgggtggtgctcaaccagggaagggagatcgtgcagacaatgaacagcgacccaggcctggctgtgggttacactgccttcaatggcgtggacttcgagggcacgttccatgtgaacacggtcacggatgacgactatgcgggcttcatctttggctaccaggacagctccagcttctacgtggtcatgtggaagcagatggagcaaacgtattggcaggcgaaccccttccgtgctgtggccgagcctggcatccaactcaaggctgtgaagtcttccacaggccccggggaacagctgcggaacgctctgtggcatacaggagacacagagtcccaggtgcggctgctgtggaaggacccgcgaaacgtgggttggaaggacaagaagtcctatcgttggttcctgcagcaccggccccaagtgggctacatcagggtgcgattctatgagggccctgagctggtggccgacagcaacgtggtcttggacacaaccatgcggggtggccgcctgggggtcttctgcttctcccaggagaacatcatctgggccaacctgcgttaccgctgcaatgacaccatcccagaggactatgagacccatcagctgcggcaagcctagggaccagggtgaggacccgccggatgacagccaccctcaccgcggctggatgggggctctgcacccagcccaaggggtggccgtcctgagggggaagtgagaagggctcagagaggacaaaataaagtgtgtgtgcaggg

SEQ ID NO: 345 - DNA, 3321 bp, Homo sapiens
atgaagattttgatacttggtatttttctgtttttatgtagtaccccagcctgggcgaaagaaaagcattattacattggaattattgaaacgacttgggattatgcctctgaccatggggaaaagaaacttatttctgttgacacggaacattccaatatctatcttcaaaatggcccagatagaattgggagactatataagaaggccctttatcttcagtacacagatgaaacctttaggacaactatagaaaaaccggtctggcttgggtttttaggccctattatcaaagctgaaactggagataaagtttatgtacacttaaaaaaccttgcctctaggccctacacctttcattcacatggaataacttactataaggaacatgagggggccatctaccctgataacaccacagattttcaaagagcagatgacaaagtatatccaggagagcagtatacatacatgttgcttgccactgaagaacaaagtcctggggaaggagatggcaattgtgtgactaggatttaccattcccacattgatgctccaaaagatattgcctcaggactcatcggacctttaataatctgtaaaaaagattctctagataaagaaaaagaaaaacatattgaccgagaatttgtggtgatgttttctgtggtggatgaaaatttcagctggtacctagaagacaacattaaaacctactgctcagaaccagagaaagttgacaaagacaacgaagacttccaggagagtaacagaatgtattctgtgaatggatacacttttggaagtctcccaggactctccatgtgtgctgaagacagagtaaaatggtacctttttggtatgggtaatgaagttgatgtgcacgcagctttctttcacgggcaagcactgactaacaagaactaccgtattgacacaatcaacctctttcctgctaccctgtttgatgcttatatggtggcccagaaccctggagaatggatgctcagctgtcagaatctaaaccatctgaaagccggtttgcaagcctttttccaggtccaggagtgtaacaagtcttcatcaaaggataatatccgtgggaagcatgttagacactactacattgccgctgaggaaatcatctggaactatgctccctctggtatagacatcttcactaaagaaaacttaacagcacctggaagtgactcagcggtgttttttgaacaaggtaccacaagaattggaggctcttataaaaagctggtttatcgtgagtacacagatgcctccttcacaaatcgaaaggagagaggccctgaagaagagcatcttggcatcctgggtcctgtcatttgggcagaggtgggagacaccatcagagtaaccttccataacaaaggagcatatcccctcagtattgagccgattggggtgagattcaataagaacaacgagggcacatactattccccaaattacaacccccagagcagaagtgtgcctccttcagcctcccatgtggcacccacagaaacattcacctatgaatggactgtccccaaagaagtaggacccactaatgcagatcctgtgtgtctagctaagatgtattattctgctgtggatcccactaaagatatattcactgggcttattgggccaatgaaaatatgcaagaaaggaagtttacatgcaaatgggagacagaaagatgtagacaaggaattctatttgtttcctacagtatttgatgagaatgagagtttactcctggaagataatattagaatgtttacaactgcacctgatcaggtggataaggaagatgaagactttcaggaatctaataaaatgcactccatgaatggattcatgtatgggaatcagccgggtctcactatgtgcaaaggagattcggtcgtgtggtacttattcagcgccggaaatgaggccgatgtacatggaatatacttttcaggaaacacatatctgtggagaggagaacggagagacacagcaaacctcttccctcaaacaagtcttacgctccacatgtggcctgacacagaggggacttttaatgttgaatgccttacaactgatcattacacaggcggcatgaagcaaaaatatactgtgaaccaatgcaggcggcagtctgaggattccaccttctacctgggagagaggacatactatatcgcagcagtggaggtggaatgggattattccccacaaagggagtgggaaaaggagctgcatcatttacaagagcagaatgtttcaaatgcatttttagataagggagagttttacataggctcaaagtacaagaaagttgtgtatcggcagtatactgatagcacattccgtgttccagtggagagaaaagctgaagaagaacatctgggaattctaggtccacaacttcatgcagatgttggagacaaagtcaaaattatctttaaaaacatggccacaaggccctactcaatacatgcccatggggtacaaacagagagttctacagttactccaacattaccaggtgaaactctcacttacgtatggaaaatcccagaaagatctggagctggaacagaggattctgcttgtattccatgggcttattattcaactgtggatcaagttaaggacctctacagtggattaattggccccctgattgtttgtcgaagaccttacttgaaagtattcaatcccagaaggaagctggaatttgcccttctgtttctagtttttgatgagaatgaatcttggtacttagatgacaacatcaaaacatactctgatcaccccgagaaagtaaacaaagatgatgaggaattcatagaaagcaataaaatgcatgctattaatggaagaatgtttggaaacctacaaggcctcacaatgcacgtgggagatgaagtcaactggtatctgatgggaatgggcaatgaaatagacttacacactgtacattttcacggccatagcttccaatacaagcacaggggagtttatagttctgatgtctttgacattttccctggaacataccaaaccctagaaatgtttccaagaacacctggaatttggttactccactgccatgtgaccgaccacattcatgctggaatggaaaccacttacaccgttctacaaaatgaagacaccaaatctggctgaatgaaataaattggtgataagtggaaaaaagagaaaaaccaatgattcataacaatgtatgtgaaagtgtaaaatagaatgttactttggaatgactataaacattaaaagagactggagcat

SEQ ID NO: 346 - DNA, 818 bp, Homo sapiens
cgcagcgggtcctctctatctagctccagcctctcgcctgcgccccactccccgcgtcccgcgtcctagccgaccatggccgggcccctgcgcgccccgctgctcctgctggccatcctggccgtggccctggccgtgagccccgcggccggctccagtcccggcaagccgccgcgcctggtgggaggccccatggacgccagcgtggaggaggagggtgtgcggcgtgcactggactttgccgtcggcgagtacaacaaagccagcaacgacatgtaccacagccgcgcgctgcaggtggtgcgcgcccgcaagcagatcgtagctggggtgaactacttcttggacgtggagctgggccgaaccacgtgtaccaagacccagcccaacttggacaactgccccttccatgaccagccacatctgaaaaggaaagcattctgctctttccagatctacgctgtgccttggcagggcacaatgaccttgtcgaaatccacctgtcaggacgcctaggggtctgtaccgggctggcctgtgcctatcacctcttatgcacacctcccaccccctgtattcccacccctggactggtggcccctgccttggggaaggtctccccatgtgcctgcaccaggagacagacagagaaggcagcaggcggcctttgttgctcagcaaggggctctgccctccctccttccttcttgcttctcatagccccggtgtgcggtgcatacacccccacctcctgcaataaaatagtagcatcggcaaaaaaaaaaaaaaaaaaaaaaaaaaaaaaaaaaaaaaaaaaa

SEQ ID NO: 347 - DNA, 674 bp, Homo sapiens
ccccttggttccgcccgcgcgtcacgtgaccccagcgcctacttgggctgaggagccgccgcgtcccctcgccgagtcccctcgccagattccctccgtcgccgccaagatgatgtgcggggcgccctccgccacgcagccggccaccgccgagacccagcacatcgccgaccaggtgaggtcccagcttgaagagaaagaaaacaagaagttccctgtgtttaaggccgtgtcattcaagagccaggtggtcgcggggacaaactacttcatcaaggtgcacgtcggcgacgaggacttcgtacacctgcgagtgttccaatctctccctcatgaaaacaagcccttgaccttatctaactaccagaccaacaaagccaagcatgatgagctgacctatttctgatcctgactttggacaaggcccttcagccagaagactgacaaagtcatcctccgtctaccagagcgtgcacttgtgatcctaaaataagcttcatctccgggctgtgccccttggggtggaaggggcaggattctgcagctgcttttgcatttctcttcctaaatttcattgtgttgatttctttccttcccaataggtgatcttaattactttcagaatattttcaaaatagatatatttttaaaatccttaaaaaaaaaaaaaaaaa

SEQ ID NO: 348 - DNA, 5128 bp, Homo sapiens
actctggagtgggagtgggagcgagcgcttctgcgactccagttgtgagagccgcaagggcatgggaattgacgccactcaccgacccccagtctcaatctcaacgctgtgaggaaacctcgactttgccaggtccccaagggcagcggggctcggcgagcgaggcacccttctccgtccccatcccaatccaagcgctcctggcactgacgacgccaagagactcgagtgggagttaaagcttccagtgagggcagcaggtgtccaggccgggcctgcgggttcctgttgacgtcttgccctaggcaaaggtcccagttccttctcggagccggctgtcccgcgccactggaaaccgcacctccccgcagcatgggcaccagcctcagcccgaacgacccttggccgctaaacccgctgtccatccagcagaccacgctcctgctactcctgtcggtgctggccactgtgcatgtgggccagcggctgctgaggcaacggaggcggcagctccggtccgcgcccccgggcccgtttgcgtggccactgatcggaaacgcggcggcggtgggccaggcggctcacctctcgttcgctcgcctggcgcggcgctacggcgacgttttccagatccgcctgggcagctgccccatagtggtgctgaatggcgagcgcgccatccaccaggccctggtgcagcagggctcggccttcgccgaccggccggccttcgcctccttccgtgtggtgtccggcggccgcagcatggctttcggccactactcggagcactggaaggtgcagcggcgcgcagcccacagcatgatgcgcaacttcttcacgcgccagccgcgcagccgccaagtcctcgagggccacgtgctgagcgaggcgcgcgagctggtggcgctgctggtgcgcggcagcgcggacggcgccttcctcgacccgaggccgctgaccgtcgtggccgtggccaacgtcatgagtgccgtgtgtttcggctgccgctacagccacgacgaccccgagttccgtgagctgctcagccacaacgaagagttcgggcgcacggtgggcgcgggcagcctggtggacgtgatgccctggctgcagtacttccccaacccggtgcgcaccgttttccgcgaattcgagcagctcaaccgcaacttcagcaacttcatcctggacaagttcttgaggcactgcgaaagccttcggcccggggccgccccccgcgacatgatggacgcctttatcctctctgcggaaaagaaggcggccggggactcgcacggtggtggcgcgcggctggatttggagaacgtaccggccactatcactgacatcttcggcgccagccaggacaccctgtccaccgcgctgcagtggctgctcctcctcttcaccaggtatcctgatgtgcagactcgagtgcaggcagaattggatcaggtcgtggggagggaccgtctgccttgtatgggtgaccagcccaacctgccctatgtcctggccttcctttatgaagccatgcgcttctccagctttgtgcctgtcactattcctcatgccaccactgccaacacctctgtcttgggctaccacattcccaaggacactgtggtttttgtcaaccagtggtctgtgaatcatgacccagtgaagtggcctaacccggagaactttgatccagctcgattcttggacaaggatggcctcatcaacaaggacctgaccagcagagtgatgattttttcagtgggcaaaaggcggtgcattggcgaagaactttctaagatgcagctttttctcttcatctccatcctggctcaccagtgcgatttcagggccaacccaaatgagcctgcgaaaatgaatttcagttatggtctaaccattaaacccaagtcatttaaagtcaatgtcactctcagagagtccatggagctccttgatagtgctgtccaaaatttacaagccaaggaaacttgccaataagaagcaagaggcaagctgaaattttagaaatattcacatcttcggagatgaggagtaaaattcagtttttttccagttcctcttttgtgctgcttctcaattagcgtttaaggtgagcataaatcaactgtccatcaggtgaggtgtgctccatacccagcggttcttcatgagtagtgggctatgcaggagcttctgggagatttttttgagtcaaagacttaaagggcccaatgaattattatatacatactgcatcttggttatttctgaaggtagcattctttggagttaaaatgcacatatagacacatacacccaaacacttacaccaaactactgaatgaagaagtattttggtaaccaggccatttttggtgggaatccaagattggtctcccatatgcagaaatagacaaaaagtatattaaacaaagtttcagagtatattgttgaagagacagagacaagtaatttcagtgtaaagtgtgtgattgaaggtgataagggaaaagataaagaccagaaattcccttttcaccttttcaggaaaataacttagactctagtatttatgggtggatttatccttttgccttctggtatacttccttacttttaaggataaatcataaagtcagttgctcaaaaagaaatcaatagttgaattagtgagtatagtggggttccatgagttatcatgaattttaaagtatgcattattaaattgtaaaactccaaggtgatgttgtacctcttttgcttgccaaagtacagaatttgaattatcagcaaagaaaaaaaaaaaagccagccaagctttaaattatgtgaccataatgtactgatttcagtaagtctcataggttaaaaaaaaaagtcaccaaatagtgtgaaatatattacttaactgtccgtaagcagtatattagtattatcttgttcaggaaaaggttgaataatatatgccttgtgtaatattgaaaattgaaaagtacaactaacgcaaccaagtgtgctaaaaatgagcttgattaaatcaaccacctatttttgacatggaaatgaagcagggtttcttttcttcactcaaattttggcgaatctcaaaattagatcctaagatgtgttcttatttttataacatctttattgaaattctatttataatacagaatcttgttttgaaaataacctaattaatatattaaaattccaaattcatggcatgcttaaattttaactaaattttaaagccattctgattattgagttccagttgaagttagtggaaatctgaacattctcctgtggaaggcagagaaatctaagctgtgtctgcccaatgaataatggaaaatgccatgaattacctggatgttctttttacgaggtgacaagagttggggacagaactcccattacaactgaccaagtttctcttctagatgattttttgaaagttaacattaatgcctgctttttggaaagtcagaatcagaagatagtcttggaagctgtttggaaaagacagtggagatgaggtcagttgtgttttttaagatggcaattactttggtagctgggaaagcataaagctcaaatgaaatgtatgcattcacatttagaaaagtgaattgaagtttcaagttttaaagttcattgcaattaaacttccaaagaaagttctacagtgtcctaagtgctaagtgcttattacattttattaagctttttggaatctttgtaccaaaattttaaaaaagggagtttttgatagttgtgtgtatgtgtgtgtggggtggggggatggtaagagaaaagagagaaacactgaaaagaaggaaagatggttaaacattttcccactcattctgaattaattaatttggagcacaaaattcaaagcatggacatttagaagaaagatgtttggcgtagcagagttaaatctcaaataggctattaaaaaagtctacaacatagcagatctgttttgtggtttggaatattaaaaaacttcatgtaattttattttaaaatttcatagctgtacttcttgaatataaaaaatcatgccagtatttttaaaggcattagagtcaactacacaaagcaggcttgcccagtacatttaaattttttggcacttgccattccaaaatattatgccccaccaaggctgagacagtgaatttgggctgctgtagcctatttttttagattgagaaatgtgtagctgcaaaaataatcatgaaccaatctggatgcctcattatgtcaaccaggtccagatgtgctataatctgtttttacgtatgtaggcccagtcgtcatcagatgcttgcggcaaaagaaagctgtgtttatatggaagaaagtaaggtgcttggagtttacctggcttatttaatatgcttataacctagttaaagaaaggaaaagaaaacaaaaaacgaatgaaaataactgaatttggaggctggagtaatcagattactgctttaatcagaaaccctcattgtgtttctaccggagagagaatgtatttgctgacaaccattaaagtcagaagttttactccaggttattgcaataaagtataatgtttattaaatgcttcatttgtatgtcaaagctttgactctataagcaaattgcttttttccaaaacaaaaagatgtctcaggtttgttttgtgaattttctaaaagctttcatgtcccagaacttagcctttacctgtgaagtgttactacagccttaatattttcctagtagatctatattagatcaaatagttgcatagcagtatatgttaatttgtgtgtttttagctgtgacacaactgtgtgattaaaaggtatactttagtagacatttataactcaaggataccttcttatttaatcttttcttatttttgtactttatcatgaatgcttttagtgtgtgcataatagctacagtgcatagttgtagacaaagtacattctggggaaacaacatttatatgtagcctttactgtttgatataccaaattaaaaaaaaattgtatctcattacttatactgggacaccattaccaaaataataaaaatcactttcataatcttgaaaaaa

SEQ ID NO: 349 - DNA, 2072 bp, Homo sapiens
cgcggtcggcgcgagaacaagcagggtggcgcgggtccgggcatgaagctgggccgggccgtgctgggcctgctgctgctggcgccgtccgtggtgcaggcggtggagcccatcagcctgggactggccctggccggcgtcctcaccggctacatctacccgcgtctctactgcctcttcgccgagtgctgcgggcagaagcggagccttagccgggaggcactgcagaaggatctggacgacaacctctttggacagcatcttgcaaagaaaatcatcttaaatgccgtgtttggtttcataaacaacccaaagcccaagaaacctctcacgctctccctgcacgggtggacaggcaccggcaaaaatttcgtcagcaagatcatcgcagagaatatttacgagggtggtctgaacagtgactatgtccacctgtttgtggccacattgcactttccacatgcttcaaacatcaccttgtacaaggatcagttacagttgtggattcgaggcaacgtgagtgcctgtgcgaggtccatcttcatatttgatgaaatggataagatgcatgcaggcctcatagatgccatcaagcctttcctcgactattatgacctggtggatggggtctcctaccagaaagccatgttcatatttctcagcaatgctggagcagaaaggatcacagatgtggctttggatttctggaggagtggaaagcagagggaagacatcaagctcaaagacattgaacacgcgttgtctgtgtcggttttcaataacaagaacagtggcttctggcacagcagcttaattgaccggaacctcattgattattttgttcccttcctccccctggaatacaaacacctaaaaatgtgtatccgagtggaaatgcagtcccgaggctatgaaattgatgaagacattgtaagcagagtggctgaggagatgacatttttccccaaagaggagagagttttctcagataaaggctgcaaaacggtgttcaccaagttagattattactacgatgattgacagtcatgattggcagccggagtcactgcctggagttggaaaagaaacaacactcagtccttccacacttccacccccagctcctttccctggaagaggaatccagtgaatgttcctgtttgatgtgacaggaattctccctggcattgtttccaccccctggtgcctgcaggccacccagggaccacgggcgaggacgtgaagcctcccgaacacgcacagaaggaaggagccagctcccagcccactcatcgcagggctcatgattttttacaaattatgttttaattccaagtgtttctgtttcaaggaaggatgaataagttttattgaaaatgtggtaactttatttaaaatgatttttaacattatgagagactgctcagattctaagttgttggccttgtgtgtgtgtttttttttaagttctcatcattattacatagactgtgaagtatctttactggaaatgagcccaagcacacatgcatggcatttgttcctgaacaggagggcatccctggggatgtggctggagcatgagccagctctgtcccaggatggtcccagcggatgctgccaggggcagtgaagtgtttaggtgaaggacaagtaggtaagaggacgccttcaggcaccacagataagcctgaaacagcctctccaagggttttcaccttagcaacaatgggagctgtgggagtgattttggccacactgtcaacatttgttagaaccagtcttttgaaagaaaagtatttccaacttgtcacttgccagtcactccgttttgcaaaaggtggcccttcactgtccattccaaatagcccacacgtgctctctgctggattctaaattatgtgaattttgccatattaaatcttcctcatttatactattatttgttacgttcaatcagaatccccgaaacctcctataaagcttagctgccccttctgaggatgctgagaacggtgtctttctttataaatgcaaatggctaccgttttacaataaaattttgcatgtgc

SEQ ID NO: 350 - DNA, 1883 bp, Homo sapiens
ccgggccggggtgccagcgcccgccttcccgtttcctcccgttccgcagcgcgcccacggcctgtgaccccggcgaccgctccccagtgacgagagagcggggccgggcgctgctccggcctgacctgcgaagggacctcggtccagtcccctgttgcgccgcgcccccgtccgtccgtgcgcgggccagtcaggggccagtgtctcgagcggtcgaggtcgcagacctagaggcgccccacaggccggcccggggcgctgggagcgccggccgcgggccgggtggggatgcctctgcacgtgaagtggccgttccccgcggtgccgccgctcacctggaccctggccagcagcgtcgtcatgggcttggtgggcacctacagctgcttctggaccaagtacatgaaccacctgaccgtgcacaacagggaggtgctgtacgagctcatcgagaagcgaggcccggccacgcccctcatcaccgtgtccaatcaccagtcctgcatggacgaccctcatctctgggggatcctgaaactccgccacatctggaacctgaagttgatgcgttggacccctgcagctgcagacatctgcttcaccaaggagctacactcccacttcttcagcttgggcaagtgtgtgcctgtgtgccgaggagcagaatttttccaagcagagaatgaggggaaaggtgttctagacacaggcaggcacatgccaggtgctggaaaaagaagagagaaaggagatggcgtctaccagaaggggatggacttcattttggagaagctcaaccatggggactgggtgcatatcttcccagaagggaaagtgaacatgagttccgaattcctgcgtttcaagtggggaatcgggcgcctgattgctgagtgtcatctcaaccccatcatcctgcccctgtggcatgtcggaatgaatgacgtccttcctaacagtccgccctacttcccccgctttggacagaaaatcactgtgctgatcgggaagcccttcagtgccctgcctgtactcgagcggctccgggcggagaacaagtcggctgtggagatgcggaaagccctgacggacttcattcaagaggaattccagcatctgaagactcaggcagagcagctccacaaccacctccagcctgggagataggccttgcttgctgccttctggattcttggcccgcacagagctggggctgagggatggactgatgcttttagctcaaacgtggcttttagacagatttgttcatagaccctctcaagtgccctctccgagctggtaggcattccagctcctccgtgcttcctcagttacacaaaggacctcagctgcttctcccacttggccaagcagggaggaagaagcttaggcagggctctctttccttcttgccttcagatgttctctcccaggggctggcttcaggagggagcatagaaggcaggtgagcaaccagttggctaggggagcagggggcccaccagagctgtggagaggggaccctaagactcctcggcctggctcctacccaccgcccttgccgaaccaggagctgctcactacctcctcagggatggccgttggccacgtcttccttctgcctgagcttcccccccaccacaggccctttcctcaggcaaggtctggcctcaggtgggccgcaggcgggaaaagcagcccttggccagaagtcaagcccagccacgtggagcctagagtgagggcctgaggtctggctgcttgcccccatgctggcgccaacaacttctccatcctttctgcctctcaacatcacttgaatcctagggcctgggttttcatgtttttgaaacagaaccataaagcatatgtgttggcttgtt

SEQ ID NO: 351 - DNA, 2697 bp, Homo sapiens
tggatatgggactcctgtttgtggcctgcctctcttccgagtcttccagtgcagtccagataacgatctctgagagtctcttgagaccactgaagcaagaggcttcaaggtttgttctaggcttctctagttggcaggtcttccccgatcccaccccctcccccagggctgccaggcgtattcctgcctgggcctcctggcacaagagataaaatgaacagggttactcccagtaactggtccaggagataccagcagagagggagtaggagagaagaaacatgtcagggtgctcacaggagtagtggggggaggttttgctatttccagattcttaagccaacaaaagtgccttcatattttctgtctggaagacagaaagcccagaaggagcccagaagcaacagtttgagagaggcgcttctgcggccaagtggataagaggagcggcctgcaaccatgggacagggtgagccaagccagcgctcgacagggcttgctggactgtatgcagcccccgcagcatcacctgttttcattaaaggaagtgggatggatgccctgggtatcaagagctgtgactttcaggcagcaagaaacaatgaggagcaccacaccaaggccctcagctcccggcgcctctttgtgaggagggggcagcccttcaccatcatcctgtacttccgcgctccagtccgtgcatttctgcctgccctgaagaaggtggccctcactgcacaaactggagagcagccttccaagatcaacaggacccaagccacattcccaatttccagtctgggggaccgaaagtggtggagtgcagtggtggaggagagagatgcccagtcctggaccatctctgtgaccacacctgcggacgctgtcattggccactactcgcttctgctgcaggtctcaggcaggaagcaactcctcttgggtcagttcacactgctttttaacccctggaatagagaggatgctgttttcctgaagaatgaggctcagcgcatggagtacttgttgaaccagaatggtctcatctacctgggtacagctgactgcatccaggcagagtcctgggactttggccagttcgagggggatgtcattgacctcagcctgcgcttgctgagcaaggacaagcaggtagagaagtggagccagccggtgcacgtggcccgtgtgttgggtgccttgctgcattttctcaaggagcagagggtcctgcccaccccgcagacccaggccacccaggaaggggccttgctgaacaagcgccggggcagcgtgcccatcctgcggcagtggctcaccggccgaggccgacctgtgtatgatggccaggcctgggtgttggctgctgttgcttgcacagtgctgcgatgcctgggaatccctgcccgcgtggtgaccacgtttgcctcagcacagggcaccggtgggcgtcttctcatagatgaatactataatgaggagggacttcagaacggagaaggccagagaggcagaatctggatcttccagacttccacagagtgctggatgacgcggcctgccttgccccagggttatgatggatggcagattctcgacccaagtgctcctaatggaggtggagtcctggggtcctgtgatctggtgccggtcagagcagtcaaggaggggaccgtggggctgaccccagcagtgtcagacctttttgctgccataaatgcctcatgtgtggtctggaagtgctgtgaggatgggacactggagttgactgactccaacacaaagtatgttggcaacaacatcagcaccaagggtgtgggcagtgaccgctgcgaggacatcactcagaactacaagtatcctgaagggtctcttcaggaaaaagaggtgctggagagagtcgagaaagagaaaatggaacgtgagaaagacaacggcatccgtcctcccagtctcgagactgccagtcctctgtacctgctcttgaaagcacccagctccctacccctgagaggggatgcccagatctcagtgacgctggttaatcacagtgagcaggagaaggcagtgcagctggcaattggggtccaggctgtacactacaacggtgtccttgctgccaagctctggaggaagaagctgcacctcacgctcagtgccaacctggaaaagataataaccatcggcctgttcttctccaattttgagcgaaacccacccgagaacaccttccttagactcaccgccatggcaacacactctgaatccaaccttagctgctttgctcaggaagacattgccatttgtagaccacaccttgccatcaagatgccagagaaagcagagcagtatcaacccctcacagcctcagtcagcctccagaactccctagatgcccccatggaggactgtgtgatctccatcctgggaagggggctcattcacagagagaggagctacagattccgttcagtgtggcctgaaaacaccatgtgtgccaagttccagttcacgccaacacatgtggggctccagagactcactgtggaagtggactgcaacatgttccagaacctaaccaactataaaagcgtcaccgtggtagcccctgaactatcagcttaaacttccagctctatcaccactctcctgccaacccttgttctacaatctaaaccaaacatgtgctaggaagag

SEQ ID NO: 352 - DNA, 2751 bp, Homo sapiens
gggagcttccggattgagccggaagtccccccagagcggatgccgcggcgggcctgtgggagcggggtcatcttctctctgctgctgtagctgccatgggcaaaagagaccgagcggaccgcgacaagaagaaatccaggaagcggcactatgaggatgaagaggatgatgaagaggacgccccggggaacgaccctcaggaagcggttccctcggcggcggggaagcaggtggatgagtcaggcaccaaagtggatgaatatggagccaaggactacaggctgcaaatgccgctgaaggacgaccacacctccaggcccctctgggtggctcccgatggccatatcttcttggaagccttctctccagtttacaaatatgcccaagacttcttggtggctattgcagagccagtgtgccgaccaacccatgtgcatgagtacaaactaactgcctactccttgtatgcagctgtcagcgttgggctgcaaaccagtgacatcaccgagtacctcaggaagctcagcaagactggagtccctgatggaattatgcagtttattaagttgtgtactgtcagctatggaaaagtcaagctggtcttgaagcacaacagatacttcgttgaaagttgccaccctgatgtaatccagcatcttctccaggaccccgtgatccgagaatgccgcttaagaaactctgaaggggaggccactgagctcatcacagagactttcacaagcaaatctgccatttctaagactgctgaaagcagtggtgggccctccacttcccgagtgacagatccacagggtaaatctgacatccccatggacctgtttgacttctatgagcaaatggacaaggatgaagaagaagaagaagagacacagacagtgtcttttgaagtcaagcaggaaatgattgaggaactccagaaacgttgcatccacctggagtaccctctgttggcagaatatgacttccggaatgattctgtcaaccctgatatcaacattgacctaaagcccacagctgtcctcagaccctatcaggagaagagcttgcgaaagatgtttggaaacgggcgtgcacgttcgggggtcattgttcttccctgcggtgctggaaagtccctggttggtgtgactgctgcatgcactgtcagaaaacgctgtctggtgctgggcaactcagctgtttctgtggagcagtggaaagcccagttcaagatgtggtccaccattgacgacagccagatctgccggttcacctccgatgccaaggacaagcccatcggctgctccgttgccattagcacctactccatgctgggccacaccaccaaaaggtcctgggaggccgagcgagtcatggagtggctcaagacccaggagtggggcctcatgatcctggatgaagtgcacaccataccagccaagatgttccgaagggtgctcaccatcgtgcaggcccactgtaagctgggtttgactgcgaccctcgtccgcgaagatgacaaaattgtggatttaaattttctgattgggcctaagctctacgaagccaactggatggagctgcagaataatggctacatcgccaaagtccagtgtgctgaggtctggtgccctatgtctcctgaattttaccgggaatatgtggcaatcaaaaccaagaaacgaatcttgctgtacaccatgaaccccaacaaatttagagcttgccagtttctgatcaagtttcatgaaaggaggaatgacaagattattgtctttgctgacaatgtgtttgccctaaaggaatatgccattcgactgaacaaaccctatatctacggacctacgtctcagggggaaaggatgcaaattctccagaatttcaagcacaaccccaaaattaacaccatcttcatatccaaggtaggtgacacttcgtttgatctgccggaagcaaatgtcctcattcagatctcatcccatggtggctccaggcgtcaggaagcccaaaggctagggcgggtgcttcgagctaaaaaagggatggttgcagaagagtacaatgcctttttctactcactggtatcccaggacacacaggaaatggcttactcaaccaagcggcagagattcttggtagatcaaggttatagcttcaaggtgatcacgaaactcgctggcatggaggaggaagacttggcgttttcgacaaaagaagagcaacagcagctcttacagaaagtcctggcagccactgacctggatgccgaggaggaggtggtggctggggaatttggctccagatccagccaggcatctcggcgctttggcaccatgagttctatgtctggggccgacgacactgtgtacatggagtaccactcatcgcggagcaaggcgcccagcaaacatgtacacccgctcttcaagcgctttaggaaatgatgcttaggcagggtacttcgttcaagaccggcgcttggcacccttgttggaaagggattttcagcataacattttccttccacctctttgaccttccctccagcgttggccaaattgtgctgaggaagatgcatcaagggcttggctgtgccttcataggtcatctagggttttataaaggaggaggagacaatattttttcaaactttttggggagtggggtcatttctgtatataaaaaatgttaatatttaaggtgtatttatgttaccgttctgaataaacagaatggaccattgaaccagta

SEQ ID NO: 353 - DNA, 2217 bp, Homo sapiens
tgctgtactgagagagaatgttacataacattgagaactagtacaagtaaatattaaagtgaagtgaccatttcctacacaagctcattcagaggaggatgaagaccattttggaggaagaaaagcacccttattaagaattgcagcaagtaagccaacaaggtcttttcaggatgattttcttatatcaagtggtacatttcattttatttacttcagtttctggtgaatgtgtgactcagttgttgaaggacacctgctttgaaggaggggacattactacggtcttcacaccaagcgccaagtactgccaggtagtctgcacttaccacccaagatgtttactcttcactttcacggcggaatcaccatctgaggatcccacccgatggtttacttgtgtcctgaaagacagtgttacagaaacactgccaagagtgaataggacagcagcgatttctgggtattctttcaagcaatgctcacaccaaataagcgcttgcaacaaagacatttatgtggacctagacatgaagggcataaactataacagctcagttgccaagagtgctcaagaatgccaagaaagatgcacggatgacgtccactgccactttttcacgtacgccacaaggcagtttcccagcctggagcatcgtaacatttgtctactgaagcacacccaaacagggacaccaaccagaataacgaagctcgataaagtggtgtctggattttcactgaaatcctgtgcactttctaatctggcttgtattagggacattttccctaatacggtgtttgcagacagcaacatcgacagtgtcatggctcccgatgcttttgtctgtggccgaatctgcactcatcatcccggttgcttgttttttaccttcttttcccaggaatggcccaaagaatctcaaagaaatctttgtctccttaaaacatctgagagtggattgcccagtacacgcattaaaaagagcaaagctctttctggtttcagtctacaaagctgcaggcacagcatcccagtgttctgccattcttcattttaccatgacactgatttcttgggagaagaactggatattgttgctgcaaaaagtcacgaggcctgccagaaactgtgcaccaatgccgtccgctgccagttttttacctataccccagcccaagcatcctgcaacgaagggaagggcaagtgttacttaaagctttcttcaaacggatctccaactaaaatacttcacgggagaggaggcatctctggatacacattaaggttgtgtaaaatggataatgagtgtaccaccaaaatcaagcccaggatcgttggaggaactgcgtctgttcgtggtgagtggccgtggcaggtgaccctgcacacaacctcacccactcagagacacctgtgtggaggctccatcattggaaaccagtggatattaacagccgctcactgtttctatggggtagagtcacctaagattttgcgtgtctacagtggcattttaaatcaatctgaaataaaagaggacacatctttctttggggttcaagaaataataatccatgatcagtataaaatggcagaaagcgggtatgatattgccttgttgaaactggaaaccacagtgaattacacagattctcaacgacccatatgcctgccttccaaaggagatagaaatgtaatatacactgattgctgggtgactggatgggggtacagaaaactaagagacaaaatacaaaatactctccagaaagccaagatacccttagtgaccaacgaagagtgccagaagagatacagaggacataaaataacccataagatgatctgtgccggctacagggaaggagggaaggacgcttgcaagggagattcgggaggccctctgtcctgcaaacacaatgaggtctggcatctggtaggcatcacgagctggggcgaaggctgtgctcaaagggagcggccaggtgtttacaccaacgtggtcgagtacgtggactggattctggagaaaactcaagcagtgtgaatgggttcccaggggccattggagtccctgaaggacccaggatttgctgggagagggtgttgagttcactgtgccagcatgcttcctccacagtaacacgctgaaggggcttggtgtttgtaagaaaatgctagaagaaaacaaactgtcacaagttgttatgtcc

SEQ ID NO: 354 - DNA, 3833 bp, Homo sapiens
ctttcccgagtccgtttgaggaagtccccgaggcgcacagagcaagcccacgcgagggcacctctggaggggagcgcctgcaggaccttgtaaagtcaaaaatgtcagaaacttccaggaccgcctttggaggcagaagagcagttccacccaataactctaatgcagcggaagatgacctgcccacagtggagcttcagggcgtggtgccccggggcgtcaacctgcaagagtttcttaatgtcacgagcgttcacctgttcaaggagagatgggacactaacaaggtggaccaccacactgacaagtatgaaaacaacaagctgattgtccgcagagggcagtctttctatgtgcagattgacctcagtcgtccatatgaccccagaagggatctcttcagggtggaatacgtcattggtcgctacccacaggagaacaagggaacctacatcccagtgcctatagtctcagagttacaaagtggaaagtggggggccaagattgtcatgagagaggacaggtctgtgcggctgtccatccagtcttcccccaaatgtattgtggggaaattccgcatgtatgttgctgtctggactccctatggcgtacttcgaaccagtcgaaacccagaaacagacacgtacattctcttcaatccttggtgtgaagatgatgctgtgtatctggacaatgagaaagaaagagaagagtatgtcctgaatgacatcggggtaattttttatggagaggtcaatgacatcaagaccagaagctggagctatggtcagtttgaagatggcatcctggacacttgcctgtatgtgatggacagagcacaaatggacctctctggaagagggaatcccatcaaagtcagccgtgtggggtctgcaatggtgaatgccaaagatgacgaaggtgtcctcgttggatcctgggacaatatctatgcctatggcgtccccccatcggcctggactggaagcgttgacattctattggaataccggagctctgagaatccagtccggtatggccaatgctgggtttttgctggtgtctttaacacatttttacgatgccttggaataccagcaagaattgttaccaattatttctctgcccatgataatgatgccaatttgcaaatggacatcttcctggaagaagatgggaacgtgaattccaaactcaccaaggattcagtgtggaactaccactgctggaatgaagcatggatgacaaggcctgaccttcctgttggatttggaggctggcaagctgtggacagcaccccccaggaaaatagcgatggcatgtatcggtgtggccccgcctcggttcaagccatcaagcacggccatgtctgcttccaatttgatgcaccttttgtttttgcagaggtcaacagcgacctcatttacattacagctaagaaagatggcactcatgtggtggaaaatgtggatgccacccacattgggaaattaattgtgaccaaacaaattggaggagatggcatgatggatattactgatacttacaaattccaagaaggtcaagaagaagagagattggccctagaaactgccctgatgtacggagctaaaaagcccctcaacacagaaggtgtcatgaaatcaaggtccaacgttgacatggactttgaagtggaaaatgctgtgctgggaaaagacttcaagctctccatcaccttccggaacaacagccacaaccgttacaccatcacagcttatctctcagccaacatcaccttctacaccggggtcccgaaggcagagttcaagaaggagacgttcgacgtgacgctggagcccttgtccttcaagaaagaggcggtgctgatccaagccggcgagtacatgggtcagctgctggaacaagcgtccctgcacttctttgtcacagctcgcatcaatgagaccagggatgttctggccaagcaaaagtccaccgtgctaaccatccctgagatcatcatcaaggtccgtggcactcaggtagttggttctgacatgactgtgacagttcagtttaccaatcctttaaaagaaaccctgcgaaatgtctgggtacacctggatggtcctggagtaacaagaccaatgaagaagatgttccgtgaaatccggcccaactccaccgtgcagtgggaagaagtgtgccggccctgggtctctgggcatcggaagctgatagccagcatgagcagtgactccctgagacatgtgtatggcgagctggacgtgcagattcaaagacgaccttccatgtgaatgcacaggaagctgagatgaaccctggcatttggcctcttgtagtcttggctaaggaaattctaacgcaaaaatagctcttgctttgacttaggtgtgaagacccagacaggactgcagagggccccagagtggagatcccacatatttcaaaaacatacttttccaaacccaggctattcggcaaggaagttagtttttaatctctccaccttccaaagagtgctaagcattagctttaattaagctctcatagctcataagagtaacagtcatcatttatcatcacaaatggctacatctccaaatatcagtgggctctcttaccagggagatttgctcaatacctggcctcatttaaaacaagacttcagattccccactcagccttttgggaataatagcacatgatttgggctctagaattccagtcccctttctcggggtcaggttctaccctccatgtgagaatatttttcccaggactagagcacaacataatttttatttttggcaaagccagaaaaagatctttcattttgcacctgcagccaagcaaatgcctgccaaattttagatttaccttgttagaagaggtggccccatattaacaaattgcatttgtgggaaacttaaccacctacaaggagataagaaagcaggtgcaacactcaagtctattgaataatgtagttttgtgatgcattttatagaatgtgtcacactgtggcctgatcagcaggagccaatatcccttactttaaccctttctgggatgcaatactaggaagtaaagtgaagaatttatctctttagttagtgattatatttcacccatctctcaggaatcatctcctttgcagaatgatgcaggttcaggtcccctttcagagatataataagcccaacaagttgaagaagctggcggatctagtgaccagatatatagaaggactgcagccactgattctctcttgtccttcacatcaccattttgagacctcagcttggcactcaggtgctgaagggtaatatggactcagccttgcaaatagccagtgctagttctgacccaaccacagaggatgctgacatcatttgtattatgttccaaggctactacagagaaggctgcctgctatgtatttgcaaggctgatttatggtcagaatttccctctgatatgtctagggtgtgatttaggtcagtagactgtgattcttagcaaaaaatgaacagtgataagtatactgggggcaaaatcagaatggaatgctctggtctatataaccacatttctgagcctttgagactgttcctgagccttcagcactaacctatgagggtgagctggtcccctctatatatacatcatacttaactttactaagtaatctcacagcatttgccaagtctcccaatatccaattttaaaatgaaatgcattttgctagacagttaaactggcttaacttagtatattattattaattacaatgtaatagaagcttaaaataaagttaaactgattat

SEQ ID NO: 355 - DNA, 6914 bp, Homo sapiens
tcattgcagctgggacagcccggagtgtggttagcagctcggcaagcgctgcccaggtcctggggtggtggcagccagcgggagcaggaaaggaagcatgttcccaggctgcccacgcctctgggtcctggtggtcttgggcaccagctgggtaggctgggggagccaagggacagaagcggcacagctaaggcagttctacgtggctgctcagggcatcagttggagctaccgacctgagcccacaaactcaagtttgaatctttctgtaacttcctttaagaaaattgtctacagagagtatgaaccatattttaagaaagaaaaaccacaatctaccatttcaggacttcttgggcctactttatatgctgaagtcggagacatcataaaagttcactttaaaaataaggcagataagcccttgagcatccatcctcaaggaattaggtacagtaaattatcagaaggtgcttcttaccttgaccacacattccctgcagagaagatggacgacgctgtggctccaggccgagaatacacctatgaatggagtatcagtgaggacagtggacccacccatgatgaccctccatgcctcacacacatctattactcccatgaaaatctgatcgaggatttcaactctgggctgattgggcccctgcttatctgtaaaaaagggaccctaactgagggtgggacacagaagacgtttgacaagcaaatcgtgctactatttgctgtgtttgatgaaagcaagagctggagccagtcatcatccctaatgtacacagtcaatggatatgtgaatgggacaatgccagatataacagtttgtgcccatgaccacatcagctggcatctgctgggaatgagctcggggccagaattattctccattcatttcaacggccaggtcctggagcagaaccatcataaggtctcagccatcacccttgtcagtgctacatccactaccgcaaatatgactgtgggcccagagggaaagtggatcatatcttctctcaccccaaaacatttgcaagctgggatgcaggcttacattgacattaaaaactgcccaaagaaaaccaggaatcttaagaaaataactcgtgagcagaggcggcacatgaagaggtgggaatacttcattgctgcagaggaagtcatttgggactatgcacctgtaataccagcgaatatggacaaaaaatacaggtctcagcatttggataatttctcaaaccaaattggaaaacattataagaaagttatgtacacacagtacgaagatgagtccttcaccaaacatacagtgaatcccaatatgaaagaagatgggattttgggtcctattatcagagcccaggtcagagacacactcaaaatcgtgttcaaaaatatggccagccgcccctatagcatttaccctcatggagtgaccttctcgccttatgaagatgaagtcaactcttctttcacctcaggcaggaacaacaccatgatcagagcagttcaaccaggggaaacctatacttataagtggaacatcttagagtttgatgaacccacagaaaatgatgcccagtgcttaacaagaccatactacagtgacgtggacatcatgagagacatcgcctctgggctaataggactacttctaatctgtaagagcagatccctggacaggcgaggaatacagagggcagcagacatcgaacagcaggctgtgtttgctgtgtttgatgagaacaaaagctggtaccttgaggacaacatcaacaagttttgtgaaaatcctgatgaggtgaaacgtgatgaccccaagttttatgaatcaaacatcatgagcactatcaatggctatgtgcctgagagcataactactcttggattctgctttgatgacactgtccagtggcacttctgtagtgtggggacccagaatgaaattttgaccatccacttcactgggcactcattcatctatggaaagaggcatgaggacaccttgaccctcttccccatgcgtggagaatctgtgacggtcacaatggataatgttggaacttggatgttaacttccatgaattctagtccaagaagcaaaaagctgaggctgaaattcagggatgttaaatgtatcccagatgatgatgaagactcatatgagatttttgaacctccagaatctacagtcatggctacacggaaaatgcatgatcgtttagaacctgaagatgaagagagtgatgctgactatgattaccagaacagactggctgcagcattaggaattaggtcattccgaaactcatcattgaaccaggaagaagaagagttcaatcttactgccctagctctggagaatggcactgaattcgtttcttcgaacacagatataattgttggttcaaattattcttccccaagtaatattagtaagttcactgtcaataaccttgcagaacctcagaaagccccttctcaccaacaagccaccacagctggttccccactgagacacctcattggcaagaactcagttctcaattcttccacagcagagcattccagcccatattctgaagaccctatagaggatcctctacagccagatgtcacagggatacgtctactttcacttggtgctggagaattcagaagtcaagaacatgctaagcgtaagggacccaaggtagaaagagatcaagcagcaaagcacaggttctcctggatgaaattactagcacataaagttgggagacacctaagccaagacactggttctccttccggaatgaggccctgggaggaccttcctagccaagacactggttctccttccagaatgaggccctgggaggaccctcctagtgatctgttactcttaaaacaaagtaactcatctaagattttggttgggagatggcatttggcttctgagaaaggtagctatgaaataatccaagatactgatgaagacacagctgttaacaattggctgatcagcccccagaatgcctcacgtgcttggggagaaagcacccctcttgccaacaagcctggaaagcagagtggccacccaaagtttcctagagttagacataaatctctacaagtaagacaggatggaggaaagagtagactgaagaaaagccagtttctcattaagacacgaaaaaagaaaaaagagaagcacacacaccatgctcctttatctccgaggacctttcaccctctaagaagtgaagcctacaacacattttcagaaagaagacttaagcattcgttggtgcttcataaatccaatgaaacatctcttcccacagacctcaatcagacattgccctctatggattttggctggatagcctcacttcctgaccataatcagaattcctcaaatgacactggtcaggcaagctgtcctccaggtctttatcagacagtgcccccagaggaacactatcaaacattccccattcaagaccctgatcaaatgcactctacttcagaccccagtcacagatcctcttctccagagctcagtgaaatgcttgagtatgaccgaagtcacaagtccttccccacagatataagtcaaatgtccccttcctcagaacatgaagtctggcagacagtcatctctccagacctcagccaggtgaccctctctccagaactcagccagacaaacctctctccagacctcagccacacgactctctctccagaactcattcagagaaacctttccccagccctcggtcagatgcccatttctccagacctcagccatacaaccctttctccagacctcagccatacaaccctttctttagacctcagccagacaaacctctctccagaactcagtcagacaaacctttctccagccctcggtcagatgcccctttctccagacctcagccatacaaccatttctctagacttcagccagacaaacctctctccagaactcagccatatgactctctctccagaactcagtcagacaaacctttccccagccctcggtcagatgcccatttctccagacctcagccatacaaccctttctctagacttcagccagacaaacctctctccagaactcagtcaaacaaacctttccccagccctcggtcagatgcccctttctccagaccccagccatacaaccctttctctagacctcagccagacaaacctctctccagaactcagtcagacaaacctttccccagacctcagtgagatgcccctctttgcagatctcagtcaaattccccttaccccagacctcgaccagatgacactttctccagaccttggtgagacagatctttccccaaactttggtcagatgtccctttccccagacctcagccaggtgactctctctccagacatcagtgacaccacccttctcccggatctcagccagatatcacctcctccagaccttgatcagatattctacccttctgaatctagtcagtcattgcttcttcaagaatttaatgagtcttttccttatccagaccttggtcagatgccatctccttcatctcctactctcaatgatacttttctatcaaaggaatttaatccactggttatagtgggcctcagtaaagatggtacagattacattgagatcattccaaaggaagaggtccagagcagtgaagatgactatgctgaaattgattatgtgccctatgatgacccctacaaaactgatgttaggacaaacatcaactcctccagagatcctgacaacattgcagcatggtacctccgcagcaacaatggaaacagaagaaattattacattgctgctgaagaaatatcctgggattattcagaatttgtacaaagggaaacagatattgaagactctgatgatattccagaagataccacatataagaaagtagtttttcgaaagtacctcgacagcacttttaccaaacgtgatcctcgaggggagtatgaagagcatctcggaattcttggtcctattatcagagctgaagtggatgatgttatccaagttcgttttaaaaatttagcatccagaccgtattctctacatgcccatggactttcctatgaaaaatcatcagagggaaagacttatgaagatgactctcctgaatggtttaaggaagataatgctgttcagccaaatagcagttatacctacgtatggcatgccactgagcgatcagggccagaaagtcctggctctgcctgtcgggcttgggcctactactcagctgtgaacccagaaaaagatattcactcaggcttgataggtcccctcctaatctgccaaaaaggaatactacataaggacagcaacatgcctgtggacatgagagaatttgtcttactatttatgacctttgatgaaaagaagagctggtactatgaaaagaagtcccgaagttcttggagactcacatcctcagaaatgaaaaaatcccatgagtttcacgccattaatgggatgatctacagcttgcctggcctgaaaatgtatgagcaagagtgggtgaggttacacctgctgaacataggcggctcccaagacattcacgtggttcactttcacggccagaccttgctggaaaatggcaataaacagcaccagttaggggtctggccccttctgcctggttcatttaaaactcttgaaatgaaggcatcaaaacctggctggtggctcctaaacacagaggttggagaaaaccagagagcagggatgcaaacgccatttcttatcatggacagagactgtaggatgccaatgggactaagcactggtatcatatctgattcacagatcaaggcttcagagtttctgggttactgggagcccagattagcaagattaaacaatggtggatcttataatgcttggagtgtagaaaaacttgcagcagaatttgcctctaaaccttggatccaggtggacatgcaaaaggaagtcataatcacagggatccagacccaaggtgccaaacactacctgaagtcctgctataccacagagttctatgtagcttacagttccaaccagatcaactggcagatcttcaaagggaacagcacaaggaatgtgatgtattttaatggcaattcagatgcctctacaataaaagagaatcagtttgacccacctattgtggctagatatattaggatctctccaactcgagcctataacagacctacccttcgattggaactgcaaggttgtgaggtaaatggatgttccacacccctgggtatggaaaatggaaagatagaaaacaagcaaatcacagcttcttcgtttaagaaatcttggtggggagattactgggaacccttccgtgcccgtctgaatgcccagggacgtgtgaatgcctggcaagccaaggcaaacaacaataagcagtggctagaaattgatctactcaagatcaagaagataacggcaattataacacagggctgcaagtctctgtcctctgaaatgtatgtaaagagctataccatccactacagtgagcagggagtggaatggaaaccatacaggctgaaatcctccatggtggacaagatttttgaaggaaatactaataccaaaggacatgtgaagaactttttcaaccccccaatcatttccaggtttatccgtgtcattcctaaaacatggaatcaaagtattgcacttcgcctggaactctttggctgtgatatttactagaattgaacattcaaaaacccctggaagagactctttaagacctcaaaccatttagaatgggcaatgtattttacgctgtgttaaatgttaacagttttccactatttctctttcttttctattagtgaataaaattttatac

SEQ ID NO: 356 - DNA, 2478 bp, Homo sapiens
agtcccatggggaatgtcaacaggcaggggcagcactgcagagatttcatcatggtctcccaggccctcaggctcctctgccttctgcttgggcttcagggctgcctggctgcaggcggggtcgctaaggcctcaggaggagaaacacgggacatgccgtggaagccggggcctcacagagtcttcgtaacccaggaggaagcccacggcgtcctgcaccggcgccggcgcgccaacgcgttcctggaggagctgcggccgggctccctggagagggagtgcaaggaggagcagtgctccttcgaggaggcccgggagatcttcaaggacgcggagaggacgaagctgttctggatttcttacagtgatggggaccagtgtgcctcaagtccatgccagaatgggggctcctgcaaggaccagctccagtcctatatctgcttctgcctccctgccttcgagggccggaactgtgagacgcacaaggatgaccagctgatctgtgtgaacgagaacggcggctgtgagcagtactgcagtgaccacacgggcaccaagcgctcctgtcggtgccacgaggggtactctctgctggcagacggggtgtcctgcacacccacagttgaatatccatgtggaaaaatacctattctagaaaaaagaaatgccagcaaaccccaaggccgaattgtggggggcaaggtgtgccccaaaggggagtgtccatggcaggtcctgttgttggtgaatggagctcagttgtgtggggggaccctgatcaacaccatctgggtggtctccgcggcccactgtttcgacaaaatcaagaactggaggaacctgatcgcggtgctgggcgagcacgacctcagcgagcacgacggggatgagcagagccggcgggtggcgcaggtcatcatccccagcacgtacgtcccgggcaccaccaaccacgacatcgcgctgctccgcctgcaccagcccgtggtcctcactgaccatgtggtgcccctctgcctgcccgaacggacgttctctgagaggacgctggccttcgtgcgcttctcattggtcagcggctggggccagctgctggaccgtggcgccacggccctggagctcatggtgctcaacgtgccccggctgatgacccaggactgcctgcagcagtcacggaaggtgggagactccccaaatatcacggagtacatgttctgtgccggctactcggatggcagcaaggactcctgcaagggggacagtggaggcccacatgccacccactaccggggcacgtggtacctgacgggcatcgtcagctggggccagggctgcgcaaccgtgggccactttggggtgtacaccagggtctcccagtacatcgagtggctgcaaaagctcatgcgctcagagccacgcccaggagtcctcctgcgagccccatttccctagcccagcagccctggcctgtggagagaaagccaaggctgcgtcgaactgtcctggcaccaaatcccatatattcttctgcagttaatggggtagaggagggcatgggagggagggagaggtggggagggagacagagacagaaacagagagagacagagacagagagagactgagggagagactctgaggacatggagagagactcaaagagactccaagattcaaagagactaatagagacacagagatggaatagaaaagatgagaggcagaggcagacaggcgctggacagaggggcaggggagtgccaaggttgtcctggaggcagacagcccagctgagcctccttacctcccttcagccaagccccacctgcacgtgatctgctggccctcaggctgctgctctgccttcattgctggagacagtagaggcatgaacacacatggatgcacacacacacacgccaatgcacacacacagagatatgcacacacacggatgcacacacagatggtcacacagagatacgcaaacacaccgatgcacacgcacatagagatatgcacacacagatgcacacacagatatacacatggatgcacgcacatgccaatgcacgcacacatcagtgcacacggatgcacagagatatgcacacaccgatgtgcgcacacacagatatgcacacacatggatgagcacacacacaccaagtgcgcacacacaccgatgtacacacacagatgcacacacagatgcacacacaccgatgctgactccatgtgtgctgtcctctgaaggcggttgtttagctctcacttttctggttcttatccattatcatcttcacttcagacaattcagaagcatcaccatgcatggtggcgaatgcccccaaactctcccccaaatgtatttctcccttcgctgggtgccgggctgcacagactattccccacctgcttcccagcttcacaataaacggctgcgtctcctccgcacacctgtggtgcctgccaccc

SEQ ID NO: 357 - DNA, 2804 bp, Homo sapiens
accactttcacaatctgctagcaaaggttatgcagcgcgtgaacatgatcatggcagaatcaccaggcctcatcaccatctgccttttaggatatctactcagtgctgaatgtacagtttttcttgatcatgaaaacgccaacaaaattctgaatcggccaaagaggtataattcaggtaaattggaagagtttgttcaagggaaccttgagagagaatgtatggaagaaaagtgtagttttgaagaagcacgagaagtttttgaaaacactgaaagaacaactgaattttggaagcagtatgttgatggagatcagtgtgagtccaatccatgtttaaatggcggcagttgcaaggatgacattaattcctatgaatgttggtgtccctttggatttgaaggaaagaactgtgaattagatgtaacatgtaacattaagaatggcagatgcgagcagttttgtaaaaatagtgctgataacaaggtggtttgctcctgtactgagggatatcgacttgcagaaaaccagaagtcctgtgaaccagcagtgccatttccatgtggaagagtttctgtttcacaaacttctaagctcacccgtgctgagactgtttttcctgatgtggactatgtaaattctactgaagctgaaaccattttggataacatcactcaaagcacccaatcatttaatgacttcactcgggttgttggtggagaagatgccaaaccaggtcaattcccttggcaggttgttttgaatggtaaagttgatgcattctgtggaggctctatcgttaatgaaaaatggattgtaactgctgcccactgtgttgaaactggtgttaaaattacagttgtcgcaggtgaacataatattgaggagacagaacatacagagcaaaagcgaaatgtgattcgaattattcctcaccacaactacaatgcagctattaataagtacaaccatgacattgcccttctggaactggacgaacccttagtgctaaacagctacgttacacctatttgcattgctgacaaggaatacacgaacatcttcctcaaatttggatctggctatgtaagtggctggggaagagtcttccacaaagggagatcagctttagttcttcagtaccttagagttccacttgttgaccgagccacatgtcttcgatctacaaagttcaccatctataacaacatgttctgtgctggcttccatgaaggaggtagagattcatgtcaaggagatagtgggggaccccatgttactgaagtggaagggaccagtttcttaactggaattattagctggggtgaagagtgtgcaatgaaaggcaaatatggaatatataccaaggtatcccggtatgtcaactggattaaggaaaaaacaaagctcacttaatgaaagatggatttccaaggttaattcattggaattgaaaattaacagggcctctcactaactaatcactttcccatcttttgttagatttgaatatatacattctatgatcattgctttttctctttacaggggagaatttcatattttacctgagcaaattgattagaaaatggaaccactagaggaatataatgtgttaggaaattacagtcatttctaagggcccagcccttgacaaaattgtgaagttaaattctccactctgtccatcagatactatggttctccactatggcaactaactcactcaattttccctccttagcagcattccatcttcccgatcttctttgcttctccaaccaaaacatcaatgtttattagttctgtatacagtacaggatctttggtctactctatcacaaggccagtaccacactcatgaagaaagaacacaggagtagctgagaggctaaaactcatcaaaaacactactccttttcctctaccctattcctcaatcttttaccttttccaaatcccaatccccaaatcagtttttctctttcttactccctctctcccttttaccctccatggtcgttaaaggagagatggggagcatcattctgttatacttctgtacacagttatacatgtctatcaaacccagacttgcttccatagtggagacttgcttttcagaacatagggatgaagtaaggtgcctgaaaagtttgggggaaaagtttctttcagagagttaagttattttatatatataatatatatataaaatatataatatacaatataaatatatagtgtgtgtgtgtatgcgtgtgtgtagacacacacgcatacacacatataatggaagcaataagccattctaagagcttgtatggttatggaggtctgactaggcatgatttcacgaaggcaagattggcatatcattgtaactaaaaaagctgacattgacccagacatattgtactctttctaaaaataataataataatgctaacagaaagaagagaaccgttcgtttgcaatctacagctagtagagactttgaggaagaattcaacagtgtgtcttcagcagtgttcagagccaagcaagaagttgaagttgcctagaccagaggacataagtatcatgtctcctttaactagcataccccgaagtggagaagggtgcagcaggctcaaaggcataagtcattccaatcagccaactaagttgtccttttctggtttcgtgttcaccatggaacattttgattatagttaatccttctatcttgaatcttctagagagttgctgaccaactgacgtatgtttccctttgtgaattaataaactggtgttctggttcat

SEQ ID NO: 358 - DNA, 878 bp, Homo sapiens
gtcccgcgggtctgtctcttgcttcaacagtgtttggacggaacagatccggggactctcttccagcctccgaccgccctccgatttcctctccgcttgcaacctccgggaccatcttctcggccatctcctgcttctgggacctgccagcaccgtttttgtggttagctccttcttgccaaccaaccatgagctcccagattcgtcagaattattccaccgacgtggaggcagccgtcaacagcctggtcaatttgtacctgcaggcctcctacacctacctctctctgggcttctatttcgaccgcgatgatgtggctctggaaggcgtgagccacttcttccgcgaattggccgaggagaagcgcgagggctacgagcgtctcctgaagatgcaaaaccagcgtggcggccgcgctctcttccaggacatcaagaagccagctgaagatgagtggggtaaaaccccagacgccatgaaagctgccatggccctggagaaaaagctgaaccaggcccttttggatcttcatgccctgggttctgcccgcacggacccccatctctgtgacttcctggagactcacttcctagatgaggaagtgaagcttatcaagaagatgggtgaccacctgaccaacctccacaggctgggtggcccggaggctgggctgggcgagtatctcttcgaaaggctcactctcaagcacgactaagagccttctgagcccagcgacttctgaagggccccttgcaaagtaatagggcttctgcctaagcctctccctccagccaataggcagctttcttaactatcctaacaagccttggaccaaatggaaataaagctttttgatgcaaaaaaaaaaaaaaaaaaa

SEQ ID NO: 359 - DNA, 1295 bp, Homo sapiens
tttttccagcggatcccccggtggcctcatgtcgcgcagtggaaccgatcctcagcaacgccagcaggcgtcagaggcggacgccgcagcagcaaccttccgggcaaacgaccatcagcatatccgctacaacccgctgcaggatgagtgggtgctggtgtcagctcaccgcatgaagcggccctggcagggtcaagtggagccccagcttctgaagacagtgccccgccatgaccctctcaaccctctgtgtcctggggccatccgagccaacggagaggtgaatccccagtacgatagcaccttcctgtttgacaacgacttcccagctctgcagcctgatgcccccagtccaggacccagtgatcatccccttttccaagcaaagtctgctcgaggagtctgtaaggtcatgtgcttccacccctggtcggatgtaacgctgccactcatgtcggtccctgagatccgggctgttgttgatgcatgggcctcagtcacagaggagctgggtgcccagtacccttgggtgcagatctttgaaaacaaaggtgccatgatgggctgttctaacccccacccccactgccaggtatgggccagcagtttcctgccagatattgcccagcgtgaggagcgatctcagcaggcctataagagtcagcatggagagcccctgctaatggagtacagccgccaggagctactcaggaaggaacgtctggtcctaaccagtgagcactggttagtactggtccccttctgggcaacatggccctaccagacactgctgctgcccgtcggccatgtgcggcggctacctgagctgacccctgctgagcgtgatgatctagcctccatcatgaagaagctcttgaccaagtatgacaacctctttgagacgtcctttccctactccatgggctggcatggggctcccacaggatcagaggctggggccaactggaaccattggcagctgcacgctcattactaccctccgctcctgcgctctgccactgtccggaaattcatggttggctacgaaatgcttgctcaggctcagagggacctcacccctgagcaggctgcagagagactaagggcacttcctgaggttcattaccacctggggcagaaggacagggagacagcaaccatcgcctgaccacgccgaccacagggccttgaatccttttttgttttcaacagtcttgctgaattaagcagaaagggccttgaatcctggcctggaatttgggcagatatagcattaataaaactgtgcatcacaa

SEQ ID NO: 360 - DNA, 2913 bp, Homo sapiens
gtcccagctagagctccagcgcccgctcaggccccactcgaccctctcgggcctcggctacttggactgcggcggaatatggcggctccgatgactcccgcggctcggcccgaggactacgaggcggcgctcaatgccgccctggctgacgtgcccgaactggccagactcctggagatcgacccgtacttgaagccctacgccgtggacttccagcgcaggtataagcagtttagccaaattttgaagaacattggagaaaatgaaggtggtattgataagttttccagaggctatgaatcatttggcgtccacagatgtgctgatggtggtttatactccaaagaatgggccccgggagcagaaggagtttttcttactggagattttaatggttggaatccattttcgtacccatacaaaaaactggattatggaaaatgggagctgtatatcccaccaaagcagaataaatctgtactcgtgcctcatggatccaaattaaaggtagttattactagtaaaagcggagagatcttgtatcgtatttcaccgtgggcaaagtatgtggttcgtgaaggtgataatgtgaattatgattggatacactgggatccagaacactcatatgagtttaagcattccagaccaaagaagccacggagtctaagaatttatgaatctcatgtgggaatttcttcccatgaaggaaaagtagcttcttataaacattttacatgcaatgtactaccaagaatcaaaggccttggatacaactgcattcagttgatggcaatcatggagcatgcttactatgccagctttggttaccaaatcacaagcttctttgcagcttccagccgttatggaacacctgaagagctacaagaactggtagacacagctcattccatgggtatcatagtcctcttagatgtggtacacagccatgcttcaaaaaattcagcagatggattgaatatgtttgatgggacagattcctgttattttcattctggacctagagggactcatgatctttgggatagcagattgtttgcctactccagctgggaagttttaagattccttctgtcaaacataagatggtggttggaagaatatcgctttgatggatttcgttttgatggtgttacgtccatgctttatcatcaccatggagtgggtcaaggtttctcaggtgattacagtgaatatttcggactacaagtagatgaagatgccttgacttacctcatgttggcaaatcatttggttcacacgctgtgtcccgattctataacaatagctgaggatgtatcaggaatgccagctctgtgctctccaatttcccagggagggggtggttttgactatcgactagccatggcaattccagataagtggattcagctacttaaagagtttaaagatgaagactggaacatgggcgatatagtatacacgctcacaaacaggcgctaccttgaaaagtgcattgcttatgcagagagccatgatcaggcattggttggggataagtcgctggcattttggttgatggatgccgaaatgtatacaaacatgagtgtcctgactccttttactccagttattgatcgtggaatacagcttcataaaatgattcgactcattacgcatgggcttggtggagaaggctatctcaatttcatgggtaatgaatttgggcatcctgaatggttagacttcccaagaaaaggaaataatgagagttaccattatgccaggcggcagtttcatttaactgacgacgaccttcttcgctacaagttcctaaataattttgacagggatatgaatagattggaagaaagatatggttggcttgcagctccacaggcctacgtgagtgaaaaacatgaaggcaataagatcattgcttttgaaagagcaggtcttcttttcattttcaacttccatccaagcaagagctacactgactaccgagttggaacagcattgccagggaaattcaaaattgtgctagattcagatgcagcggaatatggagggcatcagagactggaccacagcactgactttttttctgaggcttttgaacataatgggcgtccctattctcttttggtgtacattccaagcagagtggccctcatccttcagaatgtggatctgccgaattgaagaggcctgatttcagctccaccagatgcagatttgtgttttgttttcttgttatcactgtcacacagcttataacatgtatgcttttcagaatacagttgtctagccaagccatcaagtgtctgaaattcaatattggtttatgcaaatacagcaaacttttatttaagtagataggagaatatgtttaaaatattaggaatcctagaccatattttcaagtcatcttagcagctaggattctcaaatggaagtgttatatataatatgttaaaaacattttgctttcctggctaattatttgatccttttaaatccaaatttgaatcatttgtcatgtatgattatttctgttaaatgtacacagtatttaagatggatatttggtggctctatttgttctgatatcttttggtctaaattatgaggtaccaagattgtttctttgtttctttttttcaaattgtgtttagaaatactgtaataaatatgcagtagtgatataaagaattatatccaaggtaatataaaagccattacgtatgaactcatccgtgtctcattttgtgttttattttgtgatctcttgtccactaagtatcttgttaaatgccagtatctcagtctttctgaagccctgaaatggtaattgtagcatttcagaaaatgtctttcatttcaatcaataaaaagcttttgtaaaaaaaaaaaaaaaaaaaaaaaaaa

SEQ ID NO: 361 - DNA, 3088 bp, Homo sapiens
acaaaaaagcttttacgaggtatcagcacttttctttcattagggggaaggcgtgaggaaagtaccaaacagcagcggagttttaaactttaaatagacaggtctgagtgcctgaacttgccttttcattttacttcatcctccaaggagttcaatcacttggcgtgacttcactacttttaagcaaaagagtggtgcccaggcaacatgggtgactggagcgccttaggcaaactccttgacaaggttcaagcctactcaactgctggagggaaggtgtggctgtcagtacttttcattttccgaatcctgctgctggggacagcggttgagtcagcctggggagatgagcagtctgcctttcgttgtaacactcagcaacctggttgtgaaaatgtctgctatgacaagtctttcccaatctctcatgtgcgcttctgggtcctgcagatcatatttgtgtctgtacccacactcttgtacctggctcatgtgttctatgtgatgcgaaaggaagagaaactgaacaagaaagaggaagaactcaaggttgcccaaactgatggtgtcaatgtggacatgcacttgaagcagattgagataaagaagttcaagtacggtattgaagagcatggtaaggtgaaaatgcgaggggggttgctgcgaacctacatcatcagtatcctcttcaagtctatctttgaggtggccttcttgctgatccagtggtacatctatggattcagcttgagtgctgtttacacttgcaaaagagatccctgcccacatcaggtggactgtttcctctctcgccccacggagaaaaccatcttcatcatcttcatgctggtggtgtccttggtgtccctggccttgaatatcattgaactcttctatgttttcttcaagggcgttaaggatcgggttaagggaaagagcgacccttaccatgcgaccagtggtgcgctgagccctgccaaagactgtgggtctcaaaaatatgcttatttcaatggctgctcctcaccaaccgctcccctctcgcctatgtctcctcctgggtacaagctggttactggcgacagaaacaattcttcttgccgcaattacaacaagcaagcaagtgagcaaaactgggctaattacagtgcagaacaaaatcgaatggggcaggcgggaagcaccatctctaactcccatgcacagccttttgatttccccgatgataaccagaattctaaaaaactagctgctggacatgaattacagccactagccattgtggaccagcgaccttcaagcagagccagcagtcgtgccagcagcagacctcggcctgatgacctggagatctagatacaggcttgaaagcatcaagattccactcaattgtggagaagaaaaaaggtgctgtagaaagtgcaccaggtgttaattttgatccggtggaggtggtactcaacagccttattcatgaggcttagaaaacacaaagacattagaatacctaggttcactgggggtgtatggggtagatgggtggagagggaggggataagagaggtgcatgttggtatttaaagtagtggattcaaagaacttagattataaataagagttccattaggtgatacatagataagggctttttctccccgcaaacacccctaagaatggttctgtgtatgtgaatgagcgggtggtaattgtggctaaatatttttgttttaccaagaaactgaaataattctggccaggaataaatacttcctgaacatcttaggtcttttcaacaagaaaaagacagaggattgtccttaagtccctgctaaaacattccattgttaaaatttgcactttgaaggtaagctttctaggcctgaccctccaggtgtcaatggacttgtgctactatatttttttattcttggtatcagtttaaaattcagacaaggcccacagaataagattttccatgcatttgcaaatacgtatattctttttccatccacttgcacaatatcattaccatcactttttcatcattcctcagctactactcacattcatttaatggtttctgtaaacatttttaagacagttgggatgtcacttaacattttttttttttgagctaaagtcagggaatcaagccatgcttaatatttaacaatcacttatatgtgtgtcgaagagtttgttttgtttgtcatgtattggtacaagcagatacagtataaactcacaaacacagatttgaaaataatgcacatatggtgttcaaatttgaacctttctcatggatttttgtggtgtgggccaatatggtgtttacattatataattcctgctgtggcaagtaaagcacactttttttttctcctaaaatgtttttccctgtgtatcctattatggatactggttttgttaattatgattctttattttctctcctttttttaggatatagcagtaatgctattactgaaatgaatttcctttttctgaaatgtaatcattgatgcttgaatgatagaattttagtactgtaaacaggctttagtcattaatgtgagagacttagaaaaaatgcttagagtggactattaaatgtgcctaaatgaattttgcagtaactggtattcttgggttttcctacttaatacacagtaattcagaacttgtattctattatgagtttagcagtcttttggagtgaccagcaactttgatgtttgcactaagattttatttggaatgcaagagaggttgaaagaggattcagtagtacacatacaactaatttatttgaactatatgttgaagacatctaccagtttctccaaatgccttttttaaaactcatcacagaagattggtgaaaatgctgagtatgacacttttcttcttgcatgcatgtcagctacataaacagttttgtacaatgaaaattactaatttgtttgacattccatgttaaactacggtcatgttcagcttcattgcatgtaatgtagacctagtccatcagatcatgtgttctggagagtgttctttattcaataaagttttaatttagtataaacat

SEQ ID NO: 362 - DNA, 2075 bp, Homo sapiens
gccataaaggccgccgcgcgcccacgcgcctcgcttgctgcgcgctgccggcgctccttcctcctcggctcgcgtctcactcagtgtaccttctagtcccgccatggccgctctcacccgggacccccagttccagaagctgcagcaatggtaccgcgagcaccgctccgagctgaacctgcgccgcctcttcgatgccaacaaggaccgcttcaaccacttcagcttgaccctcaacaccaaccatgggcatatcctggtggattactccaagaacctggtgacggaggacgtgatgcggatgctggtggacttggccaagtccaggggcgtggaggccgcccgggagcggatgttcaatggtgagaagatcaactacaccgagggtcgagccgtgctgcacgtggctctgcggaaccggtcaaacacacccatcctggtagacggcaaggatgtgatgccagaggtcaacaaggttctggacaagatgaagtctttctgccagcgtgtccggagcggtgactggaaggggtacacaggcaagaccatcacggacgtcatcaacattggcattggcggctccgacctgggacccctcatggtgactgaagcccttaagccatactcttcaggaggtccccgcgtctggtatgtctccaacattgatggaactcacattgccaaaaccctggcccagctgaaccccgagtcctccctgttcatcattgcctccaagacctttactacccaggagaccatcacgaatgcagagacggcgaaggagtggtttctccaggcggccaaggatccttctgcagtggcgaagcactttgttgccctgtctactaacacaaccaaagtgaaggagtttggaattgaccctcaaaacatgttcgagttctgggattgggtgggaggacgctactcgctgtggtcggccatcggactctccattgccctgcacgtgggttttgacaacttcgagcagctgctctcgggggctcactggatggaccagcacttccgcacgacgcccctggagaagaacgcccccgtcttgctggccctgctgggtatctggtacatcaactgctttgggtgtgagacacacgccatgctgccctatgaccagtacctgcaccgctttgctgcgtacttccagcagggcgacatggagtccaatgggaaatacatcaccaaatctggaacccgtgtggaccaccagacaggccccattgtgtggggggagccagggaccaatggccagcatgctttttaccagctcatccaccaaggcaccaagatgataccctgtgacttcctcatcccggtccagacccagcaccccatacggaagggtctgcatcacaagatcctcctggccaacttcttggcccagacagaggccctgatgaggggaaaatcgacggaggaggcccgaaaggagctccaggctgcgggcaagagtccagaggaccttgagaggctgctgccacataaggtctttgaaggaaatcgcccaaccaactctattgtgttcaccaagctcacaccattcatgcttggagccttggtcgccatgtatgagcacaagatcttcgttcagggcatcatctgggacatcaacagctttgaccagtggggagtggagctgggaaagcagctggctaagaaaatagagcctgagcttgatggcagtgctcaagtgacctctcacgacgcttctaccaatgggctcatcaacttcatcaagcagcagcgcgaggccagagtccaataaactcgtgctcatctgcagcctcctctgtgactcccctttctcttctcgtccctcctccccggagccggcactgcatgttcctggacaccacccagagcaccctctggttgtgggcttggaccacgagcccttagcagggaaggctggtctcccccagcctaacccccagcccctccatgtctatgctccctctgtgttagaattggctgaagtgtttttgtgcagctgacttttctgacccatgttcacgttgttcacatcccatgtagaaaaataaagatgccacggaggaggt

SEQ ID NO: 363 - DNA, 4788 bp, Homo sapiens
tttttagaaaaaaaaaatatatttccctcctgctccttctgcgttcacaagctaagttgtttatctcggctgcggcgggaactgcggacggtggcgggcgagcggctcctctgccagagttgatattcactgatggactccaaagaatcattaactcctggtagagaagaaaaccccagcagtgtgcttgctcaggagaggggagatgtgatggacttctataaaaccctaagaggaggagctactgtgaaggtttctgcgtcttcaccctcactggctgtcgcttctcaatcagactccaagcagcgaagacttttggttgattttccaaaaggctcagtaagcaatgcgcagcagccagatctgtccaaagcagtttcactctcaatgggactgtatatgggagagacagaaacaaaagtgatgggaaatgacctgggattcccacagcagggccaaatcagcctttcctcgggggaaacagacttaaagcttttggaagaaagcattgcaaacctcaataggtcgaccagtgttccagagaaccccaagagttcagcatccactgctgtgtctgctgcccccacagagaaggagtttccaaaaactcactctgatgtatcttcagaacagcaacatttgaagggccagactggcaccaacggtggcaatgtgaaattgtataccacagaccaaagcacctttgacattttgcaggatttggagttttcttctgggtccccaggtaaagagacgaatgagagtccttggagatcagacctgttgatagatgaaaactgtttgctttctcctctggcgggagaagacgattcattccttttggaaggaaactcgaatgaggactgcaagcctctcattttaccggacactaaacccaaaattaaggataatggagatctggttttgtcaagccccagtaatgtaacactgccccaagtgaaaacagaaaaagaagatttcatcgaactctgcacccctggggtaattaagcaagagaaactgggcacagtttactgtcaggcaagctttcctggagcaaatataattggtaataaaatgtctgccatttctgttcatggtgtgagtacctctggaggacagatgtaccactatgacatgaatacagcatccctttctcaacagcaggatcagaagcctatttttaatgtcattccaccaattcccgttggttccgaaaattggaataggtgccaaggatctggagatgacaacttgacttctctggggactctgaacttccctggtcgaacagttttttctaatggctattcaagccccagcatgagaccagatgtaagctctcctccatccagctcctcaacagcaacaacaggaccacctcccaaactctgcctggtgtgctctgatgaagcttcaggatgtcattatggagtcttaacttgtggaagctgtaaagttttcttcaaaagagcagtggaaggacagcacaattacctatgtgctggaaggaatgattgcatcatcgataaaattcgaagaaaaaactgcccagcatgccgctatcgaaaatgtcttcaggctggaatgaacctggaagctcgaaaaacaaagaaaaaaataaaaggaattcagcaggccactacaggagtctcacaagaaacctctgaaaatcctggtaacaaaacaatagttcctgcaacgttaccacaactcacccctaccctggtgtcactgttggaggttattgaacctgaagtgttatatgcaggatatgatagctctgttccagactcaacttggaggatcatgactacgctcaacatgttaggagggcggcaagtgattgcagcagtgaaatgggcaaaggcaataccaggtttcaggaacttacacctggatgaccaaatgaccctactgcagtactcctggatgtttcttatggcatttgctctggggtggagatcatatagacaatcaagtgcaaacctgctgtgttttgctcctgatctgattattaatgagcagagaatgactctaccctgcatgtacgaccaatgtaaacacatgctgtatgtttcctctgagttacacaggcttcaggtatcttatgaagagtatctctgtatgaaaaccttactgcttctctcttcagttcctaaggacggtctgaagagccaagagctatttgatgaaattagaatgacctacatcaaagagctaggaaaagccattgtcaagagggaaggaaactccagccagaactggcagcggttttatcaactgacaaaactcttggattctatgcatgaagtggttgaaaatctccttaactattgcttccaaacatttttggataagaccatgagtattgaattccccgagatgttagctgaaatcatcaccaatcagataccaaaatattcaaatggaaatatcaaaaaacttctgtttcatcaaaagtgactgccttaataagaatggttgccttaaagaaagtcgaattaatagcttttattgtataaactatcagtttgtcctgtagaggttttgttgttttattttttattgttttcatctgttgttttgttttaaatacgcactacatgtggtttatagagggccaagacttggcaacagaagcagttgagtcgtcatcacttttcagtgatgggagagtagatggtgaaatttattagttaatatatcccagaaattagaaaccttaatatgtggacgtaatctccacagtcaaagaaggatggcacctaaaccaccagtgcccaaagtctgtgtgatgaactttctcttcatactttttttcacagttggctggatgaaattttctagactttctgttggtgtatcccccccctgtatagttaggatagcatttttgatttatgcatggaaacctgaaaaaaagtttacaagtgtatatcagaaaagggaagttgtgccttttatagctattactgtctggttttaacaatttcctttatatttagtgaactacgcttgctcattttttcttacataattttttattcaagttattgtacagctgtttaagatgggcagctagttcgtagctttcccaaataaactctaaacattaatcaatcatctgtgtgaaaatgggttggtgcttctaacctgatggcacttagctatcagaagaccacaaaaattgactcaaatctccagtattcttgtcaaaaaaaaaaaaaaaaaagctcatattttgtatatatctgcttcagtggagaattatataggttgtgcaaattaacagtcctaactggtatagagcacctagtccagtgacctgctgggtaaactgtggatgatggttgcaaaagactaatttaaaaaataactaccaagaggccctgtctgtacctaacgccctatttttgcaatggctatatggcaagaaagctggtaaactatttgtctttcaggaccttttgaagtagtttgtataacttcttaaaagttgtgattccagataaccagctgtaacacagctgagagacttttaatcagacaaagtaattcctctcactaaactttacccaaaaactaaatctctaatatggcaaaaatggctagacacccattttcacattcccatctgtcaccaattggttaatctttcctgatggtacaggaaagctcagctactgatttttgtgatttagaactgtatgtcagacatccatgtttgtaaaactacacatccctaatgtgtgccatagagtttaacacaagtcctgtgaatttcttcactgttgaaaattattttaaacaaaatagaagctgtagtagccctttctgtgtgcaccttaccaactttctgtaaactcaaaacttaacatatttactaagccacaagaaatttgatttctattcaaggtggccaaattatttgtgtaatagaaaactgaaaatctaatattaaaaatatggaacttctaatatatttttatatttagttatagtttcagatatatatcatattggtattcactaatctgggaagggaagggctactgcagctttacatgcaatttattaaaatgattgtaaaatagcttgtatagtgtaaaataagaatgatttttagatgagattgttttatcatgacatgttatatattttttgtaggggtcaaagaaatgctgatggataacctatatgatttatagtttgtacatgcattcatacaggcagcgatggtctcagaaaccaaacagtttgctctaggggaagagggagatggagactggtcctgtgtgcagtgaaggttgctgaggctctgacccagtgagattacagaggaagttatcctctgcctcccattctgaccacccttctcattccaacagtgagtctgtcagcgcaggtttagtttactcaatctccccttgcactaaagtatgtaaagtatgtaaacaggagacaggaaggtggtgcttacatccttaaaggcaccatctaatagcgggttactttcacatacagccctcccccagcagttgaatgacaacagaagcttcagaagtttggcaatagtttgcatagaggtaccagcaatatgtaaatagtgcagaatctcataggttgccaataatacactaattcctttctatcctacaacaagagtttatttccaaataaaatgaggacatgtttttgttttctttgaatgctttttgaatgttatttgttattttcagtattttggagaaattatttaataaaaaaacaatcatttgctttttg

SEQ ID NO: 364 - DNA, 2602 bp, Homo sapiens
gccgtgtcgccaccatggctccgcaccgccccgcgcccgcgctgctttgcgcgctgtccctggcgctgtgcgcgctgtcgctgcccgtccgcgcggccactgcgtcgcggggggcgtcccaggcgggggcgccccaggggcgggtgcccgaggcgcggcccaacagcatggtggtggaacaccccgagttcctcaaggcagggaaggagcctggcctgcagatctggcgtgtggagaagttcgatctggtgcccgtgcccaccaacctttatggagacttcttcacgggcgacgcctacgtcatcctgaagacagtgcagctgaggaacggaaatctgcagtatgacctccactactggctgggcaatgagtgcagccaggatgagagcggggcggccgccatctttaccgtgcagctggatgactacctgaacggccgggccgtgcagcaccgtgaggtccagggcttcgagtcggccaccttcctaggctacttcaagtctggcctgaagtacaagaaaggaggtgtggcatcaggattcaagcacgtggtacccaacgaggtggtggtgcagagactcttccaggtcaaagggcggcgtgtggtccgtgccaccgaggtacctgtgtcctgggagagcttcaacaatggcgactgcttcatcctggacctgggcaacaacatccaccagtggtgtggttccaacagcaatcggtatgaaagactgaaggccacacaggtgtccaagggcatccgggacaacgagcggagtggccgggcccgagtgcacgtgtctgaggagggcactgagcccgaggcgatgctccaggtgctgggccccaagccggctctgcctgcaggtaccgaggacaccgccaaggaggatgcggccaaccgcaagctggccaagctctacaaggtctccaatggtgcagggaccatgtccgtctccctcgtggctgatgagaaccccttcgcccagggggccctgaagtcagaggactgcttcatcctggaccacggcaaagatgggaaaatctttgtctggaaaggcaagcaggcaaacacggaggagaggaaggctgccctcaaaacagcctctgacttcatcaccaagatggactaccccaagcagactcaggtctcggtccttcctgagggcggtgagaccccactgttcaagcagttcttcaagaactggcgggacccagaccagacagatggcctgggcttgtcctacctttccagccatatcgccaacgtggagcgggtgcccttcgacgccgccaccctgcacacctccactgccatggccgcccagcacggcatggatgacgatggcacaggccagaaacagatctggagaatcgaaggttccaacaaggtgcccgtggaccctgccacatatggacagttctatggaggcgacagctacatcattctgtacaactaccgccatggtggccgccaggggcagataatctataactggcagggtgcccagtctacccaggatgaggtcgctgcatctgccatcctgactgctcagctggatgaggagctgggaggtacccctgtccagagccgtgtggtccaaggcaaggagcccgcccacctcatgagcctgtttggtgggaagcccatgatcatctacaagggcggcacctcccgcgagggcgggcagacagcccctgccagcacccgcctcttccaggtccgcgccaacagcgctggagccacccgggctgttgaggtattgcctaaggctggtgcactgaactccaacgatgcctttgttctgaaaaccccctcagccgcctacctgtgggtgggtacaggagccagcgaggcagagaagacgggggcccaggagctgctcagggtgctgcgggcccaacctgtgcaggtggcagaaggcagcgagccagatggcttctgggaggccctgggcgggaaggctgcctaccgcacatccccacggctgaaggacaagaagatggatgcccatcctcctcgcctctttgcctgctccaacaagattggacgttttgtgatcgaagaggttcctggtgagctcatgcaggaagacctggcaacggatgacgtcatgcttctggacacctgggaccaggtctttgtctgggttggaaaggattctcaagaagaagaaaagacagaagccttgacttctgctaagcggtacatcgagacggacccagccaatcgggatcggcggacgcccatcaccgtggtgaagcaaggctttgagcctccctcctttgtgggctggttccttggctgggatgatgattactggtctgtggaccccttggacagggccatggctgagctggctgcctgaggaggggcagggcccacccatgtcaccggtcagtgccttttggaactgtccttccctcaaagaggccttagagcgagcagagcagctctgctatgagtgtgtgtgtgtgtgtgtgttgtttcttttttttttttttacagtatccaaaaatagccctgcaaaaattcagagtccttgcaaaattgtctaaaatgtcagtgtttgggaaattaaatccaataaaaacattttgaagtgtg

SEQ ID NO: 365 - DNA, 1856 bp, Homo sapiens
gggagaaccgttcgcggaggaaaggcgaactagtgttgggatggccaccaactgggggagcctcttgcaggataaacagcagctagaggagctggcacggcaggccgtggaccgggccctggctgagggagtattgctgaggacctcacaggagcccacttcctcggaggtggtgagctatgccccattcacgctcttcccctcactggtccccagtgccctgctggagcaagcctatgctgtgcagatggacttcaacctgctagtggatgctgtcagccagaacgctgccttcctggagcaaactctttccagcaccatcaaacaggatgactttaccgctcgtctctttgacatccacaagcaagtcctaaaagagggcattgcccagactgtgttcctgggcctgaatcgctcagactacatgttccagcgcagcgcagatggctccccagccctgaaacagatcgaaatcaacaccatctctgccagctttgggggcctggcctcccggaccccagctgtgcaccgacatgttctcagtgtcctgagtaagaccaaagaagctggcaagatcctctctaataatcccagcaagggactggccctgggaattgccaaagcctgggagctctacggctcacccaatgctctggtgctactgattgctcaagagaaggaaagaaacatatttgaccagcgtgccatagagaatgagctactggccaggaacatccatgtgatccgacgaacatttgaagatatctctgaaaaggggtctctggaccaagaccgaaggctgtttgtggatggccaggaaattgctgtggtttacttccgggatggctacatgcctcgtcagtacagtctacagaattgggaagcacgtctactgctggagaggtcacatgctgccaagtgcccagacattgccacccagctggctgggactaagaaggtgcagcaggagctaagcaggccgggcatgctggagatgttgctccctggccagcctgaggctgtggcccgcctccgcgccacctttgctggcctctactcactggatgtgggtgaagaaggggaccaggccatcgccgaggcccttgctgcccctagccggtttgtgctaaagccccagagagagggtggaggtaacaacctatatggggaggaaatggtacaggccctgaaacagctgaaggacagtgaggagagggcctcctacatcctcatggagaagatcgaacctgagccttttgagaattgcctgctacggcctggcagccctgcccgagtggtccagtgcatttcagagctgggcatctttggggtctatgtcaggcaggaaaagacactcgtgatgaacaagcacgtggggcatctacttcgaaccaaagccatcgagcatgcagatggtggtgtggcagcgggagtggcagtcctggacaacccataccctgtgtgagggcacaaccaggccacgggaccttctatcctctgtatttgtcattcctctcctagccctcctgaggggtatcctcctaaagacctccaaagtttttatggaagggtaaatactggtaccttcccccagctttccatctgaggaccagaaaagttgtgtctcccttagatgagatctagacgcccccaaatccttgagatgtgggtatagctcagggtaagctgctctgaggtaaaggtccatgaaccctgccccactcctgtcagcccctcatcagccttttcagcaggttccagtgcctgacttgggataggactgagtggtaggaggagggggagtggaggggcatagcctttccctaattctgccttaaataaaactgcattgctgt

SEQ ID NO: 366 - DNA, 4264 bp, Homo sapiens
atttcccgccagcaggagccgcgcggtagatgcggtgcttttaggagctccgtccgacagaacggttgggccttgccggctgtcggtatgtcgcgacagagcaccctgtacagcttcttccccaagtctccggcgctgagtgatgccaacaaggcctcggccagggcctcacgcgaaggcggccgtgccgccgctgcccccggggcctctccttccccaggcggggatgcggcctggagcgaggctgggcctgggcccaggcccttggcgcgatccgcgtcaccgcccaaggcgaagaacctcaacggagggctgcggagatcggtagcgcctgctgcccccaccagttgtgacttctcaccaggagatttggtttgggccaagatggagggttacccctggtggccttgtctggtttacaaccacccctttgatggaacattcatccgcgagaaagggaaatcagtccgtgttcatgtacagttttttgatgacagcccaacaaggggctgggttagcaaaaggcttttaaagccatatacaggttcaaaatcaaaggaagcccagaagggaggtcatttttacagtgcaaagcctgaaatactgagagcaatgcaacgtgcagatgaagccttaaataaagacaagattaagaggcttgaattggcagtttgtgatgagccctcagagccagaagaggaagaagagatggaggtaggcacaacttacgtaacagataagagtgaagaagataatgaaattgagagtgaagaggaagtacagcctaagacacaaggatctaggcgaagtagccgccaaataaaaaaacgaagggtcatatcagattctgagagtgacattggtggctctgatgtggaatttaagccagacactaaggaggaaggaagcagtgatgaaataagcagtggagtgggggatagtgagagtgaaggcctgaacagccctgtcaaagttgctcgaaagcggaagagaatggtgactggaaatggctctcttaaaaggaaaagctctaggaaggaaacgccctcagccaccaaacaagcaactagcatttcatcagaaaccaagaatactttgagagctttctctgcccctcaaaattctgaatcccaagcccacgttagtggaggtggtgatgacagtagtcgccctactgtttggtatcatgaaactttagaatggcttaaggaggaaaagagaagagatgagcacaggaggaggcctgatcaccccgattttgatgcatctacactctatgtgcctgaggatttcctcaattcttgtactcctgggatgaggaagtggtggcagattaagtctcagaactttgatcttgtcatctgttacaaggtggggaaattttatgagctgtaccacatggatgctcttattggagtcagtgaactggggctggtattcatgaaaggcaactgggcccattctggctttcctgaaattgcatttggccgttattcagattccctggtgcagaagggctataaagtagcacgagtggaacagactgagactccagaaatgatggaggcacgatgtagaaagatggcacatatatccaagtatgatagagtggtgaggagggagatctgtaggatcattaccaagggtacacagacttacagtgtgctggaaggtgatccctctgagaactacagtaagtatcttcttagcctcaaagaaaaagaggaagattcttctggccatactcgtgcatatggtgtgtgctttgttgatacttcactgggaaagtttttcataggtcagttttcagatgatcgccattgttcgagatttaggactctagtggcacactatcccccagtacaagttttatttgaaaaaggaaatctctcaaaggaaactaaaacaattctaaagagttcattgtcctgttctcttcaggaaggtctgatacccggctcccagttttgggatgcatccaaaactttgagaactctccttgaggaagaatattttagggaaaagctaagtgatggcattggggtgatgttaccccaggtgcttaaaggtatgacttcagagtctgattccattgggttgacaccaggagagaaaagtgaattggccctctctgctctaggtggttgtgtcttctacctcaaaaaatgccttattgatcaggagcttttatcaatggctaattttgaagaatatattcccttggattctgacacagtcagcactacaagatctggtgctatcttcaccaaagcctatcaacgaatggtgctagatgcagtgacattaaacaacttggagatttttctgaatggaacaaatggttctactgaaggaaccctactagagagggttgatacttgccatactccttttggtaagcggctcctaaagcaatggctttgtgccccactctgtaaccattatgctattaatgatcgtctagatgccatagaagacctcatggttgtgcctgacaaaatctccgaagttgtagagcttctaaagaagcttccagatcttgagaggctactcagtaaaattcataatgttgggtctcccctgaagagtcagaaccacccagacagcagggctataatgtatgaagaaactacatacagcaagaagaagattattgattttctttctgctctggaaggattcaaagtaatgtgtaaaattatagggatcatggaagaagttgctgatggttttaagtctaaaatccttaagcaggtcatctctctgcagacaaaaaatcctgaaggtcgttttcctgatttgactgtagaattgaaccgatgggatacagcctttgaccatgaaaaggctcgaaagactggacttattactcccaaagcaggctttgactctgattatgaccaagctcttgctgacataagagaaaatgaacagagcctcctggaatacctagagaaacagcgcaacagaattggctgtaggaccatagtctattgggggattggtaggaaccgttaccagctggaaattcctgagaatttcaccactcgcaatttgccagaagaatacgagttgaaatctaccaagaagggctgtaaacgatactggaccaaaactattgaaaagaagttggctaatctcataaatgctgaagaacggagggatgtatcattgaaggactgcatgcggcgactgttctataactttgataaaaattacaaggactggcagtctgctgtagagtgtatcgcagtgttggatgttttactgtgcctggctaactatagtcgagggggtgatggtcctatgtgtcgcccagtaattctgttgccggaagataccccccccttcttagagcttaaaggatcacgccatccttgcattacgaagactttttttggagatgattttattcctaatgacattctaataggctgtgaggaagaggagcaggaaaatggcaaagcctattgtgtgcttgttactggaccaaatatggggggcaagtctacgcttatgagacaggctggcttattagctgtaatggcccagatgggttgttacgtccctgctgaagtgtgcaggctcacaccaattgatagagtgtttactagacttggtgcctcagacagaataatgtcaggtgaaagtacattttttgttgaattaagtgaaactgccagcatactcatgcatgcaacagcacattctctggtgcttgtggatgaattaggaagaggtactgcaacatttgatgggacggcaatagcaaatgcagttgttaaagaacttgctgagactataaaatgtcgtacattattttcaactcactaccattcattagtagaagattattctcaaaatgttgctgtgcgcctaggacatatggcatgcatggtagaaaatgaatgtgaagaccccagccaggagactattacgttcctctataaattcattaagggagcttgtcctaaaagctatggctttaatgcagcaaggcttgctaatctcccagaggaagttattcaaaagggacatagaaaagcaagagaatttgagaagatgaatcagtcactacgattatttcgggaagtttgcctggctagtgaaaggtcaactgtagatgctgaagctgtccataaattgctgactttgattaaggaattatagactgactacattggaagctttgagttgacttctgaccaaaggtggtaaattcagacaacattatgatctaataaactttattttttaaaaatga

SEQ ID NO: 367 - DNA, 2972 bp, Homo sapiens
ggcacgaggccactgctgtcctcttcagctcaagatggtggcctgccgggcgattggcatcctcagccgcttttctgccttcaggatcctccgctcccgaggttatatatgccgcaattttacagggtcttctgctttgctgaccagaacccatattaactatggagtcaaaggggatgtggcagttgttcgaattaactctcccaattcaaaggtaaatacactgagtaaagagctacattcagagttctcagaagttatgaatgaaatctgggctagtgatcaaatcagaagtgccgtccttatctcatcaaagccaggctgctttattgcaggtgctgatatcaacatgttagccgcttgcaagacccttcaagaagtaacacagctatcacaagaagcacagagaatagttgagaaacttgaaaagtccacaaagcctattgtggctgccatcaatggatcctgcctgggaggaggacttgaggttgccatttcatgccaatacagaatagcaacaaaagacagaaaaacagtattaggtacccctgaagttttgctgggggccttaccaggagcaggaggcacacaaaggctgcccaaaatggtgggtgtgcctgctgctttggacatgatgctgactggtagaagcattcgtgcagacagggcaaagaaaatgggactggttgaccaactggtggaacccctgggaccaggactaaaacctccagaggaacggacaatagaatacctagaagaagttgcaattacttttgccaaaggactagctgataagaagatctctccaaagagagacaagggattggtggaaaaattgacagcgtatgccatgactattccatttgtcaggcaacaggtttacaaaaaagtggaagaaaaagtgcgaaagcagactaaaggcctttatcctgcacctctgaaaataattgatgtggtaaagactggaattgagcaagggagtgatgccggttatctctgtgaatctcagaaatttggagagcttgtaatgaccaaagaatcaaaggccttgatgggactctaccatggtcaggtcctgtgcaagaagaataaatttggagctccacagaaggatgttaagcatctggctattcttggtgcagggctgatgggagcaggcatcgcccaagtctccgtggataaggggctaaagactatacttaaagatgccaccctcactgcgctagaccgaggacagcaacaagtgttcaaaggattgaatgacaaagtgaagaagaaagctctaacatcatttgaaagggattccatcttcagcaacttgactgggcagcttgattaccaaggttttgaaaaggccgacatggtgattgaagctgtgtttgaggaccttagtcttaagcacagagtgctaaaggaagtagaagcggtgattccagatcactgtatctttgccagtaacacatctgctctcccaatcagtgaaatcgctgctgtcagcaaaagacctgagaaggtgattggcatgcactacttctctcccgtggacaagatgcagctgctggagattatcacgaccgagaaaacttccaaagacaccagtgcttcagctgtagcagttggtctcaagcaggggaaggtcatcattgtggttaaggatggacctggcttctatactaccaggtgtcttgcgcccatgatgtctgaagtcatccgaatcctccaggaaggagttgacccgaagaagctggattccctgaccacaagctttggctttcctgtgggtgccgccacactggtggatgaagttggtgtggatgtagcgaaacatgtggcggaagatctgggcaaagtctttggggagcggtttggaggtggaaacccagaactgctgacacagatggtgtccaagggcttcctaggtcgtaaatctgggaagggcttttacatctatcaggagggtgtgaagaggaaggatttgaattctgacatggatagtattttagcgagtctgaagctgcctcctaagtctgaagtctcatcagacgaagacatccagttccgcctggtgacaagatttgtgaatgaggcagtcatgtgcctgcaagaggggatcttggccacacctgcagagggagacatcggagccgtctttgggcttggcttcccgccttgtctgggagggcctttccgctttgtggatctgtatggcgcccagaagatagtggaccggctcaagaaatatgaagctgcctatggaaaacagttcaccccatgccagctgctagctgaccatgctaacagccctaacaagaagttctaccagtgagcaggcctcatgcctcgctcagtcagtgcactaaccccagctgccggcagtgctggttctccaacagagtggtgtctagatttatcagagtaacgagaagacaaactccggcactgggtttgctccctgattaaagtgccttcagccaagaccatctctccctcctggtgaagtgtgacttcgaattagtttgcacttcctattggaaggtagagcccactgctcattgtataagccccgaggcctagagtggcagccaagagccatctgaagccacctctctgcctgttcctcccaagaggccagggtggccaggggtggtgagggcagttctgcacccagccaaacacataacaataaaaaccaaactctgtgtcagcatctttgcccttctggtttaaacgcctccttcaaaaagcaatctggaagaaagccctgtgctttgggggagtaagaatgtgtgtgcagaattctaggcagcaccttagggagggactgggatgagagaaagtgggacctggtgggctcaaccacacacacctgtctgtgcagatgctttgcccaggcttctcaccacggtgtaccgggatattaaacctctttccccagcaaaaaaaaaaaaaaaaaaaaaaaaaaaaaaaaaaaa

SEQ ID NO: 368 - DNA, 2217 bp, Homo sapiens
ccttggctgctttcatctgaagcgccacttctcagaaacacacagagctttagctccgccaaaatgaaacactcattaaacgcacttctcattttcctcatcataacatctgcgtggggtgggagcaaaggcccgctggatcagctagagaaaggaggggaaactgctcagtctgcagatccccagtgggagcagttaaataacaaaaacctgagcatgcctcttctccctgccgacttccacaaggaaaacaccgtcaccaacgactggattccagagggggaggaggacgacgactatctggacctggagaagatattcagtgaagacgacgactacatcgacatcgtcgacagtctgtcagtttccccgacagactctgatgtgagtgctgggaacatcctccagctttttcatggcaagagccggatccagcgtcttaacatcctcaacgccaagttcgctttcaacctctaccgagtgctgaaagaccaggtcaacactttcgataacatcttcatagcacccgttggcatttctactgcgatgggtatgatttccttaggtctgaagggagagacccatgaacaagtgcactcgattttgcattttaaagactttgttaatgccagcagcaagtatgaaatcacgaccattcataatctcttccgtaagctgactcatcgcctcttcaggaggaattttgggtacacactgcggtcagtcaatgacctttatatccagaagcagtttccaatcctgcttgacttcagaactaaagtaagagagtattactttgctgaggcccagatagctgacttctcagaccctgccttcatatcaaaaaccaacaaccacatcatgaagctcaccaagggcctcataaaagatgctctggagaatatagaccctgctacccagatgatgattctcaactgcatctacttcaaaggatcctgggtgaataaattcccagtggaaatgacacacaaccacaacttccggctgaatgagagagaggtagttaaggtttccatgatgcagaccaaggggaacttcctcgcagcaaatgaccaggagctggactgcgacatcctccagctggaatacgtggggggcatcagcatgctaattgtggtcccacacaagatgtctgggatgaagaccctcgaagcgcaactgacaccccgggtggtggagagatggcaaaaaagcatgacaaacagaactcgagaagtgcttctgccgaaattcaagctggagaagaactacaatctagtggagtccctgaagttgatggggatcaggatgctgtttgacaaaaatggcaacatggcaggcatctcagaccaaaggatcgccatcgacctgttcaagcaccaaggcacgatcacagtgaacgaggaaggcacccaagccaccactgtgaccacggtggggttcatgccgctgtccacccaagtccgcttcactgtcgaccgcccctttcttttcctcatctacgagcaccgcaccagctgcctgctcttcatgggaagagtggccaaccccagcaggtcctagaggtggaggtctaggtgtctgaagtgccttgggggcaccctcattttgtttccattccaacaacgagaacagagatgttctggcatcatttacgtagtttacgctaccaatctgaattcgaggcccatatgagaggagcttagaaacgaccaagaagagaggcttgttggaatcaattctgcacaatagcccatgctgtaagctcatagaagtcactgtaactgtagtgtgtctgctgttacctagagggtctcacctccccactcttcacagcaaacctgagcagcgcgtcctaagcacctcccgctccggtgaccccatccttgcacacctgactctgtcactcaagcctttctccaccaggcccctcatctgaataccaagcacagaaatgagtggtgtgactaattccttacctctcccaaggagggtacacaactagcaccattcttgatgtccagggaagaagccacctcaagacatatgaggggtgccctgggctaatgttagggcttaattttctcaaagcctgacctttcaaatccatgatgaatgccatcagtccctcctgctgttgcctccctgtgacctggaggacagtgtgtgccatgtctcccatactagagataaataaatgtagccacatttactgtg

SEQ ID NO: 369 - DNA, 3926 bp, Homo sapiens
aattcttggaagaggagaactggacgttgtgaacagagttagctggtaaatgtcctcttaaaagatccaaaaaatgagacttctagcaaagattatttgccttatgttatgggctatttgtgtagcagaagattgcaatgaacttcctccaagaagaaatacagaaattctgacaggttcctggtctgaccaaacatatccagaaggcacccaggctatctataaatgccgccctggatatagatctcttggaaatgtaataatggtatgcaggaagggagaatgggttgctcttaatccattaaggaaatgtcagaaaaggccctgtggacatcctggagatactccttttggtacttttacccttacaggaggaaatgtgtttgaatatggtgtaaaagctgtgtatacatgtaatgaggggtatcaattgctaggtgagattaattaccgtgaatgtgacacagatggatggaccaatgatattcctatatgtgaagttgtgaagtgtttaccagtgacagcaccagagaatggaaaaattgtcagtagtgcaatggaaccagatcgggaataccattttggacaagcagtacggtttgtatgtaactcaggctacaagattgaaggagatgaagaaatgcattgttcagacgatggtttttggagtaaagagaaaccaaagtgtgtggaaatttcatgcaaatccccagatgttataaatggatctcctatatctcagaagattatttataaggagaatgaacgatttcaatataaatgtaacatgggttatgaatacagtgaaagaggagatgctgtatgcactgaatctggatggcgtccgttgccttcatgtgaagaaaaatcatgtgataatccttatattccaaatggtgactactcacctttaaggattaaacacagaactggagatgaaatcacgtaccagtgtagaaatggtttttatcctgcaacccggggaaatacagccaaatgcacaagtactggctggatacctgctccgagatgtaccttgaaaccttgtgattatccagacattaaacatggaggtctatatcatgagaatatgcgtagaccatactttccagtagctgtaggaaaatattactcctattactgtgatgaacattttgagactccgtcaggaagttactgggatcacattcattgcacacaagatggatggtcgccagcagtaccatgcctcagaaaatgttattttccttatttggaaaatggatataatcaaaatcatggaagaaagtttgtacagggtaaatctatagacgttgcctgccatcctggctacgctcttccaaaagcgcagaccacagttacatgtatggagaatggctggtctcctactcccagatgcatccgtgtcaaaacatgttccaaatcaagtatagatattgagaatgggtttatttctgaatctcagtatacatatgccttaaaagaaaaagcgaaatatcaatgcaaactaggatatgtaacagcagatggtgaaacatcaggatcaattagatgtgggaaagatggatggtcagctcaacccacgtgcattaaatcttgtgatatcccagtatttatgaatgccagaactaaaaatgacttcacatggtttaagctgaatgacacattggactatgaatgccatgatggttatgaaagcaatactggaagcaccactggttccatagtgtgtggttacaatggttggtctgatttacccatatgttatgaaagagaatgcgaacttcctaaaatagatgtacacttagttcctgatcgcaagaaagaccagtataaagttggagaggtgttgaaattctcctgcaaaccaggatttacaatagttggacctaattccgttcagtgctaccactttggattgtctcctgacctcccaatatgtaaagagcaagtacaatcatgtggtccacctcctgaactcctcaatgggaatgttaaggaaaaaacgaaagaagaatatggacacagtgaagtggtggaatattattgcaatcctagatttctaatgaagggacctaataaaattcaatgtgttgatggagagtggacaactttaccagtgtgtattgtggaggagagtacctgtggagatatacctgaacttgaacatggctgggcccagctttcttcccctccttattactatggagattcagtggaattcaattgctcagaatcatttacaatgattggacacagatcaattacgtgtattcatggagtatggacccaacttccccagtgtgtggcaatagataaacttaagaagtgcaaatcatcaaatttaattatacttgaggaacatttaaaaaacaagaaggaattcgatcataattctaacataaggtacagatgtagaggaaaagaaggatggatacacacagtctgcataaatggaagatgggatccagaagtgaactgctcaatggcacaaatacaattatgcccacctccacctcagattcccaattctcacaatatgacaaccacactgaattatcgggatggagaaaaagtatctgttctttgccaagaaaattatctaattcaggaaggagaagaaattacatgcaaagatggaagatggcagtcaataccactctgtgttgaaaaaattccatgttcacaaccacctcagatagaacacggaaccattaattcatccaggtcttcacaagaaagttatgcacatgggactaaattgagttatacttgtgagggtggtttcaggatatctgaagaaaatgaaacaacatgctacatgggaaaatggagttctccacctcagtgtgaaggccttccttgtaaatctccacctgagatttctcatggtgttgtagctcacatgtcagacagttatcagtatggagaagaagttacgtacaaatgttttgaaggttttggaattgatgggcctgcaattgcaaaatgcttaggagaaaaatggtctcaccctccatcatgcataaaaacagattgtctcagtttacctagctttgaaaatgccatacccatgggagagaagaaggatgtgtataaggcgggtgagcaagtgacttacacttgtgcaacatattacaaaatggatggagccagtaatgtaacatgcattaatagcagatggacaggaaggccaacatgcagagacacctcctgtgtgaatccgcccacagtacaaaatgcttatatagtgtcgagacagatgagtaaatatccatctggtgagagagtacgttatcaatgtaggagcccttatgaaatgtttggggatgaagaagtgatgtgtttaaatggaaactggacggaaccacctcaatgcaaagattctacaggaaaatgtgggccccctccacctattgacaatggggacattacttcattcccgttgtcagtatatgctccagcttcatcagttgagtaccaatgccagaacttgtatcaacttgagggtaacaagcgaataacatgtagaaatggacaatggtcagaaccaccaaaatgcttacatccgtgtgtaatatcccgagaaattatggaaaattataacatagcattaaggtggacagccaaacagaagctttattcgagaacaggtgaatcagttgaatttgtgtgtaaacggggatatcgtctttcatcacgttctcacacattgcgaacaacatgttgggatgggaaactggagtatccaacttgtgcaaaaagatagaatcaatcataaagtgcacacctttattcagaactttagtattaaatcagttctcaatttcattttttatgtattgttttactcctttttattcatacgtaaaattttggattaatttgtgaaaatgtaattataagctgagaccggtggctctctt

SEQ ID NO: 370 - DNA, 3580 bp, Homo sapiens
ccgccggaggaccacggctcgccagggctgcggaggaccgaccgtccccacgcctgccgccccgcgaccccgaccgccagcatgatcgccgcgcagctcctggcctattacttcacggagctgaaggatgaccaggtcaaaaagattgacaagtatctgtatgccatgcggctctccgatgaaactctcatagatatcatgactcgcttcaggaaggagatgaagaatggcctctcccgggattttaatccaacagccacagtcaagatgttgccaacattcgtaaggtccattcctgatggctctgaaaagggagatttcattgccctggatcttggtgggtcttcctttcgaattctgcgggtgcaagtgaatcatgagaaaaaccagaatgttcacatggagtccgaggtttatgacaccccagagaacatcgtgcacggcagtggaagccagctttttgatcatgttgctgagtgcctgggagatttcatggagaaaaggaagatcaaggacaagaagttacctgtgggattcacgttttcttttccttgccaacaatccaaaatagatgaggccatcctgatcacctggacaaagcgatttaaagcgagcggagtggaaggagcagatgtggtcaaactgcttaacaaagccatcaaaaagcgaggggactatgatgccaacatcgtagctgtggtgaatgacacagtgggcaccatgatgacctgtggctatgacgaccagcactgtgaagtcggcctgatcatcggcactggcaccaatgcttgctacatggaggaactgaggcacattgatctggtggaaggagacgaggggaggatgtgtatcaatacagaatggggagcctttggagacgatggatcattagaagacatccggacagagtttgacagggagatagaccggggatccctcaaccctggaaaacagctgtttgagaagatggtcagtggcatgtacttgggagagctggttcgactgatcctagtcaagatggccaaggagggcctcttatttgaagggcggatcaccccggagctgctcacccgagggaagtttaacaccagtgatgtgtcagccatcgaaaagaataaggaaggcctccacaatgccaaagaaatcctgacccgcctgggagtggagccgtccgatgatgactgtgtctcagtccagcacgtttgcaccattgtctcatttcgctcagccaacttggtggctgccacactgggcgccatcttgaaccgcctgcgtgataacaagggcacacccaggctgcggaccacggttggtgtcgacggatctctttacaagacgcacccacagtattcccggcgtttccacaagactctaaggcgcttggtgccagactccgatgtgcgcttcctcctctcggagagtggcagcggcaagggggctgccatggtgacggcggtggcctaccgcttggccgagcagcaccggcagatagaggagaccctggctcatttccacctcaccaaagacatgctgctggaggtgaagaagaggatgcgggccgagatggagctggggctgaggaagcagacgcacaacaatgccgtggttaagatgctgccctccttcgtccggagaactcccgacgggaccgagaatggtgacttcttggccctggatcttggaggaaccaatttccgtgtgctgctggtgaaaatccgtagtgggaaaaagagaacggtggaaatgcacaacaagatctacgccattcctattgaaatcatgcagggcactggggaagagctgtttgatcacattgtctcctgcatctctgacttcttggactacatggggatcaaaggccccaggatgcctctgggcttcacgttctcatttccctgccagcagacgagtctggacgcgggaatcttgatcacgtggacaaagggttttaaggcaacagactgcgtgggccacgatgtagtcaccttactaagggatgcgataaaaaggagagaggaatttgacctggacgtggtggctgtggtcaacgacacagtgggcaccatgatgacctgtgcttatgaggagcccacctgtgaggttggactcattgttgggaccggcagcaatgcctgctacatggaggagatgaagaacgtggagatggtggagggggaccaggggcagatgtgcatcaacatggagtggggggcctttggggacaacgggtgtctggatgatatcaggacacactacgacagactggtgaacgaatattccctaaatgctgggaaacaaaggtatgagaagatgatcagtggtatgtacctgggtgaaatcgtccgcaacatcttaatcgacttcaccaagaagggattcctcttccgagggcagatctctgagacgatgaagacccggggcatctttgagaccaagtttctctctcagatcgagagtgaccgattagcactgctccaggtccgggctatcctccagcagctaggtctgaatagcacctgcgatgacagtatcctcgtcaagacagtgtgcggggtggtgtccaggagggccgcacagctgtgtggcgcaggcatggctgcggttgtggataagatccgcgagaacagaggactggaccgtctgaatgtgactgtgggagtggacgggacactctacaagcttcatccacacttctccagaatcatgcaccagacggtgaaggaactgtcaccaaaatgtaacgtgtccttcctcctgtctgaggatggcagcggcaagggggccgccctcatcacggccgtgggcgtgcggttacgcacagaggcaagcagctaagagtccgggatccccagcctactgcctctccagcacttctctcttcaagcggcgaccccctaccctcccagcgagttgcgctgggagacgctggcgccagggcctgccggcgcggggaggaaagcaaaatccaactaatggtatatattgtagggtacagaatagagcgtgtgctgttgataatatctctcacccggatccctcctcacttgccctgccactttgcatggtttgattttgacctggtcccccacgtgtgaagtgtagtggcatccatttctaatgtatgcattcatccaacagagttatttattggctggagatggaaaatcacaccacctgacaggccttctgggcctccaaagcccatccttggggttccccctccctgtgtgaaatgtattatcaccagcagacactgccgggcctccctcccgggggcactgcctgaaggcgagtgtgggcatagcattagctgcttcctcccctcctggcacccactgtggcctggcatcgcatcgtggtgtgtcaatgccacaaaatcgtgtgtccgtggaaccagtcctagccgcgtgtgacagtcttgcattctgtttgtctcgtggggggaggtggacagtcctgcggaaatgtgtcttgtcttccatttggataaaaggaaccaaccaacaaacaatgccatcactggaatttcccaccgctttgtgagccgtgtcgtatgacctagtaaactttgtaccaattc

SEQ ID NO: 371 - DNA, 1536 bp, Homo sapiens
gtgacgcgaggctctgcggagaccaggagtcagactgtaggacgacctcgggtcccacgtgtccccggtactcgccggccggagcccccggcttcccggggccgggggaccttagcggcacccacacacagcctactttccaagcggagccatgtctggtaacggcaatgcggctgcaacggcggaagaaaacagcccaaagatgagagtgattcgcgtgggtacccgcaagagccagcttgctcgcatacagacggacagtgtggtggcaacattgaaagcctcgtaccctggcctgcagtttgaaatcattgctatgtccaccacaggggacaagattcttgatactgcactctctaagattggagagaaaagcctgtttaccaaggagcttgaacatgccctggagaagaatgaagtggacctggttgttcactccttgaaggacctgcccactgtgcttcctcctggcttcaccatcggagccatctgcaagcgggaaaaccctcatgatgctgttgtctttcacccaaaatttgttgggaagaccctagaaaccctgccagagaagagtgtggtgggaaccagctccctgcgaagagcagcccagctgcagagaaagttcccgcatctggagttcaggagtattcggggaaacctcaacacccggcttcggaagctggacgagcagcaggagttcagtgccatcatcctggcaacagctggcctgcagcgcatgggctggcacaaccgggtggggcagatcctgcaccctgaggaatgcatgtatgctgtgggccagggggccttgggcgtggaagtgcgagccaaggaccaggacatcttggatctggtgggtgtgctgcacgatcccgagactctgcttcgctgcatcgctgaaagggccttcctgaggcacctggaaggaggctgcagtgtgccagtagccgtgcatacagctatgaaggatgggcaactgtacctgactggaggagtctggagtctagacggctcagatagcatacaagagaccatgcaggctaccatccatgtccctgcccagcatgaagatggccctgaggatgacccacagttggtaggcatcactgctcgtaacattccacgagggccccagttggctgcccagaacttgggcatcagcctggccaacttgttgctgagcaaaggagccaaaaacatcctggatgttgcacggcagcttaacgatgcccattaactggtttgtggggcacagatgcctgggttgctgctgtccagtgcctacatcccgggcctcagtgccccattctcactgctatctggggagtgattaccccgggagactgaactgcagggttcaagccttccagggatttgcctcaccttggggccttgatgactgccttgcctcctcagtatgtgggggcttcatctctttagagaagtccaagcaacagcctttgaatgtaaccaatcctactaataaaccagttctgaaggtaaaaaaaaaaaaaaaaaaaaaaaaaaaaaaaaaaa

SEQ ID NO: 372 - DNA, 2657 bp, Homo sapiens
gaattccgggccatgagctgccccgtgcccgcctgctgcgcgctgctgctagtcctggggctctgccgggcgcgtccccggaacgcactgctgctcctcgcggatgacggaggctttgagagtggcgcgtacaacaacagcgccatcgccaccccgcacctggacgccttggcccgccgcagcctcctctttcgcaatgccttcacctcggtcagcagctgctctcccagccgcgccagcctcctcactggcctgccccagcatcagaatgggatgtacgggctgcaccaggacgtgcaccacttcaactccttcgacaaggtgcggagcctgccgctgctgctcagccaagctggtgtgcgcacaggcatcatcgggaagaagcacgtggggccggagaccgtgtacccgtttgactttgcgtacacggaggagaatggctccgtcctccaggtggggcggaacatcactagaattaagctgctcgtccggaaattcctgcagactcaggatgaccggcctttcttcctctacgtcgccttccacgacccccaccgctgtgggcactcccagccccagtacggaaccttctgtgagaagtttggcaacggagagagcggcatgggtcgtatcccagactggaccccccaggcctacgacccactggacgtgctggtgccttacttcgtccccaacaccccggcagcccgagccgacctggccgctcagtacaccaccgtcggccgcatggaccaaggagttggactggtgctccaggagctgcgtgacgccggtgtcctgaacgacacactggtgatcttcacgtccgacaacgggatccccttccccagcggcaggaccaacctgtactggccgggcactgctgaacccttactggtgtcatccccggagcacccaaaacgctggggccaagtcagcgaggcctacgtgagcctcctagacctcacgcccaccatcttggattggttctcgatcccgtaccccagctacgccatctttggctcgaagaccatccacctcactggccggtccctcctgccggcgctggaggccgagcccctctgggccaccgtctttggcagccagagccaccacgaggtcaccatgtcctaccccatgcgctccgtgcagcaccggcacttccgcctcgtgcacaacctcaacttcaagatgccctttcccatcgaccaggacttctacgtctcacccaccttccaggacctcctgaaccgcaccacagctggtcagcccacgggctggtacaaggacctccgtcattactactaccgggcgcgctgggagctctacgaccggagccgggacccccacgagacccagaacctggccaccgacccgcgctttgctcagcttctggagatgcttcgggaccagctggccaagtggcagtgggagacccacgacccctgggtgtgcgcccccgacggcgtcctggaggagaagctctctccccagtgccagcccctccacaatgagctgtgaccatcccaggaggcctgtgcacacatcccaggcatgtcccagacacatcccacacgtgtccgtgtggccggccagcctggggagtagtggcaacagcccttccgtccacactcccatccaaggagggttcttccttcctgtggggtcactcttgccattgcctggagggggaccagagcatgtgaccagagcatgtgcccagcccctccaccaccaggggcactgccgtcatggcaggggacacagttgtccttgtgtctgaaccatgtcccagcacgggaattctagacatacgtggtctgcggacagggcagcgcccccagcccatgacaagggagtcttgttttctggcttggtttggggacctgcaaatgggaggcctgaggccctcttcaggctttggcagccacagatacttctgaacccttcacagagagcaggcaggggcttcggtgccgcgtgggcagtacgcaggtcccaccgacactcacctgggagcacggcgcctggctcttaccagcgtctggcctagaggaagcctttgagcgacctttgggcaggtttctgcttcttctgttttgcccatggtcaagtccctgttccccaggcaggtttcagctgattggcagcaggctccctgagtgatgagcttgaacctgtggtgtttctgggcagaagcttatcttttttgagagtgtccgaagatgaaggcatggcgatgcccgtcctctggcttgggttaattcttcggtgacactggcattgctgggtggtgatgcccgtcctctggcttgggttaattcttcggtgacactggcgttgctgggtggcaatgcccgtcctctggcttgggttaattcttcggtgacactggcgttgctgggtggcgatgcccgtcctctggcttgggttaattcttggatgacgtcggcgttgctgggagaatgtgccgttcctgccctgcctccacccacctcgggagcagaagcccggcctggacacccctcggcctggacacccctcgaaggagagggcgcttccttgagtaggtgggctccccttgcccttccctccctatcactccatactggggtgggctggaggaggccacaggccagctattgtaaaagcttttt

SEQ ID NO: 373 - DNA, 2155 bp, Homo sapiens
gtcacatggggtgcgcgcccagactccgacccggaggcggaaccggcagtgcagcccgaagccccgcagtccccgagcacgcgtggccatgcgtcccctgcgcccccgcgccgcgctgctggcgctcctggcctcgctcctggccgcgcccccggtggccccggccgaggccccgcacctggtgcaggtggacgcggcccgcgcgctgtggcccctgcggcgcttctggaggagcacaggcttctgccccccgctgccacacagccaggctgaccagtacgtcctcagctgggaccagcagctcaacctcgcctatgtgggcgccgtccctcaccgcggcatcaagcaggtccggacccactggctgctggagcttgtcaccaccagggggtccactggacggggcctgagctacaacttcacccacctggacgggtacttggaccttctcagggagaaccagctcctcccagggtttgagctgatgggcagcgcctcgggccacttcactgactttgaggacaagcagcaggtgtttgagtggaaggacttggtctccagcctggccaggagatacatcggtaggtacggactggcgcatgtttccaagtggaacttcgagacgtggaatgagccagaccaccacgactttgacaacgtctccatgaccatgcaaggcttcctgaactactacgatgcctgctcggagggtctgcgcgccgccagccccgccctgcggctgggaggccccggcgactccttccacaccccaccgcgatccccgctgagctggggcctcctgcgccactgccacgacggtaccaacttcttcactggggaggcgggcgtgcggctggactacatctccctccacaggaagggtgcgcgcagctccatctccatcctggagcaggagaaggtcgtcgcgcagcagatccggcagctcttccccaagttcgcggacacccccatttacaacgacgaggcggacccgctggtgggctggtccctgccacagccgtggagggcggacgtgacctacgcggccatggtggtgaaggtcatcgcgcagcatcagaacctgctactggccaacaccacctccgccttcccctacgcgctcctgagcaacgacaatgccttcctgagctaccacccgcaccccttcgcgcagcgcacgctcaccgcgcgcttccaggtcaacaacacccgcccgccgcacgtgcagctgttgcgcaagccggtgctcacggccatggggctgctggcgctgctggatgaggagcagctctgggccgaagtgtcgcaggccgggaccgtcctggacagcaaccacacggtgggcgtcctggccagcgcccaccgcccccagggcccggccgacgcctggcgcgccgcggtgctgatctacgcgagcgacgacacccgcgcccaccccaaccgcagcgtcgcggtgaccctgcggctgcgcggggtgccccccggcccgggcctggtctacgtcacgcgctacctggacaacgggctctgcagccccgacggcgagtggcggcgcctgggccggcccgtcttccccacggcagagcagttccggcgcatgcgcgcggctgaggacccggtggccgcggcgccccgccccttacccgccggcggccgcctgaccctgcgccccgcgctgcggctgccgtcgcttttgctggtgcacgtgtgtgcgcgccccgagaagccgcccgggcaggtcacgcggctccgcgccctgcccctgacccaagggcagctggttctggtctggtcggatgaacacgtgggctccaagtgcctgtggacatacgagatccagttctctcaggacggtaaggcgtacaccccggtcagcaggaagccatcgaccttcaacctctttgtgttcagcccagacacaggtgctgtctctggctcctaccgagttcgagccctggactactgggcccgaccaggccccttctcggaccctgtgccgtacctggaggtccctgtgccaagagggcccccatccccgggcaatccatgagcctgtgctgagccccagtgggttgcacctccaccggcagtcagcgagctggggctgcactgtgcccatgctgccctcccatcaccccctttgcaatatattttt

SEQ ID NO: 374 - DNA, 1963 bp, Homo sapiens
cgaacacctccaacatgaagcttcttcatgttttcctgttatttctgtgcttccacttaaggttttgcaaggtcacttatacatctcaagaggatctggtggagaaaaagtgcttagcaaaaaaatatactcacctctcctgcgataaagtcttctgccagccatggcagagatgcattgagggcacctgtgtttgtaaactaccgtatcagtgcccaaagaatggcactgcagtgtgtgcaactaacaggagaagcttcccaacatactgtcaacaaaagagtttggaatgtcttcatccagggacaaagtttttaaataacggaacatgcacagccgaaggaaagtttagtgtttccttgaagcatggaaatacagattcagagggaatagttgaagtaaaacttgtggaccaagataagacaatgttcatatgcaaaagcagctggagcatgagggaagccaacgtggcctgccttgaccttgggtttcaacaaggtgctgatactcaaagaaggtttaagttgtctgatctctctataaattccactgaatgtctacatgtgcattgccgaggattagagaccagtttggctgaatgtacttttactaagagaagaactatgggttaccaggatttcgctgatgtggtttgttatacacagaaagcagattctccaatggatgacttctttcagtgtgtgaatgggaaatacatttctcagatgaaagcctgtgatggtatcaatgattgtggagaccaaagtgatgaactgtgttgtaaagcatgccaaggcaaaggcttccattgcaaatcgggtgtttgcattccaagccagtatcaatgcaatggtgaggtggactgcattacaggggaagatgaagttggctgtgcaggctttgcatctgtggctcaagaagaaacagaaattttgactgctgacatggatgcagaaagaagacggataaaatcattattacctaaactatcttgtggagttaaaaacagaatgcacattcgaaggaaacgaattgtgggaggaaagcgagcacaactgggagacctcccatggcaggtggcaattaaggatgccagtggaatcacctgtgggggaatttatattggtggctgttggattctgactgctgcacattgtctcagagccagtaaaactcatcgttaccaaatatggacaacagtagtagactggatacaccccgaccttaaacgtatagtaattgaatacgtggatagaattattttccatgaaaactacaatgcaggcacttaccaaaatgacatcgctttgattgaaatgaaaaaagacggaaacaaaaaagattgtgagctgcctcgttccatccctgcctgtgtcccctggtctccttacctattccaacctaatgatacatgcatcgtttctggctggggacgagaaaaagataacgaaagagtcttttcacttcagtggggtgaagttaaactaataagcaactgctctaagttttacggaaatcgtttctatgaaaaagaaatggaatgtgcaggtacatatgatggttccatcgatgcctgtaaaggggactctggaggccccttagtctgtatggatgccaacaatgtgacttatgtctggggtgttgtgagttggggggaaaactgtggaaaaccagagttcccaggtttttacaccaaagtggccaattattttgactggattagctaccatgtaggaaggccttttatttctcagtacaatgtataaaattgtgatctctctcttcattctattctttttctctcaagagttccatttaatggaaataaaacggtataattaataattctctaggggggaaaaatgaagcaaatctcattggatatttttaaaggtctccacagagtttatgccatattggaattttgttgtataattctcaaataaatattttggtgaagcat

SEQ ID NO: 375 - DNA, 5611 bp, Homo sapiens
gcgcgaccgtcccgggggtggggccgggcgcagcggcgagaggaggcgaaggtggctgcggtagcagcagcgcggcagcctcggacccagcccggagcgcagggcggccgctgcaggtccccgctcccctccccgtgcgtccgcccatggccgccgccgggcagctgtgcttgctctacctgtcggcggggctcctgtcccggctcggcgcagccttcaacttggacactcgggaggacaacgtgatccggaaatatggagaccccgggagcctcttcggcttctcgctggccatgcactggcaactgcagcccgaggacaagcggctgttgctcgtgggggccccgcgcggagaagcgcttccactgcagagagccaacagaacgggagggctgtacagctgcgacatcaccgcccgggggccatgcacgcggatcgagtttgataacgatgctgaccccacgtcagaaagcaaggaagatcagtggatgggggtcaccgtccagagccaaggtccagggggcaaggtcgtgacatgtgctcaccgatatgaaaaaaggcagcatgttaatacgaagcaggaatcccgagacatctttgggcggtgttatgtcctgagtcagaatctcaggattgaagacgatatggatgggggagattggagcttttgtgatgggcgattgagaggccatgagaaatttggctcttgccagcaaggtgtagcagctacttttactaaagactttcattacattgtatttggagccccgggtacttataactggaaagggattgttcgtgtagagcaaaagaataacactttttttgacatgaacatctttgaagatgggccttatgaagttggtggagagactgagcatgatgaaagtctcgttcctgttcctgctaacagttacttaggtttttctttggactcagggaaaggtattgtttctaaagatgagatcacttttgtatctggtgctcccagagccaatcacagtggagccgtggttttgctgaagagagacatgaagtctgcacatctcctccctgagcacatattcgatggagaaggtctggcctcttcatttggctatgatgtggcggtggtggacctcaacaaggatgggtggcaagatatagttattggagccccacagtattttgatagagatggagaagttggaggtgcagtgtatgtctacatgaaccagcaaggcagatggaataatgtgaagccaattcgtcttaatggaaccaaagattctatgtttggcattgcagtaaaaaatattggagatattaatcaagatggctacccagatattgcagttggagctccgtatgatgacttgggaaaggtttttatctatcatggatctgcaaatggaataaataccaaaccaacacaggttctcaagggtatatcaccttattttggatattcaattgctggaaacatggaccttgatcgaaattcctaccctgatgttgctgttggttccctctcagattcagtaactattttcagatcccggcctgtgattaatattcagaaaaccatcacagtaactcctaacagaattgacctccgccagaaaacagcgtgtggggcgcctagtgggatatgcctccaggttaaatcctgttttgaatatactgctaaccccgctggttataatccttcaatatcaattgtgggcacacttgaagctgaaaaagaaagaagaaaatctgggctatcctcaagagttcagtttcgaaaccaaggttctgagcccaaatatactcaagaactaactctgaagaggcagaaacagaaagtgtgcatggaggaaaccctgtggctacaggataatatcagagataaactgcgtcccattcccataactgcctcagtggagatccaagagccaagctctcgtaggcgagtgaattcacttccagaagttcttccaattctgaattcagatgaacccaagacagctcatattgatgttcacttcttaaaagagggatgtggagacgacaatgtatgtaacagcaaccttaaactagaatataaattttgcacccgagaaggaaatcaagacaaattttcttatttaccaattcaaaaaggtgtaccagaactagttctaaaagatcagaaggatattgctttagaaataacagtgacaaacagcccttccaacccaaggaatcccacaaaagatggcgatgacgcccatgaggctaaactgattgcaacgtttccagacactttaacctattctgcatatagagaactgagggctttccctgagaaacagttgagttgtgttgccaaccagaatggctcgcaagctgactgtgagctcggaaatccttttaaaagaaattcaaatgtcactttttatttggttttaagtacaactgaagtcacctttgacaccccatatctggatattaatctgaagttagaaacaacaagcaatcaagataatttggctccaattacagctaaagcaaaagtggttattgaactgcttttatcggtctcgggagttgctaaaccttcccaggtgtattttggaggtacagttgttggcgagcaagctatgaaatctgaagatgaagtgggaagtttaatagagtatgaattcagggtaataaacttaggtaaacctcttacaaacctcggcacagcaaccttgaacattcagtggccaaaagaaattagcaatgggaaatggttgctttatttggtgaaagtagaatccaaaggattggaaaaggtaacttgtgagccacaaaaggagataaactccctgaacctaacggagtctcacaactcaagaaagaaacgggaaattactgaaaaacagatagatgataacagaaaattttctttatttgctgaaagaaaataccagactcttaactgtagcgtgaacgtgaactgtgtgaacatcagatgcccgctgcgggggctggacagcaaggcgtctcttattttgcgctcgaggttatggaacagcacatttctagaggaatattccaaactgaactacttggacattctcatgcgagccttcattgatgtgactgctgctgccgaaaatatcaggctgccaaatgcaggcactcaggttcgagtgactgtgtttccctcaaagactgtagctcagtattcgggagtaccttggtggatcatcctagtggctattctcgctgggatcttgatgcttgctttattagtgtttatactatggaagtgtggtttcttcaagagaaataagaaagatcattatgatgccacatatcacaaggctgagatccatgctcagccatctgataaagagaggcttacttctgatgcatagtattgatctacttctgtaattgtgtggattctttaaacgctctaggtacgatgacagtgttccccgataccatgctgtaaggatccggaaagaagagcgagagatcaaagatgaaaagtatattgataaccttgaaaaaaaacagtggatcacaaagtggaacagaaatgaaagctactcatagcgggggcctaaaaaaaaaaaagcttcacagtacccaaactgctttttccaactcagaaattcaatttggatttaaaagcctgctcaatccctgaggactgatttcagagtgactacacacagtacgaacctacagttttaactgtggatattgttacgtagcctaaggctcctgttttgcacagccaaatttaaaactgttggaatggatttttctttaactgccgtaatttaactttctgggttgcctttgtttttggcgtggctgacttacatcatgtgttggggaagggcctgcccagttgcactcaggtgacatcctccagatagtgtagctgaggaggcacctacactcacctgcactaacagagtggccgtcctaacctcgggcctgctgcgcagacgtccatcacgttagctgtcccacatcacaagactatgccattggggtagttgtgtttcaacggaaagtgctgtcttaaactaaatgtgcaatagaaggtgatgttgccatcctaccgtcttttcctgtttcctagctgtgtgaatacctgctcacgtcaaatgcatacaagtttcattctccctttcactaaaaacacacaggtgcaacagacttgaatgctagttatacttatttgtatatggtatttattttttcttttctttacaaaccattttgttattgactaacaggccaaagagtctccagtttacccttcaggttggtttaatcaatcagaattagaattagagcatgggagggtcatcactatgacctaaattatttactgcaaaaagaaaatctttataaatgtaccagagagagttgttttaataacttatctataaactataacctctccttcatgacagcctccaccccacaacccaaaaggtttaagaaatagaattataactgtaaagatgtttatttcaggcattggatattttttactttagaagcctgcataatgtttctggatttacatactgtaacattcaggaattcttggagaagatgggtttattcactgaactctagtgcggtttactcactgctgcaaatactgtatattcaggacttgaaagaaatggtgaatgcctatggaactagtggatccaaactgatccagtataagactactgaatctgctaccaaaacagttaatcagtgagtcgagtgttctattttttgttttgtttcctcccctatctgtattcccaaaaattactttggggctaatttaacaagaactttaaattgtgttttaattgtaaaaatggcagggggtggaattattactctatacattcaacagagactgaatagatatgaaagctgattttttttaattaccatgcttcacaatgttaagttatatggggagcaacagcaaacaggtgctaatttgttttggatatagtataagcagtgtctgtgttttgaaagaatagaacacagtttgtagtgccactgttgttttggggggggctttttttctttttccggaaaatccttaaaccttaagatactaaggacgttgttttggttgtacttggaattcttagtcacaaaatatattttgtttacaaaaatttctgtaaaacaggttataacagtgtttaaagtctcagtttcttgcttggggaacttgtgtccctaatgtgttagattgctagattgctaaggagctgatacttgacagttttttagacctgtgttactaaaaaaaagatgaatgtcggaaaagggtgttgggagggtggtcaacaaagaaacaaagatgttatggtgtttagacttatggttgttaaaaatgtcatctcaagtcaagtcactggtctgtttgcatttgatacatttttgtactaactagcattgtaaaattatttcatgattagaaattacctgtggatatttgtataaaagtgtgaaataaattttttataaaagtgttcattgtttcgtaacacagcattgtatatgtgaagcaaactctaaaattataaatgacaacctgaattatctatttcatcaaaaaaaaaaaaaaaaaaaa

SEQ ID NO: 376 - DNA, 6314 bp, Homo sapiens
gtcggcgaggagggtccggccggagttgaaggattgaactttccggctcagtcgcggcggctgcctggtcctcagcagtgcagccccggcgcggagcagggagcctcggcccgcgcccggcgccctcgccctcgccctcgacccgcagccatggtgcccggggtgcccggcgcggtcctgaccctctgcctctggctggcggcctccagcggctgcctggcggccggccccggcgcggctgctgcgcggcggctggacgagtcgctgtctgccgggagcgtccagcgcgctccgtgcgcctccaggtgcctgagcctgcagatcactcgcatctccgccttcttccagcacttccagaacaatggttccctggtttggtgccagaatcacaagcaatgttctaagtgcctggagccctgcaaggaatcaggggacctgaggaaacaccagtgccaaagcttttgtgagcctctcttccccaagaagagctacgaatgcttgaccagctgtgagttcctcaaatacatcctgttggtgaagcagggggactgtccggctcctgagaaagccagtggatttgcggccgcctgtgttgaaagctgcgaagttgacaatgagtgctctggggtgaagaaatgttgttcgaatgggtgtggacacacctgtcaagtacccaagactctgtacaaaggtgtccccctgaagcccagaaaagagttacgatttacagaactgcagtctggacagctggaggttaagtggtcctcgaaattcaatatttctattgagcctgtgatctatgtggtacaaagaagatggaattatggaatccatcctagcgaagatgacgccactcactggcagacagtggcccagaccacagacgagcgagttcaactgactgacataagacccagccgatggtaccagtttcgagtggctgctgtgaatgtgcatggaactcgaggcttcactgcccccagcaaacacttccgttcttccaaagatccatctgccccaccagcaccggctaacctccggctggccaactccaccgtcaacagtgatgggagtgtgaccgtcactatagtttgggatctccccgaggagccggacatccctgtgcatcattacaaggtcttttggagctggatggtcagcagtaagtctcttgtcccaacaaagaagaagcggagaaagactacggatgggtttcaaaattctgtgatcctggagaaactccagccagactgtgactatgttgtggaattgcaagccataacgtactggggacagacacggctgaagagtgcaaaggtgtcccttcacttcacatcgacacatgcaaccaacaacaaagaacagcttgtgaaaactagaaaaggtggaattcaaacacaactcccttttcaaagacgacgacccactcgcccgctggaagtcggagctcccttctatcaggatggccaactgcaagttaaagtctactggaagaagacagaagatcccactgtcaaccgatatcatgtgcggtggtttcctgaagcgtgtgcccacaacagaacaaccggatcagaggcatcatctggcatgacccacgaaaattacataattcttcaagatctgtcattttcctgcaagtataaggtgactgtccaaccaatacggccaaaaagtcactccaaggcagaagctgttttcttcactactccaccatgctctgctcttaaggggaagagccacaagcctattggctgcctgggcgaagcaggtcatgttctttctaaggtgctagctaagcctgagaacctttctgcttcattcatcgtccaggatgtgaacatcaccggtcacttttcttggaagatggccaaggccaatctctatcagcccatgactgggtttcaagtgacttgggctgaggtcactacggaaagcagacagaacagcctacccaacagcattatttcacagtcccagattctgccttccgatcattatgtcctaacagtgcccaatctgagaccatctactctttaccgactggaagtgcaagtgctgaccccaggaggggaggggccggccaccatcaagacgttccggacgccggagctcccaccctcttcagcacacagatctcatcttaagcatcgtcatccacatcattacaagccttctccagaaagatactaaactgttcaaaaagattttgtgaaattgcacagatgtgtaagcttgttgaacttcggccacgagacatgcacacttccagaggcagtgggaactgctcagaggcccggactctcctatgtgactttagtgcaggaagaacttctgtcaatcatggacgcatctggagacaagtgagaaacagtagattggtgaagacagacaccagttccctacaagcatggagaaaatgaagaataggcctgtttaatgctaaattttgttttcatgtatggtgtcgctcatttctattgaattacaacagaactcagttttccctgaatttggagcaccaaactccgccccaaaaaggagagtaacaaatacacaattcacacataacactaagcgtaaatctaatcaataaaatatatttttgactaaattattgattcgatatgaaaaatcaactaagattacacagctttgtttttttgaatctttcctaagatcatttttatcctaggtgatttttaaatgaaaatgtgtaatctaaaatataccagcgaatttaaatctaaaaatgctcctactttaagtaccttgtgctgctctttatgcaaaggtaaatcaaagttccctctataaattatgatttacaaaagacacccaagccagaggaactcaatgaaataagctgctaatcagattttaccttggagaaatgaaaattatttcttggggatgccttttaatatttgatcctattatgtgagagattttcctgatatgttatcttatttatattttcccttattttcctcaatgcagataatagcttttggtgcacttttgtttcaccatctgaaaattcacaaaacttcttgcttcaaatgaaaaaatcccaactattgagcatgtttaaatctttgcagagatttgccttttcttaatcaaagaaaggtctttgtgtgctagaatattattggtaatgttttaaaaattcctttgattgatagagaaggacagttatttgcatttaattcacccatatgctttcaaatctagtatatcttactttttggaaatgttttatgctacaaattagtgccttgtagcatgaacttaagtcaaaacgtgttatcaatatagagtgttgcagtgtatattgtaacaacctaaaacgcagagaagtttaatttaatactgttttttttcttgaaggaatactcacatacatggtttgaaatgtgcatagatatgcatgtctatataattataaatgcatgtgtatatatatgcaaatatatgtacatatacatgtatatacacacagacacatgcatatacatgaatataccttgagcatgaatccctggagaaatcgttttcgtaggctcaccaatggtgagtaaagatacagctcttttaaaggtcataaggataatatattttccccatcaatgctgattctgagaaaagagcaatttatcaaaattaaacactgtaaaagaaaggtgtccatatgtctttacctacctaagtaaaacaggaagaaaatcagtaacattatccttaggttttgacaatggtacttgcttcttgttgttttattgtttcctgaattcatgcagatgcctggccattcctgggaagagtggataactcagaagtcactgtactccacagagcctcactgcagtgtctaaaggtagatgcaaattaaaatgcagggaaaataacttttctgatgttgatgcatgtctttgggaaacacatttataaacatggatacctgataatagatattgaaacccatttcctgtgtgttaaaatatttaaaaagtggatattccaggaatgttttgcagctttgtacaagtaacataaattggacacctcagaatgaaagttcatgttggttctgaatggttcactgcagctcctgtcacaagctgggatggatttatcacattgagttatgaaattacctggttctaagaatttttgagtggcaaaaatagaaaacaatcttcatttgaaaacatccctaagcttgaataaatggataccatagatagcttctcttttttattctggtgtcattaccagcatctgaatttcaagttcttaaaatttcaaaaattaaaatttttcattattagctatccatttatcttttacatgaacttgtcatgaacaaattcaaatgtttatgccagcaaatttttgtactgttgcatagttaaaaatgctgggagtctctgcatagatacaaaatattattaaattattacataaatttaattttataaaatttaatcatgcttcttttgtctggtaatagacattggacagatatttttagttcagatggtgattctgaagcttacatctcccttaaaaaaatctaaagcagctcttatgggcttctaattttaatataaataaataatttaaattttattggtgttattggaagaaaaatgctattaatgggctaataaaaaacatgtgtttctcttatggattttaataagctccagtattattcaaatgatcaaaaatatagttataattttttgaattttaaaaatgtgattgctctaataaagaataaaatctatgctttttaacaaacatagttttggtgcctaattctgtaatatgttttattgaaattagattcatttctctaatgtgagaaaaatatatccagtaatagtattgactgtttaaaaaattgagctcatcaaaaatattgtcatcaaatacaggtggttaatctgacatacattgcagttacatgcattatttttatttacaacatttgctccttaatgatgaatttatctgtgttaccctgtttttctacctggaactccatagaatgatgtttgcaaaccaacatgtgctcttttcagtcattcactgttttaatatgacatggtagagaagataaggtttatggcaggtaattttttgtaatgtgtattaaacgaagttcaaagattagaaatacatctgtgtcctgaaaaccttagatacatagccgactgtatacagaggttcatctcaacctcaacactattgacttttggggctggatagttctctgttgtgggggtttgtcttgtgcactgtaggtttttagtagcatccacactttctcctcaccagatgccagttgcaccctcccccaagttgagacaaccaaaaatgtctccagatattgccagctaccccttgagggatggtacctctggttgagaaccattgctagagaatgatctttactgaatttgccctttataagaaacccagtgaatttctagagcaagtcccaaaaactaagggacagctaagaagttattatggttgacttcaaaggcctaaactgtgttttttatgtccactaaacaacttgattaaaagacggaattttgactcgtgtctgtatcatacaagtacaaatactaattttgccctatgtatccgtaaatgtcatttgtgattttgacttatttatttaatgccctttcttatgccgtgggttttcaagtttactcatttctatggttgcaaataactctaaaacttattatataaactttcatattataggcagaacacaatggctaaatatctgttgcatgtactttaaagtttattataaaatataaacagatatataaagatgttgactcttacctgtgattttgcatggtcagactcggtgtcaggtacggagaggattctcatgactgtcttacctctactgaatattctagtgagttatatgatttacggagtgattaacagaggtctatataaagttacttttcccctttacttaattatattgtagtgtgcagataacaaaactgctaccttctcatccaagtggtctgtagaattcatgtcccttacagtggtcatttaaagtcaatatttatttatgtatgtaataaaaaaagttggatttttgtgtatgtctgtcacattatttagagagaagtaatcttgtaaaaatgttttgtaaaaaacaaaaaagtattgtaaatagtcttgatattctgtgactcattattttcatgttagagtttgtacatactggttcaataataaagtatccttaaaccaga

SEQ ID NO: 377 - DNA, 1487 bp, Homo sapiens
ctagcactctgacctagcagtcaacatgaaggctctcattgttctggggcttgtcctcctttctgttacggtccagggcaaggtctttgaaaggtgtgagttggccagaactctgaaaagattgggaatggatggctacaggggaatcagcctagcaaactggatgtgtttggccaaatgggagagtggttacaacacacgagctacaaactacaatgctggagacagaagcactgattatgggatatttcagatcaatagccgctactggtgtaatgatggcaaaaccccaggagcagttaatgcctgtcatttatcctgcagtgctttgctgcaagataacatcgctgatgctgtagcttgtgcaaagagggttgtccgtgatccacaaggcattagagcatgggtggcatggagaaatcgttgtcaaaacagagatgtccgtcagtatgttcaaggttgtggagtgtaactccagaattttccttcttcagctcattttgtctctctcacattaagggagtaggaattaagtgaaaggtcacactaccattatttccccttcaaacaaataatatttttacagaagcaggagcaaaatatggcctttcttctaagagatataatgttcactaatgtggttattttacattaagcctacaacatttttcagtttgcaaatagaactaatactggtgaaaatttacctaaaaccttggttatcaaatacatctccagtacattccgttcttttttttttttgagacagtctcgctctgtcgcccaggctggagtgcagtggcgcaatctcggctcactgcaacctccacctcccgggttcacgccattctcctgcctcagcctcccgagtagctgggattacgggcgcccgccaccacgcccggctaattttttgtatttttagtagagacagggtttcaccgtgttagccaggatggtctcgatctcctgaccttgtgatccacccacctcggcctcccaaagtgctgggattacaggcgtgagccactgcgcccggccacattcagttcttatcaaagaaataacccagacttaatcttgaatgatacgattatgcccaatattaagtaaaaaatataagaaaaggttatcttaaatagatcttaggcaaaataccagctgatgaaggcatctgatgccttcatctgttcagtcatctccaaaaacagtaaaaataaccactttttgttgggcaatatgaaatttttaaaggagtagaataccaaatgatagaaacagactgcctgaattgagaattttgatttcttaaagtgtgtttctttctaaattgctgttccttaatttgattaatttaattcatgtattatgattaaatctgaggcagatgagcttacaagtattgaaataattactaattaatcacaaatgtgaagttatgcatgatgtaaaaaatacaaacattctaattaaaggctttgcaacac

SEQ ID NO: 378 - DNA, 1418 bp, Homo sapiens
aactgtgcgaaccagacccggcagccttgctcagttcagcatagcggagcggatccgatcggatcggagcacaccggagcaggctcatcgagaaggcgtctgcgagaccatggagaacggatacacctatgaagattataagaacactgcagaatggcttctgtctcatactaagcaccgacctcaagttgcaataatctgtggttctggattaggaggtctgactgataaattaactcaggcccagatctttgactacagtgaaatccccaactttcctcgaagtacagtgccaggtcatgctggccgactggtgtttgggttcctgaatggcagggcctgtgtgatgatgcagggcaggttccacatgtatgaagggtacccactctggaaggtgacattcccagtgagggttttccaccttctgggtgtggacaccctggtagtcaccaatgcagcaggagggctgaaccccaagtttgaggttggagatatcatgctgatccgtgaccatatcaacctacctggtttcagtggtcagaaccctctcagagggcccaatgatgaaaggtttggagatcgtttccctgccatgtctgatgcctacgaccggactatgaggcagagggctctcagtacctggaaacaaatgggggagcaacgtgagctacaggaaggcacctatgtgatggtggcaggccccagctttgagactgtggcagaatgtcgtgtgctgcagaagctgggagcagacgctgttggcatgagtacagtaccagaagttatcgttgcacggcactgtggacttcgagtctttggcttctcactcatcactaacaaggtcatcatggattatgaaagcctggagaaggccaaccatgaagaagtcttagcagctggcaaacaagctgcacagaaattggaacagtttgtctccattcttatggccagcattccactccctgacaaagccagttgacctgccttggagtcgtctggcatctcccacacaagacccaagtagctgctaccttctttggccccttgctggagtcatgtgcctctgtccttaggttgtagcagaaaggaaaagattcctgtccttcacctttcccactttcttctaccagacccttctggtgccagatcctcttctcaaagctgggattacaggtgtgagcatagtgagaccttggcgctacaaaataaagctgttctcattcctgttctttcttacacaagagctggagcccgtgccctaccacacatctgtggagatgcccaggatttgactcgggccttagaactttgcatagcagctgctactagctctttgagataatacattccgaggggctcagttctgccttatctaaatcaccagagaccaaacaaggactaatccaatacctcttgga

SEQ ID NO: 379 - DNA, 4673 bp, Homo sapiens
tttgctcctgctcctccgctcctcctgcgcggggtgctgaaacagcccggggaagtagagccgcctccggggagcccaaccagccgaacgccgccggcgtcagcagccttgcgcggccacagcatgaccgctcgcggcctggcccttggcctcctcctgctgctactgtgtccagcgcaggtgttttcacagtcctgtgtttggtatggagagtgtggaattgcatatggggacaagaggtacaattgcgaatattctggcccaccaaaaccattgccaaaggatggatatgacttagtgcaggaactctgtccaggattcttctttggcaatgtcagtctctgttgtgatgttcggcagcttcagacactaaaagacaacctgcagctgcctctacagtttctgtccagatgtccatcctgtttttataacctactgaacctgttttgtgagctgacatgtagccctcgacagagtcagtttttgaatgttacagctactgaagattatgttgatcctgttacaaaccagacgaaaacaaatgtgaaagagttacaatactacgtcggacagagttttgccaatgcaatgtacaatgcctgccgggatgtggaggccccctcaagtaatgacaaggccctgggactcctgtgtgggaaggacgctgacgcctgtaatgccaccaactggattgaatacatgttcaataaggacaatggacaggcaccttttaccatcactcctgtgttttcagattttccagtccatgggatggagcccatgaacaatgccaccaaaggctgtgacgagtctgtggatgaggtcacagcaccatgtagctgccaagactgctctattgtctgtggccccaagccccagcccccacctcctcctgctccctggacgatccttggcttggacgccatgtatgtcatcatgtggatcacctacatggcgtttttgcttgtgttttttggagcattttttgcagtgtggtgctacagaaaacggtattttgtctccgagtacactcccatcgatagcaatatagctttttctgttaatgcaagtgacaaaggagaggcgtcctgctgtgaccctgtcagcgcagcatttgagggctgcttgaggcggctgttcacacgctgggggtctttctgcgtccgaaaccctggctgtgtcattttcttctcgctggtcttcattactgcgtgttcgtcaggcctggtgtttgtccgggtcacaaccaatccagttgacctctggtcagcccccagcagccaggctcgcctggaaaaagagtactttgaccagcactttgggcctttcttccggacggagcagctcatcatccgggcccctctcactgacaaacacatttaccagccatacccttcgggagctgatgtaccctttggacctccgcttgacatacagatactgcaccaggttcttgacttacaaatagccatcgaaaacattactgcctcttatgacaatgagactgtgacacttcaagacatctgcttggcccctctttcaccgtataacacgaactgcaccattttgagtgtgttaaattacttccagaacagccattccgtgctggaccacaagaaaggggacgacttctttgtgtatgccgattaccacacgcactttctgtactgcgtacgggctcctgcctctctgaatgatacaagtttgctccatgacccttgtctgggtacgtttggtggaccagtgttcccgtggcttgtgttgggaggctatgatgatcaaaactacaataacgccactgcccttgtgattaccttccctgtcaataattactataatgatacagagaagctccagagggcccaggcctgggaaaaagagtttattaattttgtgaaaaactacaagaatcccaatctgaccatttccttcactgctgaacgaagtattgaagatgaactaaatcgtgaaagtgacagtgatgtcttcaccgttgtaattagctatgccatcatgtttctatatatttccctagccttggggcacatcaaaagctgtcgcaggcttctggtggattcgaaggtctcactaggcatcgcgggcatcttgatcgtgctgagctcggtggcttgctccttgggtgtcttcagctacattgggttgcccttgaccctcattgtgattgaagtcatcccgttcctggtgctggctgttggagtggacaacatcttcattctggtgcaggcctaccagagagatgaacgtcttcaaggggaaaccctggatcagcagctgggcagggtcctaggagaagtggctcccagtatgttcctgtcatccttttctgagactgtagcatttttcttaggagcattgtccgtgatgccagccgtgcacaccttctctctctttgcgggattggcagtcttcattgactttcttctgcagattacctgtttcgtgagtctcttggggttagacattaaacgtcaagagaaaaatcggctagacatcttttgctgtgtcagaggtgctgaagatggaacaagcgtccaggcctcagagagctgtttgtttcgcttcttcaaaaactcctattctccacttctgctaaaggactggatgagaccaattgtgatagcaatatttgtgggtgttctgtcattcagcatcgcagtcctgaacaaagtagatattggattggatcagtctctttcgatgccagatgactcctacatggtggattatttcaaatccatcagtcagtacctgcatgcgggtccgcctgtgtactttgtcctggaggaagggcacgactacacttcttccaaggggcagaacatggtgtgcggcggcatgggctgcaacaatgattccctggtgcagcagatatttaacgcggcgcagctggacaactatacccgaataggcttcgccccctcgtcctggatcgacgattatttcgactgggtgaagccacagtcgtcttgctgtcgagtggacaatatcactgaccagttctgcaatgcttcagtggttgaccctgcctgcgttcgctgcaggcctctgactccggaaggcaaacagaggcctcaggggggagacttcatgagattcctgcccatgttcctttcggataaccctaaccccaagtgtggcaaagggggacatgctgcctatagttctgcagttaacatcctccttggccatggcaccagggtcggagccacgtacttcatgacctaccacaccgtgctgcagacctctgctgactttattgacgctctgaagaaagcccgacttatagccagtaatgtcaccgaaaccatgggcattaacggcagtgcctaccgagtatttccttacagtgtgttttatgtcttctacgaacagtacctgaccatcattgacgacactatcttcaacctcggtgtgtccctgggcgcgatatttctggtgaccatggtcctcctgggctgtgagctctggtctgcagtcatcatgtgtgccaccatcgccatggtcttggtcaacatgtttggagttatgtggctctggggcatcagtctgaacgctgtatccttggtcaacctggtgatgagctgtggcatctccgtggagttctgcagccacataaccagagcgttcacggtgagcatgaaaggcagccgcgtggagcgcgcggaagaggcacttgcccacatgggcagctccgtgttcagtggaatcacacttacaaaatttggagggattgtggtgttggcttttgccaaatctcaaattttccagatattctacttcaggatgtatttggccatggtcttactgggagccactcacggattaatatttctccctgtcttactcagttacatagggccatcagtaaataaagccaaaagttgtgccactgaagagcgatacaaaggaacagagcgcgaacggcttctaaatttctagccctctcgcagggcatcctgactgaactgtgtctaagggtcggtcggtttaccactggacgggtgctgcatcggcaaggccaagttgaacaccggatggtgccaaccatcggttgtttggcagcagctttgaacgtagcgcctgtgaactcaggaatgcacagttgacttgggaagcagtattactagatctggaggcaaccacaggacactaaacttctcccagcctcttcaggaaagaaacctcattctttggcaagcaggaggtgacactagatggctgtgaatgtgatccgctcactgacactctgtaaaggccaatcaatgcactgtctgtcctctcctttttaggagtaagccatcccacaagttctataccatatttttagtgacagttgaggttgtagatacactttataacattttatagtttaaagagctttattaatgcaataaattaactttgtacacatttttatataaaaaaacagcaagtgatttcagaatgttgtaggcctcattagagcttggtctccaaaaatctgtttgaaaaaagcaacatgttcttcacagtgttcccctagaaaggaagagatttaattgccagttagatgtggcatgaaatgagggacaaagaaagcatctcgtaggtgtgtctactgggttttaacttatttttctttaataaaatacattgttttcctaaaaaaaaaa

SEQ ID NO: 380 - DNA, 2013 bp, Homo sapiens
aattcctgtcctcaggcgctgtcagatctgtggtttttctacttgaaggacacaatgttttccaaactagcacatttgcagaggtttgctgtacttagtcgcggagttcattcttcagtggcttctgctacatctgttgcaactaaaaaaacagtccaaggccctccaacctctgatgacatttttgaaagggaatataagtatggtgcacacaactaccatcctttacctgtagccctggagagaggaaaaggtatttacttatgggatgtagaaggcagaaaatattttgacttcctgagttcttacagtgctgtcaaccaagggcattgtcaccccaagattgtgaatgctctgaagagtcaagtggacaaattgaccttaacatctagagctttctataataacgtacttggtgaatatgaggagtatattactaaacttttcaactaccacaaagttcttcctatgaatacaggagtggaggctggagagactgcctgtaaactagctcgtaagtggggctataccgtgaagggcattcagaaatacaaagcaaagattgtttttgcagctgggaacttctggggtaggacgttgtctgctatctccagttccacagacccaaccagttacgatggttttggaccatttatgccgggattcgacatcattccctataatgatctgcccgcactggagcgtgctcttcaggatccaaatgtggctgcgttcatggtagaaccaattcagggtgaagcaggcgttgttgttccggatccaggttacctaatgggagtgcgagagctctgcaccaggcaccaggttctctttattgctgatgaaatacagacaggattggccagaactggtagatggctggctgttgattatgaaaatgtcagacctgatatagtcctccttggaaaggccctttctgggggcttataccctgtgtctgcagtgctgtgtgatgatgacatcatgctgaccattaagccaggggagcatgggtccacatacggtggcaatccactaggctgccgagtggccatcgcagcccttgaggttttagaagaagaaaaccttgctgaaaatgcagacaaattgggcattatcttgagaaatgaactcatgaagctaccttctgatgttgtaactgccgtaagaggaaaaggattattaaacgctattgtcattaaagaaaccaaagattgggatgcttggaaggtgtgtctacgacttcgagataatggacttctggccaagccaacccatggcgacattatcaggtttgcgcctccgctggtgatcaaggaggatgagcttcgagagtccattgaaattattaacaagaccatcttgtctttctgagggtagccagctgttttcagtggtccctgggagccagctggagacaggtggtcctgtaaaagctttattcctaatgtgggcacattccactcccatgagtcttcaaaaactttttttttgaatatatttttttcagttgatacataatagaacaacgtttatgaacctgccgtttgctttgtaacgtaactaaataatgtaatggcatctatattcagttgaagtgttttgatgtgcatgtgtacttcctaaggtgaaatgcatctatatacagacagcctctaaatcaagtccttcagtataattgatatatgtttttataatttcctcactggtataagtgtttcatatttgaaaaagttatctctgggtattgcataaaaggcttcatcttataaagtgaaatcattgttattgaattttaggaaggattaatggttaagtgtatataaaatactaatattaagtaaacttcatattggccaacaccagggttgtattctatggatgtcattattttgaattaagaattagtgtttaacattcctaaattgttttgagtgcttgattataatttgtaaaaaatgtttattttcaatacttctttaaatttaaaataaagcttatatttcaaatgtc

SEQ ID NO: 381 - DNA, 1888 bp, Homo sapiens
ccggtgccgggcgaacatggcggcggccaccggaccctcgttttggctggggaatgaaaccctgaaggtgccgctggcgctctttgccttgaaccggcagcgcctgtgtgagcggctgcggaagaaccctgctgtgcaggccggctccatcgtggtcctgcagggcggggaggagactcagcgctactgcaccgacaccggggtcctcttcctccaggagtccttctttcactgggcgttcggtgtcactgagccaggctgctatggtgtcatcgatgttgacactgggaagtcgaccctgtttgtgcccaggcttcctgccagccatgccacctggatgggaaagatccattccaaggagcacttcaaggagaagtatgccgtggacgacgtccagtacgtagatgagattgccagcgtcctgacgtcacagaagccctctgtcctcctcactttgcgtggcgtcaacacggacagcggcagtgtctgcagggaggcctcctttgacggcatcagcaagttcgaagtcaacaataccattcttcacccagagatcgttgagagccgagtgtttaagacggatatggagctggaggttctgcgctataccaataaaatctccagcgaggcccaccgtgaggtaatgaaggctgtaaaagtgggaatgaaagaatatgggttggaaagcctcttcgagcactactgctactcccggggcggcatgcgccacagctcctacacctgcatctgcggcagtggtgagaactcagccgtgctacactacggacacgccggagctcccaacgaccgaacgatccagaatggggatatgtgcctgttcgacatgggcggtgagtattactctgtcgcttccgacatcacctgctcctttccccgcaacggcaagttcactgcagaccagaaggccgtctatgaggcagtgctgctgagctcccgtgccgtcatgggtgccatgaagccaggtgactggtggcctgacatcgaccgcctggctgaccgcatccacctggaggagctggcccacatgggcatcctgagcggcagcgtggacgccatggtccaggctcacctgggggccgtgtttatgcctcacgggcttggccacttcctgggcattgacgtgcacgacgtgggaggctacccagagggcgtggagcgcatcgacgagcccggcctgcggagcctgcgcactgcacggcacctgcagccaggcatggtgctcaccgtggagccgggcatctacttcatcgaccacctcctggatgaggccctggcggacccggcccgcgcctccttccttaaccgcgaggtcctgcagcgctttcgcggttttggcggggtccgcatcgaggaggacgtcgtggtgatcgacagcggcatagagctgctgacctgcgtgccccgcactgtggaagagattgaagcatgcatggcaggctgtgacaaggcctttacccccttctctggccccaagtagagccagccagaaatcccagcgcacctgggggcctggccttgcaacctcttttcgtgatgggcagcctgctggtcagcactccagtagcgagagacggcacccagaatcagatcccagcttcggcatttgatcagaccaaacagtgctgtttcccggggaggaaacacttttttaattacccttttgcaggcaccacctttaatctgttttataccttgcttattaaatgagcgacttaaaatgattgaaaataatgctgtcctttagtagcaagtaaaatgtgtcttgctgtcatttatattccttttcccaggaaagaagcatttctgatactttctgtcaaaaatcaatatgcagaatggcatttgcaataaaaggtttcctaaaatg

SEQ ID NO: 382 - DNA, 2759 bp, Homo sapiens
gcctgactgagagtggatcatgacccatgaagagcaccatgcagccaaaaccctggggattggcaaagccattgctgtcttaacctctggtggagatgcccaaggtatgaatgctgctgtcagggctgtggttcgagttggtatcttcaccggtgcccgtgtcttctttgtccatgagggttatcaaggcctggtggatggtggagatcacatcaaggaagccacctgggagagcgtttcgatgatgcttcagctgggaggcacggtgattggaagtgcccggtgcaaggactttcgggaacgagaaggacgactccgagctgcctacaacctggtgaagcgtgggatcaccaatctctgtgtcattgggggtgatggcagcctcactggggctgacaccttccgttctgagtggagtgacttgttgagtgacctccagaaagcaggtaagatcacagatgaggaggctacgaagtccagctacctgaacattgtgggcctggttgggtcaattgacaatgacttctgtggcactgatatgaccattggcactgactctgccctgcatcggatcatggaaattgtagatgccatcactaccactgcccagagccaccagaggacatttgtgttagaagtaatgggccgccactgtggatacctggcccttgtcacctctctgtcctgtggggccgactgggtttttattcctgaatgtccaccagatgacgactgggaggaacacctttgtcgccgactcagcgagacaaggacccgtggttctcgtctcaacatcatcattgtggctgagggtgcaattgacaagaatggaaaaccaatcacctcagaagacatcaagaatctggtggttaagcgtctgggatatgacacccgggttactgtcttggggcatgtgcagaggggtgggacgccatcagcctttgacagaattctgggcagcaggatgggtgtggaagcagtgatggcacttttggaggggaccccagataccccagcctgtgtagtgagcctctctggtaaccaggctgtgcgcctgcccctcatggaatgtgtccaggtgaccaaagatgtgaccaaggccatggatgagaagaaatttgacgaagccctgaagctgagaggccggagcttcatgaacaactgggaggtgtacaagcttctagctcatgtcagacccccggtatctaagagtggttcgcacacagtggctgtgatgaacgtgggggctccggctgcaggcatgaatgctgctgttcgctccactgtgaggattggccttatccagggcaaccgagtgctcgttgtccatgatggtttcgagggcctggccaaggggcagatagaggaagctggctggagctatgttgggggctggactggccaaggtggctctaaacttgggactaaaaggactctacccaagaagagctttgaacagatcagtgccaatataactaagtttaacattcagggccttgtcatcattgggggctttgaggcttacacagggggcctggaactgatggagggcaggaagcagtttgatgagctctgcatcccatttgtggtcattcctgctacagtctccaacaatgtccctggctcagacttcagcgttggggctgacacagcactcaatactatctgcacaacctgtgaccgcatcaagcagtcagcagctggcaccaagcgtcgggtgtttatcattgagactatgggtggctactgtggctacctggctaccatggctggactggcagctggggccgatgctgcctacatttttgaggagcccttcaccattcgagacctgcaggcaaatgttgaacatctggtgcaaaagatgaaaacaactgtgaaaaggggcttggtgttaaggaatgaaaagtgcaatgagaactataccactgacttcattttcaacctgtactctgaggaggggaagggcatcttcgacagcaggaagaatgtgcttggtcacatgcagcagggtgggagcccaaccccatttgataggaattttgccactaagatgggcgccaaggctatgaactggatgtctgggaaaatcaaagagagttaccgtaatgggcggatctttgccaatactccagattcgggctgtgttctggggatgcgtaagagggctctggtcttccaaccagtggctgagctgaaggaccagacagattttgagcatcgaatccccaaggaacagtggtggctgaaactgaggcccatcctcaaaatcctagccaagtacgagattgacttggacacttcagaccatgcccacctggagcacatcacccggaagcggtccggggaagctgccgtctaaacctctctggagtgaggggaatagattacctgatcatggtcagctcacaccctaataagtccacatcttctcagtgttttagctgtttttttcattaggtttccttttattctgtaccttgcagccatgaccagttctggccaggagctggaggagcaggcagtgggtgggagctccttttaggtagaatttaacatgacttctgccccagctttatctgtcacacaaggctgggcacctctagtgctactgctagatatcacttactcagttagaattttcctaaaaataagctttatttatttctttgtgataacaaagagtcttggttcctctactacttttactacagtgacaaattgtaactacactaataaatgccaactggtcactgtga

SEQ ID NO: 383 - DNA, 1767 bp, Homo sapiens
aagcctccggagcgcacgtcggcagtcggctccctcgttgaccgaatcaccgacctctctccccagctgtatttccaaaatgtcgctttctaacaagctgacgctggacaagctggacgttaaagggaagcgggtcgttatgagagtcgacttcaatgttcctatgaagaacaaccagataacaaacaaccagaggattaaggctgctgtcccaagcatcaaattctgcttggacaatggagccaagtcggtagtccttatgagccacctaggccggcctgatggtgtgcccatgcctgacaagtactccttagagccagttgctgtagaactcaaatctctgctgggcaaggatgttctgttcttgaaggactgtgtaggcccagaagtggagaaagcctgtgccaacccagctgctgggtctgtcatcctgctggagaacctccgctttcatgtggaggaagaagggaagggaaaagatgcttctgggaacaaggttaaagccgagccagccaaaatagaagctttccgagcttcactttccaagctaggggatgtctatgtcaatgatgcttttggcactgctcacagagcccacagctccatggtaggagtcaatctgccacagaaggctggtgggtttttgatgaagaaggagctgaactactttgcaaaggccttggagagcccagagcgacccttcctggccatcctgggcggagctaaagttgcagacaagatccagctcatcaataatatgctggacaaagtcaatgagatgattattggtggtggaatggcttttaccttccttaaggtgctcaacaacatggagattggcacttctctgtttgatgaagagggagccaagattgtcaaagacctaatgtccaaagctgagaagaatggtgtgaagattaccttgcctgttgactttgtcactgctgacaagtttgatgagaatgccaagactggccaagccactgtggcttctggcatacctgctggctggatgggcttggactgtggtcctgaaagcagcaagaagtatgctgaggctgtcactcgggctaagcagattgtgtggaatggtcctgtgggggtatttgaatgggaagcttttgcccggggaaccaaagctctcatggatgaggtggtgaaagccacttctaggggctgcatcaccatcataggtggtggagacactgccacttgctgtgccaaatggaacacggaggataaagtcagccatgtgagcactgggggtggtgccagtttggagctcctggaaggtaaagtccttcctggggtggatgctctcagcaatatttagtactttcctgccttttagttcctgtgcacagcccctaagtcaacttagcattttctgcatctccacttggcattagctaaaaccttccatgtcaagattcagctagtggccaagagatgcagtgccaggaacccttaaacagttgcacagcatctcagctcatcttcactgcaccctggatttgcatacattcttcaagatcccatttgaattttttagtgactaaaccattgtgcattctagagtgcatatatttatattttgcctgttaaaaagaaagtgagcagtgttagcttagttctcttttgatgtaggttattatgattagctttgtcactgtttcactactcagcatggaaacaagatgaaattccatttgtaggtagtgagacaaaattgatgatccattaagtaaacaataaaagtgtccattg

SEQ ID NO: 384 - DNA, 1345 bp, Homo sapiens
acatgtaatcgacaatgccgtcttctgtctcgtggggcatcctcctggcaggcctgtgctgcctggtccctgtctccctggctgaggatccccagggagatgctgcccagaagacagatacatcccaccatgatcaggatcacccaaccttcaacaagatcacccccaacctggctgagttcgccttcagcctataccgccagctggcacaccagtccaacagcaccaatatcttcttctccccagtgagcatcgctacagcctttgcaatgctctccctggggaccaaggctgacactcacgatgaaatcctggagggcctgaatttcaacctcacggagattccggaggctcagatccatgaaggcttccaggaactcctccgtaccctaaaccagccagacagccagctccagctgaccaccggcaatggcctgttcctcagcgagggcctgaagctagtggataagtttttggaggatgttaaaaagttgtaccactcagaagccttcactgtcaacttcggggatcacgaagaggccaagaaacagatcaacgattacgtggagaagggtactcaagggaaaattgtggatttggtcaaggagcttgacagagacacagtttttgctctggtgaattacatcttctttaaaggcaaatgggagagaccttttgaagtcaaggacaccgaggacgaggacttccacgtggaccaggtgaccaccgtgaaggtccctatgatgaagcgtttaggcatgtttaacatccagcactgtaagaagctgtccagctgggtactgctaatgaaatacctgggcaatgccaccgccatcttcttcctacctgatgaggggaaactacagcacctggaaaatgaactcacccacgatatcatcaccaagttcctggaaaatgaagacagaaggtctgccagcttacatttacccaaactgtccattactggaacctatgatctgaagagcgtcctgggtcaactgggcatcactaaggtcttcagcaatggggctgacctctccggggtcacagaggaggcacccctgaagctctccaaggccgtgcataaggctgtgctgaccatcgacgagaaggggactgaagctgctggggccatgtttttagaggccataccaatgtctatccccccagaggtcaagttcaacaaaccctttgtcttcttaatgattgaacaaaataccaagtctcccctcttcatgggaaaagtggtgaatcccacccaaaaataactgcctctcgctcctcaacccctcccctccatccctggccccctccctggatgacattaaagaagggttgagctgga

SEQ ID NO: 385 - DNA, 14136 bp, Homo sapiens
gcactgcagcgccagcgtccgagcgggcggccgagctcccggagcggcctggccccgagccccgagcgggcgtcgctcagcagcaggtcgcggccgcgcagccccatccagccccgcgcccgccatgccgtccgcgggccccgcctgagctgcggtctccgcgcgcgggcgggcctggggacggcggggccatgcgcgcgctgccctaacgatgccgcccgccgcgcccgcccgcctggcgctggccctgggcctgggcctgtggctcggggcgctggcggggggccccgggcgcggctgcgggccctgcgagcccccctgcctctgcggcccagcgcccggcgccgcctgccgcgtcaactgctcgggccgcgggctgcggacgctcggtcccgcgctgcgcatccccgcggacgccacagcgctagacgtctcccacaacctgctccgggcgctggacgttgggctcctggcgaacctctcggcgctggcagagctggatataagcaacaacaagatttctacgttagaagaaggaatatttgctaatttatttaatttaagtgaaataaacctgagtgggaacccgtttgagtgtgactgtggcctggcgtggctgccgcgatgggcggaggagcagcaggtgcgggtggtgcagcccgaggcagccacgtgtgctgggcctggctccctggctggccagcctctgcttggcatccccttgctggacagtggctgtggtgaggagtatgtcgcctgcctccctgacaacagctcaggcaccgtggcagcagtgtccttttcagctgcccacgaaggcctgcttcagccagaggcctgcagcgccttctgcttctccaccggccagggcctcgcagccctctcggagcagggctggtgcctgtgtggggcggcccagccctccagtgcctcctttgcctgcctgtccctctgctccggccccccgccacctcctgcccccacctgtaggggccccaccctcctccagcacgtcttccctgcctccccaggggccaccctggtggggccccacggacctctggcctctggccagctagcagccttccacatcgctgccccgctccctgtcactgccacacgctgggacttcggagacggctccgccgaggtggatgccgctgggccggctgcctcgcatcgctatgtgctgcctgggcgctatcacgtgacggccgtgctggccctgggggccggctcagccctgctggggacagacgtgcaggtggaagcggcacctgccgccctggagctcgtgtgcccgtcctcggtgcagagtgacgagagccttgacctcagcatccagaaccgcggtggttcaggcctggaggccgcctacagcatcgtggccctgggcgaggagccggcccgagcggtgcacccgctctgcccctcggacacggagatcttccctggcaacgggcactgctaccgcctggtggtggagaaggcggcctggctgcaggcgcaggagcagtgtcaggcctgggccggggccgccctggcaatggtggacagtcccgccgtgcagcgcttcctggtctcccgggtcaccaggagcctagacgtgtggatcggcttctcgactgtgcagggggtggaggtgggcccagcgccgcagggcgaggccttcagcctggagagctgccagaactggctgcccggggagccacacccagccacagccgagcactgcgtccggctcgggcccaccgggtggtgtaacaccgacctgtgctcagcgccgcacagctacgtctgcgagctgcagcccggaggcccagtgcaggatgccgagaacctcctcgtgggagcgcccagtggggacctgcagggacccctgacgcctctggcacagcaggacggcctctcagccccgcacgagcccgtggaggtcatggtattcccgggcctgcgtctgagccgtgaagccttcctcaccacggccgaatttgggacccaggagctccggcggcccgcccagctgcggctgcaggtgtaccggctcctcagcacagcagggaccccggagaacggcagcgagcctgagagcaggtccccggacaacaggacccagctggcccccgcgtgcatgccagggggacgctggtgccctggagccaacatctgcttgccgctggacgcctcttgccacccccaggcctgcgccaatggctgcacgtcagggccagggctacccggggccccctatgcgctatggagagagttcctcttctccgttgccgcggggccccccgcgcagtactcggtcaccctccacggccaggatgtcctcatgctccctggtgacctcgttggcttgcagcacgacgctggccctggcgccctcctgcactgctcgccggctcccggccaccctggtccccaggccccgtacctctccgccaacgcctcgtcatggctgccccacttgccagcccagctggagggcacttgggcctgccctgcctgtgccctgcggctgcttgcagccacggaacagctcaccgtgctgctgggcttgaggcccaaccctggactgcggatgcctgggcgctatgaggtccgggcagaggtgggcaatggcgtgtccaggcacaacctctcctgcagctttgacgtggtctccccagtggctgggctgcgggtcatctaccctgccccccgcgacggccgcctctacgtgcccaccaacggctcagccttggtgctccaggtggactctggtgccaacgccacggccacggctcgctggcctgggggcagtgtcagcgcccgctttgagaatgtctgccctgccctggtggccaccttcgtgcccggctgcccctgggagaccaacgataccctgttctcagtggtagcactgccgtggctcagtgagggggagcacgtggtggacgtggtggtggaaaacagcgccagccgggccaacctcagcctgcgggtgacggcggaggagcccatctgtggcctccgcgccacgcccagccccgaggcccgtgtactgcagggagtcctagtgaggtacagccccgtggtggaggccggctcggacatggtcttccggtggaccatcaacgacaagcagtccctgaccttccagaacgtggtcttcaatgtcatttatcagagcgcggcggtcttcaagctctcactgacggcctccaaccacgtgagcaacgtcaccgtgaactacaacgtaaccgtggagcggatgaacaggatgcagggtctgcaggtctccacagtgccggccgtgctgtcccccaatgccacgctagcactgacggcgggcgtgctggtggactcggccgtggaggtggccttcctgtggaactttggggatggggagcaggccctccaccagttccagcctccgtacaacgagtccttcccggttccagacccctcggtggcccaggtgctggtggagcacaatgtcatgcacacctacgctgccccaggtgagtacctcctgaccgtgctggcatctaatgccttcgagaacctgacgcagcaggtgcctgtgagcgtgcgcgcctccctgccctccgtggctgtgggtgtgagtgacggcgtcctggtggccggccggcccgtcaccttctacccgcacccgctgccctcgcctgggggtgttctttacacgtgggacttcggggacggctcccctgtcctgacccagagccagccggctgccaaccacacctatgcctcgaggggcacctaccacgtgcgcctggaggtcaacaacacggtgagcggtgcggcggcccaggcggatgtgcgcgtctttgaggagctccgcggactcagcgtggacatgagcctggccgtggagcagggcgcccccgtggtggtcagcgccgcggtgcagacgggcgacaacatcacgtggaccttcgacatgggggacggcaccgtgctgtcgggcccggaggcaacagtggagcatgtgtacctgcgggcacagaactgcacagtgaccgtgggtgcggccagccccgccggccacctggcccggagcctgcacgtgctggtcttcgtcctggaggtgctgcgcgttgaacccgccgcctgcatccccacgcagcctgacgcgcggctcacggcctacgtcaccgggaacccggcccactacctcttcgactggaccttcggggatggctcctccaacacgaccgtgcgggggtgcccgacggtgacacacaacttcacgcggagcggcacgttccccctggcgctggtgctgtccagccgcgtgaacagggcgcattacttcaccagcatctgcgtggagccagaggtgggcaacgtcaccctgcagccagagaggcagtttgtgcagctcggggacgaggcctggctggtggcatgtgcctggcccccgttcccctaccgctacacctgggactttggcaccgaggaagccgcccccacccgtgccaggggccctgaggtgacgttcatctaccgagacccaggctcctatcttgtgacagtcaccgcgtccaacaacatctctgctgccaatgactcagccctggtggaggtgcaggagcccgtgctggtcaccagcatcaaggtcaatggctcccttgggctggagctgcagcagccgtacctgttctctgctgtgggccgtgggcgccccgccagctacctgtgggatctgggggacggtgggtggctcgagggtccggaggtcacccacgcttacaacagcacaggtgacttcaccgttagggtggccggctggaatgaggtgagccgcagcgaggcctggctcaatgtgacggtgaagcggcgcgtgcgggggctcgtcgtcaatgcaagccgcacggtggtgcccctgaatgggagcgtgagcttcagcacgtcgctggaggccggcagtgatgtgcgctattcctgggtgctctgtgaccgctgcacgcccatccctgggggtcctaccatctcttacaccttccgctccgtgggcaccttcaatatcatcgtcacggctgagaacgaggtgggctccgcccaggacagcatcttcgtctatgtcctgcagctcatagaggggctgcaggtggtgggcggtggccgctacttccccaccaaccacacggtacagctgcaggccgtggttagggatggcaccaacgtctcctacagctggactgcctggagggacaggggcccggccctggccggcagcggcaaaggcttctcgctcaccgtgctcgaggccggcacctaccatgtgcagctgcgggccaccaacatgctgggcagcgcctgggccgactgcaccatggacttcgtggagcctgtggggtggctgatggtgaccgcctccccgaacccagctgccgtcaacacaagcgtcaccctcagtgccgagctggctggtggcagtggtgtcgtatacacttggtccttggaggaggggctgagctgggagacctccgagccatttaccacccatagcttccccacacccggcctgcacttggtcaccatgacggcagggaacccgctgggctcagccaacgccaccgtggaagtggatgtgcaggtgcctgtgagtggcctcagcatcagggccagcgagcccggaggcagcttcgtggcggccgggtcctctgtgcccttttgggggcagctggccacgggcaccaatgtgagctggtgctgggctgtgcccggcggcagcagcaagcgtggccctcatgtcaccatggtcttcccggatgctggcaccttctccatccggctcaatgcctccaacgcagtcagctgggtctcagccacgtacaacctcacggcggaggagcccatcgtgggcctggtgctgtgggccagcagcaaggtggtggcgcccgggcagctggtccattttcagatcctgctggctgccggctcagctgtcaccttccgcctgcaggtcggcggggccaaccccgaggtgctccccgggccccgtttctcccacagcttcccccgcgtcggagaccacgtggtgagcgtgcggggcaaaaaccacgtgagctgggcccaggcgcaggtgcgcatcgtggtgctggaggccgtgagtgggctgcagatgcccaactgctgcgagcctggcatcgccacgggcactgagaggaacttcacagcccgcgtgcagcgcggctctcgggtcgcctacgcctggtacttctcgctgcagaaggtccagggcgactcgctggtcatcctgtcgggccgcgacgtcacctacacgcccgtggccgcggggctgttggagatccaggtgcgcgccttcaacgccctgggcagtgagaaccgcacgctggtgctggaggttcaggacgccgtccagtatgtggccctgcagagcggcccctgcttcaccaaccgctcggcgcagtttgaggccgccaccagccccagcccccggcgtgtggcctaccactgggactttggggatgggtcgccagggcaggacacagatgagcccagggccgagcactcctacctgaggcctggggactaccgcgtgcaggtgaacgcctccaacctggtgagcttcttcgtggcgcaggccacggtgaccgtccaggtgctggcctgccgggagccggaggtggacgtggtcctgcccctgcaggtgctgatgcggcgatcacagcgcaactacttggaggcccacgttgacctgcgcgactgcgtcacctaccagactgagtaccgctgggaggtgtatcgcaccgccagctgccagcggccggggcgcccagcgcgtgtggccctgcccggcgtggacgtgagccggcctcggctggtgctgccgcggctggcgctgcctgtggggcactactgctttgtgtttgtcgtgtcatttggggacacgccactgacacagagcatccaggccaatgtgacggtggcccccgagcgcctggtgcccatcattgagggtggctcataccgcgtgtggtcagacacacgggacctggtgctggatgggagcgagtcctacgaccccaacctggaggacggcgaccagacgccgctcagtttccactgggcctgtgtggcttcgacacagagggaggctggcgggtgtgcgctgaactttgggccccgcgggagcagcacggtcaccattccacgggagcggctggcggctggcgtggagtacaccttcagcctgaccgtgtggaaggccggccgcaaggaggaggccaccaaccagacggtgctgatccggagtggccgggtgcccattgtgtccttggagtgtgtgtcctgcaaggcacaggccgtgtacgaagtgagccgcagctcctacgtgtacttggagggccgctgcctcaattgcagcagcggctccaagcgagggcggtgggctgcacgtacgttcagcaacaagacgctggtgctggatgagaccaccacatccacgggcagtgcaggcatgcgactggtgctgcggcggggcgtgctgcgggacggcgagggatacaccttcacgctcacggtgctgggccgctctggcgaggaggagggctgcgcctccatccgcctgtcccccaaccgcccgccgctggggggctcttgccgcctcttcccactgggcgctgtgcacgccctcaccaccaaggtgcacttcgaatgcacgggctggcatgacgcggaggatgctggcgccccgctggtgtacgccctgctgctgcggcgctgtcgccagggccactgcgaggagttctgtgtctacaagggcagcctctccagctacggagccgtgctgcccccgggtttcaggccacacttcgaggtgggcctggccgtggtggtgcaggaccagctgggagccgctgtggtcgccctcaacaggtctttggccatcaccctcccagagcccaacggcagcgcaacggggctcacagtctggctgcacgggctcaccgctagtgtgctcccagggctgctgcggcaggccgatccccagcacgtcatcgagtactcgttggccctggtcaccgtgctgaacgagtacgagcgggccctggacgtggcggcagagcccaagcacgagcggcagcaccgagcccagatacgcaagaacatcacggagactctggtgtccctgagggtccacactgtggatgacatccagcagatcgctgctgcgctggcccagtgcatggggcccagcagggagctcgtatgccgctcgtgcctgaagcagacgctgcacaagctggaggccatgatgctcatcctgcaggcagagaccaccgcgggcaccgtgacgcccaccgccatcggagacagcatcctcaacatcacaggagacctcatccacctggccagctcggacgtgcgggcaccacagccctcagagctgggagccgagtcaccatctcggatggtggcgtcccaggcctacaacctgacctctgccctcatgcgcatcctcatgcgctcccgcgtgctcaacgaggagcccctgacgctggcgggcgaggagatcgtggcccagggcaagcgctcggacccgcggagcctgctgtgctatggcggcgccccagggcctggctgccacttctccatccccgaggctttcagcggggccctggccaacctcagtgacgtggtgcagctcatctttctggtggactccaatccctttccctttggctatatcagcaactacaccgtctccaccaaggtggcctcgatggcattccagacacaggccggcgcccagatccccatcgagcggctggcctcagagcgcgccatcaccgtgaaggtgcccaacaactcggactgggctgcccggggccaccgcagctccgccaactccgccaactccgttgtggtccagccccaggcctccgtcggtgctgtggtcaccctggacagcagcaaccctgcggccgggctgcatctgcagctcaactatacgctgctggacggccactacctgtctgaggaacctgagccctacctggcagtctacctacactcggagccccggcccaatgagcacaactgctcggctagcaggaggatccgcccagagtcactccagggtgctgaccaccggccctacaccttcttcatttccccggggagcagagacccagcggggagttaccatctgaacctctccagccacttccgctggtcggcgctgcaggtgtccgtgggcctgtacacgtccctgtgccagtacttcagcgaggaggacatggtgtggcggacagaggggctgctgcccctggaggagacctcgccccgccaggccgtctgcctcacccgccacctcaccgccttcggcgccagcctcttcgtgcccccaagccatgtccgctttgtgtttcctgagccgacagcggatgtaaactacatcgtcatgctgacatgtgctgtgtgcctggtgacctacatggtcatggccgccatcctgcacaagctggaccagttggatgccagccggggccgcgccatccctttctgtgggcagcggggccgcttcaagtacgagatcctcgtcaagacaggctggggccggggctcaggtaccacggcccacgtgggcatcatgctgtatggggtggacagccggagcggccaccggcacctggacggcgacagagccttccaccgcaacagcctggacatcttccggatcgccaccccgcacagcctgggtagcgtgtggaagatccgagtgtggcacgacaacaaagggctcagccctgcctggttcctgcagcacgtcatcgtcagggacctgcagacggcacgcagcgccttcttcctggtcaatgactggctttcggtggagacggaggccaacgggggcctggtggagaaggaggtgctggccgcgagcgacgcagcccttttgcgcttccggcgcctgctggtggctgagctgcagcgtggcttctttgacaagcacatctggctctccatatgggaccggccgcctcgtagccgtttcactcgcatccagagggccacctgctgcgttctcctcatctgcctcttcctgggcgccaacgccgtgtggtacggggctgttggcgactctgcctacagcacggggcatgtgtccaggctgagcccgctgagcgtcgacacagtcgctgttggcctggtgtccagcgtggttgtctatcccgtctacctggccatcctttttctcttccggatgtcccggagcaaggtggctgggagcccgagccccacacctgccgggcagcaggtgctggacatcgacagctgcctggactcgtccgtgctggacagctccttcctcacgttctcaggcctccacgctgaggcctttgttggacagatgaagagtgacttgtttctggatgattctaagagtctggtgtgctggccctccggcgagggaacgctcagttggccggacctgctcagtgacccgtccattgtgggtagcaatctgcggcagctggcacggggccaggcgggccatgggctgggcccagaggaggacggcttctccctggccagcccctactcgcctgccaaatccttctcagcatcagatgaagacctgatccagcaggtccttgccgagggggtcagcagcccagcccctacccaagacacccacatggaaacggacctgctcagcagcctgtccagcactcctggggagaagacagagacgctggcgctgcagaggctgggggagctggggccacccagcccaggcctgaactgggaacagccccaggcagcgaggctgtccaggacaggactggtggagggtctgcggaagcgcctgctgccggcctggtgtgcctccctggcccacgggctcagcctgctcctggtggctgtggctgtggctgtctcagggtgggtgggtgcgagcttccccccgggcgtgagtgttgcgtggctcctgtccagcagcgccagcttcctggcctcattcctcggctgggagccactgaaggtcttgctggaagccctgtacttctcactggtggccaagcggctgcacccggatgaagatgacaccctggtagagagcccggctgtgacgcctgtgagcgcacgtgtgccccgcgtacggccaccccacggctttgcactcttcctggccaaggaagaagcccgcaaggtcaagaggctacatggcatgctgcggagcctcctggtgtacatgctttttctgctggtgaccctgctggccagctatggggatgcctcatgccatgggcacgcctaccgtctgcaaagcgccatcaagcaggagctgcacagccgggccttcctggccatcacgcggtctgaggagctctggccatggatggcccacgtgctgctgccctacgtccacgggaaccagtccagcccagagctggggcccccacggctgcggcaggtgcggctgcaggaagcactctacccagaccctcccggccccagggtccacacgtgctcggccgcaggaggcttcagcaccagcgattacgacgttggctgggagagtcctcacaatggctcggggacgtgggcctattcagcgccggatctgctgggggcatggtcctggggctcctgtgccgtgtatgacagcgggggctacgtgcaggagctgggcctgagcctggaggagagccgcgaccggctgcgcttcctgcagctgcacaactggctggacaacaggagccgcgctgtgttcctggagctcacgcgctacagcccggccgtggggctgcacgccgccgtcacgctgcgcctcgagttcccggcggccggccgcgccctggccgccctcagcgtccgcccctttgcgctgcgccgcctcagcgcgggcctctcgctgcctctgctcacctcggtgtgcctgctgctgttcgccgtgcacttcgccgtggccgaggcccgtacttggcacagggaagggcgctggcgcgtgctgcggctcggagcctgggcgcggtggctgctggtggcgctgacggcggccacggcactggtacgcctcgcccagctgggtgccgctgaccgccagtggacccgtttcgtgcgcggccgcccgcgccgcttcactagcttcgaccaggtggcgcagctgagctccgcagcccgtggcctggcggcctcgctgctcttcctgcttttggtcaaggctgcccagcagctacgcttcgtgcgccagtggtccgtctttggcaagacattatgccgagctctgccagagctcctgggggtcaccttgggcctggtggtgctcggggtagcctacgcccagctggccatcctgctcgtgtcttcctgtgtggactccctctggagcgtggcccaggccctgttggtgctgtgccctgggactgggctctctaccctgtgtcctgccgagtcctggcacctgtcacccctgctgtgtgtggggctctgggcactgcggctgtggggcgccctacggctgggggctgttattctccgctggcgctaccacgccttgcgtggagagctgtaccggccggcctgggagccccaggactacgagatggtggagttgttcctgcgcaggctgcgcctctggatgggcctcagcaaggtcaaggagttccgccacaaagtccgctttgaagggatggagccgctgccctctcgctcctccaggggctccaaggtatccccggatgtgcccccacccagcgctggctccgatgcctcgcacccctccacctcctccagccagctggatgggctgagcgtgagcctgggccggctggggacaaggtgtgagcctgagccctcccgcctccaagccgtgttcgaggccctgctcacccagtttgaccgactcaaccaggccacagaggacgtctaccagctggagcagcagctgcacagcctgcaaggccgcaggagcagccgggcgcccgccggatcttcccgtggcccatccccgggcctgcggccagcactgcccagccgccttgcccgggccagtcggggtgtggacctggccactggccccagcaggacaccccttcgggccaagaacaaggtccaccccagcagcacttagtcctccttcctggcgggggtgggccgtggagtcggagtggacaccgctcagtattactttctgccgctgtcaaggccgagggccaggcagaatggctgcacgtaggttccccagagagcaggcaggggcatctgtctgtctgtgggcttcagcactttaaagaggctgtgtggccaaccaggacccagggtcccctccccagctcccttgggaaggacacagcagtattggacggtttctagcctctgagatgctaatttatttccccgagtcctcaggtacagcgggctgtgcccggccccaccccctgggcagatgtcccccactgctaaggctgctggcttcagggagggttagcctgcaccgccgccaccctgcccctaagttattacctctccagttcctaccgtactccctgcaccgtctcactgtgtgtctcgtgtcagtaatttatatggtgttaaaatgtgtatatttttgtatgtcactattttcactagggctgaggggcctgcgcccagagctggcctcccccaacacctgctgcgcttggtaggtgtggtggcgttatggcagcccggctgctgcttggatgcgagcttggccttgggccggtgctgggggcacagctgtctgccaggcactctcatcaccccagaggccttgtcatcctcccttgccccaggccaggtagcaagagagcagcgcccaggcctgctggcatcaggtctgggcaagtagcaggactaggcatgtcagaggaccccagggtggttagaggaaaagactcctcctgggggctggctcccagggtggaggaaggtgactgtgtgtgtgtgtgtgtgcgcgcgcgacgcgcgagtgtgctgtatggcccaggcagcctcaaggccctcggagctggctgtgcctgcttctgtgtaccacttctgtgggcatggccgcttctagagcctcgacacccccccaacccccgcaccaagcagacaaagtcaataaaagagctgtctgactgc

SEQ ID NO: 386 - DNA, 997 bp, Homo sapiens
gaaggaaaaagagcaacagatccagggagcattcacctgccctgtctccaaacagccttgtgcctcacctacccccaacctcccagagggagcagctatttaaggggagcaggagtgcagaacaaacaagacggcctggggatacaactctggagtcctctgagagagccaccaaggaggagcaggggagcgacggccggggcagaagttgagaccacccagcagaggagctaggccagtccatctgcatttgtcacccaagaactcttaccatgaagaccctcctactgttggcagtgatcatgatctttggcctactgcaggcccatgggaatttggtgaatttccacagaatgatcaagttgacgacaggaaaggaagccgcactcagttatggcttctacggctgccactgtggcgtgggtggcagaggatcccccaaggatgcaacggatcgctgctgtgtcactcatgactgttgctacaaacgtctggagaaacgtggatgtggcaccaaatttctgagctacaagtttagcaactcggggagcagaatcacctgtgcaaaacaggactcctgcagaagtcaactgtgtgagtgtgataaggctgctgccacctgttttgctagaaacaagacgacctacaataaaaagtaccagtactattccaataaacactgcagagggagcacccctcgttgctgagtcccctcttccctggaaaccttccacccagtgctgaatttccctctctcataccctccctccctaccctaaccaagttccttggccatgcagaaagcatccctcacccatcctagaggccaggcaggagcccttctatacccacccagaatgagacatccagcagatttccagccttctactgctctcctccacctcaactccgtgcttaaccaaagaagctgtactccggggggtctcttctgaataaagcaattagcaaaaaaaaaaaaaaaaaaaaaaaaaaaaaa

SEQ ID NO: 387 - DNA, 2732 bp, Homo sapiens
aacaacatcctgggattgggacccactttctgggcactgctggccagtcccaaaatggaacataaggaagtggttcttctacttcttttatttctgaaatcaggtcaaggagagcctctggatgactatgtgaatacccagggggcttcactgttcagtgtcactaagaagcagctgggagcaggaagtatagaagaatgtgcagcaaaatgtgaggaggacgaagaattcacctgcagggcattccaatatcacagtaaagagcaacaatgtgtgataatggctgaaaacaggaagtcctccataatcattaggatgagagatgtagttttatttgaaaagaaagtgtatctctcagagtgcaagactgggaatggaaagaactacagagggacgatgtccaaaacaaaaaatggcatcacctgtcaaaaatggagttccacttctccccacagacctagattctcacctgctacacacccctcagagggactggaggagaactactgcaggaatccagacaacgatccgcaggggccctggtgctatactactgatccagaaaagagatatgactactgcgacattcttgagtgtgaagaggaatgtatgcattgcagtggagaaaactatgacggcaaaatttccaagaccatgtctggactggaatgccaggcctgggactctcagagcccacacgctcatggatacattccttccaaatttccaaacaagaacctgaagaagaattactgtcgtaaccccgatagggagctgcggccttggtgtttcaccaccgaccccaacaagcgctgggaactttgcgacatcccccgctgcacaacacctccaccatcttctggtcccacctaccagtgtctgaagggaacaggtgaaaactatcgcgggaatgtggctgttaccgtttccgggcacacctgtcagcactggagtgcacagacccctcacacacataacaggacaccagaaaacttcccctgcaaaaatttggatgaaaactactgccgcaatcctgacggaaaaagggccccatggtgccatacaaccaacagccaagtgcggtgggagtactgtaagataccgtcctgtgactcctccccagtatccacggaacaattggctcccacagcaccacctgagctaacccctgtggtccaggactgctaccatggtgatggacagagctaccgaggcacatcctccaccaccaccacaggaaagaagtgtcagtcttggtcatctatgacaccacaccggcaccagaagaccccagaaaactacccaaatgctggcctgacaatgaactactgcaggaatccagatgccgataaaggcccctggtgttttaccacagaccccagcgtcaggtgggagtactgcaacctgaaaaaatgctcaggaacagaagcgagtgttgtagcacctccgcctgttgtcctgcttccagatgtagagactccttccgaagaagactgtatgtttgggaatgggaaaggataccgaggcaagagggcgaccactgttactgggacgccatgccaggactgggctgcccaggagccccatagacacagcattttcactccagagacaaatccacgggcgggtctggaaaaaaattactgccgtaaccctgatggtgatgtaggtggtccctggtgctacacgacaaatccaagaaaactttacgactactgtgatgtccctcagtgtgcggccccttcatttgattgtgggaagcctcaagtggagccgaagaaatgtcctggaagggttgtgggggggtgtgtggcccacccacattcctggccctggcaagtcagtcttagaacaaggtttggaatgcacttctgtggaggcaccttgatatccccagagtgggtgttgactgctgcccactgcttggagaagtccccaaggccttcatcctacaaggtcatcctgggtgcacaccaagaagtgaatctcgaaccgcatgttcaggaaatagaagtgtctaggctgttcttggagcccacacgaaaagatattgccttgctaaagctaagcagtcctgccgtcatcactgacaaagtaatcccagcttgtctgccatccccaaattatgtggtcgctgaccggaccgaatgtttcatcactggctggggagaaacccaaggtacttttggagctggccttctcaaggaagcccagctccctgtgattgagaataaagtgtgcaatcgctatgagtttctgaatggaagagtccaatccaccgaactctgtgctgggcatttggccggaggcactgacagttgccagggtgacagtggaggtcctctggtttgcttcgagaaggacaaatacattttacaaggagtcacttcttggggtcttggctgtgcacgccccaataagcctggtgtctatgttcgtgtttcaaggtttgttacttggattgagggagtgatgagaaataattaattggacgggagacagagtgacgcactgactcacctagaggctgggacgtgggtagggatttagcatgctggaaataactggcagtaatcaaacgaagacactgtccccagctaccagctacgccaaacctcggcattttttgtgttattttctgactgctggattctgtagtaaggtgacatagctatgacatttgttaaaaataaactctgtacttaactttgatttgagtaaattttggtttt

SEQ ID NO: 388 - DNA, 3115 bp, Homo sapiens
ccaccatatcggtcccgtatttcacattgataaggtcctgtttcatttctcgtgacattgggtagaatgaggatcctgttttcaatgggtcgctttaccctgggactgacagggaggctctgaccatttagccaccaaatgtaggtgtagttctcactcttaggttcaccccgcggccgatcgtcccccatacctcggccatgcggcccctgctgctactggccctgctgggctggctgctgctggccgaagcgaagggcgacgccaagccggaggacaaccttttagtcctcacggtggccactaaggagaccgagggattccgtcgcttcaagcgctcagctcagttcttcaactacaagatccaggcgcttggcctaggggaggactggaatgtggagaaggggacgtcggcaggtggagggcagaaggtccggctgctgaagaaagctctggagaagcacgcagacaaggaggatctggtcattctcttcacagacagctatgacgtgctgtttgcatcggggccccgggagctcctgaagaagttccggcaggccaggagccaggtggtcttctctgctgaggagctcatctacccagaccgcaggctggagaccaagtatccggtggtgtccgatggcaagaggttcctgggctctggaggcttcatcggttatgcccccaacctcagcaaactggtggccgagtgggagggccaggacagcgacagcgatcagctgttttacaccaagatcttcttggacccggagaagagggagcagatcaatatcaccctggaccaccgctgccgtatcttccagaacctggatggagccttggatgaggtcgtgctcaagtttgaaatgggccatgtgagagcgaggaacctggcctatgacaccctcccggtcctgatccatggcaacgggccaaccaagctgcagttgaactacctgggcaactacatcccgcgcttctggaccttcgaaacaggctgcaccgtgtgtgacgaaggcttgcgcagcctcaagggcattggggatgaagctctgcccacggtcctggtcggcgtgttcatcgaacagcccacgccgtttgtgtccctgttcttccagcggctcctgcggctccactacccccagaaacacatgcgacttttcatccacaaccacgagcagcaccacaaggctcaggtggaagagttcctggcacagcatggcagcgagtaccagtctgtgaagctggtgggccctgaggtgcggatggcgaatgcagatgccaggaacatgggcgcagacctgtgccggcaggaccgcagctgcacctactacttcagcgtggatgctgacgtggccctgaccgagcccaacagcctgcggctgctgatccaacagaacaagaatgtcattgccccgctgatgacccggcatgggaggctgtggtcgaacttctggggggctctcagtgcagatggctactatgcccgttccgaggactacgtggacattgtgcaggggcggcgtgttggtgtctggaatgtgccctatatttcaaacatctacttgatcaagggcagtgccctgcggggtgagctgcagtcctcagatctcttccaccacagcaagctggaccccgacatggccttctgtgccaacatccggcagcaggatgtgttcatgttcctgaccaaccggcacacccttggccatctgctctccctagacagctaccgcaccacccacctgcacaacgacctctgggaggtgttcagcaaccccgaggactggaaggagaagtacatccaccagaactacaccaaagccctggcagggaagctggtggagacgccctgcccggatgtctattggttccccatcttcacggaggtggcctgtgatgagctggtggaggagatggagcactttggccagtggtctctgggcaacaacaaggacaaccgcatccagggtggctacgagaacgtgccgactattgacatccacatgaaccagatcggctttgagcgggagtggcacaaattcctgctggagtacattgcgcccatgacggagaagctctaccccggctactacaccagggcccagtttgacctggcctttgtcgtccgctacaagcctgatgagcagccctcactgatgccacaccatgatgcctccaccttcaccatcaacatcgccctgaaccgagtcggggtggattacgagggcgggggctgtcggttcctgcgctacaactgttccatccgagccccaaggaagggctggaccctcatgcaccctggacgactcacgcattaccatgaggggctccccaccaccaggggcacccgctacatcgcagtctccttcgtcgatccctaattggccaggcctgaccctcttggacctttcttctttgccgacaaccactgcccagcagcctctgggacctcggggtcccagggaacccagtccagcctcctggctgttgacttcccattgctcttggagccaccaatcaaagagattcaaagagattcctgcaggccagaggccggaacacacctttatggctggggctctccgtggtgttctggacccagcccctggagacaccattcacttttactgctttgtagtgactcgtgctctccaacctgtcttcctgaaaaaccaaggcccccttcccccacctcttccatggggtgagacttgagcagaacaggggcttccccaagttgcccagaaagactgtctgggtgagaagccatggccagagcttctcccaggcacaggtgttgcaccagggacttctgcttcaagttttggggtaaagacacctggatcagactccaagggctgccctgagtctgggacttctgcctccatggctggtcatgagagcaaaccgtagtcccctggagacagccactccagagaacctcttgggagacagaagaggcatctgtgcacagctcgatcttctacttgcctgtggggaggggagtgacaggtccacacaccacactgggtcaccctgtcctggatgcctctgaagagagggacagaccgtcagaaactggagagtttctattaaaggtcatttaaaccac

SEQ ID NO: 389 - DNA, 1806 bp, Homo sapiens
agggaacatctcggggagcctggttggaagctgcaggcttagtctgtcggctgcgggtctctgactgccctgtggggagggtcttgccttaacatcccttgcatttggctgcaaagaaatctgcttggaagaaggggttacgctgtttggccgggcagaaactccgctgagcagaacttgccgccagaatgctcctcctgttgctgagtatcatcgtcctccacgtcgcggtgctggtgctgctgttcgtctccacgatcgtcagccaatggatcgtgggcaatggacacgcaactgatctctggcagaactgtagcacctcttcctcaggaaatgtccaccactgtttctcatcatcaccaaacgaatggctgcagtctgtccaggccaccatgatcctgtcgatcatcttcagcattctgtctctgttcctgttcttctgccaactcttcaccctcaccaaggggggcaggttttacatcactggaatcttccaaattcttgctggtctgtgcgtgatgagtgctgcggccatctacacggtgaggcacccggagtggcatctcaactcggattactcctacggtttcgcctacatcctggcctgggtggccttccccctggcccttctcagcggtgtcatctatgtgatcttgcggaaacgcgaatgaggcgcccagacggtctgtctgaggctctgagcgtacatagggaagggaggaagggaaaccagaaagcagacaaagaaaaaagagctagcccaaaatcccaaactcaaaccaaaccaaacagaaagcagtggaggtgggggttgctgttgattgaagatgtatataatatctccggtttataaaacctatttataacactttttacatatatgtacatagtattgtttgctttttatgttgaccatcagcctcgtgttgagccttaaagaagtagctaaggaactttacatggtaacagtataatccagctcagtatttttgttttgttttttgtttgtttgttttgttttacccagaaataagataactccatgtcgccccttccctttcatctgaaagaagatacctccctcccagtccacctcatttagaaaaccaaagtgtgggtagaaaccccaaatgtccaaaagcccttttctggtgggtgacccagtgcatccaacagaaacagccgctgcccgaacctgtgtgaagctttacgcgcacacggacaaaatgcccaaactggagcccttgcaaaaacacggcttgtggcattggcatacttgcccttacaggtggagtatcttcgtcacacatctaaatgagaaatcagtgacaacaagtctttgaaatggtgctatggatttaccattccttattatcactaatcatctaaacaactcactggaaatccaattaacaattttacaacataagatagaatggagacctgaataattctgtgtaatataaatggtttataactgcttttgtacctagctaggctgctattattactataatgagtaaatcataaagccttcatcactcccacattttccttacggtcggagcatcagaacaagcgtctagactccttgggaccgtgagttcctagagcttggctgggtctaggctgttctgtgcctccaaggactgtctggcaatgacttgtattggccaccaactgtagatgtatatatggtgcccttctgatgctaagactccagaccttttgtttttgctttgcattttctgattttataccaactgtgtggactaagatgcattaaaataaacatcagagtaactc

SEQ ID NO: 390 - DNA, 1815 bp, Homo sapiens
ggggagatgatccgagccgcgccgccgccgctgttcctgctgctgctgctgctgctgctgctagtgtcctgggcgtcccgaggcgaggcagcccccgaccaggacgagatccagcgcctccccgggctggccaagcagccgtctttccgccagtactccggctacctcaaaagctccggctccaagcacctccactactggtttgtggagtcccagaaggatcccgagaacagccctgtggtgctttggctcaatgggggtcccggctgcagctcactagatgggctcctcacagagcatggccccttcctggtccagccagatggtgtcaccctggagtacaacccctattcttggaatctgattgccaatgtgttatacctggagtccccagctggggtgggcttctcctactccgatgacaagttttatgcaactaatgacactgaggtcgcccagagcaattttgaggcccttcaagatttcttccgcctctttccggagtacaagaacaacaaacttttcctgaccggggagagctatgctggcatctacatccccaccctggccgtgctggtcatgcaggatcccagcatgaaccttcaggggctggctgtgggcaatggactctcctcctatgagcagaatgacaactccctggtctactttgcctactaccatggccttctggggaacaggctttggtcttctctccagacccactgctgctctcaaaacaagtgtaacttctatgacaacaaagacctggaatgcgtgaccaatcttcaggaagtggcccgcatcgtgggcaactctggcctcaacatctacaatctctatgccccgtgtgctggaggggtgcccagccattttaggtatgagaaggacactgttgtggtccaggatttgggcaacatcttcactcgcctgccactcaagcggatgtggcatcaggcactgctgcgctcaggggataaagtgcgcatggaccccccctgcaccaacacaacagctgcttccacctacctcaacaacccgtacgtgcggaaggccctcaacatcccggagcagctgccacaatgggacatgtgcaactttctggtaaacttacagtaccgccgtctctaccgaagcatgaactcccagtatctgaagctgcttagctcacagaaataccagatcctattatataatggagatgtagacatggcctgcaatttcatgggggatgagtggtttgtggattccctcaaccagaagatggaggtgcagcgccggccctggttagtgaagtacggggacagcggggagcagattgccggcttcgtgaaggagttctcccacatcgcctttctcacgatcaagggcgccggccacatggttcccaccgacaagcccctcgctgccttcaccatgttctcccgcttcctgaacaagcagccatactgatgaccacagcaaccagctccacggcctgatgcagcccctcccagcctctcccgctaggagagtcctcttctaagcaaagtgcccctgcaggcgggttctgccgccaggactgcccccttcccagagccctgtacatcccagactgggcccagggtctcccatagacagcctgggggcaagttagcactttattcccgcagcagttcctgaatggggtggcctggccccttctctgcttaaagaatgccctttatgatgcactgattccatcccaggaacccaacagagctcaggacagcccacagggaggtggtggacggactgtaattgatagattgattatggaattaaattgggtacagcttc

SEQ ID NO: 391 - DNA, 2279 bp, Homo sapiens
ggcacgagcgaagatggcgtcgcccggctgcctgtggctcttggctgtggctctcctgccatggacctgcgcttctcgggcgctgcagcatctggacccgccggcgccgctgccgttggtgatctggcatgggatgggagacagctgttgcaatcccttaagcatgggtgctattaaaaaaatggtggagaagaaaatacctggaatttacgtcttatctttagagattgggaagaccctgatggaggacgtggagaacagcttcttcttgaatgtcaattcccaagtaacaacagtgtgtcaggcacttgctaaggatcctaaattgcagcaaggctacaatgctatgggattctcccagggaggccaatttctgagggcagtggctcagagatgcccttcacctcccatgatcaatctgatctcggttgggggacaacatcaaggtgtttttggactccctcgatgcccaggagagagctctcacatctgtgacttcatccgaaaaacactgaatgctggggcgtactccaaagttgttcaggaacgcctcgtgcaagccgaatactggcatgaccccataaaggaggatgtgtatcgcaaccacagcatcttcttggcagatataaatcaggagcggggtatcaatgagtcctacaagaaaaacctgatggccctgaagaagtttgtgatggtgaaattcctcaatgattccattgtggaccctgtagattcggagtggtttggattttacagaagtggccaagccaaggaaaccattcccttacaggagacctccctgtacacacaggaccgcctggggctaaaggaaatggacaatgcaggacagctagtgtttctggctacagaaggggaccatcttcagttgtctgaagaatggttttatgcccacatcataccattccttggatgaaacccgtatagttcacaatagagctcagggagcccctaactcttccaaaccacatgggagacagtttccttcatgcccaagcctgagctcagatccagcttgcaactaatccttctatcatctaacatgcactacttggaaagatctaagatctgaatcttatcctttgccatcttctgttaccatatggtgttgaatgcaagtttaattaccatggagattgttttacaaacttttgatgtggtcaagttcagttttagaaaagggagtctgttccagatcagggccagaactgtgcccaggcccaaaggagacaactaactaaagtagtgagatagattctaagggcaaacatttttccaagtcttgccatatttcaagcaaagaggtgcccaggcctgaggtactcacataaatgctttgttttgctggtgatttaaccagtgcttggaaaaatcttgcttggctatttctgcatcatttcttaaggctgccttcctctctgagtacgttgccctctgtgctatcaatcatcttatcatcaattattagacaaatcccactggcctacagtcttgcttctgcagcacccactttgtctcctcaggtagtgatgaattagttgctgtcacaaaaggagggaagtagcacccaaattaaattgcttaagagaggaaatgtacatcttgtataacttagggagcgaagaaaatgtaggcgcgaaagtgaaaagtgaggcagctagttcttcctattccattctcgaccaacctgccctttcttaatatgactagtggtcttgatgctagagtcaacttactctgttgctggctttagcagagaataggaggaaccatatgaaaaagatcaggctttctgacttccatccccaaaacacatttaccagcatactccaaactgtttctgatgtgttccatgagaaaaggattgtttgctcaaaaagcttggaaaatactacacactccctttctccttctggagatcaacccacattagagtgtctaaggactcctgagaattcctgttacagtaaacaaaactaacgtaatctaccatttcctacactatttgagcatggaaatcatagtccccactctatgaaaacttaacgctttttggaagacatttctgtagcatgtcagtttggagaaatgatgagctacgccttgatgaaagaaccgtgttggtgctgctaagtttagccattatggtttttcctttctctctcttaagccttattcttcaactaaaagatgaggattaagagcaagaagttgggggggatgtgaaaataattttatgaggttgtctaaaatctcgtgcc

SEQ ID NO: 392 - DNA, 2415 bp, Homo sapiens
cggcgccgcgagcttctcctctcctcacgaccgaggcagagcagtcattatggcgaaccttggctgctggatgctggttctctttgtggccacatggagtgacctgggcctctgcaagaagcgcccgaagcctggaggatggaacactgggggcagccgatacccggggcagggcagccctggaggcaaccgctacccacctcagggcggtggtggctgggggcagcctcatggtggtggctgggggcagcctcatggtggtggctgggggcagccccatggtggtggctggggacagcctcatggtggtggctggggtcaaggaggtggcacccacagtcagtggaacaagccgagtaagccaaaaaccaacatgaagcacatggctggtgctgcagcagctggggcagtggtggggggccttggcggctacatgctgggaagtgccatgagcaggcccatcatacatttcggcagtgactatgaggaccgttactatcgtgaaaacatgcaccgttaccccaaccaagtgtactacaggcccatggatgagtacagcaaccagaacaactttgtgcacgactgcgtcaatatcacaatcaagcagcacacggtcaccacaaccaccaagggggagaacttcaccgagaccgacgttaagatgatggagcgcgtggttgagcagatgtgtatcacccagtacgagagggaatctcaggcctattaccagagaggatcgagcatggtcctcttctcctctccacctgtgatcctcctgatctctttcctcatcttcctgatagtgggatgaggaaggtcttcctgttttcaccatctttctaatctttttccagcttgagggaggcggtatccacctgcagcccttttagtggtggtgtctcactctttcttctctctttgtcccggataggctaatcaatacccttggcactgatgggcactggaaaacatagagtagacctgagatgctggtcaagccccctttgattgagttcatcatgagccgttgctaatgccaggccagtaaaagtataacagcaaataaccattggttaatctggacttatttttggacttagtgcaacaggttgaggctaaaacaaatctcagaacagtctgaaatacctttgcctggatacctctggctccttcagcagctagagctcagtatactaatgccctatcttagtagagatttcatagctatttagagatattttccattttaagaaaacccgacaacatttctgccaggtttgttaggaggccacatgatacttattcaaaaaaatcctagagattcttagctcttgggatgcaggctcagcccgctggagcatgagctctgtgtgtaccgagaactggggtgatgttttacttttcacagtatgggctacacagcagctgttcaacaagagtaaatattgtcacaacactgaacctctggctagaggacatattcacagtgaacataactgtaacatatatgaaaggcttctgggacttgaaatcaaatgtttgggaatggtgcccttggaggcaacctcccattttagatgtttaaaggaccctatatgtggcattcctttctttaaactataggtaattaaggcagctgaaaagtaaattgccttctagacactgaaggcaaatctcctttgtccatttacctggaaaccagaatgattttgacatacaggagagctgcagttgtgaaagcaccatcatcatagaggatgatgtaattaaaaaatggtcagtgtgcaaagaaaagaactgcttgcatttctttatttctgtctcataattgtcaaaaaccagaattaggtcaagttcatagtttctgtaattggcttttgaatcaaagaatagggagacaatctaaaaaatatcttaggttggagatgacagaaatatgattgatttgaagtggaaaaagaaattctgttaatgttaattaaagtaaaattattccctgaattgtttgatattgtcacctagcagatatgtattacttttctgcaatgttattattggcttgcactttgtgagtatctatgtaaaaatatatatgtatataaaatatatattgcataggacagacttaggagttttgtttagagcagttaacatctgaagtgtctaatgcattaacttttgtaaggtactgaatacttaatatgtgggaaacccttttgcgtggtccttaggcttacaatgtgcactgaatcgtttcatgtaagaatccaaagtggacaccattaacaggtctttgaaatatgcatgtactttatattttctatatttgtaactttgcatgttcttgttttgttatataaaaaaattgtaaatgtttaatatctgactgaaattaaacgagcgaagatgagcacc

SEQ ID NO: 393 - DNA, 1843 bp, Homo sapiens
ctgcaggggggggggggggggggggctgtcatggcggcaggacggcgaacttgcagtatctccacgacccgcccctacaggtgccagtgcctccagaatgtggcagctcacaagcctcctgctgttcgtggccacctggggaatttccggcacaccagctcctcttgactcagtgttctccagcagcgagcgtgcccaccaggtgctgcggatccgcaaacgtgccaactccttcctggaggagctccgtcacagcagcctggagcgggagtgcatagaggagatctgtgacttcgaggaggccaaggaaattttccaaaatgtggatgacacactggccttctggtccaagcacgtcgacggtgaccagtgcttggtcttgcccttggagcacccgtgcgccagcctgtgctgcgggcacggcacgtgcatcgacggcatcggcagcttcagctgcgactgccgcagcggctgggagggccgcttctgccagcgcgaggtgagcttcctcaattgctcgctggacaacggcggctgcacgcattactgcctagaggaggtgggctggcggcgctgtagctgtgcgcctggctacaagctgggggacgacctcctgcagtgtcaccccgcagtgaagttcccttgtgggaggccctggaagcggatggagaagaagcgcagtcacctgaaacgagacacagaagaccaagaagaccaagtagatccgcggctcattgatgggaagatgaccaggcggggagacagcccctggcaggtggtcctgctggactcaaagaagaagctggcctgcggggcagtgctcatccacccctcctgggtgctgacagcggcccactgcatggatgagtccaagaagctccttgtcaggcttggagagtatgacctgcggcgctgggagaagtgggagctggacctggacatcaaggaggtcttcgtccaccccaactacagcaagagcaccaccgacaatgacatcgcactgctgcacctggcccagcccgccaccctctcgcagaccatagtgcccatctgcctcccggacagcggccttgcagagcgcgagctcaatcaggccggccaggagaccctcgtgacgggctggggctaccacagcagccgagagaaggaggccaagagaaaccgcaccttcgtcctcaacttcatcaagattcccgtggtcccgcacaatgagtgcagcgaggtcatgagcaacatggtgtctgagaacatgctgtgtgcgggcatcctcggggaccggcaggatgcctgcgagggcgacagtggggggcccatggtcgcctccttccacggcacctggttcctggtgggcctggtgagctggggtgagggctgtgggctccttcacaactacggcgtttacaccaaagtcagccgctacctcgactggatccatgggcacatcagagacaaggaagccccccagaagagctgggcaccttagcgaccctccctgcagggctgggcttttgcatggcaatggatgggacattaaagggacatgtaacaagcacaccggcctgctgttctgtccttccatccctcttttgggctcttctggagggaagtaacatttactgagcacctgttgtatgtcacatgccttatgaatagaatcttaactcctagagcaactctgtggggtggggaggagcagatccaagttttgcggggtctaaagctgtgtgtgttgagggggatactctgtttatgaaaaagaataaaaaacacaaccacgaaaaaaaaaaaaaaaaaaaaaaaaaaaaaaaaaaaaaaaacccccccccgccccccccccctgcag

SEQ ID NO: 394 - DNA, 3309 bp, Homo sapiens
ctgcagggggggggggggggggggggggggggggggggcgcagcacggctcagaccgaggcgcacaggctcgcagctccgggcgcctagcgcccggtccccgccgcgacgcgccaccgtccctgccggcgcctccgcgccttcgaaatgagggtcctgggtgggcgctgcggggcgccgctggcgtgtctcctcctagtgcttcccgtctcagaggcaaaccttctgtcaaagcaacaggcttcacaagtcctggttaggaagcgtcgtgcaaattctttacttgaagaaaccaaacagggtaatcttgaaagagaatgcatcgaagaactgtgcaataaagaagaagccagggaggtctttgaaaatgacccggaaacggattatttttatccaaaatacttagtttgtcttcgctcttttcaaactgggttattcactgctgcacgtcagtcaactaatgcttatcctgacctaagaagctgtgtcaatgccattccagaccagtgtagtcctctgccatgcaatgaagatggatatatgagctgcaaagatggaaaagcttcttttacttgcacttgtaaaccaggttggcaaggagaaaagtgtgaatttgacataaatgaatgcaaagatccctcaaatataaatggaggttgcagtcaaatttgtgataatacacctggaagttaccactgttcctgtaaaaatggttttgttatgctttcaaataagaaagattgtaaagatgtggatgaatgctctttgaagccaagcatttgtggcacagctgtgtgcaagaacatcccaggagattttgaatgtgaatgccccgaaggctacagatataatctcaaatcaaagtcttgtgaagatatagatgaatgctctgagaacatgtgtgctcagctttgtgtcaattaccctggaggttacacttgctattgtgatgggaagaaaggattcaaacttgcccaagatcagaagagttgtgaggttgtttcagtgtgccttcccttgaaccttgacacaaagtatgaattactttacttggcggagcagtttgcaggggttgttttatatttaaaatttcgtttgccagaaatcagcagattttcagcagaatttgatttccggacatatgattcagaaggcgtgatactgtacgcagaatctatcgatcactcagcgtggctcctgattgcacttcgtggtggaaagattgaagttcagcttaagaatgaacatacatccaaaatcacaactggaggtgatgttattaataatggtctatggaatatggtgtctgtggaagaattagaacatagtattagcattaaaatagctaaagaagctgtgatggatataaataaacctggacccctttttaagccggaaaatggattgctggaaaccaaagtatactttgcaggattccctcggaaagtggaaagtgaactcattaaaccgattaaccctcgtctagatggatgtatacgaagctggaatttgatgaagcaaggagcttctggaataaaggaaattattcaagaaaaacaaaataagcattgcctggttactgtggagaagggctcctactatcctggttctggaattgctcaatttcacatagattataataatgtatccagtgctgagggttggcatgtaaatgtgaccttgaatattcgtccatccacgggcactggtgttatgcttgccttggtttctggtaacaacacagtgccctttgctgtgtccttggtggactccacctctgaaaaatcacaggatattctgttatctgttgaaaatactgtaatatatcggatacaggccctaagtctatgttccgatcaacaatctcatctggaatttagagtcaacagaaacaatctggagttgtcgacaccacttaaaatagaaaccatctcccatgaagaccttcaaagacaacttgccgtcttggacaaagcaatgaaagcaaaagtggccacatacctgggtggccttccagatgttccattcagtgccacaccagtgaatgccttttataatggctgcatggaagtgaatattaatggtgtacagttggatctggatgaagccatttctaaacataatgatattagagctcactcatgtccatcagtttggaaaaagacaaagaattcttaaggcatcttttctctgcttataataccttttccttgtgtgtaattatacttatgtttcaataacagctgaagggttttatttacaatgtgcagtctttgattattttgtggtcctttcctgggatttttaaaaggtcctttgtcaaggaaaaaaattctgttgtgatataaatcacagtaaagaaattcttacttctcttgctatctaagaatagtgaaaaataacaattttaaatttgaatttttttcctacaaatgacagtttcaatttttgtttgtaaaactaaattttaattttatcatcatgaactagtgtctaaatacctatgtttttttcagaaagcaaggaagtaaactcaaacaaaagtgcgtgtaattaaatactattaatcataggcagatactattttgtttatgtttttgtttttttcctgatgaaggcagaagagatggtggtctattaaatatgaattgaatggagggtcctaatgccttatttcaaaacaattcctcagggggaccagctttggcttcatctttctcttgtgtggcttcacatttaaaccagtatctttattgaattagaaaacaagtgggacatattttcctgagagcagcacaggaatcttcttcttggcagctgcagtctgtcaggatgagatatcagattaggttggataggtggggaaatctgaagtgggtacattttttaaattttgctgtgtgggtcacacaaggtctacattacaaaagacagaattcagggatggaaaggagaatgaacaaatgtgggagttcatagttttccttgaatccaacttttaattaccagagtaagttgccaaaatgtgattgttgaagtacaaaaggaactatgaaaaccagaacaaattttaacaaaaggacaaccacagagggatatagtgaatatcgtatcattgtaatcaaagaagtaaggaggtaagattgccacgtgcctgctggtactgtgatgcatttcaagtggcagttttatcacgtttgaatctaccattcatagccagatgtgtatcagatgtttcactgacagtttttaacaataaattcttttcactgtattttatatcacttataataaatcggtgtataatttt

SEQ ID NO: 395 - DNA, 1948 bp, Homo sapiens
cggagggacgcggccctaggcggtggcgatggggaccgcccggatcgcacccggcctggcgctcctgctctgctgccccgtgctcagctccgcgtacgcgctggtggatgcagatgacgtcatgactaaagaggaacagatcttcctgctgcaccgtgctcaggcccagtgcgaaaaacggctcaaggaggtcctgcagaggccagccagcataatggaatcagacaagggatggacatctgcgtccacatcagggaagcccaggaaagataaggcatctgggaagctctaccctgagtctgaggaggacaaggaggcacccactggcagcaggtaccgagggcgcccctgtctgccggaatgggaccacatcctgtgctggccgctgggggcaccaggtgaggtggtggctgtgccctgtccggactacatttatgacttcaatcacaaaggccatgcctaccgacgctgtgaccgcaatggcagctgggagctggtgcctgggcacaacaggacgtgggccaactacagcgagtgtgtcaaatttctcaccaatgagactcgtgaacgggaggtgtttgaccgcctgggcatgatttacaccgtgggctactccgtgtccctggcgtccctcaccgtagctgtgctcatcctggcctactttaggcggctgcactgcacgcgcaactacatccacatgcacctgttcctgtccttcatgctgcgcgccgtgagcatcttcgtcaaggacgctgtgctctactctggcgccacgcttgatgaggctgagcgcctcaccgaggaggagctgcgcgccatcgcccaggcgcccccgccgcctgccaccgccgctgccggctacgcgggctgcagggtggctgtgaccttcttcctttacttcctggccaccaactactactggattctggtggaggggctgtacctgcacagcctcatcttcatggccttcttctcagagaagaagtacctgtggggcttcacagtcttcggctggggtctgcccgctgtcttcgtggctgtgtgggtcagtgtcagagctaccctggccaacaccgggtgctgggacttgagctccgggaacaaaaagtggatcatccaggtgcccatcctggcctccattgtgctcaacttcatcctcttcatcaatatcgtccgggtgctcgccaccaagctgcgggagaccaacgccggccggtgtgacacacggcagcagtaccggaagctgctcaaatccacgctggtgctcatgcccctctttggcgtccactacattgtcttcatggccacaccatacaccgaggtctcagggacgctctggcaagtccagatgcactatgagatgctcttcaactccttccagggattttttgtcgcaatcatatactgtttctgcaatggcgaggtacaagctgagatcaagaaatcttggagccgctggacactggcactggacttcaagcgaaaggcacgcagcgggagcagcagctatagctacggccccatggtgtcccacacaagtgtgaccaatgtcggcccccgtgtgggactcggcctgcccctcagcccccgcctactgcccactgccaccaccaacggccaccctcagctgcctggccatgccaagccagggaccccagccctggagaccctcgagaccacaccacctgccatggctgctcccaaggacgatgggttcctcaacggctcctgctcaggcctggacgaggaggcctctgggcctgagcggccacctgccctgctacaggaagagtgggagacagtcatgtgaccaggcgctgggggctggacctgctgacatagtggatggacagatggaccaaaagatgggtggttgaatgatttcccactcagggcctggggccaagaggaaaaacagggaaaaaaagaaaaaaaaaagaaaaaggaa

SEQ ID NO: 396 - DNA, 1550 bp, Homo sapiens
gtggcctaccatggtttcaacgggtaacggggaataagggttcgattcggagctgcgggagccgggctggcaggagcaggatggcggcggcggcggctgcaggcgaggcgcgccgggtgctggtgtacggcggcaggggcgctctgggttctcgatgcgtgcaggcttttcgggcccgcaactggtgggttgccagcgttgatgtggtggagaatgaagaggccagcgctacgatcattgttaaaatgacagactcgttcactgagcaggctgaccaggtgactgctgaggttggaaagctcttgggtgaagagaaggtggatgcaattctttgcgttgctggaggatgggccgggggcaatgccaaatccaagtctctctttaagaactgtgacctgatgtggaagcagagcatatggacatcgaccatctccagccatctggctaccaagcatctcaaggaaggaggcctcctgaccttggctggcgcaaaggctgccctggatgggactcctggtatgatcgggtacggcatggccaagggtgctgttcaccagctctgccagagcctggctgggaagaacagcggcatgccgcccggggcagccgccatcgctgtgctcccggttaccctggataccccgatgaacaggaaatcaatgcctgaggctgacttcagctcctggacacccttagaattcctagttgaaactttccatgactggatcacagggaaaaaccgaccgagctcaggaagcctaatccaggtggtaaccacagaaggaaggacggaactcaccccagcatatttttaggcctcatctcagtgcctatgaggggcctgccagaaaagtcactaacctgtctcagtgtggccttgtccagccttgtgttttctgtaacccctgtttgtggtacgagataatgagtcctatttttctctcacataatatgcatttgctctcctagggacaagtgtaatacatttatgtgaagtaagacaatgcgagactggtggccgtcaaatagcatccgtcaatctgtgttaactgcataggaggctctcgatagcacctgctatagcggtgtcatgttggatcgctttgtgactgttcatctgtccttgacagtggctgtcatcttgactactttgttgatttgttggtattggggacattttaaaggctgagttatttttgaatgtcatgtttatgtcatagacgtagaaaacgcatccttgaattaaactgccttaactccttttgtggtataagcaaactacatggactctgtccctggtatccttttcctgtgtggttgcccctgtgcctgtggtctggcctaggttaagtgtgcaagataactactcgtgagttattcagaatgttgttcctaataaatgcacttgttgtctgtcttctttaatcaaatcacatcttatatacagcagtcagagatgagtatactagaatcatggattgctggaggtcttttaatctgatgttctcagaagggggtggatttaaatcctgaaataaatatttcaacac

SEQ ID NO: 397 - DNA, 10660 bp, Homo sapiens
ctactacagtggcggacgtacaggacctgtttcactgcagggggatccaaaacaagccccgtggagcaacagccagagcaacagcagctgcaagacattgtttctctccctctgcccccccttccccacgcaaccccagatccatttacactttacagttttacctcacaaaaactactacaagcaccaagctccctgatggaaaggagcatcgtgcatcaagtcaccagggtggtccattcaagctgcagatttgtttgtcatccttgtacagcaatctcctcctccactgccactacagggaagtgcatcacatgtcagcatactggagcatagtgaaagagtctattttgaagcttcaaacttagtgctgctgcagaccaggaacaagagagaaagagtggatttcagcctgcacggatggtcttgaaacacaaatggtttttggtctaggcgttttacactgagattctccactgccaccctttctactcaagcaaaatcttcgtgaaaagatctgctgcaaggaactgatagcttatggttctccattgtgatgaaagcacatggtacagttttccaaagaaattagaccattttcttcgtgagaaagaaatcgacgtgctgttttcatagggtatttctcacttctctgtgaaaggaagaaagaacacgcctgagcccaagagccctcaggagccctccagagcctgtgggaagtctccatggtgaagtataggctgaggctacctgtgaacagtacgcagtgaatgttcatccagagctgctgttggcggattgtacccacggggagatgattcctcatgaagagcctggatcccctacagaaatcaaatgtgactttccgtttatcagactaaaatcagagccatccagacagtgaaacagtcaccgtggaggggggacggcgaaaaatgaaatccaaccaagagcggagcaacgaatgcctgcctcccaagaagcgcgagatccccgccaccagccggtcctccgaggagaaggcccctaccctgcccagcgacaaccaccgggtggagggcacagcatggctcccgggcaaccctggtggccggggccacgggggcgggaggcatgggccggcagggacctcggtggagcttggtttacaacagggaataggtttacacaaagcattgtccacagggctggactactccccgcccagcgctcccaggtctgtccccgtggccaccacgctgcctgccgcgtacgccaccccgcagccagggaccccggtgtcccccgtgcagtacgctcacctgccgcacaccttccagttcattgggtcctcccaatacagtggaacctatgccagcttcatcccatcacagctgatccccccaaccgccaaccccgtcaccagtgcagtggcctcggccgcaggggccaccactccatcccagcgctcccagctggaggcctattccactctgctggccaacatgggcagtctgagccagacgccgggacacaaggctgagcagcagcagcagcagcagcagcagcagcagcagcagcatcagcatcagcagcagcagcagcagcagcagcagcagcagcagcagcagcagcacctcagcagggctccggggctcatcaccccggggtcccccccaccagcccagcagaaccagtacgtccacatttccagttctccgcagaacaccggccgcaccgcctctcctccggccatccccgtccacctccacccccaccagacgatgatcccacacacgctcaccctggggcccccctcccaggtcgtcatgcaatacgccgactccggcagccactttgtccctcgggaggccaccaagaaagctgagagcagccggctgcagcaggccatccaggccaaggaggtcctgaacggtgagatggagaagagccggcggtacggggccccgtcctcagccgacctgggcctgggcaaggcaggcggcaagtcggttcctcacccgtacgagtccaggcacgtggtggtccacccgagcccctcagactacagcagtcgtgatccttcgggggtccgggcctctgtgatggtcctgcccaacagcaacacgcccgcagctgacctggaggtgcaacaggccactcatcgtgaagcctccccttctaccctcaacgacaaaagtggcctgcatttagggaagcctggccaccggtcctacgcgctctcaccccacacggtcattcagaccacacacagtgcttcagagccactcccggtgggactgccagccacggccttctacgcagggactcaaccccctgtcatcggctacctgagcggccagcagcaagcaatcacctacgccggcagcctgccccagcacctggtgatccccggcacacagcccctgctcatcccggtcggcagcactgacatggaagcgtcgggggcagccccggccatagtcacgtcatccccccagtttgctgcagtgcctcacacgttcgtcaccaccgcccttcccaagagcgagaacttcaaccctgaggccctggtcacccaggccgcctacccagccatggtgcaggcccagatccacctgcctgtggtgcagtccgtggcctccccggcggcggctccccctacgctgcctccctacttcatgaaaggctccatcatccagttggccaacggggagctaaagaaggtggaagacttaaaaacagaagatttcatccagagtgcagagataagcaacgacctgaagatcgactccagcaccgtagagaggattgaagacagccatagcccgggcgtggccgtgatacagttcgccgtcggggagcaccgagcccaggtcagcgttgaagttttggtagagtatcctttttttgtgtttggacagggctggtcatcctgctgtccggagagaaccagccagctctttgatttgccgtgttccaaactctcagttggggatgtctgcatctcgcttaccctcaagaacctgaagaacggctctgttaaaaagggccagcccgtggatcccgccagcgtcctgctgaagcactcaaaggccgacggcctggcgggcagcagacacaggtatgccgagcaggaaaacggaatcaaccaggggagtgcccagatgctctctgagaatggcgaactgaagtttccagagaaaatgggattgcctgcagcgcccttcctcaccaaaatagaacccagcaagcccgcggcaacgaggaagaggaggtggtcggcgccagagagccgcaaactggagaagtcagaagacgaaccacctttgactcttcctaagccttctctaattcctcaggaggttaagatttgcattgaaggccggtctaatgtaggcaagtagaggcagcgtgggggaaaggaaacgtggctctcccttatcatttgtatccagattactgtactgtaggctaaaataacacagtatttacatgttatcttcttaattttaggtttctgttctaaccttgtcattagagttacagcaggtgtgtcgcaggagactggtgcatatgctttttccacgagtgtctgtcagtgagcgggcgggaggaagggcacagcaggagcggtcagggctccaggcatccccggggaagaaaggaacggggcttcacagtgcctgccttctctagcggcacagaagcagccgggggcgctgactcccgctagtgtcaggagaaaagtcccgtgggaagagtcctgcaggggtgcagggttgcacgcatgtgggggtgcacaggcgctgtggcggcgagtgagggtctctttttctctgcctccctctgcctcactctcttgctatcggcatgggccgggggggttcagagcagtgtcctcctggggttcccacgtgcaaaatcaacatcaggaacccagcttcagggcatcgcggagacgcgtcagatggcagatttggaaagttaaccatttaaaagaacatttttctctccaacatattttacaataaaagcaacttttaattgtatagatatatatttccccctatggggcctgactgcactgatatatattttttttaaagagcaactgccacatgcgggatttcatttctgctttttactagtgcagcgatgtcaccagggtgttgtggtggacagggaagcccctgctgtcatggccccacatggggtaaggggggttgggggtgggggagagggagagagcgaacacccacgctggtttctgtgcagtgttaggaaaaccaatcaggttattgcattgacttcactcccaagaggtagatgcaaactgcccttcagtgagagcaacagaagctcttcacgttgagtttgcgaaatctttttgtctttgaactctagtactgtttatagttcatgactatggacaactcgggtgccacttttttttttttcagattccagtgtgacatgaggaattagattttgaagatgagcatatattactatctttaagcatttaaaaatactgttcacactttattaccaagcatcttggtctctcattcaacaagtactgtatctcactttaaactctttggggaaaaaacaaaaacaaaaaaaactaagttgctttctttttttcaacactgtaactacatttcagctctgcagaattgctgaagagcaagatattgaaagtttcaatgtggtttaaagggatgaatgtgaattatgaactagtatgtgacaataaatgaccaccaagtactacctgacgggaggcacttttcactttgatgtctgagaatcagttcaaggcatatgcagagttggcagagaaactgagagaaaagggatggagaagagaatactcatttttgtccagtgtttttctttttaagatgaacttttaaagaaccttgcgatttgcacatattgagtttataacttgtgtgatattcctgcagtttttatccaataacattgtgggaaaggtttgggggactgaacgagcataaataaatgtagcaaaatttctttctaacctgcctaaactctaggccattttataaggttatgttcctttgaaaattcattttggtctttttaccacatctgtcacaaaaagccaggtcttagcgggctcttagaaactctgagaattttcttcagattcattgagagagttttccataaagacatttatatatgtgagcaagattttttttaaacaattactttattattgttgttattaatgttattttcagaatggctttttttttctattcaaaatcaaatcgagatttaatgtttggtacaaacccagaaagggtatttcatagtttttaaacctttcattcccagagatccgaaatatcatttgtgggttttgaatgcatctttaaagtgctttaaaaaaaagttttataagtagggagaaatttttaaatattcttacttggatggctgcaactaaactgaacaaatacctgacttttcttttaccccattgaaaatagtactttcttcgtttcacaaattaaaaaaaaaatctggtatcaacccacattttggctgtctagtattcatttacatttagggttcaccaggactaatgatttttataaaccgttttctggggtgtaccaaaaacatttgaataggtttagaatagctagaatagttccttgactttcctcgaatttcattaccctctcagcatgcttgcagagagctgggtgggctcattcttgcagtcatactgcttatttagtgctgtattttttaaacgtttctgttcagagaacttgcttaatcttccatatattctgctcagggcacttgcaattattaggttttgtttttctttttgttttttagcctttgatggtaagaggaatacgggctgccacatagactttgttctcattaatatcactatttacaactcatgtggactcagaaaaacacacaccaccttttggcttacttcgagtattgaattgactggatccactaaaccaacactaagatgggaaaacacacatggtttggagcaataggaacatcatcataatttttgtggttctatttcaggtataggaattataaaataattggttctttctaaacacttgtcccatttcattctcttgcttttttagcatgtgcaatactttctgtgccaatagagtctgaccagtgtgctatatagttaaagctcattcccttttggctttttccttgtttggttgatcttccccattctggccagagcagggctggagggaaggagccaggagggagagagcctcccacctttcccctgctgcggatgctgagtgctggggcggggagccttcaggagccccgtgcgtctgccgccacgttgcagaaagagccagccaaggagacccgggggaggaaccgcagtgtcccctgtcaccacacggaatagtgaatgtggagtgtggagaggaaggaggcagattcatttctaagacgcactctggagccatgtagcctggagtcaacccattttccacggtcttttctgcaagtgggcaggcccctcctcggggtctgtgtccttgagacttggagccctgcctctgagcctggacgggaagtgtggcctgttgtgtgtgtgcgttctgagcgtgttggccagtggctgtggaggggaccacctgccacccacggtcaccactcccttgtggcagctttctcttcaaataggaagaacgcacagagggcaggagcctcctgtttgcagacgttggcgggccccgaggctcccagagcagcctctgtcaccgcttctgtgtagcaaacattaacgatgacaggggtagaaattcttcggtgccgttcagcttacaaggatcagccatgtgcctctgtactatgtccactttgcaatatttaccgacagccgtcttttgttctttctttcctgttttccatttttaaactagtaacagcaggccttttgcgtttacaatggaacacaatcaccaagaaattagtcagggcgaaaagaaaaaaataatactattaataagaaaccaacaaacaagaacctctctttctagggatttctaaatatataaaatgactgttccttagaatgtttaacttaagaattatttcagtttgtctgggccacactggggcagaggggggagggagggatacagagatggatgccacttacctcagatcttttaaagtggaaatccaaattgaattttcatttggactttcaggataattttctatgttggtcaacttttcgttttccctaactcacccagtttagtttgggatgatttgatttctgttgttgttgatcccatttctaacttggaattgtgagcctctatgttttctgttaggtgagtgtgttgggttttttccccccaccaggaagtggcagcatccctccttctcccctaaagggactctgcggaacctttcacacctctttctcagggacggggcaggtgtgtgtgtggtacactgacgtgtccagaagcagcactttgactgctctggagtagggttgtacaatttcaaggaatgtttggatttcctgcatcttgtggattactccttagataccgcatagattgcaatataatgctgcatgttcaagatgaacagtagctcctagtaatcataaaatccactctttgcacagtttgatctttactgaaatatgttgccaaaatttatttttgttgttgtagctctggattttgttttgttttgttttttaaggaaacgattgacaataccctttaacatctgtgactactaaggaaacctatttctttcatagagagaaaaatctccaatgcttttgaagacactaataccgtgctatttcagatatgggtgaggaagcagagctctcggtaccgaaggccgggcttcttgagctgtgttggttgtcatggctactgtttcatgaaccacaagcagctcaacagactggtctgttgccttctgaaaccctttgcacttcaatttgcaccaggtgaaaacagggccagcagactccatggcccaattcggtttcttcggtggtgatgtgaaaggagagaattacactttttttttttttaagtggcgtggaggcctttgcttccacatttgtttttaacccagaatttctgaaatagagaatttaagaacacatcaagtaataaatatacagagaatatacttttttataaagcacatgcatctgctattgtgttgggttggtttcctctcttttccacggacagtgttgtgtttctggcatagggaaactccaaacaacttgcacacctctactccggagctgagatttcttttacatagatgacctcgcttcaaatacgttaccttactgatgataggatcttttcttgtagcactataccttgtgggaatttttttttaaatgtacacctgatttgagaagctgaagaaaacaaaattttgaagcactcactttgaggagtacaggtaatgttttaaaaaattgcacaaaagaaaaatgaatgtcgaaatgattcattcagtgtttgaaagatatggctctgttgaaacaatgagtttcatactttgtttgtaaaaaaaaaaagcagagaagggttgaaagttacatgtttttttgtatatagaaatttgtcatgtctaaatgatcagatttgtatggttatggcctggaagaattactacgtaaaaggctcttaaactatacctatgcttattgttatttttgttacatatagccctcgtctgagggaggggaactcggtattctgcgatttgagaatactgttcattcctatgctgaaagtacttctctgagctcccttcttagtctaaactcttaagccattgcaacttctttttcttcagagatgatgtttgacattttcagcacttcctgttcctataaacccaaagaatataatcttgaacacgaagtgtttgtaacaagggatccaggctaccaatcaaacaggactcattatggggacaaaaaaaaaaaaaattatttcaccttctttccccccacacctcatttaaatggggggagtaaaaacatgatttcaatgtaaatgcctcattttattttagttttattttgatttttatttaatataaagaggccagaataaatacggagcatcttctcagaatagtattcctgtccaaaaatcaagccggacagtggaaactggacagctgtggggatattaagcacccccacttacaattcttaaattcagaatctcgtcccctcccttctcgttgaaggcaactgttctggtagctaactttctcctgtgtaatggcgggagggaacaccggcttcagtttttcatgtccccatgacttgcatacaaatggttcaactgtattaaaattaagtgcatttggccaataggtagtatctatacaataacaacaatctctaagaatttccataacttttcttatctgaaaggactcaagtcttccactgcagatacattggaggcttcacccacgttttctttccctttagtttgtttgctgtctggatggccaatgagcctgtctccttttctgtggccaatctgaaggccttcgttggaagtgttgttcacagtaatccttaccaagataacatactgtcctccagaataccaagtattaggtgacactagctcaagctgttgtcttcagagcagttaccaagaagctcggtgcacaggttttctctggttcttacaggaaccacctactctttcagttttctggcccaggagtggggtaaatcctttagttagtgcatttgaacttggtacctgtgcattcagttctgtgaatactgccctttttggcggggtttcctcatctccccagcctgaactgctcaactctaaacccaaattagtgtcagccgaaaggaggtttcaagatagtcctgtcagtatttgtggtgaccttcagattagacagtcttcatttccagccagtggagtcctggctccagagccatctctgagactccgtactactggatgttttaatatcagatcattacccaccatatgcctcccacaggccaagggaaaacagacaccagaacttgggttgagggcactaccagactgacatggccagtacagaggagaactagggaaggaatgatgttttgcaccttattgaaaagaaaattttaagtgcatacataatagttaagagcttttattgtgacaggagaacttttttccatatgcgtgcatactctctgtaattccagtgtaaaatattgtacttgcactagcttttttaaacaaatattaaaaaatggaagaattcatattctattttctaatcgtggtgtgtctatttgtaggatacactcgagtctgtttattgaattttatggtccctttctttgatggtgcttgcaggttttctaggtagaaattatttcattattataataaaacaatgtttgattcaaaatttgaacaaaattgttttaaataaattgtctgtataccagtacaagtttattgtttcagtatactcgtactaataaaataacagtgccaattgcaaaaaaaaaaaaaaaaaaaaaaaaaaaaaaaaaaaaaaaaaaaaaaaaaaaaaaaaa

SEQ ID NO: 398 - DNA, 1780 bp, Homo sapiens
tattcctggttgcagcaagcactctcctactccctgtccatattagatgcatctcctgttttcaagggagagaaacccctgctcagcccctgatgagcacatcatcaaatatttactattgttttattaatcaatgtgggtggttattatgtgtctctggctcagggagtgtttcatccaactaagctccctcagtggttgtctcacttcatctcttatagattaacttccttccaaaatgtcaccattcctgtacctggttctcttggtacttgggcttcatgctacaatccactgtgcatcacctgaaggcaaagtaacagcctgccattcatcccaaccaaatgccactctctacaagatgtcatccattaatgctgactttgcattcaatctgtaccggaggttcactgtggagaccccagataagaacatcttcttttcccctgtgagcatttctgcagctttggttatgctttcctttggggcctgctgcagcacccaaactgagattgtggagaccttggggttcaacctcacagacactccaatggtagagatccagcatggcttccagcatctgatctgttcactgaattttccaaagaaggaactggaattgcagataggaaatgccctcttcattggcaagcatctgaaaccactggcaaagttcttgaatgatgtcaagaccctctatgagactgaagtcttttctaccgacttctccaacatttctgcagccaagcaggagattaacagtcatgtggagatgcaaaccaaagggaaagttgtgggtctaattcaagacctcaagccaaacaccactatggtcttagtgaactatattcactttaaagcccagtgggcaaatccttttgatccatccaagacagaagacagttccagcttcttaatagacaagaccaccactgttcaagtgcccatgatgcaccagatggaacaatactatcacctagtggatatggaattgaactgcacagttctgcaaatggactacagcaagaatgctctggcactctttgttcttcccaaggagggacagatggagtcagtggaagctgccatgtcatctaaaacactgaagaagtggaaccgcttactacagaagggatgggttgacttgtttgttccaaagttttccatttctgccacatatgaccttggagccacacttttgaagatgggcattcagcatgcctattctgaaaatgctgatttttctggactcacagaggacaatggtctgaaactttccaatgctgcccataaggctgtgctgcacattggtgaaaagggaactgaagctgcagctgtccctgaagttgaactttcggatcagcctgaaaacactttcctacaccctattatccaaattgatagatctttcatgttgttgattttggagagaagcacaaggagtattctctttctagggaaagttgtgaacccaacggaagcgtagttgggaaaaaggccattggctaattgcacgtgtgtattgcaatgggaaataaataaataatatagcctggtgtgattgatgtgagcttggacttgcattcccttatgatgggatgaagattgaaccctggctgaactttgttggctgtggaagaggccaatcctatggcagagcattcagaatgtcaatgagtaattcattattatccaaagcataggaaggctctatgtttgtatatttctctttgtcagaatacccctcaactcatttgctctaataaatttgactgggttg

SEQ ID NO: 399 - DNA, 2691 bp, Homo sapiens
gcttgcccgtcggtcgctagctcgctcggtgcgcgtcgtcccgctccatggcgctcttcgtgcggctgctggctctcgccctggctctggccctgggccccgccgcgaccctggcgggtcccgccaagtcgccctaccagctggtgctgcagcacagcaggctccggggccgccagcacggccccaacgtgtgtgctgtgcagaaggttattggcactaataggaagtacttcaccaactgcaagcagtggtaccaaaggaaaatctgtggcaaatcaacagtcatcagctacgagtgctgtcctggatatgaaaaggtccctggggagaagggctgtccagcagccctaccactctcaaacctttacgagaccctgggagtcgttggatccaccaccactcagctgtacacggaccgcacggagaagctgaggcctgagatggaggggcccggcagcttcaccatcttcgcccctagcaacgaggcctgggcctccttgccagctgaagtgctggactccctggtcagcaatgtcaacattgagctgctcaatgccctccgctaccatatggtgggcaggcgagtcctgactgatgagctgaaacacggcatgaccctcacctctatgtaccagaattccaacatccagatccaccactatcctaatgggattgtaactgtgaactgtgcccggctcctgaaagccgaccaccatgcaaccaacggggtggtgcacctcatcgataaggtcatctccaccatcaccaacaacatccagcagatcattgagatcgaggacacctttgagacccttcgggctgctgtggctgcatcagggctcaacacgatgcttgaaggtaacggccagtacacgcttttggccccgaccaatgaggccttcgagaagatccctagtgagactttgaaccgtatcctgggcgacccagaagccctgagagacctgctgaacaaccacatcttgaagtcagctatgtgtgctgaagccatcgttgcggggctgtctgtagagaccctggagggcacgacactggaggtgggctgcagcggggacatgctcactatcaacgggaaggcgatcatctccaataaagacatcctagccaccaacggggtgatccactacattgatgagctactcatcccagactcagccaagacactatttgaattggctgcagagtctgatgtgtccacagccattgaccttttcagacaagccggcctcggcaatcatctctctggaagtgagcggttgaccctcctggctcccctgaattctgtattcaaagatggaacccctccaattgatgcccatacaaggaatttgcttcggaaccacataattaaagaccagctggcctctaagtatctgtaccatggacagaccctggaaactctgggcggcaaaaaactgagagtttttgtttatcgtaatagcctctgcattgagaacagctgcatcgcggcccacgacaagagggggaggtacgggaccctgttcacgatggaccgggtgctgacccccccaatggggactgtcatggatgtcctgaagggagacaatcgctttagcatgctggtagctgccatccagtctgcaggactgacggagaccctcaaccgggaaggagtctacacagtctttgctcccacaaatgaagccttccgagccctgccaccaagagaacggagcagactcttgggagatgccaaggaacttgccaacatcctgaaataccacattggtgatgaaatcctggttagcggaggcatcggggccctggtgcggctaaagtctctccaaggtgacaagctggaagtcagcttgaaaaacaatgtggtgagtgtcaacaaggagcctgttgccgagcctgacatcatggccacaaatggcgtggtccatgtcatcaccaatgttctgcagcctccagccaacagacctcaggaaagaggggatgaacttgcagactctgcgcttgagatcttcaaacaagcatcagcgttttccagggcttcccagaggtctgtgcgactagcccctgtctatcaaaagttattagagaggatgaagcattagcttgaagcactacaggaggaatgcaccacggcagctctccgccaatttctctcagatttccacagagactgtttgaatgttttcaaaaccaagtatcacactttaatgtacatgggccgcaccataatgagatgtgagccttgtgcatgtgggggaggagggagagagatgtactttttaaatcatgttccccctaaacatggctgttaacccactgcatgcagaaacttggatgtcactgcctgacattcacttccagagaggacctatcccaaatgtggaattgactgcctatgccaagtccctggaaaaggagcttcagtattgtggggctcataaaacatgaatcaagcaatccagcctcatgggaagtcctggcacagtttttgtaaagcccttgcacagctggagaaatggcatcattataagctatgagttgaaatgttctgtcaaatgtgtctcacatctacacgtggcttggaggcttttatggggccctgtccaggtagaaaagaaatggtatgtagagcttagatttccctattgtgacagagccatggtgtgtttgtaataataaaaccaaagaaacata

SEQ ID NO: 400 - DNA, 2709 bp, Homo sapiens
gggtcctgtcccatccatcctgacctgttccatctcagccccaggactcagtactgcggttgccaacactgctgccaggcatgatggatgggccacgttccgatgtgggccgttggggtggcaaccccttgcagccccctaccacgccatctccagagccagagccagagccagacggacgctctcgcagaggaggaggccgttccttctgggctcgctgctgtggctgctgttcatgccgaaatgcggcagatgacgactggggacctgaaccctctgactccaggggtcgagggtccagctctggcactcgaagacctggctcccggggctcagactcccgccggcctgtatcccggggcagcggtgtcaatgcagctggagatggcaccatccgagagggcatgctagtagtgaacggtgtggacttgctgagctcgcgctcggaccagaaccgccgagagcaccacacagacgagtatgagtacgacgagctgatagtgcgccgcgggcagcctttccatatgctcctcctcctgtcccggacctatgaatcctctgatcgcatcacccttgagttactcatcggaaacaaccccgaggtgggcaagggcacgcacgtgatcatcccagtgggcaaggggggcagtggaggctggaaagcccaggtggtcaaggccagtgggcagaatctgaacctgcgggtccacacttcccccaacgccatcatcggcaagtttcagttcacagtccgcacacaatcagacgctggggagttccagttgccctttgacccccgcaatgagatctacatcctcttcaacccctggtgcccagaggacattgtgtacgtggaccatgaggattggcggcaggagtatgttcttaatgagtctgggagaatttactacgggaccgaagcacagattggtgagcggacctggaactacggccagtttgaccacggggtgctggatgcctgcttatacatcctggaccggcgggggatgccatatggaggccgtggagacccagtcaatgtctcccgggtcatctctgccatggtgaactccctggatgacaatggagtcctgattgggaactggtctggtgattactcccgaggcaccaacccatcagcgtgggtgggcagcgtggagatcctgcttagctacctacgcacgggatattccgtcccctatggccagtgctgggtctttgctggagtgaccaccacagtgctgcgctgcctgggtctggccacccgtactgtcaccaacttcaactccgcccacgacacagacacatcccttaccatggacatctacttcgacgagaacatgaagcccctggagcacctgaaccatgattctgtctggaacttccatgtgtggaacgactgctggatgaagaggccggatctgccctcgggctttgatgggtggcaggtggtggatgccacaccccaagagactagcagtggcatcttctgctgcggcccctgctctgtggagtccatcaagaatggcctggtctacatgaagtacgacacgcctttcatttttgctgaggtgaatagtgacaaggtgtactggcagcggcaggatgatggcagcttcaagattgtttatgtggaggagaaggccatcggcacactcattgtcacaaaggccatcagctccaacatgcgggaggacatcacctacctctataagcacccagaaggctcagacgcagagcggaaggcagtagagacagcagcagcccacggcagcaaacccaatgtgtatgccaaccggggctcagcggaggatgtggccatgcaggtggaggcacaggacgcggtgatggggcaggatctgatggtctctgtgatgctgatcaatcacagcagcagccgccgcacagtgaaactgcacctctacctctcagtcactttctatactggtgtcagtggtaccatcttcaaggagaccaagaaggaagtggagctggcaccaggggcctcggaccgtgtgaccatgccagtggcctacaaggaataccggccccatcttgtggaccagggggccatgctgctcaatgtctcaggccacgtcaaggagagcgggcaggtgctggccaagcagcacaccttccgtctgcgcaccccagacctctccctcacgttactgggagcagcagtggttggccaggagtgtgaagtacagattgtcttcaagaacccccttcccgtcaccctcaccaatgtcgtcttccggctcgaaggctctgggttacagaggcccaagatcctcaacgttggggacattggaggcaatgaaacagtgacactgcgccagtcgtttgtgcctgtgcgaccaggcccccgccagctcattgccagcttggacagcccacagctctcccaggtgcacggtgtcatccaggtggatgtggccccagcccctggggatgggggcttcttctcagacgctggaggtgacagtcacttaggagagaccatccctatggcatctcgaggtggagcttagccctgtgccaggagcaatgggactggagtcagatgagcaaggacattgccccaagataggggcacactacagagcagctccccaggagctcaggtggggagtccagggctcccggagagggagtcagtcttcacttgcactgggggaacagatgctaataaactgttttttaatg

SEQ ID NO: 401 - DNA, 5483 bp, Homo sapiens
  misc_feature (399)..(399): n is a, c, g, or t
  misc_feature (401)..(401): n is a, c, g, or t
  misc_feature (656)..(656): n is a, c, g, or t
tctgtcgacttgccccagagctgatccttgtctttgtccacttctcagcgaggatggcacttcagggagcccttcccttactatcgcagagagagcaggccctccccagtcatgtccaacccagaactctgttttgttttcttcatagccctagcatcacagaaaatcaccctgtgcattcatggatgtccacgggggcaagggctttgtgttgcttaacccagcatcctgaaccgtgtttgttgaatgaatacagaaccccgtttgctctgggagagcacagaaaacagtcttctatcatatatcatagccagctcgaaacagcagatggcttccatatccagagagcaagaaccagagagagagagaaagagagagagtttgggtctttctcctctntncctgctctctccagagaaactggaggggtagcagttagcattcccccgctggttccaccaagcacagtcaaggtctctaggacatggccacccctcacctgtggaagcggtcctgctggggtgggtgggtgttagttggttctggtttgggtcagagacacccagtggcccaggtgggcgtggggccagggcgcagacgagaaggggcacgagggctccgctccgaggacccagcggcaagcaccggtcccgggngggccccagcccacccactcgcgtgcccacggcggcattattccctataaggatctgaacgatccgggggcggccccgccccgttaccccttgcccccggccccgccccctttttggagggccgatgaggtaatgcggctctgccattggtctgagggggcgggccccaacagcccgaggcggggtccccgggggcccagcgctatatcactcggccgcccaggcagacggcgcagagcgggcagcaggcaggcggcgggcgctcagacggcttctcctcctcctcttgctcctccagctcctgctccttcgccgggaggccgcccgccgagtcctggccagcgccgaggcagcctgcctgcgccccatcccgtcccgccgggcactcggagggcagcgcgccggaggccaaggttgccccgcacggcccggcgggcgagcgagctcgggctgcagcagccccgccggcgcgcacggcaactttggagaggcgagcagcagccccggcagcggcggcagcagcggcaatgaccccttggctcgggctcatcgtgctcctgggcagctggagcctgggggactggggcgccgaggcgtgcacatgctcgcccagccacccccaggacgccttctgcaactccgacatcgtgatccgggccaaggtggtggggaagaagctggtaaaggaggggcccttcggcacgctggtctacaccatcaagcagatgaagatgtaccgaggcttcaccaagatgccccatgtgcagtacatccacacggaagcttccgagagtctctgtggccttaagctggaggtcaacaagtaccagtacctgctgacaggtcgcgtctatgatggcaagatgtacacggggctgtgcaacttcgtggagaggtgggaccagctcaccctctcccagcgcaaggggctgaactatcggtatcacctgggttgtaactgcaagatcaagtcctgctactacctgccttgctttgtgacttccaagaacgagtgtctctggaccgacatgctctccaatttcggttaccctggctaccagtccaaacactacgcctgcatccggcagaagggcggctactgcagctggtaccgaggatgggcccccccggataaaagcatcatcaatgccacagacccctgagcgccagaccctgccccacctcacttccctcccttcccgctgagcttcccttggacactaactcttcccagatgatgacaatgaaattagtgcctgttttcttgcaaatttagcacttggaacatttaaagaaaggtctatgctgtcatatggggtttattgggaactatcctcctggccccaccctgccccttctttttggttttgacatcattcatttccacctgggaatttctggtgccatgccagaaagaatgaggaacctgtattcctcttcttcgtgataatataatctctatttttttaggaaaacaaaaatgaaaaactactccatttgaggattgtaattcccacccctcttgcttcttccccacctcaccatctcccagaccctcttccctttgcccttctcctccaatacataaaggacacagacaaggaacttgctgaaaggccaaccatttcaggatcagtcaaaggcagcaagcagatagactcaaggtgtgtgaaagatgttatacaccaggagctgccactgcatgtcccaaccagactgtgtctgtctgtgtctgcatgtaagagtgagggagggaaggaaggaactacaagagagtcggagatgatgcagcacacacacaattccccagcccagtgatgcttgtgttgaccagatgttcctgagtctggagcaagcacccaggccagaataacagagctttcttagttggtgaagacttaaacatctgcctgaggtcaggaggcaatttgcctgccttgtacaaaagctcaggtgaaagactgagatgaatgtctttcctctccctgcctcccaccagacttcctcctggaaaacgctttggtagatttggccaggagctttcttttatgtaaattggataaatacacacaccatacactatccacagatatagccaagtagatttgggtagaggatactatttccagaatagtgtttagctcacctagggggatatgtttgtatacacatttgcatatacccacatggggacataagctaatttttttacaggacacagaattctgttcaatgctgttaaatatgccaatagtttaatctcttctattttgttgtcgttgcttgtttgaagaaaatcatgacattccaagttgacattttttttttcattttaattaaaatttgaaattctgaacaccgtcagcaccctctcttccctatcatgggtcatctgacccctgtccgtctccttgtccctgcttcatgtttgggggcctttctttaactgccttcctggcttagctcagatggcagatgagagtgtagtcaagggcctgggcacaggagggagagctgcagagtgtcctgcctgccttggctggagggacacctctcctgggtgtggagacagcttggttccctttccctagctccctggtgggtgaatgccacctcctgagatcctcacctcttggaattaaaattgttggtcactggggaaagcctgagtttgcaaccagttgtagggtttctgttgtgttttttttttttttgaaataaaactataatataaattctcctattaaataaaattattttaagttttagtgtcaaaagtgagatgctgagagtaggtgataatgtatattttacagagtgggggttggcaggatggtgacattgaacatgattgctctctgtctcttttttcagcttatgggtatttatcttctattagtatttgtatcttcagttcattccactttaggaaacagagctgccaattgaaacagaagaagaaaaaaaaaaaagcagcagacaacacactgtagagtcttgcacacacacaagtgcccaggcaaggtgcttggcagaaccgcagagtgggaagagagtaccggcatcgggtttccttgggatcaatttcattaccgtgtacctttcccattgtggtcacgccatttggcagggggagaatgggaggcttggccttctttgtgaggcagtgtgagcagaagaagctgatgccagcatgtcactggttttgaagggatgagcccagacttgatgttttgggattgtccttattttaacctcaaggtctcgcatggtggggcccctgaccaacctacacaagttccctcccacaagtggacatcagtgtcttctctgtgaggcatctggccattcgcactccctggtgtggtcagcctctctcacacaaggaggaacttgggtgaaggctgagtgtgaggcacctgaagtttccctgcggagtcgataaattagcagaaccacatccccatctgttaggccttggtgaggaggccctgggcaaagaagggtctttcgcaaagcgatgtcagagggcggttttgagctttctataagctatagctttgtttatttcacccgttcacttactgtataatttaaaatcatttatgtagctgagacacttctgtatttcaatcatatcatgaacattttattttgctaaatcttgtgtcatgtgtaggctgtaatatgtgtacattgtgtttaagagaaaaatgaaacccacatgccgccattttcctgaatcaaattctgcagtggaatggagaggaaaatacttctaggcaagcagctagactggtgaattgggggaaatagaaggaactagtaactgagactcctccagcctcttccctattggaatcccaatggctcctggagtaggaaaaaagtttaaactacattcatgttcttgttctgtgtcactcggccctgggtagtctaccatttacttcaccccaagtcctgctgcccatccagttgggaagcccatgattttcctaagaatccagggccataggagatacaattccaagttctcgcttcctcctttgggcatctcttctgcctcccaatcaaggaagctccacgctcaggctctcagctctcgggccagtgctctgctctgtccagggtaggtaatactgggagactcctgtcttttaccctcccctcgttccagacctgcctcatggtggcaacatggttcttgaacaattaaagaaacaaatgactttttggaatagccctgtctagggcaaactgtggcccccaggagacactacccttccatgccccagacctctgtcttgcatgtgacaattgacaatctggactaccccaagatggcacccaagtgtttggcttctggctacctaaggttaacatgtcactagagtatttttatgagagacaaacattataaaaatctgatggcaaaagcaaaacaaaatggaaagtaggggaggtggatgtgacaacaacttccaaattggctctttggaggcgagaggaaggggagaacttggagaatagtttttgctttgggggtagaggcttcttagattctcccagcatccgcctttccctttagccagtctgctgtcctgaaacccagaagtgatggagagaaaccaacaagagatctcgaaccctgtctagaaggaatgtatttgttgctaaatttcgtagcactgtttacagttttcctccatgttatttatgaattttatattccgtgaatgtatattgtcttgtaatgttgcataatgttcactttttatagtgtgtcctttattctaaacagtaaagtggttttatttctatcac

SEQ ID NO: 402 - DNA, 1774 bp, Homo sapiens
ggcacgagggagaactagtctcagtttttttttttttttttttaggtgagaaagccagctgactttattgctctgggggcagggggctcaggagctcttggtggggcgggtccgcttcctcttcaccatcacaggcttctggctgcgcaggatggcgctggccctgcggatggctgccatgcgcaggtcggggcggtacttgttcttgcggatcatgtgtctgatgctgctgagcgtggcgcgagcattcttgttgatggtggtccgcacataggaggtggcaggcttccgctggccggatctccgcttaatgaccaccacgacacctttgccgtcggctgccggctccacgcccacagtcttgcggtgaatcagtccgttgtagcggaaggaattgcgggccttcaagttattgggctcagtgctgtaggtctgcttattcctcttgatcaggaaactggagcagttccgcacgaccatccattgcagatgcgcagacatggcggcggctcccttcgcagcggcgacctgaccttcagcgcctcggctccagcgccatggcgccctccaggaagttcttcgttgggggaaactggaagatgaacgggcggaagcagagtctgggggagctcatcggcactctgaacgcggccaaggtgccggccgacaccgaggtggtttgtgctccccctactgcctatatcgacttcgcccggcagaagctagatcccaagattgctgtggctgcgcagaactgctacaaagtgactaatggggcttttactggggagatcagccctggcatgatcaaagactgcggagccacgtgggtggtcctggggcactcagagagaaggcatgtctttggggagtcagatgagctgattgggcagaaagtggcccatgctctggcagagggactcggagtaatcgcctgcattggggagaagctagatgaaagggaagctggcatcactgagaaggttgttttcgagcagacaaaggtcatcgcagataacgtgaaggactggagcaaggtcgtcctggcctatgagcctgtgtgggccattggtactggcaagactgcaacaccccaacaggcccaggaagtacacgagaagctccgaggatggctgaagtccaacgtctctgatgcggtggctcagagcacccgtatcatttatggaggctctgtgactggggcaacctgcaaggagctggccagccagcctgatgtggatggcttccttgtgggtggtgcttccctcaagcccgaattcgtggacatcatcaatgccaaacaatgagccccatccatcttccctacccttcctgccaagccagggactaagcagcccagaagcccagtaactgccctttccctgcatatgcttctgatggtgtcatctgctccttcctgtggcctcatccaaactgtatcttcctttactgtttatatcttcaccctgtaatggttgggaccaggccaatcccttctccacttactataatggttggaactaaacgtcaccaaggtggcttctccttggctgagagatggaaggcgtggtgggatttgctcctgggttccctaggccctagtgagggcagaagagaaaccatcctctcccttcttacaccgtgaggccaagatcccctcagaaggcaggagtgctgccctctcccatggtgcccgtgcctctgtgctgtgtatgtgaaccacccatgtgagggaataaacctggcactaggtaaaaaaaaaaaaaaaaaaaaa

SEQ ID NO: 403 - DNA, 1296 bp, Homo sapiens
agttacagacagctgaccatggaagcgaatgggttgggacctcagggttttccggagctgaagaatgacacattcctgcgagcagcctggggagaggaaacagactacactcccgtttggtgcatgcgccaggcaggccgttacttaccagagtttagggaaacccgggctgcccaggactttttcagcacgtgtcgctctcctgaggcctgctgtgaactgactctgcagccactgcgtcgcttccttctggatgctgccatcattttctccgacatccttgttgtaccccaggcactgggcatggaggtgaccatggtacctggcaaaggacccagcttcccagagccattaagagaagagcaggacctagaacgcctacgggatccagaagtggtagcctctgagctaggctatgtgttccaagccatcacccttacccgacaacgactggctggacgtgtgccgctgattggctttgctggtgccccatggaccctgatgacatacatggttgagggtggtggctcaagcaccatggctcaggccaagcgctggctctatcagagacctcaggctagtcaccagctgcttcgcatcctcactgatgctctggtcccatatctggtaggacaagtggtggctggtgcccaggcattgcagctgtttgagtcccatgcagggcatcttggcccacagctcttcaacaagtttgcactgccttacatccgtgatgtggccaagcaagtgaaggccaggttgcgggaggcaggcctggcaccagtgcccatgatcatctttgctaaggatgggcattttgccctggaggagctggcccaagctggctatgaggtggttgggcttgactggacagtggccccaaagaaagcccgggagtgtgtggggaagacggtgacattgcagggcaacctggacccctgtgccttgtatgcatctgaggaggagatcgggcagttggtgaagcagatgctggatgactttggaccacatcgctacattgccaacttgggccatgggctttatcctgacatggacccagaacatgtgggcgcctttgtggatgctgtgcataaacactcacgtctgcttcgacagaactgaccgtatacctttaccctcaagtaccactaacacagatgattgatcgtttccaggacaataaaagtttcggagttgaacctattgtgtagttttgtttgtgaaagattgtcccatatcctcagttcttcttagcctctgtctccttccctgggaccctctcatatcctcttatag

SEQ ID NO: 404 - DNA, 1662 bp, Homo sapiens
gcacccggcagcggtctcaggccaagccccctgccagcatggccagcgagttcaagaagaagctcttctggagggcagtggtggccgagttcctggccacgaccctctttgtcttcatcagcatcggttctgccctgggcttcaaatacccggtggggaacaaccagacggcggtccaggacaacgtgaaggtgtcgctggccttcgggctgagcatcgccacgctggcgcagagtgtgggccacatcagcggcgcccacctcaacccggctgtcacactggggctgctgctcagctgccagatcagcatcttccgtgccctcatgtacatcatcgcccagtgcgtgggggccatcgtcgccaccgccatcctctcaggcatcacctcctccctgactgggaactcgcttggccgcaatgacctggctgatggtgtgaactcgggccagggcctgggcatcgagatcatcgggaccctccagctggtgctatgcgtgctggctactaccgaccggaggcgccgtgaccttggtggctcagccccccttgccatcggcctctctgtagcccttggacacctcctggctattgactacactggctgtgggattaaccctgctcggtcctttggctccgcggtgatcacacacaacttcagcaaccactggattttctgggtggggccattcatcgggggagccctggctgtactcatctacgacttcatcctggccccacgcagcagtgacctcacagaccgcgtgaaggtgtggaccagcggccaggtggaggagtatgacctggatgccgacgacatcaactccagggtggagatgaagcccaaatagaaggggtctggcccgggcatccacgtagggggcaggggcaggggcgggcggagggaggggaggggtgaaatccatactgtagacactctgacaagctggccaaagtcacttccccaagatctgccagacctgcatggtcaagcctcttatgggggtgtttctatctctttctttctctttctgtttcctggcctcagagcttcctggggaccaagatttaccaattcacccactcccttgaagttgtggaggaggtgaaagaaagggacccacctgctagtcgcccctcagagcatgatgggaggtgtgccagaaagtcccccctcgccccaaagttgctcaccgactcacctgcgcaagtgcctgggattctaccgtaattgctttgtgcctttgggcaggccctccttcttttcctaacatgcaccttgctcccaatggtgcttggagggggaagagatcccaggaggtgcagtggagggggcaagctttgctccttcagttctgcttgctcccaagcccctgacccgctcggacttactgcctgaccttggaatcgtccctatatcagggcctgagtgacctccttctgcaaagtggcagggaccggcagagctctacaggcctgcagcccctaagtgcaaacacagcatgggtccagaagacgtggtctagaccagggctgctctttccacttgccctgtgttctttccccaggggcatgactgtcgccacacgcctctgcatatatgtctctttggagttggaatttcattatatgttaagaaaataaaggaaaatgacttgtaaggtc

SEQ ID NO: 405 - DNA, 1932 bp, Homo sapiens
cagcgagccgcagcgcaatcccggcgctcgcccaaggaccctggaagctaccgttaccccgccggcagcgtgggcgccatgagcagctcgggactgaattcggagaaggtagctgctctgatacagaaactgaattccgacccccagttcgtacttgcccagaatgtcgggaccacccacgacctgctggacatctgtctgaagcgggccacggtgcagcgcgcgcagcatgtgttccagcacgccgtgccccaggagggcaagccaatcaccaaccagaagagctcagggcgatgctggatcttttcttgtctgaatgttatgaggcttccattcatgaaaaagttaaatattgaagaatttgagtttagccaatcttacctgtttttttgggacaaggttgaacgctgttatttcttcttgagtgcttttgtggacacagcccagagaaaggagcctgaggatgggaggctggtgcagtttttgcttatgaaccctgcaaatgatggtggccaatgggatatgcttgttaatattgttgaaaaatatggtgttatccctaagaaatgcttccctgaatcttatacaacagaggcaaccagaaggatgaatgatattctgaatcacaagatgagagaattctgtatacgactgcggaacctggtacacagtggagcaaccaaaggagaaatctcggccacacaggacgtcatgatggaggagatattccgagtggtgtgcatctgtttgggtaatccaccagagacattcacctgggaatatcgagacaaagataaaaattatcagaaaattggccccataacacccttggagttttacagggaacatgtcaagccactcttcaatatggaagataagatttgtttagtgaatgaccctaggccccagcacaagtacaacaaactttacacagtggaatacttaagcaatatggttggtgggagaaaaactctatacaacaaccagcccattgacttcctgaaaaagatggttgctgcctccatcaaagatggagaggctgtgtggtttggctgtgatgttggaaaacacttcaatagcaagctgggcctcagtgacatgaatctctatgaccatgagttagtgtttggtgtctccttgaagaacatgaataaagcggagaggctgacttttggtgagtcacttatgacccacgccatgaccttcactgctgtctcagagaaggatgatcaggatggtgctttcacaaaatggagagtggagaattcatggggtgaagaccatggccacaaaggttacctgtgcatgacagatgagtggttctctgagtatgtctacgaagtggtggtggacaggaagcatgtccctgaagaggtgctagctgtgttagagcaggaacccattatcctgccagcatgggaccccatgggagctttggctgagtgatactgccctccagctctttcctccttccatggaacctgacgtagctgcaaaggacagatccagggactgaagccaaagttatgcaagggactgtgtgttgccacaggacacagtcagatttccagtctccaccaggaacctcttcagaaagtgtgctttatgctgaaacagaatactgttaaaggaaaaaaaagaggggggaagatcaggtcatactatctactctcctcatctctaacagctcaggatctcttagcattttaattagatgtaattgtttgtctttaactgtcaaaaagtttggttctgtgtctgtgttttaataagacgagaggacgagcgattgaggtgtatggagagaaaacagacctaatgctccttgttcctagagtagagtggagggagggtggcctaagagttgagctctcggaactgcatgctgctggacagtatcactgtctttcctagatggcagtcactgaattc

SEQ ID NO: 406 - DNA, 3502 bp, Homo sapiens
acatgacagcagatccgcggaagggcagaatgggactccaagcctgcctcctagggctctttgccctcatcctctctggcaaatgcagttacagcccggagcccgaccagcggaggacgctgcccccaggctgggtgtccctgggccgtgcggaccctgaggaagagctgagtctcacctttgccctgagacagcagaatgtggaaagactctcggagctggtgcaggctgtgtcggatcccagctctcctcaatacggaaaatacctgaccctagagaatgtggctgatctggtgaggccatccccactgaccctccacacggtgcaaaaatggctcttggcagccggagcccagaagtgccattctgtgatcacacaggactttctgacttgctggctgagcatccgacaagcagagctgctgctccctggggctgagtttcatcactatgtgggaggacctacggaaacccatgttgtaaggtccccacatccctaccagcttccacaggccttggccccccatgtggactttgtggggggactgcaccgttttcccccaacatcatccctgaggcaacgtcctgagccgcaggtgacagggactgtaggcctgcatctgggggtaaccccctctgtgatccgtaagcgatacaacttgacctcacaagacgtgggctctggcaccagcaataacagccaagcctgtgcccagttcctggagcagtatttccatgactcagacctggctcagttcatgcgcctcttcggtggcaactttgcacatcaggcatcagtagcccgtgtggttggacaacagggccggggccgggccgggattgaggccagtctagatgtgcagtacctgatgagtgctggtgccaacatctccacctgggtctacagtagccctggccggcatgagggacaggagcccttcctgcagtggctcatgctgctcagtaatgagtcagccctgccacatgtgcatactgtgagctatggagatgatgaggactccctcagcagcgcctacatccagcgggtcaacactgagctcatgaaggctgccgctcggggtctcaccctgctcttcgcctcaggtgacagtggggccgggtgttggtctgtctctggaagacaccagttccgccctaccttccctgcctccagcccctatgtcaccacagtgggaggcacatccttccaggaacctttcctcatcacaaatgaaattgttgactatatcagtggtggtggcttcagcaatgtgttcccacggccttcataccaggaggaagctgtaacgaagttcctgagctctagcccccacctgccaccatccagttacttcaatgccagtggccgtgcctacccagatgtggctgcactttctgatggctactgggtggtcagcaacagagtgcccattccatgggtgtccggaacctcggcctctactccagtgtttggggggatcctatccttgatcaatgagcacaggatccttagtggccgcccccctcttggctttctcaacccaaggctctaccagcagcatggggcaggactctttgatgtaacccgtggctgccatgagtcctgtctggatgaagaggtagagggccagggtttctgctctggtcctggctgggatcctgtaacaggctggggaacacccaacttcccagctttgctgaagactctactcaacccctgaccctttcctatcaggagagatggcttgtcccctgccctgaagctggcagttcagtcccttattctgccctgttggaagccctgctgaaccctcaactattgactgctgcagacagcttatctccctaaccctgaaatgcggtgagcttgacttgactcccaaccctaccatgctccatcatactcaggtctccctactcctgccttagattcctcaataagatgctgtaactagcattttttgaatgcctctccctccgcatctcatctttctcttttcaatcaggcttttccaaagggttgtatacagactctgtgcactatttcacttgatattcattccccaattcactgcaaggagacctctactgtcaccgtttactctttcctaccctgacatccagaaacaatggcctccagtgcatacttctcaatctttgctttatggcctttccatcatagttgcccactccctctccttacttagcttccaggtcttaacttctctgactactcttgtcttcctctctcatcaatttctgcttcttcatggaatgctgaccttcattgctccatttgtagatttttgctcttctcagtttactcattgtcccctggaacaaatcactgacatctacaaccattaccatctcactaaataagactttctatccaataatgattgatacctcaaatgtaagatgcgtgatactcaacatttcatcgtccaccttcccaaccccaaacaattccatctcgtttcttcttggtaaatgatgctatgctttttccaaccaagccagaaacctgtgtcatcttttcaccccaccttcaatcaacaagtcctcaatcaacaagtcctactgactgcacatcttaaatatatctttatcagtccacaagtccttccaattatatttcccaagtatatctagaacttatccacttatatccccactgctactaccttagtttagggctatattctcttgaaaaaaagtgtccttacttcctgccaatccccaagtcatcttccagagtaaaatgcaaatcccatcaggccacttggatgaaaacccttcaaggattactggatagaattcaggctttcccctccagcccccaatcatagctcacaaaccttccttgctatttgttcttaagtaaaaaatcatttttcctcctccctccccaaaccccaaggaactctcactcttgctcaagctgttccgtccccttaccacccctgatacaactgccaggttaatttccagaattcttgcaagactcagttcagaagtcaccttctttcgtgaatgttttgattccctgaggctactttattttggtatggctgaaaaatcctagattttctaaacaaaacctgtttgaatcttggttctgatatggactaggagagagactgggtcaagtaagcttatctccctgaggctgtttcctcgtctgttaagtgtgaatatcaatacctgcctttcataatcaccagggaataaagtggaataatgttgataacagtgcttggcacctggaagtaggtggcagatgttaacgcccttcctcccttgcactgcgccccctgtgcctacctctagcattgtaacgaccacatagtattgaaatggccagtttacttgtctgccttcctttccaagaccgttggtgcctagaggactagaatcgtgtcctatttaactttgtgttcccaggtcctagctcaggagttggcaaataagaattaaatgtctgctacaccgaaacaaa

SEQ ID NO: 407 - DNA, 6217 bp, Homo sapiens
cgcagactgtgctggagctggtgctgaaaaagggggtttgcagaggctgccctggggctggtgctgaaagaagagcccacagctgacttcatggtgctacaataacctcagaatctacttttcactctcaggagaacccacagtctaatatttagacatgatggcaaactgggcggaagcaagacctctcctcattcttattgttttattagggcaatttgtctcaataaaagcccaggaagaagacgaggatgaaggatatggtgaagaaatagcctgcactcagaatggccagatgtacttaaacagggacatttggaaacctgccccttgtcagatctgtgtctgtgacaatggagccattctctgtgacaagatagaatgccaggatgtgctggactgtgccgaccctgtaacgccccctggggaatgctgtcctgtctgttcacaaacacctggaggtggcaatacaaattttggtagaggaagaaagggacaaaagggagaaccaggattagtgcctgttgtaacaggcatacgtggtcgtccaggaccggcaggacctccaggatcacagggaccaagaggagagcgagggccaaaaggaagacctggccctcgtggacctcagggaattgatggagaaccaggtgttcctggtcaacctggtgctccaggacctcctggacatccgtcccacccaggacccgatggcttgagcaggccgttttcagctcaaatggctgggttggatgaaaaatctggacttgggagtcaagtaggactaatgcctggctctgtgggtcctgttggcccaaggggaccacagggtttacaaggacagcaaggtggtgcaggacctacaggacctcctggtgaacctggtgatcctggaccaatgggtccgattggttcacgtggaccagagggccctcctggtaaacctggggaagatggtgaacctggcagaaatggaaatcctggtgaagtgggatttgcaggatctccgggagctcgtggatttcctggggctcctggtcttccaggtctgaagggtcaccgaggacacaaaggtcttgaaggccctaaaggtgaagttggagcacctggttccaagggtgaagctggccccactggtccaatgggtgccatgggtcctctgggtccgaggggaatgccaggagagagagggagacttgggccacagggtgctcctggacaacgaggtgcacatggtatgcctggaaaacctggaccaatgggtcctcttgggataccaggctcttctggttttccaggaaatcctggaatgaagggagaagcaggtcctacaggggcgcgaggccctgaaggtcctcaggggcagagaggtgaaactgggcccccaggtccagttggctctccaggtcttcctggtgcaataggaactgatggtactcctggtcccaaaggcccaacgggctctccgggtacctctggtcctcctggctcagcagggcctcctggatctccaggacctcagggtagcactggtcctcaggggaattcgggccttccgggtgatccaggtttcaaaggagaagctggcccaaaaggggaaccagggccacatggtattcagggtccgataggcccacccggtgaagaaggcaaaagaggtcccagaggtgacccaggaacacttggtcctccagggccagtgggagaaaggggtgctcctggcaatcgtggttttccaggctctgatggtttacctgggccaaagggtgctcaaggagaacggggtcctgtaggttcttcaggacccaaaggaagccagggggatccaggacgtccaggggaacctgggcttccaggtgctcggggtttgacaggaaatcctggtgttcaaggtcctgaaggaaaacttggacctttgggtgcgccaggggaagatggccgtccaggtcctccaggctccataggaatcaaagggcagcccgggaccatgggccttccaggccccaaaggtagcaatggtgaccctgggaaacctggagaagcaggaaatcctggagttcctgggcaaaggggagctcctggaaaagatggtaaagttggtccttatggtcctcctgggccgccgggtctacgtggtgaaagaggagaacaaggacctccagggcccacaggttttcaggggcatcctggtcctccaggtcctcctggagaaggtggaaaaccaggtgatcaaggtgttcctggaggtcccggagcagttggcccgttaggacctagaggagaacgaggaaatcctggggaaagaggagaacctgggataactggactccctggtgagaagggaatggctggaggacatggtcctgatggcccaaaaggcagtccaggtccatctgggacccctggagatacaggcccaccaggtcttcaaggtatgccgggagaaagaggaattgcaggaactcctggccccaagggtgacagaggtggcataggagaaaaaggtgctgaaggcacagctggaaatgatggtgcaggaggtcttccaggtcctttgggccctccaggtccggcaggcctactgggagaaaagggtgaacctggtcctcgaggtttagttggtcctcctggctcccggggcaatcctggttctcgaggtgaaaatgggccaactggagctgttggttttgccggaccccaggggtctgacggacagcctggagtaaaaggtgaacctggagagccaggacagaagggagatgctggttctcctggaccacaaggtttagcaggatcccctggccctcatggtcctaatggtgttcctggactaaaaggtggtcgaggaacccaaggtccgcctggtgctacaggatttcctggttctgcgggcagagttggacctccaggccctgctggagctccaggacctgcgggacccctaggggaacccgggaaggagggacctccaggtcctcgtggggaccctggctctcatgggcgtgtgggagtccgaggaccagctggcccccctggtggcccaggagacaaaggggacccaggagaagatgggcaacctggtccagatggcccccctggtccagctggaacgaccgggcagagaggaattgttggcatgcctgggcaacgtggagagagaggcatgcccggcctaccaggcccagcgggaacaccaggaaaagtaggaccaactggtgcaacaggagataaaggtccacctggacctgtggggcccccaggctccaatggtcctgtaggggaacctggaccagaaggtccagctggcaatgatggtaccccaggacgggatggtgctgttggagaacgtggtgatcgtggagaccctgggcctgcaggtctgccaggctctcagggtgcccctggaactcctggccctgtgggtgctccaggagatgcaggacaaagaggagatccgggttctcggggtcctataggacacctgggtcgagctggaaaacgtggattacctggaccccaaggacctcgtggtgacaaaggtgatcatggagaccgaggcgacagaggtcagaagggccacagaggctttactggtcttcagggtcttcctggccctcctggtccaaatggtgaacaaggaagtgctggaatccctggaccatttggcccaagaggtcctccaggcccagttggtccttcaggtaaagaaggaaaccctgggccacttgggccattgggacctccaggtgtacgaggcagtgtaggagaagcaggacctgagggccctcctggtgagcctggcccacctggccctccgggtccccctggccaccttacagctgctcttggggatatcatggggcactatgatgaaagcatgccagatccacttcctgagtttactgaagatcaggcggctcctgatgacaaaaacaaaacggacccaggggttcatgctaccctgaagtcactcagtagtcagattgaaaccatgcgcagccccgatggctcgaaaaagcacccagcccgcacgtgtgatgacctaaagctttgccattccgcaaagcagagtggtgaatactggattgatcctaaccaaggatctgttgaagatgccatcaaagtttactgcaacatggaaacaggagaaacatgtatttcagcaaacccatccagtgtaccacgtaaaacctggtgggccagtaaatctcctgacaataaacctgtttggtatggtcttgatatgaacagagggtctcagttcgcttatggagaccaccaatcacctaatacagccattactcagatgacttttttgcgccttttatcaaaagaagcctcccagaacatcacttacatctgtaaaaacagtgtaggatacatggacgatcaagctaagaacctcaaaaaagctgtggttctcaaaggggcaaatgacttagatatcaaagcagagggaaatattagattccggtatatcgttcttcaagacacttgctctaagcggaatggaaatgtgggcaagactgtctttgaatatagaacacagaatgtggcacgcttgcccatcatagatcttgctcctgtggatgttggcggcacagaccaggaattcggcgttgaaattgggccagtttgttttgtgtaaagtaagccaagacacatcgacaatgagcaccaccatcaatgaccaccgccattcacaagaactttgactgtttgaagttgatcctgagactcttgaagtaatggctgatcctgcatcagcattgtatatatggtcttaagtgcctggcctccttatccttcagaatatttattttacttacaatcctcaagttttaattgattttaaatatttttcaatacaacagtttaggtttaagatgaccaatgacaatgaccacctttgcagaaagtaaactgattgaataaataaatctccgttttcttcaatttatttcagtgtaatgaaaaagttgcttagtatttatgaggaaattcttcttcctggcaggtagcttaaagagtggggtatatagagccacaacacatgtttattttgcttggctgcagttgaaaaatagaaattagtgcccttttgtgacctctcattccaagattgtcaattaaaaatgagtttaaaatgtttaacttgtgatcgagacctacatgcatgtcttgatattgtgtaactataatagagactctttaaggagaatcttaaaaaaaaaaaacgtttctcactgtcttaaatagaatttttaaatagtatatattcagtggcattttggagaacaaagtgaatttacttcgacttcttaaatttttgtaaaagactataagtttagacatctttctcattcaaatttaaagatatctttctcctcttgatcaatctatcaatattgatagaagtcacactagtatataccatttaatacatttacactttcttatttaagaagatattgaatgcaaaataattgacatatagaactttacaaacatatgtccaaggactctaaattgagactcttccacatgtacaatctcatcatcctgaagcctataatgaagaaaaagatctagaaactgagttgtggagctgactctaatcaaatgtgatgattggaattagaccatttggcctttgaactttcataggaaaaatgacccaacatttcttagcatgagctacctcatctctagaagctgggatggacttactattcttgtttatattttagatactgaaaggtgctatgcttctgttattattccaagactggagataggcagggctaaaaaggtattattatttttcctttaatgatggtgctaaaattcttcctataaaattccttaaaaataaagatggtttaatcactaccattgtgaaaacataactgttagacttcccgtttctgaaagaaagagcatcgttccaatgcttgttcactgttcctctgtcatactgtatctggaatgctttgtaatacttgcatgcttcttagaccagaacatgtaggtccccttgtgtctcaatactttttttttcttaattgcatttgttggctctattttaatttttttcttttaaaataaacagctgggaccatcccaaaagacaagccatgcatacaactttggtcatgtatctctgcaaagcatcaaattaaatgcacgcttttgtcatgtcaaaaaaaaaaaaaaa

SEQ ID NO: 408 - DNA, 1669 bp, Homo sapiens
gaaacaagcactggattccatatcccactgccaaaaccgcatggttcagattatcgctattgcagctttcatcataatacacacctttgctgccgaaacgaagccagacaacagatttccatcagcaggatgtgggggctcaaggttctgctgctacctgtggtgagctttgctctgtaccctgaggagatactggacacccactgggagctatggaagaagacccacaggaagcaatataacaacaaggtggatgaaatctctcggcgtttaatttgggaaaaaaacctgaagtatatttccatccataaccttgaggcttctcttggtgtccatacatatgaactggctatgaaccacctgggggacatgaccagtgaagaggtggttcagaagatgactggactcaaagtacccctgtctcattcccgcagtaatgacaccctttatatcccagaatgggaaggtagagccccagactctgtcgactatcgaaagaaaggatatgttactcctgtcaaaaatcagggtcagtgtggttcctgttgggcttttagctctgtgggtgccctggagggccaactcaagaagaaaactggcaaactcttaaatctgagtccccagaacctagtggattgtgtgtctgagaatgatggctgtggagggggctacatgaccaatgccttccaatatgtgcagaagaaccggggtattgactctgaagatgcctacccatatgtgggacaggaagagagttgtatgtacaacccaacaggcaaggcagctaaatgcagagggtacagagagatccccgaggggaatgagaaagccctgaagagggcagtggcccgagtgggacctgtctctgtggccattgatgcaagcctgacctccttccagttttacagcaaaggtgtgtattatgatgaaagctgcaatagcgataatctgaaccatgcggttttggcagtgggatatggaatccagaagggaaacaagcactggataattaaaaacagctggggagaaaactggggaaacaaaggatatatcctcatggctcgaaataagaacaacgcctgtggcattgccaacctggccagcttccccaagatgtgactccagccagccaaatccatcctgctcttccatttcttccacgatggtgcagtgtaacgatgcactttggaagggagttggtgtgctatttttgaagcagatgtggtgatactgagattgtctgttcagtttccccatttgtttgtgcttcaaatgatccttcctactttgcttctctccacccatgacctttttcactgtggccatcaggactttccctgacagctgtgtactcttaggctaagagatgtgactacagcctgcccctgactgtgttgtcccagggctgatgctgtacaggtacaggctggagattttcacataggttagattctcattcacgggactagttagctttaagcaccctagaggactagggtaatctgacttctcacttcctaagttcccttctatatcctcaaggtagaaatgtctatgttttctactccaattcataaatctattcataagtctttggtacaagtttacatgataaaaagaaatgtgatttgtcttcccttctttgcacttttgaaataaagtatttatc

SEQ ID NO: 409 - DNA, 2409 bp, Homo sapiens
gaattcgggcgcgaagcggccggcctgggcgccgactgcagagccgggaggctggtggtcatgccggggttcctggttcgcatcctccttctgctgctggttctgctgcttctgggccctacgcgcggcttgcgcaatgccacccagaggatgtttgaaattgactatagccgggactccttcctcaaggatggccagccatttcgctacatctcaggaagcattcactactcccgtgtgccccgcttctactggaaggaccggctgctgaagatgaagatggctgggctgaacgccatccagacgtatgtgccctggaactttcatgagccctggccaggacagtaccagttttctgaggaccatgatgtggaatattttcttcggctggctcatgagctgggactgctggttatcctgaggcccgggccctacatctgtgcagagtgggaaatgggaggattacctgcttggctgctagagaaagagtctattcttctccgctcctccgacccagattacctggcagctgtggacaagtggttgggagtccttctgcccaagatgaagcctctcctctatcagaatggagggccagttataacagtgcaggttgaaaatgaatatggcagctactttgcctgtgattttgactacctgcgcttcctgcagaagcgctttcgccaccatctgggggatgatgtggttctgtttaccactgatggagcacataaaacattcctgaaatgtggggccctgcagggcctctacaccacggtggactttggaacaggcagcaacatcacagatgctttcctaagccagaggaagtgtgagcccaaaggacccttgatcaattctgaattctatactggctggctagatcactggggccaacctcactccacaatcaagaccgaagcagtggcttcctccctctatgatatacttgcccgtggggcgagtgtgaacttgtacatgtttataggtgggaccaattttgcctattggaatggggccaactcaccctatgcagcacagcccaccagctacgactatgatgccccactgagtgaggctggggacctcactgagaagtattttgctctgcgaaacatcatccagaagtttgaaaaagtaccagaaggtcctatccctccatctacaccaaagtttgcatatggaaaggtcactttggaaaagttaaagacagtgggagcagctctggacattctgtgtccctctgggcccatcaaaagcctttatcccttgacatttatccaggtgaaacagcattatgggtttgtgctgtaccggacaacacttcctcaagattgcagcaacccagcacctctctcttcacccctcaatggagtccacgatcgagcatatgttgctgtggatgggatcccccagggagtccttgagcgaaacaatgtgatcactctgaacataacagggaaagctggagccactctggaccttctggtagagaacatgggacgtgtgaactatggtgcatatatcaacgattttaagggtttggtttctaacctgactctcagttccaatatcctcacggactggacgatctttccactggacactgaggatgcagtgcgcagccacctggggggctggggacaccgtgacagtggccaccatgatgaagcctgggcccacaactcatccaactacacgctcccggccttttatatggggaacttctccattcccagtgggatcccagacttgccccaggacacctttatccagtttcctggatggaccaagggccaggtctggattaatggctttaaccttggccgctattggccagcccggggccctcagttgaccttgtttgtgccccagcacatcctgatgacctcggccccaaacaccatcaccgtgctggaactggagtgggcaccctgcagcagtgatgatccagaactatgtgctgtgacgttcgtggacaggccagttattggctcatctgtgacctacgatcatccctccaaacctgttgaaaaaagactcatgcccccacccccgcaaaaaaacaaagattcatggctggaccatgtatgatgatgaaagcctgtgtctttgagggattctaccctgaacatacctcacagatcctccctgtcatgccacatttcactgattggaatgtggaaatggaaaaggaatttaggatgtgcattttcacctgaggtttccctgcatccctgcagtgccaaagccccaccttcagggaccacctggaatgtgtgaggggctgacagcacagtaacgtgcatacatatctgcagggctggaatggaagctttaaaggtggtagtgatttttattttggaagaatcatgttacctttttgttaaataaaatttgcccgaattc

SEQ ID NO: 410 - DNA, 955 bp, Homo sapiens
agtaagccgggctgccgtcttctcgccatgggctccgggccgcgcggggcgctgagcttactgctcctgctgctggccccgccgagccgcccggccgcaggttgcccggcgccctgtagctgcgcggggacgctcgtggactgcgggcgccgcgggctgacttgggcctcgctgccgaccgccttccctgtcgacacaaccgagctggtgctgaccggcaacaacctgacggcgctgccgccggggctgctggacgcgctgcccgcgctgcgcaccgcacacctgggcgccaacccctggcgctgcgactgccgccttgtgccgctgcgcgcctggctggccggccgccccgagcgtgcgccctaccgcgacctgcgttgcgtggcgcccccagcgctgcgcggccgcctgctgccctatctggccgaggacgagctgcgcgccgcttgcgctcccggcccgctctgctggggggcgctggcggcgcagcttgcgctgctgggccttgggctgctgcacgcgttgctgctggtgctgctgctgtgccgcctgcggaggctgcgggcccgggcccgcgctcgcgccgcagcccggctgtcgctgaccgacccgctggtggccgagcgagccggaaccgacgagtcctgaggagagaaccggtgcgtcctgaggagagaaccggcgctgggcaacacgggcctgcaaactcgacaggaccctgcccgaggggccctcgcgccaacctggaccggtccccgcctcctccgctgcccaatctctcagacccaccccacctgcaggcccagaccacgtgggacagaactcctgcccaccctaccccgagggaggcgaacccgcacttccaggcttgggaggaccatggggcacaatgcggtccagaccctgctgcgtctcccttccaaactctggtgctgaataaacccttctgatctgg

SEQ ID NO: 411 - DNA, 2593 bp, Homo sapiens
ggccagcgcgtctgcttgttcgtgtgtgtgtcgttgcaggccttattcatgggctcaccgctgaggttcgacgggcgggtggtactggtcaccggcgcgggggcaggattgggccgagcctatgccctggcttttgcagaaagaggagcgttagttgttgtgaatgatttgggaggggacttcaaaggagttggtaaaggctccttagctgctgataaggttgttgaagaaataagaaggagaggtggaaaagcagtggccaactatgattcagtggaagaaggagagaaggttgtgaagacagccctggatgcttttggaagaatagatgttgtggtcaacaatgctggaattctgagggatcgttcctttgctaggataagtgatgaagactgggatataatccacagagttcatttgcggggttcattccaagtgacacgggcagcatgggaacacatgaagaaacagaagtatggaaggattattatgacttcatcagcttcaggaatatatggcaactttggccaggccaattatagtgctgcaaagttgggtcttctgggccttgcaaattctcttgcaattgaaggcaggaaaagcaacattcattgtaacaccattgctcctaatgcgggatcacggatgactcagacagttatgcctgaagatcttgtggaagccctgaagccagagtatgtggcacctcttgtcctttggctttgtcacgagagttgtgaggagaatggtggcttgtttgaggttggagcaggatggattggaaaattacgctgggagcggactcttggagctattgtaagacaaaagaatcacccaatgactcctgaggcagtcaaggctaactggaagaagatctgtgactttgagaatgccagcaagcctcagagtatccaagaatcaactggcagtataattgaagttctgagtaaaatagattcagaaggaggagtttcagcaaatcatactagtcgtgcaacgtctacagcaacatcaggatttgctggagctattggccagaaactccctccattttcttatgcttatacggaactggaagctattatgtatgcccttggagtgggagcgtcaatcaaggatccaaaagatttgaaatttatttatgaaggaagttctgatttctcctgtttgcccaccttcggagttatcataggtcagaaatctatgatgggtggaggattagcagaaattcctggactttcaatcaactttgcaaaggttcttcatggagagcagtacttagagttatataaaccacttcccagagcaggaaaattaaaatgtgaagcagttgttgctgatgtcctagataaaggatccggtgtagtgattattatggatgtctattcttattctgagaaggaacttatatgccacaatcagttctctctctttcttgttggctctggaggctttggtggaaaacggacatcagacaaagtcaaggtagctgtagccatacctaatagacctcctgatgctgtacttacagataccacctctcttaatcaggctgctttgtaccgcctcagtggagactggaatcccttacacattgatcctaactttgctagtctagcaggttttgacaagcccatattacatggattatgtacatttggattttctgccaggcgtgtgttacagcagtttgcagataatgatgtgtcaagattcaaggcaattaaggctcgttttgcaaaaccagtatatccaggacaaactctacaaactgagatgtggaaggaaggaaacagaattcattttcaaaccaaggtccaagaaactggagacattgtcatttcaaatgcatatgtggatcttgcaccaacatctggtacttcagctaagacaccctctgagggcgggaagcttcagagtacctttgtatttgaggaaataggacgccgcctaaaggatattgggcctgaggtggtgaagaaagtaaatgctgtatttgagtggcatataaccaaaggcggaaatattggggctaagtggactattgacctgaaaagtggttctggaaaagtgtaccaaggccctgcaaaaggtgctgctgatacaacaatcatactttcagatgaagatttcatggaggtggtcctgggcaagcttgaccctcagaaggcattctttagtggcaggctgaaggccagagggaacatcatgctgagccagaaacttcagatgattcttaaagactacgccaagctctgaagggcacactacactattaataaaaatggaatcattaaatactctcttcacccaaatatgcttgattattctgcaaaagtgattagaactaagatgcaggggaaattgcttaacattttcagatatcagataactgcagattttcattttctactaattttcatgtatcattatttttacaaggaactatatataagctagcacatgattatccttctgttcttagatctgtatcttcataataaaaaattttgcccaagtcctgtttccttagaatttgtgatagcattgataagttgaaaggaaaattaaatcaataaaggcctttgatacc

SEQ ID NO: 412 - DNA, 2562 bp, Homo sapiens
gggaggagaagcctgggtgccccccactgataagcaggctccacccagaggccagtcctgtgtgtctggggacaaggcgaaagagcagcagaagtgccccttctccaggatcaaggaactggggcggggggtgtttcctggaccccagtcctccgaatcagctcctagagtggaaccaggaaggattctggagccacagaagatagacagatggaaggtggggaccaaagtgaggaagagccgagggaacgcagccaggcaggtggaatgggaactctctggagccaagagagcactccagaagagaggctgcccgtggaagggagcaggccatgggcagtggccaggcgggtgctgacagctatcctgattttgggcctgctcctttgtttttctgtgcttttgttctacaacttccagaactgtggccctcgcccctgtgagacatctgtgtgtttggatctccgggatcattacctggcctctgggaacacaagtgtggccccctgcaccgacttcttcagctttgcctgtggaagggccaaagagaccaataattcttttcaggagcttgccacaaagaacaaaaaccgacttcggagaatactggaggtccagaattcctggcacccaggctctggggaggagaaagccttccagttctacaactcctgcatggatacacttgccattgaagctgcagggactggtcccctcagacaagttattgaggagcttggaggctggcgcatctctggtaaatggacttccttaaactttaaccgaacgctgagacttctgatgagtcagtatggccatttccctttcttcagagcctacctaggacctcatcctgcctctccacacacaccagtcatccagatagaccagccagagtttgatgttcccctcaagcaagatcaagaacagaagatctatgcccagatctttcgggaatacctgacttacctgaatcagctgggaaccttgctgggaggagacccaagcaaggtgcaagaacactcttccttgtcaatctccatcacttcacggctgttccagtttctgaggcccctggagcagcggcgggcacagggcaagctcttccagatggtcactatcgaccagctcaaggaaatggcccccgccatcgactggttgtcctgcttgcaagcgacattcacaccgatgtccctgagcccttctcagtccctcgtggtccatgacgtggaatatttgaaaaacatgtcacaactggtggaggagatgctgctaaagcagagggactttctgcagagccacatgatcttagggctggtggtgaccctttctccagccctggacagtcaattccaggaggcacgcagaaagctcagccagaaactgcgggaactgacagagcaaccacccatgcctgcccgcccacgatggatgaagtgcgtggaggagacaggcacgttcttcgagcccacgctggcggctttgtttgttcgtgaggcctttggcccgagcacccgaagtgctgccatgaaattattcactgcgatccgggatgccctcatcactcgcctcagaaaccttccctggatgaatgaggagacccagaacatggcccaggacaaggttgctcaactgcaggtggagatgggggcttcagaatgggccctgaagccagagctggcccgacaagaatacaacgatatacagcttggatcgagcttcctgcagtctgtcctgagctgtgtccggtccctccgagctagaattgtccagagcttcttgcagcctcacccccaacacaggtggaaggtgtccccttgggacgtcaatgcttactattcggtatctgaccatgtggtagtctttccagctggactcctccaacccccattcttccaccctggctatcccagagccgtgaactttggcgctgctggcagcatcatggcccacgagctgttgcacatcttctaccagctcttactgcctgggggctgcctcgcctgtgacaaccatgccctccaggaagctcacctgtgcctgaagcgccattatgctgcctttccattacctagcagaacctccttcaatgactccctcacattcttagagaatgctgcagacgttggggggctagccatcgcgctgcaggcatacagcaagaggctgttacggcaccatggggagactgtcctgcccagcctggacctcagcccccagcagatcttctttcgaagctatgcccaggtgatgtgtaggaagcccagcccccaggactctcacgacactcacagccctccacacctccgagtccacgggcccctcagcagcaccccagcctttgccaggtatttccgctgtgcacgtggtgctctcttgaacccctccagccgctgccagctctggtaacttggttaccaaagatgccacagcacagaaatatcgaccaacacctccctggtcacatccatggaatcagagcaagatttcctttctgcttctgttccaaaaataaaagctggcacttggcttccgcttgtctcttaaaaaaaaaaaaaaaaa

SEQ ID NO: 413 - DNA, 7017 bp, Homo sapiens
cctcgctccctctccggtaatgagggggctgagctgtccctccgaggagggggcctggtgtggataaaagagacgaaaaagccgggggaggtttccaaaaataaaaccgtccgggtccccttcagacggctgcaggcacagggaggaggcgcgaaggtgcagcagccgtgcgagcccagctggagtaggagcgcggactcgaggctcggggcgcgcagccctcgttccgccgagagccgggcccccagtcggccgcttcagggccccctagactcagagaagctggccgccgggcggggccgggagaacagcccgcgggcgtccagcgtgccgaccacaaagctcttcgcggtgcccgcgcgcaccactctccagccgccccgcgccatgaggccgcggaccaaagcccgcagcccggggcgcgccctgcggaacccctggagaggcttcctgccgctcaccctggctctcttcgtgggcgcgggtcatgcccaaagggaccccgtagggagatacgagccggctggtggagacgcgaatcgactgcggcgccctgggggcagctacccggcagcggctgcagccaaggtgtacagtctgttccgggagcaggacgcgcctgtcgcgggcttgcagcccgtggagcgggcccagccgggctgggggagccccaggaggcccaccgaggcggaggccaggaggccgtcccgcgcgcagcagtcgcggcgtgtccagccacctgcgcagacccggagaagcactcccctgggccagcagcaaccagcaccccggacccgggccgcgccggctctcccacgcctggggaccccacagcggtctggggctgcgcccccaaccccgccgcgagggcggctcacggggaggaacgtctgcgggggacagtgctgcccaggatggacaacagcaaacagcaccaaccactgtatcaaacccgtttgcgagccgccgtgccagaaccggggctcctgcagccgcccgcagctctgtgtctgccgctctggtttccgtggagcccgctgcgaggaggtcattcccgatgaggaatttgacccccagaactccaggctggcacctcgacgctgggccgagcgttcacccaacctgcgcaggagcagtgcggctggagagggcaccttggccagagcacagccgccagcaccacagtcgccgcccgcaccacagtcgccaccagctgggaccctgagtggcctcagccagacccacccttcccagcagcacgtggggttgtcccgcactgtccgacttcacccgactgccacggccagtagccagctctcttccaacgccctgcccccgggaccaggccttgagcagagagatggcacccaacaggcggtacctctggagcacccctcatccccctgggggctgaacctcacggagaaaatcaagaagatcaagatcgtcttcactcccaccatctgcaagcagacctgtgcccgtggacactgtgccaacagctgtgagaggggcgacaccaccaccctgtacagccagggcggccatgggcacgatcccaagtctggcttccgcatctatttctgccagatcccctgcctgaacggaggccgctgcatcggcagggacgaatgctggtgccccgccaactccaccgggaagttctgccacctgcctatcccgcagccggacagggagcctccagggagggggtcccgccccagggccttgctggaagccccactgaagcagtccactttcacactgccgctctccaaccagctggcctccgtgaacccctccctggtgaaggtgcacattcaccacccacccgaggcctcagtgcagatccaccaggtggcccaggtgcggggcggggtggaggaggccctagtggagaacagcgtggagaccagacccccgccctggctgcctgccagccctggccacagcctctgggacagcaacaacatccctgctcggtctggagagccccctcggccactgcccccagcagcacccaggcctcgaggactgctgggccggtgttacctgaacactgtgaacggacagtgtgccaaccctctgctggagctgactacccaggaggactgctgtggcagtgtgggagccttctggggggtgactttgtgtgccccatgcccacccagaccagcctccccggtgattgagaatggccagctggagtgtcctcaggggtacaagagactgaacctcactcactgccaagatatcaacgagtgcttgaccctgggcctgtgcaaggacgcggagtgtgtgaataccaggggcagctacctgtgcacatgcagacctggcctcatgctggatccatcgcggagccgctgtgtgtcggacaaggcaatctccatgctgcagggactgtgctaccggtcgctggggcccggcacctgcaccctgcctttggcccagcggatcaccaagcagatatgctgctgcagccgcgtgggcaaagcatggggcagcgagtgtgagaaatgccctctgcctggcacagaggccttcagagagatctgccctgccggccacggctacacctacgcgagctccgacatccgcctgtccatgaggaaagccgaggaggaggaactggcaaggcccccaagggagcaagggcagaggagcagcggggcactgcccgggccagcagagaggcagcccctccgggtcgtcacggacacctggcttgaggccgggaccatccctgacaagggtgactctcaggctggccaggtcacgaccagtgtcactcatgcacctgcctgggtcacagggaatgccacaaccccaccaatgcctgaacaggggattgcagagatacaggaagaacaagtgaccccctccaccgatgtgctggtgaccctgagcaccccaggcattgacagatgcgctgctggagccaccaacgtctgtggccctggaacctgcgtgaacctccccgatggatacagatgtgtctgcagccctggctaccagctgcaccccagccaggcctactgcacagatgacaacgagtgtctgagggacccctgcaagggaaaagggcgctgcatcaaccgcgtggggtcctactcctgcttctgctaccctggctacactctggccacctcaggggcgacacaggagtgtcaagatatcaatgagtgtgagcagccaggggtgtgcagcggggggcagtgcaccaacaccgagggctcgtaccactgcgagtgtgatcagggctacatcatggtcaggaaaggacactgccaagatatcaacgaatgccgtcaccccggtacctgccctgatgggagatgcgtcaattcccctggctcctacacttgtctggcctgtgaggagggctaccggggccagagtgggagctgtgtagatgtgaatgagtgtctgactcccggggtctgtgcccatggaaagtgcaccaacctagaaggctccttcagatgctcttgtgagcagggctatgaggtcacctcagatgagaagggctgccaagatgtggatgagtgtgccagccgggcctcatgccccacaggcctctgcctcaacacggagggctccttcgcctgctctgcctgtgagaacgggtactgggtgaatgaagacggcactgcctgtgaagacctagatgagtgtgccttcccgggagtctgcccctccggagtctgcaccaacacggctggctccttctcctgcaaggactgcgatgggggctaccggcccagccccctgggtgactcctgtgaagatgtggatgaatgtgaagacccccagagcagctgcctgggaggcgagtgcaagaacactgtgggctcctaccagtgcctctgtccccagggcttccagctggccaatggcaccgtgtgtgaggatgtgaatgagtgcatgggggaggagcactgcgcaccccacggcgagtgcctcaacagccacgggtctttcttctgtctgtgcgcgcctggcttcgtcagcgcagaggggggcaccagctgccaggatgtggacgagtgtgccaccacagacccgtgtgtgggagggcactgtgtcaacaccgagggctccttcaactgtctatgtgagactggcttccagccctccccagagagtggagagtgtgtggatattgacgagtgtgaggactatggagacccggtgtgtggcacctggaagtgtgaaaacagccctggctcctaccgctgtgttctgggctgccagcctggcttccacatggccccgaacggagactgcattgacatagacgagtgcgccaacgacaccatgtgtggcagccacggcttctgtgacaacactgatggctccttccgctgcctctgtgaccagggcttcgagatctctccctcaggctgggactgtgtggatgtgaacgagtgtgagcttatgctggcggtatgtggggccgcgctctgtgagaacgtggagggctccttcctgtgcctctgtgccagtgacctggaggagtacgatgcccaggaggggcactgccgcccacggggggctggaggtcagagtatgtctgaggccccaacgggggaccatgccccggcccccacccgcatggactgctactccgggcagaagggccatgcgccctgctccagtgtcctgggccggaacaccacacaggctgaatgctgctgcacccagggcgctagctggggagatgcctgtgacctctgcccgtctgaggactcagctgaattcagcgagatctgccctagtggaaaaggctacattcctgtggaaggagcctggacgtttggacagaccatgtacacagatgcggatgagtgtgtgatattcgggcctggtctctgcccgaacggccggtgcctcaacaccgtgcctggttatgtctgcctgtgcaatcccggcttccactacgatgcttcccacaagaagtgtgaggatcacgatgagtgccaggacctggcctgtgagaatggcgagtgcgtcaacacggagggctccttccactgcttctgcagccccccgctcaccctggacctcagccagcagcgctgcatgaacagcaccagcagcacggaggacctccctgaccacgacatccacatggacatctgctggaaaaaagtcaccaatgatgtgtgcagcgaacccctgcgtgggcaccgcaccacctacacggaatgctgctgccaggacggcgaggcctggagccagcagtgtgctctgtgtcccccgaggagctctgaggtctatgctcagctgtgcaacgtggctcgcattgaggcagagcgggaggccggggtccacttccggccaggctatgagtatggccccgggcccgatgacctgcactacagcatctatggcccagatggggcccccttctacaactacctgggccccgaggacaccgtccctgagcctgccttccccaacacagccggtcactcagcggaccgcacacccatccttgagtctcctttgcagccctcagaactccagccccactacgtggccagccatccagagcccccagccggcttcgaagggcttcaggcggaggagtgcggcatcctgaacggctgtgagaatggccgctgtgtgcgcgtgcgggagggctacacctgtgactgttttgagggcttccagctggatgcggcccacatggcctgcgtagatgtgaatgagtgtgatgacttgaacgggcctgctgtgctctgtgtccatggttactgcgagaacacagagggctcctaccgctgccactgctccccgggatatgtggctgaggcagggcccccccactgcactgccaaggagtagcagtcaggggtcagtgtggcaactacctggaaatggcctccagtcacaggcaggggccttgaggatgatttcctagctgggaagacaccgtgacatcaggccagaggtttccaatcagccttgcctgctttcatctctcccagcttagcctctggctgtaagcttcggtcattgcctccatgcccttgcttggctcaagcaccaccaatcgctttaatgcttcagccaccgcatgaggccctgtccaccacctttcctggccttgctatgggatgcttaccaaaggatggccctcatccaccctcccaagctgtgcgagcatgcaaggccccatggcctcacactgcagacacccctttccagccacaatccaccatcatcctgacgatcccacaactgggacagaggctacatctgccctagggaggtccttcagaatctgtggagcaagaaaggatttggggaagcttggggactgactccagagccccctcctaagaaccatcaccaccactcagccaatctgttctgggccctgattttgccacacctccatcctgtagcccattctctgaccccaaggagtggcagaagatcccttcactcagagaagcaaggctgatattagcttgttgaatgtaagagacacaaatgaagaagaacaaagagcctgagaaagcagcaagaggacatgatgaaaaatacgtggagttgatgagaaaggggagccaaggctttatacgtctaaagaaaatattcagtagctgaatccgcccagtgatagcctgtgggcaccagcagcaagggctgccatgggatacagcacccatctacaaagacctctattacataaacactgcttcttacaggaaacaaacctcttctgggatctccttttgtgaaaaccagtttgatgtgctaaaagtaaaaagtctattttccagtgtggtcttgttcagaagcagccagatttccaatgttgtttttcccctccactcagaaacccctgccctttcccttcagaaaacgatggcaggcattcctctgagtttacaagcagagactcactccaacccaaactagctgggagttcagaaccatggtggaataaagaaatgtgcatctggtccaaaaaaaaaaaaaaaaaaaaaaaaaaaaaaaaaa

SEQ ID NO: 414 - DNA, 3337 bp, Homo sapiens
gtcgagcctctagcccgcccgggtttccttcgcagtcgcgcaccgacgctcaaacgcgcgctccaacccgcagcctcctcctgcctcaccgcccgaagatggcggctctcaaactcctctcctccgggcttcggctctgcgcctctgcccgcggatctggggcaacctggtacaagggatgtgtttgttccttttccaccagtgctcatcgccataccaagttttatacagatccagtagaagctgtaaaagacatccctgatggtgccacggttttggttggtggttttgggctatgtggaattccagagaatcttatagatgctttactgaaaactggagtaaaaggactaactgcagtcagcaacaatgcaggggttgacaattttggtttggggcttttgcttcggtcgaagcagataaaacgcatggtctcttcatatgtgggagaaaatgcagaatttgaacgacagtacttatctggtgaattagaagtggagctgacaccacagggcacacttgcagagaggatccgtgcaggcggggctggagttcctgcattttacaccccaacagggtatgggaccctggtacaagaaggaggatcgcccatcaaatacaacaaagatggcagtgttgccattgccagtaagccaagagaggtgagggagttcaatggtcagcactttattttggaggaagcaattacaggggattttgctttggtgaaagcctggaaggcggaccgagcaggaaacgtgattttcaggaaaagtgcaaggaatttcaacttgccaatgtgcaaagctgcagaaaccacagtggtagaggttgaagaaattgtggatattggagcatttgctccagaagacatccatattcctcagatttatgtacatcgccttataaagggagaaaaatatgagaaaagaattgagcgtttatcaatccggaaagagggagatggggaagccaaatctgctaaacctggagatgacgtaagggaacgaatcatcaagagggccgctcttgagtttgaggatggcatgtatgctaatttgggcataggaatccctctcctggccagcaattttatcagcccaaatataactgttcatcttcaaagtgaaaatggagttctgggtttgggtccatatccacgacaacatgaagctgatgcagatctcatcaatgcaggcaaggaaacagttactattcttccaggagcctcttttttctccagcgatgaatcatttgcaatgattagaggtggacacgtcgatctgacaatgctaggagcgatgcaggtttccaaatatggtgacctggctaactggatgatacctgggaagatggtgaaaggaatgggaggtgctatggatttagtgtccagtgcgaaaaccaaagtggtggtcaccatggagcattctgcaaagggaaatgcacataaaatcatggagaaatgtacattaccattgactggaaagcaatgtgtcaaccgcattattactgaaaaggctgtgtttgatgtggacaagaagaaagggttgactctgattgagctctgggaaggcctgacagtggatgacgtacaaaagagtactgggtgtgattttgcagtttcaccaaaactcatgccaatgcagcagatcgcaaattgaaatatggatatttgtaccaggctgcgtgtttttcattttaaacacacaagatttaattgaaaggacatcaataatcataattgtgtatttaacaggtggttttttattagttttcttgtgtttcagactttatgcagccatataaactgttctctaggcatgctgtgacattttaataaaaagcaaaaggagcatttataattatctcatttgttaaggctgagaaggttgtttttataataggtaattatattgaatgcattttcactgaatatggtatgtatgctaaattatatgaacctttccccaagaagggccctagaaattgatgtggctttcctcttaaatattaattattagtcctgaaagaaagataacatatgtgatttttgtggttaggagagttgctgtcatgattgttttttcttcagcctcctctgacttttcttttggggcttcagattttatgattacatcttgtccccctagaacatcccccttcctcccatactgcttttaaacagatgcccaagaaggcaagcaggaatgcctcttgtgggggagggcagggagaaataactagttcaaaccaactatctatctatgctttgcaaagactaaggcgtattataggaagagggctagaaacctaactgattcttctcagttttctcattttaaaacagcccagtattcctttgtatcctcaagggtccttgagaatacttctgttattgaaaccctgtgggctacttgtactgtacctcctctcaagccaagaagggctgtgggataatttaccatgaatccttagtagcaatgacagcagagttaaaaaataaaaggtgttttactttcaggctcttgttttggttcagaggagattttaaatattgaatgacacttctacagaacaacggtttttcttctgccaaggctacttcctttaacgaagtgcctttaattcagccttatccaactagggaaaataatgttggacaagtctaggatttgaagagtcagtgaacttttagtgtcagggaataaacatggtgggtagattaggtttgaaaaaaacttccttagaggtatttattctcaatacctgacaggggcccatgggaatgacttcagaagcatcccggataatagatgggtaaaaagtctaggcaccctgaagaacaggtgagacagctggcctctggacagaggtaggcatagtacagtacgatatatcattcctctggtcctaaatatacaaacttattcatgtttttaggtgatgatggtcattgaaactcacttcttttcaggtgtagctacaattgtgtaatgtacaatattagagaaaggacaggctttttatgagtaacacacaccatatataaaacagcctttctggctgaccacatggttaaatgcataccttcccagtactggggggaaaatgacccttcttagaatgtgcaagttccatagagtaatatattgatatgattttgaaaagaattgttgatagttacatcttcaaacttatcattccagtatgcatctttaagataatgtgattctaagtagatgactttatattcttgattaaagagtgctatacatgttaagaaatgcattaaggaatacaataaatattctaaactgatgaaaaaaaaaaaaaaaaa

SEQ ID NO: 415 - DNA, 5054 bp, Homo sapiens
actcagcctggagaccgaagcgcttcactgagcgctcgccgccgcccagcctctcctctcgcgcctcctagctcttcgcagagcaaccaggagccaggagtggtctagagcccgagggtgggaagggggagtctgtctggcttttctcctatcttgcttctttttcctcttcccttcccactcttgttcaagcgagtgtgtgagctatggagcgaagagcctggagtctgcagtgcactgctttcgtcctcttttgcgcttggtgtgcactgaacagtgcaaaagcgaaaaggcaatttgtcaatgaatgggcagcggagatccccgggggcccggaagcagcctcggccatcgccgaggagctgggctatgaccttttgggtcagattggttcacttgaaaatcactacttattcaaacataaaaaccaccccagaaggtctcgaaggagtgcctttcatatcactaagagattatctgatgatgatcgtgtgatatgggctgaacaacagtatgaaaaagaaagaagtaaacgttcagctctaagggactcagcactaaatctcttcaatgatcccatgtggaatcagcaatggtacttgcaagataccaggatgacggcagccctgcccaagctggaccttcatgtgatacctgtttggcaaaaaggcattacgggcaaaggagttgttatcaccgtactggatgatggtttggagtggaatcacacggacatttatgccaactatgatccagaggctagctatgattttaatgataatgaccatgatccatttccccgatatgatcccacaaacgagaacaaacacgggaccagatgtgcaggagaaattgccatgcaagcaaataatcacaaatgcggggttggagttgcatacaattccaaagttggaggcataagaatgctggatggcattgtgacggatgctattgaggccagttcaattggattcaatcctggacacgtggatatttacagtgcaagctggggccctaatgatgatgggaaaactgtggaggggcctggccggctagcccagaaggcttttgaatatggtgtcaaacaggggagacaggggaaggggtccatcttcgtctgggcttcgggaaacggggggcgtcagggagataattgtgactgtgatggctacacagacagcatctacaccatctccatcagcagtgcctcccagcaaggcctatccccctggtacgctgagaagtgctcctccacactggccacctcttacagcagcggagattacaccgaccagagaatcacgagcgctgacctgcacaatgactgcacggagacgcacacaggcacctcggcctctgcacctctggctgctggcatcttcgctctggccctggaagcaaacccaaatctcacctggcgagatatgcagcacctggttgtctggacctctgagtatgacccgctggccaataaccctggatggaaaaagaatggagcaggcttgatggtgaatagtcgatttggatttggcttgctaaatgccaaagctctggtggatttagctgaccccaggacctggaggagcgtgcctgagaagaaagagtgtgttgtaaaggacaatgactttgagcccagagccctgaaagctaatggagaagttatcattgaaattccaacaagagcttgtgaaggacaagaaaatgctatcaagtccctggagcatgtacaatttgaagcaacaattgaatattcccgaagaggagaccttcatgtcacacttacttctgctgctggaactagcactgtgctcttggctgaaagagaacgggatacatctcctaatggctttaagaactgggacttcatgtctgttcacacatggggagagaaccctataggtacttggactttgagaattacagacatgtctggaagaattcaaaatgaaggaagaattgtgaactggaagctgattttgcacgggacctcttctcagccagagcatatgaagcagcctcgtgtgtacacgtcctacaacactgttcagaatgacagaagaggggtggagaagatggtggatccaggggaggagcagcccacacaagagaaccctaaggagaacaccctggtgtccaaaagccccagcagcagcagcgtagggggccggagggatgagttggaggagggagccccttcccaggccatgctgcgactcctgcaaagtgctttcagtaaaaactcaccgccaaagcaatcaccaaagaagtccccaagtgcaaagctcaacatcccttatgaaaacttctacgaagccctggaaaagctgaacaaaccttcccagcttaaagactctgaagacagtctgtataatgactatgttgatgttttttataacactaaaccttacaagcacagagacgaccggctgcttcaagctctggtggacattctgaatgaggaaaattaaaataagtgtgtggtcccaagttggaaatattcatgcttcttccttaccctgcgattttgcctgtgtctgaagtggttgttttgtcatgaattcttatgcttataatatcctttgtggcaccttttctttttctccctaaactgtacatgtgaaggggatgagctcaagcaggaagttcaacttccagaattgatcataggtatttcaaaacacatctttcctgtctgcacaagtgaagtgttttgttctttctggagtcacagttgacaaaaagctcttacactacattagaacactgcattagagcccatttcaattctcaaaagaaaaggcaaaacctgggatatcaattaatttgaaaacataatctgcaaagaatgagaaggagtcagaaactgtttctgtagcttgttccctgtcttgtccatgtggttcttcaaattttgatgccaagaaagtatttggtaggcctaatgaaggagttcactgtaagactcattccctagatctttctattccaaagtgccactcattcctgtagtcaaaatctggtcatgttggtcaaaagctggattatttagatctagaaacagatcttgaaatctgaatgctctggtttgagcaattttcgaacattctttgcctggtgcactgtgtctgtggtgccagaggcgtccgtggatccagaggtggttatgactcgtgctgcatgcctggtctttcctctgtttctccttctgaaagttttctatacctgtctcctttctcagccacaaaataaatgttgggagaaatgatatataccactttcccagaaaaaaaaaaacttacacttgggacttggcaaattcctagtcacaatttttttcagcagtaacaggaaaccacttatcacatggagacctaatgtaataatagaaaaatactcataatagggagaaaccaagagaagttttgtttttgtttttttccaactgtgttcattagaacagcgtgttctaagtatttgaaactgaatgtttattccttgatactaaaagttcttctccaatcctatcactgatagtgtccaaattctcaccaaattgctcctaagcttcaaatcagaagcagaaactggcaggccatggaccttaattgtccctcaggtagattttgtttggtatgcagaatgtttttaaaatatgagtggttattgaaaatatgatgtttcacataaaacctcattctcggacccatctttgctcatggcaacagttagctggagctgagtagcagctgcctgattagatgactctcagtccccatggcaccctgctccatgttacctagagcaggcacttgattccttgctgggcagtatccaataggcatttgattttgcccactcctacactaagcgaatgtgtacaaagtgtaaatgcattaggaaaaacaaactacccgcatcttctgttaggcaggatctgtacaataataattatgagtttgcttatgtaatctcacctcacctggatgatcactaatactaattcatttattactaaccttctggcttccttctctcaatatgcttacaaagtctccagtcacctacaatgctggctttctcccactgagtttgctgtttgcaatttttccatgaagtttgaacttcataaggtaattcatggcattgaactggttcatgaaaagaacactagagtctgtcatttgctttggcttgaagtatggttggtaacacaaattttcacctgctcttctaccatttgaatttgtgtagagggtgtttgcagagcaatgcccgtaatgcttagagaatgttctcctaaaagacttgcggaatcactctgtccttggaagtttcatatattgtttgatatgaagtgttagatagaatttccaatattggagcatatcaaaaagtattaaaactaaaaaggaccagagaattcttagattggcccggaaaggccaataaagagttagaatgaaaactcattacttttccattcccaatctagtgctagatgtataaatctttcttttgattcttcctaacaaaatattttctgggttaaaaccccagccaactcattgggttgtagccaaaggttcactctcaagaagctttaatatttaaataaaatcatattgaatgtttccaacctggagtataatattcagatataaaacagttttgtcagtctttcttagtgcctgtgtggatttttgtgaaaatgtcaaagagaaaacttatatactatttcccttgaaattttaaactatattttctttacaggtatttataatataccaatgcttttatcaaacagaattttaaagagcataataaattatattaaagaaccaaaagttttcctgagaataagaaagtttcacccaataaaatatttttgaaaggcatgttcctctgtcaatgaaaaaaagtacatgtatgtgttgtgatattaaaagtgacatttgtctaatagcctaatacaacatgtagctgagtttaacatgtgtggtcttggtattcttaagggaacttccacattatacatttgatgtattgaccagaat

SEQ ID NO: 416 - DNA, 4930 bp, Homo sapiens
ctcagccttcccggttcgggaaaggggaagaatgcaggaggggtaggatttctttcctgataggatcggttgggaaagaccgcagcctgtgtgtgtctttcccttcgaccaaggtgtctgttgctccgtaaataaaacgtcccactgccttctgagagcgctataaaggcagcggaagggtagtccgcggggcattccgggcggggcgcgagcagagacaggtcatggcagcgccaggcggcaggtcggagccgccgcagctccccgagtacagctgcagctacatggtgtcgcggccggtctacagcgagctcgctttccagcaacagcacgagcggcgcctgcaggagcgcaagacgctgcgggagagcctggccaagtgctgcagttgttcaagaaagagagcctttggtgtgctaaagactcttgtgcccatcttggagtggctccccaaataccgagtcaaggaatggctgcttagtgacgtcatttcgggagttagtactgggctagtggccacgctgcaagggatggcatatgccctactagctgcagttcctgtcggatatggtctctactctgcttttttccctatcctgacatactttatctttggaacatcaagacatatctcagttggaccttttccagtggtgagtttaatggtgggatctgttgttctgagcatggcccccgacgaacactttctcgtatccagcagcaatggaactgtattaaatactactatgatagacactgcagctagagatacagctagagtcctgattgccagtgccctgactctgctggttggaattatacagttgatatttggtggcttgcagattggattcatagtgaggtacttggcagatcctttggttggtggcttcacaacagctgctgccttccaagtgctggtctcacagctaaagattgtcctcaatgtttcaaccaaaaactacaatggagttctctctattatctatacgctggttgagatttttcaaaatattggtgataccaatcttgctgatttcactgctggattgctcaccattgtcgtctgtatggcagttaaggaattaaatgatcggtttagacacaaaatcccagtccctattcctatagaagtaattgtgacgataattgctactgccatttcatatggagccaacctggaaaaaaattacaatgctggcattgttaaatccatcccaagggggtttttgcctcctgaacttccacctgtgagcttgttctcggagatgctggctgcatcattttccatcgctgtggtggcttatgctattgcagtgtcagtaggaaaagtatatgccaccaagtatgattacaccatcgatgggaaccaggaattcattgcctttgggatcagcaacatcttctcaggattcttctcttgttttgtggccaccactgctctttcccgcacggccgtccaggagagcactggaggaaagacacaggttgctggcatcatctctgctgcgattgtgatgatcgccattcttgccctggggaagcttctggaacccttgcagaagtcggtcttggcagctgttgtaattgccaacctgaaagggatgtttatgcagctgtgtgacattcctcgtctgtggagacagaataagattgatgctgttatctgggtgtttacgtgtatagtgtccatcattctggggctggatctcggtttactagctggccttatatttggactgttgactgtggtcctgagagttcagtttccttcttggaatggccttggaagcatccctagcacagatatctacaaaagtaccaagaattacaaaaacattgaagaacctcaaggagtgaagattcttagattttccagtcctattttctatggcaatgtcgatggttttaaaaaatgtatcaagtccacagttggatttgatgccattagagtatataataagaggctgaaagcgctgaggaaaatacagaaactaataaaaagtggacaattaagagcaacaaagaatggcatcataagtgatgctgtttcaacaaataatgcttttgagcctgatgaggatattgaagatctggaggaacttgatatcccaaccaaggaaatagagattcaagtggattggaactctgagcttccagtcaaagtgaacgttcccaaagtgccaatccatagccttgtgcttgactgtggagctatatctttcctggacgttgttggagtgagatcactgcgggtgattgtcaaagaattccaaagaattgatgtgaatgtgtattttgcatcacttcaagattatgtgatagaaaagctggagcaatgcgggttctttgacgacaacattagaaaggacacattctttttgacggtccatgatgctatactctatctacagaaccaagtgaaatctcaagagggtcaaggttccattttagaaacgatcactctcattcaggattgtaaagatacccttgaattaatagaaacagagctgacggaagaagaacttgatgtccaggatgaggctatgcgtacacttgcatcctgaaagtgggttcgggaggtctctatgagcaaggaatacaagacaaaacttcctcaatgcattgactatttcttcagactcaaaacactcattcttttttctattaagccattgaaagagaagcactaagactgcttctaggctttatttataaaataaacaccttatccctaacatgggcaaaatggctagaattattcagacgatttggcagcgtccagggtaagctggtgttataatacgctgctgatctacatcacagatttgctaataatgttcacgtgggccctggcatatctctgttcagttagagtgagtgctgacccaacagcctctgtggtcaagcgagtcacgaatgattaatcataaagaaaaatcagtttttgactgacctggatatccatgagctgcactgatcaccatgtaaggtcacatttagtaaatgctgaaataaaatgattaatgcatttatcaataaaagcctttgaaaatactttggataataaattggagttttaaaaatgcaaatttgcttagtatctaataatgaagtgttattacatatagccggaattgaggatctctttgatcctggaaatggtttacctaaaagctacagaaccaggccaatatattttgaaatattgatgcagacaaatgaaataataaagagattttcatggtttataaaaatcttttttgatatgataataatcatgatcacaactgagatcaaaaaaatatatgacagattattttgtttaaaaatgcagttttaattatcttagtctatagaaatgatcattgcatggaggcatgtataggtatgatctgtgtaaaatctgacataaaaacagtgctattctgagtgaaaatttttttgatgtgcttacataaccatggtgattaaaatgagtttatattttttctcaaaaattttagcagtgtgtaaagtaagtaatctttaactgaactctgaccacttaaaaaaaaatctaaaaattgaactacctatagtagtctgtgtttaaagtgaatttttaaagacaaagcattctaaatgaactcaatataaaaacattcatttggaatgtacatactgaaaaatacaggtttttttgaccaaaagtttttatatcttttctttttatttatttttttcctaagtgccaacaattttctagatattatatacaacacaggctttgatcttggggacttttcccatatatttcacactggagtgaatgaagttgtacttcatttctagagaaaagttatacccaggtccccaattgagaatgtcttgcttgattgaaaacgacatcatcccttggtatactccagggattggtttcaggacccctgcatttaccaaaatttgtgcacactcaagtcctgcagtcacccctgcctaaagatagaatggcttctctgtttttcttctgaaatacaaccagaaacaatgtgtctatttctgaaagaataggattaatgatcatacaaatgggttaatcctgaattctggttgtaaatctggttacagcataactaggattataatgctgcctcattttcacagcactacttgcttatattgacaacaaatcatctcgctaaagagtgaatgtaggccaggcgcggtggctcatgcctgtaatcccagcactttgggaggccgaggcgggtggatcacgaggtcaggagatcgagaccatcctggctaacatggtaaaaccccgtctctactaaaaatagaaaaaaagaaattagcctagcgtggtggctggcgggcgcctgtagtcccagctatttgggaggctaaggcaggagaatggcgtgaacccgggaggcggagcttgcagtgagccgaggtcgtgccactgcactccagcctgggcgacagagcaagactccgtctcaaaaaaaaaaaaaaaaaaaaaaaaagagtgaatgtaatagtcttgcagaaaatgaatgaatacctttgttcaataaaggaaatatgcactgctcacttttttgaaggaaatgccaaagttacgttttacaacaaggctagagtttgtaaattctgggttcatttgtgatgacataagtcagcaaactgcgggaatactgtctcttctatgtattttgtgaatagtaagcataattttagttttgtattatcaatgaaaatttcacttgaaattaaagctgccttttgttatatttttaacctataggataagattccagtattgtatatgagttttaacaaattaaaaaatcaaatcatgtacatttgaaaatatttgcacacatttaaaaataaatgtaaagttgtcttttaaactactcggatgtgtcctttctgaacaaaa

SEQ ID NO: 417 - DNA, 2590 bp, Homo sapiens
aacgcctcgctcttgagaccagccaccaaaccacgaaaagtgactttcttctcgtgtgctctctacggcccttctgatggaagcagaaacagggagcagcgtggagactggaaagaaggccaacagaggcactcgaattgccctggtcgtgtttgtcggtggcaccctagttctgggcacgatcctctttctagtgagtcaaggtctcttaagtctccaagctaaacaggagtactgcctgaagccagaatgcatcgaagcggctgctgccatcttaagtaaagtaaatctgtctgtggatccttgtgataatttcttccggttcgcttgtgatggctggataagcaataatccaattcccgaagatatgccaagctatggggtttatccttggctgagacataatgttgacctcaagttgaaggaacttttggagaaatcaatcagtagaaggcgggacaccgaagccatacagaaagccaaaatcctttattcatcctgcatgaatgagaaagcgattgaaaaagcagatgccaagccactgctacacatcctacggcattcacctttccgctggcccgtgcttgaatctaatattggccctgaaggggtttggtcagagagaaagttcagccttctgcagacacttgcaacgtttcgtggtcaatacagcaattctgtgttcatccgtttgtatgtgtcccctgatgacaaagcatccaatgaacatatcttgaagctggaccaagcaacactctccctggccgtgagggaagactaccttgataacagtacagaagccaagtcttatcgggatgccctttacaagttcatggtggatactgccgtgcttttaggagctaacagttccagagcagagcatgacatgaagtcagtgctcagattggaaattaagatagctgagataatgattccacatgaaaaccgaaccagcgaggccatgtacaacaaaatgaacatttctgaactgagtgctatgattccccagttcgactggctgggctacatcaagaaggtcattgacaccagactctacccccatctgaaagacatcagcccctccgagaatgtggtggtccgcgtcccgcagtactttaaagatttgtttaggatattagggtctgagagaaagaagaccattgccaactatttggtgtggagaatggtttattccagaattccaaaccttagcaggcgctttcagtatagatggctggaattctcaagggtaatccaggggaccacaactttgctgcctcaatgggacaaatgtgtaaactttattgaaagtgccctcccttatgttgttggaaagatgtttgtagatgtgtacttccaggaagataagaaggaaatgatggaggaattggttgagggcgttcgctgggcctttattgacatgctagagaaagaaaatgagtggatggatgcaggaacgaaaaggaaagccaaagaaaaggcgagagctgttttggcaaaagttggctatccagagtttataatgaatgatactcatgttaatgaagacctcaaagctatcaagttttcagaagccgactactttggcaacgtcctacaaactcgcaagtatttagcacagtctgatttcttctggctaagaaaagccgttccaaaaacagagtggtttacaaatccgacgactgtcaatgccttctacagtgcatccaccaaccagatccgatttccagcaggagagctccagaagcctttcttttggggaacagaatatcctcgatctctgagttatggtgctataggagtaattgtcggacatgaatttacacatggatttgataataatggtagaaaatatgataaaaatggaaacctggatccttggtggtctactgaatcagaagaaaagtttaaggaaaaaacaaaatgcatgattaaccagtatagcaactattattggaagaaagctggcttaaatgtcaaggggaagaggaccctgggagaaaatattgctgataatggaggcctgcgggaagcttttagggcttacaggaaatggataaatgacagaaggcagggacttgaggagcctcttctaccaggcatcacattcaccaacaaccagctcttcttcctgagttatgctcatgtgaggtgcaattcctacagaccagaagctgcccgagaacaagtccaaattggtgctcacagtccccctcagtttagggtcaatggtgcaattagtaactttgaagaattccagaaagcttttaactgtccacccaattccacgatgaacagaggcatggactcctgccgactctggtagctgggacgctggtttatggcatcctgagacagttgcacagtgccagcggaggctgcactgagccttcatcgcccattgctttaggcctggagactttcatttttagtgcattttcattatttgggtaggtgacctgcttggatctagacagcatctgttcaaagtcgtagggcttataaagtggaatataagaatgaactaagtatgtttctttagaaaatcaaaccaacaaaaataaatccctaggctacttttgttaaaaaa

SEQ ID NO: 418 - DNA, 14800 bp, Homo sapiens
cgcccgggcaggtggcggcagagctgaagtgagcggagccaccaggaggccatgtcgggtgaggacgctgaggtccgggcagtctctgaagatgtctccaatggaagcagtggctcgcccagccctggggacacactgccctggaaccttgggaaaacgcagcggagccggcgcagcgggggtggcgctgggagcaacgggagtgtcctggacccagctgagcgggcggtcattcgcatcgcagatgagcgggatcgtgtgcagaagaaaaccttcaccaagtgggtcaacaagcacctcatcaaggcccagaggcacatcagtgacctgtatgaagacctccgcgatggccacaacctcatctccctgctggaggtcctctcgggggacagcctgccccgggagaaggggaggatgcgtttccacaagctgcagaatgtccagattgccctggactacctccggcaccgccaggtgaagctggtgaacatcagggatgatgacatcgctgacggcaaccccaagctgacccttggcctcatctggacaatcattctgcacttccagatctcagatatccaggtgagtgggcagtcggaggacatgacggccaaggagaagctgctgctgtggtcgcagcgaatggtggaggggtaccagggcctgcgatgcgacaacttcacctccagctggagagacggccgcctcttcaatgccatcatccaccggcacaagcccctgctcatcgacatgaacaaggtgtaccggcagaccaacctggagaacctggaccaggccttctctgtggcggagcgggacctgggagtgacgcggctcctggaccctgaggacgtggatgtccctcagcccgacgagaagtccatcatcacctacgtctcgtcgctgtatgacgccatgccccgcgtgccggacgtgcaggatggggtgagggccaacgagctgcagctgcgctggcaggagtaccgggagctggtgctgctgctgcttcagtggatgcgacaccacacggccgcctttgaggaacgcaggttcccctccagcttcgaggagattgagatcctgtggtctcagttcctgaagtttaaggagatggagctaccagccaaggaggccgacaagaacaggtccaagggcatctaccaatccctggagggagcggtgcaagcaggccagctcaaggtgccccctggctaccacccgctggatgtggagaaggagtggggcaagctgcacgtggccatcctggagcgggagaagcagctccgcagcgagtttgagaggctggagtgtcttcagcgcatcgtgaccaagctgcagatggaggcggggctgtgtgaggagcagctgaaccaggccgacgccctgctgcagtcggatgtccggctgctggctgcaggcaaagtgccacagcgggcgggggaggtggaacgggacttggacaaggcggatagcatgatccggctgctcttcaacgacgtgcagaccctcaaggatggacggcacccgcagggcgagcagatgtaccgcagggtgtaccgtctgcacgagcgcctggtagccatccgcaccgagtacaacctacggctgaaggcaggcgtggcggcccctgcaacccaggtggcccaggtgactctgcagagtgtgcagaggcgccccgagctggaggactccactctgcgctacctgcaggacctgctggcctgggtggaggagaaccagcaccgtgtggatggcgctgagtggggtgtggacctgcccagcgtggaggcgcagctgggcagccaccgaggcctgcaccagtccatcgaagaattccgggccaagatcgagcgggcacggagtgacgagggccagctctcccccgccacccggggtgcctaccgtgactgcctgggtcggctggacctgcagtacgccaagctgctgaactcctccaaggcccgcctcaggtccctggagagcttgcacagctttgtggcagccgccactaaggagctaatgtggctgaatgagaaggaggaggaggaggtgggcttcgactggagcgaccgcaacaccaacatgaccgccaagaaggagagctactcggcgctgatgcgggagctggagctgaaggagaagaagatcaaggagctccaaaatgctggggaccggctgctgcgggaggaccacccggcccggcccacggtggagtccttccaggcggccctgcagacgcagtggagctggatgctacagctgtgctgctgtatcgaggcacacctgaaggagaacgctgcctactttcagttcttctcagatgtgcgggaggccgaggggcagttgcagaagctgcaggaggcactgcgtaggaaatacagttgtgatcgctccgccaccgtcacccggctggaggacctgctgcaggatgcccaggacgagaaggaacagctgaacgagtacaagggccacctctcaggcctggccaagcgggccaaggccgtcgtgcagctgaagccccgccacccagcccaccccatgcggggccgcctgcccctgctggccgtgtgcgactataagcaggtggaggtgactgtgcacaagggtgacgagtgccagctggtgggccctgcacagccgtcccactggaaggtgctcagcagctccggcagcgaggccgccgtgccctccgtgtgcttcctggtgcccccgcccaaccaggaggcccaggaggccgtcaccaggctggaggcccagcaccaggccctggtcacgctgtggcaccagttgcacgtggacatgaagagccttctggcctggcagagccttcgccgcgacgtgcagctcatccgctcgtggtccctggccacgttccgcaccctgaagccagaggagcagcgccaagccctgcacagcctggagctgcactaccaggccttcctgcgggacagccaggacgcgggcggcttcggacccgaggaccggctgatggctgagcgcgagtacggctcctgcagccaccactaccagcagctgctgcagagcctggaacagggtgcacaggaagagtctcgctgccagcgctgcatctccgagctcaaagacatccggctgcagctggaggcctgtgagacgcgcaccgtgcaccgcctgcggctgccgctggacaaagagccggcacgggagtgtgcccagcgcatcgccgagcagcagaaggcacaggcagaggtggaggggctgggcaagggggtcgcccggctctctgccgaggccgagaaggtcttggccctaccagagccatcgcctgcggcccccacgctgcgctcggagctggagctgacgctgggcaagctggagcaggtccgcagcctgtctgccatctacctggagaagctcaagaccatcagcctggtgatccgcggcacgcagggggccgaggaggtgctcagggcccacgaggagcagctcaaggaggcccaggccgtgccggccaccctcccggagctcgaggccaccaaggcctctctgaagaagctgcgggcccaggccgaggcacagcagcccacgttcgacgccctgcgggatgagctgcggggggcacaggaggtgggggagcgactgcagcagcggcacggggagcgggacttggaggtggagcgctggcgggagcgggtcgcccaggtgcttgagcgctggcaggctgtgctggcccagaccgacttgcggcagcgcgagctcgagcaactgggccgccagctgcgttactaccgcgagagtgcagaccccttgggcgcctggctgcaggacgccaggcggcggcaggagcagatccaggccatgccgctggccgacagccaggctgtgcgggagcagctgcggcaggagcaggccctgctggaggagatcgagcgccacggcgagaaggtcgaggagtgccagaggtttgcgaaacagtacatcaacgccatcaaggactatgaactccagctggtgacgtacaaggcgcagcttgagccggtggcctccccggccaagaagcccaaggtccagtcgggatcagagagtgtcatccaggagtacgtggacctgcgtacgcactacagcgagctgaccacactgacgagccagtacatcaagttcatcagcgagactctgcggcgcatggaggaggaggagaggctggctgagcagcagcgggcagaggagcgcgagcggctggccgaggtggaggccgcgctggagaagcagcggcagctggccgaggcgcacgcccaggcaaaggcacaggcggagcgggaggcgaaggagctgcagcagcgcatgcaggaggaggtggtgcggcgggaggaggcggcggtggacgcgcagcagcagaagcgcagcattcaggaggagctgcagcagctgcggcagagctcggaggcggagatccaggccaaggcccggcaggcagaggcggctgagcgcagccggctgcgcatcgaggaggagatccgcgtggtgcgcctgcagttggaggccaccgagcgccagcgtggcggggctgagggggagctgcaggcactgcgtgcacgggcggaggaggctgaggcacaaaagcgacaggcgcaggaggaggccgagcgcttgcggaggcaggtgcaggacgagagccagcgtaagcggcaggcggaggtggagctggcctcgcgcgtgaaggccgagaccgaggcggcgcgcgagaagcagcgggccctgcaggccctggaggagctgcggctgcaggcggaggaggcggagcggcgcctgcggcaggccgaggtggagcgagcgcggcaggtacaggtggccctggagacggcgcagcgcagtgcagaggcggagctgcagagcaaacgcgcctccttcgccgagaagacggcacagctggagcgctccctgcaggaggaacacgtggctgtggcacagctgcgggaggaggctgagcggcgggcacagcagcaggccgaggccgagcgggcgcgcgaggaggcagagcgggagctggagcgctggcagctcaaggccaacgaggcgctacggctgcggctgcaggcggaggaggtggcgcagcagaagagcctggcgcaggccgaggctgagaagcagaaggaggaggcggagcgcgaggcgcggcggcgcggcaaggcggaggagcaggccgtccggcagcgggagctggctgaacaagagctggagaagcagcggcagctggcggaaggcaccgcgcagcagcgcctggccgcggagcaggagttgatccggctgcgggccgagacggagcagggggagcagcagcggcagctgctggaggaggagctggcccggctgcagcgtgaggcggctgcagccacgcagaaacggcaggagctggaagccgagctggccaaggtgcgggccgagatggaggtgctgctggccagcaaggcgagggctgaggaggagtcgcgctccaccagcgagaagtccaagcagaggctggaggccgaggccggccggttccgcgagctggccgaggaggccgcccgcctgcgtgccctggcggaagaggccaagcggcagcggcagctggccgaggaagacgcggcgcggcagcgggccgaggcggagcgggtgcttgcggagaagctggccgccatcggcgaggccacgcggctcaagacggaggcggagatcgcgctcaaggagaaggaggcggagaacgagcgcctgcggcggctggcggaggacgaggccttccagcggcggcggctggaggagcaggccgcgcaacacaaggctgacatcgaggagcgcctggcccagctgcgcaaggcatcggacagcgagctggagcggcagaaggggctggtggaggacacgctgaggcagcggcggcaggtggaggaagagatcctggcgctgaaggcgagcttcgagaaggcggccgctggcaaggcggagctggagctggagctgggacgcatccgcagcaacgcggaggacacgctgcgcagcaaggagcaggccgagctggaggccgcgaggcagcggcagctggcggcggaggaggagcggcggcgccgtgaggctgaggagcgcgtgcagaagagcctggcggccgaggaggaggccgcacggcagcggaaggcggcgctggaggaagtcgagcggctgaaagccaacgtggaggaggcgcggcgcctgcgggagcgagcggagcaggagtcggcgcggcagctgcagctggcccaggaggccgcccagaagcggctgcaggcggaagagaaggcacacgccttcgcggtgcagcagaaggagcaggagctacagcagacgctgcagcaggagcagagcgtgctggaccagctgcgcggcgaggcggaggcggcccggcgggcggctgaggaggcggaggaggcccgggtgcaggcggagcgtgaggcggcgcaggcccggcggcaggtggaagaggccgagcggctgaagcagtcggcagaggagcaggcacaggcccgggctcaggcacaggcggctgcagagaagctgcgcaaggaggccgagcaagaggcggcgcggcgggcacaggcggagcaggcggccctgcggcagaagcaggcagctgacgcggagatggagaagcataagaaattcgccgagcagacgctgcggcagaaggcgcaggtggagcaggagctgacaacactgcggctgcagctggaggagaccgaccaccagaagaacctgctggacgaggagctgcagcggctgaaggcggaggccacggaggccgcacgccagcgcagccaggtggaggaggagctcttctcggtgcgcgtgcagatggaggagctgagcaagctcaaggcacgcatcgaggctgagaaccgcgcactcatcttgcgtgacaaggacaatacgcagcgcttcctgcaggaggaggctgagaagatgaagcaggtggcggaggaggccgcgcggctgagtgtggcggcccaagaggctgcgcgactgcggcagctggcagaggaggacctggcacagcagcgggccttggcagagaagatgctcaaggagaagatgcaggcggtgcaggaggccacgcgactcaaggctgaggcggaactgctgcagcagcagaaggagcttgcgcaggagcaggcgcggcggctgcaggaggacaaggagcagatggcgcagcagctggcggaggagacgcagggcttccagcggacgctggaggccgagcggcagcggcagctggagatgagcgctgaggctgagcgcctcaagctgcgtgtggccgagatgagccgagcccaggcccgcgctgaggaggacgcccagcgcttccggaagcaggcggaggagatcggtgagaagctgcaccgcacggagctcgccacccaggagaaggtgaccctggtgcagacactggagatccagcgacagcagagtgaccatgatgccgagcgcctgcgggaggccatcgctgagctggagcgtgagaaggagaagctccaacaggaggccaaactgctgcagctcaagtctgaggagatgcagacggtgcagcaggagcagctgctgcaggagacgcaggccctgcagcaaagcttcctctctgaaaaggacagcctgctacagcgggagcgcttcatcgagcaggagaaggccaagctggagcagctcttccaggacgaggtggccaaggcacagcagctgcgtgaggagcagcagcggcagcagcagcagatggagcaggaacggcagcggctggtggccagcatggaggaggcgcggcggcggcagcatgaggccgaggagggcgtgcggcgcaagcaggaggagctgcagcagctggagcagcagcggcggcagcaggaggagctgctggctgaggagaaccagaggctgcgtgagcagctgcagctcctggaggagcagcaccgggccgcgctggcgcactcagaggaggtcactgcctcgcaggtggctgccacaaagaccctgcccaatggccgggatgcacttgatggccccgcggcagaggcagagccggagcacagcttcgatggcctgcggcggaaggtgtcagctcagaggctgcaggaggccggcatcctgagtgcggaggagctgcagcggttggcgcagggccacaccacggtggacgagctcgcacggcgggaagacgtgcgccactacctgcagggccgcagcagtatcgcagggctgttgctgaaggccaccaatgagaagctgagtgtttacgccgccctgcagaggcagctgctgagtcccggcacggccctcatcctgctggaggcgcaggcggcctcaggcttcctgctggaccctgtgcggaaccggcggctgaccgtcaacgaggctgtgaaggagggtgtggtgggccccgagctgcaccacaagctgctgtcggccgagcgcgccgtcactggctacaaggacccctacactggccagcagatctctctcttccaagccatgcagaagggcctcatcgtccgggagcacggcatccgcctgctggaggcccagatcgccacgggcggcgttatcgaccccgtgcacagccaccgcgtgcccgtggacgtggcctaccggcgcggctacttcgacgaggagatgaaccgcgtcctggcggaccccagcgacgacaccaagggcttctttgaccccaacacgcacgagaacctcacgtacctgcagctactggagcgctgcgtggaggaccccgagacgggcctgtgccttctgccactcacggataaggctgccgagggcggggagctggtctacactgactccgaggcccgggacgtctttgagaaggccaccgtgtctgcgccgttcggcaagttccagggcaagacggtgaccatttgggagatcatcaactcggaatacttcacggcagagcagcggcgggacctgctgcggcagttccgcacgggccggatcacagtggagaagatcatcaagatcatcatcacggtggtggaggagcaggagcagaagggccggctttgctttgagggcctgcgcagcctggtgccagccgccgagctgctggagagcagggtcatcgaccgcgagctctaccagcagctgcagcgaggtgagcgctctgtgcgagacgtagccgaggtggacactgtgcggcgggctctccggggtgccaacgtcatcgcgggtgtatggctggaggaggcggggcagaagctgagtatctacaatgccctgaagaaagacctgctgccatccgacatggccgtggccctgttggaagcccaggccggcaccgggcacatcatcgaccccgccaccagcgcccggctgaccgtggacgaggcagtgcgtgctggcctggtgggccccgagtttcatgagaagctgctatcagccgagaaggctgtgacagggtacagggacccctacacagggcagagcgtctccctgttccaggccctgaagaagggcctcattccccgggagcagggcctgcgcctgttggacgcccagctgtccacgggcggcatcgtggaccccagcaagagccaccgcgtgcccctggatgtcgcctgcgcccgaggctgcctggatgaggagaccagcagggccctgtcggcaccaagggccgacgccaaggcctacagtgaccccagcacaggggagccggccacctacggcgagctccagcagcggtgccggcccgaccagctgaccgggctgagcctgctgccgctctcagaaaaggctgctcgggcccggcaggaggagctctactcagagctgcaggcccgtgagacctttgaaaagaccccggttgaggtccccgtgggtggcttcaagggcaggacggtgacggtgtgggagctcatcagctctgagtacttcactgcggagcagcggcaggagctgttgcgtcagttccgcacgggcaaggtcaccgtggagaaggtcatcaagattctcattaccatcgtggaggaggtggagaccctgcggcaggagaggctgtccttcagcggcctccgtgcccctgtgccagccagcgagctcctggcttccggggtcctcagcagagcccagtttgagcagctcaaggacggcaagacgacggtcaaggacctttcggagctgggctccgtgcggacgctgctgcagggcagtggctgcctcgccggcatctacctggaggacaccaaggagaaggtgtccatctacgaggccatgcgccggggcctgctgagagccacaacggctgcgctcctgctggaggcgcaggcggccactggcttcctggtggaccccgtgcggaaccagcgcctgtatgtccacgaggccgtgaaggcgggcgtggtgggccccgagcttcacgagcagctgctgtctgccgagaaggccgtcaccggctacagagacccctactcgggcagcaccatctccctcttccaggccatgcagaagggcctggttctccggcagcacggcatccgcctgctggaggcccagatcgccacgggcggcatcatcgaccccgtgcacagccaccgcgtgcctgtggacgtggcctaccagcgcggctacttcagtgaggagatgaaccgcgtcctggcggaccccagcgacgacaccaagggcttctttgaccccaacacgcatgagaacctcacgtacaggcagctgctggagcggtgcgtggaggaccccgagacgggcttgcgccttctgccactgaaaggggcggagaaggctgaggtggtggagaccacgcaggtgtacactgaggaggagacaagaagggcatttgaagagacacagatcgacattcccggcggcggcagccacggcggctccaccatgtccctgtgggaggtgatgcagtcggacctgatccccgaggagcagcgggcccagctgatggctgacttccaggccggccgggtgaccaaggaacgcatgatcatcatcatcatcgagatcattgagaagacagagatcatccgccagcagggtctggcctcctatgactacgtgcgccgccgcctcacggctgaggacctgttcgaggctcggatcatctctctcgagacctacaacctgctccgggagggcaccaggagcctccgtgaggctctcgaggcggagtccgcctggtgctacctctatggcacgggctccgtggctggtgtctacctgcccggttccaggcagacactgagcatctaccaggctctcaagaaagggctgctgagtgccgaggtggcccgcctgctgctggaggcacaggcagccacaggcttcctgctggacccggtgaagggggagcggctgactgtggatgaggctgtgcggaagggcctcgtggggcccgagctgcacgaccgcctgctctcggctgagcgggcggtcaccggctaccgtgacccctacaccgagcagaccatctcgctcttccaggccatgaagaaggagctgatccctactgaggaggccctgcggctgctggatgcccagctggccaccggcggcatcgtggacccccgcctgggcttccaccttcccctggaggtggcttaccagcgtggctacctcaacaaggacacgcacgaccagctgtcagagcccagcgaggtgcgcagctacgtggacccgtccaccgacgagcgcctcagctacacgcagctgctcaggcggtgccgtcgtgacgacggcaccggccagctgctcctgccactgtcggacgcccgcaagctgaccttccgtggcctgcggaagcagatcaccatggaggagctggtgcgctcgcaggtcatggacgaggccacggcgctgcagctgcgggagggcctgacctccatcgaggaggtcaccaagaacttgcagaagttcctggaaggcaccagctgcatcgctggtgtcttcgtggacgccaccaaggaacggctctcggtgtaccaggccatgaagaaaggcatcatccgccccggcacagcctttgagctcctggaggcgcaggcggccaccggttacgtcatcgaccccatcaagggactgaagctgacggtggaggaggctgtgcgtatgggcattgtgggccccgagttcaaggacaagctgctgtcggccgagcgcgccgtcactgggtacaaggacccctactctgggaagctcatctccctcttccaggccatgaagaagggcctgatcctgaaggaccatggcatccgcctgctggaggcccagatcgccacgggcggcatcatcgaccctgaggagagccaccggctgcccgtggaggtggcctacaagcgcggcctcttcgatgaggagatgaacgagatcctgaccgacccctcggacgacaccaagggcttctttgaccctaacacggaggagaacctcacctacctgcagctgatggagcgttgtatcactgacccccagacgggcctgtgtctcttgccgctgaaggagaagaagcgggagcggaagacgtcctccaagtcctccgtgcgcaagcgccgagtggtcatcgtggaccccgagacgggcaaggagatgtcagtgtacgaggcctaccgcaagggcctgattgaccaccagacgtacctggagctgtccgagcaggagtgcgagtgggaggagatcaccatctcctcctcggacggcgtggtcaagtccatgatcatcgaccgccgctccgggcgccagtacgacatcgatgatgccatcgccaagaacctcatcgaccgctcggcactggaccagtaccgcgccggcacgctctccatcaccgagttcgccgacatgctctcgggcaacgccggtggtttccgctcccgttcctcctcggtgggatcctcctcctcctaccccatcagccccgccgtctccaggacccagctggcctcctggtcagaccccactgaggagacgggccccgtggctggcatcctggacacggagacgctggagaaggtgtccatcaccgaggccatgcaccggaacctggtggataacatcacggggcagcggctgctggaggcgcaggcctgcaccgggggcatcatcgaccccagcaccggtgagcgcttccctgtcaccgacgccgtcaacaagggcctggtggacaagatcatggtggaccgcatcaacctggcccagaaggccttttgcggcttcgaggacccacgcaccaagaccaagatgtcggccgcccaggccctgaagaagggctggctctactacgaggccggccagcgcttcctggaggtgcagtacctgaccggcggcttgatcgagcccgacacgccgggccgcgtgcccctggacgaggccctgcagcgcggcacggtggacgcccgcaccgcacagaagctgcgtgacgtgggcgcctactccaagtacctcacctgccctaagaccaagctcaagatctcctataaggacgcgctggaccgcagcatggtggaggagggcacggggctgcggctgctggaggctgccgcgcagtccaccaagggctactacagcccctacagcgtcagcggctccggctctaccgctggctcccgcaccggctcgcgcaccggctcccgggccggctcccgccgcggcagctttgacgccaccggctccggcttctccatgaccttctcttcatcctcctactcctcctcgggctacggccgccgctacgcctcggggtcctcggcctccctggggggccctgagtctgccgtggcctgaggctgcctgcgcccaccccgctctgcatgcggcccagcccggctcccaccgaggcgcgggggccgttttcaacgcttaaaggtgtcttcctcccaagtggtgcctaaagtttaaccaaaaagaccagactaatatattaatatatatctgctgtccagacagcctgtatcttgggggacagggctggcccagccctgctggccgcctcaccccctcgggtctcctcactcccttctacctgccactcacacagccaggtgccttggagggtcccaagctgggccccagcccaccctcctgtcttcccagggtagcccgcctgccagtcctagctgcacagggcagctgggcccaaccctgtctgtagagggccctggtgtttctagcactggcctgcacggtgggccttgctggggacggggggccccagtcagcctctctcccagtctacccagagaagccccttccccatgggaagacgaggccctcgggcccagcccccacagtgctgtctgatctgtgctttccagctcaccccccacactcactcctgagacccctggcctccggcgtcagcctccagcctctgttcccctagtaagtgccttccatgtcggcctctaaccccaggccccgaggacccagacccagtggggaggcggacgttccagccggcatggctgggaactgcagacctgtcctcctggtgggtccaggggcccctccagcttgtggagccccacactggggtgccgcctgcccgtctctctcccatggagccccagccccctttgggcccagggacaccagccaggctctgtgctgaccctcctgttgcgcccagccctggtctcagcagcgaccacccctgcctccaccctctgagctttgcatgttccactaaccccgggcgggtggcaggtggaggtgtcaggctgctggcgcctctgcaagggcagaacactaacctgaccgtgggcggggccttgcggtatccgcccccaataaaagcaattccaacctt

SEQ ID NO: 419 - DNA, 2236 bp, Homo sapiens
cgagcggcggcggagcaggcatttccagcagtgaggagacagccagaagcaagctattggagctgaaggaacctgagacagaagctagtcccccctctgaattttactgatgaagaaactgaggccacagagctaaagtgacttttcccaaggtcgcccagcgaggacgtgggacttctcagacgtcaggagagtgatgtgagggagctgtgtgaccatagaaagtgacgtgttaaaaaccagcgctgccctctttgaaagccagggagcatcattcatttagcctgctgagaagaagaaaccaagtgtccgggattcagacctctctgcggccccaagtgttcgtggtgcttccagaggcagggctatgctcacattcatggcctctgacagcgaggaagaagtgtgtgatgagcggacgtccctaatgtcggccgagagccccacgccgcgctcctgccaggagggcaggcagggcccagaggatggagagaacactgcccagtggagaagccaggagaacgaggaggacggtgaggaggaccctgaccgctatgtctgtagtggggttcccgggcggccgccaggcctggaggaagagctgaccctcaaatacggagcgaagcacgtgatcatgctgtttgtgcctgtcactctgtgcatgatcgtggtggtagccaccatcaagtctgtgcgcttctacacagagaagaatggacagctcatctacacgacattcactgaggacacaccctcggtgggccagcgcctcctcaactccgtgctgaacaccctcatcatgatcagcgtcatcgtggttatgaccatcttcttggtggtgctctacaagtaccgctgctacaagttcatccatggctggttgatcatgtcttcactgatgctgctgttcctcttcacctatatctaccttggggaagtgctcaagacctacaatgtggccatggactaccccaccctcttgctgactgtctggaacttcggggcagtgggcatggtgtgcatccactggaagggccctctggtgctgcagcaggcctacctcatcatgatcagtgcgctcatggccctagtgttcatcaagtacctcccagagtggtccgcgtgggtcatcctgggcgccatctctgtgtatgatctcgtggctgtgctgtgtcccaaagggcctctgagaatgctggtagaaactgcccaggagagaaatgagcccatattccctgccctgatatactcatctgccatggtgtggacggttggcatggcgaagctggacccctcctctcagggtgccctccagctcccctacgacccggagatggaagaagactcctatgacagttttggggagccttcataccccgaagtctttgagcctcccttgactggctacccaggggaggagctggaggaagaggaggaaaggggcgtgaagcttggcctcggggacttcatcttctacagtgtgctggtgggcaaggcggctgccacgggcagcggggactggaataccacgctggcctgcttcgtggccatcctcattggcttgtgtctgaccctcctgctgcttgctgtgttcaagaaggcgctgcccgccctccccatctccatcacgttcgggctcatcttttacttctccacggacaacctggtgcggccgttcatggacaccctggcctcccatcagctctacatctgagggacatggtgtgccacaggctgcaagctgcagggaattttcattggatgcagttgtatagttttacactctagtgccatatatttttaagacttttctttccttaaaaaataaagtacgtgtttacttggtgaggaggaggcagaaccagctctttggtgccagctgtttcatcaccagactttggctcccgctttggggagcgcctcgcttcacggacaggaagcacagcaggtttatccagatgaactgagaaggtcagattagggcggggagaagagcatccggcatgagggctgagatgcgcaaagagtgtgctcgggagtggcccctggcacctgggtgctctggctggagaggaaaagccagttccctacgaggagtgttcccaatgctttgtccatgatgtccttgttattttattgcctttagaaactgagtcctgttcttgttacggcagtcacactgctgggaagtggcttaatagtaatatcaataaatagatgagtcctgttagaaaaa

SEQ ID NO: 420 - DNA, 560 bp, Homo sapiens
atggcgacgaaggccgtgtgcgtgctgaagggcgacggcccagtgcagggcatcatcaatttcgagcagaaggaaagtaatggaccagtgaaggtgtggggaagcattaaaggactgactgaaggcctgcatggattccatgttcatgagtttggagataatacggcaggctgtaccagtgcaggtcctcactttaatcctctatccagaaaacacggtgggccaaaggatgaagagaggcatgttggagacttgggcaatgtgactgctgacaaagatggtgtggccgatgtgtctattgaagattctgtgatctcactctcaggagaccattgcatcattggccgcacactggtggtccatgaaaaagcagatgacttgggcaaaggtggaaatgaagaaagtacaaagacaggaaacgctggaagtcgtttggcttgtggtgtaattgggatcgcccaataaacattcccttggatgtagtctgaggccccttaactcatctgttatcctgctagctgtagaaatgtatcctgataaacattaaacactgtaatctt

SEQ ID NO: 421 - DNA, 2271 bp, Homo sapiens
gcacgcactggccccggcgcccacccgcacccctccccagagagcactgacacggctcccgggacctcggcaggatggaagagaagctgaagaaaaccaagatcatctttgtggtgggtgggcctggctcagggaagggcacccagtgtgagaagatcgtgcagaagtatggctacacccacctctccaccggggacctcctgcggtccgaggtcagctcaggctcggccaggggcaagaagctgtcggaaatcatggagaaggggcagctggttccactggagacagtgttggacatgctccgggatgccatggtggccaaagtcaatacttccaaaggcttcctgattgatggctacccgcgggaggtgcagcaaggagaagagtttgagcgacggattggacagcccacactgctgctgtatgtggacgcaggccctgagaccatgacccagcggctcttgaaacgtggagagaccagcgggcgtgtggacgacaatgaggagaccatcaaaaagcggctggagacctattacaaggccacagaacccgtcatcgccttctatgagaaacgtggcattgtgcgcaaggtcaacgctgagggctccgtggacagtgtcttctcccaggtctgcacccacctggacgccctaaagtagcaacgctggagccgcttccccagctcagagccccgccccaccccgtcctgattagaggtcctcctggcctgagcgcagcgcctccaccctgccctgctgagcacagacggaggaagccgcttatcctgttttcatggacagctgagcactaaaggaatttctaaggacatttggttttactgctttttctctgcttccagttggagttgattcatgtgcttgtgcctacctggccgcaagtccccagcccctcaaccctccgttcctcctcagcctccctttgccagccacccctcctctagctctggtgggaggcccggggcccttcctcgcacagggcatgcctggcctgaggacccggcgctgagtggcggggcccctgctccgaggggctcatgttcaggcagaaccggtcccagcctgggctcctctgcatcttgctctgtgccttggccctgacccccatcgctctgagcatatgttccatgcctgccttgccggggcctggactgcacaggcagcaaggtcatggtctgagtggggcttcctgggcagttggggcggcccacgccagctggcccagtgggtagtgaattggcttccttgacgcgagaggctctgagggtctgaaaagggcatctcaatggcatgggtgggtggggagtcagtcatgtcactgaaattgaatgggggaggcccaatgaggtggctcatgcctgtaatcccagcactttgggaagctgaggcaggaggatcacctgaggtcaggagttcgagagcagcctggccaacatggcaaaaccccttatttactaaaaatacaaaaacttagccgggcatggtggcatgtgcctgtattcccagctactcatgaggctgaggcaggagaatggcgtgaacccgggagtggagcttgcaatgagccaagattgcgccactgcactccagcctgggtgacagagcaagactccgtctcaaaaaaaaaaaaaaaaaaaaagaaattaattgggggagtcatggtcaggggtgagacctgaaggacctccccctgtgtggccctggacacagcccaccctctgtgagccgtttccaattctaaaacagactcaatgtccccctcacccccacctcaaggtcaggatgcgaacacactgagtgaggagtggacgctgtccattgccacggccatgagggctggagaccagaacagcatggcccgaagcgtgcggggccccggatgacttggggacaccccagaatcccctggggagaacccttcctgcgcgctttcattttttgacctcatcactgagaaaggctcaatttggtgctcacgtgtccttaacacctgatctggcccaagctgcgtgccctttaagccaagagagcctcttgtggaccccgcctgcccgaatgaaatccgaacagttggggctgttatggcaagtggggctggtttttcatttccattggttatttaaagtttcctttaaaataaacgattttaagttataaaaggtgaatctattgaaagaagaacatcaaagaaataaacaggagttcagcggagtagcagaagacaaggcatgtagggggagccattctgtcccag

SEQ ID NO: 422 - DNA, 3579 bp, Homo sapiens
agtttcctcggcagcggtaggcgagagcacgcggaggagcgtgcgcgggggccccgggagacggcggcggtggcggcgcgggcagagcaaggacgcggcggatcccactcgcacagcagcgcactcggtgccccgcgcagggtcgcgatgctgcccggtttggcactgctcctgctggccgcctggacggctcgggcgctggaggtacccactgatggtaatgctggcctgctggctgaaccccagattgccatgttctgtggcagactgaacatgcacatgaatgtccagaatgggaagtgggattcagatccatcagggaccaaaacctgcattgataccaaggaaggcatcctgcagtattgccaagaagtctaccctgaactgcagatcaccaatgtggtagaagccaaccaaccagtgaccatccagaactggtgcaagcggggccgcaagcagtgcaagacccatccccactttgtgattccctaccgctgcttagttggtgagtttgtaagtgatgcccttctcgttcctgacaagtgcaaattcttacaccaggagaggatggatgtttgcgaaactcatcttcactggcacaccgtcgccaaagagacatgcagtgagaagagtaccaacttgcatgactacggcatgttgctgccctgcggaattgacaagttccgaggggtagagtttgtgtgttgcccactggctgaagaaagtgacaatgtggattctgctgatgcggaggaggatgactcggatgtctggtggggcggagcagacacagactatgcagatgggagtgaagacaaagtagtagaagtagcagaggaggaagaagtggctgaggtggaagaagaagaagccgatgatgacgaggacgatgaggatggtgatgaggtagaggaagaggctgaggaaccctacgaagaagccacagagagaaccaccagcattgccaccaccaccaccaccaccacagagtctgtggaagaggtggttcgagaggtgtgctctgaacaagccgagacggggccgtgccgagcaatgatctcccgctggtactttgatgtgactgaagggaagtgtgccccattcttttacggcggatgtggcggcaaccggaacaactttgacacagaagagtactgcatggccgtgtgtggcagcgccatgtcccaaagtttactcaagactacccaggaacctcttgcccgagatcctgttaaacttcctacaacagcagccagtacccctgatgccgttgacaagtatctcgagacacctggggatgagaatgaacatgcccatttccagaaagccaaagagaggcttgaggccaagcaccgagagagaatgtcccaggtcatgagagaatgggaagaggcagaacgtcaagcaaagaacttgcctaaagctgataagaaggcagttatccagcatttccaggagaaagtggaatctttggaacaggaagcagccaacgagagacagcagctggtggagacacacatggccagagtggaagccatgctcaatgaccgccgccgcctggccctggagaactacatcaccgctctgcaggctgttcctcctcggcctcgtcacgtgttcaatatgctaaagaagtatgtccgcgcagaacagaaggacagacagcacaccctaaagcatttcgagcatgtgcgcatggtggatcccaagaaagccgctcagatccggtcccaggttatgacacacctccgtgtgatttatgagcgcatgaatcagtctctctccctgctctacaacgtgcctgcagtggccgaggagattcaggatgaagttgatgagctgcttcagaaagagcaaaactattcagatgacgtcttggccaacatgattagtgaaccaaggatcagttacggaaacgatgctctcatgccatctttgaccgaaacgaaaaccaccgtggagctccttcccgtgaatggagagttcagcctggacgatctccagccgtggcattcttttggggctgactctgtgccagccaacacagaaaacgaagttgagcctgttgatgcccgccctgctgccgaccgaggactgaccactcgaccaggttctgggttgacaaatatcaagacggaggagatctctgaagtgaagatggatgcagaattccgacatgactcaggatatgaagttcatcatcaaaaattggtgttctttgcagaagatgtgggttcaaacaaaggtgcaatcattggactcatggtgggcggtgttgtcatagcgacagtgatcgtcatcaccttggtgatgctgaagaagaaacagtacacatccattcatcatggtgtggtggaggttgacgccgctgtcaccccagaggagcgccacctgtccaagatgcagcagaacggctacgaaaatccaacctacaagttctttgagcagatgcagaactagacccccgccacagcagcctctgaagttggacagcaaaaccattgcttcactacccatcggtgtccatttatagaataatgtgggaagaaacaaacccgttttatgatttactcattatcgccttttgacagctgtgctgtaacacaagtagatgcctgaacttgaattaatccacacatcagtaatgtattctatctctctttacattttggtctctatactacattattaatgggttttgtgtactgtaaagaatttagctgtatcaaactagtgcatgaatagattctctcctgattatttatcacatagccccttagccagttgtatattattcttgtggtttgtgacccaattaagtcctactttacatatgctttaagaatcgatgggggatgcttcatgtgaacgtgggagttcagctgcttctcttgcctaagtattcctttcctgatcactatgcattttaaagttaaacatttttaagtatttcagatgctttagagagattttttttccatgactgcattttactgtacagattgctgcttctgctatatttgtgatataggaattaagaggatacacacgtttgtttcttcgtgcctgttttatgtgcacacattaggcattgagacttcaagcttttctttttttgtccacgtatctttgggtctttgataaagaaaagaatccctgttcattgtaagcacttttacggggcgggtggggaggggtgctctgctggtcttcaattaccaagaattctccaaaacaattttctgcaggatgattgtacagaatcattgcttatgacatgatcgctttctacactgtattacataaataaattaaataaaataaccccgggcaagacttttctttgaaggatgactacagacattaaataatcgaagtaattttgggtggggagaagaggcagattcaattttctttaaccagtctgaagtttcatttatgatacaaaagaagatgaaaatggaagtggcaatataaggggatgaggaaggcatgcctggacaaacccttcttttaagatgtgtcttcaatttgtataaaatggtgttttcatgtaaataaatacattcttggaggagc

SEQ ID NO: 423 - DNA, 3579 bp, Homo sapiens; identical to SEQ ID NO: 422

SEQ ID NO: 424 - DNA, 841 bp, Homo sapiens
acccctcgtggcggtcccgcccgtccccgcgcaggcgcgctcgggctgccgctggctcttcgcacgcggccatggccgactccgagctgcagctggttgagcagcggatccgcagcttccccgacttccccaccccaggcgtggtattcagggacatctcgcccgtcctgaaggaccccgcctccttccgcgccgccatcggcctcctggcgcgacacctgaaggcgacccacgggggccgcatcgactacatcgcaggcctagactcccgaggcttcctctttggcccctccctggcccaggagcttggactgggctgcgtgctcatccgaaagcgggggaagctgccaggccccactctgtgggcctcctattccctggagtacgggaaggctgagctggagattcagaaagacgccctggagccaggacagagggtggtcgtcgtggatgatctgctggccactggtggaaccatgaacgctgcctgtgagctgctgggccgcctgcaggctgaggtcctggagtgcgtgagcctggtggagctgacctcgcttaagggcagggagaagctggcacctgtacccttcttctctctcctgcagtatgagtgaccacagggcctcccagcccaacatctccagctggatcccagggaaatatcagccttgggcaactgcagtgaccaggggcaccggctgcccacagggaacacattcctttgctggggttcagcgcctctcctggggctggaagtgccaaagcctggggcaaagctgtgtttcagccacactgaacccaattacacacagcgggagaacgcagtaaacagctttcccac

SEQ ID NO: 425 - DNA, 1395 bp, Homo sapiens
atgtattccaatgtgataggaactgtaacctctggaaaaaggaaggtttatcttttgtccttgctgctcattggcttctgggactgcgtgacctgtcacgggagccctgtggacatctgcacagccaagccgcgggacattcccatgaatcccatgtgcatttaccgctccccggagaagaaggcaactgaggatgagggctcagaacagaagatcccggaggccaccaaccggcgtgtctgggaactgtccaaggccaattcccgctttgctaccactttctatcagcacctggcagattccaagaatgacaatgataacattttcctgtcacccctgagtatctccacggcttttgctatgaccaagctgggtgcctgtaatgacaccctccagcaactgatggaggtatttaagtttgacaccatatctgagaaaacatctgatcagatccacttcttctttgccaaactgaactgccgactctatcgaaaagccaacaaatcctccaagttagtatcagccaatcgcctttttggagacaaatcccttaccttcaatgagacctaccaggacatcagtgagttggtatatggagccaagctccagcccctggacttcaaggaaaatgcagagcaatccagagcggccatcaacaaatgggtgtccaataagaccgaaggccgaatcaccgatgtcattccctcggaagccatcaatgagctcactgttctggtgctggttaacaccatttacttcaagggcctgtggaagtcaaagttcagccctgagaacacaaggaaggaactgttctacaaggctgatggagagtcgtgttcagcatctatgatgtaccaggaaggcaagttccgttatcggcgcgtggctgaaggcacccaggtgcttgagttgcccttcaaaggtgatgacatcaccatggtcctcatcttgcccaagcctgagaagagcctggccaaggtggagaaggaactcaccccagaggtgctgcaggagtggctggatgaattggaggagatgatgctggtggtccacatgccccgcttccgcattgaggacggcttcagtttgaaggagcagctgcaagacatgggccttgtcgatctgttcagccctgaaaagtccaaactcccaggtattgttgcagaaggccgagatgacctctatgtctcagatgcattccataaggcatttcttgaggtaaatgaagaaggcagtgaagcagctgcaagtaccgctgttgtgattgctggccgttcgctaaaccccaacagggtgactttcaaggccaacaggcctttcctggtttttataagagaagttcctctgaacactattatcttcatgggcagagtagccaacccttgtgttaagtaa

SEQ ID NO: 426 - DNA, 10330 bp, Homo sapiens
ctcggcccaacaaaatggcggcggcagcggtgtcgctttgtttccgcggctcctgcggcggtggcagtggtagcggcctttgagctgtggggaggttccagcagcagctacagtgacgactaagactccagtgcatttctatcgtaaccgggcgcgggggagcgcagatcggcgcccagcaatcacagaagccgacaaggcgttcaagcgaaaacatgaccgctgagcccatgagtgaaagcaagttgaatacattggtgcagaagcttcatgacttccttgcacactcatcagaagaatctgaagaaacaagttctcctccacgacttgcaatgaatcaaaacacagataaaatcagtggttctggaagtaactctgatatgatggaaaacagcaaggaagagggaactagctcttcagaaaaatccaagtcttcaggatcgtcacgatcaaagaggaaaccttcaattgtaacaaagtatgtagaatcagatgatgaaaaacctttggatgatgaaactgtaaatgaagatgcgtctaatgaaaattcagaaaatgatattactatgcagagcttgccaaaaggtacagtgattgtacagccagagccagtgctgaatgaagacaaagatgattttaaagggcctgaatttagaagcagaagtaaaatgaaaactgaaaatctcaaaaaacgcggagaagatgggcttcatgggattgtgagctgcactgcttgtggacaacaggtcaatcattttcaaaaagattccatttatagacacccttcattgcaagttcttatttgtaagaattgctttaagtattacatgagtgatgatattagccgtgactcagatggaatggatgaacaatgtaggtggtgtgcggaaggtggaaacttgatttgttgtgacttttgccataatgctttctgcaagaaatgcattctacgcaaccttggtcgaaaggagttgtccacaataatggatgaaaacaaccaatggtattgctacatttgtcacccagagcctttgttggacttggtcactgcatgtaacagcgtatttgagaatttagaacagttgttgcagcaaaataagaagaagataaaagttgacagtgaaaagagtaataaagtatatgaacatacatccagattttctccaaagaagactagttcaaattgtaatggagaagaaaagaaattagatgattcctgttctggctctgtaacctactcttattccgcactaattgtgcccaaagagatgattaagaaggcaaaaaaactgattgagaccacagccaacatgaactccagttatgttaaatttttaaagcaggcaacagataattcagaaatcagttctgctacaaaattacgtcagcttaaggcttttaagtctgtgttggctgatattaagaaggctcatcttgcattggaagaagacttaaattccgagtttcgagcgatggatgctgtaaacaaagagaaaaataccaaagagcataaagtcatagatgctaagtttgaaacaaaagcacgaaaaggagaaaaaccttgtgctttggaaaagaaggatatttcaaagtcagaagctaaactttcaagaaaacaggtagatagtgagcacatgcatcagaatgttccaacagaggaacaaagaacaaataaaagtaccggtggtgaacataagaaatctgatagaaaagaagaacctcaatatgaacctgccaacacttctgaagatttagacatggatattgtgtctgttccttcctcagttccagaagacatttttgagaatcttgagactgctatggaagttcagagttcagttgatcatcaaggggatggcagcagtggaactgaacaagaagtggagagttcatctgtaaaattaaatatttcttcaaaagacaacagaggaggtattaaatcaaaaactacagctaaagtaacaaaagaattatatgttaaactcactcctgtttccctttctaattccccaattaaaggtgctgattgtcaggaagttccacaagataaagatggctataaaagttgtggtctgaaccccaagttagagaaatgtggacttggacaggaaaacagtgataatgagcatttggttgaaaatgaagtttcattacttttagaggaatctgatcttcgaagatccccacgtgtaaagactacacccttgaggcgaccgacagaaactaaccctgtaacatctaattcagatgaagaatgtaatgaaacagttaaggagaaacaaaaactatcagttccagtgagaaaaaaggataagcgtaattcttctgacagtgctatagataatcctaagcctaataaattgccaaaatctaagcaatcagagactgtggatcaaaattcagattctgatgaaatgctagcaatcctcaaagaggtgagcaggatgagtcacagttcttcttcagatactgatattaatgaaattcatacaaaccataagactttgtatgatttaaagactcaggcggggaaagatgataaaggaaaaaggaaacgaaaaagttctacatctggctcagattttgatactaaaaagggcaaatcagctaagagctctataatttctaaaaagaaacgacaaacccagtctgagtcttctaattatgactcagaattagaaaaagagataaagagcatgagtaaaattggtgctgccagaaccaccaaaaaaagaattccaaatacaaaagattttgactcttctgaagatgagaaacacagcaaaaaaggaatggataatcaagggcacaaaaatttgaagacctcacaagaaggatcatctgatgatgctgaaagaaaacaagagagagagactttctcttcagcagaaggcacagttgataaagacacgaccatcatggaattaagagatcgacttcctaagaagcagcaagcaagtgcttccactgatggtgtcgataagctttctgggaaagagcagagttttacttctttggaagttagaaaagttgctgaaactaaagaaaagagcaagcatctcaaaaccaaaacatgtaaaaaagtacaggatggcttatctgatattgcagagaaattcctaaagaaagaccagagcgatgaaacttctgaagatgataaaaagcagagcaaaaagggaactgaagaaaaaaagaaaccttcagactttaagaaaaaagtaattaaaatggaacaacagtatgaatcttcatctgatggcactgaaaagttacctgagcgagaagaaatttgtcattttcctaagggcataaaacaaattaagaatggaacaactgatggagaaaagaaaagtaaaaaaataagagataaaacttctaaaaagaaggatgaattatctgattatgctgagaagtcaacagggaaaggagatagttgtgactcttcagaggataaaaagagtaagaatggagcatatggtagagagaagaaaaggtgcaagttgcttggaaagagttcaaggaagagacaagattgttcatcatctgatactgagaaatattccatgaaagaagatggttgtaactcttctgataagagactgaaaagaatagaattgagggaaagaagaaatttaagttcaaagagaaatactaaggaaatacaaagtggctcatcatcatctgatgctgaggaaagttctgaagataataaaaagaagaagcaaagaacttcatctaaaaagaaggcagtcattgtcaaggagaaaaagagaaactccctaagaacaagcactaaaaggaagcaagctgacattacatcctcatcttcttctgatatagaagatgatgatcagaattctataggtgagggaagcagcgatgaacagaaaattaagcctgtgactgaaaatttagtgctgtcttcacatactggattttgccaatcttcaggagatgaagccttatctaaatcagtgcctgtcacagtggatgatgatgatgacgacaatgatcctgagaatagaattgccaagaagatgcttttagaagaaattaaagccaatctttcctctgatgaggatggatcttcagatgatgagccagaagaagggaaaaaaagaactggaaaacaaaatgaagaaaacccaggagatgaggaagcaaaaaatcaagtcaattctgaatcagattcagattctgaagaatctaagaagccaagatacagacataggcttttgcggcacaaattgactgtgagtgacggagaatctggagaagaaaaaaagacaaagcctaaagagcataaagaagtcaaaggcagaaacagaagaaaggtgagcagtgaagattcagaagattctgattttcaggaatcaggagttagtgaagaagttagtgaatccgaagatgaacagcggcccagaacaaggtctgcaaagaaagcagagttggaagaaaatcagcggagctataaacagaaaaagaaaaggcgacgtattaaggttcaagaagattcatccagtgaaaacaagagtaattctgaggaagaagaggaggaaaaagaagaggaggaggaagaggaggaggaggaggaagaggaggaggaagatgaaaatgatgattccaagtctcctggaaaaggcagaaagaaaattcggaagattcttaaagatgataaactgagaacagaaacacaaaatgctcttaaggaagaggaagagagacgaaaacgtattgctgagagggagcgtgagcgagaaaaattgagagaggtgatagaaattgaagatgcttcacccaccaagtgtccaataacaaccaagttggttttagatgaagatgaagaaaccaaagaacctttagtgcaggttcatagaaatatggttatcaaattgaaaccccatcaagtagatggtgttcagtttatgtgggattgctgctgtgagtctgtgaaaaaaacaaagaaatctccaggttcaggatgcattcttgcccactgtatgggccttggtaagactttacaggtggtaagttttcttcatacagttcttttgtgtgacaaactggatttcagcacggcgttagtggtttgtcctcttaatactgctttgaattggatgaatgaatttgagaagtggcaagagggattaaaagatgatgagaagcttgaggtttctgaattagcaactgtgaaacgtcctcaggagagaagctacatgctgcagaggtggcaagaagatggtggtgttatgatcataggctatgagatgtatagaaatcttgctcaaggaaggaatgtgaagagtcggaaacttaaagaaatatttaacaaagctttggttgatccaggccctgattttgttgtttgtgatgaaggccatattctaaaaaatgaagcatctgctgtttctaaagctatgaattctatacgatcaaggaggaggattattttaacaggaacaccacttcaaaataacctaattgagtatcattgtatggttaattttatcaaggaaaatttacttggatccattaaggagttcaggaatagatttataaatccaattcaaaatggtcagtgtgcagattctaccatggtagatgtcagagtgatgaaaaaacgtgctcacattctctatgagatgttagctggatgtgttcagaggaaagattatacagcattaacaaaattcttgcctccaaaacacgaatatgtgttagctgtgagaatgacttctattcagtgcaagctctatcagtactacttagatcacttaacaggtgtgggcaataatagtgaaggtggaagaggaaaggcaggtgcaaagcttttccaagattttcagatgttaagtagaatatggactcatccttggtgtttgcagctagactacattagcaaagaaaataagggttattttgatgaagacagtatggatgaatttatagcctcagattctgatgaaacctccatgagtttaagctccgatgattatacaaaaaagaagaaaaaagggaaaaaggggaaaaaagatagtagctcaagtggaagtggcagtgacaatgatgttgaagtgattaaggtctggaattcaagatctcggggaggtggtgaaggaaatgtggatgaaacaggaaacaatccttctgtttctttaaaactggaagaaagtaaagctacttcttcttctaatccaagcagcccagctccagactggtacaaagattttgttacagatgctgatgctgaggttttagagcattctgggaaaatggtacttctctttgaaattcttcgaatggcagaggaaattggggataaagtccttgttttcagccagtccctcatatctctggacttgattgaagattttcttgaattagctagtagggagaagacagaagataaagataaaccccttatttataaaggtgaggggaagtggcttcgaaacattgactattaccgtttagatggttccactactgcacagtcaaggaagaagtgggctgaagaatttaatgatgaaactaatgtgagaggacgattatttatcatttctactaaagcaggatctctaggaattaatctggtagctgctaatcgagtaattatattcgacgcttcttggaatccatcttatgacatccagagtatattcagagtttatcgctttggacaaactaagcctgtttatgtatataggttcttagctcagggaaccatggaagataagatttatgatcggcaagtaactaagcagtcactgtcttttcgagttgttgatcagcagcaggtggagcgtcattttactatgaatgagcttactgaactttatacttttgagccagacttattagatgaccctaattcagaaaagaagaagaagagggatactcccatgctgccaaaggataccatacttgcagagctccttcagatacataaagaacacattgtaggataccatgaacatgattctcttttggaccacaaagaagaagaagagttgactgaagaagaaagaaaagcagcttgggctgagtatgaagcagagaagaagggactgaccatgcgtttcaacataccaactgggaccaatttaccccctgtcagtttcaactctcaaactccttatattcctttcaatttgggagccctgtcagcaatgagtaatcaacagctggaggacctcattaatcaaggaagagaaaaagttgtagaagcaacaaacagtgtgacagcagtgaggattcaacctcttgaggatataatttcagctgtatggaaggagaacatgaatctctcagaggcccaagtacaggcgttagcattaagtagacaagccagccaggagcttgatgttaaacgaagagaagcaatctacaatgatgtattgacaaaacaacagatgttaatcagctgtgttcagcgaatacttatgaacagaaggctccagcagcagtacaatcagcagcaacagcaacaaatgacttatcaacaagcaacactgggtcacctcatgatgccaaagcccccaaatttgatcatgaatccttctaactaccagcagattgatatgagaggaatgtatcagccagtggctggtggtatgcagccaccaccattacagcgtgcaccacccccaatgagaagcaaaaatccaggaccttcccaagggaaatcaatgtgattttgcactaaaagcttaatggattgttaaaatcatagaaagatcttttatttctttaggaatcaatgacttaacagaactcaactgtataaatagtttggtccccttaaatgccaatcttccatattagttttacttttttttttttttaaatagggcataccatttcttcctgacatttgtcagtgatgttgcctagaatcttcttacacacgctgagtacagaagatatttcaaattgttttcagtgaaaacaagtccttccataatagtaacaactccacagatttcctctctaaatttttatgcctgcttttagcaaccataaaattgtcataaaattaataaatttaggaaagaataaagatttatatattcattctttacatataaaaacacacagctgagttcttagagttgattcctcaagttatgaaatacttttgtacttaatccatttcttgattaaagtgattgaaatggttttaatgttcttttgactgaagtctgaaactgggctcctgctttattgtctctgtgactgaaagttagaaactgagggttatctttgacacagaattgtgtgcaatattcttaaatactactgctctaaaagttggagaagtcttgcagttatcttagcattgtataaacagccttaagtatagcctaagaagagaattcctttttcttctttagtccttctgccattttttattttcagttatatgtgctgaaataattactggtaaaatttcagggttgtggattatcttccacacatgaattttctctctcctggcacgaatataaagcacatctcttaactgcatggtgccagtgctaatgcttcatcctgttgctggcagtgggatgtggacttagaaaatcaagttctagcattttagtaggttaacactgaagttgtggttgttaggttcacaccctgttttataaacaacatcaaaatggcagaaccattgctgactttaggttcacatgaggaatgtacttttaacaattcccagtactatcagtattgtgaaataattcctctgaaagataagaatcactggcttctatgcgcttcttttctctcatcatcatgttcttttaccccagtttccttacatttttttaaattgtttcagagtttgttttttttttagtttagattgtgaggcaattattaaatcaaaattaattcatccaatacccctttactagaagttttactagaaaatgtattacattttattttttcttaatccagttctgcaaaaatgacctataaatttattcatgtacaattttggttacttgaattgttaaagaaaacattgtttttgactatgggagtcaactcaacatggcagaaccatttttgagatgatgatacaacaggtagtgaaacagcttaagaattccaaaaaaaaaaaaaaaaaaaaaaaaaaagaaaactgggtttgggctttgctttaggtatcactggattagaatgagtttaacattagctaaaactgctttgagttgtttggatgattaagagattgccatttttatcttggaagaactagtggtaaaacatccaagagcactaggattgtgatacagaatttgtgaggtttggtggatccacgcccctctcccccactttcccatgatgaaatatcactaataaatcctgtatatttagatattatgctagccatgtaatcagatttatttaattgggtggggcaggtgtgtatttactttagaaaaaatgaaaaagacaagatttatgagaaatatttgaaggcagtacactctggccaactgttaccagttggtatttctacaagttcagaatattttaaacctgatttactagacctgggaattttcaacatggtctaattatttactcaaagacatagatgtgaaatttaggcaaccttctaaatcttttcaccatggatgaaactataacttaaagataatacttagaagggttaattggaaatcagagtttgaaataaaacttggaccactttgtatacactcttctcacttgacattttagctatataatatgtactttgagtataacatcaagctttaacaaatatttaaagacaaaaaaatcacgtcagtaaaatactaaaaggctcatttttatatttgttttagatgttttaaatagttgcaatggattaaaaatgatgatttaaaatgttgcttgtaatacagttttgcctgctaaattctccacattttgtaacctgttttatttctttgggtgtaaagcgtttttgcttagtattgtgatattgtatatgttttgtcccagttgtatagtaatgtttcagtccatcatccagctttggctgctgaaatcatacagctgtgaagacttgcctttgtttctgttagactgcttttcagttctgtattgagtatcttaagtactgtagaaaagatgtcacttcttcctttaaggctgttttgtaatatatataaggactggaattgtgtttttaaagaaaagcattcaagtatgacaatatactatctgtgttttcaccattcaaagtgctgtttagtagttgaaacttaaactatttaatgtcatttaataaagtgaccaaaatgtg

SEQ ID NO: 427 - DNA, 2112 bp, Homo sapiens
tgggagggtacctgaaggtggggtcaagggaggccccaaaacagtctacacagcaggagggatggctggggctcttgagctataagtggcacctcagggccctgacgggcgtctcgccatgctgctcctgggcctgctgctgctgctgcccctgctggctggcgcccgcctgctgtggaactggtggaagctccggagcctccacctcccgcctcttgccccgggcttcttgcacttgctgcagcccgacctcccaatctatctgcttggcctgactcagaaattcgggcccatctacaggctccaccttgggctgcaagatgtggtggtgctgaactccaagaggaccattgaggaagccatggtcaaaaagtgggcagactttgctggcagacctgagccacttacctacaagctggtgtctaggaactacccggacctgtccttgggagactactccctgctctggaaagcccacaagaagctcacccgctcagccctgctgctgggcatccgtgactccatggagccagtggtggagcagctgacccaggagttctgtgagcgcatgagagcccagcccggcacccctgtggccattgaggaggaattctctctcctcacctgcagcatcatctgttacctcaccttcggagacaagatcaaggacgacaacttaatgcctgcctattacaaatgtatccaggaggtgttaaaaacctggagccactggtccatccaaattgtggacgtgattccctttctcaggttcttccccaatccaggtctccggaggctgaagcaggccatagagaagagggatcacatcgtggagatgcagctgaggcagcacaaggagagcctcgtggcaggccagtggagggacatgatggactacatgctccaaggggtggcgcagccgagcatggaagagggctctggacagctcctggaagggcacgtgcacatggctgcagtggacctcctgatcggtggcactgagaccacagcaaacaccctctcctgggccgtggtttttttgcttcaccaccctgagattcagcagcgactgcaggaggagctagaccacgaactgggccctggtgcctccagctcccgggtcccctacaaggaccgtgcacggctgcccttgctcaatgccaccatcgccgaggtgctgcgcctgcggcccgttgtgcccttagccttgccccaccgcaccacacggcccagcagcatctccggctacgacatccctgagggcacagtcatcattccgaacctccaaggcgcccacctggatgagacggtctgggagaggccacatgagttctggcctgatcgcttcctggagccaggcaagaactccagagctctggccttcggctgcggtgcccgcgtgtgcctgggcgagccgctggcgcgcctggagctcttcgtggtgctgacccgactgctgcaggccttcacgctgctgccctccggggacgccctgccctccctgcagcccctgccccactgcagtgtcatcctcaagatgcagcctttccaagtgcggctgcagccccgggggatgggggcccacagcccgggccagagccagtgatggggcaggaccgatgccagccgggtacctcagtttctcctttattgctcctgtacgaacccctcccctcccccctgtaaacacagtgctgcgagatcgctggcagagaaggcttcctccagcggctgggtggtgaaggaccctggctcttctctcggggcgacccctcagtgctcggcagtcatactggggtgcgagagaggtgggcagcagctcagcctccccccgctggggagcgaaagtttcttggtctcagcttcatttccgtgaagggcaccgagaactcgaagcccttccagtggtaccagctcactccctgggaaaggggttgtcaagagagagtcaaagccggatgtcccatctgctcctcccattccccttaaggaggtagctcccagcactcaaccaacctccccgcagagctcccttcctgaccctccgctgcagaggattgaggcttaattctgagctggccctttccagccaataaatcaactccagctccc

SEQ ID NO: 428 - DNA, 1502 bp, Homo sapiens
cagggacacagtactcggccacaccatggggcgcccactgcacctcgtcctgctcagtgcctccctggctggcctcctgctgctcggggaaagtctgttcatccgcagggagcaggccaacaacatcctggcgagggtcacgagggccaattcctttcttgaagagatgaagaaaggacacctcgaaagagagtgcatggaagagacctgctcatacgaagaggcccgcgaggtctttgaggacagcgacaagacgaatgaattctggaataaatacaaagatggcgaccagtgtgagaccagtccttgccagaaccagggcaaatgtaaagacggcctcggggaatacacctgcacctgtttagaaggattcgaaggcaaaaactgtgaattattcacacggaagctctgcagcctggacaacggggactgtgaccagttctgccacgaggaacagaactctgtggtgtgctcctgcgcccgcgggtacaccctggctgacaacggcaaggcctgcattcccacagggccctacccctgtgggaaacagaccctggaacgcaggaagaggtcagtggcccaggccaccagcagcagcggggaggcccctgacagcatcacatggaagccatatgatgcagccgacctggaccccaccgagaaccccttcgacctgcttgacttcaaccagacgcagcctgagaggggcgacaacaacctcaccaggatcgtgggaggccaggaatgcaaggacggggagtgtccctggcaggccctgctcatcaatgaggaaaacgagggtttctgtggtggaaccattctgagcgagttctacatcctaacggcagcccactgtctctaccaagccaagagattcaaggtgagggtaggggaccggaacacggagcaggaggagggcggtgaggcggtgcacgaggtggaggtggtcatcaagcacaaccggttcacaaaggagacctatgacttcgacatcgccgtgctccggctcaagacccccatcaccttccgcatgaacgtggcgcctgcctgcctccccgagcgtgactgggccgagtccacgctgatgacgcagaagacggggattgtgagcggcttcgggcgcacccacgagaagggccggcagtccaccaggctcaagatgctggaggtgccctacgtggaccgcaacagctgcaagctgtccagcagcttcatcatcacccagaacatgttctgtgccggctacgacaccaagcaggaggatgcctgccagggggacagcgggggcccgcacgtcacccgcttcaaggacacctacttcgtgacaggcatcgtcagctggggagagggctgtgcccgtaaggggaagtacgggatctacaccaaggtcaccgccttcctcaagtggatcgacaggtccatgaaaaccaggggcttgcccaaggccaagagccatgccccggaggtcataacgtcctctccattaaagtgagatcccactc

SEQ ID NO: 429 - DNA, 2048 bp, Homo sapiens
ctattgatctggactcctggataggcagctggaccaacggacggacgccatgagggctctgctgctcctggggttcctgctggtgagcttggagtcaacactttcgattccaccttgggaagcccccaaggagcataagtacaaagctgaagagcacacagtcgttctcactgtcaccggggagccctgccacttccccttccagtaccaccggcagctgtaccacaaatgtacccacaagggccggccaggccctcagccctggtgtgctaccacccccaactttgatcaggaccagcgatggggatactgtttggagcccaagaaagtgaaagaccactgcagcaaacacagcccctgccagaaaggagggacctgtgtgaacatgccaagcggcccccactgtctctgtccacaacacctcactggaaaccactgccagaaagagaagtgctttgagcctcagcttctccggtttttccacaagaatgagatatggtatagaactgagcaagcagctgtggccagatgccagtgcaagggtcctgatgcccactgccagcggctggccagccaggcctgccgcaccaacccgtgcctccatgggggtcgctgcctagaggtggagggccaccgcctgtgccactgcccggtgggctacaccggacccttctgcgacgtggacaccaaggcaagctgctatgatggccgcgggctcagctaccgcggcctggccaggaccacgctctcgggtgcgccctgtcagccgtgggcctcggaggccacctaccggaacgtgactgccgagcaagcgcggaactggggactgggcggccacgccttctgccggaacccggacaacgacatccgcccgtggtgcttcgtgctgaaccgcgaccggctgagctgggagtactgcgacctggcacagtgccagaccccaacccaggcggcgcctccgaccccggtgtcccctaggcttcatgtcccactcatgcccgcgcagccggcaccgccgaagcctcagcccacgacccggaccccgcctcagtcccagaccccgggagccttgccggcgaagcgggagcagccgccttccctgaccaggaacggcccactgagctgcgggcagcggctccgcaagagtctgtcttcgatgacccgcgtcgttggcgggctggtggcgctacgcggggcgcacccctacatcgccgcgctgtactggggccacagtttctgcgccggcagcctcatcgccccctgctgggtgctgacggccgctcactgcctgcaggaccggcccgcacccgaggatctgacggtggtgctcggccaggaacgccgtaaccacagctgtgagccgtgccagacgttggccgtgcgctcctaccgcttgcacgaggccttctcgcccgtcagctaccagcacgacctggctctgttgcgccttcaggaggatgcggacggcagctgcgcgctcctgtcgccttacgttcagccggtgtgcctgccaagcggcgccgcgcgaccctccgagaccacgctctgccaggtggccggctggggccaccagttcgagggggcggaggaatatgccagcttcctgcaggaggcgcaggtaccgttcctctccctggagcgctgctcagccccggacgtgcacggatcctccatcctccccggcatgctctgcgcagggttcctcgagggcggcaccgatgcgtgccagggtgattccggaggcccgctggtgtgtgaggaccaagctgcagagcgccggctcaccctgcaaggcatcatcagctggggatcgggctgtggtgaccgcaacaagccaggcgtctacaccgatgtggcctactacctggcctggatccgggagcacaccgtttcctgattgctcagggactcatctttccctccttggtgattccgcagtgagagagtggctggggcatggaaggcaagattgtgtcccattcccccagtgcggccagctccgcgccaggatggcgaggaactcaataaagtgctttgaaaatgctgag

SEQ ID NO: 430 - DNA, 1997 bp, Homo sapiens
aattcctcagtgacccaggagctgacacactatggcgcacgtccgaggcttgcagctgcctggctgcctggccctggctgccctgtgtagccttgtgcacagccagcatgtgttcctggctcctcagcaagcacggtcgctgctccagcgggtccggcgagccaacaccttcttggaggaggtgcgcaagggcaacctagagcgagagtgcgtggaggagacgtgcagctacgaggaggccttcgaggctctggagtcctccacggctacggatgtgttctgggccaagtacacagcttgtgagacagcgaggacgcctcgagataagcttgctgcatgtctggaaggtaactgtgctgagggtctgggtacgaactaccgagggcatgtgaacatcacccggtcaggcattgagtgccagctatggaggagtcgctacccacataagcctgaaatcaactccactacccatcctggggccgacctacaggagaatttctgccgcaaccccgacagcagcaccacgggaccctggtgctacactacagaccccaccgtgaggaggcaggaatgcagcatccctgtctgtggccaggatcaagtcactgtagcgatgactccacgctccgaaggctccagtgtgaatctgtcacctccattggagcagtgtgtccctgatcgggggcagcagtaccaggggcgcctggcggtgaccacacatgggctcccctgcctggcctgggccagcgcacaggccaaggccctgagcaagcaccaggacttcaactcagctgtgcagctggtggagaacttctgccgcaacccagacggggatgaggagggcgtgtggtgctatgtggccgggaagcctggcgactttgggtactgcgacctcaactattgtgaggaggccgtggaggaggagacaggagatgggctggatgaggactcagacagggccatcgaagggcgtaccgccaccagtgagtaccagactttcttcaatccgaggacctttggctcgggagaggcagactgtgggctgcgacctctgttcgagaagaagtcgctggaggacaaaaccgaaagagagctcctggaatcctacatcgacgggcgcattgtggagggctcggatgcagagatcggcatgtcaccttggcaggtgatgcttttccggaagagtccccaggagctgctgtgtggggccagcctcatcagtgaccgctgggtcctcaccgccgcccactgcctcctgtacccgccctgggacaagaacttcaccgagaatgaccttctggtgcgcattggcaagcactcccgcacaaggtacgagcgaaacattgaaaagatatccatgttggaaaagatctacatccaccccaggtacaactggcgggagaacctggaccgggacattgccctgatgaagctgaagaagcctgttgccttcagtgactacattcaccctgtgtgtctgcccgacagggagacggcagccagcttgctccaggctggatacaaggggcgggtgacaggctggggcaacctgaaggagacgtggacagccaacgttggtaaggggcagcccagtgtcctgcaggtggtgaacctgcccattgtggagcggccggtctgcaaggactccacccggatccgcatcactgacaacatgttctgtgctggttacaagcctgatgaagggaaacgaggggatgcctgtgaaggtgacagtgggggaccctttgtcatgaagagcccctttaacaaccgctggtatcaaatgggcatcgtctcatggggtgaaggctgtgaccgggatgggaaatatggcttctacacacatgtgttccgcctgaagaagtggatacagaaggtcattgatcagtttggagagtaggggccactcatattctgggctcctggaaccaatcccgtgaaagaattatttttgtgtttctaaaactatggttcccaataaaagtgactctcagcgg

SEQ ID NO: 431 - DNA, 1593 bp, Homo sapiens
ccgccgccgccgcagcccggccgcgccccgccgccgccgccgccgccatgggctgcctcgggaacagtaagaccgaggaccagcgcaacgaggagaaggcgcagcgtgaggccaacaaaaagatcgagaagcagctgcagaaggacaagcaggtctaccgggccacgcaccgcctgctgctgctgggtgctggagaatctggtaaaagcaccattgtgaagcagatgaggatcctgcatgttaatgggtttaatggagagggcggcgaagaggacccgcaggctgcaaggagcaacagcgatggtgagaaggcaaccaaagtgcaggacatcaaaaacaacctgaaagaggcgattgaaaccattgtggccgccatgagcaacctggtgccccccgtggagctggccaaccccgagaaccagttcagagtggactacatcctgagtgtgatgaacgtgcctgactttgacttccctcccgaattctatgagcatgccaaggctctgtgggaggatgaaggagtgcgtgcctgctacgaacgctccaacgagtaccagctgattgactgtgcccagtacttcctggacaagatcgacgtgatcaagcaggctgactatgtgccgagcgatcaggacctgcttcgctgccgtgtcctgacttctggaatctttgagaccaagttccaggtggacaaagtcaacttccacatgtttgacgtgggtggccagcgcgatgaacgccgcaagtggatccagtgcttcaacgatgtgactgccatcatcttcgtggtggccagcagcagctacaacatggtcatccgggaggacaaccagaccaaccgcctgcaggaggctctgaacctcttcaagagcatctggaacaacagatggctgcgcaccatctctgtgatcctgttcctcaacaagcaagatctgctcgctgagaaagtccttgctgggaaatcgaagattgaggactactttccagaatttgctcgctacactactcctgaggatgctactcccgagcccggagaggacccacgcgtgacccgggccaagtacttcattcgagatgagtttctgaggatcagcactgccagtggagatgggcgtcactactgctaccctcatttcacctgcgctgtggacactgagaacatccgccgtgtgttcaacgactgccgtgacatcattcagcgcatgcaccttcgtcagtacgagctgctctaagaagggaacccccaaatttaattaaagccttaagcacaattaattaaaagtgaaacgtaattgtacaagcagttaatcacccaccatagggcatgattaacaaagcaacctttcccttcccccgagtgattttgcgaaacccccttttcccttcagcttgcttagatgttccaaatttagaaagcttaaggcggcctacagaaaaaggaaaaaaggccacaaaagttccctctcactttcagtaaaaataaataaaacagcagcagcaaacaaataaaatgaaataaaagaaacaaatgaaataaatattgtgttgtgcagcattaaaaaaaatcaaaataaaaattaaatgtgagcaaag

SEQ ID NO: 432 - DNA, 626 bp, Homo sapiens
acatttgcttctgacacaactgtgttcactagcaacctcaaacagacaccatggtgcacctgactcctgaggagaagtctgccgttactgccctgtggggcaaggtgaacgtggatgaagttggtggtgaggccctgggcaggctgctggtggtctacccttggacccagaggttctttgagtcctttggggatctgtccactcctgatgctgttatgggcaaccctaaggtgaaggctcatggcaagaaagtgctcggtgcctttagtgatggcctggctcacctggacaacctcaagggcacctttgccacactgagtgagctgcactgtgacaagctgcacgtggatcctgagaacttcaggctcctgggcaacgtgctggtctgtgtgctggcccatcactttggcaaagaattcaccccaccagtgcaggctgcctatcagaaagtggtggctggtgtggctaatgccctggcccacaagtatcactaagctcgctttcttgctgtccaatttctattaaaggttcctttgttccctaagtccaactactaaactgggggatattatgaagggccttgagcatctggattctgcctaataaaaaacatttattttcattgc

SEQ ID NO: 433 - DNA, 5175 bp, Homo sapiens
gccccgagtgcaatcgcgggaagccagggtttccagctaggacacagcaggtcgtgatccgggtcgggacactgcctggcagaggctgcgagcatggggccctggggctggaaattgcgctggaccgtcgccttgctcctcgccgcggcggggactgcagtgggcgacagatgtgaaagaaacgagttccagtgccaagacgggaaatgcatctcctacaagtgggtctgcgatggcagcgctgagtgccaggatggctctgatgagtcccaggagacgtgcttgtctgtcacctgcaaatccggggacttcagctgtgggggccgtgtcaaccgctgcattcctcagttctggaggtgcgatggccaagtggactgcgacaacggctcagacgagcaaggctgtccccccaagacgtgctcccaggacgagtttcgctgccacgatgggaagtgcatctctcggcagttcgtctgtgactcagaccgggactgcttggacggctcagacgaggcctcctgcccggtgctcacctgtggtcccgccagcttccagtgcaacagctccacctgcatcccccagctgtgggcctgcgacaacgaccccgactgcgaagatggctcggatgagtggccgcagcgctgtaggggtctttacgtgttccaaggggacagtagcccctgctcggccttcgagttccactgcctaagtggcgagtgcatccactccagctggcgctgtgatggtggccccgactgcaaggacaaatctgacgaggaaaactgcgctgtggccacctgtcgccctgacgaattccagtgctctgatggaaactgcatccatggcagccggcagtgtgaccgggaatatgactgcaaggacatgagcgatgaagttggctgcgttaatgtgacactctgcgagggacccaacaagttcaagtgtcacagcggcgaatgcatcaccctggacaaagtctgcaacatggctagagactgccgggactggtcagatgaacccatcaaagagtgcgggaccaacgaatgcttggacaacaacggcggctgttcccacgtctgcaatgaccttaagatcggctacgagtgcctgtgccccgacggcttccagctggtggcccagcgaagatgcgaagatatcgatgagtgtcaggatcccgacacctgcagccagctctgcgtgaacctggagggtggctacaagtgccagtgtgaggaaggcttccagctggacccccacacgaaggcctgcaaggctgtgggctccatcgcctacctcttcttcaccaaccggcacgaggtcaggaagatgacgctggaccggagcgagtacaccagcctcatccccaacctgaggaacgtggtcgctctggacacggaggtggccagcaatagaatctactggtctgacctgtcccagagaatgatctgcagcacccagcttgacagagcccacggcgtctcttcctatgacaccgtcatcagcagggacatccaggcccccgacgggctggctgtggactggatccacagcaacatctactggaccgactctgtcctgggcactgtctctgttgcggataccaagggcgtgaagaggaaaacgttattcagggagaacggctccaagccaagggccatcgtggtggatcctgttcatggcttcatgtactggactgactggggaactcccgccaagatcaagaaagggggcctgaatggtgtggacatctactcgctggtgactgaaaacattcagtggcccaatggcatcaccctagatctcctcagtggccgcctctactgggttgactccaaacttcactccatctcaagcatcgatgtcaatgggggcaaccggaagaccatcttggaggatgaaaagaggctggcccaccccttctccttggccgtctttgaggacaaagtattttggacagatatcatcaacgaagccattttcagtgccaaccgcctcacaggttccgatgtcaacttgttggctgaaaacctactgtccccagaggatatggtcctcttccacaacctcacccagccaagaggagtgaactggtgtgagaggaccaccctgagcaatggcggctgccagtatctgtgcctccctgccccgcagatcaacccccactcgcccaagtttacctgcgcctgcccggacggcatgctgctggccagggacatgaggagctgcctcacagaggctgaggctgcagtggccacccaggagacatccaccgtcaggctaaaggtcagctccacagccgtaaggacacagcacacaaccacccggcctgttcccgacacctcccggctgcctggggccacccctgggctcaccacggtggagatagtgacaatgtctcaccaagctctgggcgacgttgctggcagaggaaatgagaagaagcccagtagcgtgagggctctgtccattgtcctccccatcgtgctcctcgtcttcctttgcctgggggtcttccttctatggaagaactggcggcttaagaacatcaacagcatcaactttgacaaccccgtctatcagaagaccacagaggatgaggtccacatttgccacaaccaggacggctacagctacccctcgagacagatggtcagtctggaggatgacgtggcgtgaacatctgcctggagtcccgcccctgcccagaacccttcctgagacctcgccggccttgttttattcaaagacagagaagaccaaagcattgcctgccagagctttgttttatatatttattcatctgggaggcagaacaggcttcggacagtgcccatgcaatggcttgggttgggattttggtttcttcctttcctgtgaaggataagagaaacaggcccggggggaccaggatgacacctccatttctctccaggaagttttgagtttctctccaccgtgacacaatcctcaaacatggaagatgaaagggcaggggatgtcaggcccagagaagcaagtggctttcaacacacaacagcagatggcaccaacgggaccccctggccctgcctcatccaccaatctctaagccaaacccctaaactcaggagtcaacgtgtttacctcttctatgcaagccttgctagacagccaggttagcctttgccctgtcacccccgaatcatgacccacccagtgtctttcgaggtgggtttgtaccttccttaagccaggaaagggattcatggcgtcggaaatgatctggctgaatccgtggtggcaccgagaccaaactcattcaccaaatgatgccacttcccagaggcagagcctgagtcaccggtcacccttaatatttattaagtgcctgagacacccggttaccttggccgtgaggacacgtggcctgcacccaggtgtggctgtcaggacaccagcctggtgcccatcctcccgacccctacccacttccattcccgtggtctccttgcactttctcagttcagagttgtacactgtgtacatttggcatttgtgttattattttgcactgttttctgtcgtgtgtgttgggatgggatcccaggccagggaaagcccgtgtcaatgaatgccggggacagagaggggcaggttgaccgggacttcaaagccgtgatcgtgaatatcgagaactgccattgtcgtctttatgtccgcccacctagtgcttccacttctatgcaaatgcctccaagccattcacttccccaatcttgtcgttgatgggtatgtgtttaaaacatgcacggtgaggccgggcgcagtggcctcacgcctgtaatcccagcactttgggaggccgaggcgggtggatcatgaggtcaggagatcgagaccatcctggctaacaaggtgaaaccccgtctctactaaaaatacaaaaaattagccgggcgcggtggtgggcacctgtagtcccagctactcgggaggctgaggcaggagaatggtgtgaacccgggaagcggagcttgcagtgagccgagattgcgccactgcagtccgcagtctggcctgggcgacagagcgagactccgtctcaaaaaaaacaaaacaaaaaaaaaccatgcatggtgcatcagcagcccatggcctctggccaggcatggcgaggctgaggtgggaggatggtttgagctcaggcatttgaggctgtcgtgagctatgattatgccactgctttccagcctgggcaacatagtaagaccccatctcttaaaaaatgaatttggccagacacaggtgcctcacgcctgtaatcccagcactttgggaggctgagctggatcacttgagttcaggagttggagaccaggcctgagcaacaaagcgagatcccatctctacaaaaaccaaaaagttaaaaatcagctgggtatggtggcacgtgcctgtgatcccagctacttgggaggctgaggcaggaggatcgcctgagcccaggaggtggaggttgcagtgagccatgatcgagccactgcactccagcctgggcaacagatgaagaccctatttcagaaatacaactataaaaaaaataaataaatcctccagtctggatcgtttgacgggacttcaggttctttctgaaatcgccgtgttactgttgcactgatgtccggagagacagtgacagcctccgtcagactcccgcgtgaagatgtcacaagggattggcaattgtccccagggacaaaacactgtgtcccccccagtgcagggaaccgtgataagcctttctggtttcggagcacgtaaatgcgtccctgtacagatagtggggattttttgttatgtttgcactttgtatattggttgaaactgttatcacttatatatatatatacacacatatatataaaatctatttatttttgcaaaccctggttgctgtatttgttcagtgactattctcggggccctgtgtagggggttattgcctctgaaatgcctcttctttatgtacaaagattatttgcacgaactggactgtgtgcaacgctttttgggagaatgatgtccccgttgtatgtatgagtggcttctgggagatgggtgtcactttttaaaccactgtatagaaggtttttgtagcctgaatgtcttactgtgatcaattaaatttcttaaatg

SEQ ID NO: 434 - DNA, 2771 bp, Homo sapiens
cgaggcggatcgggtgttgcatccatggagcgagctgagagctcgagtacagaacctgctaaggccatcaaacctattgatcggaagtcagtccatcagatttgctctgggcaggtggtactgagtctaagcactgcggtaaaggagttagtagaaaacagtctggatgctggtgccactaatattgatctaaagcttaaggactatggagtggatcttattgaagtttcagacaatggatgtggggtagaagaagaaaacttcgaaggcttaactctgaaacatcacacatctaagattcaagagtttgccgacctaactcaggttgaaacttttggctttcggggggaagctctgagctcactttgtgcactgagcgatgtcaccatttctacctgccacgcatcggcgaaggttggaactcgactgatgtttgatcacaatgggaaaattatccagaaaaccccctacccccgccccagagggaccacagtcagcgtgcagcagttattttccacactacctgtgcgccataaggaatttcaaaggaatattaagaaggagtatgccaaaatggtccaggtcttacatgcatactgtatcatttcagcaggcatccgtgtaagttgcaccaatcagcttggacaaggaaaacgacagcctgtggtatgcacaggtggaagccccagcataaaggaaaatatcggctctgtgtttgggcagaagcagttgcaaagcctcattccttttgttcagctgccccctagtgactccgtgtgtgaagagtacggtttgagctgttcggatgctctgcataatcttttttacatctcaggtttcatttcacaatgcacgcatggagttggaaggagttcaacagacagacagtttttctttatcaaccggcggccttgtgacccagcaaaggtctgcagactcgtgaatgaggtctaccacatgtataatcgacaccagtatccatttgttgttcttaacatttctgttgattcagaatgcgttgatatcaatgttactccagataaaaggcaaattttgctacaagaggaaaagcttttgttggcagttttaaagacctctttgataggaatgtttgatagtgatgtcaacaagctaaatgtcagtcagcagccactgctggatgttgaaggtaacttaataaaaatgcatgcagcggatttggaaaagcccatggtagaaaagcaggatcaatccccttcattaaggactggagaagaaaaaaaagacgtgtccatttccagactgcgagaggccttttctcttcgtcacacaacagagaacaagcctcacagcccaaagactccagaaccaagaaggagccctctaggacagaaaaggggtatgctgtcttctagcacttcaggtgccatctctgacaaaggcgtcctgagacctcagaaagaggcagtgagttccagtcacggacccagtgaccctacggacagagcggaggtggagaaggactcggggcacggcagcacttccgtggattctgaggggttcagcatcccagacacgggcagtcactgcagcagcgagtatgcggccagctccccaggggacaggggctcgcaggaacatgtggactctcaggagaaagcgcctgaaactgacgactctttttcagatgtggactgccattcaaaccaggaagataccggatgtaaatttcgagttttgcctcagccaactaatctcgcaaccccaaacacaaagcgttttaaaaaagaagaaattctttccagttctgacatttgtcaaaagttagtaaatactcaggacatgtcagcctctcaggttgatgtagctgtgaaaattaataagaaagttgtgcccctggacttttctatgagttctttagctaaacgaataaagcagttacatcatgaagcacagcaaagtgaaggggaacagaattacaggaagtttagggcaaagatttgtcctggagaaaatcaagcagccgaagatgaactaagaaaagagataagtaaaacgatgtttgcagaaatggaaatcattggtcagtttaacctgggatttataataaccaaactgaatgaggatatcttcatagtggaccagcatgccacggacgagaagtataacttcgagatgctgcagcagcacaccgtgctccaggggcagaggctcatagcacctcagactctcaacttaactgctgttaatgaagctgttctgatagaaaatctggaaatatttagaaagaatggctttgattttgttatcgatgaaaatgctccagtcactgaaagggctaaactgatttccttgccaactagtaaaaactggaccttcggaccccaggacgtcgatgaactgatcttcatgctgagcgacagccctggggtcatgtgccggccttcccgagtcaagcagatgtttgcctccagagcctgccggaagtcggtgatgattgggactgctcttaacacaagcgagatgaagaaactgatcacccacatgggggagatggaccacccctggaactgtccccatggaaggccaaccatgagacacatcgccaacctgggtgtcatttctcagaactgaccgtagtcactgtatggaataattggttttatcgcagatttttatgttttgaaagacagagtcttcactaaccttttttgttttaaaatgaaacctgctacttaaaaaaaatacacatcacacccatttaaaagtgatcttgagaaccttttcaaacc

SEQ ID NO: 435 - DNA, 1461 bp, Homo sapiens
agaacctcagtggatctcagagagagccccagactgagggaagcatggatggatggagaaggatgcctcgctggggactgctgctgctgctctggggctcctgtacctttggtctcccgacagacaccaccacctttaaacggatcttcctcaagagaatgccctcaatccgagaaagcctgaaggaacgaggtgtggacatggccaggcttggtcccgagtggagccaacccatgaagaggctgacacttggcaacaccacctcctccgtgatcctcaccaactacatggacacccagtactatggcgagattgggatcgggaccccaccccaaaccttcaaagtcgtctttgacactggttcgtccaatgtttgggtgccctcctccaagtgcagccgtctctacactgcctgtgtgtatcacaagctcttcgatgcttcggattcctccagctacaagcacaatggaacagaactcaccctccgctattcaacagggacagtcagtggctttctcagccaggacatcatcaccgtgggtggaatcacggtgacacagatgtttggagaggtcacggagatgcccgccttacccttcatgctggccgagtttgatggggttgtgggcatgggcttcattgaacaggccattggcagggtcacccctatcttcgacaacatcatctcccaaggggtgctaaaagaggacgtcttctctttctactacaacagagattccgagaattcccaatcgctgggaggacagattgtgctgggaggcagcgacccccagcattacgaagggaatttccactatatcaacctcatcaagactggtgtctggcagattcaaatgaagggggtgtctgtggggtcatccaccttgctctgtgaagacggctgcctggcattggtagacaccggtgcatcctacatctcaggttctaccagctccatagagaagctcatggaggccttgggagccaagaagaggctgtttgattatgtcgtgaagtgtaacgagggccctacactccccgacatctctttccacctgggaggcaaagaatacacgctcaccagcgcggactatgtatttcaggaatcctacagtagtaaaaagctgtgcacactggccatccacgccatggatatcccgccacccactggacccacctgggccctgggggccaccttcatccgaaagttctacacagagtttgatcggcgtaacaaccgcattggcttcgccttggcccgctgaggccctctgccacccaggcaggccctgccttcagccctggcccagagctggaacactctctgagatgcccctctgcctgggcttatgccctcagatggagacattggatgtggagctcctgctggatgcgtgccctgacccctgcaccagcccttccctgctttgaggacaaagagaataaagacttcatgttcac

SEQ ID NO: 436 - DNA, 1890 bp, Homo sapiens
atgccccgctacggagcgtcactccgccagagctgccccaggtccggccgggagcagggacaagacgggaccgccggagcccccggactcctttggatgggcctggcgctggcgctggcgctggcgctggcgctggctctgtctgactctcgggttctctgggctccggcagaggctcaccctctttctccccaaggccatcctgccaggttacatcgcatagtgccccggctccgagatgtctttgggtgggggaacctcacctgcccaatctgcaaaggtctattcaccgccatcaacctcgggctgaagaaggaacccaatgtggctcgcgtgggctccgtggccatcaagctgtgcaatctgctgaagatagcaccacctgccgtgtgccaatccattgtccacctctttgaggatgacatggtggaggtgtggagacgctcagtgctgagcccatctgaggcctgtggcctgctcctgggctccacctgtgggcactgggacattttctcatcttggaacatctctttgcctactgtgccgaagccgccccccaaaccccctagccccccagccccaggtgcccctgtcagccgcatcctcttcctcactgacctgcactgggatcatgactacctggagggcacggaccctgactgtgcagacccactgtgctgccgccggggttctggcctgccgcccgcatcccggccaggtgccggatactggggcgaatacagcaagtgtgacctgcccctgaggaccctggagagcctgttgagtgggctgggcccagccggcccttttgatatggtgtactggacaggagacatccccgcacatgatgtctggcaccagactcgtcaggaccaactgcgggccctgaccaccgtcacagcacttgtgaggaagttcctggggccagtgccagtgtaccctgctgtgggtaaccatgaaagcacacctgtcaatagcttccctccccccttcattgagggcaaccactcctcccgctggctctatgaagcgatggccaaggcttgggagccctggctgcctgccgaagccctgcgcaccctcagaattggggggttctatgctctttccccataccccggtctccgcctcatctctctcaatatgaatttttgttcccgtgagaacttctggctcttgatcaactccacggatcccgcaggacagctccagtggctggtgggggagcttcaggctgctgaggatcgaggagacaaagtgcatataattggccacattcccccagggcactgtctgaagagctggagctggaattattaccgaattgtagccaggtatgagaacaccctggctgctcagttctttggccacactcatgtggatgaatttgaggtcttctatgatgaagagactctgagccggccgctggctgtagccttcctggcacccagtgcaactacctacatcggccttaatcctggttaccgtgtgtaccaaatagatggaaactactccgggagctctcacgtggtcctggaccatgagacctacatcctgaatctgacccaggcaaacataccgggagccataccgcactggcagcttctctacagggctcgagaaacctatgggctgcccaacacactgcctaccgcctggcacaacctggtatatcgcatgcggggcgacatgcaacttttccagaccttctggtttctctaccataagggccacccaccctcggagccctgtggcacgccctgccgtctggctactctttgtgcccagctctctgcccgtgctgacagccctgctctgtgccgccacctgatgccagatgggagcctcccagaggcccagagcctgtggccaaggccactgttttgctag

SEQ ID NO: 437 - DNA, 2383 bp, Homo sapiens
ctccttcaagccctcagtcagttgtgcaggagaaagggggcggttggctttctcctttcaagaacgagttattttcagctgctgactggagacggtgcacgtctggatacgagagcatttccactatgggactggatacaaacacacacccggcagacttcaagagtctcagactgaggagaaagcctttccttctgctgctactgctgctgccgctgcttttgaaagtccactcctttcatggtttttcctgccaaaccagaggcacctttgctgctgccgctgttctctttggtgtcattcagcggctggccagaggatgagactccccaaactcctcactttcttgctttggtacctggcttggctggacctggaattcatctgcactgtgttgggtgcccctgacttgggccagagaccccaggggaccaggccaggattggccaaagcagaggccaaggagaggccccccctggcccggaacgtcttcaggccagggggtcacagctatggtgggggggccaccaatgccaatgccagggcaaagggaggcaccgggcagacaggaggcctgacacagcccaagaaggatgaacccaaaaagctgccccccagaccgggcggccctgaacccaagccaggacaccctccccaaacaaggcaggctacagcccggactgtgaccccaaaaggacagcttcccggaggcaaggcacccccaaaagcaggatctgtccccagctccttcctgctgaagaaggccagggagcccgggcccccacgagagcccaaggagccgtttcgcccaccccccatcacaccccacgagtacatgctctcgctgtacaggacgctgtccgatgctgacagaaagggaggcaacagcagcgtgaagttggaggctggcctggccaacaccatcaccagctttattgacaaagggcaagatgaccgaggtcccgtggtcaggaagcagaggtacgtgtttgacattagtgccctggagaaggatgggctgctgggggccgagctgcggatcttgcggaagaagccctcggacacggccaagccagcggcccccggaggcgggcgggctgcccagctgaagctgtccagctgccccagcggccggcagccggcctccttgctggatgtgcgctccgtgccaggcctggacggatctggctgggaggtgttcgacatctggaagctcttccgaaactttaagaactcggcccagctgtgcctggagctggaggcctgggaacggggcagggccgtggacctccgtggcctgggcttcgaccgcgccgcccggcaggtccacgagaaggccctgttcctggtgtttggccgcaccaagaaacgggacctgttctttaatgagattaaggcccgctctggccaggacgataagaccgtgtatgagtacctgttcagccagcggcgaaaacggcgggccccactggccactcgccagggcaagcgacccagcaagaaccttaaggctcgctgcagtcggaaggcactgcatgtcaacttcaaggacatgggctgggacgactggatcatcgcaccccttgagtacgaggctttccactgcgaggggctgtgcgagttcccattgcgctcccacctggagcccacgaatcatgcagtcatccagaccctgatgaactccatggaccccgagtccacaccacccacctgctgtgtgcccacgcggctgagtcccatcagcatcctcttcattgactctgccaacaacgtggtgtataagcagtatgaggacatggtcgtggagtcgtgtggctgcaggtagcagcactggccctctgtcttcctgggtggcacatcccaagagccccttcctgcactcctggaatcacagaggggtcaggaagctgtggcaggagcatctacacagcttgggtgaaaggggattccaataagcttgctcgctctctgagtgtgacttgggctaaaggcccccttttatccacaagttcccctggctgaggattgctgcccgtctgctgatgtgaccagtggcaggcacaggtccagggagacagactctgaatgggactgagtcccaggaaacagtgctttccgatgagactcagcccaccatttctcctcacctgggccttctcagcctctggactctcctaagcacctctcaggagagccacaggtgccactgcctcctcaaatcacatttgtgcctggtgacttcctgtccctgggacagttgagaagctgactgggcaagagtgggagagaagaggagagggcttggatagagttgaggagtgtgaggctgttagactgttagatttaaatgtatattgatgagataaaaagcaaaactgtgcct

SEQ ID NO: 438 - DNA, 2102 bp, Homo sapiens
ccgctgggcgtagctgcgactcggcggagtcccggcggcgcgtccttgttctaacccggcgcgccatgaccgtcgcgcggccgagcgtgcccgcggcgctgcccctcctcggggagctgccccggctgctgctgctggtgctgttgtgcctgccggccgtgtggggtgactgtggccttcccccagatgtacctaatgcccagccagctttggaaggccgtacaagttttcccgaggatactgtaataacgtacaaatgtgaagaaagctttgtgaaaattcctggcgagaaggactcagtgatctgccttaagggcagtcaatggtcagatattgaagagttctgcaatcgtagctgcgaggtgccaacaaggctaaattctgcatccctcaaacagccttatatcactcagaattattttccagtcggtactgttgtggaatatgagtgccgtccaggttacagaagagaaccttctctatcaccaaaactaacttgccttcagaatttaaaatggtccacagcagtcgaattttgtaaaaagaaatcatgccctaatccgggagaaatacgaaatggtcagattgatgtaccaggtggcatattatttggtgcaaccatctccttctcatgtaacacagggtacaaattatttggctcgacttctagtttttgtcttatttcaggcagctctgtccagtggagtgacccgttgccagagtgcagagaaatttattgtccagcaccaccacaaattgacaatggaataattcaaggggaacgtgaccattatggatatagacagtctgtaacgtatgcatgtaataaaggattcaccatgattggagagcactctatttattgtactgtgaataatgatgaaggagagtggagtggcccaccacctgaatgcagaggaaaatctctaacttccaaggtcccaccaacagttcagaaacctaccacagtaaatgttccaactacagaagtctcaccaacttctcagaaaaccaccacaaaaaccaccacaccaaatgctcaagcaacacggagtacacctgtttccaggacaaccaagcattttcatgaaacaaccccaaataaaggaagtggaaccacttcaggtactacccgtcttctatctgggcacacgtgtttcacgttgacaggtttgcttgggacgctagtaaccatgggcttgctgacttagccaaagaagagttaagaagaaaatacacacaagtatacagactgttcctagtttcttagacttatctgcatattggataaaataaatgcaattgtgctcttcatttaggatgctttcattgtctttaagatgtgttaggaatgtcaacagagcaaggagaaaaaaggcagtcctggaatcacattcttagcacacctacacctcttgaaaatagaacaacttgcagaattgagagtgattcctttcctaaaagtgtaagaaagcatagagatttgttcgtatttagaatgggatcacgaggaaaagagaaggaaagtgatttttttccacaagatctgtaatgttatttccacttataaaggaaataaaaaatgaaaaacattatttggatatcaaaagcaaataaaaacccaattcagtctcttctaagcaaaattgctaaagagagatgaaccacattataaagtaatctttggctgtaaggcattttcatctttccttcgggttggcaaaatattttaaaggtaaaacatgctggtgaaccaggggtgttgatggtgataagggaggaatatagaatgaaagactgaatcttcctttgttgcacaaatagagtttggaaaaagcctgtgaaaggtgtcttctttgacttaatgtctttaaaagtatccagagatactacaatattaacataagaaaagattatatattatttctgaatcgagatgtccatagtcaaatttgtaaatcttattcttttgtaatatttatttatatttatttatgacagtgaacattctgattttacatgtaaaacaagaaaagttgaagaagatatgtgaagaaaaatgtatttttcctaaatagaaataaatgatcccattttttggt

SEQ ID NO: 439 - DNA, 1524 bp, Homo sapiens
gcagagcacagcatcgtcgggaccagactcgtctcaggccagttgcagccttctcagccaaacgccgaccaaggaaaactcactaccatgagaattgcagtgatttgcttttgcctcctaggcatcacctgtgccataccagttaaacaggctgattctggaagttctgaggaaaagcagctttacaacaaatacccagatgctgtggccacatggctaaaccctgacccatctcagaagcagaatctcctagccccacagacccttccaagtaagtccaacgaaagccatgaccacatggatgatatggatgatgaagatgatgatgaccatgtggacagccaggactccattgactcgaacgactctgatgatgtagatgacactgatgattctcaccagtctgatgagtctcaccattctgatgaatctgatgaactggtcactgattttcccacggacctgccagcaaccgaagttttcactccagttgtccccacagtagacacatatgatggccgaggtgatagtgtggtttatggactgaggtcaaaatctaagaagtttcgcagacctgacatccagtaccctgatgctacagacgaggacatcacctcacacatggaaagcgaggagttgaatggtgcatacaaggccatccccgttgcccaggacctgaacgcgccttctgattgggacagccgtgggaaggacagttatgaaacgagtcagctggatgaccagagtgctgaaacccacagccacaagcagtccagattatataagcggaaagccaatgatgagagcaatgagcattccgatgtgattgatagtcaggaactttccaaagtcagccgtgaattccacagccatgaatttcacagccatgaagatatgctggttgtagaccccaaaagtaaggaagaagataaacacctgaaatttcgtatttctcatgaattagatagtgcatcttctgaggtcaattaaaaggagaaaaaatacaatttctcactttgcatttagtcaaaagaaaaaatgctttatagcaaaatgaaagagaacatgaaatgcttctttctcagtttattggttgaatgtgtatctatttgagtctggaaataactaatgtgtttgataattagtttagtttgtggcttcatggaaactccctgtaaactaaaagcttcagggttatgtctatgttcattctatagaagaaatgcaaactatcactgtattttaatatttgttattctctcatgaatagaaatttatgtagaagcaaacaaaatacttttacccacttaaaaagagaatataacattttatgtcactataatcttttgttttttaagttagtgtatattttgttgtgattatctttttgtggtgtgaataaatcttttatcttgaatgtaataagaatttggtggtgtcaattgcttatttgttttcccacggttgtccagcaattaataaaacataaccttttttactgcctaaaaaaaaaaaaaaaaaaaa

SEQ ID NO: 440 - DNA, 5426 bp, Homo sapiens
agaaggtagcagacagacagacggatctaacctctcttggatcctccagccatgaggctgctctgggggctgatctgggcatccagcttcttcaccttatctctgcagaagcccaggttgctcttgttctctccttctgtggttcatctgggggtccccctatcggtgggggtgcagctccaggatgtgccccgaggacaggtagtgaaaggatcagtgttcctgagaaacccatctcgtaataatgtcccctgctccccaaaggtggacttcacccttagctcagaaagagacttcgcactcctcagtctccaggtgcccttgaaagatgcgaagagctgtggcctccatcaactcctcagaggccctgaggtccagctggtggcccattcgccatggctaaaggactctctgtccagaacgacaaacatccagggtatcaacctgctcttctcctctcgccgggggcacctctttttgcagacggaccagcccatttacaaccctggccagcgggttcggtaccgggtctttgctctggatcagaagatgcgcccgagcactgacaccatcacagtcatggtggagaactctcacggcctccgcgtgcggaagaaggaggtgtacatgccctcgtccatcttccaggatgactttgtgatcccagacatctcagagccagggacctggaagatctcagcccgattctcagatggcctggaatccaacagcagcacccagtttgaggtgaagaaatatgtccttcccaactttgaggtgaagatcacccctggaaagccctacatcctgacggtgccaggccatcttgatgaaatgcagttagacatccaggccaggtacatctatgggaagccagtgcagggggtggcatatgtgcgctttgggctcctagatgaggatggtaagaagactttctttcgggggctggagagtcagaccaagctggtgaatggacagagccacatttccctctcaaaggcagagttccaggacgccctggagaagctgaatatgggcattactgacctccaggggctgcgcctctacgttgctgcagccatcattgagtatccaggtggggagatggaggaggcagagctcacatcctggtattttgtgtcatctcccttctccttggatcttagcaagaccaagcgacaccttgtgcctggggcccccttcctgctgcaggccttggtccgtgagatgtcaggctccccagcttctggcattcctgtcaaagtttctgccacggtgtcttctcctgggtctgttcctgaagtccaggacattcagcaaaacacagacgggagcggccaagtcagcattccaataattatccctcagaccatctcagagctgcagctctcagtatctgcaggctccccacatccagcgatagccaggctcactgtggcagccccaccttcaggaggccccgggtttctgtctattgagcggccggattctcgacctcctcgtgttggggacactctgaacctgaacttgcgagccgtgggcagtggggccaccttttctcattactactacatgatcctatcccgagggcagatcgtgttcatgaatcgagagcccaagaggaccctgacctcggtctcggtgtttgtggaccatcacctggcaccctccttctactttgtggccttctactaccatggagaccacccagtggccaactccctgcgagtggatgtccaggctggggcctgcgagggcaagctggagctcagcgtggacggtgccaagcagtaccggaacggggagtccgtgaagctccacttagaaaccgactccctagccctggtggcgctgggagccttggacacagctctgtatgctgcaggcagcaagtcccacaagcccctcaacatgggcaaggtctttgaagctatgaacagctatgacctcggctgtggtcctgggggtggggacagtgcccttcaggtgttccaggcagcgggcctggccttttctgatggagaccagtggaccttatccagaaagagactaagctgtcccaaggagaagacaacccggaaaaagagaaacgtgaacttccaaaaggcgattaatgagaaattgggtcagtatgcttccccgacagccaagcgctgctgccaggatggggtgacacgtctgcccatgatgcgttcctgcgagcagcgggcagcccgcgtgcagcagccggactgccgggagcccttcctgtcctgctgccaatttgctgagagtctgcgcaagaagagcagggacaagggccaggcgggcctccaacgagccctggagatcctgcaggaggaggacctgattgatgaggatgacattcccgtgcgcagcttcttcccagagaactggctctggagagtggaaacagtggaccgctttcaaatattgacactgtggctccccgactctctgaccacgtgggagatccatggcctgagcctgtccaaaaccaaaggcctatgtgtggccaccccagtccagctccgggtgttccgcgagttccacctgcacctccgcctgcccatgtctgtccgccgctttgagcagctggagctgcggcctgtcctctataactacctggataaaaacctgactgtgagcgtccacgtgtccccagtggaggggctgtgcctggctgggggcggagggctggcccagcaggtgctggtgcctgcgggctctgcccggcctgttgccttctctgtggtgcccacggcagccgccgctgtgtctctgaaggtggtggctcgagggtccttcgaattccctgtgggagatgcggtgtccaaggttctgcagattgagaaggaaggggccatccatagagaggagctggtctatgaactcaaccccttggaccaccgaggccggaccttggaaatacctggcaactctgatcccaatatgatccctgatggggactttaacagctacgtcagggttacagcctcagatccattggacactttaggctctgagggggccttgtcaccaggaggcgtggcctccctcttgaggcttcctcgaggctgtggggagcaaaccatgatctacttggctccgacactggctgcttcccgctacctggacaagacagagcagtggagcacactgcctcccgagaccaaggaccacgccgtggatctgatccagaaaggctacatgcggatccagcagtttcggaaggcggatggttcctatgcggcttggttgtcacggggcagcagcacctggctcacagcctttgtgttgaaggtcctgagtttggcccaggagcaggtaggaggatcgcctgagaaactgcaggagacatctaactggcttctgtcccagcagcaggctgacggctcgttccaggacctctctccagtgatacataggagcatgcaggggggtttggtgggcaatgatgagactgtggcactcacagcctttgtgaccatcgcccttcatcatgggctggccgtcttccaggatgagggtgcagagccattgaagcagagagtggaagcctccatctcaaaggcaagctcatttttgggggagaaagcaagtgctgggctcctgggtgcccacgcagctgccatcacggcctatgccctgacactgaccaaggcccctgcggacctgcggggtgttgcccacaacaacctcatggcaatggcccaggagactggagataacctgtactggggctcagtcactggttctcagagcaatgccgtgtcgcccaccccggctcctcgcaacccatccgaccccatgccccaggccccagccctgtggattgaaaccacagcctacgccctgctgcacctcctgcttcacgagggcaaagcagagatggcagaccaggctgcggcctggctcacccgtcagggcagcttccaagggggattccgcagtacccaagacacggtgattgccctggatgccctgtctgcctactggattgcctcccacaccactgaggagaggggtctcaatgtgactctcagctccacaggccggaatgggttcaagtcccacgcgctgcagctgaacaaccgccagattcgcggcctggaggaggagctgcagttttccttgggcagcaagatcaatgtgaaggtgggaggaaacagcaaaggaaccctgaaggtccttcgtacctacaatgtcctggacatgaagaacacgacctgccaggacctacagatagaagtgacagtcaaaggccacgtcgagtacacgatggaagcaaacgaggactatgaggactatgagtacgatgagcttccagccaaggatgacccagatgcccctctgcagcccgtgacacccctgcagctgtttgagggtcggaggaaccgccgcaggagggaggcgcccaaggtggtggaggagcaggagtccagggtgcactacaccgtgtgcatctggcggaacggcaaggtggggctgtctggcatggccatcgcggacgtcaccctcctgagtggattccacgccctgcgtgctgacctggagaagctgacctccctctctgaccgttacgtgagtcactttgagaccgaggggccccacgtcctgctgtattttgactcggtccccacctcccgggagtgcgtgggctttgaggctgtgcaggaagtgccggtggggctggtgcagccggccagcgcaaccctgtacgactactacaaccccgagcgcagatgttctgtgttttacggggcaccaagtaagagcagactcttggccaccttgtgttctgctgaagtctgccagtgtgctgaggggaagtgccctcgccagcgtcgcgccctggagcggggtctgcaggacgaggatggctacaggatgaagtttgcctgctactacccccgtgtggagtacggcttccaggttaaggttctccgagaagacagcagagctgctttccgcctctttgagaccaagatcacccaagtcctgcacttcaccaaggatgtcaaggccgctgctaatcagatgcgcaacttcctggttcgagcctcctgccgccttcgcttggaacctgggaaagaatatttgatcatgggtctggatggggccacctatgacctcgagggacacccccagtacctgctggactcgaatagctggatcgaggagatgccctctgaacgcctgtgccggagcacccgccagcgggcagcctgtgcccagctcaacgacttcctccaggagtatggcactcaggggtgccaggtgtgagggctgccctcccacctccgctgggaggaacctgaacctgggaaccatgaagctggaagcactgctgtgtccgctttcatgaacacagcctgggaccagggcatattaaaggcttttggcagcaaagtgtcagtgttggc

SEQ ID NO: 441 - DNA, 2506 bp, Homo sapiens
ggcacgaggcacagcttcgcgccgtgtactgtcgccccatccctgcgcgcccagcctgccaagcagcgtgccccggttgcaggcgtcatgcagcgggcgcgacccacgctctgggccgctgcgctgactctgctggtgctgctccgcgggccgccggtggcgcgggctggcgcgagctcggggggcttgggtcccgtggtgcgctgcgagccgtgcgacgcgcgtgcactggcccagtgcgcgcctccgcccgccgtgtgcgcggagctggtgcgcgagccgggctgcggctgctgcctgacgtgcgcactgagcgagggccagccgtgcggcatctacaccgagcgctgtggctccggccttcgctgccagccgtcgcccgacgaggcgcgaccgctgcaggcgctgctggacggccgcgggctctgcgtcaacgctagtgccgtcagccgcctgcgcgcctacctgctgccagcgccgccagctccaggaaatgctagtgagtcggaggaagaccgcagcgccggcagtgtggagagcccgtccgtctccagcacgcaccgggtgtctgatcccaagttccaccccctccattcaaagataatcatcatcaagaaagggcatgctaaagacagccagcgctacaaagttgactacgagtctcagagcacagatacccagaacttctcctccgagtccaagcgggagacagaatatggtccctgccgtagagaaatggaagacacactgaatcacctgaagttcctcaatgtgctgagtcccaggggtgtacacattcccaactgtgacaagaagggattttataagaaaaagcagtgtcgcccttccaaaggcaggaagcggggcttctgctggtgtgtggataagtatgggcagcctctcccaggctacaccaccaaggggaaggaggacgtgcactgctacagcatgcagagcaagtagacgcctgccgcaaggttaatgtggagctcaaatatgccttattttgcacaaaagactgccaaggacatgaccagcagctggctacagcctcgatttatatttctgtttgtggtgaactgattttttttaaaccaaagtttagaaagaggtttttgaaatgcctatggtttctttgaatggtaaacttgagcatcttttcactttccagtagtcagcaaagagcagtttgaattttcttgtcgcttcctatcaaaatattcagagactcgagcacagcacccagacttcatgcgcccgtggaatgctcaccacatgttggtcgaagcggccgaccactgactttgtgacttaggcggctgtgttgcctatgtagagaacacgcttcacccccactccccgtacagtgcgcacaggctttatcgagaataggaaaacctttaaaccccggtcatccggacatcccaacgcatgctcctggagctcacagccttctgtggtgtcatttctgaaacaagggcgtggatccctcaaccaagaagaatgtttatgtcttcaagtgacctgtactgcttggggactattggagaaaataaggtggagtcctacttgtttaaaaaatatgtatctaagaatgttctagggcactctgggaacctataaaggcaggtatttcgggccctcctcttcaggaatcttcctgaagacatggcccagtcgaaggcccaggatggcttttgctgcggccccgtggggtaggagggacagagagacagggagagtcagcctccacattcagaggcatcacaagtaatgtcacaattcttcggatgactgcagaaaatagtgttttgtagttcaacaactcaagacgaagcttatttctgaggataagctctttaaaggcaaagctttattttcatctctcatcttttgtcctccttagcacaatgtaaaaaagaatagtaatatcagaacaggaaggaggaatggcttgctggggagcccatccaggacactgggagcacatagagattcacccatgtttgttgaacttagagtcattctcatgcttttctttataattcacacatatatgcagagaagatatgttcttgttaacattgtatacaacatagccccaaatatagtaagatctatactagataatcctagatgaaatgttagagatgctatttgatacaactgtggccatgactgaggaaaggagctcacgcccagagactgggctgctctcccggaggccaaacccaagaaggtctggcaaagtcaggctcagggagactctgccctgctgcagacctcggtgtggacacacgctgcatagagctctccttgaaaacagaggggtctcaagacattctgcctacctattagcttttctttatttttttaactttttggggggaaaagtatttttgagaagtttgtcttgcaatgtatttataaatagtaaataaagtttttaccattaaaaaaataaaaaaaaaaaaaaaaaaaaaaaaaaaaaaaaaaaaaaaaaaaa

SEQ ID NO: 442 - DNA, 2876 bp, Homo sapiens
gaattcctgcagctcagcagccgccgccagagcaggacgaaccgccaatcgcaaggcacctctgagaacttcaggatgcagatgtctccagccctcacctgcctagtcctgggcctggcccttgtctttggtgaagggtctgctgtgcaccatcccccatcctacgtggcccacctggcctcagacttcggggtgagggtgtttcagcaggtggcgcaggcctccaaggaccgcaacgtggttttctcaccctatggggtggcctcggtgttggccatgctccagctgacaacaggaggagaaacccagcagcagattcaagcagctatgggattcaagattgatgacaagggcatggcccccgccctccggcatctgtacaaggagctcatggggccatggaacaaggatgagatcagcaccacagacgcgatcttcgtccagcgggatctgaagctggtccagggcttcatgccccacttcttcaggctgttccggagcacggtcaagcaagtggacttttcagaggtggagagagccagattcatcatcaatgactgggtgaagacacacacaaaaggtatgatcagcaacttgcttgggaaaggagccgtggaccagctgacacggctggtgctggtgaatgccctctacttcaacggccagtggaagactcccttccccgactccagcacccaccgccgcctcttccacaaatcagacggcagcactgtctctgtgcccatgatggctcagaccaacaagttcaactatactgagttcaccacgcccgatggccattactacgacatcctggaactgccctaccacggggacaccctcagcatgttcattgctgccccttatgaaaaagaggtgcctctctctgccctcaccaacattctgagtgcccagctcatcagccactggaaaggcaacatgaccaggctgccccgcctcctggttctgcccaagttctccctggagactgaagtcgacctcaggaagcccctagagaacctgggaatgaccgacatgttcagacagtttcaggctgacttcacgagtctttcagaccaagagcctctccacgtcgcgcaggcgctgcagaaagtgaagatcgaggtgaacgagagtggcacggtggcctcctcatccacagctgtcatagtctcagcccgcatggcccccgaggagatcatcatggacagacccttcctctttgtggtccggcacaaccccacaggaacagtccttttcatgggccaagtgatggaaccctgaccctggggaaagacgccttcatctgggacaaaactggagatgcatcgggaaagaagaaactccgaagaaaagaattttagtgttaatgactctttctgaaggaagagaagacatttgccttttgttaaaagatggtaaaccagatctgtctccaagaccttggcctctccttggaggacctttaggtcaaactccctagtctccacctgagaccctgggagagaagtttgaagcacaactcccttaaggtctccaaaccagacggtgacgcctgcgggaccatctggggcacctgcttccacccgtctctctgcccactcgggtctgcagacctggttcccactgaggccctttgcaggatggaactacggggcttacaggagcttttgtgtgcctggtagaaactatttctgttccagtcacattgccatcactcttgtactgcctgccaccgcggaggaggctggtgacaggccaaaggccagtggaagaaacaccctttcatctcagagtccactgtggcactggccacccctccccagtacaggggtgctgcaggtggcagagtgaatgtcccccatcatgtggcccaactctcctggcctggccatctccctccccagaaacagtgtgcatgggttattttggagtgtaggtgacttgtttactcattgaagcagatttctgcttccttttatttttataggaatagaggaagaaatgtcagatgcgtgcccagctcttcaccccccaatctcttggtggggaggggtgtacctaaatatttatcatatccttgcccttgagtgcttgttagagagaaagagaactactaaggaaaataatattatttaaactcgctcctagtgtttctttgtggtctgtgtcaccgtatctcaggaagtccagccacttgactggcacacacccctccggacatccagcgtgacggagcccacactgccaccttgtggccgcctgagaccctcgcgccccccgcgccccccgcgcccctctttttccccttgatggaaattgaccatacaatttcatcctccttcaggggatcaaaaggacggagtggggggacagagactcagatgaggacagagtggtttccaatgtgttcaatagatttaggagcagaaatgcaaggggctgcatgacctaccaggacagaactttccccaattacagggtgactcacagccgcattggtgactcacttcaatgtgtcatttccggctgctgtgtgtgagcagtggacacgtgaggggggggtgggtgagagagacaggcagctcggattcaactaccttagataatatttctgaaaacctaccagccagagggtagggcacaaagatggatgtaatgcactttgggaggccaaggcgggaggattgcttgagcccaggagttcaagaccagcctgggcaacataccaagacccccgtctctttaaaaatatatatattttaaatatacttaaatatatatttctaatatctttaaatatatatatatattttaaagaccaatttatgggagaattgcacacagatgtgaaatgaatgtaatctaatagaagc

SEQ ID NO: 443 - DNA, 1794 bp, Homo sapiens
cccgcgccctccgttcgctccggacaccatggacaagttttggtggcacgcagcctggggactctgcctcgtgccgctgagcctggcgcagatcgatttgaatataacctgccgctttgcaggtgtattccacgtggagaaaaatggtcgctacagcatctctcggacggaggccgctgacctctgcaaggctttcaatagcaccttgcccacaatggcccagatggagaaagctctgagcatcggatttgagacctgcaggtatgggttcatagaagggcatgtggtgattccccggatccaccccaactccatctgtgcagcaaacaacacaggggtgtacatcctcacatacaacacctcccagtatgacacatattgcttcaatgcttcagctccacctgaagaagattgtacatcagtcacagacctgcccaatgcctttgatggaccaattaccataactattgttaaccgtgatggcacccgctatgtccagaaaggagaatacagaacgaatcctgaagacatctaccccagcaaccctactgatgatgacgtgagcagcggctcctccagtgaaaggagcagcacttcaggaggttacatcttttacaccttttctactgtacaccccatcccagacgaagacagtccctggatcaccgacagcacagacagaatccctgctaccagagaccaagacacattccaccccagtggggggtcccataccactcatggatctgaatcagatggacactcacatgggagtcaagaaggtggagcaaacacaacctctggtcctataaggacaccccaaattccagaatggctgatcatcttggcatccctcttggccttggctttgattcttgcagtttgcattgcagtcaacagtcgaagaaggtgtgggcagaagaaaaagctagtgatcaacagtggcaatggagctgtggaggacagaaagccaagtggactcaacggagaggccagcaagtctcaggaaatggtgcatttggtgaacaaggagtcgtcagaaactccagaccagtttatgacagctgatgagacaaggaacctgcagaatgtggacatgaagattggggtgtaacacctacaccattatcttggaaagaaacaaccgttggaaacataaccattacagggagctgggacacttaacagatgcaatgtgctactgattgtttcattgcgaatcttttttagcataaaattttctactctttttgttttttgtgttttgttctttaaagtcaggtccaatttgtaaaaacagcattgctttgtaaattagggcccaattaataatcagcaagaatttgatcgttcagttccacttggaggccttcatcctcgggtgtgctatggatggcttctaacaaaaactacacatatgtattcctgatcgccaacctttcccccaccagctaaggacatttcccagggttaatagggcctggtccctgggaggaaatttgaatgggtccattttgcccttccatagcctaatccctgggcattgctttccactgaggttggggtgtactagttacacatcttcaacagaccccctctagaaatttttcagatgcttctgggagacaccaaagggtgaagctatttatctgtagtaaactatttatctgtgtttttgaaatattaaaccctggatcagtcctttgatcagtataattttttaaagttactttgtcagaggcacaaaagggtttaaactgattcataataaatatctgtacttcttcgatcttc

SEQ ID NO: 444 - DNA, 1946 bp, Homo sapiens
ggcacgaggagaggatcctgggcgccgccaggttctgtggacaatcacaatgggaatccaaggagggtctgtcctgttcgggctgctgctcgtcctggctgtcttctgccattcaggtcatagcctgcagtgctacaactgtcctaacccaactgctgactgcaaaacagccgtcaattgttcatctgattttgatgcgtgtctcattaccaaagctgggttacaagtgtataacaagtgttggaagtttgagcattgcaatttcaacgacgtcacaacccgcttgagggaaaatgagctaacgtactactgctgcaagaaggacctgtgtaactttaacgaacagcttgaaaatggtgggacatccttatcagagaaaacagttcttctgctggtgactccatttctggcagcagcctggagccttcatccctaagtcaacaccaggagagcttctcccaaactccccgttcctgcgtagtccgctttctcttgctgccacattctaaaggcttgatattttccaaatggatcctgttgggaaagaataaaattagcttgagcaacctggctaagatagaggggctctgggagactttgaagaccagtcctgtttgcagggaagccccacttgaaggaagaagtctaagagtgaagtaggtgtgacttgaactagattgcatgcttcctcctttgctcttgggaagaccagctttgcagtgacagcttgagtgggttctctgcagccctcagattatttttcctctggctccttggatgtagtcagttagcatcattagtacatctttggagggtggggcaggagtatatgagcatcctctctcacatggaacgctttcataaacttcagggatcccgtgttgccatggaggcatgccaaatgttccatatgtgggtgtcagtcagggacaacaagatccttaatgcagagctagaggacttctggcagggaagtggggaagtgttccagatagcagggcatgaaaacttagagaggtacaagtggctgaaaatcgagtttttcctctgtctttaaattttatatgggctttgttatcttccactggaaaagtgtaatagcatacatcaatggtgtgttaaagctatttccttgccttttttttattggaatggtaggatatcttggctttgccacacacagttacagagtgaacactctactacatgtgactggcagtattaagtgtgcttattttaaatgttactggtagaaaggcagttcaggtatgtgtgtatatagtatgaatgcagtggggacaccctttgtggttacagtttgagacttccaaaggtcatccttaataacaacagatctgcaggggtatgttttaccatctgcatccagcctcctgctaactcctagctgactcagcatagattgtataaaatacctttgtaacggctcttagcacactcacagatgtttgaggctttcagaagctcttctaaaaaatgatacacacctttcacaagggcaaactttttccttttccctgtgtattctagtgaatgaatctcaagattcagtagacctaatgacatttgtattttatgatcttggctgtatttaatggcataggctgacttttgcagatggaggaatttcttgattaatgttgaaaaaaaacccttgattatactctgttggacaaaccgagtgcaatgaatgatgcttttctgaaaatgaaatataacaagtgggtgaatgtggttatggccgaaaaggatatgcagtatgcttaatggtagcaactgaaagaagacatcctgagcagtgccagctttcttctgttgatgccgttccctgaacataggaaaatagaaacttgcttatcaaaacttaaaaaaaaaaaaaaaaaaaaaaaaaaaaaaaaaaaaaaaaaaaaaaaaaaaaaaaaaaaaaa

SEQ ID NO: 445 - DNA, 603 bp, Homo sapiens
atggctttcacagagcattcaccgctgacccctcaccgtcgggacctctgtagccgctctatctggctagcaaggaagattcgttcagacctgactgctcttacggaatcctatgtgaagcatcagggcctgaacaagaacatcaacctggactctgcggatgggatgccagtggcaagcactgatcagtggagtgagctgaccgaggcagagcgactccaagagaaccttcaagcttatcgtaccttccatgttttgttggccaggctcttagaagaccagcaggtgcattttaccccaaccgaaggtgacttccatcaagctatacatacccttcttctccaagtcgctgcctttgcataccagatagaggagttaatgatactcctggaatacaagatcccccgcaatgaggctgatgggatgcctattaatgttggagatggtggtctctttgagaagaagctgtggggcctaaaggtgctgcaggagctttcacagtggacagtaaggtccatccatgaccttcgtttcatttcttctcatcagactgggatcccagcacgtgggagccattatattgctaacaacaagaaaatgtag

SEQ ID NO: 446 - DNA, 1245 bp, Homo sapiens
ctcatagaacaaagaacatccaccatgcagctcttcctcctcttgtgcctggtgcttctcagccctcagggggcctcccttcaccgccaccacccccgggagatgaagaagagagtcgaggacctccatgtaggtgccacggtggcccccagcagcagaagggactttaccttcgacctctacagggtcttggcttccgctgcccccagccagaatatcttcttctcccctgtgagcatctccatgagcctggccatgctctccctgggggctgggtccagcacaaagatgcagatcctggagggcctgggcctcaacctccagaaaagctcagaggaggagctgcacagaggctttcagcagctccttcaggaactcaaccagcccagagatggcttccagctgagcctcggcaatgcccttttcaccgacctggtggtagacctgcaggacaccttcgtaagtgccatgaagacgctgtacctggcagacactttccccaccaactttagggactctgcaggggccatgaagcagatcaatgattatgtggcaaagcaaacgaagggcaagattgtggacttgcttaagaacctcgatagcaatgcggtcgtgatcatggtgaattacatcttctttaaagctaagtgggagacaagcttcaaccacaaaggcacccaagagcaagacttctacgtgacctcggagactgtggtgcgggtacccatgatgagccgcgaggatcagtatcactacctcctggaccggaacctctcctgcagggtggtgggggtcccctaccaaggcaatgccacggctttgttcattctccccagtgagggaaagatgcagcaggtggagaatggactgagtgagaaaacgctgaggaagtggcttaagatgttcaaaaagaggcagctcgagctttaccttcccaaattctccattgagggctcctatcagctggagaaagtcctccccagtctggggatcagtaacgtcttcacctcccatgctgatctgtccggcatcagcaaccactcaaatatccaggtgtctgagatggtgcacaaagctgtggtggaggtggacgagtcgggaaccagagcagcggcagccacggggacaatattcactttcaggtcggcccgcctgaactctcagaggctagtgttcaacaggccctttctgatgttcattgtggataacaacatcctcttccttggcaaagtgaaccgcccctga

SEQ ID NO: 447 - DNA, 1270 bp, Homo sapiens
caggggacaggctgcagccggtgcagttacacgttttcctccaaggagcctcggacgttgtcacgggtttggggtcggggacagagcagtgaccatggccaggctggcgttgtctcctgtgcccagccactggatggtggcgttgctgctgctgctctcagctgagccagtaccagcagccagatcggaggaccggtaccggaatcccaaaggtagtgcttgttcgcggatctggcagagcccacgtttcatagccaggaaacggggcttcacggtgaaaatgcactgctacatgaacagcgcctccggcaatgtgagctggctctggaagcaggagatggacgagaatccccagcagctgaagctggaaaagggccgcatggaagagtcccagaacgaatctctcgccaccctcaccatccaaggcatccggtttgaggacaatggcatctacttctgtcagcagaagtgcaacaacacctcggaggtctaccagggctgcggcacagagctgcgagtcatgggattcagcaccttggcacagctgaagcagaggaacacgctgaaggatggtatcatcatgatccagacgctgctgatcatcctcttcatcatcgtgcctatcttcctgctgctggacaaggatgacagcaaggctggcatggaggaagatcacacctacgagggcctggacattgaccagacagccacctatgaggacatagtgacgctgcggacaggggaagtgaagtggtctgtaggtgagcacccaggccaggagtgagagccaggtcgccccatgacctgggtgcaggctccctggcctcagtgactgcttcggagctgcctggctcatggcccaacccctttcctggaccccccagctggcctctgaagctggcccaccagagctgccatttgtctccagcccctggtccccagctcttgccaaagggcctggagtagaaggacaacagggcagcaacttggagggagttctctggggatggacgggacccagccttctgggggtgctatgaggtgatccgtccccacacatgggatgggggaggcagagactggtccagagcccgcaaatggactcggagccgagggcctcccagcagagcttgggaagggccatggacccaactgggccccagaagagccacaggaacatcattcctctcccgcaaccactcccaccccagggaggccctggcctccagtgccttcccccgtggaataaacggtgtgtcctgagaaacca

SEQ ID NO: 448 - DNA, 5075 bp, Homo sapiens
tgaattcggcacgaggtgggctctctcttttcccctcttgctcctttcttttctttttttctgtttttttaaaccttccaaggcaagttcatggatactaagctgatgtgtttgttgttctttttctccctgcctccgctcctagtgagtaaccacactggccgcatcaaggtggtctttactccgagcatctgtaaagtgacctgcaccaagggcagctgtcagaacagctgtgagaaggggaacaccaccactctcattagtgagaatggtcatgctgccgacaccctgacggccacgaacttccgagtggtaatttgccatcttccatgtatgaatggtggccagtgcagttcaagggacaaatgtcagtgccctccaaatttcacaggaaaactttgtcagatcccagtccatggtgccagcgtgcctaaactttatcagcattcccagcagccaggcaaggcgttggggacgcatgtcatccattcaacacataccttgcctctgaccgtgactagccagcaaggagtcaaagtgaaatttcctcctaacatagtcaatatccatgtgaaacatcctcctgaagcttccgtccagatacatcaggtttcaagaattgatggcccaacaggccagaagacaaaagaagctcaaccaggccaatcccaagtctcgtaccaagggcttcctgtccagaagacccagaccatacattccacatactcccaccagcaggtcattcctcacgtctaccccgtggctgctaagacacagcttggccggtgcttccaggaaaccattgggtcacagtgtggcaaagcgctccctggcctttcaaagcaagaggactgctgtggaactgtgggtacctcctggggctttaacaaatgccagaaatgccccaagaaaccatcttatcatggatacaaccaaatgatggaatgcctaccgggttataagcgggttaacaacaccttttgccaagatattaatgaatgtcagctacaaggtgtatgccctaatggtgagtgtttgaataccatgggcagctatcgatgtacctgcaaaataggatttgggccggatcctaccttttcaagttgtgttcctgatccccctgtgatctcggaagagaaagggccctgttaccgacttgtcagttctggaagacagtgtatgtaccctctgtctgttcacctcaccaagcagctctgctgttgtagtgtgggcaaggctgggccacactgtgagaaatgtccccttccaggcacagctgcttttaaggaaatctgtcctggtggaatgggttatacggtttctggcgttcatagacgcaggccaatccatcaccatgtaggtaaaggacctgtatttgtcaagccaaagaacactcaacctgttgctaaaagtactcatcctccacctctcccagccaaggaagagccagtggaggccctgaccttctcccgggaacacggggccaggagtgcggagccagaagtggcaactgcaccccctgaaaaggaaataccttcattggatcaagagaaaaccaaacttgagcctggtcaaccccagctgtctccaggcatttccgctattcatctgcatccacagtttccagtagtgattgaaaaaacatcacctcctgtgcctgttgaagtagctcctgaagcttctacgtctagtgccagccaagtgattgctcctactcaagtgacagaaatcaatgaatgtactgtgaaccctgatatctgtggagcaggacactgcattaacctaccagtgagatatacctgtatatgctacgagggctacaggttcagtgaacaacagaggaaatgtgtggatattgatgagtgtactcaggtccaacacctctgctcccagggccgctgtgaaaacaccgagggaagtttcttgtgcatttgcccagcaggatttatggccagtgaggagggtactaactgcatagatgttgacgaatgcctgaggccggacgtctgtggggaggggcactgtgtcaatactgtgggggccttccggtgtgaatactgtgacagcgggtaccgcatgactcagagaggccgttgtgaggatattgatgaatgtttgaatccaagcacttgtccagatgagcagtgtgtgaattctcctggatcttaccagtgcgttccctgcacagaaggattccgaggctggaatggacagtgccttgatgtggacgagtgcctggaaccaaacgtctgcgcaaatggtgattgttccaaccttgaaggctcctacatgtgttcatgccacaaaggctatacccggactccggaccacaagcactgtagagatattgatgaatgtcagcaagggaatctatgtgtaaacgggcagtgcaaaaataccgagggctccttcaggtgcacctgtggacaggggtaccagctgtcggcagctaaagaccagtgtgaagacattgatgaatgccagcaccgtcatctctgtgctcatgggcagtgcaggaacactgagggctcttttcaatgtgtgtgtgaccagggttacagagcatctgggcttggagaccactgtgaagatatcaatgaatgcttggaggacaagagtgtttgccagagaggagactgcattaatactgcagggtcctatgattgtacttgtccggatggatttcagctagatgacaataaaacatgtcaagatattaatgaatgtgaacatccagggctctgtggtccgcaaggggagtgcctaaacacagagggttctttccattgtgtctgccagcagggtttctcaatctctgcagatggccgtacgtgtgaagatattgatgaatgtgtaaacaacactgtttgtgacagtcacgggttttgtgacaatacagctggctccttccgctgcctctgttatcagggctttcaagccccacaggatgggcaagggtgtgtggatgtgaatgaatgtgaactgctcagtggggtgtgtggtgaagccttctgtgaaaacgtggaagggtccttcctgtgcgtgtgtgctgatgaaaaccaagagtacagccccatgactgggcagtgccgctcccggacctccacagatttagatgtagatgtagatcaacccaaagaagaaaagaaagaatgctactataatctcaatgacgccagtctctgtgataatgtgttggcccccaatgtcacgaaacaagaatgctgctgtacatcaggcgcgggatggggagataactgcgaaatcttcccctgcccggtcttgggaactgctgagttcactgaaatgtgtcccaaagggaaaggttttgtgcctgctggagaatcatcttctgaagctggtggtgagaactataaagatgcagatgaatgcctactttttggacaagaaatctgcaaaaatggtttctgtttgaacactcggcctgggtatgaatgctactgtaagcaagggacgtactatgatcctgtgaaactgcagtgctttgatatggatgaatgtcaagaccccagtagttgtattgatggccagtgtgttaatacagagggctcttacaactgcttctgtactcaccccatggtcctggatgcgtcagaaaaaagatgtatacgaccggctgagtcaaacgaacaaatagaagaaactgatgtctaccaagatttgtgctgggaacatctgagtgatgaatacgtgtgtagccggcctcttgtgggcaagcagacaacgtacactgagtgctgctgtctgtatggagaggcctggggcatgcagtgtgccctctgccccctgaaggattcagatgactatgctcagctgtgtaacatccccgtgacgggacgccggcagccatatggacgggacgccttggttgacttcagtgaacagtatactccagaagccgatccctacttcatccaagaccgttttctaaatagctttgaggagttacaggctgaggaatgcggcatcctcaatggatgtgaaaatggtcgctgtgtgagggtccaggaaggttacacctgcgattgcttggatgggtatcacttggatactgccaagatgacctgtttcgatgtaaatgaatgcgatgagttgaacaaccggatgtctctctgcaagaatgccaagtgcattaacaccgatggttcctacaagtgtttgtgtctgccaggctacgtgccttctgacaagccaaactactgcactccgttgaataccgccttgaatttagagaaagacagtgacctggagtgaaacagaatctacataacctaagcccatatactctgcactgtgtaaaggaaaagggagaaatgtattatacttgagacattgcacctaccccggaaggctggaaatacagaaacagcatggagttgcaagtcctctgaagacaatgagaggatttaggatgagcccgataggtgtggcagaccaaatggacatttctctaaaaaaccagtatatatagtctgttcatatgtaaaattcaatggaagagaggtggaacagtgctgttattttaaacagaaggttgtattattatgttgttttgttttttttactattgcttgattaaatttggcatttaaatagtggtggaaatatttttatataattttcattttttggttgtgcagttccttggctactgtttttcttttacttcagttttttaaaaatctcaaatgaaaaagtcttcgatacaatattgttaagctgtattataagtattgttacacagggttatgcaattcccggcctggagcatttttgaaattcaaattgtctgtcctgtggagcaggcagtgattttgttccaaaactttgtatacacatttggagaaaagtactttatattttcagtgttttgtctgattttaatgtccgttcttagccaagctgctagcaggtgttaattggatccctttccttcactgaaatggaagagtttataagcttacgttagtattgtaatatgtaaagtaagcccaacaaaaatttttaaaaatttgatgatccccaatatatctaccattgtatgttaaataaat

SEQ ID NO: 449 - DNA, 1026 bp, Homo sapiens
cagcatgttgagccgggcagtgtgcggcaccagcaggcagctgcctccggttttggggtatctgggctccaggcagaagcacagcctccccgacctgccctacgactacggcgccctggaacctcacatcaacgcgcagatcatgcagctgcaccacagcaagcaccacgcggcctacgtgaacaacctgaacgtcaccgaggagaagtaccaggaggcgttggccaagggagatgttacagcccagatagctcttcagcctgcactgaagttcaatggtggtggtcatatcaatcatagcattttctggacaaacctcagccctaacggtggtggagaacccaaaggggagttgctggaagccatcaaactggactttggttcctttgacaagtttaaggagaagctgacggctgcatctgttggtgtccaaggctcaggttggggttggcttggtttcaataaggaacggggacacttacaaattgctgcttgtccaaatcaggatccactgcaaggaacaacaggccttattccactgctggggattgatgtgtgggagcacgcttactaccttcagtataaaaatgtcaggcctgattatctaaaagctatttggaatgtaatcaactgggagaatgtaactgaaagatacatggcttgcaaaaagtaaaccacgatcgttatgctgagtatgttaagctctttatgactgtttttgtagtggtatagagtactgcagaatacagtaagctgctctattgtagcatttcttgatgttgcttagtcacttatttcataaacaacttaatgttctgaataatttcttactaaacattttgttattgggcaagtgattgaaaatagtaaatgctttgtgtgattgaatctgattggacattttcttcagagagctaaattacaattgtcatttataaaaccatcaaaaatattccatccatatactttggggacttgtagggatgcctttctagtcctattctattgcagttatagaaaatctag

SEQ ID NO: 450 - DNA, 2022 bp, Homo sapiens
caatcatggatcaatagctatgtttggagaaggaatttgtggctgctccagctactgggcattttgtctggtccagttcatgtaatctcccaacaccccatgaagcaaggctttgttaatcctattttactgaaaatgaactaagactcagagagataaagctgttgcccaatgagccttctttctgccctccagatccacggtgctaattccccttccgatgacctaatgattctgagcttggcaaaggtcttatctcccagctcgcccaggcccagtgttccaggaatgtgacctttgctgcagcagccgctggagggggcagaggggatgggctggaggttgagcaaacagagcagcagaaaaggcagttcctcttctccagtgccctccttccctgtctctgcctctccctcccttcctcaggcatcagagcggagacttcagggagaccagagcccagcttgccaggcactgagctagaagccctgccatggcacccctgagaccccttctcatactggccctgctggcatgggttgctctggctgaccaagagtcatgcaagggccgctgcactgagggcttcaacgtggacaagaagtgccagtgtgacgagctctgctcttactaccagagctgctgcacagactatacggctgagtgcaagccccaagtgactcgcggggatgtgttcactatgccggaggatgagtacacggtctatgacgatggcgaggagaaaaacaatgccactgtccatgaacaggtggggggcccctccctgacctctgacctccaggcccagtccaaagggaatcctgagcagacacctgttctgaaacctgaggaagaggcccctgcgcctgaggtgggcgcctctaagcctgaggggatagactcaaggcctgagacccttcatccagggagacctcagcccccagcagaggaggagctgtgcagtgggaagcccttcgacgccttcaccgacctcaagaacggttccctctttgccttccgagggcagtactgctatgaactggacgaaaaggcagtgaggcctgggtaccccaagctcatccgagatgtctggggcatcgagggccccatcgatgccgccttcacccgcatcaactgtcaggggaagacctacctcttcaagggtagtcagtactggcgctttgaggatggtgtcctggaccctgattacccccgaaatatctctgacggcttcgatggcatcccggacaacgtggatgcagccttggccctccctgcccatagctacagtggccgggagcgggtctacttcttcaaggggaaacagtactgggagtaccagttccagcaccagcccagtcaggaggagtgtgaaggcagctccctgtcggctgtgtttgaacactttgccatgatgcagcgggacagctgggaggacatcttcgagcttctcttctggggcagaacctctgctggtaccagacagccccagttcattagccgggactggcacggtgtgccagggcaagtggacgcagccatggctggccgcatctacatctcaggcatggcaccccgcccctccttggccaagaaacaaaggtttaggcatcgcaaccgcaaaggctaccgttcacaacgaggccacagccgtggccgcaaccagaactcccgccggccatcccgcgccatgtggctgtccttgttctccagtgaggagagcaacttgggagccaacaactatgatgactacaggatggactggcttgtgcctgccacctgtgaacccatccagagtgtcttcttcttctctggagacaagtactaccgagtcaatcttcgcacacggcgagtggacactgtggaccctccctacccacgctccatcgctcagtactggctgggctgcccagctcctggccatctgtaggagtcagagcccacatggccgggccctctgtagctccctcctcccatctccttcccccagcccaataaaggtcccttagccccgagtttaaa

SEQ ID NO: 451 - DNA, 716 bp, Homo sapiens
ttctttctttgctgcgtctactgcgagaatgaagactattctcagcaatcagactgtcgacattccagaaaatgtcgacattactctgaagggacgcacagttatcgtgaagggccccagaggaaccctgcggagggacttcaatcacatcaatgtagaactcagccttcttggaaagaaaaaaaagaggctccgggttgacaaatggtggggtaacagaaaggaactggctaccgttcggactatttgtagtcatgtacagaacatgatcaagggtgttacactgggcttccgttacaagatgaggtctgtgtatgctcacttccccatcaacgttgttatccaggagaatgggtctcttgttgaaatccgaaatttcttgggtgaaaaatacatccgcagggttcggatgagaccaggtgttgcttgttcagtatctcaagcccagaaagatgaattaatccttgaaggaaatgacattgagcttgtttcaaattcagcggctttgattcagcaagccacaacagttaaaaacaaggatatcaggaaatttttggatggtatctatgtctctgaaaaaggaactgttcagcaggctgatgaataagatctaagagttacctggctacagaaagaagatgccagatgacacttaagacctacttgtgatatttaaatgatgcaataaaagacctattgatttggaccttcttctt

SEQ ID NO: 452 - DNA, 1415 bp, Homo sapiens
gggcgctgagaggcgagcgtgagcccagcgacaggagagtgagctcaccacgcgcagcgccatgaccagcaagggtcccgaggaggagcacccatcggtgacgctcttccgccagtacctgcgtatccgcactgtccagcccaagcctgactatggagctgctgtggctttctttgaggagacagcccgccagctgggcctgggctgtcagaaagtagaggtggcacctggctatgtggtgaccgtgttgacctggccaggcaccaaccctacactctcctccatcttgctcaactcccacacggatgtggtgcctgtcttcaaggaacattggagtcacgacccctttgaggccttcaaggattctgagggctacatctatgccaggggtgcccaggacatgaagtgcgtcagcatccagtacctggaagctgtgaggaggctgaaggtggagggccaccggttccccagaaccatccacatgacctttgtgcctgatgaggaggttgggggtcaccaaggcatggagctgttcgtgcagcggcctgagttccacgccctgagggcaggctttgccctggatgagggcatagccaatcccactgatgccttcactgtcttttatagtgagcggagtccctggtgggtgcgggttaccagcactgggaggccaggccatgcctcacgcttcatggaggacacagcagcagagaagctgcacaaggttgtaaactccatcctggcattccgggagaaggaatggcagaggctgcagtcaaacccccacctgaaagaggggtccgtgacctccgtgaacctgactaagctagagggtggcgtggcctataacgtgatacctgccaccatgagcgccagctttgacttccgtgtggcaccggatgtggacttcaaggcttttgaggagcagctgcagagctggtgccaggcagctggcgagggggtcaccctagagtttgctcagaagtggatgcacccccaagtgacacctactgatgactcaaacccttggtgggcagcttttagccgggtctgcaaggatatgaacctcactctggagcctgagatcatgcctgctgccactgacaaccgctatatccgcgcggtgggggtcccagctctaggcttctcacccatgaaccgcacacctgtgctgctgcacgaccacgatgaacggctgcatgaggctgtgttcctccgtggggtggacatatatacacgcctgctgcctgcccttgccagtgtgcctgccctgcccagtgacagctgagccctggaactcctaaacctttgcccctggggcttccatcccaaccagtgccaaggacctcctcttcccccttccaaataataaagtctatggacagggctgtctctgaagtactaacacaaggaca

SEQ ID NO: 453 - DNA, 1399 bp, Homo sapiens
agtgtgaaatcttcagagaagaatttctctttagttctttgcaagaaggtagagataaagacactttttcaaaaatggcaatggtatcagaattcctcaagcaggcctggtttattgaaaatgaagagcaggaatatgttcaaactgtgaagtcatccaaaggtggtcccggatcagcggtgagcccctatcctaccttcaatccatcctcggatgtcgctgccttgcataaggccataatggttaaaggtgtggatgaagcaaccatcattgacattctaactaagcgaaacaatgcacagcgtcaacagatcaaagcagcatatctccaggaaacaggaaagcccctggatgaaacacttaagaaagcccttacaggtcaccttgaggaggttgttttagctctgctaaaaactccagcgcaatttgatgctgatgaacttcgtgctgccatgaagggccttggaactgatgaagatactctaattgagattttggcatcaagaactaacaaagaaatcagagacattaacagggtctacagagaggaactgaagagagatctggccaaagacataacctcagacacatctggagattttcggaacgctttgctttctcttgctaagggtgaccgatctgaggactttggtgtgaatgaagacttggctgattcagatgccagggccttgtatgaagcaggagaaaggagaaaggggacagacgtaaacgtgttcaataccatccttaccaccagaagctatccacaacttcgcagagtgtttcagaaatacaccaagtacagtaagcatgacatgaacaaagttctggacctggagttgaaaggtgacattgagaaatgcctcacagctatcgtgaagtgcgccacaagcaaaccagctttctttgcagagaagcttcatcaagccatgaaaggtgttggaactcgccataaggcattgatcaggattatggtttcccgttctgaaattgacatgaatgatatcaaagcattctatcagaagatgtatggtatctccctttgccaagccatcctggatgaaaccaaaggagattatgagaaaatcctggtggctctttgtggaggaaactaaacattcccttgatggtctcaagctatgatcagaagactttaattatatattttcatcctataagcttaaataggaaagtttcttcaacaggattacagtgtagctacctacatgctgaaaaatatagcctttaaatcatttttatattataactctgtataatagagataagtccattttttaaaaatgttttccccaaaccataaaaccctatacaagttgttctagtaacaatacatgagaaagatgtctatgtagctgaaaataaaatgacgtcacaagac

SEQ ID NO: 454 - DNA, 2598 bp, Homo sapiens
atggggaagggggttggacgtgataagtatgagcctgctgctgtttcagaacaaggtgataaaaagggcaaaaagggcaaaaaagacagggacatggatgaactgaagaaagaagtttctatggatgatcataaacttagccttgatgaacttcatcgtaaatatggaacagacttgagccggggattaacatctgctcgtgcagctgagatcctggcgcgagatggtcccaacgccctcactccccctcccactactcctgaatggatcaagttttgtcggcagctctttggggggttctcaatgttactgtggattggagcgattctttgtttcttggcttatagcatccaagctgctacagaagaggaacctcaaaacgataatctgtacctgggtgtggtgctatcagccgttgtaatcataactggttgcttctcctactatcaagaagctaaaagttcaaagatcatggaatccttcaaaaacatggtccctcagcaagcccttgtgattcgaaatggtgagaaaatgagcataaatgcggaggaagttgtggttggggatctggtggaagtaaaaggaggagaccgaattcctgctgacctcagaatcatatctgcaaatggctgcaaggtggataactcctcgctcactggtgaatcagaaccccagactaggtctccagatttcacaaatgaaaaccccctggagacgaggaacattgccttcttttcaaccaattgtgttgaaggcaccgcacgtggtattgttgtctacactggggatcgcactgtgatgggaagaattgccacacttgcttctgggctggaaggaggccagacccccattgctgcagaaattgaacattttatccacatcatcacgggtgtggctgtgttcctgggtgtgtctttcttcatcctttctctcatccttgagtacacctggcttgaggctgtcatcttcctcatcggtatcatcgtagccaatgtgccggaaggtttgctggccactgtcacggtctgtctgacacttactgccaaacgcatggcaaggaaaaactgcttagtgaagaacttagaagctgtggagaccttggggtccacgtccaccatctgctctgataaaactggaactctgactcagaaccggatgacagtggcccacatgtggtttgacaatcaaatccatgaagctgatacgacagagaatcagagtggtgtctcttttgacaagacttcagctacctggcttgctctgtccagaattgcaggtctttgtaacagggcagtgtttcaggctaaccaggaaaacctacctattcttaagcgggcagttgcaggagatgcctctgagtcagcactcttaaagtgcatagagctgtgctgtggttccgtgaaggagatgagagaaagatacgccaaaatcgtcgagatacccttcaactccaccaacaagtaccagttgtctattcataagaaccccaacacatcggagccccaacacctgttggtgatgaagggcgccccagaaaggatcctagaccgttgcagctctatcctcctccacggcaaggagcagcccctggatgaggagctgaaagacgcctttcagaacgcctatttggagctggggggcctcggagaacgagtcctaggtttctgccacctctttctgccagatgaacagtttcctgaagggttccagtttgacactgacgatgtgaatttccctatcgataatctgtgctttgttgggctcatctccatgattgaccctccacgggcggccgttcctgatgccgtgggcaaatgtcgaagtgctggaattaaggtcatcatggtcacaggagaccatccaatcacagctaaagctattgccaaaggtgtgggcatcatctcagaaggcagtggacctatgagcagaggaaaatcgtggagttcacctgccacacagccttcttcgtcagtatcgtggtggtgcagtgggccgacttggtcatctgtaagaccaggaggaattcggtcttccagcaggggatgaagaacaagatcttgatatttggcctctttgaagagacagccctggctgctttcctttcctactgccctggaatgggtgttgctcttaggatgtatcccctcaaacctacctggtggttctgtgccttcccctactctcttctcatcttcgtatatgacgaagtcagaaaactcatcatcaggcgacgccctggcggctgggtggagaaggaaacctactattagccccccgtcctgcacgccgtggagcatcaggccacacactctgcatccgacacccaccccctctttgtgtacttcagtcttggagtttggaactctaccctggtaggaaagcaccgcagcatgtggggaagcaagacgtcctggaatgaagcatgtagctctatggggggaggggggagggctgcctgaaaaccatccatctgtggaaatgacagcggggaaggtttttatgtgcctttttgtttttgtaaaaaaggaacacccggaaagactgaaagaatacattttatatctggatttttacaaataaagatggctattataatgg

SEQ ID NO: 455 - DNA, 824 bp, Homo sapiens
gaattcgaatgccaccctcccagatgggggcagagagcaccgcccagcagccagtgggttcccgcgcgtgccgagactctgaggccttgcacccccacgatcccgtacgatggccgtcaagaagatcgcgatcttcggcgccactggccagaccgggctcaccaccctggcgcaggcggtgcaagcaggttacgaagtgacagtgctggtgcgggactcctccaggctgccatcagaggggccccggccggcccacgtggtagtgggagatgttctgcaggcagccgatgtggacaagaccgtggctggccaggacgctgtcatcgtgctgctgggcacccgcaatgacctcagtcccacgacagttatgtccgagggcgcccggaacattgtggcagccatgaaggctcatggtgtggacaaggtcgtggcctgcacctcggctttcctgctctgggaccctaccaaggtgcccccacgactgcaggctgtgactgatgaccacatccggatgcacaaggtgctgcgggaatcaggcctgaagtacgtggctgtgatgccgccacacataggagaccagccactaactggggcgtacacagtgaccctggatggacgagggccctcaagggtcatctccaaacatgacctgggccatttcatgctgcgctgcctcaccaccgatgagtacgacggacacagcacctacccctcccaccagtaccagtagcactctgtccccatctgggagggtggcattctggacatgaggagcaaaggaagggggcaataaatgttgagccaagagcttcaaattactctag

SEQ ID NO: 456 - DNA, 848 bp, Homo sapiens
  misc_feature (447)..(447): n is a, c, g, or t
agcggcctggctaactcctgccaggcagtgcccttcccggagcgtgccctcgccgctgagctcccctgaacagcagctgcagcagccatggccccgccctgggtgcccgccatgggcttcacgctggcgcccagcctggggtgcttcgtgggctcccgctttgtccacggcgagggtctccgctggtacgccggcctgcagaagccctcgtggcacccgccccactgggtgctgggccctgtctggggcacgctctactcagccatggggtacggctcctacctggtctggaaagagctgggaggcttcacagagaaggctgtggttcccctgggcctctacactgggcagctggccctgaactgggcatggccccccatcttctttggtgcccgacaaatgggctgggccttggtggatctcctgctggtcagtggggcggcggcngccactaccgtggcctggtaccaggtgagcccgctggccgcccgcctgctctacccctacctggcctggctggccttcgcgaccacactcaactactgcgtatggcgggacaaccatggctggcatgggggacggcggctgccagagtgagtgcccggcccaccagggactgcagctgcaccagcaggtgccatcacgcttgtgatgtggtggccgtcacgctttcatgaccactgggcctgctagtctgtcagggccttggcccaggggtcagcagagcttcagaggttgccccacctgagcccccacccgggagcagtgtcctgtgctttctgcatgcttagagcatgttcttggaacatggaattttataagctgaataaagtttttgacttccttta

SEQ ID NO: 457 - DNA, 1509 bp, Homo sapiens
atgcgctgctcgccgggaggcgtctggctggcgctggccgcgtcgctcctgcacgtgtccctgcaaggcgagttccagaggaagctttacaaggagctggtcaagaactacaatcccttggagaggcccgtggccaatgactcgcaaccactcaccgtctacttctccctgagcctcctgcagatcatggacgtggatgagaagaaccaagttttaaccaccaacatttggctgcaaatgtcttggacagatcactatttacagtggaatgtgtcagaatatccaggggtgaagactgttcgtttcccagatggccagatttggaaaccagacattcttctctataacagtgctgatgagcgctttgacgccacattccacactaacgtgttggtgaattcttctgggcattgccagtacctgcctccaggcatattcaagagttcctgctacatcgatgtacgctggtttccctttgatgtgcagcactgcaaactgaagtttgggtcctggtcttacggaggctggtccttggatctgcagatgcaggaggcagatatcagtggctatatccccaatggagaatgggacctagtgggaatccccggcaagaggagtgaaaggttctatgagtgctgcaaagagccctaccccgatgtcaccttcacagtgaccatgcgccgcaggacgctctactatggcctcaacctgctgatcccctgtgtgctcatctccgccctcgccctgctggtgttcctgcttcctgcagattccggggagaagatttccctggggataacagtcttactctctcttaccgtcttcatgctgctcgtggctgagatcatgcccgcaacatccgattcggtaccattgatagcccagtacttcgccagcaccatgatcatcgtgggcctctcggtggtggtgacggtgatcgtgctgcagtaccaccaccacgaccccgacgggggcaagatgcccaagtggaccagagtcatccttctgaactggtgcgcgtggttcctgcgaatgaagaggcccggggaggacaaggtgcgcccggcctgccagcacaagcagcggcgctgcagcctggccagtgtggagatgagcgccgtggcgccgccgcccgccagcaacgggaacctgctgtacatcggcttccgcggcctggacggcgtgcactgtgtcccgacccccgactctggggtagtgtgtggccgcatggcctgctcccccacgcacgatgagcacctcctgcacggtgggcaaccccccgagggggacccggacttggccaagatcctggaggaggtccgctacattgccaaccgcttccgctgccaggacgaaagcgaggcggtctgcagcgagtggaagttcgccgcctgtgtggtggaccgcctgtgcctcatggccttctcggtcttcaccatcatctgcaccatcggcatcctgatgtcggctcccaacttcgtggaggccgtgtccaaagactttgcgtaa

SEQ ID NO: 458 - DNA, 3002 bp, Homo sapiens
gccattctctcacatcccgtgcggtcaggaagcccttcctgaactctgacttcagttcttgctgcggtttctgcccatttttttcatatcctctgacagctgcgaggtcatctctgctctggcttttctccaagcagaacaagtgggggctctggaaaggttaagggacctcagtggccaccattatactttgcatctttcctgagaagtgagagttgaaagggaagcaggaaggcccatggtcagattgaaggaaggactttttagtttcttttttttttttttgaaatggagtctcgctctgtcattcaggctggagtgcagtggtgcgatctcagctcactgcagcctccacttcctgggttcacatgattctcctgcctcagcctcccaagtagctgagactacaggcacatgccactacacccagctaacttttgtatttttagtagagacggggtttcaccatgttggccaggctggtctcaaactgctaacatcaagtgatctgctcccctcagcctcccaaagtgctgggattaccggtatgaaccaccacaacctgccaggaatttttagtttttagcttttgcaggagacttcaaggaaaggagacattcctctgtccaggaaacgggtaaggggaccatttctgcattgctggtttcccctcttggcagggtgggcatgaggcatcactgttcctgctccctcactcctgctcctcatgctcagcctgccagctcggcctcaactttgtgtgtctaaagtggaactgaatagtagctgtgagaagataggaaagaggtagtgccaatctccttgcccagatcataaatccagactcagcagggtaaccacatgggcaagcacaaggtaggtgcttggggaaaggggaagtaattggcattctgtgtgataccaaggagaccatttggattttggcttctaccaaagagaatggagaattggttgacctaaatggaaccagtccctttaagtaaggggaggaaagggggtgctggaagatggccctcttcccaccacctagatcatagcttgaactgaagccaaggacagagtgctgcccccttcggcatttactgatgtgccctctttaaatcatgatgttatctaacccaaacccagacccaggacctagtcacagctccaacctacacttcctattaatcttaaaacaaagcgaaacaaacacaaaaagatatcagcattgtagcctccaatctgagcccatttcccttctctggctaccatacctccttctcctatatgataccattcactactttgttcaattatccagtctagacctgcatcttgaggccacacccagccttctcactccccacacccctctttcctctctcactgctccttcctggtctcttctcatctggccccacctctaaggagtcctcctgccttctgggttgccctggaaaacagactatcccccctcctagtgaagggagtgggtaggggtttcagccccaccctcaggaagatgcgtcttccctgtcctctgctctgtggtacttcctctctggctgatttagcaaacagcacctagacctggggccaggcctttggcagtgggacagatccagggataggctacaccaccctgccctgaccctgggattggcatcagcttccaaccagttcctgccaaagcttgtaagtcctcccgacggccatgaacactacatcttctgcagcacccccctcactaggtgtagagttcatctctctgctggctatcatcctgctgtcagtggcgctggctgtggggcttcccggcaacagctttgtggtgtggagtatcctgaaaaggatgcagaagcgctctgtcactgccctgatggtgctgaacctggccctggccgacctggccgtattgctcactgctccctttttccttcacttcctggcccaaggcacctggagttttggactggctggttgccgcctgtgtcactatgtctgcggagtcagcatgtacgccagcgtcctgcttatcacggccatgagtctagaccgctcactggcggtggcccgcccctttgtgtcccagaagctacgcaccaaggcgatggcccggcgggtgctggcaggcatctgggtgttgtcctttctgctggccacacccgtcctcgcgtaccgcacagtagtgccctggaaaacgaacatgagcctgtgcttcccgcggtaccccagcgaagggcaccgggccttccatctaatcttcgaggctgtcacgggcttcctgctgcccttcctggctgtggtggccagctactcggacatagggcgtcggctacaggcccggcgcttccgccgcagccgccgcaccggccgcctggtggtgctcatcatcctgaccttcgccgccttctggctgccctaccacgtggtgaacctggctgaggcgggccgcgcgctggccggccaggccgccgggttagggctcgtggggaagcggctgagcctggcccgcaacgtgctcatcgcactcgccttcctgagcagcagcgtgaaccccgtgctgtacgcgtgcgccggcggcggcctgctgcgctcggcgggcgtgggcttcgtcgccaagctgctggagggcacgggttccgaggcgtccagcacgcgccgcgggggcagcctgggccagaccgctaggagcggccccgccgctctggagcccggcccttccgagagcctcactgcctccagccctctcaagttaaacgaactgaactaggcctggtggaaggaggcgcactttcctcctggcagaatgctagctctgagccagttcagtacctggaggaggagcaggggcgtggagggcgtggagggcgtgggagcgtgggaggcgggagtggagtggaagaagagggagagatggagcaaagtgagggccgagtgagagcgtgctccagcctggctcccacaggcagctttaaccattaaaactgaagtctgaa

SEQ ID NO: 459 - DNA, 4020 bp, Homo sapiens
gccgagcaccgcgcaccgcgtcatgggggccgcctcgggccgccgggggccggggctgctgctgccgctgccgctgctgttgctgctgccgccgcagcccgccctggcgttggaccccgggctgcagcccggcaacttttctgctgacgaggccggggcgcagctcttcgcgcagagctacaactccagcgccgaacaggtgctgttccagagcgtggccgccagctgggcgcacgacaccaacatcaccgcggagaatgcaaggcgccaggaggaagcagccctgctcagccaggagtttgcggaggcctggggccagaaggccaaggagctgtatgaaccgatctggcagaacttcacggacccgcagctgcgcaggatcatcggagctgtgcgaaccctgggctctgccaacctgcccctggctaagcggcagcagtacaacgccctgctaagcaacatgagcaggatctactccaccgccaaggtctgcctccccaacaagactgccacctgctggtccctggacccagatctcaccaacatcctggcttcctcgcgaagctacgccatgctcctgtttgcctgggagggctggcacaacgctgcgggcatcccgctgaaaccgctgtacgaggatttcactgccctcagcaatgaagcctacaagcaggacggcttcacagacacgggggcctactggcgctcctggtacaactcccccaccttcgaggacgatctggaacacctctaccaacagctagagcccctctacctgaacctccatgccttcgtccgccgcgcactgcatcgccgatacggagacagatacatcaacctcaggggacccatccctgctcatctgctgggagacatgtgggcccagagctgggaaaacatctacgacatggtggtgcctttcccagacaagcccaacctcgatgtcaccagtactatgctgcagcagggctggaacgccacgcacatgttccgggtggcagaggagttcttcacctccctggagctctcccccatgcctcccgagttctgggaagggtcgatgctggagaagccggccgacgggcgggaagtggtgtgccacgcctcggcttgggacttctacaacaggaaagacttcaggatcaagcagtgcacacgggtcacgatggaccagctctccacagtgcaccatgagatgggccatatacagtactacctgcagtacaaggatctgcccgtctccctgcgtcggggggccaaccccggcttccatgaggccattggggacgtgctggcgctctcggtctccactcctgaacatctgcacaaaatcggcctgctggaccgtgtcaccaatgacacggaaagtgacatcaattacttgctaaaaatggcactggaaaaaattgccttcctgccctttggctacttggtggaccagtggcgctggggggtctttagtgggcgtacccccccttcccgctacaacttcgactggtggtatcttcgaaccaagtatcaggggatctgtcctcctgttacccgaaacgaaacccactttgatgctggagctaagtttcatgttccaaatgtgacaccatacatcaggtactttgtgagttttgtcctgcagttccagttccatgaagccctgtgcaaggaggcaggctatgagggcccactgcaccagtgtgacatctaccggtccaccaaggcaggggccaagctccggaaggtgctgcaggctggctcctccaggccctggcaggaggtgctgaaggacatggtcggcttagatgccctggatgcccagccgctgctcaagtacttccagccagtcacccagtggctgcaggagcagaaccagcagaacggcgaggtcctgggctggcccgagtaccagtggcacccgccgttgcctgacaactacccggagggcatagacctggtgactgatgaggctgaggccagcaagtttgtggaggaatatgaccggacatcccaggtggtgtggaacgagtatgccgaggccaactggaactacaacaccaacatcaccacagagaccagcaagattctgctgcagaagaacatgcaaatagccaaccacaccctgaagtacggcacccaggccaggaagtttgatgtgaaccagttgcagaacaccactatcaagcggatcataaagaaggttcaggacctagaacgggcagcgctgcctgcccaggagctggaggagtacaacaagatcctgttggatatggaaaccacctacagcgtggccactgtgtgccacccgaatggcagctgcctgcagctcgagccagatctgacgaatgtgatggccacatcccggaaatatgaagacctgttatgggcatgggagggctggcgagacaaggcggggagagccatcctccagttttacccgaaatacgtggaactcatcaaccaggctgcccggctcaatggctatgtagatgcaggggactcgtggaggtctatgtacgagacaccatccctggagcaagacctggagcggctcttccaggagctgcagccactctacctcaacctgcatgcctacgtgcgccgggccctgcaccgtcactacggggcccagcacatcaacctggaggggcccattcctgctcacctgctggggaacatgtgggcgcagacctggtccaacatctatgacttggtggtgcccttcccttcagccccctcgatggacaccacagaggctatgctaaagcagggctggacgcccaggaggatgtttaaggaggctgatgatttcttcacctccctggggctgctgcccgtgcctcctgagttctggaacaagtcgatgctggagaagccaaccgacgggcgggaggtggtctgccacgcctcggcctgggacttctacaacggcaaggacttccggatcaagcagtgcaccaccgtgaacttggaggacctggtggtggcccaccacgaaatgggccacatccagtatttcatgcagtacaaagacttacctgtggccttgagggagggtgccaaccccggcttccatgaggccattggggacgtgctagccctctcagtgtctacgcccaagcacctgcacagtctcaacctgctgagcagtgagggtggcagcgacgagcatgacatcaactttctgatgaagatggcccttgacaagatcgcctttatccccttcagctacctcgtcgatcagtggcgctggagggtatttgatggaagcatcaccaaggagaactataaccaggagtggtggagcctcaggctgaagtaccagggcctctgccccccagtgcccaggactcaaggtgactttgacccaggggccaagttccacattccttctagcgtgccttacatcaggtactttgtcagcttcatcatccagttccagttccacgaggcactgtgccaggcagctggccacacgggccccctgcacaagtgtgacatctaccagtccaaggaggccgggcagcgcctggcgaccgccatgaagctgggcttcagtaggccgtggccggaagccatgcagctgatcacgggccagcccaacatgagcgcctcggccatgttgagctacttcaagccgctgctggactggctccgcacggagaacgagctgcatggggagaagctgggctggccgcagtacaactggacgccgaactccgctcgctcagaagggcccctcccagacagcggccgcgtcagcttcctgggcctggacctggatgcgcagcaggcccgcgtgggccagtggctgctgctcttcctgggcatcgccctgctggtagccaccctgggcctcagccagcggctcttcagcatccgccaccgcagcctccaccggcactcccacgggccccagttcggctccgaggtggagctgagacactcctgaggtgacccggctgggtcggccctgcccaagggcctcccaccagagactgggatgggaacactggtgggcagctgagg

SEQ ID NO: 460 - DNA, 6429 bp, Homo sapiens
gcctgcagagagaggcactttgcaccacagacagatagcaagaagggaaagacagagagtgagaaaaaagaggagtcagtcgctcctggggaagggagagagtgagactgggagaaagagaagcacagaaagtgtgtgtaaaacggagtaaagaaagaaaaaaaaaaaactacccttaaagcacatttaaaaaaaaaaaactctggcaattcaagaaagaaacaggctacgtttaaagagcatagagacaatgaaaggctaaagaaaattttaaaatctctgccacagtctcataggtgcttggaaatgaaagtagaactgcctgtctttaacggactctgacagagagggtgaaggggaaccagagcgcacaagggaactgactcaggaggcagagaagatgggcatcctcagcgtagacttgctgatcacactgcaaattctgccagtttttttctccaactgcctcttcctggctctctatgactcggtcattctgctcaagcacgtggtgctgctgttgagccgctccaagtccactcgcggagagtggcggcgcatgctgacctcagagggactgcgctgcgtctggaagagcttcctcctcgatgcctacaaacaggtgaaattgggtgaggatgcccccaattccagtgtggtgcatgtctccagtacagaaggaggtgacaacagtggcaatggtacccaggagaagatagctgagggagccacatgccaccttcttgactttgccagccctgagcgcccactagtggtcaactttggctcagccacttgacctcctttcacgagccagctgccagccttccgcaaactggtggaagagttctcctcagtggctgacttcctgctggtctacattgatgaggctcatccatcagatggctgggcgataccgggggactcctctttgtcttttgaggtgaagaagcaccagaaccaggaagatcgatgtgcagcagcccagcagcttctggagcgtttctccttgccgccccagtgccgagttgtggctgaccgcatggacaataacgccaacatagcttacggggtagcctttgaacgtgtgtgcattgtgcagagacagaaaattgcttatctgggaggaaagggccccttctcctacaaccttcaagaagtccggcattggctggagaagaatttcagcaagagatgaaagaaaactagattagctggttaaaggtatgattataagagagcttattgttttaaaaagttatataaaggcaaggaaattaagaactgaatccatatttcaacagagccctattggcttactgaaagacaggagtttatctatcggaagaacatgaatctctaacagctccatacttctttcactactcaaatggcattgggctgagtaagtaaccatatcacctctcttcttagtaaaaagccctatgtgaaaagatcccaagatggagaggaagaaacgctaattcagcatgtgttcattctgcattgagaaggaactgatacatctgatgcatgctttgagaccagaagaaaagacttacctgaataattactacattagggaagctactgtctacgttaagataaagggtattgccttggctctatttggcatggatggagcccagttggaaaattcccaaatattacaacaagtccttgaacccaggccatgtggttagacgttggtgttaaggttagaccttatgttagagtcatttctgatgttccagcttctagccatgtagtgctctcagtcttcataccccagaaattattggtatatttgtagataccgagaatgatccctcagtctgagaggttagaatgatcatctgtaatctgagggttaatttctaggcaggtggagagagtggtaaaaaagaaatgaaattgacaagctaggaaagaggaggcagaaagatttggaaaattcacagagtttcacccttaagctgtagagagtgggtcacatttgttagccacggaaacatagaaacatacacaaggccagaaaaagaagaaggagctcaactaaaagtggcatagagaatacacatataaaaacaatatatttgtcatatgctcctagagaggagaaaggggtgattgaaagaaaaaaaaatacttaaatatttgtaattgtgaggggtttcttttggaaataattacttttgaaccatgtatgtggtatgtatattttcagtgggttaattataccccatgatacctattaaaggaaaaccagtgggtctggtggtgctggtcttttcctccccattcctacaatttctatgtggcccaagtcattcctaatcttggtctctatagcagtgttctctctgaatgctgagctgaagaaattatacgtacatacacacatacatacatacatacaaatatatgtatatatattctcagctgctgcgggaggtaggtaccatggccattcagcacagccttgatttcctcccaaagtaggtgagctatagtgaagaataggtgcaaacaaacaagcttacttccattgcaaaatagaagaagaggaagttagagataattctgatcaatcattttggaggctttgttataaggcaacccccggtatatcatggaatttccattgacatttgaatttggacttggatcttcccttggtcccattagctgaggtttagtaatctaaagtccctatagtatatgattataatgctattttaaaaaatatatatataaaatatttttttctttttaaaatagacactatagttttacccataagtaatatttaaagattatagctcccaaaagaatggaccaaccactttcgtatcataatttctttttggtaaatatgagactattatgaaatcatagtatatgattgtatttaaaggtacaatcaaaggatcttttgtccattccattaataactgaataaaaaataaataaaatggatagaaaaaaactaaagttgaaaatacattcttaaactagttgtctgaaatgagaaaagagtgagaactaggtgtgcaagaaccaaacgtattttattttattttttaaatgggagcaacatatcagtcgtgtcaccagctggtatattgtgtaaatattaaagctccattgggactgatttttcatggcaacatcagctttctaatgttctaaattctataaaaaccacccacaaagaaacaaagcaaatttcattatctaatgagttgctggaaaatcatattgagaataattatttcagattcctcagttgttaacttctacattcaagggcttatctctgcccccattgatttttaacctcaaaatggtgtgagatttactgtggaaccctaaagcagtaaaataaaaaacctggttgcagcacattcacactgttgtccttaaaattccccttttttctctatgtacgataaagtaacagtatgtcagataagccggtggggggatgagattaggctgaggcagtgctagtcaactgggggaaaaggatgatggaaaaatcacccagttgtgctatatttttaaagaaggaggtcgtttatgtgtgcagacaattctccctgaggttagcccaatggagaaatgaagcagaggaaggaaacatagaaagacatgggctatcagggaggaagatgttcaatagaacatgcaagaatttctggaagaaaggctgtggaagggccaatggagaaaatgaatggacaaagctcaggaatccctacgctatgtagaatgttcttggtgttatcagggttaagccctgtaattatgtaacctatttatcgcaacatgaatttttatgatttcttgtgatgtattcttttatgaaattaacaagaactcattattttgaggtagaggaaaatcaatgctttatctgatatgctgagaaattattagattgccaatactcatgtgcgtttcatgtgttttataaggtttgttcctttgaagaattgtagttcttagtcccacagggaaatgtgtatctatttatatatcatagtataaatctatgatatatttatatcatatataaaagtctgagttctctttcttagtccctaatcatgtttctcccataggctgtgtttacatggagctatcggtttagccttttaagcttcattagcttgtctattattgaaatagtttccaagaaattttagatattatcataacatctgggtctactcaaacacttattgtttgaaagacttatgtcttggacctatcaaaaactgactttatttattgcttagtgaaaatactagtgggatcaacaatgattttcttgaatgggcatgaatggagatgcccgcacagtaatgtagaaatgtttcatacagctattaaaatgtaactgacctccttagaggcagattagtaactgttcctactttgtatagctaagtgacagtcacttaacttacatgactttcttttttcacattgggtctctggtcctgtgtcttcacctcatttatagcacgtctccttgatttttggtagtatcaacttcccagtgatctgttcagttaagttcttctcccgttaaccaggaagtgcttattctctcatcacagtgggaagaatagcctattgtctttcattttgcctgagtgtattttactatttgggctctgaaataaaaattatgaaatatggtgaggtcacatgttggtgctgccttgctgcataaaattctaggagggcaggttaggagacagttatgtatggcctttcgggaaaattcaaagggtgggattacaagggtgttcctcaggcatgcccctatgggccctatgtggaagcaagaagaattgactgatttacaggacttctctttatgtcaatcttaagaggatggatgaatctggacatttgttccacccgacctctgactgatggtttggaaaataactttaattaggatcatatgaccattgaaaaaggaaaaatgtagactctgacttccgtcccactgaaggattaatgaaaacctttactagcatttagagcttttcagaacatccccactgtcatgtgtctcagcagtggagactgcaagtaaggcttttaattttaggaggtttttttttttttttttttttcccctaaatggtatggccaaaagtcagagttaaaatatatatagttagattccaacttcctccttcactctaaaaatagaatccaaacccactcttcatatatgcttccagaatggggcttaagtaccaatctctgctttgcaatgggcacaatcttggtcatgtcctgaggctctctaagaaaagagaggatctaggatgggagagctagaaagttgctaactgggaagaacaaggccctgaggggttggtctaccaatctgggaagatttgaaaacaaacttctcgcaactgaaggaaggctgaaggctgctgcaagtcattgagtgactttaggatgagcaaaacattgggccacttcctaatgccctatgtgtatagtaccagaagcaaggtctcagacttaacagacccagctctgttccaaggtgagtctgaaccaatagaaagcaaacatgtgcagatatccaaacaagactgctcatgcaagtcggggctggctacccgtcttaggcagcaacagcagagctccagggagcttattcaatatttactgagacttcgaagacccagcagatgtttaatgaagtcactattttggctcaaaccctccacttctccccctcccctcaaaaagccaacaggtaaacacataaatgaaagaaacccacagaaggggatgggaaataaagaaaattctctcaagacttctccaggcccatgtcactggtcagcgtggtttttatgtgtattaggattgggggatgtgaagaaataagtatccagtactttataaccaaagcaattaaatgatattggggtagggaatgttggccagttttgtttagttttgccatcacattgtcacccagacctcacctagccccaagtaatcgggcgccccgaagagggagacagagatgtgccagagttgacccagtgtgcggatgataactactgacgaaagagtcatcgacctcagttagtggttggatgtagtcacattagtttgcctctccccatctttgtctccctggcaaggagaatatgcgggacatgatgctaagagccctgggtaaatgtggtgagaatgcacgcgtgcatatgctacacatatgtgcttctcagttgcagaaaatgaactgctttgggagattatcagtagaaagagtgttatcatattggtgctgagtgctatgtgtgcttatacaatttgttcttgtattttaataaactttgaataaaagaataaaaaaaaaaaaaaaaaaaaaaa

SEQ ID NO: 461 - DNA, 2357 bp, Homo sapiens
gagccgggctactctgagaagaagacaccaagtggattctgcttcccctgggacagcactgagcgagtgtggagagaggtacagccctcggcctacaagctctttagtcttgaaagcgccacaagcagcagctgctgagccatggctgaaggggaaatcaccaccttcacagccctgaccgagaagtttaatctgcctccagggaattacaagaagcccaaactcctctactgtagcaacgggggccacttcctgaggatccttccggatggcacagtggatgggacaagggacaggagcgaccagcacattcagctgcagctcagtgcggaaagcgtgggggaggtgtatataaagagtaccgagactggccagtacttggccatggacaccgacgggcttttatacggctcacagacaccaaatgaggaatgtttgttcctggaaaggctggaggagaaccattacaacacctatatatccaagaagcatgcagagaagaattggtttgttggcctcaagaagaatgggagctgcaaacgcggtcctcggactcactatggccagaaagcaatcttgtttctccccctgccagtctcttctgattaaagagatctgttctgggtgttgaccactccagagaagtttcgaggggtcctcacctggttgacccaaaaatgttcccttgaccattggctgcgctaacccccagcccacagagcctgaatttgtaagcaacttgcttctaaatgcccagttcacttctttgcagagccttttacccctgcacagtttagaacagagggaccaaattgcttctaggagtcaactggctggccagtctgggtctgggtttggatctccaattgcctcttgcaggctgagtccctccatgcaaaagtggggctaaatgaagtgtgttaaggggtcggctaagtgggacattagtaactgcacactatttccctctactgagtaaaccctatctgtgattcccccaaacatctggcatggctcccttttgtccttcctgtgccctgcaaatattagcaaagaagcttcatgccaggttaggaaggcagcattccatgaccagaaacagggacaaagaaatccccccttcagaacagaggcatttaaaatggaaaagagagattggattttggtgggtaacttagaaggatggcatctccatgtagaataaatgaagaaagggaggcccagccgcaggaaggcagaataaatccttgggagtcattaccacgccttgaccttcccaaggttactcagcagcagagagccctgggtgacttcaggtggagagcactagaagtggtttcctgataacaagcaaggatatcagagctgggaaattcatgtggatctggggactgagtgtgggagtgcagagaaagaaagggaaactggctgaggggataccataaaaagaggatgatttcagaaggagaaggaaaaagaaagtaatgccacacattgtgcttggcccctggtaagcagaggctttggggtcctagcccagtgcttctccaacactgaagtgcttgcagatcatctggggacctggtttgaatggagattctgattcagtgggttgggggcagagtttctgcagttccatcaggtcccccccaggtgcaggtgctgacaatactgctgccttacccgccatacattaaggagcagggtcctggtcctaaagagttattcaaatgaaggtggttcgacgccccgaacctcacctgacctcaactaacccttaaaaatgcacacctcatgagtctacctgagcattcaggcagcactgacaatagttatgcctgtactaaggagcatgattttaagaggctttggccaatgcctataaaatgcccatttcgaagatatacaaaaacatacttcaaaaatgttaaacccttaccaacagcttttcccaggagaccatttgtattaccattacttgtataaatacacttcctgcttaaacttgacccaggtggctagcaaattagaaacaccattcatctctaacatatgatactgatgccatgtaaaggcctttaataagtcattgaaatttactgtgagactgtatgttttaattgcatttaaaaatatatagcttgaaagcagttaaactgattagtattcaggcactgagaatgatagtaataggatacaatgtataagctactcacttatctgatacttatttacctataaaatgagatttttgttttccactgtgctattacaaattttcttttgaaagtaggaactcttaagcaatggtaattgtgaataaaaattgatgagagtgttaaaaaaaaaaaaaaaaa

SEQ ID NO: 462 - DNA, 1578 bp, Homo sapiens
gcgacgcgccgaggtactaggcagagccgtggaaccgccgccaggtcgctgttggtccacgccgcccgtcgcgccgcccgcccgctcagcgtccgccgccgccatgggagtgcaggtggaaaccatctccccaggagacgggcgcaccttccccaagcgcggccagacctgcgtggtgcactacaccgggatgcttgaagatggaaagaaatttgattcctcccgggacagaaacaagccctttaagtttatgctaggcaagcaggaggtgatccgaggctgggaagaaggggttgcccagatgagtgtgggtcagagagccaaactgactatatctccagattatgcctatggtgccactgggcacccaggcatcatcccaccacatgccactctcgtcttcgatgtggagcttctaaaactggaatgacaggaatggcctcctcccttagctccctgttcttggatctgccatggagggatctggtgcctccagacatgtgcacatgagtccatatggagcttttcctgatgttccactccactttgtatagacatctgccctgactgaatgtgttctgtcactcagctttgcttccgacacctctgtttcctcttcccctttctcctcgtatgtgtgtttacctaaactatatgccataaacctcaagttattcattttattttgttttcattttggggtgaagattcagtttcagtcttttggatataggtttccaattaagtacatggtcaagtattaacagcacaagtggtaggttaacattagaataggaattggtgttggggggggggtttgcaagaatattttattttaattttttggatgaaatttttatctattatatattaaacattcttgctgctgcgctgcaaagccatagcagatttgaggcgctgttgaggactgaattactctccaagttgagagatgtctttgggttaaattaaaagccctacctaaaactgaggtggggatggggagagcctttgcctccaccattcccacccaccctccccttaaaccctctgcctttgaaagtagatcatgttcactgcaatgctggacactacaggtatctgtccctgggccagcagggacctctgaagccttctttgtggccttttttttttttcatcctgtggtttttctaatggactttcaggaattttgtaatctcataactttccaagctccaccacttcctaaatcttaagaactttaattgacagtttcaattgaaggtgctgtttgtagacttaacacccagtgaaagcccagccatcatgacaaatccttgaatgttctcttaagaaaatgatgctggtcatcgcagcttcagcatctcctgttttttgatgcttggctccctctgctgatctcagtttcctggcttttcctccctcagccccttctcacccctttgctgtcctgtgtagtgatttggtgagaaatcgttgctgcacccttcccccagcaccatttatgagtctcaagttttattattgcaataaaagtgctttatgccggcttttctcaaaaaaaaaaaaaaaaaa

SEQ ID NO: 463 - DNA, 2461 bp, Homo sapiens
ccgcagccgccgccgccgccgccgccgcgatgtgaccttcagggccgccaggacgggatgaccggagcctccgccccgcggcgcccgctcgcctcggcctcccgggcgctctgaccgcgcgtccccggcccgccatggccccttcgctctcgcccgggcccgccgccctgcgccgcgcgccgcagctgctgctgctgctgctggccgcggagtgcgcgcttgccgcgctgttgccggcgcgcgaggccacgcagttcctgcggcccaggcagcgccgcgcctttcaggtcttcgaggaggccaagcagggccacctggagagggagtgcgtggaggagctgtgcagccgcgaggaggcgcgggaggtgttcgagaacgaccccgagacggattatttttacccaagatacttagactgcatcaacaagtatgggtctccgtacaccaaaaactcaggcttcgccacctgcgtgcaaaacctgcctgaccagtgcacgcccaacccctgcgataggaaggggacccaagcctgccaggacctcatgggcaacttcttctgcctgtgtaaagctggctgggggggccggctctgcgacaaagatgtcaacgaatgcagccaggagaacgggggctgcctccagatctgccacaacaagccgggtagcttccactgttcctgccacagcggcttcgagctctcctctgatggcaggacctgccaagacatagacgagtgcgcagactcggaggcctgcggggaggcgcgctgcaagaacctgcccggctcctactcctgcctctgtgacgagggctttgcgtacagctcccaggagaaggcttgccgagatgtggacgagtgtctgcagggccgctgtgagcaggtctgcgtgaactccccagggagctacacctgccactgtgacgggcgtgggggcctcaagctgtcccaggacatggacacctgtgaggacatcttgccgtgcgtgcccttcagcgtggccaagagtgtgaagtccttgtacctgggccggatgttcagtgggacccccgtgatccgactgcgcttcaagaggctgcagcccaccaggctggtagctgagtttgacttccggacctttgaccccgagggcatcctcctctttgccggaggccaccaggacagcacctggatcgtgctggccctgagagccggccggctggagctgcagctgcgctacaacggtgtcggccgtgtcaccagcagcggcccggtcatcaaccatggcatgtggcagacaatctctgttgaggagctggcgcggaatctggtcatcaaggtcaacagggatgctgtcatgaaaatcgcggtggccggggacttgttccaaccggagcgaggactgtatcatctgaacctgaccgtgggaggtattcccttccatgagaaggacctcgtgcagcctataaaccctcgtctggatggctgcatgaggagctggaactggctgaacggagaagacaccaccatccaggaaacggtgaaagtgaacacgaggatgcagtgcttctcggtgacggagagaggctctttctaccccgggagcggcttcgccttctacagcctggactacatgcggacccctctggacgtcgggactgaatcaacctgggaagtagaagtcgtggctcacatccgcccagccgcagacacaggcgtgctgtttgcgctctgggcccccgacctccgtgccgtgcctctctctgtggcactggtagactatcactccacgaagaaactcaagaagcagctggtggtcctggccgtggagcatacggccttggccctaatggagatcaaggtctgcgacggccaagagcacgtggtcaccgtctcgctgagggacggtgaggccaccctggaggtggacggcaccaggggccagagcgaggtgagcgccgcgcagctgcaggagaggctggccgtgctcgagaggcacctgcggagccccgtgctcacctttgctggcggcctgccagatgtgccggtgacttcagcgccagtcaccgcgttctaccgcggctgcatgacactggaggtcaaccggaggctgctggacctggacgaggcggcgtacaagcacagcgacatcacggcccactcctgcccccccgtggagcccgccgcagcctaggcccccacgggacgcggcaggcttctcagtctctgtccgagacagccgggaggagcctgggggctcctcaccacgtggggccatgctgagagctgggctttcctctgtgaccatcccggcctgtaacatatctgtaaatagtgagatggacttggggcctctgacgccgcgcactcagccgtgggcccgggcgcggggaggccggcgcagcgcagagcgggctcgaagaaaataattctctattatttttattaccaagcgcttctttctgactctaaaatatggaaaat

SEQ ID NO: 464 - DNA, 2106 bp, Homo sapiens
gagcctccacgatctcgcccggcgattgtgggcaggggcgcctccggatcgatcttctgaaattcaagttttcaagatgaagtttttattgacaactgcctttttaattttaatttccttgtgggtggaagaagcctattctaaggaaaagtcttcaaagaaagggaaggggaaaaagaagcagtatctatgcccatctcagcagtcagcagaggaccttgcccgagtacctgccaactccactagcaatatcttgaacaggttattggtcagttatgatcccaggataagaccaaacttcaaaggcattcctgttgatgtagtagtcaacatttttattaacagttttggatccattcaagaaacaacaatggactatagagttaacatcttcctgagacaaaaatggaatgaccccaggctgaagctccccagtgattttaggggttcagatgcactgacagtggatccaacaatgtacaagtgtttatggaaacctgatttattttttgcaaatgaaaaaagtgccaattttcatgatgtgacccaggaaaacatcctcctctttatttttcgtgatggagatgtccttgtcagcatgaggttatctattactctttcatgccctttggacttgacattgtttcccatggatacacaacgttgcaagatgcaactggagagctttggttacacaactgatgatttacgatttatctggcagtcaggagatcctgtgcaattagaaaaaattgccttgcctcaatttgatatcaaaaaggaagatattgaatatggtaactgtacaaaatactataaaggcacgggctactacacatgcgtggaagtcatcttcaccctgaggaggcaggtcggcttttacatgatgggggtctacgccccaaccctgctcattgttgttctctcctggctttccttctggatcaacccggacgcgagtgctgccagagtgcccctgggtatcttctcagtcctcagcttggcctctgagtgcacaacccttgccgctgagcttcccaaagtttcctatgtgaaggctcttgatgtttggcttattgcttgccttctctttgggtttgcttccctggtggagtatgcagttgtccaggtgatgctgaacaaccccaaaagggttgaagctgaaaaagccagaattgctaaggctgagcaagcagatggaaaaggtggaaatgtggctaaaaagaatactgtgaatggaacagggactcctgttcatattagcactttgcaggttggtgagaccagatgcaaaaaagtttgtacttctaagtctgatctgagatctaatgacttcagcattgttggaagcttaccaagagattttgaactatccaattatgactgctatggaaaacccattgaagttaacaacggacttgggaaatctcaggctaagaacaacaagaagcctccccctgcgaaacctgttattccaacagcagcaaagcgaattgatctttatgcaagagcattgtttcctttctgcttcttgttcttcaatgttatatattggtctatatatttatgataaatcttttccatttgtacaaaataaaattccatttcattgtgacctactcctttcataaatgccaatctgtgagaacttttgaattttcatagcaacattgcattttggatgccatttgattgtaataaaactgtggcaccttaattttgaatggcagcatgatcatgtaatatctgtgctctaataacgatgtatatatgtatagtgaacatattgcttagtaacaaatgaaggacaagcatactacataatataatccatacaattctcttcagttagtgtaaactgcaaatactacagataattctgataataaaatgatatgcacgctgaatcctgctatggtaccattctaatgtatgtagtatttcaaatttccttccttgtaactttcaaagaaagccatcttattcttgtaaaattttagatggtattatcacagatttaaaaaggttgtattacatattgtttaaactttgtaagtagaaatatatctgttataattatacaggctctgtggagaaataaagttc

SEQ ID NO: 465 - DNA, 1401 bp, Homo sapiens
tgctccctgaacactcggaggtggcggtggatcttactccttccagccagtgaggatccagcaacctgctccgtgcctcccgcgcctgttggttggaagtgacgaccttgaagatcggccggttggaagtgacgaccttgaagatcggcgggcgcagcggggccgagggggcgggtctggcgctaggtccagcccctgcgtgccgggaaccccagaggaggtcgcagttcagcccagctgaggcctgtctgcagaatcgacaccaaccagcatcatgtccatgacactggggtactgggacatccgcgggctggcccacgccatccgcctgctcctggaatacacagactcaagctacgaggaaaagaagtatacgatgggggacgctcctgactatgacagaagccagtggctgaatgaaaaattcaagctgggcctggactttcccaatctgccctacttgattgatggggctcacaagatcacccagagcaacgccatcctgtgctacattgcccgcaagcacaacctgtgtggggagacagaagaggagaagattcgtgtggacattttggagaaccaggctatggacgtctccaatcagctggccagagtctgctacagccctgactttgagaaactgaagccagaatacttggaggaacttcctacaatgatgcagcacttctcacagttcctggggaagaggccatggtttgttggagacaagatcacctttgtagatttcctcgcctatgatgtccttgacctccaccgtatatttgagcccaactgcttggacgccttcccaaatctgaaggacttcatctcccgctttgagggcttggagaagatctctgcctacatgaagtccagccgcttcctcccaaaacctctgtacacaagggtggctgtctggggcaacaagtaatgccttgaaggccaggaggtgggagtgaggagcccatactcagcctgctgcccaggctgtgcagcgcagctggactctgcatcccagcacctgcctcctcgttcctttctcctgtttattcccatctttacccccaagactttattgggcctcttcacttcccctaaacccctgtcccatgcaggccctttgaagcctcagctacctactttccttcatgaacatccccctcccaacactacccttccctgcactaaagccagcctgaccttccttcctgttagtggttgtatctgctttgaagggcctacctggcccctcgcctgtggagctcagccctgagctgtccccgtgttgcatgacagcattgactggtttacaggccctgctcctgcagcatggcccctgccttaggcctacctgatcaaaataaagcctcagccacaaaaaaaaaaaaaaaaaaaaaaaaa

SEQ ID NO: 466 - DNA, 1552 bp, Homo sapiens
caaagtctgagccccgctccgctgatgcctgtctgcagaatccgcaccaccagcaccatgcccatgactctggggtactgggacatccgtgggctggcccacgccatccgcttgctcctggaatacacagactcaagctatgtggaaaagaagtacacgatgggggacgctcctgactatgacagaagccagtggctgaatgaaaaattcaagctgggcctggactttcccaatctgccctacttgattgatggggctcacaagatcacccagagcaatgccatcctgcgctacattgcccgcaagcacaacctgtgtggggagacagaagaggagaagattcgtgtggacattttggagaaccaggttatggataaccacatggagctggtcagactgtgctatgacccagattttgagaaactgaagccaaaatacttggaggaactccctgaaaagctaaagctctactcagagtttctggggaagcggccatggtttgcaggagacaagatcacctttgtggatttccttgcctatgatgtccttgacatgaagcgtatatttgagcccaagtgcttggacgccttcctaaacttgaaggacttcatctcccgctttgagggtttgaagaagatctctgcctacatgaagtccagccaattcctccgaggtcttttgtttggaaagtcagctacatggaacagcaaatagggcccagtgatgccagaagatgggagggaggagccaaccttgctgcctgcgaccctggaggacagcctgactccctggacctgccttcttcctttttccttctttctactctcttctcttccccaaggcctcattggcttcctttcttctaacatcatccctccccgcatcgaggctctttaaagcttcagctccccactgtcctccatcaaagtccccctcctaacgtcttcctttccctgcactaacgccaacctgactgcttttcctgtcagtgcttttctcttctttgagaagccagactgatctctgagctccctagcactgtcctcaaagaccatctgtatgccctgctccctttgctgggtccctaccccagctccgtgtgatgcccagtaaagcctgaaccatgcctgccatgtcttgtcttattccctgaggctcccttgaactcaggactgtcctcgaattgtgggtggttttttgtcttctgttgtccacagccagagcttagtggatgggtgtgtgtgtgtgtgtgggggtggtgatcaggcaggttcataaatttccttggtcatttctgccctctagccacatccctctgttcctcactgtggggattactacagaaaggtgctctgtgccaagttcctcactcattcgcgctcctgtaggccgtctagaactggcatggttcaaagaggggctaggctgatggggaagggggctgagcagctcccaggcagactgccttctttcaccctgtcctgatagacttccctgatctagatatccttcgtcatgacacttctcaataaaacgtatcccaccgtattgt

SEQ ID NO: 467 - DNA, 737 bp, Homo sapiens
ggagtttcgccgccgcagtcttcgccaccatgccgccctacaccgtggtctatttcccagttcgaggccgctgcgcggccctgcgcatgctgctggcagatcagggccagagctggaaggaggaggtggtgaccgtggagacgtggcaggagggctcactcaaagcctcctgcctatacgggcagctccccaagttccaggacggagacctcaccctgtaccagtccaataccatcctgcgtcacctgggccgcacccttgggctctatgggaaggaccagcaggaggcagccctggtggacatggtgaatgacggcgtggaggacctccgctgcaaatacatctccctcatctacaccaactatgaggcgggcaaggatgactatgtgaaggcactgcccgggcaactgaagccttttgagaccctgctgtcccagaaccagggaggcaagaccttcattgtgggagaccagatctccttcgctgactacaacctgctggacttgctgctgatccatgaggtcctagcccctggctgcctggatgcgttccccctgctctcagcatatgtggggcgcctcagcgcccggcccaagctcaaggccttcctggcctcccctgagtacgtgaacctccccatcaatggcaacgggaaacagtgagggttggggggactctgagcgggaggcagagtttgccttcctttctccaggaccaataaaatttctaagagagct

SEQ ID NO: 468 - DNA, 1004 bp, Homo sapiens
atgggtctggagctctacctggacctgctgtcccagccctgccgcgctgtttacatctttgccaagaagaacgacattcccttcgagctgcgcatcgtggatctgattaaaggtcagcacttaagcgatgcctttgcccaggtgaaccccctcaagaaggtgccggccttgaaggacggggacttcaccttgacggagagtgtggccatcctgctctacctgacgcgcaaatataaggtccctgactactggtaccctcaggacctgcaggcccgtgcccgtgtggatgagtacctggcatggcagcacacgactctgcggagaagctgcctccgggccttgtggcataaggtgatgttccctgtgttcctgggtgggccagtatctccccagacactggcagccaccctggcagagttggatgtgaccctgcagttgctcgaggacaagttcctccagaacaaggccttccttactggtcctcacatctccttagctgacctcgtagccatcacggagctgatgcatcccgtgggtgctggctgccaagtcttcgaaggccgacccaagctggccacatggcggcagcgcgtggaggcagcagtgggggaggacctcttccaggaggcccatgaggtcattctgaaggccaaggacttcccacctgcagaccccaccataaagcagaagctgatgccctgggtgctggccatgatccggtgagctgggaaacctcacccttgcaccgtcctcagcagtccacaaagcattttcatttctaatggcccatgggagccaggcccagaaagcaggaatggcttgcttaagacttgcccaagtcccagagcacctcacctcccgaagccaccatccccaccctgtcttccacagccgcctgaaagccacaatgagaatgatgcacactgaggccttgtgtcctttaatcactgcatttcattttgattttggataataaacctggctcagcctgagcctctgcttct

SEQ ID NO: 469 - DNA, 1082 bp, Homo sapiens
ggcacgaggcgctggccgggctggctgcggccgccctgggccgggccccaccggacggcttgctctgctctttacctggggttgctgtcgaggaccctgtgcaagactcggccggtttttctttctccctgatggacagacccaaacatagccgcgcagcatcgtgaagggctggggccttcactcctctgtggctctggaagagcccgatttcctcaggaggcatgtcgggccccaggcctgtggtgctgagcgggccttcgggagctgggaagagcaccctgctgaagaggctgctccaggagcacagcggcatctttggcttcagcgtgtcccataccacgaggaacccgaggcccggcgaggagaacggcaaagattactactttgtaaccagggaggtgatgcagcgtgacatagcagccggcgacttcatcgagcatgccgagttctcggggaacctgtatggcacgagcaaggtggcggtgcaggccgtgcaggccatgaaccgcatctgtgtgctggacgtggacctgcagggtgtgcggaacatcaaggccaccgatctgcggcccatctacatctctgtgcagccgccttcactgcacgtgctggagcagcggctgcggcagcgcaacactgaaaccgaggagagcctggtgaagcggctggctgctgcccaggccgacatggagagcagcaaggagcccggcctgtttgatgtggtcatcattaacgacagcctggaccaggcctacgcagagctgaaggaggcgctctctgaggaaatcaagaaagctcaaaggaccggcgcctgaggcttgctgtctgttctcggcaccccgggcccatacaggaccagggcagcagcattgagccacccccttggcaggcgatacggcagctctgtgcccttggccagcatgtggagtggaggagatgctgcccctgtggttggaacatcctggggtgacccccgacccagcctcgctgggctgtcccctgtccctatctctcactctggacccagggctgacatcctaataaaataactgttggattagaaaaaaaaaaaaaaaaaa

SEQ ID NO: 470 - DNA, 3870 bp, Homo sapiens
cagggagacatacaggatttaagaagcccatcatggagaagaccttcaattacagagataaaaagtttttcttgtggaacaagttaacactagatggcagataacagactgaggagtgagctgcttctgactcgattaaaaagggagtgagccataactggcggctgctctttcgccaatgagcctccccaattcctcctgcctcttagaagacaagatgtgtgagggcaacaagaccactatggccagcccccagctgatgcccctggtggtggtcctgagcactatctgcttggtcacagtagggctcaacctgctggtgctgtatgccgtacggagtgagcggaagctccacactgtggggaacctgtacatcgtcagcctctcggtggcggacttgatcgtgggtgccgtcgtcatgcctatgaacatcctctacctgctcatgtccaagtggtcactgggccgtcctctctgcctcttttggctttccatggactatgtggccagcacagcgtccattttcagtgtcttcatcctgtgcattgatcgctaccgctctgtccagcagcccctcaggtaccttaagtatcgtaccaagacccgagcctcggccaccattctgggggcctggtttctctcttttctgtgggttattcccattctaggctggaatcacttcatgcagcagacctcggtgcgccgagaggacaagtgtgagacagacttctatgatgtcacctggttcaaggtcatgactgccatcatcaacttctacctgcccaccttgctcatgctctggttctatgccaagatctacaaggccgtacgacaacactgccagcaccgggagctcatcaataggtccctcccttccttctcagaaattaagctgaggccagagaaccccaagggggatgccaagaaaccagggaaggagtctccctgggaggttctgaaaaggaagccaaaagatgctggtggtggatctgtcttgaagtcaccatcccaaacccccaaggagatgaaatccccagttgtcttcagccaagaggatgatagagaagtagacaaactctactgctttccacttgatattgtgcacatgcaggctgcggcagaggggagtagcagggactatgtagccgtcaaccggagccatggccagctcaagacagatgagcagggcctgaacacacatggggccagcgagatatcagaggatcagatgttaggtgatagccaatccttctctcgaacggactcagataccaccacagagacagcaccaggcaaaggcaaattgaggagtgggtctaacacaggcctggattacatcaagtttacttggaagaggctccgctcgcattcaagacagtatgtatctgggttgcacatgaaccgcgaaaggaaggccgccaaacagttgggttttatcatggcagccttcatcctctgctggatcccttatttcatcttcttcatggtcattgccttctgcaagaactgttgcaatgaacatttgcacatgttcaccatctggctgggctacatcaactccacactgaaccccctcatctaccccttgtgcaatgagaacttcaagaagacattcaagagaattctgcatattcgctcctaagggaggctctgaggggatgcaacaaaatgatccttatgatgtccaacaaggaaatagaggacgaaggcctgtgtgttgccaggcaggcacctgggctttctggaatccaaaccacagtcttaggggcttggtagtttggaaagttcttaggcaccatagaagaacagcagatggcggtgatcagcagagagattgaactttgaggaggaagcagaatctttgcaagaaagtcagacctgtttcttgtaactgggttcaaaaagaaaaaaataataaaaataaaagagagagagaatcagacctgggtggaactctcctgctcctcaggaactatgggagcctcagactcattgtaattcaagctttccgagtcaagtgattgacaactgaagagacacgtggctagggttccactggagaattgaaaaggactcttgagccctcctggaatggagctgtataactgtgcagagactttatccatgccaatagttgctgtccccttccaggggtcaccttgagaggcatgacagctgttccacaggggctatcccttctcagaaaacttctcttctgagcctctttaacagctttctccagaaccagtgtctgaaccaccctggaaattctgccttattatttcttactcaaacatgtttagagtggatagaaaattatgcagcttgcacacccatcatctttaaccccaaatttcctttggctattaaaaaagtggtggcaaaaggcatcctcaaaagaaagagaaatgaaatatttttgaatggttgcacgttaaaaattaaaagaaggaatgggggcagaatgccatatttttgagggctgtactaggtttatctcatttaagccccacaacaccccacaggagggtaattttctaactctagtttgcagaggagcaaattgaggttcagcaaggtgagagaggtacccaaggtcacatagctagttatgtgagaaagttagagtacagatcctctggggtttcagcttattgtagcatattttctccgaaaggcaaaaatgtgcccttttggccgggcatggtagctcaagcctataatcccagcatgttgagaggctgaggtgggcagatcatttgaggccaggagttcaagaccagtctggccaatatggagaaaccttgtctctactaaaaacacaaaaattatctgggcatggtggggcatgcctgtagtcccacttacttgggaggccgaggcacgagaatcgcttgaacccgggaggtggaggttgccgtgagccaagatcacgccactgcactccagcctgggcaacagagcaagactctgtctcaaaaaaaaaaatacaatattttaacaatgtgccctcttaagtgtgcacagatacacatacacggtattcccaagagtggtggcagctcaaaatgatatgtttgagtagacgaacagctgacatggagttcccgtgcacctacggaaggggacgctttgaaggaaccaagtgcatttttatctgtgagttctgttgtgtttgtcaaaaagtcattgtaatctttcatagccatacctggtaagcaaaaactagtaaagacataggaacatgtagttttacttggtgtttatgttgcaatctggttgtgatttatattttaaagcttggtgctaaaccacaatatgtatagcacatggagtgcctgtacaagctgatgttttgtattttgtgttcctctttgcatgatctgtcaaagtgagatatttttacctgcctaaaatatgatgtttaaaagcatactctatgtgatttatttatttctacctttctgagtctcttggactaagaagatgttttgaaatgtaccatcaaatgttaacagagtttgatatgggctttctctttggtttctcatcacatttgtaaatgtcttttcaaaaggatttactttttgtaaaaagcttcattctcactctgctttgcatcccccaaacttcttgttcaaaacggggggagtttaggagactttaatcccggtttcagaagctgcagctggtctgtttccaggtcagaaaccattgttcagaagacctccctgtgagagagttgctcctcagggtccctcaggaccaaagaacactcgaaaagagcacttcacacagacaagtggctaagtgtccattatttaccttgaacaatcaaggcaactagtggagagaactgattgtgagctc

SEQ ID NO: 471 - DNA, 4775 bp, Homo sapiens
acccgcgcgaggtaggcgctctggtgcttgcggaggacgcttccttcctcagatgcaccgatcttcccgatactgcctttggagcggctagattgctagccttggctgctccattggcctgccttgccccttacctgccgattgcatatgaactcttcttctgtctgtacatcgttgtcgtcggagtcgtcgcgatcgtcgtggcgctcgtgtgatggccttcgtccgtttagagtagtgtagttagttaggggccaacgaagaagaaagaagacgcgattagtgcagagatgctggaggtggtcagttactaagctagagtaagatagcggagcgaaaagagccaaacctagccggggggcgcacggtcacccaaaggaggtcgactcgccggcgcttcctatcgcgccgagctccctccattcctctccctccgccgaggcgcgaggttgcggcgcgcagcgcagcgcagctcagcgcaccgactgccgcgggctccgctgggcgattgcagccgagtccgtttctcgtctagctgccgccgcggcgaccgctgcctggtcttcctcccggacgctagtgggttatcagctaacacccgcgagcatctataacataggccaactgacgccatccttcaaaaacaactaaaggatgatatgatgaacctagcctgttaatttcgtcttctcaattttaaactttggttgcttaagactgaagcaatcatggtgaacctgaggaatgcggtgcattcattccttgtgcacctaattggcctattggtttggcaatgtgatatttctgtgagcccagtagcagctatagtaactgacattttcaatacctccgatggtggacgcttcaaattcccagacggggtacaaaactggccagcactttcaatcgtcatcataataatcatgacaataggtggcaacatccttgtgatcatggcagtaagcatggaaaagaaactgcacaatgccaccaattacttcttaatgtccctagccattgctgatatgctagtgggactacttgtcatgcccctgtctctcctggcaatcctttatgattatgtctggccactacctagatatttgtgccccgtctggatttctttagatgttttattttcaacagcgtccatcatgcacctctgcgctatatcgctggatcggtatgtagcaatacgtaatcctattgagcatagccgtttcaattcgcggactaaggccatcatgaagattgctattgtttgggcaatttctataggtgtatcagttcctatccctgtgattggactgagggacgaagaaaaggtgttcgtgaacaacacgacgtgcgtgctcaacgacccaaatttcgttcttattgggtccttcgtagctttcttcataccgctgacgattatggtgattacgtattgcctgaccatctacgttctgcgccgacaagctttgatgttactgcacggccacaccgaggaaccgcctggactaagtctggatttcctgaagtgctgcaagaggaatacggccgaggaagagaactctgcaaaccctaaccaagaccagaacgcacgccgaagaaagaagaaggagagacgtcctaggggcaccatgcaggctatcaacaatgaaagaaaagcttcgaaagtccttgggattgttttctttgtgtttctgatcatgtggtgcccatttttcattaccaatattctgtctgttctttgtgagaagtcctgtaaccaaaagctcatggaaaagcttctgaatgtgtttgtttggattggctatgtttgttcaggaatcaatcctctggtgtatactctgttcaacaaaatttaccgaagggcattctccaactatttgcgttgcaattataaggtagagaaaaagcctcctgtcaggcagattccaagagttgccgccactgctttgtctgggagggagcttaatgttaacatttatcggcataccaatgaaccggtgatcgagaaagccagtgacaatgagcccggtatagagatgcaagttgagaatttagagttaccagtaaatccctccagtgtggttagcgaaaggattagcagtgtgtgagaaagaacagcacagtcttttcctacggtacaagctacatatgtaggaaaattttcttctttaatttttctgttggtcttaactaatgtaaatattgctgtctgaaaaagtgtttttacatatagctttgcaaccttgtactttacaatcatgcctacattagtgagatttagggttctatatttactgtttataataggtggagactaacttattttgattgtttgatgaataaaatgtttatttttgctctccctcccttctttccttccttttttcctttcttccttcctttctctctttcttttgtgcatatggcaacgttcatgttcatctcaggtggcatttgcaggtgaccagaatgaggcacatgacagtggttatatttcaaccacacctaaattaacaaattcagtggacatttgttctgggttaacagtaaatatacactttacattcttgctctgctcatctacacatataaacacagtaagataggttctgctttctgatacatctgtcagtgagtcagaggcagaacctagtcttgttgttcatataggggcaaaaatttgacattgtcagaatgttgtgttggtatttactgcaatgtctgtccctaaacatagtggtattttaacatagcagctggttaaccgggactacagaagtggaaggataatgagatgtaatacaccaaatagcttttcacttcttaaggacagtgttcaaattctgattattacaacaagcaaactgaaattagtgttttcattctggtccttagtaaattcctaattctatgattaaactgggaaatgagatcccagagttatttcccaacccaggattcaacatcaattgggttttgatctcagcatcctggaaatttgtgtgcttcacacaaagtgaaattagtattttgagccttattaaaatattttcttaattatggtacctctgtctataggacttaatttagcagtccatttttgagtaaaacttgtattggaagtatagatggtagaaactttggaagttttacttgattaaggactacagaattgggcccttagaatgtgaaaaaaaaaagtaattaaaaagacacttttaccgaactcgggattacagaaacacggagtttccatttggattttaaacaaaatttatgtcattttcagatccttccaaactctctagtgcaggaaaaggctgcagctaatttgtgaaagtggcaagctcttcattgcactgcagttatttaccagaagtttaaatctttgttaaaatatagtgttgtgttacaataagtgttggccatcatttcattcgtgggcctgctgctctctaagaattcagtagcattttaatagtttctaaaccatgaaaagttttcaagcattgctaaagtcaggccattcagtctatgctgtgtgcagagtatacaagtgtttctagtaacagtatttccatacgtgcccatttcacacaactgtggataaattttggaagaattcatgatgctagttcttacgcttgacagttacttacacacctgagaatgtgcctctcagtatcttaaaattggttaatgaaaaatctgaatttctaaaacccttggtctgtgttctcaacacacagtatagataaatccaatagtctgccacaagggcagtggaagagctgctgtatttgaggaaactcatacagtctctatttgatttgcaacactggccaaacatcagtcatttgcttgagcatgcccaaatattacatgaaagtcaagtctacctgccttgcctgttaggtctgttgaagtgcatgttaaaataattatatgaagcagaatgagatgatttaattcttaccgaaatgaaaatggctgaagaaacacagcatgcatttagcatgagttctgcacatacagatggtgtcctgcatgtatgccatgtatgttgcatgaatccatcgatttgtattaatgtagggcagaatagctgatagaagaaggactgaagaaaatccttcagcaatccttaaaaagaccatgcattcagatctgaagtagtgtgagtgttagaaaaaactggaaacatctgatttctgaactatcagggcaagctcatagcacatgttttacaaagaaacaaaatataaatcacagatttccaaaagtactagcaataagttgaatgataatagctcacagcacatttgttaatgattcttgtgtcatcaagtagtagtacttaatagtacccaacctggtaattatcctcaagttgtgtgctattcgtaagttctgtgcagtttggtatgaaacaaatatactcatttggatataaatcttacccttcaatgttaaatctacaaacttttataaatgttttaaagaagtccatgtgataattgtaaaggtgatgaatttaccatcaaacaaatcattttgatgtattattatatatgtatatctgtgtaagacacgtgcaacagactgccttatattattttctgtaattcttctcctttgtcaaatggtattttttgtgaatggttgcaaagtgttgtcttattcctaattcctgtatgttatccactacaggttttatgagacttcctattaatttattaaatttattaaatgttgaaaaaaaaaaaaaaaaaaaaaaa

SEQ ID NO: 472 - DNA, 4910 bp, Homo sapiens
tagacgcaccctctgaagatggtgactccctcctgagaagctggaccccttggtaaaagacaaggccttctccaagaagaatatgaaagtgttactcagacttatttgtttcatagctctactgatttcttctctggaggctgataaatgcaaggaacgtgaagaaaaaataattttagtgtcatctgcaaatgaaattgatgttcgtccctgtcctcttaacccaaatgaacacaaaggcactataacttggtataaagatgacagcaagacacctgtatctacagaacaagcctccaggattcatcaacacaaagagaaactttggtttgttcctgctaaggtggaggattcaggacattactattgcgtggtaagaaattcatcttactgcctcagaattaaaataagtgcaaaatttgtggagaatgagcctaacttatgttataatgcacaagccatatttaagcagaaactacccgttgcaggagacggaggacttgtgtgcccttatatggagttttttaaaaatgaaaataatgagttacctaaattacagtggtataaggattgcaaacctctacttcttgacaatatacactttagtggagtcaaagataggctcatcgtgatgaatgtggctgaaaagcatagagggaactatacttgtcatgcatcctacacatacttgggcaagcaatatcctattacccgggtaatagaatttattactctagaggaaaacaaacccacaaggcctgtgattgtgagcccagctaatgagacaatggaagtagacttgggatcccagatacaattgatctgtaatgtcaccggccagttgagtgacattgcttactggaagtggaatgggtcagtaattgatgaagatgacccagtgctaggggaagactattacagtgtggaaaatcctgcaaacaaaagaaggagtaccctcatcacagtgcttaatatatcggaaattgaaagtagattttataaacatccatttacctgttttgccaagaatacacatggtatagatgcagcatatatccagttaatatatccagtcactaatttccagaagcacatgattggtatatgtgtcacgttgacagtcataattgtgtgttctgttttcatctataaaatcttcaagattgacattgtgctttggtacagggattcctgctatgattttctcccaataaaagcttcagatggaaagacctatgacgcatatatactgtatccaaagactgttggggaagggtctacctctgactgtgatatttttgtgtttaaagtcttgcctgaggtcttggaaaaacagtgtggatataagctgttcatttatggaagggatgactacgttggggaagacattgttgaggtcattaatgaaaacgtaaagaaaagcagaagactgattatcattttagtcagagaaacatcaggcttcagctggctgggtggttcatctgaagagcaaatagccatgtataatgctcttgttcaggatggaattaaagttgtcctgcttgagctggagaaaatccaagactatgagaaaatgccagaatcgattaaattcattaagcagaaacatggggctatccgctggtcaggggactttacacagggaccacagtctgcaaagacaaggttctggaagaatgtcaggtaccacatgccagtccagcgacggtcaccttcatctaaacaccagttactgtcaccagccactaaggagaaactgcaaagagaggctcacgtgcctctcgggtagcatggagaagttgccaagagttctttaggtgcctcctgtcttatggcgttgcaggccaggttatgcctcatgctgacttgcagagttcatggaatgtaactatatcatcctttatccctgaggtcacctggaatcagattattaagggaataagccatgacgtcaatagcagcccagggcacttcagagtagagggcttgggaagatcttttaaaaaggcagtaggcccggtgtggtggctcacgcctataatcccagcactttgggaggctgaagtgggtggatcaccagaggtcaggagttcgagaccagcccagccaacatggcaaaaccccatctctactaaaaatacaaaaatgagctaggcatggtggcacacgcctgtaatcccagctacacctgaggctgaggcaggagaattgcttgaaccggggagacggaggttgcagtgagccgagtttgggccactgcactctagcctggcaacagagcaagactccgtctcaaaaaaagggcaataaatgccctctctgaatgtttgaactgccaagaaaaggcatggagacagcgaactagaagaaagggcaagaaggaaatagccaccgtctacagatggcttagttaagtcatccacagcccaagggcggggctatgccttgtctggggaccctgtagagtcactgaccctggagcggctctcctgagaggtgctgcaggcaaagtgagactgacacctcactgaggaagggagacatattcttggagaactttccatctgcttgtattttccatacacatccccagccagaagttagtgtccgaagaccgaattttattttacagagcttgaaaactcacttcaatgaacaaagggattctccaggattccaaagttttgaagtcatcttagctttccacaggagggagagaacttaaaaaagcaacagtagcagggaattgatccacttcttaatgctttcctccctggcatgaccatcctgtcctttgttattatcctgcattttacgtctttggaggaacagctccctagtggcttcctccgtctgcaatgtcccttgcacagcccacacatgaaccatccttcccatgatgccgctcttctgtcatcccgctcctgctgaaacacctcccaggggctccacctgttcaggagctgaagcccatgctttcccaccagcatgtcactcccagaccacctccctgccctgtcctccagcttcccctcgctgtcctgctgtgtgaattcccaggttggcctggtggccatgtcgcctgcccccagcactcctctgtctctgctcttgcctcgacccttcctcctcctttgcctaggaggccttctcgcattttctctagctgatcagaattttaccaaaattcagaacatcctccaattccacagtctctgggagactttccctaagaggcgacttcctctccagccttctctctctggtcaggcccactgcagagatggtggtgagcacatctgggaggctggtctccctccagctggaattgctgctctctgagggagaggctgtggtggctgtctctgtccctcactgccttccaggagcaatttgcacatgtaacatagatttatgtaatgctttatgtttaaaaacattccccaattatcttatttaatttttgcaattattctaattttatatatagagaaagtgacctattttttaaaaaaatcacactctaagttctattgaacctaggacttgagcctccatttctggcttctagtctggtgttctgagtacttgatttcaggtcaataacggtcccccctcactccacactggcacgtttgtgagaagaaatgacattttgctaggaagtgaccgagtctaggaatgcttttattcaagacaccaaattccaaacttctaaatgttggaattttcaaaaattgtgtttagattttatgaaaaactcttctactttcatctattctttccctagaggcaaacatttcttaaaatgtttcattttcattaaaaatgaaagccaaatttatatgccaccgattgcaggacacaagcacagttttaagagttgtatgaacatggagaggacttttggtttttatatttctcgtatttaatatgggtgaacaccaacttttatttggaataataattttcctcctaaacaaaaacacattgagtttaagtctctgactcttgcctttccacctgctttctcctgggcccgctttgcctgcttgaaggaacagtgctgttctggagctgctgttccaacagacagggcctagctttcatttgacacacagactacagccagaagcccatggagcagggatgtcacgtcttgaaaagcctattagatgttttacaaatttaattttgcagattattttagtctgtcatccagaaaatgtgtcagcatgcatagtgctaagaaagcaagccaatttggaaacttaggttagtgacaaaattggccagagagtgggggtgatgatgaccaagaattacaagtagaatggcagctggaatttaaggagggacaagaatcaatggataagcgtgggtggaggaagatccaaacagaaaagtgcaaagttattccccatcttccaagggttgaattctggaggaagaagacacattcctagttccccgtgaacttcctttgacttattgtccccactaaaacaaaacaaaaaacttttaatgccttccacattaattagattttcttgcagtttttttatggcatttttttaaagatgccctaagtgttgaagaagagtttgcaaatgcaacaaaaatatttaattaccggttgttaaaactggtttagcacaatttatattttccctctcttgcctttcttatttgcaataaaaggtattgagccattttttaaatgacatttttgataaattatgtttgtactagttgatgaaggagttttttttaacctgtttatataattttgcagcagaagccaaattttttgtatattaaagcaccaaattcatgtacagcatgcatcacggatcaatagactgtacttattttccaataaaattttcaaactttgtactgttaaa

SEQ ID NO: 473 - DNA, 1654 bp, Homo sapiens
gaattcgggcggtcctcggagacacgcggcggtgtcctgtgttggccatggccgactacctgattagtgggggcacgtcctacgtgccagacgacggactcacagcacagcagctcttcaactgcggagacggcctcacctacaatgactttctcattctccctgggtacatcgacttcactgcagaccaggtggacctgacttctgctctgaccaagaaaatcactcttaagaccccactggtttcctctcccatggacacagtcacagaggctgggatggccatagcaatggcgcttacaggcggtattggcttcatccaccacaactgtacacctgaattccaggccaatgaagttcggaaagtgaagaaatatgaacagggattcatcacagaccctgtggtcctcagccccaaggatcgcgtgcgggatgtttttgaggccaaggcccggcatggtttctgcggtatcccaatcacagacacaggccggatggggagccgcttggtgggcatcatctcctccagggacattgattttctcaaagaggaggaacatgactgtttcttggaagagataatgacaaagagggaagacttggtggtagccccccgcagcatcacactgaaggaggcaaatgaaattctgcagcgcagcaagaagggaaagttgcccattgtaaatgaagatgatgagcttgtggccatcattgcccggacagacctgaagaagaatcgggactacccactagcctccaaagatgccaagaaacagctgctgtgtggggcagccattggcactcatgaggatgacaagtataggctggacttgctcgcccaggctggtgtggatgtagtggttttggactcttcccagggaaattccatcttccagatcaatatgatcaagtacatcaaagacaaataccctaatctccaagtcattggaggcaatgtggtcactgctgcccaggccaagaacctcattgatgcaggtgtggatgccctgcgggtgggcatgggaagtggctccatctgcattacgcaggaagtgctggcctgtgggcggccccaagcaacagcagtgtacaaggtgtcagagtatgcacggcgctttggtgttccggtcattgctgatggaggaatccaaaatgtgggtcatattgcgaaagccttggcccttggggcctccacagtcatgatgggctctctcctggctgccaccactgaggcccctggtgaatacttcttttccgatgggatccggctaaagaaatatcgcggtatgggttctctcgatgccatggacaagcacctcagcagccagaacagatatttcagtgaagctgacaaaatcaaagtggcccagggagtgtctggtgctgtgcaggacaaagggtcaatccacaaatttgtcccttacctgattgctggcatccaacactcatgccaggacattggtgccaagagcttgacccaagtccgagccatgatgtactctggggagcttaagtttgagaagagaacgtcctcagcccaggtggaaggtggcgtccatagcctccattcgtatgagaagcggcttttctgaaaagggatccagcacacctcctcggtttttttttcaataaaagtttagaaagacccgaattc

SEQ ID NO: 474 - DNA, 2245 bp, Homo sapiens
agaacagcttgaagaccgttcatttttaagtgacaagagactcacctccaagaagcaattgtgttttcagaatgattttattcaagcaagcaacttatttcatttccttgtttgctacagtttcctgtggatgtctgactcaactctatgaaaacgccttcttcagaggtggggatgtagcttccatgtacaccccaaatgcccaatactgccagatgaggtgcacattccacccaaggtgtttgctattcagttttcttccagcaagttcaatcaatgacatggagaaaaggtttggttgcttcttgaaagatagtgttacaggaaccctgccaaaagtacatcgaacaggtgcagtttctggacattccttgaagcaatgtggtcatcaaataagtgcttgccatcgagacatttataaaggagttgatatgagaggagtcaattttaatgtgtctaaggttagcagtgttgaagaatgccaaaaaaggtgcaccaataacattcgctgccagtttttttcatatgccacgcaaacatttcacaaggcagagtaccggaacaattgcctattaaagtacagtcccggaggaacacctaccgctataaaggtgctgagtaacgtggaatctggattctcactgaagccctgtgccctttcagaaattggttgccacatgaacatcttccagcatcttgcgttctcagatgtggatgttgccagggttctcactccagatgcttttgtgtgtcggaccatctgcacctatcaccccaactgcctcttctttacattctatacaaatgtatggaaaatcgagtcacaaagaaatgtttgtcttcttaaaacatctgaaagtggcacaccaagttcctctactcctcaagaaaacaccatatctggatatagccttttaacctgcaaaagaactttacctgaaccctgccattctaaaatttacccgggagttgactttggaggagaagaattgaatgtgacttttgttaaaggagtgaatgtttgccaagagacttgcacaaagatgattcgctgtcagtttttcacttattctttactcccagaagactgtaaggaagagaagtgtaagtgtttcttaagattatctatggatggttctccaactaggattgcgtatgggacacaagggagctctggttactctttgagattgtgtaacactggggacaactctgtctgcacaacaaaaacaagcacacgcattgttggaggaacaaactcttcttggggagagtggccctggcaggtgagcctgcaggtgaagctgacagctcagaggcacctgtgtggagggtcactcataggacaccagtgggtcctcactgctgcccactgctttgatgggcttcccctgcaggatgtttggcgcatctatagtggcattttaaatctgtcagacattacaaaagatacacctttctcacaaataaaagagattattattcaccaaaactataaagtctcagaagggaatcatgatatcgccttgataaaactccaggctcctttgaattacactgaattccaaaaaccaatatgcctaccttccaaaggtgacacaagcacaatttataccaactgttgggtaaccggatggggcttctcgaaggagaaaggtgaaatccaaaatattctacaaaaggtaaatattcctttggtaacaaatgaagaatgccagaaaagatatcaagattataaaataacccaacggatggtctgtgctggctataaagaagggggaaaagatgcttgtaagggagattcaggtggtcccttagtttgcaaacacaacggaatgtggcgtttggtgggcatcacaagctggggtgaaggctgtgcccgcagggagcaacctggtgtctacaccaaagtcgctgagtacatggactggattttagagaaaacacagagcagtgatggaaaagctcagatgcagtcaccagcatgagaagcagtccagagtctaggcaatttttacaacctgagttcaagtcaaattctgagcctggggggtcctcatctgcaaagcatggagagtggcatcttctttgcatcctaaggacgaaagacacagtgcactcagagctgctgaggacaatgtctgctgaagcccgctttcagcacgccgtaaccaggggctgacaatgcgaggtcgcaactgagatctccatgactgtgtgttgtgaaataaaatggtgaaagatc

SEQ ID NO: 475 - DNA, 2060 bp, Homo sapiens
ctctatcgacgagtctggtagctgagcgttgggctgtaggtcgctgtgctgtgtgatcccccagagccatgcccgagatagtggatacctgttcgttggcctctccggcttccgtctgccggaccaagcacctgcacctgcgctgcagcgtcgactttactcgccggacgctgaccgggactgctgctctcacggtccagtctcaggaggacaatctgcgcagcctggttttggatacaaaggaccttacaatagaaaaagtagtgatcaatggacaagaagtcaaatatgctcttggagaaagacaaagttacaagggatcgccaatggaaatctctcttcctatcgctttgagcaaaaatcaagaaattgttatagaaatttcttttgagacctctccaaaatcttctgctctccagtggctcactcctgaacagacttctgggaaggaacacccatatctctttagtcagtgccaggccatccactgcagagcaatccttccttgtcaggacactccttctgtgaaattaacctatactgcagaggtgtctgtccctaaagaactggtggcacttatgagtgctattcgtgatggagaaacacctgacccagaagacccaagcaggaaaatatacaaattcatccaaaaagttccaataccctgctacctgattgctttagttgttggagctttagaaagcaggcaaattggcccaagaactttggtgtggtctgagaaagagcaggtggaaaagtctgcttatgagttttctgagactgaatctatgcttaaaatagcagaagatctgggaggaccgtatgtatggggacagtatgacctattggtcctgccaccatccttcccttatggtggcatggagaatccttgccttacttttgtaactcctactctactggcaggcgacaagtcactctccaatgtcattgcacatgaaatatctcatagctggacagggaatctagtgaccaacaaaacttgggatcacttttggttaaatgagggacatactgtgtacttggaacgccacatttgcggacgattgtttggtgaaaagttcagacattttaatgctctgggaggatggggagaactacagaattcggtaaagacatttggggagacacatcctttcaccaaacttgtggttgatctgacagatatagaccctgatgtagcttattcttcagttccctatgagaagggctttgctttacttttttaccttgaacaactgcttggaggaccagagattttcctaggattcttaaaagcttatgttgagaagttttcctataagagcataactactgatgactggaaggatttcctgtattcctattttaaagataaggttgatgttctcaatcaagttgattggaatgcctggctctactctcctggactgcctcccataaagcccaattatgatatgactctgacaaatgcttgtattgccttaagtcaaagatggattactgccaaagaagatgatttaaattcattcaatgccacagacctgaaggatctctcttctcatcaattgaatgagtttttagcacagacgctccagagggcacctcttccattggggcacataaagcgaatgcaagaggtgtacaacttcaatgccattaacaattctgaaatacgattcagatggctgcggctctgcattcaatccaagtgggaggacgcaattcctttggcgctaaagatggcaactgaacaaggaagaatgaagtttacccggcccttattcaaggatcttgctgcctttgacaaatcccatgatcaagctgtccgaacctaccaagagcacaaagcaagcatgcatcccgtgactgcaatgctggtggggaaagacttaaaagtggattaaagacctgcgtattgatgattttagagatttctcttttttaaatggaattcgtaaagaaatataaaacttcagctcacaattaaaactgtctttttagttttggctttttattgttttgttggtgattttactgaaataaagatgagctacttcttc

SEQ ID NO: 476 - DNA, 2491 bp, Homo sapiens
ctggcaggcaggactgggatcgaggcccagaaaacggagcagcgggcaccagggaggcctggaacggggcgagcgccatgagcaacaaatgcgacgtggtcgtggtggggggcggcatctcaggtatggcagcagccaaacttctgcatgactctggactgaatgtggttgttctggaagcccgggaccgtgtgggaggcaggacttacactcttaggaaccaaaaggttaaatatgtggaccttggaggatcctatgttggaccaacccagaatcgtatcttgagattagccaaggagctaggattggagacctacaaagtgaatgaggttgagcgtctgatccaccatgtaaagggcaaatcataccccttcagggggccattcccacctgtatggaatccaattacctacttagatcataacaacttttggaggacaatggatgacatggggcgagagattccgagtgatgccccatggaaggctccccttgcagaagagtgggacaacatgacaatgaaggagctactggacaagctctgctggactgaatctgcaaagcagcttgccactctctttgtgaacctgtgtgtcactgcagagacccatgaggtctctgctctctggttcctgtggtatgtgaagcagtgtggaggcacaacaagaatcatctcgacaacaaatggaggacaggagaggaaatttgtgggcggatctggtcaagtgagtgagcggataatggacctccttggagaccgagtgaagctggagaggcctgtgatctacattgaccagacaagagaaaatgtccttgtggagaccctaaaccatgagatgtatgaggctaaatatgtgattagtgctattcctcctactctgggcatgaagattcacttcaatccccctctgccaatgatgagaaaccagatgatcactcgtgtgcctttgggttcagtcatcaagtgtatagtttattataaagagcctttctggaggaaaaaggattactgtggaaccatgattattgatggagaagaagctccagttgcctacacgttggatgataccaaacctgaaggcaactatgctgccataatgggatttatcctggcccacaaagccagaaaactggcacgtcttaccaaagaggaaaggttgaagaaactttgtgaactctatgccaaggttctgggttccctagaagctctggagccagtgcattatgaagaaaagaactggtgtgaggagcagtactctgggggctgctacacaacttatttcccccctgggatcctgactcaatatggaagggttctacgccagccagtggacaggatttactttgcaggcaccgagactgccacacactggagcggctacatggagggggctgtagaggccggggagagagcagcccgagagatcctgcatgccatggggaagattccagaggatgaaatctggcagtcagaaccagagtctgtggatgtccctgcacagcccatcaccaccacctttttggagagacatttgccctccgtgccaggcctgctcaggctgattggattgaccaccatcttttcagcaacggctcttggcttcctggcccacaaaagggggctacttgtgagagtctaaagagagagggtgtctgtaatcacactctcttcttactgtatttgggatatgagtttggggaaagagttgcaagtaaagttccatgaagacaaatagtgtggagtgaggcgggggagcatgaagataaatccaactctgactgtaaaatacaatggtatctctttctccgttgtggcccctgcttagtgtcccttacctggcttagcgttctgtttcaccagtttccaagtttattgccctcaaatctttagaatagttaaattggcttgtttaaggttcttgctgccccacaacacaccttgcccatgcacaggatgaattttttcctaccattatggctttgtgcttgttcttcctcttacctgtatagcctcacttccctagttctttgcattcgtccttaggtactgtattgttacagctgaaagacagtaaagaccatttagtcctcaccttctgttttagagttgagcaaactgaagcccacagaggtggaacttaattacctaagagccacaataagccactggtatctgggggactagaacacaaataattgcttttcccacctctttggatgttttccccaattatcctccttcactccctgtcatagttaccgatggtgtcccgttgtgtgggtttactctgtgctaagttgtcttacacttctcaaatgctactcagtatatagccttaactcttactgttttgtgcggtgtgtctccagctgattttaacttttttgatggtagaaattttatctcttcttccttttgtatcctccattgtatcttcatacaaaggacagtacacacttgggtaattaaaaataaaagttgattgaccat

SEQ ID NO: 477 - DNA, 603 bp, Homo sapiens
cgtgctgctacacaagaaccctgagactgacctgcaggacgaaaccatgaagagcctgatccttcttgccatcctggccgccttagcggtagtaactttgtgttatgaatcacatgaaagcatggaatcttatgaacttaatcccttcattaacaggagaaatgcaaataccttcatatcccctcagcagagatggagagctaaagtccaagagaggatccgagaacgctctaagcctgtccacgagctcaatagggaagcctgtgatgactacagactttgcgaacgctacgccatggtttatggatacaatgctgcctataatcgctacttcaggaagcgccgaggggccaaatgagactgagggaagaaaaaaaatctctttttttctggaggctggcacctgattttgtatccccctgtagcagcattactgaaatacataggcttatatacaatgcttctttcctgtatattctcttgtctggctgcacccctttttcccgcccccagattgataagtaatgaaagtgcactgcagtgagggtcaaaggagagtcaacatatgtgattgttccataataaacttctggtgtgatactt

SEQ ID NO: 478 - DNA, 5595 bp, Homo sapiens
gcggagatgtgcaagtggcgaagcttgaccgagagcaggctggagcagccgcccaactcctggcgcgggatctgctgaggggtcacggattttaggtgatgggcaagtcagaaagtcagatggatataactgatatcaacactccaaagccaaagaagaaacagcgatggactcgactggagatcagcctctcggtccttgtcctgctcctcaccatcatagctgtgagaatgatcgcactctatgcaacctacgatgatggtatttgcaagtcatcagactgcataaaatcagctgctcgactgatccaaaacatggatgccaccactgagccttgtagagactttttcaaatatgcttgcggaggctggttgaaacgtaatgtcattcccgagaccagctcccgttacggcaactttgacattttaagagatgaactagaagtcgttttgaaagatgtccttcaagaacccaaaactgaagatatagtagcagtgcagaaagcaaaagcattgtacaggtcttgtataaatgaatctgctattgatagcagaggtggagaacctctactcaaactgttaccagacatatatgggtggccagtagcaacagaaaactgggagcaaaaatatggtgcttcttggacagctgaaaaagctattgcacaactgaattctaaatatgggaaaaaagtccttattaatttgtttgttggcactgatgataagaattctgtgaatcatgtaattcatattgaccaacctcgacttggcctcccttctagagattactatgaatgcactggaatctataaagaggcttgtacagcatatgtggattttatgatttctgtggccagattgattcgtcaggaagaaagattgcccatcgatgaaaaccagcttgctttggaaatgaataaagttatggaattggaaaaagaaattgccaatgctacggctaaacctgaagatcgaaatgatccaatgcttctgtataacaagatgagattggcccagatccaaaataacttttcactagagatcaatgggaagccattcagctggttgaatttcacaaatgaaatcatgtcaactgtgaatattagtattacaaatgaggaagatgtggttgtttatgctccagaatatttaaccaaacttaagcccattcttaccaaatattctgccagagatcttcaaaatttaatgtcctggagattcataatggatcttgtaagcagcctcagccgaacctacaaggagtccagaaatgctttccgcaaggccctttatggtacaacctcagaaacagcaacttggagacgttgtgcaaactatgtcaatgggaatatggaaaatgctgtggggaggctttatgtggaagcagcatttgctggagagagtaaacatgtggtcgaggatttgattgcacagatccgagaagtttttattcagactttagatgacctcacttggatggatgccgagacaaaaaagagagctgaagaaaaggccttagcaattaaagaaaggatcggctatcctgatgacattgtttcaaatgataacaaactgaataatgagtacctcgagttgaactacaaagaagatgaatacttcgagaacataattcaaaatttgaaattcagccaaagtaaacaactgaagaagctccgagaaaaggtggacaaagatgagtggataagtggagcagctgtagtcaatgcattttactcttcaggaagaaatcagatagtcttcccagccggcattctgcagccccccttctttagtgcccagcagtccaactcattgaactatgggggcatcggcatggtcataggacacgaaatcacccatggcttcgatgacaatggcagaaactttaacaaagatggagacctcgttgactggtggactcaacagtctgcaagtaactttaaggagcaatcccagtgcatggtgtatcagtatggaaacttttcctgggacctggcaggtggacagcaccttaatggaattaatacactgggagaaaacattgctgataatggaggtcttggtcaagcatacagagcctatcagaattatattaaaaagaatggcgaagaaaaattacttcctggacttgacctaaatcacaaacaactatttttcttgaactttgcacaggtgtggtgtggaacctataggccagagtatgcggttaactccattaaaacagatgtgcacagtccaggcaatttcaggattattgggactttgcagaactctgcagagttttcagaagcctttcactgccgcaagaattcatacatgaatccagaaaagaagtgccgggtttggtgatcttcaaaagaagcattgcagcccttggctagacttgccaacaccacagaaatggggaattctctaatcgaaagaaaatgggccctaggggtcactgtactgacttgagggtgattaacagagagggcaccatcacaatacagataacattaggttgtcctagaaagggtgtggagggaggaagggggtctaaggtctatcaagtcaatcatttctcactgtgtacataatgcttaatttctaaagataatattactgtttatttctgtttctcatatggtctaccagtttgctgatgtccctagaaaacaatgcaaaacctttgaggtagaccaggatttctaatcaaaagggaaaagaagatgttgaagaatagagttaggcaccagaagaagagtaggtgacactatagtttaaaacacattgcctaactactagtttttacttttatttgcaacatttacagtccttcaaaatccttccaaagaattcttatacacattggggccttggagcttacatagttttaaactcatttttgccatacatcagttattcattctgtgatcatttattttaagcactcttaaagcaaaaaatgaatgtctaaaattgttttttgttgtacctgctttgactgatgctgagattcttcaggcttcctgcaattttctaagcaatttcttgctctatctctcaaaacttggtatttttcagagatttatataaatgtaaaaataataatttttatatttaattattaactacatttatgagtaactattattataggtaatcaatgaatattgaagtttcagcttaaaataaacagttgtgaaccaagatctataaagcgatatacagatgaaaatttgagactatttaaacttataaatcatattgatgaaaagatttaagcacaaactttagggtaaaaattgcgattggacagttgtctagagatatatatacttgtggttttcaaattggactttcaaaattaaatctgtccctgagagtgtctctgataaaagggcaaatctgcacctatgtagctctgcatctcctgtcttttcaggtttgtcatcagatggaaatattttgataataaattgaaattgtgaactcattgctccctaagactgtgacaactgtctaactttagaagtgcatttctgaatagaaatgggaggcctctgatggaccttctagaattataagtcacaaagagttctggaaaagaactgtttactgcttgataggaattcatcttttgaggcttctgttcctctcttttcctgttgtattgactattttcgttcattacttgattaagattttacaaaagaggagcacttccaaaattcttatttttcctaacaaaagatgaaagcagggaatttctatctaaatgatgagtattagttccctgtctcttgaaaaatgcccatttgcctttaaaaaaaaaagttacagaaatactataacatatgtacataaattgcataaagcataagtatacagttcaataaacttaactttaactgaacaatggccctgtagccagcacctgtaagaaacagagcagtaccagcgctctaaaagcacctccttgtcactttattactcccagaacaacaactatcctgacttctaatatcattcactagctttgcctggttttgtcttttatgcagatagaatcaatcagtatgtattcttttgtgcctggcttctttctctcagccttacatttgtgagattcctctgtattgtgctgattgtggatcttttcattctcattgcagaataatgttctattgtgggacttattacaatttgttcatcctattgttgatgggcacttgagaactttccattttggcgctattacaaatagtgcaactatgaatgtactgcatgttaccatcttacttgagcctttaatggacttatttcttcaaatccttccaaaaattattataagcattgaaattatagtttcaagccaactgtggatacccttaccctttcctcctttatcacaaccaccgttacaagtatacttatatttccctaaaatacatttaaaacttacctaagtgacatttgtagttggagtaataggagcttccagctctaataaaacagctgtctctaacttattttatttccatcatgtcagagcaggtgaagagccagaagtgaagagtgactagtacaaattataaaaagccactagactcttcactgttagctttttaaaacattaggctcccatccctatggaggaacaactctccagtgcctggatcccctctgtctacaaatataagattttctgggcctaaaggatagatcaaagtcaaaaatagcaatgcctccctatccctcacacatccagacatcatgaattttacatggtactcttgttgagttctatagagccttctgatgtctctaaagcactaccgattctttggagttgtcacatcagataagacatatctctaattccatccataaatccagttctactatggctgagttctggtcaaagaaagaaagtttagaagctgagacacaaagggttgggagctgatgaaactcacaaatgatggtaggaagaagctctcgacaatacccgttggcaaggagtctgcctccatgctgcagtgttcgagtggattgtaggtgcaagatggaaaggattgtaggtgcaagctgtccagagaaaagagtccttgttccagccctattctgccactcctgacagggtgaccttgggtatttgcaatattcctttgggcctctgcttctctcacctaaaaaaagagaattagattatattggtggttctcagcaagagaaggagtatgtgtccaatgctgccttcccatgaatctgtctcccagttatgaatcagtgggcaggataaactgaaaactcccatttaagtgtctgaatcgagtgagacaaaattttagtccaaataacaagtaccaaagttttatcaagtttgggtctgtgctgctgttactgttaaccatttaagtggggcaaaaccttgctaattttctcaaaagcatttatcattcttgttgccacagctggagctctcaaactaaaagacatttgttattttggaaagaagaaagactctattctcaaagtttcctaatcagaaatttttatcagtttccagtctcaaaaatacaaaataaaaacaaacgtttttaatact

SEQ ID NO: 479 - DNA, 976 bp, Homo sapiens
cccggaacctggcgcaactcctagagcggtccttggggagacgcgggtcccagtcctgcggctcctactggggagtgcgctggtcggaagattgctggactcgctgaagagagactacgcaggaaagccccagccacccatcaaatcagagagaaggaatccaccttcttacgctatggcaggtaagaaagtactcattgtctatgcacaccaggaacccaagtctttcaacggatccttgaagaatgtggctgtagatgaactgagcaggcagggctgcaccgtcacagtgtctgatttgtatgccatgaactttgagccgagggccacagacaaagatatcactggtactctttctaatcctgaggttttcaattatggagtggaaacccacgaagcctacaagcaaaggtctctggctagcgacatcactgatgagcagaaaaaggttcgggaggctgacctagtgatatttcagttcccgctgtactggttcagcgtgccggccatcctgaagggctggatggatagggtgctgtgccagggctttgcctttgacatcccaggattctacgattccggtttgctccagggtaaactagcgctcctttccgtaaccacgggaggcacggccgagatgtacacgaagacaggagtcaatggagattctcgatacttcctgtggccactccagcatggcacattacacttctgtggatttaaagtccttgcccctcagatcagctttgctcctgaaattgcatccgaagaagaaagaaaggggatggtggctgcgtggtcccagaggctgcagaccatctggaaggaagagcccatcccctgcacagcccactggcacttcgggcaataactctgtggcacgtgggcatcacgtaagcagcacactaggaggcccaggcgcaggcaaagagaagatggtgctgtcatgaaataaaattacaacatagctacctgg

SEQ ID NO: 480 - DNA, 2722 bp, Homo sapiens
gagcgggctgagggtaggaagtagccgctccgagtggaggcgactgggggctgaagagcgcgccgccctctcgtcccactttccaggtgtgtgatcctgtaaaattaaatcttccaagatgatctggtatatattaattataggaattctgcttccccagtctttggctcatccaggcttttttacttcaattggtcagatgactgatttgatccatactgagaaagatctggtgacttctctgaaagattatattaaggcagaagaggacaagttagaacaaataaaaaaatgggcagagaagttagatcggctaactagtacagcgacaaaagatccagaaggatttgttgggcatccagtaaatgcattcaaattaatgaaacgtctgaatactgagtggagtgagttggagaatctggtccttaaggatatgtcagatggctttatctctaacctaaccattcagagaccagtactttctaatgatgaagatcaggttggggcagccaaagctctgttacgtctccaggatacctacaatttggatacagataccatctcaaagggtaatcttccaggagtgaaacacaaatcttttctaacggctgaggactgctttgagttgggcaaagtggcctatacagaagcagattattaccatacggaactgtggatggaacaagccctaaggcaactggatgaaggcgagatttctaccatagataaagtctctgttctagattatttgagctatgcggtatatcagcagggagacctggataaggcacttttgctcacaaagaagcttcttgaactagatcctgaacatcagagagctaatggtaacttaaaatattttgagtatataatggctaaagaaaaagatgtcaataagtctgcttcagatgaccaatctgatcagaaaactacaccaaagaaaaaaggggttgctgtggattacctgccagagagacagaagtacgaaatgctgtgccgtggggagggtatcaaaatgacccctcggagacagaaaaaactcttttgccgctaccatgatggaaaccgtaatcctaaatttattctggctccagctaaacaggaggatgaatgggacaagcctcgtattattcgcttccatgatattatttctgatgcagaaattgaaatcgtcaaagacctagcaaaaccaaggctgagccgagctacagtacatgaccctgagactggaaaattgaccacagcacagtacagagtatctaagagtgcctggctctctggctatgaaaatcctgtggtgtctcgaattaatatgagaatacaagatctaacaggactagatgtttccacagcagaggaattacaggtagcaaattatggagttggaggacagtatgaaccccattttgactttgcacggaaagatgagccagatgctttcaaagagctggggacaggaaatagaattgctacatggctgttttatatgagtgatgtgtctgcaggaggagccactgtttttcctgaagttggagctagtgtttggcccaaaaaaggaactgctgttttctggtataatctgtttgccagtggagaaggagattatagtacacggcatgcagcctgtccagtgctagttggcaacaaatgggtatccaataaatggctccatgaacgtggacaagaatttcgaagaccttgtacgttgtcagaattggaatgacaaacaggcttccctttttctcctattgttgtactcttatgtgtctgatatacacatttccatagtcttaactttcaggagtttacaattgactaacactccatgattgattcagtcatgaacctcatcccatgtttcatctgtggacaattgcttactttgtgggttcttttaaaagtaacacgaaatcatcatattgcataaaaccttaaagttctgttggtatcacagaagacaaggcagagtttaaagtgaggaattttatatttaaagaactttttggttggataaaaacataatttgagcatccagttttagtatttcactacatctcagttggtgggtgttaagctagaatgggctgtgtgataggaaacaaatgccttacagatgtgcctaggtgttctgtttacctagtgtcttactctgttttctggatctgaagactagtaataaactaggacactaactgggttccatgtgattgccctttcatatgatcttctaagttgatttttttcctcccaagtcttttttaaagaaagtatactgtattttaccaaccccctctcttttcttttagctcctctgtggtgaattaaacgtacttgagttaaaatatttcgattttttttttttttttaatggaaagtcctgcataacaacactgggccttcttaactaaaatgctcaccacttagcctgtttttttatcccttttttaaaatgacagatgattttgttcaggaattttgctgtttttcttagtgctaataccttgcctcttattcctgctacagcagggtggtaatattggcattctgattaaatactgtgccttaggagactggaagtttaaaaatgtacaagtcctttcagtgatgagggaattgattttttttaaaagtctttttcttagaaagccaaaatgtttgtttttttaagattctgaaatgtgttgtgacaacaatgacctatttatgatcttaaatctttttt

SEQ ID NO: 481 - DNA, 2438 bp, Homo sapiens
cccggcggcgccaaccgaagcgccccgcctgatccgtgtccgacatgctgcgccgcgctctgctgtgcctggccgtggccgccctggtgcgcgccgacgcccccgaggaggaggaccacgtcctggtgctgcggaaaagcaacttcgcggaggcgctggcggcccacaagtacctgctggtggagttctatgccccttggtgtggccactgcaaggctctggcccctgagtatgccaaagccgctgggaagctgaaggcagaaggttccgagatcaggttggccaaggtggacgccacggaggagtctgacctggcccagcagtacggcgtgcgcggctatcccaccatcaagttcttcaggaatggagacacggcttcccccaaggaatatacagctggcagagaggctgatgacatcgtgaactggctgaagaagcgcacgggcccggctgccaccaccctgcctgacggcgcagctgcagagtccttggtggagtccagcgaggtggctgtcatcggcttcttcaaggacgtggagtcggactctgccaagcagtttttgcaggcagcagaggccatcgatgacataccatttgggatcacttccaacagtgacgtgttctccaaataccagctcgacaaagatggggttgtcctctttaagaagtttgatgaaggccggaacaactttgaaggggaggtcaccaaggagaacctgctggactttatcaaacacaaccagctgccccttgtcatcgagttcaccgagcagacagccccgaagatttttggaggtgaaatcaagactcacatcctgctgttcttgcccaagagtgtgtctgactatgacggcaaactgagcaacttcaaaacagcagccgagagcttcaagggcaagatcctgttcatcttcatcgacagcgaccacaccgacaaccagcgcatcctcgagttctttggcctgaagaaggaagagtgcccggccgtgcgcctcatcaccctggaggaggagatgaccaagtacaagcccgaatcggaggagctgacggcagagaggatcacagagttctgccaccgcttcctggagggcaaaatcaagccccacctgatgagccaggagctgccggaggactgggacaagcagcctgtcaaggtgcttgttgggaagaactttgaagacgtggcttttgatgagaaaaaaaacgtctttgtggagttctatgccccatggtgtggtcactgcaaacagttggctcccatttgggataaactgggagagacgtacaaggaccatgagaacatcgtcatcgccaagatggactcgactgccaacgaggtggaggccgtcaaagtgcacagcttccccacactcaagttctttcctgccagtgccgacaggacggtcattgattacaacggggaacgcacgctggatggttttaagaaattcctggagagcggtggccaggatggggcaggggatgatgacgatctcgaggacctggaagaagcagaggagccagacatggaggaagacgatgatcagaaagctgtgaaagatgaactgtaatacgcaaagccagacccgggcgctgccgagacccctcgggggctgcacacccagcagcagcgcacgcctccgaagcctgcggcctcgcttgaaggagggcgtcgccggaaacccagggaacctctctgaagtgacacctcacccctacacaccgtccgttcacccccgtctcttccttctgcttttcggtttttggaaagggatccatctccaggcagcccaccctggtggggcttgtttcctgaaaccatgatgtactttttcatacatgagtctgtccagagtgcttgctaccgtgttcggagtctcgctgcctccctcccgcgggaggtttctcctctttttgaaaattccgtctgtgggatttttagacatttttcgacatcagggtatttgttccaccttggccaggcctcctcggagaagcttgtcccccgtgtgggagggacggagccggactggacatggtcactcagtaccgcctgcagtgtcgccatgactgatcatggctcttgcatttttgggtaaatggagacttccggatcctgtcagggtgtcccccatgcctggaagaggagctggtggctgccagccctggggcccggcacaggcctgggccttccccttccctcaagccagggctcctcctcctgtcgtgggctcattgtgaccactggcctctctacagcacggcctgtggcctgttcaaggcagaaccacgacccttgactcccgggtggggaggtggccaaggatgctggagctgaatcagacgctgacagttcttcaggcatttctatttcacaatcgaattgaacacattggccaaataaagttgaaattttaccaccaaaaaaaaaaaaaaaa

SEQ ID NO: 482 - DNA, 3748 bp, Homo sapiens
cggaccgagacgcctcgccgcggccagctcgctgctctcgctggcggatggtgtgtggccgccgcaggacgcccgccgtgcccgggccatgaagtagcggctgctggcggcgccgctgcccaaccgccagccccagccccgcgctgcgctgcccggtcctctcccggcggggtcgtatcggcgtggacatggctggccgcgtccctagcctgctagttctccttgtttttccaagcagctgtttggctttccgaagcccactttctgtctttaagaggtttaaagaaactaccagaccattttccaatgaatgtcttggtaccaccagacccgtagttcctattgattcatcagattttgcattggatattcgcatgcctggggttacacctaaacagtccgatacatacttctgcatgtctatgcgaataccagtggatgaggaagccttcgtgattgacttcaagcctcgagccagcatggatactgtccatcacatgttactttttggatgcaatatgccttcatccactggaagttactggttttgtgatgaaggaacctgtacagataaagccaatattctgtatgcctgggcgagaaatgctccccctacccggctccccaaaggtgttggattcagagttggaggagagactggaagtaaatactttgtactacaggtacactatggggatattagtgcttttagagataataacaaggactgttctggtgtgtccttacacctcacacgtctgccacagcctttaattgctggcatgtaccttatgatgtctgttgacactgttatcccagcaggagaaaaagtggtgaattctgacatttcatgccattataaaaattatccaatgcatgtctttgcctatagagttcacactcaccatttaggtaaggtagtaagtggatacagagtaagaaatggacagtggacactgattggacggcagagccctcagctgccacaggctttctaccctgtggggcatccagttgatgtaagttttggtgacctactggctgcaagatgtgtattcactggtgaaggaaggacagaagccacacacattggtggcacgtctagtgatgaaatgtgcaacttatacattatgtattacatggaagccaagcatgcagtttctttcatgacctgtacccagaatgtagctccagatatgttcagaaccataccaccagaggccaacattccaattcccgtgaagtctgatatggttatgatgcatgaacatcataaagaaacagaatataaagataagattcctttactacagcagccaaaacgagaagaagaagaagtgttagaccagggtgatttctattcactactttccaagctgctaggagaaagggaagatgttgttcatgtgcacaaatataatcctacagaaaaggcagaatcagagtcagacctggtagctgagattgcaaatgtagtccaaaaaaaggatcttggtcgatctgatgccagagagggtgcagaacatgagaggggtaatgctattcttgtcagagacagaattcacaaattccacagactagtatctaccttgaggccaccagagagcagagttttctcattacagcagcccccacctggtgaaggcacctgggaaccagaacacacaggagatttccacatggaagaggcactggattggcctggagtatacttgttaccaggccaggtttctggggtggctctagaccctaagaataacctggtgattttccacagaggtgaccatgtctgggatggaaactcgtttgacagcaagtttgtttaccagcaaataggactcggaccaattgaagaagacactattcttgtcatagatccaaataatgctgcagtactccagtccagtgaaaaaaatctgttttacttgccacatggcttgagtatagataaagatgggaattattgggtcacagacgtggctctccatcaggtgttcaaactggatccaaacaataaagaaggccctgtattaatcctgggaaggagcatgcaaccaggcagtgaccagaatcacttctgtcaacccactgatgtggctgtggatccaggcactggagccatttatgtatcagatggttactgcaacagcaggattgtgcagttttcaccaagtggaaagttcatcacacagtggggagaagagtcttcagggagcagtcctctgccaggccagttcactgttcctcacagcttggctcttgtgcctcttttgggccaattatgtgtggcagaccgggaaaatggtcggatccagtgttttaaaactgacaccaaagaatttgtgagagagattaagcattcatcatttggaagaaatgtatttgcaatttcatatataccaggcttgctctttgcagtgaatgggaagcctcattttggggaccaagaacctgtacaaggatttgtgatgaacttttccaatggggaaattatagacatcttcaagccagtgcgcaagcactttgatatgcctcatgatattgttgcatctgaagatgggaccgtgtacattggagatgctcataccaacaccgtgtggaagttcaccttgactgagaaattggaacatcgatcagttaaaaaggctggcattgaggtccaggaaatcaaagaagccgaggcagttgttgaaaccaaaatggagaacaaacccacctcctcagaattgcagaagatgcaagagaaacagaagctgatcaaagagccaggctcgggagtgcctgttgttctcattacaacccttctggttattccggtggttgtcctgctggccattgccatatttattcggtggaaaaaatcaagggcctttggagcagattctgaacacaaactcgagacgagttcaggaagagtactgggaagatttagaggaaagggaagtggaggcttaaaccttggtaatttctttgcaagccgtaagggctacagtcgaaaagggtttgaccggcttagcactgagggcagtgaccaagagaaagaggatgatggaagtgaatcagaagaggagtattcagcacctctgcctgcgctcgcaccttcctcctcctgaaaaccaagctttgatttagattgagtaagatttacccagaatgtcagattcctttccctttagcacgtttaaagttctgtgtatttaattgtaaactgtactagtctgtgtgggactgtacacactttatttacttcgttttggttaagttggcttctgtttctagttgaggagtttcctaaaagttcataacagtgccattgtctttatatgaacatagactagagaaaccgtcctctttttccatcataattctaatctaacaatggaagatttgcccatttacacttttgagactttttggtggatgtaaataaccccattctttgcttgaacacagtatcttcccaatagcactttcattgccagtgtctttctttggtgcctttcctgttcagcattcttagcctgtggcaataaagagaaactttgtgctacatgacgacaaagctgctaaatctcctatttttttaaaatcactaacattatattgcaatgaaggaaataaaaaagtctctatttaaattcttttttaaattttcttcagttggtgtgtttttgggatgtcttatttttagatggttacactgttagaacactattttcagaatctgaatgtaatttgtgtaataacg

SEQ ID NO: 483 - DNA, 2653 bp, Homo sapiens
atggccctgtccactgagcatcctcccgccacacagaaacccgcccagccggggccaccgaccccaccccctgcctggaaacttaaggaggccggagctgtggggagctcagagctgagatcctacaggagtccagggctggagagaaaacctctgcgaggaaagggaaggagcaagccgtgaatttaagggacgctgtgaagcaatcatggatgcaatgaagagagggctctgctgtgtgctgctgctgtgtggagcagtcttcgtttcgcccagccaggaaatccatgcccgattcagaagaggagccagatcttaccaagtgatctgcagagatgaaaaaacgcagatgatataccagcaacatcagtcatggctgcgccctgtgctcagaagcaaccgggtggaatattgctggtgcaacagtggcagggcacagtgccactcagtgcctgtcaaaagttgcagcgagccaaggtgtttcaacgggggcacctgccagcaggccctgtacttctcagatttcgtgtgccagtgccccgaaggatttgctgggaagtgctgtgaaatagataccagggccacgtgctacgaggaccagggcatcagctacaggggcacgtggagcacagcggagagtggcgccgagtgcaccaactggaacagcagcgcgttggcccagaagccctacagcgggcggaggccagacgccatcaggctgggcctggggaaccacaactactgcagaaacccagatcgagactcaaagccctggtgctacgtctttaaggcggggaagtacagctcagagttctgcagcacccctgcctgctctgagggaaacagtgactgctactttgggaatgggtcagcctaccgtggcacgcacagcctcaccgagtcgggtgcctcctgcctcccgtggaattccatgatcctgataggcaaggtttacacagcacagaaccccagtgcccaggcactgggcctgggcaaacataattactgccggaatcctgatggggatgccaagccctggtgccacgtgctgaagaaccgcaggctgacgtgggagtactgtgatgtgccctcctgctccacctgcggcctgagacagtacagccagcctcagtttcgcatcaaaggagggctcttcgccgacatcgcctcccacccctggcaggctgccatctttgccaagcacaggaggtcgcccggagagcggttcctgtgcgggggcatactcatcagctcctgctggattctctctgccgcccactgcttccaggagaggtttccgccccaccacctgacggtgatcttgggcagaacataccgggtggtccctggcgaggaggagcagaaatttgaagtcgaaaaatacattgtccataaggaattcgatgatgacacttacgacaatgacattgcgctgctgcagctgaaatcggattcgtcccgctgtgcccaggagagcagcgtggtccgcactgtgtgccttcccccggcggacctgcagctgccggactggacggagtgtgagctctccggctacggcaagcatgaggccttgtctcctttctattcggagcggctgaaggaggctcatgtcagactgtacccatccagccgctgcacatcacaacatttacttaacagaacagtcaccgacaacatgctgtgtgctggagacactcggagcggcgggccccaggcaaacttgcacgacgcctgccagggcgattcgggaggccccctggtgtgtctgaacgatggccgcatgactttggtgggcatcatcagctggggcctgggctgtggacagaaggatgtcccgggtgtgtacaccaaggttaccaactacctagactggattcgtgacaacatgcgaccgtgaccaggaacacccgactcctcaaaagcaaatgagatcccgcctcttcttcttcagaagacactgcaaaggcgcagtgcttctctacagacttctccagacccaccacaccgcagaagcgggacgagaccctacaggagagggaagagtgcattttcccagatacttcccattttggaagttttcaggacttggtctgatttcaggatactctgtcagatgggaagacatgaatgcacactagcctctccaggaatgcctcctccctgggcagaaagtggccatgccaccctgttttcagctaaagcccaacctcctgacctgtcaccgtgagcagctttggaaacaggaccacaaaaatgaaagcatgtctcaatagtaaaagataacaagatctttcaggaaagacggattgcattagaaatagacagtatatttatagtcacaagagcccagcagggcctcaaagttggggcaggctggctggcccgtcatgttcctcaaaagcacccttgacgtcaagtctccttcccctttccccactccctggctctcagaaggtattccttttgtgtacagtgtgtaaagtgtaaatcctttttctttataaactttagagtagcatgagagaattgtatcatttgaacaactaggcttcagcatatttatagcaatccatgttagtttttactttctgttgccacaaccctgttttatactgtacttaataaattcagatatatttttcacagtttttcc

SEQ ID NO: 484 - DNA, 2287 bp, Homo sapiens
gaattccggctggcaggggagaacatggcgctgctctgggggctcctggtgctcagctggtcctgcctgcaaggcccctgctccgtgttctcccctgtgagcgccatggagcccttgggctggcagctaactagcgggccgaaccaggagcaggtgtccccacttaccctcctcaagttgggcaaccaggagcctggtggccagactgccctgaagagtcccccaggagtctgcagcagagaccccaccccagagcagacccacaggctggcccgggccatgatggccttcactgccgacctgttctccctggtggctcaaacgtccacctgccccaacctcatcctgtcacccctgagtgtggccctggcgctgtctcacctggcactaggtgctcagaaccacacgttgcagaggctgcaacaggtgctgcacgcaggctcagggccctgcctcccccatctgctgagccgcctctgccaggacctgggccccggcgcgttccgactggctgccaggatgtacctgcagaaaggatttcccatcaaagaagatttcctggaacaatccgaacagctatttggggcaaagcccgtgagcctgacgggaaagcaggaagatgacctggcaaacatcaaccaatgggtgaaggaggccacggaggggaagattcaggaattcctctctgggctgccggaagacaccgtgttgcttctcctcaacgccatccacttccagggtttctggaggaacaagtttgacccgagccttacccagagagactccttccacctggacgagcagttcacggtgcccgtggaaatgatgcaggcccgcacgtacccgctgcgctggttcttgctggagcagcctgagatccaggtggctcatttcccctttaagaacaacatgagctttgtggtccttgtacccacccactttgaatggaacgtgtcccaggtactggccaacctgagttgggacaccctgcacccacctctggtgtgggagaggcccaccaaggtccggctgcctaagctgtatctgaaacaccaaatggacctggtggccaccctcagccagctgggcctgcaggagttgttccaggccccagacctgcgtgggatctccgagcagagcctggtggtgtccggcgtgcagcatcagtccaccctggagctcagcgaggtcggcgtggaggcggcggcggccaccagcattgccatgtcccgcatgtccctgtcctccttcagcgtgaaccgccccttcctcttcttcatcttcgaggacaccacaggccttcccctcttcgtgggcagcgtgaggaaccccaaccccagtgcaccgcgggagctcaaggaacagcaggattccccgggcaacaaggacttcctccagagcctgaaaggcttcccccgcggagacaagcttttcggccctgacttaaaacttgtgccccccatggaggaggattacccccagtttggcagccccaagtgaggggccgtggctgtggcatccagactccctgcctggaccagcctctccactcatgtgactctttccaacctgctttgtggcactggggcaggggccgggggcagtctgagagaggccattctttcccaacacctcttggggagtttagggtgggggggggcgcggctgggaggagggcaggcatcggggagccgggagcctgaccctcatctttcttccaaacaggctcagagggtgtcctgcaccggggcctgggcaggagggaggtgcttctagttctgccaggagacaggttagctgctccccacgtcagctgggacaccccgacttttgtttaccagagaaaaagggagggggagagggctgcctttggacttgtcccgggacacctaggctagggtggggagagacgggccctggtggtggctcgggaggcgaagcgttgtcctcagccccgcgtggaactcgtgtctggcacagcctggctgtggcctaacctgccgagagtccatcagcctccatcctaccccctgtgccttgtcacgccagacttcccacggctcctcgagatcccaacactgccagcatttcccttccttcctctcctgtctccctcctctgcccgggagctcaggaaccgaggcagggaaggatcccatgagctccttaaggctcttttgtaaggtttttgtagtgatttttatgccacctgaataaagaatgaatgggcaaaaaaaaaaaaaaaaaaaaaaaaaaaaaaaaaaaaaaaaaaaaaaaaaaggaattc

SEQ ID NO: 485 - DNA, 3503 bp, Homo sapiens
atggggggatgcacggtgaagcctcagctgctgctcctggcgctcgtcctccacccctggaatccctgtctgggtgcggactcggagaagccctcgagcatccccacagataaattattagtcataactgtagcaacaaaagaaagtgatggattccatcgatttatgcagtcagccaaatatttcaattatactgtgaaggtccttggtcaaggagaagaatggagaggtggtgatggaattaatagtattggagggggccagaaagtgagattaatgaaagaagtcatggaacactatgctgatcaagatgatctggttgtcatgtttactgaatgctttgatgtcatatttgctggtggtccagaagaagttctaaaaaaattccaaaaggcaaaccacaaagtggtctttgcagcagatggaattttgtggccagataaaagactagcagacaagtatcctgttgtgcacattgggaaacgctatctgaattcaggaggatttattggctatgctccatatgtcaaccgtatagttcaacaatggaatctccaggataatgatgatgatcagctcttttacactaaagtttacattgatccactgaaaagggaagctattaacatcacattggatcacaaatgcaaaattttccagaccttaaatggagctgtagatgaagttgttttaaaatttgaaaatggcaaagccagagctaagaatacattttatgaaacattaccagtggcaattaatggaaatggacccaccaagattctcctgaattattttggaaactatgtacccaattcatggacacaggataatggctgcactctttgtgaattcgatacagtcgacttgtctgcagtagatgtccatccaaacgtatcaataggtgtttttattgagcaaccaaccccttttctacctcggtttctggacatattgttgacactggattacccaaaagaagcacttaaactttttattcataacaaagaagtttatcatgaaaaggacatcaaggtattttttgataaagctaagcatgaaatcaaaactataaaaatagtaggaccagaagaaaatctaagtcaagcggaagccagaaacatgggaatggacttttgccgtcaggatgaaaagtgtgattattactttagtgtggatgcagatgttgttttgacaaatccaaggactttaaaaattttgattgaacaaaacagaaagatcattgctcctcttgtaactcgtcatggaaagctgtggtccaatttctggggagcattgagtcctgatggatactatgcacgatctgaagattatgtggatattgttcaagggaatagagtaggagtatggaatgtcccatatatggctaatgtgtacttaattaaaggaaagacactccgatcagagatgaatgaaaggaactattttgttcgtgataaactggatcctgatatggctctttgccgaaatgctagagaaatgggtgtatttatgtacatttctaatagacatgaatttggaaggctattatccactgctaattacaatacttcccattataacaatgacctctggcagatttttgaaaatcctgtggactggaaggaaaagtatataaaccgtgattattcaaagattttcactgaaaatatagttgaacagccctgtccagatgtcttttggttccccatattttctgaaaaagcctgtgatgaattggtagaagaaatggaacattacggcaaatggtctgggggaaaacatcatgatagccgtatatctggtggttatgaaaatgtcccaactgatgatatccacatgaagcaagttgatctggagaatgtatggcttgattttatccgggagttcattgcaccagttacactgaaggtctttgcaggctattatacgaagggatttgcactactgaattttgtagtaaaatactcccctgaacgacagcgttctcttcgtcctcatcatgatgcttctacatttaccataaacattgcacttaataacgtgggagaagactttcagggaggtggttgcaaatttctaaggtacaattgctctattgagtcaccacgaaaaggctggagcttcatgcatcctgggagactcacacatttgcatgaaggacttcctgttaaaaatggaacaagatacattgcagtgtcatttatagatccctaagttatttacttttcattgaattgaaatttattttgggtgaatgactggcatgaacacgtctttgaagttgtggctgagaagatgagaggaatatttaaataacatcaacagaacaacttcactttgggccaaacatttgaaaaactttttataaaaaattgtttgatatttcttaatgtctgctctgagccttaaaacacagattgaagaagaaaagaaagaaaaaacttaaatatttatttctatgctttgttgcctctgagaataatgacaatttatgaatttgtgtttcaaattgataaaatatttaggtacaaataacaagactaataatattttcttatttaaaaaaagcatgggaagatttttatttatcaaaatatagaggaaatgtagacaaaatggatataaatgaaaattaccatgttgtaaaaccttgaaaatcagattctaactgattgtatgcaactaagtatttctgaacacctatgcaggtcttatttacagtgttactaagggaacacacaaagaattacacaacgttttcctcaagaaaatggtacaaaacacaaccgaggagcgtatacagttgaaaacatttttgttttgattggaaggcagattattttatattagtattaaaaatcaaaccctatgtttctttcagatgaatcttccaaagtggattatattaagcaggtattagatttagaaaacctttccatttcttaaagtattatcaagtgtcaagatcagcaagtgtccttaagtcaaataggtttttttttgttggtggttgtgcttgctttccttttttagaaagttctagaaaataggaaaacgaaaaatttcattgagatgagtagtgcatttaattattttttaaaaaactttttaagtacttgaattttatatcaggaaaacaaagttgttgagccttgcttcttccgttttgccctttgtctcgctccttattcttttttggggggagggttatttgcttttttatcttcctggcataatttccattttattcttctgagtgtctatgttaacttccctctatcccgcttataaaaaaattctccaacaaaaatacttgttgacttgatgttttatcacttctctaagtaaggttgaaatatccttattgtagctactgtttttaatgtaaaggttaaacttgaaaagaaattcttaatcacggtgccaaaattcattttctaacaccatgtgttagaaaattataaaaaataaaataattttaaaaaaaaaaaaaaaaaaaaaaa

SEQ ID NO: 486 - DNA, 1028 bp, Homo sapiens
ggcacgaggacggcgcccgccgcccgcccggagcccgcgagcaaccccagtcccccccacccgcgcgtggcggcgccggctccctagccaccgcggccccaccctcttccggcctcagctgtccgggctgctttcgcctccgcctgtggatgctgcgcctctccgaacgcaacatgaaggtgctccttgccgccgccctcatcgcggggtccgtcttcttcctgctgctgccgggaccttctgcggccgatgagaagaagaaggggcccaaagtcaccgtcaaggtgtattttgacctacgaattggagatgaagatgtaggccgggtgatctttggtctcttcggaaagactgttccaaaaacagtggataattttgtggccttagctacaggagagaaaggatttggctacaaaaacagcaaattccatcgtgtaatcaaggacttcatgatccagggcggagacttcaccaggggagatggcacaggaggaaagagcatctacggtgagcgcttccccgatgagaacttcaaactgaagcactacgggcctggctgggtgagcatggccaacgcaggcaaagacaccaacggctcccagttcttcatcacgacagtcaagacagcctggctagatggcaagcatgtggtgtttggcaaagttctagagggcatggaggtggtgcggaaggtggagagcaccaagacagacagccgggataaacccctgaaggatgtgatcatcgcagactgcggcaagatcgaggtggagaagccctttgccatcgccaaggagtagggcacagggacatctttctttgagtgaccgtctgtgcaggccctgtagtccgccacagggctttgagctgcactggccccggtgctggcatctggtggagcggacccactcccctcacattccacaggcccatggactcacttttgtaacaaactcctaccaaccctgaccaataaaaaaaaatgtgggtttttttttttttttaataaaaaaaaaaaaaaaaaaaaa

SEQ ID NO: 487 - DNA, 4425 bp, Homo sapiens
gcgcgcgtggggctccattccgcggtgctgggtctccgtgccggggtgggtgctcgtgtgtgcgcttctcctccccatcccccttcccccaagaataaaagaagaaccgggaggcgtgctcagaaaataaataaataaccaccacacacgcgcagcccggagcgagtcggcggggctggcggcagcggcggaggaggagtgaaggcggcggcggcggaggagggacgcgcggaaaaggcagcaactttaaagccagctcagagcctagacctccagccgagcggtttgcagcgcggcggcggcggcggcggcggcggcggcggcgttgagtgtctggcccgccggtccggtcggggtgtgcagtcggacggacgagcagcgcgtcgctgtcctccggcagctggagatgtccgagcccaaggcaattgatcccaagttgtcgacgaccgacagggtggtgaaagctgttccatttcctccaagtcaccggcttacagcaaaagaagtgtttgataatgatggaaaacctcgtgtggatatcttaaaggcgcatcttatgaaggagggaaggctggaagagagtgttgcattgagaataataacagagggtgcatcaattcttcgacaggaaaaaaatttgctggatattgatgcgccagtcactgtttgtggggacattcatggacaattctttgatttgatgaagctctttgaagtcgggggatctcctgccaacactcgctacctcttcttaggggactatgttgacagagggtacttcagtattgaatgtgtgctgtatttgtgggccttgaaaattctctaccccaaaacactgtttttacttcgtggaaatcatgaatgtagacatctaacagagtatttcacatttaaacaagaatgtaaaataaagtattcagaacgcgtatatgatgcctgtatggatgcctttgactgccttcccctggctgccctgatgaaccaacagttcctgtgtgtgcatggtggtttgtctccagagattaacactttagatgatatcagaaaattagaccgattcaaagaaccacctgcatatggacctatgtgtgatatcctgtggtcagaccccctggaagattttggaaatgagaagactcaggaacatttcactcacaacacagtcagggggtgttcatacttctacagttacccggctgtatgtgaattcttacagcacaataacttgttatctatactccgagcccacgaagcccaagatgcagggtaccgcatgtacaggaaaagccaaacaacaggcttcccttctctaattacaattttttcagcaccaaattacttagatgtatacaataacaaagctgcagtattgaagtatgagaacaatgttatgaatatcaggcaattcaactgttctcctcatccatactggcttccaaatttcatggatgtttttacttggtcccttccatttgttggggaaaaagtgactgagatgctggtaaatgtcctcaacatctgctcagatgatgaactagggtcagaagaagatggatttgatggtgcaacagctgcagcccggaaagaggtgataaggaacaagatccgagcaataggcaaaatggccagagtgttctcagtgctcagagaagagagtgagagtgtgctgacgctgaaaggcttgaccccaactggcatgctccccagcggagtactttctggagggaagcaaaccctgcaaagcgctactgttgaggctattgaggctgatgaagctatcaaaggattttcaccacaacataagatcactagcttcgaggaagccaagggcttagaccgaattaatgagaggatgccgcctcgcagagatgccatgccctctgacgccaaccttaactccatcaacaaggctctcacctcagagactaacggcacggacagcaatggcagtaatagcagcaatattcagtgaccacttcctgttcacttttttttttttttttttttttttttgagctgcggggcatgatggggattgctgcatatcagcagttggatgttcttgcctctgacagtagcttatttgctctgggggccaggaattggattcagtttacactatcattaaaaaagagggagagagataataaactatattttggtggggatggtgattaaacacctcttttgggtatgccttttaaaaatgcttatagagaaaaaaattttaaaaagaaagctaatgctagtatatactgcaatgttaggggaatgaacatgttttcctactgcattggggacttctagataggttaatgaaaggccttttattctgttactggacatgaaaactttgtctaatttcttactctattgtacgtttacagtcgcagcactaaaaatggatgacatcaaacatttttaacaaaatgatgtacaaactaaggactatttattgataatgttttgctactcttgtcagacaatggctataaactgaattaggcagtcttaaaaaaaaaaaaaaaacagaaaaagaaaaaaaagaacgttgcaaatttgttaaaatgccaaaaaggacagtttaattttgtacagattatgcttacctcaggtttctttagtgtgcttgaatgcccttctttccatataacacttatcttcttcttaattcggcaatggaatatcttttaagttttaaaaaaactggaataattatatctatcttttttgccgtttatatttaggggtttttgttgataaaatcaagtcttggttgtggcttgctgaattaaatatttatgagtggtgcatttttaagtatagtgaacaagacaccatattaagtacagtgataaagcatctatattctgtaaaaaaaaaaaaaatctgcctatgcatgttttttaagaaaaaaaaaatggctgtatcggcctgtatgggactgtaatgcgcttagtggtctgacatatactggaaatgtatgtatactggcgtactttatattctctaaaatgcttaatgcctttgaaattttgtaatcaaaaaaaagctttgaaaaaatctaaaggggagagtattctttaaagtttttaacataagcttgtcaatgcacatgtagatggttagcatgtttagcaaaccttgtgaaattataataagtttgtagttacatgtgaaactctaaatgcatggcaactgttaatgtcataacagtttagttattttgttctgttctgtcatgtgccacaaaatatgtacttttttcacttttttccctttgtatatcagttacgggttacaactggttcattctgaaaacaacaacaacaaaagtccattcatattttttaacaattgtataagtgcccaagtaattcactacagcctaaagccttgcctttgtaatttgacttctgacatgttggcaatcaaagcatgcacttgtaacaatgaaaaagaaaaagcattttatattactactcaataaaatgtgcatgaacttacagaattctcatccttccactgagtccgctgaagggatttatgtgcacaaccaccatgtgtcttctaggtgctggcccaccaccacacatcacaggctgatttccacaggcttcttcctaggggcctcgtgatctgaggggtggtgcctacttccactgtaagaaagaatcttggtggatttgtgtctcaaatcagataagagaagcctgtttaaagagcagatgccatcttctggcttcctcaaggagccagttaaaaaaccagagcattcctttttattgaaaaataaaattaatttgttatcaggttgtttcagttgtattggatgccctatctatctgctaaagcaaaaagtactaggctactaagtgcattttcatcacagaaaagagttgcatttgtattaacaagaaatttgtatacccacgcttcagctactatctaatcatcacccgaagatttaagatacaccaaatttcagtttgtttgtaacattgttcatctttagtgcactttgttttatataataaagtatgcctgttatattaaataataagaatatggcaattagcgatatagcatacccaaacaaagatgttctcgatacagtctggcaaagactatcccaaggttattttaatgaattcagacattttttcctgtggatatttctccatcctaaaaaaagtggcaaccaaggaaaatatttagatgcaacttactagagtgatgatgtgaaagaaatggtgattctggtatcatggtgtttattttctttcttataactgcagagaaaatatcctgactaaaaaaatttcatttttttggattcctttcttttacaaattgtgctgaggcaactatggcatagaaataaacatttgacattaaaataagtaaaaaaaaaaaaaaaaaaaa

SEQ ID NO: 488 - DNA, 2548 bp, Homo sapiens
aggctgggggacaaccagaggccagggagaaagaggagacagaggaagcaccgagggtgactacgttgtcttccctagatcaattttcttctggatggctcgtgctgagtggtagatgagcgaatcgatgagtccagccactgtgaacatgcccccaatgatggcgcacacacctgtcaggaagtgggtgaaggacctgtgcttctccgtcagcttcaccatcatgggcgagagctcatagaggacgaagactccgggaaggccttggtcgcccaacagcccattggcaaccttctcatgtctggtcacagagaactgatttgtcctcagtacctctccgtccaccttcatgtacacagtgggcaccaccttcacaaagtgctgtaacacctgtgaaggcagcggctccggcgcgagcgcgaggctgcagcccccgagtttcccggccgtcttcgccccctctccccctcctttcttcttctctgcctctcctgcctctcgccgctgctcctcccgcgctctccggctctgaatgtcgaccttaatttatttccccctaccctgcccgctccctcgcgtgcccaatcgcccggccggcgcgggccccgcgcgccgcctccccctccccacgcgcgccccctccccgccggcgacccgagggccgcagctgggccgccgccgccgtttcctgcgagccagcctgagcgcaacacttctccgagccagcgagccagcgagccgccgacccgccgagcaaaatgggaaatgaggcaagttatcctttggaaatgtgctcacactttgatgcggatgaaattaaaaggctaggaaagagatttaagaagcttgatttggacaattctggttctttgagtgtggaagagttcatgtctctgcctgagttacaacagaatcctttagtacagcgagtaatagatatattcgacacagatgggaatggagaagtagactttaaagaattcattgagggcgtctctcagttcagtgtcaaaggagataaggagcagaaattgaggtttgctttccgtatctatgacatggataaagatggctatatttccaatggggaactcttccaggtattgaagatgatggtggggaacaatctgaaagatacacagttacagcaaattgtagacaaaaccataataaatgcagataaggatggagatggaagaatatcctttgaagaattctgtgctgttgtaggtggcctagatatccacaaaaagatggtggtagatgtgtgactcttatcagagagtaccacccaacacttttgctttcttctccatctctgaagatctgctcaagacgtccagcaatgctctctgtgtatttaaatggaagtatttttctctgtgaagccacattttccaacatgagcctcatgaagccaactaagtgttattgaactgtaattctctcaataactcagtgtagcactttaaagtctgaaggacagcaacatgaaaagagcatatcaatgtggtggagaaagggaaggggttggctttttaatttatttttcttcatcttttataacaagaaagtatctatatatacatatgtaaatatttatatatagatatatgtagctttctatatatgtagtaggttggctttaatttaatatccttgattcagaaacaaaacaatagagtacaaaagtgccaagcagaacataaaacatccttacttttatttcacacagttttatatatagatagaagactgtacaatttgagccgggtgttaggccagctattttccttttcctgtgctttctcctttgagagattgacaaagcatttgttaacgtcctattatttaccttaattacatttttgtaacaaaggagtctgtaactttatttatacttatgaatatatccagggactacttctcattgctgagcagcttttaatacacctctgcttgaggagaaagtctagttcattgctactgccaagagctagttcttgtgttcatatagtaactgcacagggcttatagctgcttcattctgctactttgtaactaggagccattgcatttattaaatgtccctcagtaacgttaagtgctagttgtgattttatacataaaggccagaagctgtctgaggcaatcatgattgattgtatgtatcacttactgaagaatacctgaagtgatcatgtaactacttataagggatatccatttgtttgattacatgggtaaataatttgtcattaaacttgtgtttgaatcatgaattcccttgtttcaaaagacttgcagctaatctaaaaaactggtgatatttaatatgcatgtatgtatctaaacacccacatatatttgtggtttaagtgtgagaaatcttgctaatctatatgccacagaagagcaaaattgtatccaaatttatgccacttaaatttctttaccacgagggatagagcatgcatactggtttttttttcttgatttgcccatataattggtaatggataacttaataaatttgtgtgatataaaa

SEQ ID NO: 489 - DNA, 775 bp, Homo sapiens
tgcaggagaatggctactcatcacacgctgtggatgggactggccctgctgggggtgctgggcgacctgcaggcagcaccggaggcccaggtctccgtgcagcccaacttccagcaggacaagttcctggggcgctggttcagcgcgggcctcgcctccaactcgagctggctccgggagaagaaggcggcgttgtccatgtgcaagtctgtggtggcccctgccacggatggtggcctcaacctgacctccaccttcctcaggaaaaaccagtgtgagacccgaaccatgctgctgcagcccgcggggtccctcggctcctacagctaccggagtccccactggggcagcacctactccgtgtcagtggtggagaccgactacgaccagtacgcgctgctgtacagccagggcagcaagggccctggcgaggacttccgcatggccaccctctacagccgaacccagacccccagggctgagttaaaggagaaattcaccgccttctgcaaggcccagggcttcacagaggataccattgtcttcctgccccaaaccgataagtgcatgacggaacaataggactccccagggctgaagctgggatcccggccagccaggtgacccccacgctctggatgtctctgctctgttccttccccgagcccctgccccggctccccgccaaagcacccctgcccactcgggcttcatcctgcacaataaactccggaagcaagtcagttaaaaaaaaaaaaaaaaaaaaaaaaaaaaa

SEQ ID NO: 490 - DNA, 1311 bp, Homo sapiens
ctctaccggcgggatttgatggcgtgatgtctcacagaaagttctccgctcccagacatgggtccctcggcttcctgcctcggaagcgcagcagcaggcatcgtgggaaggtgaagagcttccctaaggatgacccgtccaagccggtccacctcacagccttcctgggatacaaggctggcatgactcacatcgtgcgggaagtcgacaggccgggatccaaggtgaacaagaaggaggtggtggaggctgtgaccattgtagagacaccacccatggtggttgtgggcattgtgggctacgtggaaacccctcgaggcctccggaccttcaagactgtctttgctgagcacatcagtgatgaatgcaagaggcgtttctataagaattggcataaatctaagaagaaggcctttaccaagtactgcaagaaatggcaggatgaggatggcaagaagcagctggagaaggacttcagcagcatgaagaagtactgccaagtcatccgtgtcattgcccacacccagatgcgcctgcttcctctgcgccagaagaaggcccacctgatggagatccaggtgaacggaggcactgtggccgagaagctggactgggcccgcgagaggcttgagcagcaggtacctgtgaaccaagtgtttgggcaggatgagatgatcgacgtcatcggggtgaccaagggcaaaggctacaaaggggtcaccagtcgttggcacaccaagaagctgccccgcaagacccaccgaggcctgcgcaaggtggcctgtattggggcatggcatcctgctcgtgtagccttctctgtggcacgcgctgggcagaaaggctaccatcaccgcactgagatcaacaagaagatttataagattggccagggctaccttatcaaggacggcaagctgatcaagaacaatgcctccactgactatgacctatctgacaagagcatcaaccctctgggtggctttgtccactatggtgaagtgaccaatgactttgtcatgctgaaaggctgtgtggtgggaaccaagaagcgggtgctcaccctccgcaagtccttgctggtgcagacgaagcggcgggctctggagaagattgaccttaagttcattgacaccacctccaagtttggccatggccgcttccagaccatggaggagaagaaagcattcatgggaccactgaagaaagaccgaattgcaaaggaagaaggagcttaatgccaggaacagattttgcagttggtggggtctcaataaaagttattttccactgaaaaaaaaaaaaaaaaaa

SEQ ID NO: 491 - DNA, 1449 bp, Homo sapiens
cttttcctgtggcagcagccgggctgagaggagcgtggctgtctcctctctccgccatggcgtgtgctcgcccactgatatcggtgtactccgaaaagggggagtcatctggcaaaaatgtcactttgcctgctgtattcaaggctcctattcgaccagatattgtgaactttgttcacaccaacttgcgcaaaaacaacagacagccctatgctgtcagtgaattagcaggtcatcagactagtgctgagtcttggggtactggcagagctgtggctcgaattcccagagttcgaggtggtgggactcaccgctctggccagggtgcttttggaaacatgtgtcgtggaggccgaatgtttgcaccaaccaaaacctggcgccgttggcatcgtagagtgaacacaacccaaaaacgatacgccatctgttctgccctggctgcctcagccctaccagcactggtcatgtctaaaggtcatcgtattgaggaagttcctgaacttcctttggtagttgaagataaagttgaaggctacaagaagaccaaggaagctgttttgctccttaagaaacttaaagcctggaatgatatcaaaaaggtctatgcctctcagcgaatgagagctggcaaaggcaaaatgagaaaccgtcgccgtatccagcgcaggggcccgtgcatcatctataatgaggataatggtatcatcaaggccttcagaaacatccctggaattactctgcttaatgtaagcaagctgaacattttgaagcttgctcctggtgggcatgtgggacgtttctgcatttggactgaaagtgctttccggaagttagatgaattgtacggcacttggcgtaaagccgcttccctcaagagtaactacaatcttcccatgcacaagatgattaatacagatcttagcagaatcttgaaaagcccagagatccaaagagcccttcgagcaccacgcaagaagatccatcgcagagtcctaaagaagaacccactgaaaaacttgagaatcatgttgaagctaaacccatatgcaaagaccatgcgccggaacaccattcttcgccaggccaggaatcacaagctccgggtggataaggcagctgctgcagcagcggcactacaagccaaatcagatgagaaggcggcggttgcaggcaagaagcctgtggtaggtaagaaaggaaagaaggctgctgttggtgttaagaagcagaagaagcctctggtgggaaaaaaggcagcagctaccaagaaaccagcccctgaaaagaagcctgcagagaagaaacctactacagaggagaagaagcctgctgcataaactcttaaatttgattattccataaaggtcaaatcattttggacagcttcttttgaataaagacctgattatacaggcagtgagaaacatgaaaaaaaaaaaaaaaaaa

SEQ ID NO: 492 - DNA, 1033 bp, Homo sapiens
cctagcgccgctgggcctgcaggtctctgtcgagcagcggacgccggtctctgttccgcaggatggggtttgttaaagttgttaagaataaggcctactttaagagataccaagtgaaatttagaagacgacgagagggtaaaactgattattatgctcggaaacgcttggtgatacaagataaaaataaatacaacacacccaaatacaggatgatagttcgtgtgacaaacagagatatcatttgtcagattgcttatgcccgtatagagggggatatgatagtctgcgcagcgtatgcacacgaactgccaaaatatggtgtgaaggttggcctgacaaattatgctgcagcatattgtactggcctgctgctggcccgcaggcttctcaataggtttggcatggacaagatctatgaaggccaagtggaggtgactggtgatgaatacaatgtggaaagcattgatggtcagccaggtgccttcacctgctatttggatgcaggccttgccagaactaccactggcaataaagtttttggtgccctgaagggagctgtggatggaggcttgtctatccctcacagtaccaaacgattccctggttatgattctgaaagcaaggaatttaatgcagaagtacatcggaagcacatcatgggccagaatgttgcagattacatgcgctacttaatggaagaagatgaagatgcttacaagaaacagttctctcaatacataaagaacagcgtaactccagacatgatggaggagatgtataagaaagctcatgctgctatacgagagaatccagtctatgaaaagaagcccaagaaagaagttaaaaagaagaggtggaaccgtcccaaaatgtcccttgctcagaagaaggatcgggtagctcaaaagaaggcaagcttcctcagagctcaggagcgggctgctgagagctaaacccagcaattttctatgattttttcagatatagataataaacttatgaacagcaactaaaaaaaaaaaaaaaaaaa

SEQ ID NO: 493 - DNA, 950 bp, Homo sapiens
gggaccttaattctctttcccatcttgcaagatggcgggtgaaaaagttgagaagccagatactaaagagaagaaacccgaagccaagaaggttgatgctggtggcaaggtgaaaaagggtaacctcaaagctaaaaagcccaagaaggggaagccccattgcagccgcaaccctgtccttgtcagaggaattggcaggtattcccgatctgccatgtattccagaaaggccatgtacaagaggaagtactcagccgctaaatccaaggttgaaaagaaaaagaaggagaaggttctcgcaactgttacaaaaccagttggtggtgacaagaacggcggtacccgggtggttaaacttcgcaaaatgcctagatattatcctactgaagatgtgcctcgaaagctgttgagccacggcaaaaaacccttcagtcagcacgtgagaaaactgcgagccagcattacccccgggaccattctgatcatcctcactggacgccacaggggcaagagggtggttttcctgaagcagctggctagtggcttattacttgtgactggacctctggtcctcaatcgagttcctctacgaagaacacaccagaaatttgtcattgccacttcaaccaaaatcgatatcagcaatgtaaaaatcccaaaacatcttactgatgcttacttcaagaagaagaagctgcggaagcccagacaccaggaaggtgagatcttcgacacagaaaaagagaaatatgagattacggagcagcgcaagattgatcagaaagctgtggactcacaaattttaccaaaaatcaaagctattcctcagctccagggctacctgcgatctgtgtttgctctgacgaatggaatttatcctcacaaattggtgttctaaatgtcttaagaacctaattaaatagctgactacaaaaaaaaaaaaaaaaaaa

SEQ ID NO: 494 - DNA, 838 bp, Homo sapiens
cctctttttccggctggaaccatggagggtgtagaagagaagaagaaggaggttcctgctgtgccagaaacccttaagaaaaagcgaaggaatttcgcagagctgaagatcaagcgcctgagaaagaagtttgcccaaaagatgcttcgaaaggcaaggaggaagcttatctatgaaaaagcaaagcactatcacaaggaatataggcagatgtacagaactgaaattcgaatggcgaggatggcaagaaaagctggcaacttctatgtacctgcagaacccaaattggcgtttgtcatcagaatcagaggtatcaatggagtgagcccaaaggttcgaaaggtgttgcagcttcttcgccttcgtcaaatcttcaatggaacctttgtgaagctcaacaaggcttcgattaacatgctgaggattgtagagccatatattgcatgggggtaccccaatctgaagtcagtaaatgaactaatctacaagcgtggttatggcaaaatcaataagaagcgaattgctttgacagataacgctttgattgctcgatctcttggtaaatacggcatcatctgcatggaggatttgattcatgagatctatactgttggaaaacgcttcaaagaggcaaataacttcctgtggcccttcaaattgtcttctccacgaggtggaatgaagaaaaagaccacccattttgtagaaggtggagatgctggcaacagggaggaccagatcaacaggcttattagaagaatgaactaaggtgtctaccatgattatttttctaagctggttggttaataaacagtacctgctctcaaattgaaaaaaa

SEQ ID NO: 495 - DNA, 890 bp, Homo sapiens
tttcctttctctctcctcccgccgcccaagatgccgaaaggaaagaaggccaagggaaagaaggtggctccggccccagctgtcgtgaagaagcaggaggctaagaaagtggtgaatcccctgtttgagaaaaggcctaagaattttggcattggacaggacatccagcccaaaagagacctcacccgctttgtgaaatggccccgctatatcaggttgcagcggcagagagccatcctctataagcggctgaaagtgcctcctgcgattaaccagttcacccaggccctggaccgccaaacagctactcagctgcttaagctggcccacaagtacagaccagagacaaagcaagagaagaagcagagactgttggcccgggccgagaagaaggctgctggcaaaggggacgtcccaacgaagagaccacctgtccttcgagcaggagttaacaccgtcaccaccttggtggagaacaagaaagctcagctggtggtgattgcacacgacgtggatcccatcgagctggttgtcttcttgcctgccctgtgtcgtaaaatgggggtcccttactgcattatcaagggaaaggcaagactgggacgtctagtccacaggaagacctgcaccactgtcgccttcacacaggtgaactcggaagacaaaggcgctttggctaagctggtggaagctatcaggaccaattacaatgacagatacgatgagatccgccgtcactggggtggcaatgtcctgggtcctaagtctgtggctcgtatcgccaagctcgaaaaggcaaaggctaaagaacttgccactaaactgggttaaatgtacactgttgagttttctgtacataaaaataattgaaataatacaaattttccttc

SEQ ID NO: 496 - DNA, 609 bp, Homo sapiens
ttctcttcctgctctccatcatggcgcaggatcaaggtgaaaaggagaaccccatgcgggaacttcgcatccgcaaactctgtctcaacatctgtgttggggagagtggagacagactgacgcgagcagccaaggtgttggagcagctcacagggcagacccctgtgttttccaaagctagatacactgtcagatcctttggcatccggagaaatgaaaagattgctgtccactgcacagttcgaggggccaaggcagaagaaatcttggagaagggtctaaaggtgcgggagtatgagttaagaaaaaacaacttctcagatactggaaactttggttttgggatccaggaacacatcgatctgggtatcaaatatgacccaagcattggtatctacggcctggacttctatgtggtgctgggtaggccaggtttcagcatcgcagacaagaagcgcaggacaggctgcattggggccaaacacagaatcagcaaagaggaggccatgcgctggttccagcagaagtatgatgggatcatccttcctggcaaataaattcccgtttctatccaaaagagcaataaaaagttttcagtgaaatgtgcaa

SEQ ID NO: 497 - DNA, 632 bp, Homo sapiens
ctctcggctttcggctcggaggaggccaaggtgcaacttccttcggtcgtcccgaatccgggttcatccgacaccagccgcctccaccatgccgccgaagttcgaccccaacgagatcaaagtcgtatacctgaggtgcaccggaggtgaagtcggtgccacttctgccctggcccccaagatcggccccctgggtctgtctccaaaaaaagttggtgatgacattgccaaggcaacgggtgactggaagggcctgaggattacagtgaaactgaccattcagaacagacaggcccagattgaggtggtgccttctgcctctgccctgatcatcaaagccctcaaggaaccaccaagagacagaaagaaacagaaaaacattaaacacagtgggaatatcacttttgatgagattgtcaacattgctcgacagatgcggcaccgatccttagccagagaactctctggaaccattaaagagatcctggggactgcccagtcagtgggctgtaatgttgatggccgccatcctcatgacatcatcgatgacatcaacagtggtgctgtggaatgcccagccagttaagcacaaaggaaaacatttcaataaaggatcatttgacaactggtga

SEQ ID NO: 498 - DNA, 493 bp, Homo sapiens
cttttttcttttttccggcgttcaagatgtcgaagcgaggacgtggtgggtcctctggtgcgaaattccggatttccttgggtcttccggtaggagctgtaatcaattgtgctgacaacacaggagccaaaaacctgtatatcatctccgtgaaggggatcaagggacggctgaacagacttcccgctgctggtgtgggtgacatggtgatggccacagtcaagaaaggcaaaccagagctcagaaaaaaggtacatccagcagtggtcattcgacaacgaaagtcataccgtagaaaagatggcgtgtttctttattttgaagataatgcaggagtcatagtgaacaataaaggcgagatgaaaggttctgccattacaggaccagtagcaaaggagtgtgcagacttgtggccccggattgcatccaatgctggcagcattgcatgattctccagtatatttgtaaaaaataaaaaaaaactaaacccatt

SEQ ID NO: 499 - DNA, 618 bp, Homo sapiens
cttttgcgggtggcggcgaacgcggagagcacgccatgaaggcctcgggcacgctacgagagtacaaggtagtgggtcgctgcctgcccacccccaaatgccacacgccgcccctctaccgcatgcgaatctttgcgcctaatcatgtcgtcgccaagtcccgcttctggtactttgtatctcagttaaagaagatgaagaagtcttcaggggagattgtctactgtgggcaggtgtttgagaagtcccccctgcgggtgaagaacttcgggatctggctgcgctatgactcccggagcggcacccacaacatgtaccgggaataccgggacctgaccaccgcaggcgctgtcacccagtgctaccgagacatgggtgcccggcaccgcgcccgagcccactccattcagatcatgaaggtggaggagatcgcggccagcaagtgccgccggccggctgtcaagcagttccacgactccaagatcaagttcccgctgccccaccgggtcctgcgccgtcagcacaagccacgcttcaccaccaagaggcccaacaccttcttctaggtgcagggccctcgtccgggtgtgccccaaataaactcaggaacgccccggt

SEQ ID NO: 500 - DNA, 698 bp, Homo sapiens
ctttcctttcgctgctgcggccgcagccatgagtatgctcaggcttcagaagaggctcgcctctagtgtcctccgctgtggcaagaagaaggtctggttagaccccaatgagaccaatgaaatcgccaatgccaactcccgtcagcagatccggaagctcatcaaagatgggctgatcatccgcaagcctgtgacggtccattcccgggctcgatgccggaaaaacaccttggcccgccggaagggcaggcacatgggcataggtaagcggaagggtacagccaatgcccgaatgccagagaaggtcacatggatgaggagaatgaggattttgcgccggctgctcagaagataccgtgaatctaagaagatcgatcgccacatgtatcacagcctgtacctgaaggtgaaggggaatgtgttcaaaaacaagcggattctcatggaacacatccacaagctgaaggcagacaaggcccgcaagaagctcctggctgaccaggctgaggcccgcaggtctaagaccaaggaagcacgcaagcgccgtgaagagcgcctccaggccaagaaggaggagatcatcaagactttatccaaggaggaagagaccaagaaataaaacctcccactttgtctgtacatactggcctctgtgattacatagatcagccattaaaataaaacaagccttaatctgc

SEQ ID NO: 501 - DNA, 568 bp, Homo sapiens
gaaccgccatcttccagtaattcgccaaaatgacgaacacaaagggaaagaggagaggcacccgatatatgttctctaggccttttagaaaacatggagttgttcctttggccacatatatgcgaatctataagaaaggtgatattgtagacatcaagggaatgggtactgttcaaaaaggaatgccccacaagtgttaccatggcaaaactggaagagtctacaatgttacccagcatgctgttggcattgttgtaaacaaacaagttaagggcaagattcttgccaagagaattaatgtgcgtattgagcacattaagcactctaagagccgagatagcttcctgaaacgtgtgaaggaaaatgatcagaaaaagaaagaagccaaagagaaaggtacctgggttcaactaaagcgccagcctgctccacccagagaagcacactttgtgagaaccaatgggaaggagcctgagctgctggaacctattccctatgaattcatggcataataggtgttaaaaaaaaaaataaaggacctctgggctacaaaaaaaaaaaaaaaaaa

SEQ ID NO: 502 - DNA, 574 bp, Homo sapiens
cctttctaactccgctgccgccatggctcctgtgaaaaagcttgtggtgaaggggggcaaaaaaaagaagcaagttctgaagttcactcttgattgcacccaccctgtagaagatggaatcatggatgctgccaattttgagcagtttttgcaagaaaggatcaaagtgaacggaaaagctgggaaccttggtggaggggtggtgaccatcgaaaggagcaagagcaagatcaccgtgacatccgaggtgcctttctccaaaaggtatttgaaatatctcaccaaaaaatatttgaagaagaataatctacgtgactggttgcgcgtagttgctaacagcaaagagagttacgaattacgttacttccagattaaccaggacgaagaagaggaggaagacgaggattaaatttcatttatctggaaaattttgtatgagttcttgaataaaacttgggaaccaaaatggtggtttatccttgtatctctgcagtgtggattgaacagaaaattggaaatcatagtcaaagggcttcccttggttcgccactcatttatttgtaacttgacttct

SEQ ID NO: 503 - DNA, 546 bp, Homo sapiens
attggagacccttttcacaagatggcgccgaaagcgaagaaggaagctcctgcccctcctaaagctgaagccaaagcgaaggctttaaaggccaagaaggcagtgttgaaaggtgtccacagccacaaaaagaagaagatccgcacgtcacccaccttccggcggccgaagacactgcgactccggagacagcccaaatatcctcggaagagcgctcccaggagaaacaagcttgaccactatgctatcatcaagtttccgctgaccactgagtctgccatgaagaagatagaagacaacaacacacttgtgttcattgtggatgttaaagccaacaagcaccagattaaacaggctgtgaagaagctgtatgacattgatgtggccaaggtcaacaccctgattcggcctgatggagagaagaaggcatatgttcgactggctcctgattacgatgctttggatgttgccaacaaaattgggatcatctaaactgagtccagctgcctaattctgaatatatatatatatatatcttttcaccat

SEQ ID NO: 504 - DNA, 898 bp, Homo sapiens
tcctctttccctaagcagcctgagggttgactggattggtgaggcccgtgtggctacttctgtggaagcagtgctgtagttactggaagataaaagggaaagcaagcccttggtgggggaaagtatggctgcgatgatggcatttcttaggacacctttggattaataatgaaaacaactactctctgagcagctgttcgaatcatctgatatttatactgaatgagttactgtaagtacgtattgacagaattacactgtactttcctctaggtgatctgtgaaaatggttcgctattcacttgacccggagaaccccacgaaatcatgcaaatcaagaggttccaatcttcgtgttcactttaagaacactcgtgaaactgctcaggccatcaagggtatgcatatacgaaaagccacgaagtatctgaaagatgtcactttacagaaacagtgtgtaccattccgacgttacaatggtggagttggcaggtgtgcgcaggccaagcaatggggctggacacaaggtcggtggcccaaaaagagtgctgaatttttgctgcacatgcttaaaaacgcagagagtaatgctgaacttaagggtttagatgtagattctctggtcattgagcatatccaagtgaacaaagcacctaagatgcgccgccggacctacagagctcatggtcggattaacccatacatgagctctccctgccacattgagatgatccttacggaaaaggaacagattgttcctaaaccagaagaggaggttgcccagaagaaaaagatatcccagaagaaactgaagaaacaaaaacttatggcacgggagtaaattcagcattaaaataaatgtaattaaaaggaaaaaaaaaaaaaaaaaaaaaaaaaa

SEQ ID NO: 505 - DNA, 556 bp, Homo sapiens
tcttttcgccatcttttgtctttccgtggagctgtcgccatgaaggtcgagctgtgcagttttagcgggtacaagatctaccccggacacgggaggcgctacgccaggaccgacgggaaggttttccagtttcttaatgcgaaatgcgagtcggctttcctttccaagaggaatcctcggcagataaactggactgtcctctacagaaggaagcacaaaaagggacagtcggaagaaattcaaaagaaaagaacccgccgagcagtcaaattccagagggccattactggtgcatctcttgctgatataatggccaagaggaatcagaaacctgaagttagaaaggctcaacgagaacaagctatcagggctgctaaggaagcaaaaaaggctaagcaagcatctaaaaagactgcaatggctgctgctaaggcacctacaaaggcagcacctaagcaaaagattgtgaagcctgtgaaagtttcagctccccgagttggtggaaaacgctaaactggcagattagatttttaaataaagattggattataactct

SEQ ID NO: 506 - DNA, 525 bp, Homo sapiens
cttcccttttgcggccatcaccgaagcgggagcggccaaaatgaagtttaatccctttgtgacttccgaccgaagcaagaatcgcaaaaggcatttcaatgcaccttcccacattcgaaggaagattatgtcttcccctctttccaaagagctgagacagaagtacaacgtgcgatccatgcccatccgaaaggatgatgaagttcaggttgtacgtggacactataaaggtcagcaaattggcaaagtagtccaggtttacaggaagaaatatgttatctacattgaacgggtgcagcgggaaaaggctaatggcacaactgtccacgtaggcattcaccccagcaaggtggttatcactaggctaaaactggacaaagaccgcaaaaagatcctcgaacggaaagccaaatctcgccaagtaggaaaggaaaagggcaaatacaaggaagaaaccattgagaagatgcaggaataaagtaatcttatatacaagctttgattaaaacttgaaacaaagaaaaa

SEQ ID NO: 507 - DNA, 513 bp, Homo sapiens
tccttctttcctttttgctgtaggcccgggtggttgctgccgaaatgggcaagttcatgaaacctgggaaggtggtgcttgtcctggctggacgctactccggacgcaaagctgtcatcgtgaagaacattgatgatggcacctcagatcgcccctacagccatgctctggtggctggaattgaccgctacccccgcaaagtgacagctgccatgggcaagaagaagatcgccaagagatcaaagataaaatcttttgtgaaagtgtataactacaatcacctaatgcccacaaggtactctgtggatatccccttggacaaaactgtcgtcaataaggatgtcttcagagatcctgctcttaaacgcaaggcccgacgggaggccaaggtcaagtttgaagagagatacaagacaggcaagaacaagtggttcttccagaaactgcggttttagatgctttgttttgatcattaaaaattataaagaaaaaaaaaaaaaaaaaaaaaaaaaa

SEQ ID NO: 508 - DNA, 514 bp, Homo sapiens
ctttttcgtctgggctgccaacatgccatccagactgaggaagacccggaaacttaggggccacgtgagccacggccacggccgcataggcaagcaccggaagcaccccggcggccgcggtaatgctggtggtctgcatcaccaccggatcaacttcgacaaataccacccaggctactttgggaaagttggtatgaagcattaccacttaaagaggaaccagagcttctgcccaactgtcaaccttgacaaattgtggactttggtcagtgaacagacacgggtgaatgctgctaaaaacaagactggggctgctcccatcattgatgtggtgcgatcgggctactacaaagttctgggaaagggaaagctcccaaagcagcctgtcatcgtgaaggccaaattcttcagcagaagagctgaggagaagattaagagtgttgggggggcctgtgtcctggtggcttgaagccacatggagggagtttcattaaatgctaactacttttaaaaa

SEQ ID NO: 509 - DNA, 500 bp, Homo sapiens
ctctttccgtctcaggtcgccgctgcgaagggagccgccgccatgtctgcgcatctgcaatggatggtcgtgcggaactgctccagtttcctgatcaagaggaataagcagacctacagcactgagcccaataacttgaaggcccgcaattccttccgctacaacggactgattcaccgcaagactgtgggcgtggagccggcagccgacggcaaaggtgtcgtggtggtcattaagcggagatccggccagcggaagcctgccacctcctatgtgcggaccaccatcaacaagaatgctcgcgccacgctcagcagcatcagacacatgatccgcaagaacaagtaccgccccgacctgcgcatggcagccatccgcagggccagcgccatcctgcgcagccagaagcctgtgatggtgaagaggaagcggacccgccccaccaagagctcctgagccccctgcccccagagcaataaagtcagctggctttctcaaaa

SEQ ID NO: 510 - DNA, 737 bp, Homo sapiens
ttccggcgttgttgaccctatttcccgtgctgcaccgcagcccctttctcttccggttctaggcgcttcgggagccgcggcttatggtgcagacatggccaagtccaagaaccacaccacacacaaccagtcccgaaaatggcacagaaatggtatcaagaaaccccgatcacaaagatacgaatctcttaagggggtggaccccaagttcctgaggaacatgcgctttgccaagaagcacaacaaaaagggcctaaagaagatgcaggccaacaatgccaaggccatgagtgcacgtgccgaggctatcaaggccctcgtaaagcccaaggaggttaagcccaagatcccaaagggtgtcagccgcaagctcgatcgacttgcctacattgcccaccccaagcttgggaagcgtgctcgtgcccgtattgccaaggggctcaggctgtgccggccaaaggccaaggccaaggccaaggccaaggatcaaaccaaggcccaggctgcagccccagcttcagttccagctcaggctcccaaacgtacccaggcccctacaaaggcttcagagtagatatctctgccaacatgaggacagaaggactggtgcgaccccccacccccgcccctgggctaccatctgcatggggctggggtcctcctgtgctatttgtacaaataaacctgaggcaggaaaaaaaaaaaaaaaaaaaaaaaaaaaaaaaaaaaaaaaaaaa

SEQ ID NO: 511 - DNA, 442 bp, Homo sapiens
cttcctttccaacttggacgctgcagaatggctcccgcaaagaagggtggcgagaagaaaaagggccgttctgccatcaacgaagtggtaacccgagaatacaccatcaacattcacaagcgcatccatggagtgggcttcaagaagcgtgcacctcgggcactcaaagagattcggaaatttgccatgaaggagatgggaactccagatgtgcgcattgacaccaggctcaacaaagctgtctgggccaaaggaataaggaatgtgccataccgaatccgtgtgcggctgtccagaaaacgtaatgaggatgaagattcaccaaataagctatatactttggttacctatgtacctgttaccactttcaaaaatctacagacagtcaatgtggatgagaactaatcgctgatcgtcagatcaaataaagttataaaattgc

SEQ ID NO: 512 - DNA, 521 bp, Homo sapiens
tcttcctcggcgctgcctacggaggtggcagccatctccttctcggcatcatggccgccctcagaccccttgtgaagcccaagatcgtcaaaaagagaaccaagaagttcatccggcaccagtcagaccgatatgtcaaaattaagcgtaactggcggaaacccagaggcattgacaacagggttcgtagaagattcaagggccagatcttgatgcccaacattggttatggaagcaacaaaaaaacaaagcacatgctgcccagtggcttccggaagttcctggtccacaacgtcaaggagctggaagtgctgctgatgtgcaacaaatcttactgtgccgagatcgctcacaatgtttcctccaagaaccgcaaagccatcgtggaaagagctgcccaactggccatcagagtcaccaaccccaatgccaggctgcgcagtgaagaaaatgagtaggcagctcatgtgcacgttttctgtttaaataaatgtaaaaactgccatctggcatcttccttc

SEQ ID NO: 513 - DNA, 849 bp, Homo sapiens
tttttttttcttcctcttccggggacgttgtctgcaggcactcagaatggtccagcgtttgacataccgacgtaggctttcctacaatacagcctctaacaaaactaggctgtcccgaacccctggtaatagaattgtttacctttataccaagaaggttgggaaagcaccaaaatctgcatgtggtgtgtgcccaggcagacttcgaggggttcgtgctgtaagacctaaagttcttatgagattgtccaaaacaaagaaacatgtcagcagggcctatggtggttccatgtgtgctaaatgtgttcgtgacaggatcaagcgtgctttccttatcgaggagcagaaaatcgttgtgaaagtgttgaaggcacaagcacagagtcagaaagctaaataaaaaaatgaaacttttttgagtaataaaaatgaaaagacgctgtccaatagaaaaagttggtgtgctggagctacctcacctcagcttgagagagccagttgtgtgcatctctttccagttttgcatccagtgacgtctgcttggcatcttgagattgttatggtgagagtatttacacctcagcaaatgctgcaaaatcctgttttcccccagagagctggaggttaaatactaccagcacatccctagatactactcaagttacagtatatgatcactaatatagtatgctcttggtaccaggagctctgatatatatctggtacatgtttgataatgacttgattgttattataagtacttattaatacttcgattctgtaaagagtttagggtttgattttataaaatccaaaatgagccttttattgaaaaaaaaaaaaaaaaaa

SEQ ID NO: 514 - DNA, 511 bp, Homo sapiens
ggcctcgtccttctcttaccgccatcttggctcctgtggaggcctgctgggaacgggacttctaaaaggaactatgtctggaaggctgtggtccaaggccatttttgctggctataagcggggtctccggaaccaaagggagcacacagctcttcttaaaattgaaggtgtttacgcccgagatgaaacagaattctatttgggcaagagatgcgcttatgtatataaagcaaagaacaacacagtcactcctggcggcaaaccaaacaaaaccagagtcatctggggaaaagtaactcgggcccatggaaacagtggcatggttcgtgccaaattccgaagcaatcttcctgctaaggccattggacacagaatccgagtgatgctgtacccctcaaggatttaaactaacgaaaaatcaataaataaatgtggatttgtgctcttgtatttttaagtggattaaaaaacttactaccttaaaaaaaaaaaaaaaaaaaaaaaaaaaaaa

SEQ ID NO: 515 - DNA, 371 bp, Homo sapiens
tctttctggtctcggccgcagaagcgagatgacgaagggaacgtcatcgtttggaaagcgtcgcaataagacgcacacgttgtgccgccgctgtggctctaaggcctaccaccttcagaagtcgacctgtggcaaatgtggctaccctgccaagcgcaagagaaagtataactggagtgccaaggctaaaagacgaaataccaccggaactggtcgaatgaggcacctaaaaattgtataccgcagattcaggcatggattccgtgaaggaacaacacctaaacccaagagggcagctgttgcagcatccagttcatcttaagaatgtcaacgattagtcatgcaataaatgttctggttttaaaaaatac

SEQ ID NO: 516 - DNA, 392 bp, Homo sapiens
cttcctttctgggctcggacctaggtcgcggcgacatggccaaacgtaccaagaaagtcgggatcgtcggtaaatacgggacccgctatggggcctccctccggaaaatggtgaagaaaattgaaatcagccagcacgccaagtacacttgctctttctgtggcaaaaccaagatgaagagacgagctgtggggatctggcactgtggttcctgcatgaagacagtggctggcggtgcctggacgtacaataccacttccgctgtcacggtaaagtccgccatcagaagactgaaggagttgaaagaccagtagacgctcctctactctttgagacatcactggcctataataaatgggttaatttatgtaacaaaaaaaaaaaaaaaaaaa

SEQ ID NO: 517 - DNA, 368 bp, Homo sapiens
ctttttcgtccttttccccggttgctgcttgctgtgagtgtctctagggtgatacgtgggtgagaaaggtcctggtccgcgccagagcccagcgcgcctcgtcgccatgcctcggaaaattgaggaaatcaaggacttcctgctcacagcccgacgaaaggatgccaaatctgtcaagatcaagaaaaataaggacaacgtgaagtttaaagttcgatgcagcagatacctttacaccctggtcatcactgacaaagagaaggcagagaaactgaagcagtccctgccccccggtttggcagtgaaggaactgaaatgaaccagacacactgattggaactgtattatattaaaatactaaaaatcct

SEQ ID NO: 518 - DNA, 1116 bp, Homo sapiens
ccttctctcgccaggcgtcctcgtggaagtgacatcgtctttaaaccctgcgtggcaatccctgacgcaccgccgtgatgcccagggaagacagggcgacctggaagtccaactacttccttaagatcatccaactattggatgattatccgaaatgtttcattgtgggagcagacaatgtgggctccaagcagatgcagcagatccgcatgtcccttcgcgggaaggctgtggtgctgatgggcaagaacaccatgatgcgcaaggccatccgagggcacctggaaaacaacccagctctggagaaactgctgcctcatatccgggggaatgtgggctttgtgttcaccaaggaggacctcactgagatcagggacatgttgctggccaataaggtgccagctgctgcccgtgctggtgccattgccccatgtgaagtcactgtgccagcccagaacactggtctcgggcccgagaagacctcctttttccaggctttaggtatcaccactaaaatctccaggggcaccattgaaatcctgagtgatgtgcagctgatcaagactggagacaaagtgggagccagcgaagccacgctgctgaacatgctcaacatctcccccttctcctttgggctggtcatccagcaggtgttcgacaatggcagcatctacaaccctgaagtgcttgatatcacagaggaaactctgcattctcgcttcctggagggtgtccgcaatgttgccagtgtctgtctgcagattggctacccaactgttgcatcagtaccccattctatcatcaacgggtacaaacgagtcctggccttgtctgtggagacggattacaccttcccacttgctgaaaaggtcaaggccttcttggctgatccatctgcctttgtggctgctgcccctgtggctgctgccaccacagctgctcctgctgctgctgcagccccagctaaggttgaagccaaggaagagtcggaggagtcggacgaggatatgggatttggtctctttgactaatcaccaaaaagcaaccaacttagccagttttatttgcaaaacaaggaaataaaggcttacttctttaaaaaaaaaaaaaaaaaaa

SEQ ID NO: 519 - DNA, 512 bp, Homo sapiens
cctttcctcagctgccgccaaggtgctcggtccttccgaggaagctaaggctgcgttggggtgaggccctcacttcatccggcgactagcaccgcgtccggcagcgccagccctacactcgcccgcgccatggcctctgtctccgagctcgcctgcatctactcggccctcattctgcacgacgatgaggtgacagtcacggaggataagatcaatgccctcattaaagcagccggtgtaaatgttgagcctttttggcctggcttgtttgcaaaggccctggccaacgtcaacattgggagcctcatctgcaatgtaggggccggtggacctgctccagcagctggtgctgcaccagcaggaggtcctgccccctccactgctgctgctccagctgaggagaagaaagtggaagcaaagaaagaagaatccgaggagtctgatgatgacatgggctttggtctttttgactaaacctcttttataacatgttcaataaaaagctgaacttt

SEQ ID NO: 520 - DNA, 482 bp, Homo sapiens
ttccttttcctccctgtcgccaccgaggtcgcacgcgtgagacttctccgccgcctccgccgcagacgccgccgcgatgcgctacgtcgcctcctacctgctggctgccctagggggcaactcctcccccagcgccaaggacatcaagaagatcttggacagcgtgggtatcgaggcggacgacgaccggctcaacaaggttatcagtgagctgaatggaaaaaacattgaagacgtcattgcccagggtattggcaagcttgccagtgtacctgctggtggggctgtagccgtctctgctgccccaggctctgcagcccctgctgctggttctgcccctgctgcagcagaggagaagaaagatgagaagaaggaggagtctgaagagtcagatgatgacatgggatttggcctttttgattaaattcctgctcccctgcaaataaagcctttttacacatctcaaaaaaaaaaaaaaaaaa

SEQ ID NO: 521 - DNA, 843 bp, Homo sapiens
gcggagcgcggcggcaagatggcagtgcaaatatccaagaagaggaagtttgtcgctgatggcatcttcaaagctgaactgaatgagtttcttactcgggagctggctgaagatggctactctggagttgaggtgcgagttacaccaaccaggacagaaatcattatcttagccaccagaacacagaatgttcttggtgagaagggccggcggattcgggaactgactgctgtagttcagaagaggtttggctttccagagggcagtgtagagctttatgctgaaaaggtggccactagaggtctgtgtgccattgcccaggcagagtctctgcgttacaaactcctaggagggcttgctgtgcggagggcctgctatggtgtgctgcggttcatcatggagagtggggccaaaggctgcgaggttgtggtgtctgggaaactccgaggacagagggctaaatccatgaagtttgtggatggcctgatgatccacagcggagaccctgttaactactacgttgacactgctgtgcgccacgtgttgctcagacagggtgtgctgggcatcaaggtgaagatcatgctgccctgggacccaactggtaagattggccctaagaagcccctgcctgaccacgtgagcattgtggaacccaaagatgagatactgcccaccacccccatctcagaacagaagggtgggaagccagagccgcctgccatgccccagccagtccccacagcataacagggtctccttggcagctgtattctggagtctggatgttgctctctaaagacctttaataaaattttgtacaaagacaaaaaaaaaaaaaaa

SEQ ID NO: 522 - DNA, 921 bp, Homo sapiens
cgcgactcccacttccgcccttttggctctctgaccagcaccatggcggttggcaagaacaagcgccttacgaaaggcggcaaaaagggagccaagaagaaagtggttgatccattttctaagaaagattggtatgatgtgaaagcacctgctatgttcaatataagaaatattggaaagacgctcgtcaccaggacccaaggaaccaaaattgcatctgatggtctcaagggtcgtgtgtttgaagtgagtcttgctgatttgcagaatgatgaagttgcatttagaaaattcaagctgattactgaagatgttcagggtaaaaactgcctgactaacttccatggcatggatcttacccgtgacaaaatgtgttccatggtcaaaaaatggcagacaatgattgaagctcacgttgatgtcaagactaccgatggttacttgcttcgtctgttctgtgttggttttactaaaaaacgcaacaatcagatacggaagacctcttatgctcagcaccaacaggtccgccaaatccggaagaagatgatggaaatcatgacccgagaggtgcagacaaatgacttgaaagaagtggtcaataaattgattccagacagcattggaaaagacatagaaaaggcttgccaatctatttatcctctccatgatgtcttcgttagaaaagtaaaaatgctgaagaagcccaagtttgaattgggaaagctcatggagcttcatggtgaaggcagtagttctggaaaagccactggggacgagacaggtgctaaagttgaacgagctgatggatatgaaccaccagtccaagaatctgtttaaagttcagacttcaaatagtggcaaataaaaagtgctatttgtgatggtttgcttctgaaaaaaaaaaaaaaaaaaaaaaaaaaa

SEQ ID NO: 523 - DNA, 916 bp, Homo sapiens
aagacggaggtcctctttccttgcctaacgcagccatggctcgtggtcccaagaagcatctgaagcgggtggcagctccaaagcattggatgctggataaattgaccggtgtgtttgctcctcgtccatccaccggtccccacaagttgagagagtgtctccccctcatcattttcctgaggaacagacttaagtatgccctgacaggagatgaagtaaagaagatttgcatgcagcggttcattaaaatcgatggcaaggtccgaactgatataacctaccctgctggattcatggatgtcatcagcattgacaagacgggagagaatttccgtctgatctatgacaccaagggtcgctttgctgtacatcgtattacacctgaggaggccaagtacaagttgtgcaaagtgagaaagatctttgtgggcacaaaaggaatccctcatctggtgactcatgatgcccgcaccatccgctaccccgatcccctcatcaaggtgaatgataccattcagattgatttggagactggcaagattactgatttcatcaagttcgacactggtaacctgtgtatggtgactggaggtgctaacctaggaagaattggtgtgatcaccaacagagagaggcaccctggatcttttgacgtggttcacgtgaaagatgccaatggcaacagctttgccactcgactttccaacatttttgttattggcaagggcaacaaaccatggatttctcttccccgaggaaagggtatccgcctcaccattgctgaagagagagacaaaagactggcggccaaacagagcagtgggtgaaatgggtccctgggtgacatgtcagatctttgtacgtaattaaaaatattgtggcaggattaatagcaaaaaaaaaaaaaaaaaaaaaa

SEQ ID NO: 524 - DNA, 931 bp, Homo sapiens
cagagtttcgccatggcccggggccccaagaagcacttaaagcgtgttgcagcgccgaagcattggatgcttgacaaactaacgggtgtatttgcacctcgtccatcgacaggtccccacaagctgagggaatgtcttcctctgatcgtcttcctcaggaatagactcaagtatgcgttgactggagatgaggtaaagaagatatgtatgcaacgtttcatcaaaattgatggcaaggttcgagtggatgtcacataccctgctggattcatggatgtcatcagcatcgagaagacaggtgaacatttccgcctggtctatgacaccaagggccgttttgctgttcaccgcatcacagtggaagaggcaaagtacaagttgtgcaaagtgaggaagattactgtgggagtgaagggaatccctcacctggtgactcatgatgctcgaaccatccgctacccagatcctgtcatcaaggtgaacgatactgtgcagattgatttagggactggcaagataatcaactttatcaaatttgatacaggcaatttgtgtatggtgattggtggagccaacctcggtcgtgttggtgtgatcaccaacagggaaagacatcctggttcttttgatgtggtgcatgtgaaggatgccaatggcaacagctttgccacgaggctttccaacatttttgtcattggcaatggcaataaaccttggatttccctgcccaggggaaagggcattcgacttactgttgctgaagagagagataagaggctggccaccaaacagagcagtggctaaattgcagtagcagcatatctttttttctttgcacaaataaacagtgaattctcgtttaaaaaaaaaaaaaaaaaaaaaaaaaaaaaaaaaaaaaaaaaaaaaaaaaaaaaaaaaaaaaaaaaaaaaa

SEQ ID NO: 525 - DNA, 725 bp, Homo sapiens
ggcggcgcgtggtctacgccgagtgacagagacgctcaggctgtgttctcaggatgaccgagtgggagacagcagcaccagcggtggcagagaccccagacatcaagctctttgggaagtggagcaccgatgatgtgcagatcaatgacatttccctgcaggattacattgcagtgaaggagaagtatgccaagtacctgcctcacagtgcagggcggtatgccgccaaacgcttccgcaaagctcagtgtcccattgtggagcgcctcactaactccatgatgatgcacggccgcaacaacggcaagaagctcatgactgtgcgcatcgtcaagcatgccttcgagatcatacacctgctcacaggcgagaaccctctgcaggtcctggtgaacgccatcatcaacagtggtccccgggaggactccacacgcattgggcgcgccgggactgtgagacgacaggctgtggatgtgtcccccctgcgccgtgtgaaccaggccatctggctgctgtgcacaggcgctcgtgaggctgccttccggaacattaagaccattgctgagtgcctggcagatgagctcatcaatgctgccaagggctcctcgaactcctatgccattaagaagaaggacgagctggagcgtgtggccaagtccaaccgctgattttcccagctgctgcccaataaacctgtctgccctttggggcagtcccagccaaaa

SEQ ID NO: 526 - DNA, 829 bp, Homo sapiens
cctcttttccgtggcgcctcggaggcgttcagctgcttcaagatgaagctgaacatctccttcccagccactggctgccagaaactcattgaagtggacgatgaacgcaaacttcgtactttctatgagaagcgtatggccacagaagttgctgctgacgctctgggtgaagaatggaagggttatgtggtccgaatcagtggtgggaacgacaaacaaggtttccccatgaagcagggtgtcttgacccatggccgtgtccgcctgctactgagtaaggggcattcctgttacagaccaaggagaactggagaaagaaagagaaaatcagttcgtggttgcattgtggatgcaaatctgagcgttctcaacttggttattgtaaaaaaaggagagaaggatattcctggactgactgatactacagtgcctcgccgcctgggccccaaaagagctagcagaatccgcaaacttttcaatctctctaaagaagatgatgtccgccagtatgttgtaagaaagcccttaaataaagaaggtaagaaacctaggaccaaagcacccaagattcagcgtcttgttactccacgtgtcctgcagcacaaacggcggcgtattgctctgaagaagcagcgtaccaagaaaaataaagaagaggctgcagaatatgctaaacttttggccaagagaatgaaggaggctaaggagaagcgccaggaacaaattgcgaagagacgcagactttcctctctgcgagcttctacttctaagtctgaatccagtcagaaataagattttttgagtaacaaataaataagatcagactctg

SEQ ID NO: 527 - DNA, 729 bp, Homo sapiens
cttgcttcggacgccggattttgacgtgctctcgcgagatttgggtctcttcctaagccggcgctcggcaagttctcccaggagaaagccatgttcagttcgagcgccaagatcgtgaagcccaatggcgagaagccggacgagttcgagtccggcatctcccaggctcttctggagctggagatgaactcggacctcaaggctcagctcagggagctgaatattacggcagctaaggaaattgaagttggtggtggtcggaaagctatcataatctttgttcccgttcctcaactgaaatctttccagaaaatccaagtccggctagtacgcgaattggagaaaaagttcagtgggaagcatgtcgtctttatcgctcagaggagaattctgcctaagccaactcgaaaaagccgtacaaaaaataagcaaaagcgtcccaggagccgtactctgacagctgtgcacgatgccatccttgaggacttggtcttcccaagcgaaattgtgggcaagagaatccgcgtcaaactagatggcagccggctcataaaggttcatttggacaaagcacagcagaacaatgtggaacacaaggttgaaactttttctggtgtctataagaagctcacgggcaaggatgttaattttgaattcccagagtttcaattgtaaacaaaaatgactaaataaaaagtatatattcacagtaaaaaaaaaaaaaaaaaa

SEQ ID NO: 528 - DNA, 705 bp, Homo sapiens
ctctttccagccagcgccgagcgatgggcatctctcgggacaactggcacaagcgccgcaaaaccgggggcaagagaaagccctaccacaagaagcggaagtatgagttggggcgcccagctgccaacaccaagattggcccccgccgcatccacacagtccgtgtgcggggaggtaacaagaaataccgtgccctgaggttggacgtggggaatttctcctggggctcagagtgttgtactcgtaaaacaaggatcatcgatgttgtctacaatgcatctaataacgagctggttcgtaccaagaccctggtgaagaattgcatcgtgctcatcgacagcacaccgtaccgacagtggtacgagtcccactatgcgctgcccctgggccgcaagaagggagccaagctgactcctgaggaagaagagattttaaacaaaaaacgatctaaaaaaattcagaagaaatatgatgaaaggaaaaagaatgccaaaatcagcagtctcctggaggagcagttccagcagggcaagcttcttgcgtgcatcgcttcaaggccgggacagtgtggccgagcagatggctatgtgctagagggcaaagagttggagttctatcttaggaaaatcaaggcccgcaaaggcaaataaatccttgttttgtcttcacccatgtaataaaggtgtttattgttttgttcccaca

SEQ ID NO: 529 - DNA, 691 bp, Homo sapiens
cccgcgcaggcgcagacggggaagcggagccaacatgccagtggcccggagctgggtttgtcgcaaaacttatgtgaccccgcggagacccttcgagaaatctcgtctcgaccaagagctgaagctgatcggcgagtatgggctccggaacaaacgtgaggtctggagggtcaaatttaccctggccaagatccgcaaggccgcccgggaactgctgacgcttgatgagaaggacccacggcgtctgttcgaaggcaacgccctgctgcggcggctggtccgcattggggtgctggatgagggcaagatgaagctggattacatcctgggcctgaagatagaggatttcttagagagacgcctgcagacccaggtcttcaagctgggcttggccaagtccatccaccacgctcgcgtgctgatccgccagcgccatatcagggtccgcaagcaggtggtgaacatcccgtccttcattgtccgcctggattcccagaagcacatcgacttctctctgcgctctccctacgggggtggccgcccgggccgcgtgaagaggaagaatgccaagaagggccagggtggggctggggctggagacgacgaggaggaggattaagtccacctgtccctcctgggctgctggattgtctcgttttcctgccaaataaacaggatcagcgctttaaaa

SEQ ID NO: 530 - DNA, 598 bp, Homo sapiens
ctccttcttttccagccccggtaccggaccctgcagccgcagagatgttgatgcctaagaagaaccggattgccatttatgaactcctttttaaggagggagtcatggtggccaagaaggatgtccacatgcctaagcacccggagctggcagacaagaatgtgcccaaccttcatgtcatgaaggccatgcagtctctcaagtcccgaggctacgtgaaggaacagtttgcctggagacatttctactggtaccttaccaatgagggtatccagtatctccgtgattaccttcatctgcccccggagattgtgcctgccaccctacgccgtagccgtccagagactggcaggcctcggcctaaaggtctggagggtgagcgacctgcgagactcacaagaggggaagctgacagagatacctacagacggagtgctgtgccacctggtgccgacaagaaagccgaggctggggctgggtcagcaaccgaattccagtttagaggcggatttggtcgtggacgtggtcagccacctcagtaaaattggagaggattcttttgcattgaataaacttacagccaaaaaaccttaaaaaa

SEQ ID NO: 531 - DNA, 594 bp, Homo sapiens
ctgcccctttctttttttcaggcggccgggaagatggcggacattcagactgagcgtgcctaccaaaagcagccgaccatctttcaaaacaagaagagggtcctgctgggagaaactggcaaggagaagctcccgcggtactacaagaacatcggtctgggcttcaagacacccaaggaggctattgagggcacctacattgacaagaaatgccccttcactggtaatgtgtccattcgagggcggatcctctctggcgtggtgaccaagatgaagatgcagaggaccattgtcatccgccgagactatctgcactacatccgcaagtacaaccgcttcgagaagcgccacaagaacatgtctgtacacctgtccccctgcttcagggacgtccagatcggtgacatcgtcacagtgggcgagtgccggcctctgagcaagacagtgcgcttcaacgtgctcaaggtcaccaaggctgccggcaccaagaagcagttccagaagttctgaggctggacatcggcccgctccccacaatgaaataaagttattttctcattccaaaaaaaaaaaaaaaaaaaaaaaaaaaaaaaa

SEQ ID NO: 532 - DNA, 534 bp, Homo sapiens
ctttccctgccgccgccgagtcgcgcggaggcggaggcttgggtgcgttcaagattcagcttcacccgtaacccaccgccatggccgaggaaggcattgctgctggaggtgtaatggacgttaatactgctttacaagaggttctgaagactgccctcatccacgatggcctagcacgtggaattcgcgaagctgccaaagccttagacaagcgccaagcccatctttgtgtgcttgcatccaactgtgatgagcctatgtatgtcaagttggtggaggccctttgtgctgaacaccaaatcaacctaattaaggttgatgacaacaagaaactaggagaatgggtaggcctttgtaaaattgacagagaggggaaaccccgtaaagtggttggttgcagttgtgtagtagttaaggactatggcaaggagtctcaggccaaggatgtcattgaagagtatttcaaatgcaagaaatgaagaaataaatctttggctcacaaaaaaaaaaaaaaaaaaaaaaaaaaaaaaaaaa

SEQ ID NO: 533 - DNA, 529 bp, Homo sapiens
cgctctcctttcgttgcctgatcgccgccatcatgggtcgcatgcatgctcccgggaagggcctgtcccagtcggctttaccctatcgacgcagcgtccccacttggttgaagttgacatctgacgacgtgaaggagcagatttacaaactggccaagaagggccttactccttcacagatcggtgtaatcctgagagattcacatggtgttgcacaagtacgttttgtgacaggcaataaaattttaagaattcttaagtctaagggacttgctcctgatcttcctgaagatctctaccatttaattaagaaagcagttgctgttcgaaagcatcttgagaggaacagaaaggataaggatgctaaattccgtctgattctaatagagagccggattcaccgtttggctcgatattataagaccaagcgagtcctccctcccaattggaaatatgaatcatctacagcctctgccctggtcgcataaatttgtctgtgtactcaagcaataaaatgattgtttaacta

SEQ ID NO: 534 - DNA, 515 bp, Homo sapiens
ctgcgcaggcgcggaccaaagcgatctcttctgaggatccggcaagatggcagaagtagagcagaagaagaagcggaccttccgcaagttcacctaccgcggcgtggacctcgaccagctgctggacatgtcctacgagcagctgatgcagctgtacagtgcgcgccagcggcggcggctgaaccggggcctgcggcggaagcagcactccctgctgaagcgcctgcgcaaggccaagaaggaggcgccgcccatggagaagccggaagtggtgaagacgcacctgcgggacatgatcatcctacccgagatggtgggcagcatggtgggcgtctacaacggcaagaccttcaaccaggtggagatcaagcccgagatgatcggccactacctgggcgagttctccatcacctacaagcccgtaaagcatggccggcccggcatcggggccacccactcctcccgcttcatccctctcaagtaatggctcagctaataaaggcgcacatgactcc

SEQ ID NO: 535 - DNA, 541 bp, Homo sapiens
ctttccgcgccggtgagtagcactctctgagagctccaatttcatccgtctgccatcggcgccatcctgcaatctaagccacaatggtgcgcatgaatgtcctggcagatgctctcaagagtatcaacaatgccgaaaagagaggcaaacgccaggtgcttattaggccgtgctccaaagtcatcgtccggtttctcactgtgatgatgaagcatggttacattggcgaatttgaaatcattgatgaccacagagctgggaaaattgttgtgaacctcacaggcaggctaaacaagtgtggggtgatcagccccagatttgacgtgcaactcaaagacctggaaaaatggcagaataatctgcttccatcccgccagtttggtttcattgtactgacaacctcagctggcatcatggaccatgaagaagcaagacgaaaacacacaggagggaaaatcctgggattctttttctagggatgtaatacatatatttacaaataaaatgcctcatggactaaaaaaaaaaaaaaaaaaaaaaa

SEQ ID NO: 536 - DNA, 570 bp, Homo sapiens
ttttccggttgcggcgccgcgcggtgaggttgtctagtccacgctcggagccatgccgtccaagggcccgctgcagtctgtgcaggtcttcggacgcaagaagacagcgacagctgtggcgcactgcaaacgcggcaatggtctcatcaaggtgaacgggcggcccctggagatgattgagccgcgcacgctacagtacaagctgctggagccagttctgcttctcggcaaggagcgatttgctggtgtagacatccgtgtccgtgtaaagggtggtggtcacgtggcccagatttatgctatccgtcagtccatctccaaagccctggtggcctattaccagaaatatgtggatgaggcttccaagaaggagatcaaagacatcctcatccagtatgaccggaccctgctggtagctgaccctcgtcgctgcgagtccaaaaagtttggaggccctggtgcccgcgctcgctaccagaaatcctaccgataagcccatcgtgactcaaaactcacttgtataataaacagtttttgagggattttaaagtttcaaaaaaaaaaaaaaaa

SEQ ID NO: 537 - DNA, 515 bp, Homo sapiens
cctcttttaccaaggacccgccaacatgggccgcgttcgcaccaaaaccgtgaagaaggcggcccgggtcatcatagaaaagtactacacgcgcctgggcaacgacttccacacgaacaagcgcgtgtgcgaggagatcgccattatccccagcaaaaagctccgcaacaagatagcaggttatgtcacgcatctgatgaagcgaattcagagaggcccagtaagaggtatctccatcaagctgcaggaggaggagagagaaaggagagacaattatgttcctgaggtctcagccttggatcaggagattattgaagtagatcctgacactaaggaaatgctgaagcttttggacttcggcagtctgtccaaccttcaggtcactcagcctacagttgggatgaatttcaaaacgcctcggggacctgtttgaattttttctgtagtgctgtattattttcaataaatctgggacaacagcaaaaaaaaaaaaaaaaaaaaaaaaaaaaaaaaaa

SEQ ID NO: 538 - DNA, 569 bp, Homo sapiens
cgcccgacttgtgcgcccgggaaaccccgtcgttccctttcccctggctggcagcgcggaggccgcacgatgcctggagttactgtaaaagacgtgaaccagcaggagttcgtcagagctctggcagccttcctcaaaaagtccgggaagctgaaagtccccgaatgggtggataccgtcaagctggccaagcacaaagagcttgctccctacgatgagaactggttctacacgcgagctgcttccacagcgcggcacctgtacctccggggtggcgctggggttggctccatgaccaagatctatgggggacgtcagagaaacggcgtcatgcccagccacttcagccgaggctccaagagtgtggcccgccgggtcctccaagccctggaggggctgaaaatggtggaaaaggaccaagatggcggccgcaaactgacacctcagggacaaagagatctggacagaatcgccggacaggtggcagctgccaacaagaagcattagaacaaaccatgctgggttaataaattgcctcattcgtaaaaaaaaaaaaaaaaaaaaaaaaa

SEQ ID NO: 539 - DNA, 539 bp, Homo sapiens
ctttctttttgaggaagacgcggtcgtaagggctgaggatttttggtccgcacgctcctgctcctgactcaccgctgttcgctctcgccgaggaacaagtcggtcaggaagcccgcgcgcaacagccatggcttttaaggataccggaaaaacacccgtggagccggaggtggcaattcaccgaattcgaatcaccctaacaagccgcaacgtaaaatccttggaaaaggtgtgtgctgacttgataagaggcgcaaaagaaaagaatctcaaagtgaaaggaccagttcgaatgcctaccaagactttgagaatcactacaagaaaaactccttgtggtgaaggttctaagacgtgggatcgtttccagatgagaattcacaagcgactcattgacttgcacagtccttctgagattgttaagcagattacttccatcagtattgagccaggagttgaggtggaagtcaccattgcagatgcttaagtcaactattttaataaattgatgaccagttgttaaaaaaaaaaaaaaaaaa

SEQ ID NO: 540 - DNA, 356 bp, Homo sapiens
ctttctctctcgcgcgcggtgtggtggcagcaggcgcagcccagcctcgaaatgcagaacgacgccggcgagttcgtggacctgtacgtgccgcggaaatgctccgctagcaatcgcatcatcggtgccaaggaccacgcatccatccagatgaacgtggccgaggttgacaaggtcacaggcaggtttaatggccagtttaaaacttatgctatctgcggggccattcgtaggatgggtgagtcagatgattccattctccgattggccaaggccgatggcatcgtctcaaagaacttttgactggagagaatcacagatgtggaatatttgtcataaataaataatgaaaacct

SEQ ID NO: 541 - DNA, 506 bp, Homo sapiens
ctctttcgctcaggcccgtggcgccgacaggatgggcaagtgtcgtggacttcgtactgctaggaagctccgtagtcaccgacgagaccagaagtggcatgataaacagtataagaaagctcatttgggcacagccctaaaggccaacccttttggaggtgcttctcatgcaaaaggaatcgtgctggaaaaagtaggagttgaagccaaacagccaaattctgccattaggaagtgtgtaagggtccagctgatcaagaatggcaagaaaatcacagcctttgtacccaatgacggttgcttgaactttattgaggaaaatgatgaagttctggttgctggatttggtcgcaaaggtcatgctgttggtgatattcctggagtccgctttaaggttgtcaaagtagccaatgtttctcttttggccctatacaaaggcaagaaggaaagaccaagatcataaatattaatggtgaaaacactgtagtaataaattttcatatgcc

SEQ ID NO: 542 - DNA, 514 bp, Homo sapiens
cttcctttttgtccgacatcttgacgaggctgcggtgtctgctgctattctccgagcttcgcaatgccgcctaaggacgacaagaagaagaaggacgctggaaagtcggccaagaaagacaaagacccagtgaacaaatccgggggcaaggccaaaaagaagaagtggtccaaaggcaaagttcgggacaagctcaataacttagtcttgtttgacaaagctacctatgataaactctgtaaggaagttcccaactataaacttataaccccagctgtggtctctgagagactgaagattcgaggctccctggccagggcagcccttcaggagctccttagtaaaggacttatcaaactggtttcaaagcacagagctcaagtaatttacaccagaaataccaagggtggagatgctccagctgctggtgaagatgcatgaataggtccaaccagctgtacatttggaaaaataaaactttattaaatcaaaaaaaaaaaaaaaaaaaaaaaaa

SEQ ID NO: 543 - DNA, 459 bp, Homo sapiens
cctgtctccggtccgtgcctccaagatgacaaagaaaagaaggaacaatggtcgtgccaaaaagggccgcggccacgtgcagcctattcgctgcactaactgtgcccgatgcgtgcccaaggacaaggccattaagaaattcgtcattcgaaacatagtggaggccgcagcagtcagggacatttctgaagcgagcgtcttcgatgcctatgtgcttcccaagctgtatgtgaagctacattactgtgtgagttgtgcaattcacagcaaagtagtcaggaatcgatctcgtgaagcccgcaaggaccgaacacccccaccccgatttagacctgcgggtgctgccccacgtcccccaccaaagcccatgtaaggagctgagttcttaaagactgaagacaggctattctctggagaaaaataaaatggaaattgtacttaaaaaaaaaaaaaaaaaaa

SEQ ID NO: 544 - DNA, 344 bp, Homo sapiens
cctttccggcggtgacgacctacgcacacgagaacatgcctctcgcaaaggatctccttcatccctctccagaagaggagaagaggaaacacaagaagaaacgcctggtgcagagccccaattcctacttcatggatgtgaaatgcccaggatgctataaaatcaccacggtctttagccatgcacaaacggtagttttgtgtgttggctgctccactgtcctctgccagcctacaggaggaaaagcaaggcttacagaaggatgttccttcaggaggaagcagcactaaaagcactctgagtcaagatgagtgggaaaccatctcaataaacacattttggat

SEQ ID NO: 545 - DNA, 398 bp, Homo sapiens
ctctccgccagaccgccgccgcgccgccatcatggacaccagccgtgtgcagcctatcaagctggccagggtcaccaaggtcctgggcaggaccggttctcagggacagtgcacgcaggtgcgcgtggaattcatggacgacacgagccgatccatcatccgcaatgtaaaaggccccgtgcgcgagggcgacgtgctcacccttttggagtcagagcgagaagcccggaggttgcgctgagcttggctgctcgctgggtcttggatgtcgggttcgaccacttggccgatgggaatggtctgtcacaatctgctccttttttttgtccgccacacgtaactgagatgctcctttaaataaagcgtttgtgtttcaagttaaaaaaaaaaaaaaaaaa

SEQ ID NO: 546 - DNA, 346 bp, Homo sapiens
cttttacctcgttgcactgctgagagcaagatgggtcaccagcagctgtactggagccacccgcgaaaattcggccagggttctcgctcttgtcgtgtctgttcaaaccggcacggtctgatccggaaatatggcctcaatatgtgccgccagtgtttccgtcagtacgcgaaggatatcggtttcattaagttggactaaatgctcttccttcagaggattatccggggcatctactcaatgaaaaaccatgataattctttgtatataaaataaacatttgaaaaaaaaaaaaaaaaaaaaaaaaaaaaaaaaaaaaaaaaaaaaaaaaaaaaaaaaaaaaaaa

SEQ ID NO: 547 - DNA, 3151 bp, Homo sapiens
ccggccagcgggcgggctccccagccaggccgctgcacctgtcaggggaacaagctggaggagcaggaccctagacctctgcagcccataccaggtctcatggaggggaacaagctggaggagcaggactctagccctccacagtccactccagggctcatgaaggggaacaagcgtgaggagcaggggctgggccccgaacctgcggcgccccagcagcccacggcggaggaggaggccctgatcgagttccaccgctcctaccgagagctcttcgagttcttctgcaacaacaccaccatccacggcgccatccgcctggtgtgctcccagcacaaccgcatgaagacggccttctgggcagtgctgtggctctgcacctttggcatgatgtactggcaattcggcctgcttttcggagagtacttcagctaccccgtcagcctcaacatcaacctcaactcggacaagctcgtcttccccgcagtgaccatctgcaccctcaatccctacaggtacccggaaattaaagaggagctggaggagctggaccgcatcacagagcagacgctctttgacctgtacaaatacagctccttcaccactctcgtggccggctcccgcagccgtcgcgacctgcgggggactctgccgcaccccttgcagcgcctgagggtcccgcccccgcctcacggggcccgtcgagcccgtagcgtggcctccagcttgcgggacaacaacccccaggtggactggaaggactggaagatcggcttccagctgtgcaaccagaacaaatcggactgcttctaccagacatactcatcaggggtggatgcggtgagggagtggtaccgcttccactacatcaacatcctgtcgaggctgccagagactctgccatccctggaggaggacacgctgggcaacttcatcttcgcctgccgcttcaaccaggtctcctgcaaccaggcgaattactctcacttccaccacccgatgtatggaaactgctatactttcaatgacaagaacaactccaacctctggatgtcttccatgcctggaatcaacaacggtctgtccctgatgctgcgcgcagagcagaatgacttcattcccctgctgtccacagtgactggggcccgggtaatggtgcacgggcaggatgaacctgcctttatggatgatggtggctttaacttgcggcctggcgtggagacctccatcagcatgaggaaggaaaccctggacagacttgggggcgattatggcgactgcaccaagaatggcagtgatgttcctgttgagaacctttacccttcaaagtacacacagcaggtgtgtattcactcctgcttccaggagagcatgatcaaggagtgtggctgtgcctacatcttctatccgcggccccagaacgtggagtactgtgactacagaaagcacagttcctgggggtactgctactataagctccaggttgacttctcctcagaccacctgggctgtttcaccaagtgccggaagccatgcagcgtgaccagctaccagctctctgctggttactcacgatggccctcggtgacatcccaggaatgggtcttccagatgctatcgcgacagaacaattacaccgtcaacaacaagagaaatggagtggccaaagtcaacatcttcttcaaggagctgaactacaaaaccaattctgagtctccctctgtcacgatggtcaccctcctgtccaacctgggcagccagtggagcctgtggttcggctcctcggtgttgtctgtggtggagatggctgagctcgtctttgacctgctggtcatcatgttcctcatgctgctccgaaggttccgaagccgatactggtctccaggccgagggggcaggggtgctcaggaggtagcctccaccctggcatcctcccctccttcccacttctgcccccaccccatgtctctgtccttgtcccagccaggccctgctccctctccagccttgacagcccctccccctgcctatgccaccctgggcccccgcccatctccagggggctctgcaggggccagttcctccacctgtcctctgggggggccctgagagggaaggagaggtttctcacaccaaggcagatgctcctctggtgggagggtgctggccctggcaagattgaaggatgtgcagggcttcctctcagagccgcccaaactgccgttgatgtgtggaggggaagcaagatgggtaagggctcaggaagttgctccaagaacagtagctgatgaagctgcccagaagtgccttggctccagccctgtaccccttggtactgcctctgaacactctggtttccccacccaactgcggctaagtctctttttcccttggatcagccaagcgaaacttggagctttgacaaggaactttcctaagaaaccgctgataaccaggacaaaacacaaccaagggtacacgcaggcatgcacgggtttcctgcccagcgacggcttaagccagcccccgactggcctggccacactgctctccagtagcacagatgtctgctcctcctcttgaacttgggtgggaaaccccacccaaaagccccctttgttacttaggcaattccccttccctgactcccgagggctagggctagagcagacccgggtaagtaaaggcagacccagggctcctctagcctcatacccgtgccctcacagagccatgccccggcacctctgccctgtgtctttcatacctctacatgtctgcttgagatatttcctcagcctgaaagtttccccaaccatctgccagagaactcctatgcatcccttagaaccctgctcagacaccattacttttgtgaacgcttctgccacatcttgtcttccccaaaattgatcactccgccttctcctgggctcccgtagcacactataacatctgctggagtgttgctgttgcaccatactttcttgtacatttgtgtctcccttcccaactagactgtaagtgccttgcggtcagggactgaatcttgcccgtttatgtatgctccatgtctagcccatcatcctgcttggagcaagtaggcaggagctcaataaatgtttgttgcatgaaaaaaaaaaaaaaaaaa

SEQ ID NO: 548 - DNA, 2161 bp, Homo sapiens
cggcccagtgatcttgaaccccaaaggccagaactggagcctcagtccagagaattctgagaaaattaaagcagagaggaggggagagatcactgggaccaggccgtgatctctatgcccgagtctcaaccctcaactgtcaccccaaggcacttgggacgtcctggacagaccgagtcccgggaagccccagcactgccgctgccacactgccctgagcccaaatgggggagtgagaggccatagctgtctggcatgggcctctccaccgtgcctgacctgctgctgccgctggtgctcctggagctgttggtgggaatatacccctcaggggttattggactggtccctcacctaggggacagggagaagagagatagtgtgtgtccccaaggaaaatatatccaccctcaaaataattcgatttgctgtaccaagtgccacaaaggaacctacttgtacaatgactgtccaggcccggggcaggatacggactgcagggagtgtgagagcggctccttcaccgcttcagaaaaccacctcagacactgcctcagctgctccaaatgccgaaaggaaatgggtcaggtggagatctcttcttgcacagtggaccgggacaccgtgtgtggctgcaggaagaaccagtaccggcattattggagtgaaaaccttttccagtgcttcaattgcagcctctgcctcaatgggaccgtgcacctctcctgccaggagaaacagaacaccgtgtgcacctgccatgcaggtttctttctaagagaaaacgagtgtgtctcctgtagtaactgtaagaaaagcctggagtgcacgaagttgtgcctaccccagattgagaatgttaagggcactgaggactcaggcaccacagtgctgttgcccctggtcattttctttggtctttgccttttatccctcctcttcattggtttaatgtatcgctaccaacggtggaagtccaagctctactccattgtttgtgggaaatcgacacctgaaaaagagggggagcttgaaggaactactactaagcccctggccccaaacccaagcttcagtcccactccaggcttcacccccaccctgggcttcagtcccgtgcccagttccaccttcacctccagctccacctatacccccggtgactgtcccaactttgcggctccccgcagagaggtggcaccaccctatcagggggctgaccccatccttgcgacagccctcgcctccgaccccatccccaacccccttcagaagtgggaggacagcgcccacaagccacagagcctagacactgatgaccccgcgacgctgtacgccgtggtggagaacgtgcccccgttgcgctggaaggaattcgtgcggcgcctagggctgagcgaccacgagatcgatcggctggagctgcagaacgggcgctgcctgcgcgaggcgcaatacagcatgctggcgacctggaggcggcgcacgccgcggcgcgaggccacgctggagctgctgggacgcgtgctccgcgacatggacctgctgggctgcctggaggacatcgaggaggcgctttgcggccccgccgccctcccgcccgcgcccagtcttctcagatgaggctgcgcccctgcgggcagctctaaggaccgtcctgcgagatcgccttccaaccccacttttttctggaaaggaggggtcctgcaggggcaagcaggagctagcagccgcctacttggtgctaacccctcgatgtacatagcttttctcagctgcctgcgcgccgccgacagtcagcgctgtgcgcgcggagagaggtgcgccgtgggctcaagagcctgagtgggtggtttgcgaggatgagggacgctatgcctcatgcccgttttgggtgtcctcaccagcaaggctgctcgggggcccctggttcgtccctgagcctttttcacagtgcataagcagttttttttgtttttgttttgttttgttttgtttttaaatcaatcatgttacactaatagaaacttggcactcctgtgccctctgcctggacaagcacatagcaagctgaactgtcctaaggcaggggcgagcacggaacaatggggccttcagctggagctgtggacttttgtacatacactaaaattctgaagtt

SEQ ID NO: 549 - DNA, 1594 bp, Homo sapiens
gcccgccggtccacgccgcgcaccgctccgagggccagcgccacccgctccgcagccggcaccatgcgcgagatcgtgcacatccaggcgggccagtgcggcaaccagatcggcgccaagttttgggaggtcatcagcgatgagcatgggatcgaccccacaggcagttaccatggagacagtgacttgcagctggagagaatcaacgtgtactacaatgaggctgctggtaacaaatatgtacctcgggccatcctggtggatctggagcctggcaccatggactctgtcaggtctggacccttcggccagatcttcagaccagacaacttcgtgttcggccagagtggagccgggaataactgggccaagggccactacacagagggagccgagctggtcgactcggtcctggatgtggtgaggaaggagtcagagagctgtgactgtctccagggcttccagctgacccactctctggggggcggcacggggtccgggatgggcaccctgctcatcagcaagatccgggaagagtacccagaccgcatcatgaacaccttcagcgtcatgccctcacccaaggtgtcagacacggtggtggagccctacaacgccaccctctcggtccaccagctggtggaaaacacagatgaaacctactccattgataacgaggccctgtatgacatctgcttccgcaccctgaagctgaccacccccacctacggggacctcaaccacctggtgtcggccaccatgagcggggtcaccacctgcctgcgcttcccgggccagctgaacgcagacctgcgcaagctggcggtgaacatggtgcccttccctcgcctgcacttcttcatgcccggcttcgcgcccctgaccagccggggcagccagcagtaccgggcgctcacggtgcccgagctcacccagcagatgttcgactccaagaacatgatggccgcctgcgacccgcgccacggccgctacctgacggtggctgccatcttccggggccgcatgtccatgaaggaggtggacgagcagatgctcaacgtgcagaacaagaacagcagctacttcgtggagtggatccccaacaacgtgaagacggccgtgtgcgacatcccgccccgcggcctgaagatgtcggccaccttcatcggcaacagcacggccatccaggagctgttcaagcgcatctccgagcagttcacggccatgttccggcgcaaggccttcctgcactggtacacgggcgagggcatggacgagatggagttcaccgaggccgagagcaacatgaacgacctggtgtccgagtaccagcagtaccaggacgccacggccgacgaacaaggggagttcgaggaggaggagggcgaggacgaggcttaaaaacttctcagatcaatcgtgcatccttagtgaacttctgttgtcctcaagcatggtctttctacttgtaaactatggtgctcagttttgcctctgttagaaattcacactgttgatgtaatgatgtggaactcctctaaaaattacagtattgtctgtgaaggtatctatactaataaaaaagcatgtgtag

SEQ ID NO: 550 - DNA, 3119 bp, Homo sapiens
cgcggtatctgcatcgggcctcactggcttcaggagctgaataccctcccaggcacacacaggtgggacacaaataagggttttggaaccactattttctcatcacgacagcaacttaaaatgcctgggaagatggtcgtgatccttggagcctcaaatatactttggataatgtttgcagcttctcaagcttttaaaatcgagaccaccccagaatctagatatcttgctcagattggtgactccgtctcattgacttgcagcaccacaggctgtgagtccccatttttctcttggagaacccagatagatagtccactgaatgggaaggtgacgaatgaggggaccacatctacgctgacaatgaatcctgttagttttgggaacgaacactcttacctgtgcacagcaacttgtgaatctaggaaattggaaaaaggaatccaggtggagatctactcttttcctaaggatccagagattcatttgagtggccctctggaggctgggaagccgatcacagtcaagtgttcagttgctgatgtatacccatttgacaggctggagatagacttactgaaaggagatcatctcatgaagagtcaggaatttctggaggatgcagacaggaagtccctggaaaccaagagtttggaagtaacctttactcctgtcattgaggatattggaaaagttcttgtttgccgagctaaattacacattgatgaaatggattctgtgcccacagtaaggcaggctgtaaaagaattgcaagtctacatatcacccaagaatacagttatttctgtgaatccatccacaaagctgcaagaaggtggctctgtgaccatgacctgttccagcgagggtctaccagctccagagattttctggagtaagaaattagataatgggaatctacagcacctttctggaaatgcaactctcaccttaattgctatgaggatggaagattctggaatttatgtgtgtgaaggagttaatttgattgggaaaaacagaaaagaggtggaattaattgttcaagagaaaccatttactgttgagatctcccctggaccccggattgctgctcagattggagactcagtcatgttgacatgtagtgtcatgggctgtgaatccccatctttctcctggagaacccagatagacagccctctgagcgggaaggtgaggagtgaggggaccaattccacgctgaccctgagccctgtgagttttgagaacgaacactcttatctgtgcacagtgacttgtggacataagaaactggaaaagggaatccaggtggagctctactcattccctagagatccagaaatcgagatgagtggtggcctcgtgaatgggagctctgtcactgtaagctgcaaggttcctagcgtgtacccccttgaccggctggagattgaattacttaagggggagactattctggagaatatagagtttttggaggatacggatatgaaatctctagagaacaaaagtttggaaatgaccttcatccctaccattgaagatactggaaaagctcttgtttgtcaggctaagttacatattgatgacatggaattcgaacccaaacaaaggcagagtacgcaaacactttatgtcaatgttgcccccagagatacaaccgtcttggtcagcccttcctccatcctggaggaaggcagttctgtgaatatgacatgcttgagccagggctttcctgctccgaaaatcctgtggagcaggcagctccctaacggggagctacagcctctttctgagaatgcaactctcaccttaatttctacaaaaatggaagattctggggtttatttatgtgaaggaattaaccaggctggaagaagcagaaaggaagtggaattaattatccaagttactccaaaagacataaaacttacagcttttccttctgagagtgtcaaagaaggagacactgtcatcatctcttgtacatgtggaaatgttccagaaacatggataatcctgaagaaaaaagcggagacaggagacacagtactaaaatctatagatggcgcctataccatccgaaaggcccagttgaaggatgcgggagtatatgaatgtgaatctaaaaacaaagttggctcacaattaagaagtttaacacttgatgttcaaggaagagaaaacaacaaagactatttttctcctgagcttctcgtgctctattttgcatcctccttaataatacctgccattggaatgataatttactttgcaagaaaagccaacatgaaggggtcatatagtcttgtagaagcacagaaatcaaaagtgtagctaatgcttgatatgttcaactggagacactatttatctgtgcaaatccttgatactgctcatcattccttgagaaaaacaatgagctgagaggcagacttccctgaatgtattgaacttggaaagaaatgcccatctatgtcccttgctgtgagcaagaagtcaaagtaaaacttgctgcctgaagaacagtaactgccatcaagatgagagaactggaggagttccttgatctgtatatacaataacataatttgtacatatgtaaaataaaattatgccatagcaagattgcttaaaatagcaacactctatatttagattgttaaaataactagtgttgcttggactattataatttaatgcatgttaggaaaatttcacattaatatttgctgacagctgacctttgtcatctttcttctattttattccctttcacaaaattttattcctatatagtttattgacaataatttcaggttttgtaaagatgccgggttttatatttttatagacaaataataagcaaagggagcactgggttgactttcaggtactaaatacctcaacctatggtataatggttgactgggtttctctgtatagtactggcatggtacggagatgtttcacgaagtttgttcatcagactcctgtgcaactttcccaatgtggcctaaaaatgcaacttctttttattttcttttgtaaatgtttaggtttttttgtatagtaaagtgataatttctggaattagaaaaaaaaaaaaaaaaaaa

SEQ ID NO: 551 - DNA, 1534 bp, Homo sapiens
ggaattccctggagcagagttgagaatggagagaatgttacctctcctggctctggggctcttggcggctgggttctgccctgctgtcctctgccaccctaacagcccacttgacgaggagaatctgacccaggagaaccaagaccgagggacacacgtggacctcggattagcctccgccaacgtggacttcgctttcagcctgtacaagcagttagtcctgaaggcccttgataagaatgtcatcttctccccactgagcatctccaccgccttggccttcctgtctctgggggcccataataccaccctgacagagattctcaaggcctcgagttcacctcacggagacttactgaggcagaaattcactcagagcttccagcacctccgcgcaccctcaatcagttccagcgatgagctgcagctgagtatgggaaatgccatgtttgtcaaagagcaactcagtctgctggacaggttcacggaggatgccaagaggctgtatggctccgaggcctttgccactgactttcaggactcagctgcagctaagaagctcatcaacgactacgtgaagaatggaactagggggaaaatcacagatctgatcaaggaccccgactcgcagacaatgatggtcctggtgaattacatcttctttaaagccaaatgggagatgccctttgacccccaagatactcatcagtcaaggttctacttgagcaagaaaaagtgggtaatggtgcccatgatgagtttgcatcacctgactataccttacttccgggacgaggagctgtcctgcaccgtggtggagctgaagtacacaggcaatgccagcgcactcttcatcctccctgatcaagacaagatggaggaagtggaagccatgctgctcccagagaccctgaagcggtggagagactctctggagttcagagagataggtgagctctacctgccaaagttttccatctcgagggactataacctgaacgacatacttctccagctgggcattgaggaagccttcaccagcaaggctgacctgtcagggatcacaggggccaggaacctagcagtctcccaggtggtccataaggtcgtgtctgatgtatttgaggagggcacagaagcatctgctgccacagcagtcaaaatcaccctcctttctgcattagtggagacaaggaccattgtgcgtttcaacaggcccttcctgatgatcattgtccctacagacacccagaacatcttcttcatgagcaaagtcaccaatcccagcaagcctagagcttgcatcaagcagtggggctctcagtaaggaacttggaatgcaagctggatgcctgggtctctgggcacagctggcccctgtgcaccgtagtggccatggcatgtgtggccctgtctgcttatccttggaaggtgacagcgattccctgtgaagctctcacacgcacaggggcccatggactcttcagtctggagggtcctggcctcctgacagcaataaataatttcgttggcc

SEQ ID NO: 552 - DNA, 7452 bp, Homo sapiens
atggtcttgcttctttgtctatcttgtctgattttctcctgtctgaccttttcctggttaaaaatctgggagaaaatgacggactccaagccgatcaccaagagtaaatcagaagcaaacctcatcccgagccaggagccctttccagcctctgataactcaggggagacaccgcagagaaatggggagggccacactctgcacaaagacacccagccaggccgagcccagcctcccacaaaggcccaaagatccggtcggcggagaaactccctaccaccctcccgccagaagcccccaagaaaccccctttcttccagtgacgcagcaccctccccagagcttcaagccaacgggactgggacacaaggtctggaggccacagataccaatggcctgtcctcctcagccaggccccagggcagcaagctggtcccctccaaagaagacaagaagcaggcaaacatcaagaggcagctgatgaccaacttcatcctgggctcttttgatgactactcctccgacgaggactctgttgctggctcatctcgtgagtctacccggaagggcagccgggccagcttgggggccctgtccctggaggcttatctgaccacaggtgaagctgagacccgcgtccccactatgaggccgagcatgtcgggactccacctggtgaagaggggacgggaacacaagaagctggacctgcacagagactttaccgtggcttctcccgctgagtttgtcacacgctttgggggggatcgggtcatcgagaaggtgcttattgccaacaacgggattgccgctgtgaagtgcatgcgctccatccgcaggtgggcctatgagatgttccgcaacgagcgggccatccggtttgttcgcatggtgacccccgaggaccttaaggccaacgcagagtacatcaagatggcggatcattacgggcccgccccaggagggcccaataacaacaactatgccaacgtggagctgattgtggacattgccaagagaatcccgttgcaggcggtgtgggctggctggggccatgctttagaaaaccctaaacttccggagctgctgtgcaagaatggagttgctttcttaggccctcccaggttgaggccaatggtgggtctaggagataagatcgcctccaccgttgtcgcccagacgctacaggtcccaaccctgcccaggagtggaagcgccctgacagtggagtggacagaagatgatctgcagcagggaaaaagaatcagtgtcccagaagatgtttatgacaagggttgcgtgaaagacgtagatgagggcttggaggcagcagaaagaattggttttccattgatgatcaaagcttctgaaggtggcggagggaagggaatccgggaaactgagagtgcggaggacttcccgatccttttcagacaagtacagagtgagatcccaggctcgcccatctttctcatgaagctggcccagcacgcccgtcacctggaagttcagatcctcgctgaccagtatgggaatgctgtgtctctgtttggtcgcgactgctccatccagcggcggcatcagaagatcgttgaggaagcaccggccaccatcgcgccgctggccatattcgagttcatggagcagtgtgccattcgcctggccaagaccgtgggctatgtgagtgcagggacagtggaatacctctatagtcaggatggtagcttccacttcttggagctgaatcctcgcttgcaggtggaacatccctgcacagaaatgattgctgacgttaatctgccggccgcccagctacagatcgccatgggtgccccactgcaccggctgaaagatatccggcttctgtatggagagtcaccctggggagactccccaatttcttttgaaaactcagctcatctcccctgcccccgaggccacgtcattgccaccagaatcaccagcgaaaacccagacgagggttttaagccgagctccgggactgtccaggaactgaatttccggagcagcaagaacgtctggggttacttcacggtggccgctactggaggcctgcacgagtttgcgatttcccagtttgggcactgcttctcctggggagagaaccggaaagaggccatttcgaacatggtggtggctttgaaggaactgtccctccgaggcgactttaggactaccgtggaatacctcattaacctcctggagaccgagagcttccagaacaactacatcgacaccgggtggttggactacctcattgctgagaaagtgcaaaagaaaccgaatatcatgcttggggtggtatgcggggcccttgaacgtggagatgcgatgttcagaacgtgcatgacagatttcttacactccctggaaaggggccaggtcctcccagcggattcactactgaacctcgtagatgtggaattaatttacgagggtgtaaagtacattctaaaggtgacccggcagtctctgaccatgttcgttctcatcatgaatggctgccacatcgagattgatgcccaccggctgaatgatggggggctcctgctctcctacaatgggaacagctacaccacctacatgaaggaagaggttgacagttaccgtaccatcggcaataagacgtgtgtttttgagaaggagaacgatcctacagtcctgagatccccctcggctgggaagctgacacagatcacagtggaggatgggggccacgttgaggctgggagacgctacgctgagatggaggtgatgaagatgatcatgaccctgaacgttcaggaaagaggccgggtgaagtacatcaagcgtccaggtgcggtgctggaagcaggctgcgtggtggccaggctggagctcgatgacccttctaaagtccacccggctgaaccgttcacaggagaactccctgcccagcagaacactgccgacctcggaaagaaactgcacagggtcttccacagcgtcctgggaagcctcaccaacgtcatgagtggcttttgtctgccagagccgttttttagcataaagctgaaggagtgggtgcagaagctcatgatgaccctccggcacccgtcactgctgctggacgtgcaggagatcatgaccagtcgtgcaggccgcatccccccccctgttgagaagtctgtccgcaaggtgatggcccagtatgccagcaacatcacctcggtgctgtgccagttccccagccagcagatagccaccatcctggactgccatgcagccaccctgcagcggaaggctgatcgagaggtcttcttcatcaacacccagagcatggtgcagttggtccagaggtaccgaagtggaatccgcggtcatatgaaaacagtggtgatcgatctcttgagaagatacttgcgtgttgagaccattttcggcaaggcaagagatgctgatgccaactccagtgggatggtggggggcgtgaggagcctgagctttacctctgtgtgggtggttttgtctcccccagcccactacgacaagtgtgtgataaacctcagggaacagttcaagccagacatgtcccaggtgctggactgcatcttctcccacgcacaggtgaccaagaagaaccagctggtgatcatgttgatcgatgagctgtgtggcccagacccttccctgtcggacgagctgatctccatcctcaacgagctcactcagctgagcaaaagcgagcactgcaaagtggccctcagagcccggcagatcctgatcgcctccccctcctacgagctgcggcataaccaggtggagtccattttcctgtctgccattgacatgtacggccaccagttctgccccgagaacctccagaaattaatactttcggaaacaaccatcttcgacgtcctgaatactttcttctatcacgcaaacaaagtcgtgtgcatggcgtccttggaggtttacgtggggggggcttacatcgcctatgtgttaaacagcctgcagcaccggcagctcccggacggcacctgcgtggtagaattccagttcatgctgccgtcctcccacccaaaccggatgaccgtgcccatcagcatcaccaaccctgacctgctgaggcacacgacagagctcttcatggacagcggcttctccccactgtgccagcgcatgggagccatggtagccttcaggagattcgaggacttcaccagaaattttgatgaagtcatctcttgcttcgccaacgtgccgaaagacccccccctcttcagcgaggcccgcacctccctatactccgaggatgactgcaagagcctcagagaagagcccatccacattctgaatgtgtccatccagtgtgcggaccacctggaggatgaggcactggtgccgattttacgtacattcgtacagtccaagaaaaatatccttgtggattatggactccgacgaatcccattcttgattgcccaagagaaagaatttcccaagtttttcacattcagagcaagagatgagtttgcagaagatcgcatttaccgtcacttggaacctgccctggctttccagctggaactcaaccggatgcgtaacttcgatctgaccgccgtgccctgtgccaaccacaagatgcacctttacctgggtgctgccaaggtggaaggaaggtatgaagtgacggaccataggttcttcatccgtgccatcatcaggcactctgacctgatcacaaaggaagcctccttcgaatacctgcagaacgagggtgagcggctgctcctggaggccatggacgagctggaggtggcgttcaataacaccaacgtgcgcaccgactgcaaccacatcttcctcaacttcgtgcccactgtcatcatggaccccaacaagatcgaggagtccgtgcgctacatggttatgcgctacggcagccggctgtggaaactccgtgtgctacaggctgaggtcaagatcaacatccgccagaccaccaccggcagtgccgttcccatccgcctgttcatcaccaatgagtcgggctactacctggacatcagcctctacaaagaagtgactgactccagatctggaaatatcatgtttcactccttcggcaacaagcaagggccccagcacgggatgctgatcaatactccctacgtcaccaaggatctgctccaggccaagcgattccaggcccagaccctgggaaccacctacatctatgacttcccggaaatgttcaggcaggctctctttaaactgtggggctccccagacaagtatcccaaagacatcctgacatacactgaattagtgttggactctcagggccagctggtggagatgaaccgacttcctggtggaaatgaggtgggcatggtggccttcaaaatgaggtttaagacccaggagtacccggaaggacgggatgtgatcgtcatcggcaatgacatcacctttcgcattggatcctttggccctggagaggaccttctgtacctgcgggcatccgagatggcccgggcagaggcgattcccaaaatttacgtggcagccaacagtggcgcccgtattggcatggcagaggagatcaaacacatgttccacgtggcttgggtggacccagaagacccccacaaaggatttaaatacctgtacctgactccccaagactacaccagaatcagctccctgaactccgtccactgtaaacacatcgaggaaggaggagagtccagatacatgatcacggatatcatcgggaaggatgatggcttgggcgtggagaatctgaggggctcaggcatgattgctggggagtcctctctggcttacgaagagatcgtcaccattagcttggtgacctgccgagccattgggattggggcctacttggtgaggctgggccagcgagtgatccaggtggagaattcccacatcatcctcacaggagcaagtgctctcaacaaggtcctgggaagagaggtctacacatccaacaaccagctgggtggcgttcagatcatgcattacaatggtgtctcccacatcaccgtgccagatgactttgagggggtttataccatcctggagtggctgtcctatatgccaaaggataatcacagccctgtccctatcatcacacccactgaccccattgacagagaaattgaattcctcccatccagagctccctacgacccccggtggatgcttgcaggaaggcctcacccaactctgaagggaacgtggcagagcggattctttgaccacggcagtttcaaggaaatcatggcaccctgggcgcagaccgtggtgacaggacgagcaaggcttggggggattcccgtgggagtgattgctgtggagacacggactgtggaggtggcagtccctgcagaccctgccaacctggattctgaggccaagataattcagcaggcaggacaggtgtggttcccagactcagcctacaaaaccgcccaggccatcaaggacttcaaccgggagaagttgcccctgatgatctttgccaactggagggggttctccggtggcatgaaagacatgtatgaccaggtgctgaagtttggagcctacatcgtggacggccttagacaatacaaacagcccatcctgatctatatccgccctatgcgggagctccggggaggctcctgggtggtcatagatgccaccatcaacccgctgtgcatagaaatgtatgcagacaaagagagcaggggtggtgttctggaaccagaggggacagtggagattaagttccgaaaggaagatctgataaagtccatgagaaggatcgatccagcttacaagaagctcatggaacagctaggggaacctgatctctccgacaaggaccgaaaggacctggagggccggctaaaggctcgcgaggacctgctgctccccatctaccaccaggtggcggtgcagttcgccgacttccatgacacacccggccggatgctggagaagggcgtcatatctgacatcctggagtggaagaccgcacgcaccttcctgtattggcgtctgcgccgcctcctcctggaggaccaggtcaagcaggagatcctgcaggccagcggggagctgagtcacgtgcatatccagtccatgctgcgtcgctggttcgtggagacggagggggctgtcaaggcctacttgtgggacaacaaccaggtggttgtgcagtggctggaacagcactggcaggcaggggatggcccgcgctccaccatccgtgagaacatcacgtacctgaagcacgactctgtcctcaagaccatccgaggcctggttgaagaaaaccccgaggtggccgtggactgtgtgatatacctgagccagcacatcagcccagctgagcgggcgcaggtcgttcacctgctgtctaccatggacagcccggcctccacctga

SEQ ID NO: 553 - DNA, 1388 bp, Homo sapiens
caggcagtgcaggagtatggttgagatgctaccaactgccattctgctggtcttggcagtgtccgtggttgctaaagataacgccacgtgtgatggcccctgtgggttacggttcaggcaaaacccacagggtggtgtccgcatcgtcggcgggaaggctgcacagcatggggcctggccctggatggtcagcctccagatcttcacgtacaacagccacaggtaccacacatgtggaggcagcttgctgaattcacgatgggtgctcactgctgctcactgcttcgtcggcaaaaataatgtgcatgactggagactggttttcggagcaaaggaaattacatatgggaacaataaaccagtaaaggcgcctgtgcaagagagatatgtggagaaaatcatcattcatgaaaaatacaactctgcgacagagggaaatgacattgccctcgtggagatcacccctcccatttcgtgtgggcgcttcattgggccgggctgcctgccccacttgaaggcaggcctccccagaggctcccagagctgctgggtggccggctggggatatatagaagagaaagcccccaggccatcatctatactgatggaggcacgtgtggatctcatcgacctggacttgtgtaactcgacccagtggtacaatgggcgcgttcagccaaccaatgtgtgcgcggggtatcctgtaggcaagatcgacacctgccagggagacagcggcgggcctctcatgtgcaaagacagcaaggaaagcgcctatgtggtcgtgggaatcacaagctggggggtaggctgtgcccgtgccaagcgccccggaatctacacggccacctggccttatctgaactggatcgcctccaagattggttctaacgctttgcgtatgattcaatcggccacccctccaccgcccaccactcgaccgcccccgattcgaccccccttctcccaccctatctctgctcaccttccttggtatttccaaccgccccctcgaccacttccaccccgaccaccggcagcccagccccgacccccaccttcacccccgcccccacccccacctccagcctcacctttacccccacccccacccccacccccacctacaccctcatctaccacaaaacttccccaaggactttcttttgccaagcgcctacagcagctcatagaggtcttgaaggggaagacctattccgacggaaagaaccattatgacatggagaccacagagctcccagaactgacctcgacctcctgatctgacctggttctcaacagacccagtgagcccttcactcctgagaaaaaggaaagatgaaataaataaataaacatatatatatagatataaaaaaaaaaaaaaa

SEQ ID NO: 554 - DNA, 1793 bp, Homo sapiens
cgcgtccgccccgcgagcacagagcctcgcctttgccgatccgccgcccgtccacacccgccgccagctcaccatggatgatgatatcgccgcgctcgtcgtcgacaacggctccggcatgtgcaaggccggcttcgcgggcgacgatgccccccgggccgtcttcccctccatcgtggggcgccccaggcaccagggcgtgatggtgggcatgggtcagaaggattcctatgtgggcgacgaggcccagagcaagagaggcatcctcaccctgaagtaccccatcgagcacggcatcgtcaccaactgggacgacatggagaaaatctggcaccacaccttctacaatgagctgcgtgtggctcccgaggagcaccccgtgctgctgaccgaggcccccctgaaccccaaggccaaccgcgagaagatgacccagatcatgtttgagaccttcaacaccccagccatgtacgttgctatccaggctgtgctatccctgtacgcctctggccgtaccactggcatcgtgatggactccggtgacggggtcacccacactgtgcccatctacgaggggtatgccctcccccatgccatcctgcgtctggacctggctggccgggacctgactgactacctcatgaagatcctcaccgagcgcggctacagcttcaccaccacggccgagcgggaaatcgtgcgtgacattaaggagaagctgtgctacgtcgccctggacttcgagcaagagatggccacggctgcttccagctcctccctggagaagagctacgagctgcctgacggccaggtcatcaccattggcaatgagcggttccgctgccctgaggcactcttccagccttccttcctgggcatggagtcctgtggcatccacgaaactaccttcaactccatcatgaagtgtgacgtggacatccgcaaagacctgtacgccaacacagtgctgtctggcggcaccaccatgtaccctggcattgccgacaggatgcagaaggagatcactgccctggcacccagcacaatgaagatcaagatcattgctcctcctgagcgcaagtactccgtgtggatcggcggctccatcctggcctcgctgtccaccttccagcagatgtggatcagcaagcaggagtatgacgagtccggcccctccatcgtccaccgcaaatgcttctaggcggactatgacttagttgcgttacaccctttcttgacaaaacctaacttgcgcagaaaacaagatgagattggcatggctttatttgttttttttgttttgttttggttttttttttttttttggcttgactcaggatttaaaaactggaacggtgaaggtgacagcagtcggttggagcgagcatcccccaaagttcacaatgtggccgaggactttgattgcacattgttgtttttttaatagtcattccaaatatgagatgcattgttacaggaagtcccttgccatcctaaaagccaccccacttctctctaaggagaatggcccagtcctctcccaagtccacacaggggaggtgatagcattgctttcgtgtaaattatgtaatgcaaaatttttttaatcttcgccttaatacttttttattttgttttattttgaatgatgagccttcgtgcccccccttccccctttttgtcccccaacttgagatgtatgaaggcttttggtctccctgggagtgggtggaggcagccagggcttacctgtacactgacttgagaccagttgaataaaagtgcacacctta

SEQ ID NO: 555 - DNA, 3236 bp, Homo sapiens
gacccggccatgcgcggcctcgggctctggctgctgggcgcgatgatgctgcctgcgattgcccccagccggccctgggccctcatggagcagtatgaggtcgtgttgccgcggcgtctgccaggcccccgagtccgccgagctctgccctcccacttgggcctgcacccagagagggtgagctacgtccttggggccacagggcacaacttcaccctccacctgcggaagaacagggacctgctgggttccggctacacagagacctatacggctgccaatggctccgaggtgacggagcagcctcgcgggcaggaccactgcttataccagggccacgtagaggggtacccggactcagccgccagcctcagcacctgtgccggcctcaggggtttcttccaggtggggtcagacctgcacctgatcgagcccctggatgaaggtggcgagggcggacggcacgccgtgtaccaggctgagcacctgctgcagacggccgggacctgcggggtcagcgacgacagcctgggcagcctcctgggaccccggacggcagccgtcttcaggcctcggcccggggactctctgccatcccgagagacccgctacgtggagctgtatgtggtcgtggacaatgcagagttccagatgctggggagcgaagcagccgtgcgtcatcgggtgctggaggtggtgaatcacgtggacaagctatatcagaaactcaacttccgtgtggtcctggtgggcctggagatttggaatagtcaggacaggttccacgtcagccccgaccccagtgtcacactggagaacctcctgacctggcaggcacggcaacggacacggcggcacctgcatgacaacgtacagctcatcacgggtgtcgacttcaccgggactactgtggggtttgccagggtgtccgccatgtgctcccacagctcaggggctgtgaaccaggaccacagcaagaaccccgtgggcgtggcctgcaccatggcccatgagatgggccacaacctgggcatggaccatgatgagaacgtccagggctgccgctgccaggaacgcttcgaggccggccgctgcatcatggcaggcagcattggctccagtttccccaggatgttcagtgactgcagccaggcctacctggagagctttttggagcggccgcagtcggtgtgcctcgccaacgcccctgacctcagccacctggtgggcggccccgtgtgtgggaacctgtttgtggagcgtggggagcagtgcgactgcggcccccccgaggactgccggaaccgctgctgcaactctaccacctgccagctggctgagggggcccagtgtgcgcacggtacctgctgccaggagtgcaaggtgaagccggctggtgagctgtgccgtcccaagaaggacatgtgtgacctcgaggagttctgtgacggccggcaccctgagtgcccggaagacgccttccaggagaacggcacgccctgctccgggggctactgctacaacggggcctgtcccacactggcccagcagtgccaggccttctgggggccaggtgggcaggctgccgaggagtcctgcttctcctatgacatcctaccaggctgcaaggccagccggtacagggctgacatgtgtggcgttctgcagtgcaagggtgggcagcagcccctggggcgtgccatctgcatcgtggatgtgtgccacgcgctcaccacagaggatggcactgcgtatgaaccagtgcccgagggcacccggtgtggaccagagaaggtttgctggaaaggacgttgccaggacttacacgtttacagatccagcaactgctctgcccagtgccacaaccatggggtgtgcaaccacaagcaggagtgccactgccacgcgggctgggccccgccccactgcgcgaagctgctgactgaggtgcacgcagcgtccgggagcctccccgtcctcgtggtggtggttctggtgctcctggcagttgtgctggtcaccctggcaggcatcatcgtctaccgcaaagcccggagccgcatcctgagcaggaacgtggctcccaagaccacaatggggcgctccaaccccctgttccaccaggctgccagccgcgtgccggccaagggcggggctccagccccatccaggggcccccaagagctggtccccaccacccacccgggccagcccgcccgacacccggcctcctcggtggctctgaagaggccgccccctgctcctccggtcactgtgtccagcccacccttcccagttcctgtctacacccggcaggcaccaaagcaggtcatcaagccaacgttcgcacccccagtgcccccagtcaaacccggggctggtgcggccaaccctggtccagctgagggtgctgttggcccaaaggttgccctgaagccccccatccagaggaagcaaggagccggagctcccacagcaccctaggggggcacctgcgcctgtgtggaaatttggagaagttgcggcagagaagccatgcgttccagccttccacggtccagctagtgccgctcagccctagaccctgactttgcaggctcagctgctgttctaacctcagtaatgcatctacctgagaggctcctgctgtccacgccctcagccaattccttctccccgccttggccacgtgtagccccagctgtctgcaggcaccaggctgggatgagctgtgtgcttgcgggtgcgtgtgtgtgtacgtgtctccaggtggccgctggtctcccgctgtgttcaggaggccacatatacagcccctcccagccacacctgcccctgctctggggcctgctgagccggctgccctgggcacccggttccaggcagcacagacgtggggcatccccagaaagactccatcccaggaccaggttcccctccgtgctcttcgagagggtgtcagtgagcagactgcaccccaagctcccgactccaggtcccctgatcttgggcctgtttcccatgggattcaagagggacagccccagctttgtgtgtgtttaagcttaggaatgccctttatggaaagggctatgtgggagagtcagctatcttgtctggttttcttgagacctcagatgtgtgttcagcagggctgaaagcttttattctttaataatgagaaatgtatattttactaataaattattgaccgagttctgtagattcttgttaga

SEQ ID NO: 556 - DNA, 3410 bp, Homo sapiens
gaattcgaggatccgggtaccatgggcggcggcaggcctagcagcacgggaaccgtcccccgcgcgcatgcgcgcgcccctgaagcgcctgggggacgggtatgggcgggaggtaggggcgcggctccgcgtgccagttgggtgcccgcgcgtcacgtggtgaggaaggaggcggaggtctgagtttcgagggagggggggagagaagagggaacgagcaagggaaggaaagcggggaaaggaggaaggaaacgaacgagggggagggaggtccctgttttggaggagctaggagcgttgccggcccctgaagtggagcgagagggaggtgcttcgccgtttctcctgccaggggaggtcccggcttcccgtggaggctccggaccaagccccttcagcttctccctccggatcgatgtgctgctgttaacccgtgaggaggcggcggcggcggcagcggcagcggaagatggtgttgctgagagtgttaattctgctcctctcctgggcggcggggatgggaggtcagtatgggaatcctttaaataaatatatcagacattatgaaggattatcttacaatgtggattcattacaccaaaaacaccagcgtgccaaaagagcagtctcacatgaagaccaatttttacgtctagatttccatgcccatggaagacatttcaacctacgaatgaagagggacacttcccttttcagtgatgaatttaaagtagaaacatcaaataaagtacttgattatgatacctctcatatttacactggacatatttatggtgaagaaggaagttttagccatgggtctgttattgatggaagatttgaaggattcatccagactcgtggtggcacattttatgttgagccagcagagagatatattaaagaccgaactctgccatttcactctgtcatttatcatgaagatgatattaactatccccataaatacggtcctcaggggggctgtgcagatcattcagtatttgaaagaatgaggaaataccagatgactggtgtagaggaagtaacacagatacctcaagaagaacatgctgctaatggtccagaacttctgaggaaaaaacgtacaacttcagctgaaaaaaatacttgtcagctttatattcagactgatcatttgttctttaaatattacggaacacgagaagctgtgattgcccagatatccagtcatgttaaagcgattgatacaatttaccagaccacagacttctccggaatccgtaacatcagtttcatggtgaaacgcataagaatcaatacaactgctgatgagaaggaccctacaaatcctttccgtttcccaaatattggtgtggagaagtttctggaattgaattctgagcagaatcatgatgactactgtttggcctatgtcttcacagaccgagattttgatgatggcgtacttggtctggcttgggttggagcaccttcaggaagctctggaggaatatgtgaaaaaagtaaactctattcagatggtaagaagaagtccttaaacactggaattattactgttcagaactatgggtctcatgtacctcccaaagtctctcacattacttttgctcacgaagttggacataactttggatccccacatgattctggaacagagtgcacaccaggagaatctaagaatttgggtcaaaaagaaaatggcaattacatcatgtatgcaagagcaacatctggggacaaacttaacaacaataaattctcactctgtagtattagaaatataagccaagttcttgagaagaagagaaacaactgttttgttgaatctggccaacctatttgtggaaatggaatggtagaacaaggtgaagaatgtgattgtggctatagtgaccagtgtaaagatgaatgctgcttcgatgcaaatcaaccagagggaagaaaatgcaaactgaaacctgggaaacagtgcagtccaagtcaaggtccttgttgtacagcacagtgtgcattcaagtcaaagtctgagaagtgtcgggatgattcagactgtgcaagggaaggaatatgtaatggcttcacagctctctgcccagcatctgaccctaaaccaaacttcacagactgtaataggcatacacaagtgtgcattaatgggcaatgtgcaggttctatctgtgagaaatatggcttagaggagtgtacgtgtgccagttctgatggcaaagatgataaagaattatgccatgtatgctgtatgaagaaaatggacccatcaacttgtgccagtacagggtctgtgcagtggagtaggcacttcagtggtcgaaccatcaccctgcaacctggatccccttgcaacgattttagaggttactgtgatgttttcatgcggtgcagattagtagatgctgatggtcctctagctaggcttaaaaaagcaatttttagtccagagctctatgaaaacattgctgaatggattgtggctcattggtgggcagtattacttatgggaattgctctgatcatgctaatggctggatttattaagatatgcagtgttcatactccaagtagtaatccaaagttgcctcctcctaaaccacttccaggcactttaaagaggaggagacctccacagcccattcagcaaccccagcgtcagcggccccgagagagttatcaaatgggacacatgagacgctaactgcagcttttgccttggttcttcctagtgcctacaatgggaaaacttcactccaaagagaaacctattaagtcatcatctccaaactaaaccctcacaagtaacagttgaagaaaaaatggcaagagatcatatcctcagaccaggtggaattacttaaattttaaagcctgaaaattccaatttgggggtgggaggtggaaaaggaacccaattttcttatgaacagatatttttaacttaatggcacaaagtcttagaatattattatgtgccccgtgttccctgttcttcgttgctgcattttcttcacttgcaggcaaacttggctctcaataaacttttaccacaaattgaaataaatatatttttttcaactgccaatcaaggctaggaggctcgaccacctcaacattggagacatcacttgccaatgtacataccttgttatatgcagacatgtatttcttacgtacactgtacttctgtgtgcaattgtaaacagaaattgcaatatggatgtttctttgtattataaaatttttccgctcttaattaaaaattactgtttaattgacatactcaggataacagagaatggtggtattcagtggtccaggattctgtaatgctttacacaggcagttttgaaatgaaaatcaatttaccccatggtacccggatcctcgaattc

SEQ ID NO: 557 - DNA, 4985 bp, Homo sapiens
cccgggactcgacaacatggcttccccgccccaccagcagctgctgcatcaccacagcaccgaggtgagctgcgactccagcggggacagcaacagcgtgcgcgtcaagatcaaccccaagcagctgtcctccaacagccaccccaagcactgcaaatacagcatctcctctagctgcagcagctctggggactccgggggcgtcccccggcgagtgggcggcggaggccggctgcgcaggcagaagaagctgccccagctgttcgagagggcctccagccgctggtgggaccccaagttcgactcggtgaacctggaggaggcctgcctggagcgctgcttcccgcagacccagcgccggttccggtatgcgctcttctacatcggcttcgcctgccttctgtggagcatctattttgcggtccacatgagatccagactgatcgtcatggtcgcccccgcgctgtgcttcctcctggtgtgtgtgggcttctttctgtttaccttcaccaagctgtacgcccggcattacgcgtggacctcgctggctctcaccctgctggtgttcgccctgaccctggctgcgcagttccaggtcttgacgcctgtctcaggacgcggcgacagctccaaccttacggccacagcccggcccacagatacttgcttatctcaagtggggagcttctccatgtgcatcgaagtgctctttttgctctataccgtcatgcacttacctttgtacctgagtttgtgtctgggggtggcctactctgtccttttcgagacctttggctaccatttccgggatgaagcctgcttcccctcgcccggagccggggccctgcactgggagctgctgagcagggggctgctccacggctgcatccacgccatcggggtccacctgttcgtcatgtcccaggtgaggtccaggagcaccttcctcaaggtggggcaatccattatgcacgggaaggacctggaagtggaaaaagccctcaaagagaggatgattcattccgtgatgccaagaatcatagccgatgacttaatgaagcagggagatgaggagagtgagaattctgtcaagaggcatgccacctcgagccccaagaacaggaagaaaaagtcttccatccaaaaagctcctatagccttccgcccttttaagatgcagcagatcgaagaagtcagtattttatttgcagatatcgtgggcttcaccaagatgagtgccaacaagtctgcccacgccctggtgggtctcctgaacgatctgttcggtcgcttcgaccgcctgtgtgaggagaccaagtgtgagaaaatcagcaccctgggagactgttactactgcgtggcgggctgtcccgagccccgggccgaccatgcctactgctgcatcgagatgggcctgggcatgatcaaggccatcgagcagttctgccaggagaagaaggagatggtgaacatgagagtcggggtgcacacgggcaccgtcctttgcggcatcctgggcatgaggaggtttaaatttgacgtgtggtccaacgatgtgaacctggccaatctcatggagcagctgggagtggccggcaaagttcacatttctgaggccaccgcaaaatacttagatgaccggtacgaaatggaagatgggaaagttattgaacggctgggccagagcgtggttgctgaccagttgaaaggtttgaagacatacctgatatcgggtcagagagccaaggagtctcgctgcagctgtgcagaggccttgctttctggctttgaggtcattgacggctcacaggtgtcctcaggccctaggggacaggggacagcgtcatcagggaatgtcagtgacttggcgcagactgtcaaaacctttgataaccttaagacctgcccttcgtgcggaatcacatttgctcccaaatctgaagccggcgccgagggaggagcacctcaaaacggctgccaagacgagcataaaaacagcaccaaggcttctggaggacctaatcccaaaactcagaacgggctcctcagccctccccaagaggagaagctcaccaacagtcagacttctctgtgtgagatcttgcaggagaagggaaggtgggcaggggtgagcctggaccagtcggctctccttccgctgaggttcaagaacatccgggagaaaacggacgcccactttgtggacgttatcaaagaagacagcctgatgaaagattacttttttaagccgcccattaatcagttcagcctgaacttcctggatcaggagctggagcgatcctacaggaccagctatcaggaagaggtcataaagaactcccccgtgaagacgtttgctagtcccaccttcagctccctcctggatgtgtttctgtcgaccacagtgtttctgacgctgtccaccacctgcttcctgaagtacgaggcggccaccgtgcctcccccgcccgccgccctggcggtcttcagtgcagccctgctgctggaggtgctgtccctcgcggtgtccatcaggatggtgttcttcctggaggacgtcatggcctgcaccaagcgcctgctggagtggatcgccggctggctaccacgtcactgcatcggggccatcctggtgtcgcttcccgcactggccgtctactcccatgtcacctccgaatatgagaccaacatacacttcccagtgttcacaggctcggccgcactgattgccgtcgtgcactactgtaacttctgccagctcagctcctggatgaggtcctccctcgccaccgtcgtgggggccgggccgctgctcctgctctacgtctccctgtgcccagacagttctgtattaacttcgccccttgacgcagtacagaatttcagttccgagaggaacccgtgcaatagttcggtgccgcgtgacctccggcggcccgccagcctcatcggccaggaggtggttctcgtcttctttctcctgctcttgttggtctggttcctgaatcgcgaatttgaagtcagctaccgcctccactaccacggagacgtggaagcggatcttcaccgcaccaagatccagagcatgcgggaccaggcagactggctgctgaggaacatcatcccctaccacgtggctgagcagctgaaggtgtcccagacctactccaagaaccacgacagcggaggggtgatcttcgccagcatcgtcaacttcagcgagttctacgaggagaactacgagggcggcaaggagtgctaccgggtcctcaacgagctcatcggggactttgacgagctcctaagcaagccggactacagcagcatcgagaagatcaagaccatcggagccacgtacatggcggcgtcagggctgaacaccgcgcaggcccaggacggcagccacccgcaggagcacctgcagatcctgttcgagttcgccaaggagatgatgcgcgtggtggacgacttcaacaacaacatgctgtggttcaacttcaagctccgcgtcggcttcaaccatgggcccctcacggccggggtcatcggcaccaccaagctgctgtacgacatctggggagacaccgtcaacatcgccagcaggatggacaccaccggcgtggagtgccgcatccaggtgagcgaagagagctaccgcgtcttgagcaagatgggctatgacttcgactacagagggaccgtgaatgtcaaggggaaaggccagatgaagacctacctgtacccaaagtgcacggatcacagggtcatcccagcaccagctgtccatctccccagacatccgcgtccaggtggatggcagcatcggacggtctcccacagacgagattgccaacctggtgccttctgtccagtatgtggacaagacatctctgggttctgacagcagcacgcaggccaaggatgcccacctgtcccccaagagaccgtggaaggagcccgtcaaagccgaagaaaggggtcgatttggcaaagccatagagaaagacgactgtgacgaaacaggaatagaagaagccaacgaactcaccaagctcaacgtttcaaagagtgtgtgaggcggcgcccacccgctgcccgaggtgctctgtttgtcgaaacacagtaatatttgtatttggctgttgtgctttccaagcgccacagttgccctccccggacgtggtgttatgtggtcatttcagccctaacttctgtgtggatcacagttattcagggttcattttcatccattcttccctttcgctcccttccctggaaaccccgctgcctctgggtcatccgttcagcacgtggtggagaacaagtgccttcagggctggcctcggcctcgagtctcgggacagaggccgccagtggagatcatggctttgggtattatttgacttttagaacaaaagctgtggttaagatctcatttttattgctttttcccacgtcccacgagacactattttcggttctctggctaataccctgtttttgagtttattttgtttctgtctatgtcacagtgtccccctacgacccgacctctctatgtaagcacacatgcgcacacacacttgcattcatgaatctgatataaagtgccagtaatccgccaagagggggtgcgaagggggcatgtcacgacagctccgccaccccccattgcccacccgcactttcccgagcaccgcgccccgtgggctgtgggtgagccgcgctccctgcactgagcgggtttaggggctcgcccacatgcatgcaggccaagacagcaaatgccagccgggcacgacgcctgtgtgcccaggcctcgggggtctcagagccgcctctcacccccgaccctccacccaggggtctccccgtcgggagtggaggcgttggtcctggaagctgactcatcggagagggaaataccaaataaacatccgaggttgcaaaaaaaaaaaaaaaaaaaaaaaaaaaaaaaaaaaaaa

SEQ ID NO: 558 - DNA, 1809 bp, Homo sapiens
cgccttccctccaatcagcaccggggccggctagccaggggccggccgcgcggggtgtgtgaggacgcgctcccagtcgctgagtgcctgagccgggaagcagttgctgtggtacctgcgctgcccgagcggacgtagagcatcggacgcgggcgccgtggcgttgggcaggaggcgaagccaatgacgtcagtcagagaaaatattctctttggaatgggaaatcctctgcttgacatctctgctgtagtggacaaagatttccttgataagtattctctgaaaccaaatgaccaaatcttggctgaagacaaacacaaggaactgtttgatgaacttgtgaaaaaattcaaagtcgaatatcatgctggtggctctacccagaattcaattaaagtggctcagtggatgattcaacagccacacaaagcagcaacattttttggatgcattgggatagataaatttggggagatcctgaagagaaaagctgctgaagcccatgtggatgctcattactacgagcagaatgagcagccaacaggaacttgtgctgcatgcatcactggtgacaacaggtccctcatagctaatcttgctgctgccaattgttataaaaaggaaaaacatcttgatctggagaaaaactggatgttggtagaaaaagcaagagtttgttatatagcaggcttttttcttcacgtttccccagagtcagtattaaaggtggctcaccatgcttctgaaaacaacaggattttcactttgaatctatctgcaccgtttattagccagttctacaaggaatcattgatgaaagttatgccttatgttgatatactttttggaaatgagacagaagctgccacttttgctagagagcaaggctttgagactaaagacattaaagagatagccaaaaagacacaagccctgccaaagatgaactcaaagaggcagcgaatcgtgatcttcacccaagggagagatgacactataatggctacagaaagtgaagtcactgcttttgctgtcttggatcaagaccagaaagaaattattgataccaatggagctggagatgcatttgttggaggttttctgtctcaactggtctctgacaagcctctgactgaatgtatccgtgctggccactatgcagcaagcatcataattagacggactggctgcacctttcctgagaagccagacttccactgatggaagagctgaaaacacaagcccaggagtgcagacactgccctaattgcttcctgacaattcccatattaataaagaagaaaattatctgccattttttcctactataataatgctgaatcttaatttagagggtacaagggtatggtaatgcttgtagaatctttattatctcaacaatctaaaaaatgatgtttatttccatagtttgatagtgccacttaaatgccaattaaacaagaatataacatttcaatagaaatttttatttcattttcaattactttgtaaattcgtgtgtatttagtacactgatttgttttttacatttctgctttgaatgcagatgcaatttaatataatagattttttaatgaattaatcttaacatagtaatctttagctttttatacaaatatatttaatttaggagtatatgtgtgtctatacacacacatacataaatataccacatatacacctgatagtcaaataaggtacagaaattttatcttgtcaattatgccaaataatctctttaatgtgcactcaacatgtaataaactttggataattaaaaaaaaaaaa

SEQ ID NO: 559 - DNA, 1449 bp, Homo sapiens
ctggatagaacagctcaagccttgccacttcgggcttctcactgcagctgggcttggacttcggagttttgccattgccagtgggacgtctgagactttctccttcaagtacttggcagatcactctcttagcagggtctgcgcttcgcagccgggatgaagctggtttccgtcgccctgatgtacctgggttcgctcgccttcctaggcgctgacaccgctcggttggatgtcgcgtcggagtttcgaaagaagtggaataagtgggctctgagtcgtgggaagagggaactgcggatgtccagcagctaccccaccgggctcgctgacgtgaaggccgggcctgcccagacccttattcggccccaggacatgaagggtgcctctcgaagccccgaagacagcagtccggatgccgcccgcatccgagtcaagcgctaccgccagagcatgaacaacttccagggcctccggagctttggctgccgcttcgggacgtgcacggtgcagaagctggcacaccagatctaccagttcacagataaggacaaggacaacgtcgcccccaggagcaagatcagcccccagggctacggccgccggcgccggcgctccctgcccgaggccggcccgggtcggactctggtgtcttctaagccacaagcacacggggctccagcccccccgagtggaagtgctccccactttctttaggatttaggcgcccatggtacaaggaatagtcgcgcaagcatcccgctggtgcctcccgggacgaaggacttcccgagcggtgtggggaccgggctctgacagccctgcggagaccctgagtccgggaggcaccgtccggcggcgagctctggctttgcaagggcccctccttctgggggcttcgcttccttagccttgctcaggtgcaagtgccccagggggcggggtgcagaagaatccgagtgtttgccaggcttaaggagaggagaaactgagaaatgaatgctgagacccccggagcaggggtctgagccacagccgtgctcgcccacaaactgatttctcacggcgtgtcaccccaccagggcgcaagcctcactattacttgaactttccaaaacctaaagaggaaaagtgcaatgcgtgttgtacatacagaggtaactatcaatatttaagtttgttgctgtcaagattttttttgtaacttcaaatatagagatatttttgtacgttatatattgtattaagggcattttaaaagcaattatattgtcctcccctattttaagacgtgaatgtctcagcgaggtgtaaagttgttcgccgcgtggaatgtgagtgtgtttgtgtgcatgaaagagaaagactgattacctcctgtgtggaagaaggaaacaccgagtctctgtataatctatttacataaaatgggtgatatgcgaacagcaaacc

SEQ ID NO: 560 - DNA, 1368 bp, Homo sapiens
atggcgttcgccgagacctacccggcggcatcctccctgcccaacggcgattgcggccgccccagggcggccggaggaaaccgggtgacggtggtgctcggtgcgcagtggggcgacgaaggcaaagggaaggtggtggacctgctggcgcaggacgccgacatcgtgtgccgctgccagggaggaaataatgctggccatacagttgttgtggattctgtggaatatgattttcatctcttacccagtggaataattaatccaaatgtcactgcattcattggaaatggtgtggtaattcatctacctggattgtttgaagaagcagagaaaaatgttcaaaaaggaaaaggactagaaggctgggaaaaaaggcttattatatctgacagagctcatattgtatttgattttcatcaagcagctgatggtatccaggaacaacagagacaagaacaagcaggaaaaaatttgggtacaacaaaaaagggcattggcccagtttattcgtccaaagctgctcggagtggactcaggatgtgcgaccttgtttctgactttgatggcttctctgagaggtttaaagttctagctaaccaatacaaatctatataccccactttggaaatagacattgaaggtgaattacaaaaactcaagggttatatggaaaagattaaaccaatggtgagagatggagtttattttctatatgaggccctacatggaccaccaaagaaaatcttggtagaaggtgcaaatgcagcactattagatattgattttgggacttacccttttgtaacctcttcaaattgtactgttggaggtgtttgtactggtttgggtatgccacctcaaaatgttggagaagtgtatggagttgtgaaagcttatacaactagagttggtattggtgcctttcctacagagcaagacaatgaaattggagaattattacaaacaaggggtagagagtttggtgtaactactggaaggaaaagaagatgtggctggttggacctcgttttgctcaaatatgctcatatgatcaatggatttactgcgttggcacttaccaagttggatattttggacatgtttacggaaatcaaagttggagttgcttacaagttagatggtgaaatcatacctcatatcccagcaaaccaagaagtcttaaataaagttgaagttcaatataagactctcccaggatggaacacagacatatcaaatgcaagggcgtttaaagaactacctgttaatgcacaaaactatgttcgatttattgaagatgagcttcaaattccagttaagtggattggtgttggtaaatccagagaatctatgattcaactcttttaa

SEQ ID NO: 561 - DNA, 3935 bp, Homo sapiens
tccctcgctcaccccatcctctctcccgccccttcctggattccctcacccgtctcgatcccctctccgccctttcccagagacccagagcccctgaccccccgcgccctccccggagccccccgcgcgtgccgcggccatggcggccgtgcgcggggcgcccctgctcagctgcctcctggcgttgctggccctgtgccctggagggcgcccgcagacggtgctgaccgacgacgagatcgaggagttcctcgagggcttcctgtcagagctagaacctgagccccgggaggacgacgtggaggccccgccgcctcccgagcccaccccgcgggtccgaaaagcccaggcggggggcaagccagggaagcggccagggacggccgcagaagtgcctccggaaaagaccaaagacaaagggaagaaaggcaagaaagacaaaggccccaaggtgcccaaggagtccttggaggggtcccccaggccgcccaagaaggggaaggagaagccacccaaggccaccaagaagcccaaggagaagccacctaaggccaccaagaagcccaaggaggagccacccaaggccaccaagaagcccaaagagaagccacccaaggccaccaagaagcccccgtcagggaagaggccccccattctggctccctcagaaaccctggagtggccactgcccccaccccccagccctggccccgaggagctaccccaggagggaggggcgcccctctcaaataactggcagaatccaggagaggagacccatgtggaggcacaggagcaccagcctgagccggaggaggagaccgagcaacccacactggactacaatgaccagatcgagagggaggactatgaggactttgagtacattcggcgccagaagcaacccaggccacccccaagcagaaggaggaggcccgagcgggtctggccagagccccctgaggagaaggccccggccccagccccggaggagaggattgagcctcctgtgaagcctctgctgcccccgctgccccctgactatggtgatggttacgtgatccccaactacgatgacatggactattactttgggcctcctccgccccagaagcccgatgctgagcgccagacggacgaagagaaggaggagctgaagaaacccaaaaaggaggacagcagccccaaggaggagaccgacaagtgggcagtggagaagggcaaggaccacaaagagccccgaaagggcgaggagttggaggaggagtggacgcctacggagaaagtcaagtgtccccccattgggatggagtcacaccgtattgaggacaaccagatccgagcctcctccatgctgcgccacggcctgggggcacagcgcggccggctcaacatgcagaccggtgccactgaggacgactactatgatggtgcgtggtgtgccgaggacgatgccaggacccagtggatagaggtggacaccaggaggactacccggttcacaggcgtcatcacccagggcagagactccagcatccatgacgattttgtgaccaccttcttcgtgggcttcagcaatgacagccagacatgggtgatgtacaccaacggctatgaggaaatgacctttcatgggaacgtggacaaggacacacccgtgctgagtgagctcccagagccggtggtggctcgtttcatccgcatctacccactcacctggaatggcagcctgtgcatgcgcctggaggtgctggggtgctctgtggcccctgtctacagctactacgcacagaatgaggtggtggccaccgatgacctggatttccggcaccacagctacaaggacatgcgccagctcatgaaggtggtgaacgaggagtgccccaccatcacccgcacttacagcctgggcaagagctcacgaggcctcaagatctatgccatggagatctcagacaaccctggggagcatgaactgggggagcccgagttccgctacactgctgggatccatggcaacgaggtgctgggccgagagctgttgctgctgctcatgcagtacctgtgccgagagtaccgcgatgggaacccacgtgtgcgcagcctggtgcaggacacacgcatccacctggtgccctcactgaaccctgatggctacgaggtggcagcgcagatgggctcagagtttgggaactgggcgctgggactgtggactgaggagggctttgacatctttgaagatttcccggatctcaactctgtgctctggggagctgaggagaggaaatgggtcccctaccgggtccccaacaataacttgcccatccctgaacgctacctttcgccagatgccacggtatccacggaggtccgggccatcattgcctggatggagaagaaccccttcgtgctgggagcaaatctgaacggcggcgagcggctagtatcctacccctacgatatggcccgcacgcctacccaggagcagctgctggccgcagccatggcagcagcccggggggaggatgaggacgaggtctccgaggcccaggagactccagaccacgccatcttccggtggcttgccatctccttcgcctccgcacacctcaccttgaccgagccctaccgcggaggctgccaagcccaggactacaccggcggcatgggcatcgtcaacggggccaagtggaacccccggaccgggactatcaatgacttcagttacctgcataccaactgcctggagctctccttctacctgggctgtgacaagttccctcatgagagtgagctgccccgcgagtgggagaacaacaaggaggcgctgctcaccttcatggagcaggtgcaccgcggcattaagggggtggtgacggacgagcaaggcatccccattgccaacgccaccatctctgtgagtggcattaatcacggcgtgaagacagccagtggtggtgattactggcgaatcttgaacccgggtgagtaccgcgtgacagcccacgcggagggctacaccccgagcgccaagacctgcaatgttgactatgacatcggggccactcagtgcaacttcatcctggctcgctccaactggaagcgcatccgggagatcatggccatgaacgggaaccggcctatcccacacatagacccatcgcgccctatgaccccccaacagcgacgcctgcagcagcgacgcctacaacaccgcctgcggcttcgggcacagatgcggctgcggcgcctcaacgccaccaccaccctaggcccccacactgtgcctcccacgctgccccctgcccctgccaccaccctgagcactaccatagagccctggggcctcataccgccaaccaccgctggctgggaggagtcggagactgagacctacacagaggtggtgacagagtttgggaccgaggtggagcccgagtttgggaccaaggtggagcccgagtttgagacccagttggagcctgagttcgagacccagctggaacccgagtttgaggaagaggaggaggaggagaaagaggaggagatagccactggccaggcattccccttcacaacagtagagacctacacagtgaactttggggacttctgagatcagcgtcctaccaagaccccagcccaactcaagctacagcagcagcacttcccaagcctgctgaccacagtcacatcacccatcagcacatggaaggcccctggtatggacactgaaaggaagggctggtcctgcccctttgagggggtgcaaacatgactgggacctaagagccagaggctgtgtagaggctcctgctccacctgccagtctcgtaagagatggggttgctgcagtgttggagtaggggcagagggagggagccaaggtcactccaataaaacaagctcatggcaaaaaaaaaaaaaaaaaaaaa

SEQ ID NO: 562 - DNA, 7137 bp, Homo sapiens
cggccaggtgtgtgggactgaagttcttggagaagggagtccaactcttcaaggtgaactatgaccactttactctgggttttcgtgactctgagggtcatcactgcagctgtcactgtagaaacttcagaccatgacaactcgctgagtgtcagcatcccccaaccgtccccgctgagggtcctcctggggacctccctcaccatcccctgctatttcatcgaccccatgcaccctgtgaccaccgccccttctaccgccccactggccccaagaatcaagtggagccgtgtgtccaaggagaaggaggtagtgctgctggtggccactgaagggcgcgtgcgggtcaacagtgcctatcaggacaaggtctcactgcccaactacccggccatccccagtgacgccaccttggaagtccagagcctgcgctccaatgactctggggtctaccgctgcgaggtgatgcatggcatcgaggacagcgaggccaccctggaagtcgtggtgaaaggcatcgtgttccattacagagccatctctacacgctacaccctcgactttgacagggcgcagcgggcctgcctgcagaacagtgccatcattgccacgcctgagcagctgcaggccgcctacgaagacggcttccaccagtgtgacgccggctggctggctgaccagactgtcagataccccatccacactccccgggaaggctgctatggagacaaggatgagtttcctggtgtgaggacgtatggcatccgagacaccaacgagacctatgatgtgtactgcttcgccgaggagatggagggtgaggtcttttatgcaacatctccagagaagttcaccttccaggaagcagccaatgagtgccggcggctgggtgcccggctggccaccacgggccacgtctacctggcctggcaggctggcatggacatgtgcagcgccggctggctggccgaccgcagcgtgcgctaccccatctccaaggcccggcccaactgcggtggcaacctcctgggcgtgaggaccgtctacgtgcatgccaaccagacgggctaccccgacccctcatcccgctacgacgccatctgctacacaggtgaagactttgtggacatcccagaaaacttctttggagtggggggtgaggaggacatcaccgtccagacagtgacctggcctgacatggagctgccactgcctcgaaacatcactgagggtgaagcccgaggcagcgtgatccttaccgtaaagcccatcttcgaggtctcccccagtcccctggaacccgaggagcccttcacgtttgcccctgaaataggggccactgccttcgctgaggttgagaatgagactggagaggccaccaggccctggggctttcccacacctggcctgggccctgccacggcattcaccagtgaggacctcgtcgtgcaggtgaccgctgtccctgggcagccgcatttgccagggggggtcgtcttccactaccgcccgggacccacccgctactcgctgacctttgaggaggcacagcaggcctgccctggcacgggggcggtcattgcctcgccggagcagctccaggccgcctacgaagcaggctatgagcagtgtgacgccggctggctgcgggaccagaccgtcagataccccattgtgagcccacggaccccatgcgtgggtgacaaggacagcagcccaggggtcaggacctatggcgtgcgcccatcaacagagacctacgatgtctactgctttgtagacagacttgagggggaggtgttcttcgccacacgccttgagcagttcaccttccaggaagcactggagttctgtgaatctcacaatgccactgccaccacgggccagctctacgccgcctggagccgcggcctggacaagtgctatgccggctggctggccgacggcagcctccgctaccccatcgtcaccccaaggcctgcctgcggtggggacaagccaggcgtgagaacggtctacctctaccctaaccagacgggcctcccagacccactgtcccggcaccatgccttctgcttccgaggcatttcagcggttccttctccaggagaagaagagggtggcacacccacatcaccctctggtgtggaggagtggatcgtgacccaagtggttcctggtgtggctgctgtccccgtagaagaggagacaactgctgtaccctcaggggagactactgccatcctagagttcaccaccgagccagaaaaccagacagaatgggaaccagcctataccccagtgggcacatccccgctgccagggatccttcctacttggcctcctactggcgccgaaacagaggaaagtacagaaggcccttctgcaactgaagtgccctctgcctcagaggaaccatccccctcagaggtgccattcccctcagaggagccatccccctcagaggaaccattcccctcagtgaggccattcccctcagtggagctgttcccctcagaggagccattcccctccaaggagccatccccctcagaggaaccatcagcctcagaagagccgtatacaccttcaccccccgagcccagctggactgagctgcccagctctggggaggaatctggggcccctgatgtcagtggtgacttcacaggcagtggagatgtttcaggacaccttgacttcagtgggcagctgtcaggggacagggcaagtggactgccctctggagacctggactccagtggtcttacttccacagtgggctcaggcctgactgtggaaagtggactaccctcaggggatgaagagagaattgagtggcccagcactcctacggttggtgaactgccctctggagctgagatcctagagggctctgcctctggagttggggatctcagtggacttccttctggagaagttctagagacctctgcctctggagtaggagacctcagtgggcttccttctggagaagttctagagaccactgcccctggagtagaggacatcagcgggcttccttctggagaagttctagagaccactgcccctggagtagaggacatcagcgggcttccttctggagaagttctagagaccactgcccctggagtagaggacatcagcgggcttccttctggagaagttctagagaccactgcccctggagtagaggacatcagcgggcttccttctggagaagttctagagaccactgcccctggagtagaggacatcagcgggcttccttctggagaagttctagagaccgctgcccctggagtagaggacatcagcgggcttccttctggagaagttctagagaccgctgcccctggagtagaggacatcagcgggcttccttctggagaagttctagagaccgctgcccctggagtagaggacatcagcgggcttccttctggagaagttctagagaccgctgcccctggagtagaggacatcagcgggcttccttctggagaagttctagagaccgctgcccctggagtagaggacatcagcgggcttccttctggagaagttctagagaccgctgcccctggagtagaggacatcagcgggcttccttctggagaagttctagagaccgctgcccctggagtagaggacatcagcgggcttccttctggagaagttctagagactgctgcccctggagtagaggacatcagcgggcttccttctggagaagttctagagactgctgcccctggagtagaggacatcagcgggcttccttctggagaagttctagagactgctgcccctggagtagaggacatcagcgggcttccttctggagaagttctagagactgctgcccctggagtagaggacatcagcgggcttccttctggagaagttctagagactactgcccctggagtagaggagatcagcgggcttccttctggagaagttctagagactactgcccctggagtagatgagatcagtgggcttccttctggagaagttctagagactactgcccctggagtagaggagatcagcgggcttccttctggagaagttctagagacttctacctctgcggtaggggacctcagtggacttccttctggaggagaagttctagagatttctgtctctggagtagaggacatcagtgggcttccttctggagaggttgtagagacttctgcctctggaatagaggatgtcagtgaacttccttcaggagaaggtctagagacctctgcttctggagtagaggacctcagcaggctcccttctggagaagaagttctagagatttctgcctctggatttggggacctcagtggagttccttctggaggagaaggtctagagacctctgcttctgaagtagggactgacctcagtgggcttccttctggaagggagggtctagagacttcagcttctggagctgaggacctcagtgggttgccttctggaaaagaagacttggtggggtcagcttctggagacttggacttgggcaaactgccttctggaactctaggaagtgggcaagctccagaaacaagtggtcttccctctggatttagtggtgagtattctggggtggaccttggaagtggcccaccctctggcctgcctgactttagtggacttccatctggattcccaactgtttccctagtggattctacattggtggaagtggtcacagcctccactgcaagtgaactggaagggaggggaaccattggcatcagtggtgcaggagaaatatctggactgccctccagtgagctggacattagtgggagagctagtggactcccttcaggaactgaactcagtggccaagcatctgggtctcctgatgtcagtggggaaatacctggactctttggtgtcagtggacagccatcagggtttcctgacactagtggggaaacatctggagtgactgagcttagcgggctgtcctctggacaaccaggtgttagtggagaagcatctggagttctttatggcactagtcaaccctttggcataactgatctgagtggagaaacatctggggtccctgatctcagtgggcagccttcagggttaccagggttcagtggggcaacatcaggagtccctgacctggtttctggtaccacgagtggcagcggtgaatcttctgggattacatttgtggacaccagtttggttgaagtggcccctactacatttaaagaagaagaaggcttagggtctgtggaactcagtggcctcccttccggagaggcagatctgtcaggcaaatctgggatggtggatgtcagtggacagttttctggaacagtcgattccagtgggtttacatcccagactccggaattcagtggcctaccaagtggcatagctgaggtcagtggagaatcctccagagctgagattgggagcagcctgccctcgggagcatattatggcagtggaactccatctagtttccccacggtctctcttgtagacagaactttggtggaatctgtaacccaggctccaacagcccaagaggcaggagaagggccttctggcattttagaactcagtggtgctcattctggagcaccagacatgtctggggagcattctggatttctggacctaagtgggctgcagtccgggctgatagagcccagcggagagccaccaggtactccatattttagtggggattttgccagcaccaccaatgtaagtggagaatcctctgtagccatgggcaccagtggagaggcctcaggacttccagaagttactttaatcacttctgagttcgtggagggtgttactgaaccaactatttctcaggaactaggccaaaggccccctgtgacacacacaccccagctttttgagtccagtggaaaagtctccacagctggggacattagtggagctaccccagtgctccctgggtctggagtagaagtatcatcagtcccagaatctagcagtgagacgtccgcctatcctgaagctgggttcggggcatctgccgcccctgaggccagcagagaagattctgggtcccctgatctgagtgaaaccacctctgcattccacgaagctaaccttgagagatcctctggcctaggagtgagcggcagcactttgacatttcaagaaggcgaggcgtccgctgccccagaagtgagtggagaatccaccaccaccagtgatgtggggacagaggcaccaggcttgccttcagccactcccacggcttctggagacaggactgaaatcagcggagacctgtctggtcacacctcgcagctgggcgttgtcatcagcaccagcatcccagagtctgagtggacccagcagacccagcgccctgcagagacgcatctagaaattgagtcctcaagcctcctgtactcaggagaagagactcacacagtcgaaacagccacctccccaacagatgcttccatcccagcttctccggaatggaaacgtgaatcagaatcaactgctgcagaccaggaggtatgtgaggagggctggaacaagtaccagggccactgttaccgccacttcccggaccgcgagacctgggtggatgctgagcgccggtgtcgggagcagcagtcacacctgagcagcatcgtcacccccgaggagcaggagtttgtcaacaacaatgcccaagactaccagtggatcggcctgaacgacaggaccatcgaaggggacttccgctggtcagatggacaccccatgcaatttgagaactggcgccccaaccagcctgacaacttttttgccgctggagaggactgtgtggtgatgatctggcacgagaagggcgagtggaatgatgttccctgcaattaccacctccccttcacgtgtaaaaagggcacagccaccacctacaaacgcagactacagaagcggagctcacggcaccctcggaggagccgccccagcacagcccactgagaagagcttccaggacgcacccaggacgctgagcccaggagcctgccaggctgacgtgcatcccacccagacggtgtcctcttcttgtcgctttttgtcatataaggaatcccattaaaaaaaaaa

SEQ ID NO: 563 - DNA, 3454 bp, Homo sapiens
ggagctcttctcactcaagcccgagtttctatgttcagacatagtacattcatcactgtgtccttccaggatttggaagtctgacaaaacaccattccagtagctgcatctccaggttttgagtctagaaatgaatttaagatgtgatctcttggataagaaagctaaccccaatgccaaagccctgaatggctttacccctcttcatattgcctgcaagaagaatcgaattaaagtaatggaactccttctgaaacacggtgcatccatccaagctgtaaccgagtcgggccttaccccaatccatgttgctgccttcatggggcatgtaaatattgtatcacaactaatgcatcatggagcctcaccaaacaccaccaatgtgagaggagaaacagcactgcacatggcagctcgctccggccaagctgaagttgtgcggtatctggtacaagacggagctcaggtagaagctaaagctaaggatgaccaaacaccactccacatttcagcccgactggggaaagcagacatagtacaacagctgttgcagcaaggggcatctccaaatgcagccacaacttctgggtacaccccacttcacctttccgcccgagaggggcatgaggatgtggccgcgttccttttggatcatggagcgtctttatctataacaacaaagaaaggatttactcctcttcatgtggcagcaaaatatggaaagcttgaagtcgccaatctcctgctacagaaaagtgcatctccagatgctgctgggaagagcgggctaacaccactgcatgtagctgcacattacgataatcagaaagtggcccttctgcttttggaccaaggagcctcacctcacgcagccgcaaagaatggttatacgccactgcacatcgctgccaaaaagaaccagatggacatagcgacaactctgctggaatatggtgctgatgccaacgcagttacccggcaaggaattgcttccgtccatctcgcagctcaggaagggcacgtggacatggtgtcgctgctcctcggtagaaatgcgaatgtgaacctgagcaataagagcggcctgaccccactccatttggctgctcaagaagatcgagtgaatgtggcagaagtcctcgtaaaccaaggggctcatgtggacgcccagacaaagatgggatacacaccactgcatgtgggctgccactatggaaatatcaagattgttaatttcctgctccagcattctgcaaaagttaatgccaaaacaaagaatgggtatacgccattacatcaagcagcacagcaggggcatacgcatataataaatgtcttacttcagaacaacgcctcccccaatgaactcactgtgaatgggaatactgcccttggcattgcccggcggctcggctacatctcagtagtggacaccctgaagatagtgaccgaagaaaccatgaccacaactactgtcacagagaagcacaaaatgaatgttccagaaacgatgaatgaagttcttgatatgtctgatgatgaaggtgaagatgcaatgaccggggacacagacaaatatcttgggccacaggaccttaaggaattgggtgatgattccctgcctgcagagggttacatgggctttagtctcggagcgcgttctgccagcgataggtcttacaccttgaacagaagctcctatgcacgggacagcatgatgattgaagaactccttgtgccatccaaagagcagcatctaacattcacaagggaatttgattcagattctcttagacattacagctgggctgcagacaccttagacaatgtcaatcttgtttcaagccccattcattctgggtttctggttagctttatggtggacgcgagagggggctccatgagaggaagccgtcatcacgggatgagaatcatcattcctccacgcaagtgtacggcccccactcgaatcacctgccgtttggtaaagagacataaactggccaacccacccccacatggtgaaaggagagggattagcagtaggctggtagaaatgggtcctgcaggggcacaatttttaggccctgtcatagtggaaatccctcactttgggtccatgagaggaaaagagagagaactcattgttcttcgaagtgaaaatggtgaaacttggaaggagcatcagtttgacagcaaaaatgaagatttaaccgagttacttaatggcatggatgaagaacttgatagcccagaagagttagggaaaaagcgtatctgcaggattatcacgaaagatttcccccagtattttgcagtggtttcccggattaagcaggaaagcaaccagattggtcctgaaggtggaattctgagcagcaccacagtgccccttgttcaagcatctttcccagagggtgccctaactaaaagaattcgagtgggcctccaggcccagcctgttccagatgaaattgtgaaaaagatccttggaaacaaagcaacttttagcccaattgtcactgtggaaccaagaagacggaaattccataaaccaatcacaatgaccattccggtgcccccgccctcaggagaaggtgtatccaatggatacaaaggggacactacacccaatctgcgtcttctctgtagcattacagggggcacttcgcctgctcagtgggaagacatcacaggaacaactcctttgacgtttataaaagattgtgtctcctttacaaccaatgtttcagccagattttggcttgcagactgccatcaagttttagaaactgtggggttagccacgcaactgtacagagaattgatatgtgttccatatatggccaagtttgttgtttttgccaaaatgaatgatcccgtagaatcttccttgcgatgtttctgcatgacagatgacaaagtggacaaaactttagagcaacaagagaattttgaggaagtcgcaagaagcaaagatattgaggttctggaaggaaaacctatttatgttgattgttatggaaatttggccccacttaccaaaggaggacagcaacttgtttttaacttttattctttcaaagaaaatagactgccattttccatcaagattagagacaccagccaagagccctgtggtcgtctgtcttttctgaaagaaccaaagacaacaaaaggactgcctcaaacagcggtttgcaacttaaatatcactctgccagcacataaaaagattgagaaaacagatagacgacagagcttcgcatccttagctttacgtaagcgctacagctacttgactgagcctggaatgagtgagtttcctgacacgtccactaatccgggtcaatgttttaggagaagagacattttttctatgcgctctaaattatgatgtggtttcgaaaataaacgccctgggccaaaaaaaaaaaaaaaaaaaaaaaaaaaa

SEQ ID NO: 564 - DNA, 3494 bp, Homo sapiens
taatttttgcccagtctgcctgttgtggggctcctcccctttggggatataagcccggcctggggctgctccgttctctgcctggcctgaggctccctgagccgcctccccaccatcaccatggccaagggcttctatatttccaagtccctgggcatcctggggatcctcctgggcgtggcagccgtgtgcacaatcatcgcactgtcagtggtgtactcccaggagaagaacaagaacgccaacagctcccccgtggcctccaccaccccgtccgcctcagccaccaccaaccccgcctcggccaccaccttggaccaaagtaaagcgtggaatcgttaccgcctccccaacacgctgaaacccgattcctaccaggtgacgctgagaccgtacctcacccccaatgacaggggcctgtacgtttttaagggctccagcaccgtccgtttcacctgcaaggaggccactgacgtcatcatcatccacagcaagaagctcaactacaccctcagccaggggcacagggtggtcctgcgtggtgtgggaggctcccagccccccgacattgacaagactgagctggtggagcccaccgagtacctggtggtgcacctcaagggctccctggtgaaggacagccagtatgagatggacagcgagttcgagggggagttggcagatgacctggcgggcttctaccgcagcgagtacatggagggcaatgtcagaaaggtggtggccactacacagatgcaggctgcagatgcccggaagtccttcccatgcttcgatgagccggccatgaaggccgagttcaacatcacgcttatccaccccaaggacctgacagccctgtccaacatgcttcccaaaggtcccagcaccccacttccagaagaccccaactggaatgtcactgagttccacaccacgcccaagatgtccacgtacttgctggccttcattgtcagtgagttcgactacgtggagaagcaggcatccaatggtgtcttgatccggatctgggcccggcccagtgccattgcggcgggccacggcgattatgccctgaacgtgacgggccccatccttaacttctttgctggtcattatgacacaccctacccactcccaaaatcagaccagattggcctgccagacttcaacgccggcgccatggagaactggggactggtgacctaccgggagaactccctgctgttcgaccccctgtcctcctccagcagcaacaaggagcgggtggtcactgtgattgctcatgagctggcccaccagtggttcgggaacctggtgaccatagagtggtggaatgacctgtggctgaacgagggcttcgcctcctacgtggagtacctgggtgctgactatgcggagcccacctggaacttgaaagacctcatggtgctgaatgatgtgtaccgcgtgatggcagtggatgcactggcctcctcccacccgctgtccacacccgcctcggagatcaacacgccggcccagatcagtgagctgtttgacgccatctcctacagcaagggcgcctcagtcctcaggatgctctccagcttcctgtccgaggacgtattcaagcagggcctggcgtcctacctccacacctttgcctaccagaacaccatctacctgaacctgtgggaccacctgcaggaggctgtgaacaaccggtccatccaactccccaccaccgtgcgggacatcatgaaccgctggaccctgcagatgggcttcccggtcatcacggtggataccagcacggggaccctttcccaggagcacttcctccttgaccccgattccaatgttacccgcccctcagaattcaactacgtgtggattgtgcccatcacatccatcagagatggcagacagcagcaggactactggctgatagatgtaagagcccagaacgatctcttcagcacatcaggcaatgagtgggtcctgctgaacctcaatgtgacgggctattaccgggtgaactacgacgaagagaactggaggaagattcagactcagctgcagagagaccactcggccatccctgtcatcaatcgggcacagatcattaatgacgccttcaacctggccagtgcccataaggtccctgtcactctggcgctgaacaacaccctcttcctgattgaagagagacagtacatgccctgggaggccgccctgagcagcctgagctacttcaagctcatgtttgaccgctccgaggtctatggccccatgaagaactacctgaagaagcaggtcacacccctcttcattcacttcagaaataataccaacaactggagggagatcccagaaaacctgatggaccagtacagcgaggttaatgccatcagcaccgcctgctccaacggagttccagagtgtgaggagatggtctctggccttttcaagcagtggatggagaaccccaataataacccgatccaccccaacctgcggtccaccgtctactgcaacgctatcgcccagggcggggaggaggagtgggacttcgcctgggagcagttccgaaatgccacactggtcaatgaggctgacaagctccgggcagccctggcctgcagcaaagagttgtggatcctgaacaggtacctgagctacaccctgaacccggacttaatccggaagcaggacgccacctctaccatcatcagcattaccaacaacgtcattgggcaaggtctggtctgggactttgtccagagcaactggaagaagctttttaacgattatggtggtggctcgttctccttctccaacctcatccaggcagtgacacgacgattctccaccgagtatgagctgcagcagctggagcagttcaagaaggacaacgaggaaacaggcttcggctcaggcacccgggccctggagcaagccctggagaagacgaaagccaacatcaagtgggtgaaggagaacaaggaggtggtgctccagtggttcacagaaaacagcaaatagtccccagcccttgaagtcacccggccccgatgcaaggtgcccacatgtgtccatcccagcggctggtgcagggcctccattcctggagcccgaggcaccagtgtcctcccctcaaggacaaagtctccagcccacgttctctctgcctgtgagccagtctagttcctgatgacccaggctgcctgagcacctcccagcccctgcccctcatgccaaccccgccctaggcctggcatggcacctgtcgcccagtgccctggggctgatctcagggaagcccagctccagggccagatgagcagaagctctcgatggacaatgaacggccttgctgggggccgccctgtaccctctttcacctttccctaaagaccctaaatctgaggaatcaacagggcagcagatctgtatatttttttctaagagaaaatgtaaataaaggatttctagatgaaaaaaaaaaaaaaaaa

SEQ ID NO: 565 - DNA, 1982 bp, Homo sapiens
gcagaggaggagcgcacgccggcctcgaagaacttctgcttgggtggctgaactctgatcttgacctagagtcatggccatggcaaccaaaggaggtactgtcaaagctgcttcaggattcaatgccatggaagatgcccagaccctgaggaaggccatgaaagggctcggcaccgatgaagacgccattattagcgtccttgcctaccgcaacaccgcccagcgccaggagatcaggacagcctacaagagcaccatcggcagggacttgatagacgacctgaagtcagaactgagtggcaacttcgagcaggtgattgtggggatgatgacgcccacggtgctgtatgacgtgcaagagctgcgaagggccatgaagggagccggcactgatgagggctgcctaattgagatcctggcctcccggacccctgaggagatccggcgcataagccaaacctaccagcagcaatatggacggagccttgaagatgacattcgctctgacacatcgttcatgttccagcgagtgctggtgtctctgtcagctggtgggagggatgaaggaaattatctggacgatgctctcgtgagacaggatgcccaggacctgtatgaggctggagagaagaaatgggggacagatgaggtgaaatttctaactgttctctgttcccggaaccgaaatcacctgttgcatgtgtttgatgaatacaaaaggatatcacagaaggatattgaacagagtattaaatctgaaacatctggtagctttgaagatgctctgctggctatagtaaagtgcatgaggaacaaatctgcatattttgctgaaaagctctataaatcgatgaagggcttgggcaccgatgataacaccctcatcagagtgatggtttctcgagcagaaattgacatgttggatatccgggcacacttcaagagactctatggaaagtctctgtactcgttcatcaagggtgacacatctggagactacaggaaagtactgcttgttctctgtggaggagatgattaaaataaaaatcccagaaggacaggaggattctcaacactttgaatttttttaacttcatttttctacactgctattatcattatctcagaatgcttatttccaattaaaacgcctacagctgcctcctagaatatagactgtctgtattattattcacctataattagtcattatgatgctttaaagctgtacttgcatttcaaagcttataagatataaatggagattttaaagtagaaataaatatgtattccatgtttttaaaagattactttctactttgtgtttcacagacattgaatatattaaattattccatattttcttttcagtgaaaaattttttaaatggaagactgttctaaaatcacttttttccctaatccaatttttagagtggctagtagtttcttcatttgaaattgtaagcatccggtcagtaagaatgcccatccagttttctatatttcatagtcaaagccttgaaagcatctacaaatctctttttttaggttttgtccatagcatcagttgatccttactaagtttttcatgggagacttccttcatcacatcttatgttgaaatcactttctgtagtcaaagtataccaaaaccaatttatctgaactaaattctaaagtatggttatacaaaccatatacatctggttaccaaacataaatgctgaacattccatattattatagttaatgtcttaatccagcttgcaagtgaatggaaaaaaaaataagcttcaaactaggtattctgggaatgatgtaatgctctgaatttagtatgatataaagaaaacttttttgtgctaaaaatactttttaaaatcaattttgttgattgtagtaatttctatttgcactgtgcctttcaactccagaaacattctaagatgtacttggatttaattaaaaagttcactttgt

SEQ ID NO: 566 - DNA, 1630 bp, Homo sapiens
agggccggggtggggcgctggcgtttccgttgcttggatcagtctaggtgcagctgcggatccttcagcgtctgcatctcggcgtcgccccgcgtaccgtcgcccggctctccgccgctctcccgggggttcggggcacttgggtcccacagtctggtcctgcttcaccttcccctgacctgagtagtcgccatggcacaggttctcagaggcactgtgactgacttccctggatttgatgagcgggctgatgcagaaactcttcggaaggctatgaaaggcttgggcacagatgaggagagcatcctgactctgttgacatcccgaagtaatgctcagcgccaggaaatctctgcagcttttaagactctgtttggcagggatcttctggatgacctgaaatcagaactaactggaaaatttgaaaaattaattgtggctctgatgaaaccctctcggctttatgatgcttatgaactgaaacatgccttgaagggagctggaacaaatgaaaaagtactgacagaaattattgcttcaaggacacctgaagaactgagagccatcaaacaagtttatgaagaagaatatggctcaagcctggaagatgacgtggtgggggacacttcagggtactaccagcggatgttggtggttctccttcaggctaacagagaccctgatgctggaattgatgaagctcaagttgaacaagatgctcaggctttatttcaggctggagaacttaaatgggggacagatgaagaaaagtttatcaccatctttggaacacgaagtgtgtctcatttgagaaaggtgtttgacaagtacatgactatatcaggatttcaaattgaggaaaccattgaccgcgagacttctggcaatttagagcaactactccttgctgttgtgaaatctattcgaagtatacctgcctaccttgcagagaccctctattatgctatgaagggagctgggacagatgatcataccctcatcagagtcatggtttccaggagtgagattgatctgtttaacatcaggaaggagtttaggaagaattttgccacctctctttattccatgattaagggagatacatctggggactataagaaagctcttctgctgctctgtggagaagatgactaacgtgtcacggggaagagctccctgctgtgtgcctgcaccaccccactgccttccttcagcacctttagctgcatttgtatgccagtgcttaacacattgccttattcatactagcatgctcatgaccaacacatacacgtcatagaagaaaatagtggtgcttctttctgatctctagtggagatctctttgactgctgtagtactaaagtgtacttaatgttactaagtttaatgcctggccattttccatttatatatattttttaagaggctagagtgcttttagccttttttaaaaactccatttatattacatttgtaaccatgatactttaattagaagcttagccttgaaattgtgaactcttggaaatgttattagtgaagttcgcaactaaactaaacctgtaaaattatgatgattgtattcaaaagattaatgaaaaataaacatttctgtccccctgaattat

SEQ ID NO: 567 - DNA, 2110 bp, Homo sapiens
gaacccggtctcccgcaagatggagccgggttgggctgtgacgctgctgctggggtcagaatgtcatacccaggctatcccccaacaggctacccacctttccctggatatcctcctgcaggtcaggagtcatcttttcccccttctggtcagtatccttatcctagtggctttcctccaatgggaggaggtgcctacccacaagtgccaagtagtggctacccaggagctggaggctaccctgcgcctggaggttatccagcccctggaggctatcctggtgccccacagccagggggagctccatcctatcccggagttcctccaggccaaggatttggagtcccaccaggtggagcaggcttttctgggtatccacagccaccttcacagtcttatggaggtggtccagcacaggttccactacctggtggctttcctggaggacagatgccttctcagtatcctggaggacaacctacttaccctagtcagcctgccacagtgactcaggtcactcaaggaactatccgaccagctgccaacttcgatgctataagagatgcagaaattcttcgtaaggcaatgaagggttttgggacagatgagcaggcaattgtggatgtggtggccaaccgttccaatgatcagaggcaaaaaattaaagcagcatttaagacctcctatggcaaggatttaatcaaagatctcaaatcagagttaagtggaaatatggaagaactgatcctggccctcttcatgcctcctacgtattacgatgcctggagcttacggaaagcaatgcagggagcaggaactcaggaacgtgtattgattgagattttgtgcacaagaacaaatcaggaaatccgagaaattgtcagatgttatcagtcagaatttggacgagaccttgaaaaggacattaggtcagatacatcaggacattttgaacgtttacttgtgtccatgtgccagggaaatcgtgatgagaaccagagtataaaccaccaaatggctcaggaagatgctcagcgtctctatcaagctggtgaggggagactagggaccgatgaatcttgctttaacatgatccttgccacaagaagctttcctcagctgagagctaccatggaggcttattctaggatggctaatcgagacttgttaagcagtgtgagccgtgagttttccggatatgtagaaagtggtttgaagaccatcttgcagtgtgccctgaaccgccctgccttctttgctgagaggctctactatgctatgaaaggtgctggcacagatgactccaccctggtccggattgtggtcactcgaagtgagattgaccttgtacaaataaaacagatgttcgctcagatgtatcagaagactctgggcacaatgattgcaggtgacacgagtggagattaccgaagacttcttctggctattgtgggccagtaggagggatttttttttttttaatgaaaaaaaaatttctattcatagcttatccttcagagcaatgacctgcatgcagcaatatcaaacatcagctaaccgaaagagctttctgtcaaggaccgtatcagggtaatgtgcttggtttgcacatgttgttattgccttaattctaattttattttgttctctacatacaatcaatgtaaagccatatcacaatgatacagtaatattgcaatgtttgtaaaccttcattcttactagtttcattctaatcaagatgtcaaattgaataaaaatcacagcaatctctgattctgtgtaataatattgaataattttttagaaggttactgaaagctctgccttccggaatccctctaagtctgcttgatagagtggatagtatgttaaaactgtgtactttaaaaaaaaattcaacctttacatctagaataatttgcatctcattttgcctaaattggttctgtattcataaacactttccacatagaaaatagattagtattacctgtggcaccttttaagaaagggtcaaatgtttatatgcttaagatacatagcctccctttttttcgcgttgtttcctttttttaaattgagttatgacaaataaaaaattgcatat

SEQ ID NO: 568 - DNA, 7042 bp, Homo sapiens
aagaagaggtagcgagtggacgtgactgctctatcccgggcaaaagggatagaaccagaggtggggagtctgggcagtcggcgacccgcgaagacttgaggtgccgcagcggcatccggagtagcgccgggctccctccggggtgcagccgccgtcgggggaagggcgccacaggccgggaagacctcctccctttgtgtccagtagtggggtccaccggagggcggcccgtgggccgggcctcaccgcggcgctccgggactgtggggtcaggctgcgttgggtggacgcccacctcgccaaccttcggaggtccctgggggtcttcgtgcgccccggggctgcagagatccaggggaggcgcctgtgaggcccggacctgccccggggcgaagggtatgtggcgagacagagccctgcacccctaattcccggtggaaaactcctgttgccgtttccctccaccggcctggagtctcccagtcttgtcccggcagtgccgccctccccactaagacctaggcgcaaaggcttggctcatggttgacagctcagagagagaaagatctgagggaagatggatgcaaaagctcgaaattgtttgcttcaacatagagaagctctggaaaaggacatcaagacatcctacatcatggatcacatgattagtgatggatttttaacaatatcagaagaggaaaaagtaagaaatgagcccactcaacagcaaagagcagctatgctgattaaaatgatacttaaaaaagataatgattcctacgtatcattctacaatgctctactacatgaaggatataaagatcttgctgcccttctccatgatggcattcctgttgtctcttcttccagtgtaaggacagtcctgtgtgaaggtggagtaccacagaggccagttgtttttgtcacaaggaagaagctggtgaatgcaattcagcagaagctctccaaattgaaaggtgaaccaggatgggtcaccatacatggaatggcaggctgtgggaagtctgtattagctgcagaagctgttagagatcattcccttttagaaggttgtttcccagggggagtgcattgggtttcagttgggaaacaagacaaatctgggcttctgatgaaactgcagaatctttgcacacggttggatcaggatgagagtttttcccagaggcttccacttaatattgaagaggctaaagaccgtctccgcattctgatgcttcgcaaacacccaaggtctctcttgatcttggatgatgtttgggactcttgggtgttgaaagcttttgacagtcagtgtcagattcttcttacaaccagagacaagagtgttacagattcagtaatgggtcctaaatatgtagtccctgtggagagttccttaggaaaggaaaaaggacttgaaattttatccctttttgttaatatgaagaaggcagatttgccagaacaagctcatagtattataaaagaatgtaaaggctctccccttgtagtatctttaattggtgcacttttacgtgattttcccaatcgctgggagtactacctcaaacagcttcagaataagcagtttaagagaataaggaaatcttcgtcttatgattatgaggctctagatgaagccatgtctataagtgttgaaatgctcagagaagacatcaaagattattacacagatctttccatccttcagaaggacgttaaggtgcctacaaaggtgttatgtattctctgggacatggaaactgaagaagttgaagacatactgcaggagtttgtaaataagtctcttttattctgtgatcggaatggaaagtcgtttcgttattatttacatgatcttcaagtagattttcttacagagaagaattgcagccagcttcaggatctacataagaagataatcactcagtttcagagatatcaccagccgcatactctttcaccagatcaggaagactgtatgtattggtacaactttctggcctatcacatggccagtgccaagatgcacaaggaactttgtgctttaatgttttccctggattggattaaagcaaaaacagaacttgtaggccctgctcatctgattcatgaatttgtggaatacagacatatactagatgaaaaggattgtgcagtcagtgagaattttcaggagtttttatctttaaatggacaccttcttggacgacagccatttcctaatattgtacaactgggtctctgtgagccggaaacttcagaagtttatcagcaagctaagctgcaggccaagcaggaggtcgataatggaatgctttacctggaatggataaacaaaaaaaacatcacgaatctttcccgcttagttgtccgcccccacacagatgctgtttaccatgcctgcttttctgaggatggtcagagaatagcttcttgtggagctgataaaaccttacaggtgttcaaagctgaaacaggagagaaacttctagaaatcaaggctcatgaggatgaagtgctttgttgtgcattctctacagatgacagatttatagcaacctgctcagtggataaaaaagtgaagatttggaattctatgactggggaactagtacacacctatgatgagcactcagagcaagtcaattgctgccatttcaccaacagtagtcatcatcttctcttagccactgggtcaagtgactgcttcctcaaactttgggatttgaatcaaaaagaatgtcgaaataccatgtttggtcatacaaattcagtcaatcactgcagattttcaccagatgataagcttttggctagttgttcagctgatggaaccttaaagctttgggatgcgacatcagcaaatgagaggaaaagcattaatgtgaaacagttcttcctaaatttggaggaccctcaagaggatatggaagtgatagtgaagtgttgttcgtggtctgctgatggtgcaaggataatggtggcagcaaaaaataaaatctttttgtggaatacagactcacgttcaaaggtggctgattgcagaggacatttaagttgggttcatggtgtgatgttttctcctgatggatcatcatttttgacatcttctgatgaccagacaatcaggctctgggagacaaagaaagtatgtaagaactctgctgtaatgttaaagcaagaagtagatgttgtgtttcaagaaaatgaagtgatggtccttgcagttgaccatataagacgtctgcaactcattaatggaagaacaggtcagattgattatctgactgaagctcaagttagctgctgttgcttaagtccacatcttcagtacattgcatttggagatgaaaatggagccattgagattttagaacttgtaaacaatagaatcttccagtccaggtttcagcacaagaaaactgtatggcacatccagttcacagccgatgagaagactcttatttcaagttctgatgatgctgaaattcaggtatggaattggcaattggacaaatgtatctttctacgaggccatcaggaaacagtgaaagactttagactcttgaaaaattcaagactgctttcttggtcatttgatggaacagtgaaggtatggaatattattactggaaataaagaaaaagactttgtctgtcaccagggtacagtactttcttgtgacatttctcacgatgctaccaagttttcatctacctctgctgacaagactgcaaagatctggagttttgatctccttttgccacttcatgaattgaggggccacaacggctgtgtgcgctgctctgccttctctgtggacagtaccctgctggcaacgggagatgacaatggagaaatcaggatatggaatgtctcaaacggtgagcttcttcatttgtgtgctccgctttcagaagaaggagctgctacccatggaggctgggtgactgacctttgcttttctccagatggcaaaatgcttatctctgctggaggatatattaagtggtggaacgttgtcactggggaatcctcacagaccttctacacaaatggaaccaatcttaagaaaatacacgtgtcccctgacttcaaaacatatgtgactgtggataatcttggtattttatatattttacagactttagaataaaatagttaagcattaatgtagttgaactttttaaatttttgaattggaaaaaaattctaatgaaaccctgatatcaactttttataaagctcttaattgttgtgcagtattgcattcattacaaaagtgtttgtggttggatgaataatattaatgtagctttttcccaaatgaacatacctttaatcttgtttttcatgatcatcattaacagtttgtccttaggatgcaaatgaaaatgtgaatacataccttgttgtactgttggtaaaattctgtcttgatgcattcaaaatggttgacataattaatgagaagaatttggaagaaattggtattttaatactgtctgtatttattactgttatgcaggctgtgcctcagggtagcagtggcctgctttttgaaccacacttaccccaagggggttttgttctcctaaatacaatcttagaggttttttgcactctttaaatttgctttaaaaatattgtgtctgtgtgcatagtctgcagcatttcctttaattgactcaataagtgagtcttggatttagcaggcccccccaccttttttttttgtttttggagacagagtcttgctttgttgccaggctggagtgcagtggcgcgatctcggctcaccacaatcgctgcctcctgggttcaagcaattctcctgcctcagcctcccgagtagctgggactacaggtgtgcgcacatgccaggctaatttttgtatttttagtagagacggggtttcaccatgttggccgggatggtctcgatctcttgacctcatgatctacccgccttggcctcccaaagtgctgagattacaggcgtgagccaccgtgcctggccaggccccttctcttttaatggagacagggtcttgcactatcacccaggctggagtgcagtggcataatcatacctcattgcagcctcagactcctgggttcaagcaatcctcctgcctcagcctcccaagtagctgagactgcaggcacgagccaccacacccagctaatttttaagttttcttgtagagacagggtctcactatgttgtctaggctggtcttgaactcttggcctcaagtaatcctcctgcctcagcctcccaaagtgttgggattgcagatatgagccactggcctggccttcagcagttctttttgtgaagtaaaacttgtatgttggaaagagtagattttattggtctacccttttctcactgtagctgctggcagccctgtgccatatctggactctagttgtcagtatctgagttggacactattcctgctccctcttgtttcttacatatcagacttcttacttgaatgaaacctgatctttcctaatcctcacttttttcttttttaaaaagcagtttctccactgctaaatgttagtcattgaggtggggccaattttaatcataagccttaataagatttttctaagaaatgtgaaatagaacaattttcatctaattccatttacttttagatgaatggcattgtgaatgccattcttttaatgaatttcaagagaattctctggttttctgtgtaattccagatgagtcactgtaactctagaagattaaccttccagccaacctattttcctttcccttgtctctctcatcctcttttccttccttctttcctttctcttcttttatctccaaggttaatcaggaaaaatagcttttgacaggggaaaaaactcaataactagctatttttgacctcctgatcaggaactttagttgaagcgtaaatctaaagaaacattttctctgaaatatattattaagggcaatggagataaattaatagtagatgtggttcccagaaaatataatcaaaattcaaagattttttttgtttctgtaactggaactaaatcaaatgattactagtgttaatagtagataacttgtttttattgttggtgcatattagtataactgtggggtaggtcggggagagggtaagggaatagatcactcagatgtattttagataagctatttagcctttgatggaatcataaatacagtgaatacaatcctttgcattgttaaggaggttttttgtttttaaatggtgggtcaaggagctagtttacaggcttactgtgatttaagcaaatgtgaaaagtgaaaccttaattttatcaaaagaaatttctgtaaatggtatgtctccttagaatacccaaatcataattttatttgtacacactgttaggggctcatctcatgtaggcagagtataaagtattaccttttggaattaaaagccactgactgttataaagtataacaacacacatcaggttttaaaaagccttgaatggcccttgtcttaaaaagaaattaggagccaggtgcggtggcacgtgcctgtagtcccagctccttgggaggctgagacaggaggattccttgagccctggagtttgagtccagcctgggtgacatagcaagaccctgtcttaaaagaaaaatgggaagaaagacaaggtaacatgaagaaagaagagatacctagtatgatggagctgcaaatttcatggcagttcatgcagtcggtcaagaggaggattttgttttgtagtttgcagatgagcatttctaaagcattttcccttgctgtatttttttgtattataaattacattggacttcatatatataatttttttttacattatatgtctcttgtatgttttgaaactcttgtatttatgatatagcttatatgatttttttgccttggtatacattttaaaatatgaatttaaaaaatttttgtaaaaataaaattcacaaaattgttttgaaaaacaaaaaaaaaaaaaa

SEQ ID NO: 569 - DNA, 3496 bp, Homo sapiens
gaattctatggagtgtaattttgtgtatgaattatatttttaaaacattgaagagttttcagaaagaaggctagtagagttgattactgatactttatgctaagcagtacttttttggtagtacaatattttgttaggcgtttctgataacactagaaaggacaagttttatcttgtgataaattgattaatgtttacaacatgactgataattatagctgaatagtccttaaatgatgaacaggttatttagtttttaaatgcagtgtaaaaagtgtgctgtggaaattttatggctaactaagtttatggagaaaataccttcagttgatcaagaataatagtggtatacaaagttaggaagaaagtcaacatgatgctgcaggaaatggaaacaaatacaaatgatatttaacaaagatagagtttacagtttttgaactttaagccaaattcatttgacatcaagcactatagcaggcacaggttcaacaaagcttgtgggtattgacttcccccaaaagttgtcagctgaagtaatttagcccacttaagtaaatactatgatgataagctgtgtgaacttagcttttaaatagtgtgaccatatgaaggttttaattacttttgtttattggaataaaatgagattttttgggttgtcatgttaaagtgcttatagggaaagaagcctgcatataattttttaccttgtggcataatcagtaattggtctgttattcaggcttcatagcttgtaaccaaatataaataaaaggcataatttaggtattctatagttgcttagaattttgttaatataaatctctgtgaaaaatcaaggagttttaatattttcagaagtgcatccacctttcagggctttaagttagtattactcaagattatgaacaaatagcacttaggttacctgaaagagttactacaaccccaaagagttgtgttctaagtagtatcttggaaattcagagagatactcatcctacctgaatataaactgagataaatccagtaaagaaagtgtagtaaattctacataagagtctatcattgatttcttttggtggtaaaaatcttagttcatgtgaagaaatttcatgtgaatgttttagctatcaaacagcactgtcacctactcatgcacaaaactgcctcccaaagacttttcccaggtccctcgtatcaaaacattaagagtataatggaagatagcacgatcttgtcagattggacaaacagcaacaaacaaaaaatgaagtatgacttttcctgtgaactctacagaatgtctacatattcaactttccccgccggggtgcctgtctcagaaaggagtcttgctcgtgctggtttttattatactggtgtgaatgacaaggtcaaatgcttctgttgtggcctgatgctggataactggaaactaggagacagtcctattcaaaagcataaacagctatatcctagctgtagctttattcagaatctggtttcagctagtctgggatccacctctaagaatacgtctccaatgagaaacagttttgcacattcattatctcccaccttggaacatagtagcttgttcagtggttcttactccagcctttctccaaaccctcttaattctagagcagttgaagacatctcttcatcgaggactaacccctacagttatgcaatgagtactgaagaagccagatttcttacctaccatatgtggccattaacttttttgtcaccatcagaattggcaagagctggtttttattatataggacctggagatagggtagcctgctttgcctgtggtgggaagctcagtaactgggaaccaaaggatgatgctatgtcagaacaccggaggcattttcccaactgtccatttttggaaaattctctagaaactctgaggtttagcatttcaaatctgagcatgcagacacatgcagctcgaatgagaacatttatgtactggccatctagtgttccagttcagcctgagcagcttgcaagtgctggtttttattatgtgggtcgcaatgatgatgtcaaatgcttttgttgtgatggtggcttgaggtgttgggaatctggagatgatccatgggtagaacatgccaagtggtttccaaggtgtgagttcttgatacgaatgaaaggccaagagtttgttgatgagattcaaggtagatatcctcatcttcttgaacagctgttgtcaacttcagataccactggagaagaaaatgctgacccaccaattattcattttggacctggagaaagttcttcagaagatgctgtcatgatgaatacacctgtggttaaatctgccttggaaatgggctttaatagagacctggtgaaacaaacagttcaaagtaaaatcctgacaactggagagaactataaaacagttaatgatattgtgtcagcacttctaaatgctgaagatgaaaaaagagaggaggagaaggaaaaacaagctgaagaaatggcatcagatgatttgtcattaattcggaagaacagaatggctctctttcaacaattgacatgtgtgcttcctatcctggataatcttttaaaggccaatgtaattaataaacaggaacatgatattattaaacaaaaaacacagatacctttacaagcgagagaactgattgataccattttggttaaaggaaatgctgcggccaacatcttcaaaaactgtctaaaagaaattgactctacattgtataagaacttatttgtggataagaatatgaagtatattccaacagaagatgtttcaggtctgtcactggaagaacaattgaggaggttgcaagaagaacgaacttgtaaagtgtgtatggacaaagaagtttctgttgtatttattccttgtggtcatctggtagtatgccaggaatgtgccccttctctaagaaaatgccctatttgcaggggtataatcaagggtactgttcgtacatttctctcttaaagaaaaatagtctatattttaacctgcataaaaaggtctttaaaatattgttgaacacttgaagccatctaaagtaaaaagggaattatgagtttttcaattagtaacattcatgttctagtctgctttggtactaataatcttgtttctgaaaagatggtatcatatatttaatcttaatctgtttatttacaagggaagatttatgtttggtgaactatattagtatgtatgtgtacctaagggagtagtgtcactgcttgttatgcatcatttcaggagttactggatttgttgttctttcagaaagctttgaatactaaattatagtgtagaaaagaactggaaaccaggaactctggagttcatcagagttatggtgccgaattgtctttggtgcttttcacttgtgttttaaaataaggatttttctcttatttctccccctagtttgtgagaaacatctcaataaagtgcttt

SEQ ID NO: 570 - DNA, 1249 bp, Homo sapiens
ggcacgagccagggtttcctcttcaagtaggtctaaaacattttttttctcattgacttccttcctgttctaactgccagtactcagaagtcagagttgagagacagaggcaccccggacagagacgtgaagcactgaataaatagatcagaatgactgaaaaagccccagagccacatgtggaggaggatgacgatgatgagctggacagcaagctcaattataagcctccaccacagaagtccctgaaagagctgcaggaaatggacaaagatgatgagagtctaattaagtacaagaaaacgctgctgggagatggtcctgtggtgacagatccgaaagcccccaatgtcgttgtcacccggctcaccctggtttgtgagagtgccccgggaccaatcaccatggaccttactggagatctggaagccctcaaaaaggaaaccattgtgttaaaggaaggttctgaatatagagtcaaaattcacttcaaagtgaacagggatattgtgtcaggcctgaaatacgttcagcacacctacaggactggggtgaaagtggataaagcaacatttatggttggcagctatggacctcggcctgaggagtatgagttcctcactccagttgaggaggctcccaagggcatgctggcccgaggcacgtaccacaacaagtccttcttcaccgacgatgacaagcaagaccacctcagctgggagtggaacctgtcgattaagaaggagtggacagaatgaatgcatccaccccgttccccacccttgccacctggaagaattctctcaggcgtgttcagcaccctgtccctcctccctgtccacagctgggtccctcttcaacactgccacatttccttattgatcgatcttttcccaccctgtcactcaacgtggtccctagaacaagaggcttaaaaccgggctttcacccaacctgctccctctgatcctccatcagggccagatcttccacgtctccatctcagtacacaatcatttaatatttccctgtcttacccctattcaagcaactagaggccagaaaatgggcaaattatcactaacaggtctttgactcaggttccagtagttcattctaatgcctagattcttttgtggttgttgctggcccaatgagtccctagtcacatcccctgccagagggagttcttcttttgtgagagacactgtaaacgacacaagagaacaagaataaaacaataactgtg

SEQ ID NO: 571 - DNA, 968 bp, Homo sapiens
gggggaagttgctggctgactgggcttgcgaggaaaccgcctcggagctgcagcgaaggccaaggaatcactgaagatcggcgagggaggacagggggttcatcatgggtggctttttctcaagtatattttccagtctgtttggaactcgggaaatgagaattttaattttgggattagatggagcaggaaaaaccacaattttgtacagattacaagtgggagaagttgttactactatacctaccattggatttaatgtagagacggtgacgtacaaaaaccttaaattccaagtctgggatttaggaggacagacaagtatcaggccatactggagatgttactattcaaacacagatgcagtcatttatgtagtagacagttgtgaccgagaccgaattggcatttccaaatcagagttagttgccatgttggaggaagaagagctgagaaaagccattttagtggtgtttgcaaataaacaggacatggaacaggccatgacttcctcagagatggcaaattcacttgggttacctgccttgaaggaccgaaaatggcagatattcaaaacgtcagcaaccaaaggcaccggccttgatgaggcaatggaatggttagttgaaacattaaaaagcagacagtaattcagtccattcttctcccctgaaatgaagactacatcacctctctccctttggaaacagtcaagtgtacttcacactactagatgttaaaactatatgattattggcatatactgactgactgcaatatttgtagtaaatagggaaaataagtatttagttggagggataatttgatcgaatcacctgaatgttctatgtaatgtaaaatattcttttcttgctttcttgtgttaaggtatatattctatttgtatggaattcttattcaaatacagttgtattaaagagtatactcctattggatgaaaaaaacct

SEQ ID NO: 572 - DNA, 2176 bp, Homo sapiens
atgtaccgccgcagctacgtcttccagacccgcaaggagcagtacgagcacgccgacgaggcttcgcgcgccgccgagcccgagcgcccggccgacgagggctgggctggggcaacgagcctggcggcgctgcaggggctcggcgagcgcgtggccgcccacgtccagcgggcccgcgccctcgagcagcgccatgccgggctccggaggcagctggatgccttccagcgcctgggcgagctggccgggcccgaggacgccctcgcccgccaagtcgagagcaaccgccagcgcgtccgggacctggaggccgagcgcgcccggctggagcgccagggcaccgaggcgcagcgcgcgctcgacgagttccgaagcaagtatgaaaatgagtgcgaatgtcaactcctgctaaaagaaatgcttgaacggcttaacaaggaagctgatgaagccttgctgcataacctacgccttcagctggaagcccaatttctgcaagatgatatcagtgcggcaaaggacaggcacaagaagaatcttctggaagttcagacctatatcagcatcctgcagcagatcatccacaccactcctccagcatccattgtgacgagtgggatgagggaggagaagctcctgacggagcgggaggtggccgccctgcggagtcagctggaggagggccgggaggtgctctcccacctgcaggcgcagagagtggagctgcaggcacagacaacaactctggaacaagctattaaaagtgcccatgagtgttatgacgatgagattcagctttataacgagcagattgagacactgcgcaaggagattgaggagacagagcgggtcctggagaagtcttcttacgactgccggcagctggcggtcgcccagcaaaccctgaagaatgagctggaccggtatcatcgtatcatcgagattgaaggcaacaggctgacctctgccttcattgaaactcccattcccctgttcacccagagccatggagtctctctcagcactggatccggtgggaaagatcttaccagagctctgcaggatataacagcagcaaaaccaagacaaaaagccctccccaagaatgttccaaggagaaaagagattataacaaaagacaaaaccaacggagctctggaagatgcaccattaaaaggtttggaagacacaaagctggtacaggtggtacttaaagaggaaagtgaatctaagtttgaatcagaaagtaaagaagtaagtcccctgacacaagaaggggctccagaggatgtgccagatggagggcagataagcaaaggctttgggaaactatacaggaaggtcaaggagaaagtgagaagccccaaagagcctgagacccccactgagctctacaccaaagagcggcacgtgctggtcacaggggatgccaattacgtggaccctagattctatgtctcctccatcacagctaaaggtggggtggctgtttctgttgcggaagactctgtgctttatgacggccaggtggagccctctcctgagtcacccaagccccctttagagaatgggcaggtgggtctgcaggagaaagaagatggacaaccaattgaccagcagcctatagacaaggagattgagccagatggtgcagagctggaaggccctgaagagaaacgtgagggtgaggagcgggacgaagagtccaggagaccctgtgccatggtcacacccggtgcagaggaaccatctatacctgagcctccaaagcctgcggctgatcaggatggagctgaggtgcttgggactaggagcagaagcctgccagaaaaaggccctcccaaggctttggcctataagacagtggaagtggtggaatctatcgagaagatttccacggagagcattcagacatatgaagaaaccgctgtgatcgtggagaccatgattggaaagacaaagtcagacaagaagaaatcaggagagaagagctcttaaaatgcccaggcttgatgggataaaatgtatttggggccactgtaggggtaatgctttgatattttagagcaaatgataaaagggtgagggttcctgtttggattagaccatagttgacccatctggcattgccaacgaagccttcattaaaatgttttctttgcttgcaaaaaaaaaa

SEQ ID NO: 573 - DNA, 2487 bp, Homo sapiens
gccgcttccctcgccgccgccccgccagcatgcccggcgtggcccgcctgccgctgctgctcgggctgctgctgctcccgcgtcccggccggccgctggacttggccgactacacctatgacctggcggaggaggacgactcggagcccctcaactacaaagacccctgcaaggcggctgcctttcttggggacattgccctggacgaagaggacctgagggccttccaggtacagcaggctgtggatctcagacggcacacagctcgtaagtcctccatcaaagctgcagttccaggaaacacttctacccccagctgccagagcaccaacgggcagcctcagaggggagcctgtgggagatggagaggtagatcccgtagccggcgggcggcgacgtcccgaccagagcgtgtgtggcccgatggggtcatcccctttgtcattgggggaaacttcactggtagccagagggcagtcttccggcaggccatgaggcactgggagaagcacacctgtgtcaccttcctggagcgcactgacgaggacagctatattgtgttcacctatcgaccttgcgggtgctgctcctacgtgggtcgccgcggcgggggcccccaggccatctccatcggcaagaactgtgacaagttcggcattgtggtccacgagctgggccacgtcgtcggcttctggcacgaacacactcggccagaccgggaccgccacgtttccatcgttcgtgagaacatccagccagggcaggagtataacttcctgaagatggagcctcaggaggtggagtccctgggggagacctatgacttcgacagcatcatgcattacgctcggaacacattctccaggggcatcttcctggataccattgtccccaagtatgaggtgaacggggtgaaacctcccattggccaaaggacacggctcagcaagggggacattgcccaagcccgcaagctttacaagtgcccagcctgtggagagaccctgcaagacagcacaggcaacttctcctcccctgaataccccaatggctactctgctcacatgcactgcgtgtggcgcatctctgtcacacccggggagaagatcatcctgaacttcacgtccctggacctgtaccgcagccgcctgtgctggtacgactatgtggaggtccgagatggcttctggaggaaggcgcccctccgaggccgcttctgcgggtccaaactccctgagcctatcgtctccactgacagccgcctctgggttgaattccgcagcagcagcaattgggttggaaagggcttctttgcagtctacgaagccatctgcgggggtgatgtgaaaaaggactatggccacattcaatcgcccaactacccagacgattaccggcccagcaaagtctgcatctggcggatccaggtgtctgagggcttccacgtgggcctcacattccagtcctttgagattgagcgccacgacagctgtgcctacgactatctggaggtgcgcgacgggcacagtgagagcagcaccctcatcgggcgctactgtggctatgagaagcctgatgacatcaagagcacgtccagccgcctctggctcaagttcgtctctgacgggtccattaacaaagcgggctttgccgtcaactttttcaaagaggtggacgagtgctctcggcccaaccgcgggggctgtgagcagcggtgcctcaacaccctgggcagctacaagtgcagctgtgaccccgggtacgagctggccccagacaagcgccgctgtgaggctgcttgtggcggattcctcaccaagctcaacggctccatcaccagcccgggctggcccaaggagtacccccccaacaagaactgcatctggcagctggtggcccccacccagtaccgcatctccctgcagtttgacttctttgagacagagggcaatgatgtgtgcaagtacgacttcgtggaggtgcgcagtggactcacagctgactccaagctgcatggcaagttctgtggttctgagaagcccgaggtcatcacctcccagtacaacaacatgcgcgtggagttcaagtccgacaacaccgtgtccaaaaagggcttcaaggcccacttcttctcagaaaagaggccagctctgcagccccctcggggacgcccccaccagctcaaattccgagtgcagaaaagaaaccggaccccccagtgaggcctgccaggcctcccggaccccttgttactcaggaacctcaccttggacggaatgggatgggggcttcggtgcccaccaaccccccacctccactctgccattccggcccacctccctctggccggacagaactggtgctctcttctccccactgtgcccgtccgcggaccggggacccttccccgtgccctaccccctcccattttgatggtgtctgtgacatttcctgttgtgaagtaaaagagggacccctgcgtcctgc

SEQ ID NO: 574 - DNA, 4859 bp, Homo sapiens
cacgttgggtgacataatggggtttttttaattatagattcacactgcatttattcatcacccctgtcctctcatccataactcaaatttactaccagcaacacaaaatacaaagatgtgtccagtttcactacagctcttcgcgtttacaagtgtcgagcgcttgctttcggaacgcccttgtgattggccgagccaatgccagtgacatcaaccaacttacttttgattggaaggctggttgctgggactgtagcgtttgcaggaagtcacttaactgtttgggagctggaaaaccgaagctgaagttctcttttgccataggaacgagcgcaactgactaggaaagatgtgtcccaaagctccgcaagctggaacgtgagccaggaggcccggaccggccacgggaccgcgaggcactccgaaagtgtgcggctgccccttccctgcctcccagctgttacccttttaaatgtcagtgttcgaggctgtaggggtagcacgaggcagcgaaacggaacagtcggattggccgcacgcctcagttctagacgcacctctccaccgaagccgttctgactggcagggggagaaagtaaacagagttgaatcaccctccccactggccaattggagggggtttggtttgtgacgtgatgggattctgcgaaattgttactgagcaagagaatgccggaacgtgcggaccggccggagcaggggttcagaagccgtcagtggactcgggaaaaagtgtctcttagacctggcgctcggcggggccctcgccacccgcgtcggggtgatcgggtgaatgtcctggggctttggctcgacggcgaggcggccgagggcgtgcacctctcttgcagtttcctctcccagcgcctcgggggcgttttcagtcgaataaacttgcgaccgccacgtgtggcatctttccaagggagccggctcagaggggccggcgcgcccgtcgggggatcgcggccggcgcggggcaggggcggcggctagaggcggcggcgcggcggagcccggggccgtggatgctgcgtgcggaggcgctgccggttacgtaaagatgaggggctgaggtcgcctcggcgctcctgcgagtcggaagcgccccgcgcccccgcccccttggccgccgcgccgtgccgggcgggcgggtcgtcgtccgaggccagggagggcgagccgaacctccgcagccaccgccaagtttgtccgcgccgcctgggctgccgtcgcccgcaccatgtccgcggccgcctacatggacttcgtggctgcccagtgtctggtttccatttcgaaccgcgctgcggtgccggagcatggggtcgctccggacgccgagcggctgcgactacctgagcgcgaggtgaccaaggagcacggtgacccgggggacacctggaaggattactgcacactggtcaccatcgccaagagcttgttggacctgaacaagtaccgacccatccagaccccctccgtgtgcagcgacagtctggaaagtccagatgaggatatgggatccgacagcgacgtgaccaccgaatctgggtcgagtccttcccacagcccggaggagagacaggatcctggcagcgcgcccagcccgctctccctcctccatcctggagtggctgcgaaggggaaacacgcctccgaaaagaggcacaagtgcccctacagtggctgtgggaaagtctatggaaaatcctcccatctcaaagcccattacagagtgcatacaggtgaacggcccttcccctgcacgtggccagactgccttaaaaagttctcccgctcagacgagctgacccgccactaccggacccacactggggaaaagcagttccgctgtccgctgtgtgagaagcgcttcatgaggagtgaccacctcacaaagcacgcccggcggcacaccgagttccaccccagcatgatcaagcgatcgaaaaaggcgctggccaacgctttgtgaggtgctgcccgtggaagccagggagggatggaccccgaaaggacaaaagtactcccaggaaacagacgcgtgaaaactgagccccagaagaggcacacttgacggcacaggaagtcactgctctttggtcaatattctgattttcctctccctgcattgtttttaaaaagcacattgtagcctaagatcaaagtcaacaacactcggtccccttgaagaggcaactctctgaacccgtctctgactgttggagggaaggcaaatgcttttgggttttttggtttttgtttttgtttttttttctccttttatttttttgcgggggagggtagggagtgggtgggggggagggggtaaggccaagactgggtagattttaaagattcaacactggtgtacatatgtccgctgggtgagttgacctgtggcctcgcacagtgattctaggccctttatgcttgctgtctctcagaattgttttcttaccttttaatgtaatgacgagtgtgcttcagtttgtttagcaaaaccactctcttgaatcacgttaacttttgagattaaaaaaaaaaacgccatagcacagctgtctttatgcaagcaagagcacatctactccagcatgatctgtcatctaaagacttgaaaacaaaaaacagttacttatagtcaatgggtaagcagagtctgaatttatactaatcaagacaaacctttgaaaggttacactaagtacagaacttttaaaccttgctttgtatgagttgtactttttgaacataagctgcacttttattttctaatgcagaggatgaataagttaaatacatgctttgaggatagaagcagatgttctgtttggcaccacgttataatctgcttattttacaatatacacgtttccctaagaaatcatgcgcagagatgtgagggcagaatatacacaacagatgctgaaggagaaggagggtagtgttttgcaaaagaaaaagaaaagaaccaacagaattttaactctattaacttttccaaattttcctatgcttttagttaacatcattattgtatcctaatgccactaggggagagagcttttgactctgttgggttttatttgaatgtgtgcataacagtaatgagatctggaaacacctattttttggggaaaaaggtttgttggtctccttcctgtgttcctacaaaactcccactctcaggtgcaagagttatgtagaaggaaagggagctgaaataggaacagaaaaatcaacccctataactagtgaacaccaagggaaaataccacaatgatttcagaggagactctgcaaaatcgtcccttgtggagaatgcaggcaacatggaatactacgaatgaaatcacatcactgtatcttttacatcaatagcctcaccactaatatatcttgtatctaggtgtctataatggctgaaaccactacatccatctatgccatttacctgaaaacttaactgtggcctttatgaggccagaaaagtgaactgagttttgtagttaagacctcaaatgaggggagtcagcagtgatcatgggggaaatgtttacattttttttttcttcagaagtaacgctttctgatgattttatctgatatttaaaacagggagctatggtgcactctagtttatacttgcgctctgaaatgtgtaaacatagggtgcctacctatttcacctgacccatactcgtttctgattcagaatcagtgtgggctcctgcagtgggcgcgggtcacggctgactccaacttccaatacaacagccatcactagcacagtgtttttttgtttaaccaacgtagtgttattagtagttctataaagagaactgcttttaacattagggactgggagcagtccatgggataaaaaggaaagtgttttctcacgagaaaacatgtcaggaaaaataaagaacactttctacctctgtttcagatttttgaaacacttattttaaaccaaattttaatttctgtgtccaaaataagttttaaggacatctgttcttccatacgaaataggttaggctgcctatttctcactgagctcatggaatggttctgcttatgatactctgcacgctgccttttagtgagtgaggagtttggggttgcctagcacttgctaacttgtaaaaagtcatctttccctcacagaaagaaacgaaagaaagcaaagcaaagtcagtgaaagacaatctttatagtttcaggagtaaatctaaatgtggcttttgtcaagcacttagatggatataaatgcagcaacttgttttaaaaaaatgcacatttacttcccaaaaaagttgttacttgccttttcaagtgtgacaaactcacatttgatattctcttatatgttatagtaatgtaacgtataaactcaagcctttttattctttgtgattaaatcctgttttaaaatgtcacaaaacaggaaccagcattctaattagatttactatatcaagatatggttcaaataggactactagagttcattgaacactaaaactatgaaacaattactttttatattaaaaagaccatggatttaacttatgaaaatccaaatgcaggatagtaatttttgtttacttttttaaccaaactgaatttttgaaagactattgcaggtgtttaaaaagaaagaaaagttgttttatctaatactgtaagtagttgtcatattctggaaaatttaatagttttagagttaagatatctcctctctttggttagggaagaagaaagcccttcaccattgtggaatgatgccctggctttaaggtttagctccacatcatgcttctctt

SEQ ID NO: 575 - DNA, 952 bp, Homo sapiens
caaaggctactaagttaatggtattttctgcacagaaaataccattaacttagtagcctttgcttaaaggtgggattaattctccatgaagtcagaatgagacaataagcagcattaacttcataggcacacagaactagtgctcaaactgctaccacccttttcaattgctatcttttgaaaggcaccactatttgttttgctggggtctcgggtggacccttattcgctccgacaagatgaaagaaacaatcatgaaccaggaaaaactcgccaaactgcaggcacaagtgcgcattggtgggaaaggaactgctcgcagaaagaagaaggtggttcatagaacagccacagcagatgacaaaaaacttcagttctccttaaagaagttaggggtaaacaatatctctggtattgaagaggtgaatatgtttacaaaccaaggaacagtgatccactttaacaaccctaaagttcaggcatctctggcagcgaacactttcaccattacaggccatgctgagacgaagcagctgacagaaatgctacccagcatcttaaaccagcttggtgcggatagtctgactagtttaaggagactggccgaagctctgcccaaacaatctgtggatggaaaagcaccacttgctactggagaggatgatgatgatgaagttccagatcttgtggagaattttgatgaggcttccaagaatgaggcaaactgaattgagtcaacttctgaagataaaacctgaagaagttactgggagctgctattttatattatgactgctttttaagaaattcttgtttatggatctgataaaatctagatctctaatatttttaagcccaagccccttggacactgcagctcttttcagtttttgcttatacacaattcattctttgcagctaattaagccgaagaagccttaagtgggaattc

SEQ ID NO: 576 - DNA, 1488 bp, Homo sapiens
cttgggagagcttaatgaaaagagaacggagaggaggtgtgggttaggaaccaagaggtagccctgggggcagcagaaggctgagaggagtaggaagatcaggagctagagggagactggagggttccgggaaaagagcagaggaaagaggaaagacacagagagacgggagagagaagaagagtgggtttgaagggcggatctcagtccctggctgctttggcatttggggaactgggactccctgtggggaggagaggaaagctggaagtcctggagggacagggtcccagaaggaggggacagaggagctgagagaggggggcagggcgttgggcaggggtccctcggaggcctcctggggatgggggctgcagctcgtctgagcgcccctcgagcgctggtactctgggctgcactgggggcagcagctcacatcggaccagcacctgaccccgaggactggtggagctacaaggataatctccagggaaacttcgtgccagggcctcctttctggggcctggtgaatgcagcgtggagtctgtgtgctgtggggaagcggcagagccccgtggatgtggagctgaagagggttctttatgacccctttctgcccccattaaggctcagcactggaggagagaagctccggggaaccttgtacaacaccggccgacatgtctccttcctgcctgcaccccgacctgtggtcaatgtgtctggaggtcccctcctttacagccaccgactcagtgaactgcggctgctgtttggagctcgcgacggagccggctcggaacatcagatcaaccaccagggcttctctgctgaggtgcagctcattcacttcaaccaggaactctacgggaatttcagcgctgcctcccgcggccccaatggcctggccattctcagcctctttgtcaacgttgccagtacctctaacccattcctcagtcgcctccttaaccgcgacaccatcactcgcatctcctacaagaatgatgcctactttcttcaagacctgagcctggagctcctgttccctgaatccttcggcttcatcacctatcagggctctctcagcaccccgccctgctccgagactgtcacctggatcctcattgaccgggccctcaatatcacctcccttcagatgcactccctgagactcctgagccagaatcctccatctcagatcttccagagcctcagcggtaacagccggcccctgcagcccttggcccacagggcactgaggggcaacagggacccccggcaccccgagaggcgctgccgaggccccaactaccgcctgcatgtggatggtgtcccccatggtcgctgagactccccttcgaggattgcacccgcccgtcctaagcctccccacaaggcgaggggagttacccctaaaacaaagctattaaagggacagaatacttcctgtttaaaaaaaaaaaaaaaaaaaaaaaaaaaaaaaaa

SEQ ID NO: 577 - DNA, 3320 bp, Homo sapiens
gtgggtgagcggcggccacggcatcctgtgctgtgggggctacgaggaaagatctaattatcatggacctgcgacagtttcttatgtgcctgtccctgtgcacagcctttgccttgagcaaacccacagaaaagaaggaccgtgtacatcatgagcctcagctcagtgacaaggttcacaatgatgctcagagttttgattatgaccatgatgccttcttgggtgctgaagaagcaaagacctttgatcagctgacaccagaagagagcaaggaaaggcttggaaagattgtaagtaaaatagatggcgacaaggacgggtttgtcactgtggatgagctcaaagactggattaaatttgcacaaaagcgctggatttacgaggatgtagagcgacagtggaaggggcatgacctcaatgaggacggcctcgtttcctgggaggagtataaaaatgccacctacggctacgttttagatgatccagatcctgatgatggatttaactataaacagatgatggttagagatgagcggaggtttaaaatggcagacaaggatggagacctcattgccaccaaggaggagttcacagctttcctgcaccctgaggagtatgactacatgaaagatatagtagtacaggaaacaatggaagatatagataagaatgctgatggtttcattgatctagaagagtatattggtgacatgtacagccatgatgggaatactgatgagccagaatgggtaaagacagagcgagagcagtttgttgagtttcgggataagaaccgtgatgggaagatggacaaggaagagaccaaagactggatccttccctcagactatgatcatgcagaggcagaagccaggcacctggtctatgaatcagaccaaaacaaggatggcaagcttaccaaggaggagatcgttgacaagtatgacttatttgttggcagccaggccacagattttggggaggccttagtacggcatgatgagttctgagctgcggaggaaccctcatttcctcaaaagtaatttatttttacagcttctggtttcacatgaaattgtttgcgctactgagactgttactacaaactttttaagacatgaaaaggcgtaatgaaaaccatcccgtccccattcctcctcctctctgagggactggagggaagccgtgcttctgaggaacaactctaattagtacacttgtgtttgtagatttacactttgtattatgtattaacatggcgtgtttatttttgtatttttctctggttgggagtatgatatgaaggatcaagatcctccactcacacatgtagacaaacattagctctttactctttctcaaccccttatatgattttaataattctcacttcactaattttgtaagcctgagatcaataagaaatgttcaggagagaggaaagaaaaaatatatatgctccacaatttatatttagagagagaacacttagtcttgcctgtcaaaaagtccaacatttcataggtagtaggggccacatattacattcagttgctataggtccagcaactgaacctgccattacctgggcaaggaaagatccctttgctctaggaaagcttggcccaaattgattttcttctttttccccctgtaggactgactgttggctaattttgtcaagcacagctgtggtgggaagagttagggccagtgtcttgaaaatcaatcaagtagtgaatgtgatctctttgcagagctatagatagaaacagctggaaaactaaaggaaaaatacaaatgttttcggggcatacattttttttctgggtgtgcatctgttgaaatgctcaagacttaattatttgccttttgaaatcactgtaaatgcccccatccggttcctcttcttcccaggtgtgccaaggaattaatcttggtttcactacaattaaaattcactcctttccaatcatgtcattgaaagtgcctttaacgaaagaaatggtcactgaatgggaattctcttaagaaaccctgagattaaaaaaagactatttggataacttataggaaagcctagaacctcccagtagagtggggatttttttcttcttccctttctcttttggacaatagttaaattagcagtattagttatgagtttggttgcagtgttcttatcttgtgggctgatttccaaaaaccacatgctgctgaatttaccagggatcctcatacctcacaatgcaaaccacttactaccaggcctttttctgtgtccactggagagcttgagctcacactcaaagatcagaggacctacagagagggctctttggtttgaggaccatggcttacctttcctgcctttgacccatcacaccccatttcctcctctttccctctccccgctgccaaaaaaaaaaaaaaggaaacgtttatcatgaatcaacagggtttcagtccttatcaaagagagatgtggaaagagctaaagaaaccaccctttgttcccaactccactttacccatattttatgcaacacaaacactgtccttttgggtccctttcttacagatggacctcttgagaagaattatcgtattccacgtttttagccctcaggttaccaagataaatatatgtatatataacctttattattgctatatctttgtggataatacattcaggtggtgctgggtgatttattataatctgaacctaggtatatcctttggtcttccacagtcatgttgaggtgggctccctggtatggtaaaaagccaggtataatgtaacttcaccccagcctttgtactaagctcttgatagtggatatactcttttaagtttagccccaatatagggtaatggaaatttcctgccctctgggttccccatttttactattaagaagaccagtgataatttaataatgccaccaactctggcttagttaagtgagagtgtgaactgtgtggcaagagagcctcacacctcactaggtgcagagagcccaggccttatgttaaaatcatgcacttgaaaagcaaaccttaatctgcaaagacagcagcaagcattatacggtcatcttgaatgatccctttgaaattttttttttgtttgtttgtttaaatcaagcctgaggctggtgaacagtagctacacacccatattgtgtgttctgtgaatgctagctctcttgaatttggatattggttattttttatagagtgtaaaccaagttttatattctgcaatgcgaacaggtacctatctgtttctaaataaaactgtttacattcaaaaa

SEQ ID NO: 578 - DNA, 1311 bp, Homo sapiens
gggaggagagaaaagccatggccgacaaggtcctgaaggagaagagaaagctgtttatccgttccatgggtgaaggtacaataaatggcttactggatgaattattacagacaagggtgctgaacaaggaagagatggagaaagtaaaacgtgaaaatgctacagttatggataagacccgagctttgattgactccgttattccgaaaggggcacaggcatgccaaatttgcatcacatacatttgtgaagaagacagttacctggcagggacgctgggactctcagcagctcctcaggcagtgcaggacaacccagctatgcccacatcctcaggctcagaagggaatgtcaagctttgctccctagaagaagctcaaaggatatggaaacaaaagtcggcagagatttatccaataatggacaagtcaagccgcacacgtcttgctctcattatctgcaatgaagaatttgacagtattcctagaagaactggagctgaggttgacatcacaggcatgacaatgctgctacaaaatctggggtacagcgtagatgtgaaaaaaaatctcactgcttcggacatgactacagagctggaggcatttgcacaccgcccagagcacaagacctctgacagcacgttcctggtgttcatgtctcatggtattcgggaaggcatttgtgggaagaaacactctgagcaagtcccagatatactacaactcaatgcaatctttaacatgttgaataccaagaactgcccaagtttgaaggacaaaccgaaggtgatcatcatccaggcctgccgtggtgacagccctggtgtggtgtggtttaaagattcagtaggagtttctggaaacctatctttaccaactacagaagagtttgaggatgatgctattaagaaagcccacatagagaaggattttatcgctttctgctcttccacaccagataatgtttcttggagacatcccacaatgggctctgtttttattggaagactcattgaacatatgcaagaatatgcctgttcctgtgatgtggaggaaattttccgcaaggttcgattttcatttgagcagccagatggtagagcgcagatgcccaccactgaaagagtgactttgacaagatgtttctacctcttcccaggacattaaaataaggaaactgtatgaatgtctgctgggcaggaagtgaagagatcgttctgtaaaaggtttttggaattatgtctgctgaataataaactttttttgaaataataaatctggtagaaaaatgaaaaaaaaaaaaaaaaaa

SEQ ID NO: 579 - DNA, 2932 bp, Homo sapiens
agagggagggaacgatttaaggagcgaatactactggtaaactaatggaagaaatctgctgcaccactggatattgggagtgtgtggcatgcatcctcatcatcaggaaactctaaaaaagaaccgagtggtgctagccaaacagctgttgttgagcgaattgttagaacatcttctggagaaggacatcatcaccttggaaatgagggagctcatccaggccaaagtgggcagtttcagccagaatgtggaactcctcaacttgctgcctaagaggggtccccaagcttttgatgccttctgtgaagcactgagggagaccaagcaaggccacctggaggatatgttgctcaccaccctttctgggcttcagcatgtactcccaccgttgagctgtgactacgacttgagtctcccttttccggtgtgtgagtcctgtcccctttacaagaagctccgcctgtcgacagatactgtggaacactccctagacaataaagatggtcctgtctgccttcaggtgaagccttgcactcctgaattttatcaaacacacttccagctggcatataggttgcagtctcggcctcgtggcctagcactggtgttgagcaatgtgcacttcactggagagaaagaactggaatttcgctctggaggggatgtggaccacagtactctagtcaccctcttcaagcttttgggctatgacgtccatgttctatgtgaccagactgcacaggaaatgcaagagaaactgcagaattttgcacagttacctgcacaccgagtcacggactcctgcatcgtggcactcctctcgcatggtgtggagggcgccatctatggtgtggatgggaaactgctccagctccaagaggtttttcagctctttgacaacgccaactgcccaagcctacagaacaaaccaaaaatgttcttcatccaggcctgccgtggaggtgctattggatcccttgggcacctccttctgttcactgctgccaccgcctctcttgctctatgagactgatcgtggggttgaccaacaagatggaaagaaccacgcaggatcccctgggtgcgaggagagtgatgccggtaaagaaaagttgccgaagatgagactgcccacgcgctcagacatgatatgcggctatgcctgcctcaaagggactgccgccatgcggaacaccaaacgaggttcctggtacatcgaggctcttgctcaagtgttttctgagcgggcttgtgatatgcacgtggccgacatgctggttaaggtgaacgcacttatcaaggatcgggaaggttatgctcctggcacagaattccaccggtgcaaggagatgtctgaatactgcagcactctgtgccgccacctctacctgttcccaggacaccctcccacatgatgtcacctccccatcatccacgccaagtggaagccactggaccacaggaggtgtgatagagcctttgatcttcaggatgcacggtttctgttctgccccctcagggatgtgggaatctcccagacttgtttcctgtgcccatcatctctgcctttgagtgtgggactccaggccagctccttttctgtgaagccctttgcctgtagagccagccttggttggacctattgccaggaatgtttcagctgcagttgaagagcctgacaagtgaagttgtaaacacagtgtggttatggggagagggcatataaattccccatatttgtgttcagttccagcttttgtagatggcactttagtgattgcttttattacattagttaagatgtcttgagagaccatctcctatcttttatttcattcatatcctccgccctttttgtcctagagtgagagtttggaaggtgtccaaatttaatgtagacattatcttttggctctgaagaagcaaacatgactagagacgcaccttgctgcagtgtccagaagcggcctgtgcgttcccttcagtactgcagcgccacccagtggaaggacactcttggctcgtttgggctcaaggcaccgcagcctgtcagccaacattgccttgcatttgtaccttattgatctttgcccatggaagtctcaaagatctttcgttggttgtttctctgagctttgttactgaaatgagcctcgtggggagcatcagagaaggccaggaagaatggtgtgtttccctagactctgtaaccacctctctgtctttttccttcctgagaaacgtccatctctctcccttactattcccactttcattcaatcaacctgcacttcatatctagatttctagaaaagcttcctagcttatctccctgcttcatatctctcccttctttaccttcatttcatcctgttggctgctgccaccaaatctgtctagaatcctgctttacaggatcatgtaaatgctcaaagatgtaatgtagttctttgttcctgctttctctttcagtattaaactctcctttgatattatgtggcttttatttcagtgccatacatgttattgttttcaacctagaaacctttatccctgcttatctgaaacttcccaacttccctgatctttaagacttttttttttttttttttttttttgagacagagtctcgctctgtcgcccaggctggagggcagtggcacgatctcagctcactgcaagctccaactcccgggttcacgccattctcctgcctcagccttccaagtagctgggactacaggtgcccgccaccgtgcccggctaatttttttgtatttttagtagagacagggtttcaccatgttagccgggatggtcttgatctcctgacctcatgatccacccacctcagcctcccaaagtgttgggattacaggcgtgagccactgcgcccgggcaagacctttttttaaaaaaaaaaaaaaaaaaa

SEQ ID NO: 580 - DNA, 1286 bp, Homo sapiens
gctctttccaacgctgtaaaaaaggacagaggctgttccctatggcagaaggcaaccacagaaaaaagccacttaaggtgttggaatccctgggcaaagatttcctcactggtgttttggataacttggtggaacaaaatgtactgaactggaaggaagaggaaaaaaagaaatattacgatgctaaaactgaagacaaagttcgggtcatggcagactctatgcaagagaagcaacgtatggcaggacaaatgcttcttcaaaccttttttaacatagaccaaatatcccccaataaaaaagctcatccgaatatggaggctggaccacctgagtcaggagaatctacagatgccctcaagctttgtcctcatgaagaattcctgagactatgtaaagaaagagctgaagagatctatccaataaaggagagaaacaaccgcacacgcctggctctcatcatatgcaatacagagtttgaccatctgcctccgaggaatggagctgactttgacatcacagggatgaaggagctacttgagggtctggactatagtgtagatgtagaagagaatctgacagccagggatatggagtcagcgctgagggcatttgctaccagaccagagcacaagtcctctgacagcacattcttggtactcatgtctcatggcatcctggagggaatctgcggaactgtgcatgatgagaaaaaaccagatgtgctgctttatgacaccatcttccagatattcaacaaccgcaactgcctcagtctgaaggacaaacccaaggtcatcattgtccaggcctgcagaggtgcaaaccgtggggaactgtgggtcagagactctccagcatccttggaagtggcctcttcacagtcatctgagaacctggaggaagatgctgtttacaagacccacgtggagaaggacttcattgctttctgctcttcaacgccacacaacgtgtcctggagagacagcacaatgggctctatcttcatcacacaactcatcacatgcttccagaaatattcttggtgctgccacctagaggaagtatttcggaaggtacagcaatcatttgaaactccaagggccaaagctcaaatgcccaccatagaacgactgtccatgacaagatatttctacctctttcctggcaattgaaaatggaagccacaagcagcccagccctccttaatcaacttcaaggagcaccttcattagtacagcttgcatatttaacattttgtatttcaataaaagtgaagacaaacg

SEQ ID NO: 581 - DNA, 1661 bp, Homo sapiens
ccgagggcggggccgggcccgggagcctgtggcttcaggaagaggagggcaaggtgtctggctgcgcgtttggctgcaatgagctcggcctcggggctccgcagggggcacccggcaggtggggaagaaaacatgacagaaacagatgccttctataaaagagaaatgtttgatccggcagaaaagtacaaaatggaccacaggaggagaggaattgctttaatcttcaatcatgagaggttcttttggcacttaacactgccagaaaggcggggcacctgcgcagatagagacaatcttacccgcaggttttcagatctaggatttgaagtgaaatgctttaatgatcttaaagcagaagaactactgctcaaaattcatgaggtgtcaactgttagccacgcagatgccgattgctttgtgtgtgtcttcctgagccatggcgaaggcaatcacatttatgcatatgatgctaaaatcgaaattcagacattaactggcttgttcaaaggagacaagtgtcacagcctggttggaaaacccaagatatttatcattcaggcatgtcggggaaaccagcacgatgtgccagtcattcctttggatgtagtagataatcagacagagaagttggacaccaacataactgaggtggatgcagcctccgtttacacgctgcctgctggagctgacttcctcatgtgttactctgttgcagaaggatattattctcaccgggaaactgtgaacggctcatggtacattcaagatttgtgtgagatgttgggaaaatatggctcctccttagagttcacagaactcctcacactggtgaacaggaaagtttctcagcgccgagtggacttttgcaaagacccaagtgcaattggaaagaagcaggttccctgttttgcctcaatgctaactaaaaagctgcatttctttccaaaatctaattaattaatagaggctatctaattccacactctgtattgaaaatggctttctcagccaggcgtggttactcacacctgtaatcccagcactttgggagtccaaggtgggcggatcacctgaggtcgggagttcgagaccagcctgaccaacatggagaagccccgtctctactaaaaatgcaaaaaaaaatttagctaggcatggcggcgcatgcctgcaatcccagctacttggaaggctgaggcaggagaatcacttgaacccaggaggtggaggctgcggtgagccgagattgcgccattgcactccagcctgggcaacgagtgaaactccgtctcaaaaaaaagaaaatgtctttctcttccttttatataaatatcgttagggtgaagcattatggtctaatgattcaaatgttttaaagtttaatgcctagcagagaactgccttaaaaaaaaaaaaaaaaagttcatgttggccatggtgaaagggtttgatatggagaaacaaaatcctcaggaaattagataaataaaaatttataagcatttgtattattttttaataaactgcagggttacacaaaaatctagctgatttaacttgtattttgtcacttttttataaaagtttattgtttgatgtttttaaaggtttttgaaatccaggaattaaatcatcccttaataaaatattcgaaattc

SEQ ID NO: 582 - DNA, 2586 bp, Homo sapiens
cgcccgcgcgcgggctcaactttgtagagcgaggggccaacttggcagagcgcgcggccagctttgcagagagcgccctccagggactatgcgtgcggggacacgggtcgctttgggctcttccacccctgcggagcgcactatcccgagccaggggcggtgcaagccccgcccggccctacccagggcggctcctccctccgcagcgccgagacttttagtttcgctttcgctaaaggggccccagacccttgctgcggagcgacggagagagactgtgccagtcccagccgccctaccgccgtgggaacgatggcagatgatcagggctgtattgaagagcagggggttgaggattcagcaaatgaagattcagtggatgctaagccagaccggtcctcgtttgtaccgtccctcttcagtaagaagaagaaaaatgtcaccatgcgatccatcaagaccacccgggaccgagtgcctacatatcagtacaacatgaattttgaaaagctgggcaaatgcatcataataaacaacaagaactttgataaagtgacaggtatgggcgttcgaaacggaacagacaaagatgccgaggcgctcttcaagtgcttccgaagcctgggttttgacgtgattgtctataatgactgctcttgtgccaagatgcaagatctgcttaaaaaagcttctgaagaggaccatacaaatgccgcctgcttcgcctgcatcctcttaagccatggagaagaaaatgtaatttatgggaaagatggtgtcacaccaataaaggatttgacagcccactttaggggggatagatgcaaaacccttttagagaaacccaaactcttcttcattcaggcttgccgagggaccgagcttgatgatggcatccaggccgactcggggcccatcaatgacacagatgctaatcctcgatacaagatcccagtggaagctgacttcctcttcgcctattccacggttccaggctattactcgtggaggagcccaggaagaggctcctggtttgtgcaagccctctgctccatcctggaggagcacggaaaagacctggaaatcatgcagatcctcaccagggtgaatgacagagttgccaggcactttgagtctcagtctgatgacccacacttccatgagaagaagcagatcccctgtgtggtctccatgctcaccaaggaactctacttcagtcaatagccatatcaggggtacattctagctgagaagcaatgggtcactcattaatgaatcacatttttttatgctcttgaaatattcagaaattctccaggattttaatttcaggaaaatgtattgattcaacagggaagaaactttctggtgctgtcttttgttctctgaattttcagagacttttttataatgttattcatttggtgactgtgtaactttctcttaagattaattttctctttgtatgtctgttaccttgttaatagacttaatacatgcaacagaagtgacttctggagaaagctcatggctgtgtccactgcaattggtggtaacagtggtagagtcatgtttgcacttggcaaaaagaatcccaatgtttgacaaaacacagccaaggggatatttactgctctttattgcagaatgtgggtattgagtgtgatttgaatgatttttcattggcttagggcagattttcatgcaaaagttctcatatgagttagaggagaaaaagcttaatgattctgatatgtatccatcaggatccagtctggaaaacagaaaccattctaggtgtttcaacagagggagtttaatacaggaaattgacttacatagatgataaaagagaagccaaacagcaagaagctgttaccacacccagggctatgaggataatgggaagaggtttggtttcctgtgtccagtagtgggatcatccagaggagctggaaccatggtgggggctgcctagtgggagttaggaccaccaatggattgtggaaaatggagccatgacaagaacaaagccactgactgagatggagtgagctgagacagataagagaataccttggtctcacctatcctgccctcacatcttccaccagcaccttactgcccaggcctatctggaagccacctcaccaaggaccttggaagagcaagggacagtgaggcaggagaagaacaagaaatggatgtaagcctggcccataatgtgaacataagtaatcactaatgctcaacaatttatccattcaatcatttattcattgggttgtcagatagtctatgtatgtgtaaaacaatctgttttggctttatgtgcaaaatctgttatagctttaaaatatatctggaactttttagattattccaagccttattttgagtaaatatttgttacttttagttctataagtgaggaagagtttatggcaaagatttttggcactttgttttcaagatggtgttatcttttgaattcttgataaatgactgtttttttctgcctaatagtaactggttaaaaaacaaatgttcatatttattgattaaaaatgtggttgcttaattcct

SEQ ID NO: 583 - DNA, 2903 bp, Homo sapiens
tgaaggctggttgttcagactgagcttcctgcctgcctgtaccccgccaacagcttcagaagaaggtgactggtggctgcctgaggaataccagtgggcaagagaattagcatttctggagcatctgctgtctgagcagcccctgggtgcgtccactttctgggcacgtgaggttgggccttggccgcctgagcccttgagttggtcacttgaaccttgggaatattgagattatattctcctgccttttaaaaagatggacttcagcagaaatctttatgatattggggaacaactggacagtgaagatctggcctccctcaagttcctgagcctggactacattccgcaaaggaagcaagaacccatcaaggatgccttgatgttattccagagactccaggaaaagagaatgttggaggaaagcaatctgtccttcctgaaggagctgctcttccgaattaatagactggatttgctgattacctacctaaacactagaaaggaggagatggaaagggaacttcagacaccaggcagggctcaaatttctgcctacaggttccacttctgccgcatgagctgggctgaagcaaacagccagtgccagacacagtctgtacctttctggcggagggtcgatcatctattaataagggtcatgctctatcagatttcagaagaagtgagcagatcagaattgaggtcttttaagtttcttttgcaagaggaaatctccaaatgcaaactggatgatgacatgaacctgctggatattttcatagagatggagaagagggtcatcctgggagaaggaaagttggacatcctgaaaagagtctgtgcccaaatcaacaagagcctgctgaagataatcaacgactatgaagaattcagcaaaggggaggagttgtgtggggtaatgacaatctcggactctccaagagaacaggatagtgaatcacagactttggacaaagtttaccaaatgaaaagcaaacctcggggatactgtctgatcatcaacaatcacaattttgcaaaagcacgggagaaagtgcccaaacttcacagcattagggacaggaatggaacacacttggatgcaggggctttgaccacgacctttgaagagcttcattttgagatcaagccccacgatgactgcacagtagagcaaatctatgagattttgaaaatctaccaactcatggaccacagtaacatggactgcttcatctgctgtatcctctcccatggagacaagggcatcatctatggcactgatggacaggaggcccccatctatgagctgacatctcagttcactggtttgaagtgcccttcccttgctggaaaacccaaagtgttttttattcaggcttgtcagggggataactaccagaaaggtatacctgttgagactgattcagaggagcaaccctatttagaaatggatttatcatcacctcaaacgagatatatcccggatgaggctgactttctgctggggatggccactgtgaataactgtgtttcctaccgaaaccctgcagagggaacctggtacatccagtcactttgccagagcctgagagagcgatgtcctcgaggcgatgatattctcaccatcctgactgaagtgaactatgaagtaagcaacaaggatgacaagaaaaacatggggaaacagatgcctcagcctactttcacactaagaaaaaaacttgtcttcccttctgattgatggtgctattttgtttgttttgttttgttttgtttttttgagacagaatctcgctctgtcgcccaggctggagtgcagtggcgtgatctcggctcaccgcaagctccgcctcccgggttcaggccattctcctgcctcagcctcccgagtagctgggactacaggggcccgccaccacacctggctaattttttaaaaatatttttagtagagacagggtttcactgtgttagccagggtggtcttgatctcctgacctcgtgatccacccacctcggcctcccaaagtgctgggattacaggcgtgagccaccgcgcctggccgatggtactatttagatataacactatgtttatttactaattttctagattttctactttattaattgttttgcacttttttataagagctaaagttaaataggatattaacaacaataacactgtctcctttctcttacgcttaaggctttgggaatgtttttagctggtggcaataaataccagacacgtacaaaatccagctatgaatatagagggcttatgattcagattgttatctatcaactataagcccactgttaatattctattaactttaattctctttcaaagctaaattccacactaccacattaaaaaaattagaaagtagccacgtatggtggctcatgtctataatcccagcactttgggaggttgaggtgggaggatttgcttgaacccaagaggtccaaggctgcagtgagccatgttcacaccgctgcactcaagcttgggtgacagagcaagaccccgtccccaaaaaaattttttttttaataaacccaaatttgtttgaaaacttttaaaaattcaaatgatttttacaagttttaaataagctctccccaaacttgctttatgccttcttattgcttttatgatatatatatgcttggctaactatatttgctttttgctaacaatgctctggggtctttttatgcatttgcatttgctctttcatctctgcttggattattttaaatcattaggaattaagttatctttaaaatttaagtatcttttttccaaaacattttttaatagaataaaatataatttgatcttaaaaaaaaaaaaaaaaaaaaaaaaaaaaaaaaaaaaaaaa

SEQ ID NO: 584 - DNA, 2034 bp, Homo sapiens
ggccctggggcgggggcgggtcctggggactggggcgggcggccgaggcccggaagcggactgaggcggcctggagtcttagttggctactcgccatggacgaagcggatcggcggctcctgcggcggtgccggctgcggctggtggaagagctgcaggtggaccagctctgggacgccctgctgagccgcgagctgttcaggccccatatgatcgaggacatccagcgggcaggctctggatctcggcgggatcaggccaggcagctgatcatagatctggagactcgagggagtcaggctcttcctttgttcatctcctgcttagaggacacaggccaggacatgctggcttcgtttctgcgaactaacaggcaagcagcaaagttgtcgaagccaaccctagaaaaccttaccccagtggtgctcagaccagagattcgcaaaccagaggttctcagaccggaaacacccagaccagtggacattggttctggaggatttggtgatgtcggtgctcttgagagtttgaggggaaatgcagatttggcttacatcctgagcatggagccctgtggccactgcctcattatcaacaatgtgaacttctgccgtgagtccgggctccgcacccgcactggctccaacatcgactgtgagaagttgcggcgtcgcttctcctcgctgcatttcatggtggaggtgaagggcgacctgactgccaagaaaatggtgctggctttgctggagctggcgcagcaggaccacggtgctctggactgctgcgtggtggtcattctctctcacggctgtcaggccagccacctgcagttcccaggggctgtctacggcacagatggatgccctgtgtcggtcgagaagattgtgaacatcttcaatgggaccagctgccccagcctgggagggaagcccaagctctttttcatccaggcctgtggtggggagcagaaagaccatgggtttgaggtggcctccacttcccctgaagacgagtcccctggcagtaaccccgagccagatgccaccccgttccaggaaggtttgaggaccttcgaccagctggacgccatatctagtttgcccacacccagtgacatctttgtgtcctactctactttcccaggttttgtttcctggagggaccccaagagtggctcctggtacgttgagaccctggacgacatctttgagcagtgggctcactctgaagacctgcagtccctcctgcttagggtcgctaatgctgtttcggtgaaagggatttataaacagatgcctggttgctttaatttcctccggaaaaaacttttctttaaaacatcataaggccagggcccctcaccctgccttatcttgcaccccaaagctttcctgccccaggcctgaaagaggctgaggcctggactttcctgcaactcaaggactttgcagccggcacagggtctgctctttctctgccagtgacagacaggctcttagcagcttccagattgacgacaagtgctgaacagtggaggaagagggacagatgaatgccgtggattgcacgtggcctcttgagcagtggctggtccagggctagtgacttgtgtcccatgatccctgtgttgtctctagagcagggattaacctctgcactactgacatgtggggccaggtcaccctttgctgtgaggctgtcctgtacattgtgggatgttcagcactgtcccttgcctcaatgccagtaacgcgtcttcctgagtggtgccaaacaaaaaggttctcaggtgttgccaaatatgtcctggggtataaaactttcctcgcctgacaaccactggtctgtagggatttttggctacacacaaaccagtatcgctcatagatcagcaaaccggggcctactagagtctgaacagctgtaatctatgaattctaagtgaaattttaaaaattgttaatttttcctatattgcattaattttaaaaaaaaaaaaaaaaaaaaaaaaaaaaaaaaaaaaaaaaaaaaaaa

SEQ ID NO: 585 - DNA, 3583 bp, Homo sapiens
gcttctaaagtgaagattcagttttcacttaaacaaccagcaagtcttgaagtctcttcccaagcaaatgggagcttctttggaccttggagcacacagaggattctactttctttaaaactttgttttcaggcaatttccctgagaaccgtttacttccagaagattggtggagcttgatctgaaggctggccatgaaatctcaaggtcaacattggtattccagttcagataaaaactgtaaagtgagctttcgtgagaagcttctgattattgattcaaacctgggggtccaagatgtggagaacctcaagtttctctgcataggattggtccccaacaagaagctggagaagtccagctcagcctcagatgtttttgaacatctcttggcagaggatctgctgagtgaggaagaccctttcttcctggcagaactcctctatatcatacggcagaagaagctgctgcagcacctcaactgtaccaaagaggaagtggagcgactgctgcccacccgacaaagggtttctctgtttagaaacctgctctacgaactgtcagaaggcattgactcagagaacttaaaggacatgatcttccttctgaaagactcgcttcccaaaactgaaatgacctccctaagtttcctggcatttctagagaaacaaggtaaaatagatgaagataatctgacatgcctggaggacctctgcaaaacagttgtacctaaacttttgagaaacatagagaaatacaaaagagagaaagctatccagatagtgacacctcctgtagacaaggaagccgagtcgtatcaaggagaggaagaactagtttcccaaacagatgttaagacattcttggaagccttaccgagggcagctgtgtacaggatgaatcggaaccacagaggcctctgtgtcattgtcaacaaccacagctttacctccctgaaggacagacaaggaacccataaagatgctgagatcctgagtcatgtgttccagtggcttgggttcacagtgcatatacacaataatgtgacgaaagtggaaatggagatggtcctgcagaagcagaagtgcaatccagcccatgccgacggggactgcttcgtgttctgtattctgacccatgggagatttggagctgtctactcttcggatgaggccctcattcccattcgggagatcatgtctcacttcacagccctgcagtgccctagactggctgaaaaacctaaactctttttcatccaggcctgccaaggtgaagagatacagccttccgtatccatcgaagcagatgctctgaaccctgagcaggcacccacttccctgcaggacagtattcctgccgaggctgacttcctacttggtctggccactgtcccaggctatgtatcctttcggcatgtggaggaaggcagctggtatattcagtctctgtgtaatcatctgaagaaattggtcccaagacatgaagacatcttatccatcctcactgctgtcaacgatgatgtgagtcgaagagtggacaaacagggaacaaagaaacagatgccccagcctgctttcacactaaggaaaaaactagtattccctgtgcccctggatgcactttcaatatagcagagagtttttgttggttcttagacctcaaacgaatcattgggtataacctccagcctcctgcccagcacaggaatcggtggtctccacctgtcattctagaaacaggaaacaccgtgttttctgacacagtcaattctgattttctttttcttttgcaagtctaaatgttagaaaactttctttttttggagatagtctcattctgtcacccagactggagtgcaggggggcaatcacggctcactgtagtctcgacctcccaggctcaagctgtcctcccacctcagcctcccaagtagctgagactacaggtgtgtgtccatgcacagctaactttttattttttttgtggagatggggtttcactatgttgcctaagctggtctcaaactcctgggctcaagcgatcctcccacctcagcttctcaaagttctgggactacaggcatgaaatactgtgcctggcctggggaccaggtgcattttaaggttccttggtgttcaaaaaccacgttcttagcctagattgagcttagattgcctctctagacaactaccccttagttataattctgtgtcccctctgcatgcccttaaacattggacagtgaggtcacagtccacccaccctctctctgatctcccccttcctaagacttctcttttgcacatctagtgaggtgaaaatttggtctatgccaggcccatttcctgcttttgtgtaaggaaggtgctcacataggaagtttttatttggttagagacaggtttccctgtaggaagatgatggctcatttacactcagctgctctgcaagcagaaactttacaacctgatgtcatattccattttggactgggtgcggtgactcatgcctgtaatcccagtactctgggaagccaaggcaggcagatcacttgaggtcaggagttcgagaccagcctggccaatacggcaaaacctcatcattactaaaaacacaaaaattagccaggtgtggcggcgagcacctgtaatcccagctactcgggaggctgagacaggagaatctcttgaatccaggaggcagaggctgtggtgagccaagatgacacaactgcactccagcttgggcaacagggcgagaccttgtttaaaaaaaaaattcaatattggggttggaacatttcagttgccattgacagaacacccaattcaaattgactgaagcaaagaagggaatttattgcctctttcacattgaaacccaggagtggataacactggcttcaggcaaagcttgaatcaggactcaatctacaggccagcacctttctcttggccggatgtcctcagggctggcagatgcagtagactgcagtggacagtccccaccttgttactgctactacactttgctcctctggcccaaggcatgaggagagaggctgtgtcagaaactgaagctgttctcaggatcactgggctcttcttggcagaggggatgtctggcttgcctgaagggagtggctctgtaaggacgccttgatgctttcttcattaagattttgagcatttttacgtacttgagcttttttttttttttttttcaatttctagaggaactttttctctgttaattcctggaactgtattttgaatccttaaaggtgagccctcatagggagatccaaagtcctgtggttaacgccttcatttatagatgaggcagctgaggcctggggatgtgaacaacctgctcacagtcctcatttactggatttgacttcagccaggtgaactggaatgccttggggcgtggaagggcattaggagtgtttcatttgatatgtgaatgctcataaaaaaatgtcaaggaatgaagaacaacaactctcagtggtgcctgcatttataattatttatgtgaaagtcaaattcatgtacagtaaatttgttataagaat

SEQ ID NO: 586 - DNA, 2528 bp, Homo sapiens
aaaaatcagcctgtctgctctctccttgctcaacaaggcctctaacagtcttctgtcctctattctgcacacggcatatttgggaacgagaaacccaaagttttcccaaatgaagagaactcacttgtttattgtggggatttattttctgtcctcttgcagggcagaagaggggcttaatttccccacatatgatgggaaggaccgagtggtaagtctttccgagaagaacttcaagcaggttttaaagaaatatgacttgctttgcctctactaccatgagccggtgtcttcagataaggtcacgccaaaacagttccaactgaaagaaatcgtgcttgagcttgtggcccaggtccttgaacataaagctataggctttgtgatggtggatgccaagaaagaagccaagcttgccaagaaactgggttttgatgaagaaggaagcctgtatattcttaagggtgatcgcacaatagagtttgatggcgagtttgcagctgatgtcttggtggagttcctcttggatctaattgaagacccagtggagatcatcagcagcaaactggaagtccaagccttcgaacgcattgaagactacatcaaactcattggctttttcaagagtgaggactcagaatactacaaggcttttgaagaagcagctgaacacttccagccttacatcaaattctttgccacctttgacaaaggggttgcaaagaaattatctttgaagatgaatgaggttgacttctatgagccatttatggatgagcccattgccatccccaacaaaccttacacagaagaggagctggtggagtttgtgaaggaacaccaaagacccactctacgtcgcctgcgcccagaagaaatgtttgaaacatgggaagatgatttgaatgggatccacattgtggcctttgcagagaagagtgatccagatggctacgaattcctggagatcctgaaacaggttgcccgggacaatactgacaaccccgatctgagcatcctgtggatcgacccggacgactttcctctgctcgttgcctactgggagaagactttcaagattgacctattcaggccacagattggggtggtgaatgtcacagatgctgacagtgtctggatggagattccagatgatgacgatcttccaactgctgaggagctggaggactggattgaggatgtgctttctggaaagataaacactgaagatgatgatgaagatgatgatgatgatgataattctgatgaagaggataatgatgacagtgatgacgatgatgatgaatagcccaactccaaacaattctgatgaaaacaaaatcacagcacccactaccatacagacagcacaaggtggcagcaagcaattctgccccacacccagccagctcctttcccttttccatcatctcttttcccactccctttgcgtcaggagcagcatcattcagcaaatgccttttcaaatgcagcaatcccacttagcagggacaggagaaaaattattcccatgttgactgtcttgactgtcacggaacagatcttgttctttgctggaccatcaagggtcatggcagtgcctgaacatggcagtctagggtgaacaatcccctaacacaagtttacttgtctttgattatgacagtaacaaaattgacagctttctaactcacaggcatagagtgaccttttaatcagagcccagggaagacacatgattaatgatttagctccctccatacctcgaacatcagttgggatccctcctccagccaagatgatccttcttagagaaggctcagccttggaagcaaacttataaatcatattctcatggctttgttaaacttatttcaagtgatggtcattcatatcactatgaacttggatattcaagcctttggatggctatggagagggcttgaaatgtgtacaggtgtcaccatcatttctagtatattaggaaactgggatgggaggttgatttgctctctaaacttccctctagttggcaagtctcacatattcatcagcaggagtggagggtgggggaaaactagaaagatgaaaacttttacatttttctgatgggttcatgtctctgattgggtcagctggcttcctagcctaagctgggatctgaataccccttctctgtagctgctagtgagccttcccatttagattaaagattgctttatccagcagtcaattaactctccagttatcagtactcccacaattggccagggcaacaataattggagttcatactgatgccctgaggcactgaaaaaaaaaaaaatcccaaagtgccttctgagctgtctaaaagttacattgtgcttggtagatttagtgttaagtgtgcagtataattttctaatttattttctcaatcttttagcacatgtgtaagacactgtgcaaatttttggaaaatagagcaatactttttgtggaatactagctaactaattctgtcattaaactcatattttggaaat

SEQ ID NO: 587 - DNA, 2047 bp, Homo sapiens
gtcgcggctcgagagcgagagtcacgtcccggcgctagcccagcccgacccaggcccaccgtggtgcacgcaaaccacttcctggccatgcgctccctcctgcttctcagcgccttctgcctcctggaggcggccctggccgccgaggtgaagaaacctgcagccgcagcagctcctggcactgcggagaagttgagccccaaggcggccacgcttgccgagcgcagcgccggcctggccttcagcttgtaccaggccatggccaaggaccaggcagtggagaacatcctggtgtcacccgtggtggtggcctcgtcgctggggctcgtgtcgctgggcggcaaggcgaccacggcgtcgcaggccaaggcagtgctgagcgccgagcagctgcgcgacgaggaggtgcacgccggcctgggcgagctgctgcgctcactcagcaactccacggcgcgcaacgtgacctggaagctgggcagccgactgtacggacccagctcagtgagcttcgctgatgacttcgtgcgcagcagcaagcagcactacaactgcgagcactccaagatcaacttccgcgacaagcgcaggccgctgcagtccatcaacgagtgggccgcgcagaccaccgacggcaagctgcccgaggtcaccaaggacgtggagcgcacggacggcgccctgttagtcaacgccatgttcttcaagccacactgggatgagaaattccaccacaagatggtggacaaccgtggcttcatggtgactcggtcctataccgtgggtgtcatgatgatgcaccggacaggcctctacaactactacgacgacgagaaggaaaagctgcaaatcgtggagatgcccctggcccacaagctctccagcctcatcatcctcatgccccatcacgtggagcctctcgagcgccttgaaaagctgctaaccaaagagcagctgaagatctggatggggaagatgcagaagaaggctgttgccatctccttgcccaagggtgtggtggaggtgacccatgacctgcagaaacacctggctgggctgggcctgactgaggccattgacaagaacaaggccgacttgtcacgcatgtcaggcaagaaggacctgtacctggccagcgtgttccacgccaccgcctttgagttggacacagatggcaacccctttgaccaggacatctacgggcgcgaggagctgcgcagccccaagctgttctacgccgaccaccccttcatcttcctagtgcgggacacccaaagcggctccctgctattcattgggcgcctggtccggcctaagggtgacaagatgcgagacgagttatagggcctcagggtgcacacaggatggcaggaggcatccaaaggctcctgagacacatgggtgctattggggttgggggggaggtgaggtaccagccttggatactccatggggtgggggtggaaaagcagaccggggttcccgtgtgcctgagcggaccttcccagctagaattcactccacttggacatgggccccagataccatgatgctgagcccggaaactccacatcctgtgggacctgggccatagtcattctgcctgccctgaaagtcccagatcaagcctgcctcaatcagtattcatatttatagccaggtaccttctcacctgtgagaccaaattgagctaggggggtcagccagccctcttctgacactaaaacacctcagctgcctccccagctctatcccaacctctcccaactataaaactaggtgctgcagcccctgggaccaggcacccccagaatgacctggccgcagtgaggcggattgagaaggagctcccaggaggggcttctgggcagactctggtcaagaagcatcgtgtctggcgttgtggggatgaactttttgttttgtttcttccttttttagttcttcaaagatagggagggaagggggaacatgagcctttgttgctatcaatccaagaacttatttgtacattttttttttcaataaaacttttccaatgacattt

SEQ ID NO: 588 - DNA, 2762 bp, Homo sapiens
gtggggtcgtatcccgcgggtggaggccggggtggcgccggccggggcgggggagcccaaaagaccggctgccgcctgctccccggaaaagggcactcgtctccgtgggtgtggcggagcgcgcggtgcatggaatgggctatgtgaatgaaaaaaggtatccgttatgaaacttccagaaaaacgagctacatttttcagcagccgcagcacggtccttggcaaacaaggatgagaaaaatatccaaccacgggagcctgcgggtggcgaaggtggcataccccctggggctgtgtgtgggcgtgttcatctatgttgcctacatcaagtggcaccgggccaccgccacccaggccttcttcagcatcaccagggcagccccgggggcccggtggggtcagcaggcccacagccccctggggacagctgcagacgggcacgaggtcttctacgggatcatgtttgatgcaggaagcactggcacccgagtacacgtcttccagttcacccggccccccagagaaactcccacgttaacccacgaaaccttcaaagcagtgaagccaggtctttctgcctatgctgatgatgttgaaaagagcgctcagggaatccgggaactactggatgttgctaaacaggacattccgttcgacttctggaaggccacccctctggtcctcaaggccacagctggcttacgcctgttacctggagaaaaggcccagaagttactgcagaaggtgaaagaagtatttaaagcatcgcctttccttgtaggggatgactgtgtttccatcatgaacggaacagatgaaggcgtttcggcgtggatcaccatcaacttcctgacaggcagcttgaaaactccaggagggagcagcgtgggcatgctggacttgggcggaggatccactcagatcgccttcctgccacgcgtggagggcaccctgcaggcctccccacccggctacctgacggcactgcggatgtttaacaggacctacaagctctattcctacagctacctcgggctcgggctgatgtcggcacgcctggcgatcctgggcggcgtggaggggcagcctgctaaggatggaaaggagttggtcagcccttgcttgtctcccagtttcaaaggagagtgggaacacgcagaagtcacgtacagggtttcagggcagaaagcagcggcaagcctgcacgagctgtgtgctgccagagtgtcagaggtccttcaaaacagagtgcacaggacggaggaagtgaagcatgtggacttctatgctttctcctactattacgaccttgcagctggtgtgggcctcatagatgcggagaagggaggcagcctggtggtgggggacttcgagatcgcagccaagtacgtgtgtcggaccctggagacacagccgcagagcagccccttctcatgcatggacctcacctacgtcagcctgctactccaggagttcggctttcccaggagcaaagtgctgaagctcactcggaaaattgacaatgttgagaccagctgggctctgggggccatttttcattacatcgactccctgaacagacagaagagtccagcctcatagtggccgagccatccctgtccccgtcagcagtgtctgtgtgtctgcataaaccctcctgtcctggacgtgacttcatcctgaggagccacagcacaggccgtgctggcactttctgcacactggctctgggacttgcagaaggcctggtgctgccctggcatcagcctcttccagtcacatctggccagagggctgtctggacctgggccctgctcaatgccacctgtctgcctgggctccaagtgggcaggaccaggacagaaccacaggcacacactgagggggcagtgtggctccctgcctgtcccatccccatgccccgtccgcggggctgtggctgctgctgtgcatgtccctgcgatgggagtcttgtctcccagcctgtcagtttcctccccagggcagagctccccttcctgcaagagtctgggaggcggtgcaggctgtcctggctgctctggggaagccgagggacagccataacacccccgggacagtaggtctgggcggcaccactgggaactctggacttgagtgtgtttgctcttccttgggtatgaatgtgtgagttcacccagaggcctgctctcctcacacattgtgtggtttggggttaatgatggagggagacacctcttcatagacggcaggtgcccacctttcagggagtctcccagcatgggcggatgccgggcatgagctgctgtaaactatttgtggctgtgctgcttgagtgacgtctctgtcgtgtgggtgccaagtgcttgtgtagaaactgtgttctgagcccccttttctggacaccaactgtgtcctgtgaatgtatcgctactgtgagctgttcccgcctagccagggccatgtcttaggtgcagctgtgccacgggtcagctgagccacagtcccagaaccaagctctcggtgtctcgggccaccatccgcccacctcgggctgaccccacctcctccatggacagtgtgagccccgggccgtgcatcctgctcagtgtggcgtcagtgtcggggctgagccccttgagctgcttcagtgaatgtacagtgcccggcacgagctgaacctcatgtgttccactcccaataaaaggttgacaggggcttctccttcaaaaaaaaaaaaaaaaaaaaaaaaaaaaaaaaaa

SEQ ID NO: 589 - DNA, 1004 bp, Homo sapiens
gcctcgctcgggcgcccagtggtcctgccgcctggtctcacctcgccatggttcgtctgcctctgcagtgcgtcctctggggctgcttgctgaccgctgtccatccagaaccacccactgcatgcagagaaaaacagtacctaataaacagtcagtgctgttctttgtgccagccaggacagaaactggtgagtgactgcacagagttcactgaaacggaatgccttccttgcggtgaaagcgaattcctagacacctggaacagagagacacactgccaccagcacaaatactgcgaccccaacctagggcttcgggtccagcagaagggcacctcagaaacagacaccatctgcacctgtgaagaaggctggcactgtacgagtgaggcctgtgagagctgtgtcctgcaccgctcatgctcgcccggctttggggtcaagcagattgctacaggggtttctgataccatctgcgagccctgcccagtcggcttcttctccaatgtgtcatctgctttcgaaaaatgtcacccttggacaagctgtgagaccaaagacctggttgtgcaacaggcaggcacaaacaagactgatgttgtctgtggtccccaggatcggctgagagccctggtggtgatccccatcatcttcgggatcctgtttgccatcctcttggtgctggtctttatcaaaaaggtggccaagaagccaaccaataaggccccccaccccaagcaggaaccccaggagatcaattttcccgacgatcttcctggctccaacactgctgctccagtgcaggagactttacatggatgccaaccggtcacccaggaggatggcaaagagagtcgcatctcagtgcaggagagacagtgaggctgcacccacccaggagtgtggccacgtgggcaaacaggcagttggccagagagcctggtgctgctgctgcaggggtgcaggcagaagcggggagctatgcccagtcagtgccagcccctc

SEQ ID NO: 590 - DNA, 1722 bp, Homo sapiens
gcgggcggttcagccatgaggctggctgtgcttttctcgggggccctgctggggctactggcagcccaggggacagggaatgactgtcctcacaaaaaatcagctactttgctgccatccttcacggtgacacccacggttacagagagcactggaacaaccagccacaggactaccaagagccacaaaaccaccactcacaggacaaccaccacaggcaccaccagccacggacccacgactgccactcacaaccccaccaccaccagccatggaaacgtcacagttcatccaacaagcaatagcactgccaccagccagggaccctcaactgccactcacagtcctgccaccactagtcatggaaatgccacggttcatccaacaagcaacagcactgccaccagcccaggattcaccagttctgcccacccagaaccacctccaccctctccgagtcctagcccaacctccaaggagaccattggagactacacgtggaccaatggttcccagccctgtgtccacctccaagcccagattcagattcgagtcatgtacacaacccagggtggaggagaggcctggggcatctctgtactgaaccccaacaaaaccaaggtccagggaagctgtgagggtgcccatccccacctgcttctctcattcccctatggacacctcagctttggattcatgcaggacctccagcagaaggttgtctacctgagctacatggcggtggagtacaatgtgtccttcccccacgcagcaaagtggacattctcggctcagaatgcatcccttcgagatctccaagcacccctggggcagagcttcagttgcagcaactcgagcatcattctttcaccagctgtccacctcgacctgctctccctgaggctccaggctgctcagctgccccacacaggggtctttgggcaaagtttctcctgccccagtgaccggtccatcttgctgcctctcatcatcggcctgatccttcttggcctcctcgccctggtgcttattgctttctgcatcatccggagacgcccatccgcctaccaggccctctgagcatttgcttcaaaccccagggcactgagggggtttggggtgtggtgggggggtacccttatttcctcgacacgccgctggctcaaagacaatgttattttccttccctttcttgaagaacaaaaagaaagccgggcatgacggctcatgcctgtaatcccagcactttgggaggctgaggcaggtggatcactggaggtcaggtctttgaggccagccctagccaacatggtgtaaacactgtctctactaaaaatacaattagccaggtgtggcggcgtaatcccatgctaacctgtaatcccagctacttgggaggctgaggcagagctgcttgaaccctggaagtggaggttgcagtgagcctgtcatcgctccactgagccaagatcgctcccactgcactccagcctgggcgacagagccagactgtctcaaataaataaatatgagataatgcagtcgggagaagggagggagagaattttattaaatgtgacgaactgcccccccccccccccccagcaggagagcagcaaaatttatgtaaatctttgacggggttttccttgctcctgccaggattaaaagtccatgagtttcttgctcaaaaaaaaaaaaaaaaaaaaaaaaaaaaaaaaa

SEQ ID NO: 591 - DNA, 3840 bp, Homo sapiens
gggaagttggctggctggcgaggcagagcctctcctcaaagcctggctcccacggaaaatatgctcagtgcagccgcgtgcatgaatgaaaacgccgccgggcgcttctagtcggacaaaatgcagccgagaactccgctcgttctgtgcgttctcctgtcccaggtgctgctgctaacatctgcagaagatttggactgcactcctggatttcagcagaaagtgttccatatcaatcagccagctgaattcattgaggaccagtcaattctaaacttgaccttcagtgactgtaagggaaacgacaagctacgctatgaggtctcgagcccatacttcaaggtgaacagcgatggcggcttagttgctctgagaaacataactgcagtgggcaaaactctgttcgtccatgcacggaccccccatgcggaagatatggcagaactcgtgattgtcggggggaaagacatccagggctccttgcaggatatatttaaatttgcaagaacttctcctgtcccaagacaaaagaggtccattgtggtatctcccattttaattccagagaatcagagacagcctttcccaagagatgttggcaaggtagtcgatagtgacaggccagaaaggtccaagttccggctcactggaaagggagtggatcaagagcctaaaggaattttcagaatcaatgagaacacagggagcgtctccgtgacacggaccttggacagagaagtaatcgctgtttatcaactatttgtggagaccactgatgtcaatggcaaaactctcgaggggccggtgcctctggaagtcattgtgattgatcagaatgacaaccgaccgatctttcgggaaggcccctacatcggccacgtcatggaagggtcacccacaggcaccacagtgatgcggatgacagcctttgatgcagatgacccagccaccgataatgccctcctgcggtataatatccgtcagcagacgcctgacaagccatctcccaacatgttctacatcgatcctgagaaaggagacattgtcactgttgtgtcacctgcgctgctggaccgagagactctggaaaatcccaagtatgaactgatcatcgaggctcaagatatggctggactggatgttggattaacaggcacggccacagccacgatcatgatcgatgacaaaaatgatcactcaccaaaattcaccaagaaagagtttcaagccacagtcgaggaaggagctgtgggagttattgtcaatttgacagttgaagataaggatgaccccaccacaggtgcatggagggctgcctacaccatcatcaacggaaaccccgggcagagctttgaaatccacaccaaccctcaaaccaacgaagggatgctttctgttgtcaaaccattggactatgaaatttctgccttccacaccctgctgatcaaagtggaaaatgaagacccactcgtacccgacgtctcctacggccccagctccacagccaccgtccacatcactgtcctggatgtcaacgagggcccagtcttctacccagaccccatgatggtgaccaggcaggaggacctctctgtgggcagcgtgctgctgacagtgaatgccacggaccccgactccctgcagcatcaaaccatcaggtattctgtttacaaggacccagcaggttggctgaatattaaccccatcaatgggactgttgacaccacagctgtgctggaccgtgagtccccatttgtcgacaacagcgtgtacactgctctcttcctggcaattgacagtggcaaccctcccgctacgggcactgggactttgctgataaccctggaggacgtgaatgacaatgccccgttcatttaccccacagtagctgaagtctgtgatgatgccaaaaacctcagtgtagtcattttgggagcatcagataaggatcttcacccgaatacagatcctttcaaatttgaaatccacaaacaagctgttcctgataaagtctggaagatctccaagatcaacaatacacacgccctggtaagccttcttcaaaatctgaacaaagcaaactacaacctgcccatcatggtgacagattcagggaaaccacccatgacgaatatcacagatctcagggtacaagtgtgctcctgcaggaattccaaagtggactgcaacgcggcaggggccctgcgcttcagcctgccctcagtcctgctcctcagcctcttcagcttagcttgtctgtgagaactcctgacgtctgaagcttgactcccaagtttccatagcaacaggaaaaaaaaaaatctatccaatctgaagattgcggtttacagctatcgaacttcacaactaggcctcaattgttccggttttttattttctttacaatttcacttagtctgtacttcatcattttgacagcatcttcctccctcctttaattaatggaatcttctgaattttccctgaatgtttaaagatcatgacatatgacttgatcttctgggagcaggaacaatgactactttttctggtgtgttaacatgtcgctagccagtgctccaggcacccagctttgtctgtgggttagtattggtgtatgtatgagtatctgtatgtatatatacacggtatttatagagagagactatcctggagaagcctcgttttgatgccattcttccttgcaaggttaagcaaggtgggtggaaactaagacacctgaaccctccagggcctcccgcatcaaggtcagcatgaggacagaccacagagctgtcacttttgctccgaagctacttctccactgtcccgttcagtctgaatgctgccacaaccagccaggcaggtccacagagagggagagcagagaaagaagtcctttctctttattgagttcgaggactacaaccaatttacactgccatctgatgccgtgatcctgagccaaggaggtgaggagcagagcaggcaatttcaccaccaaatgccaagaaaagggctgacattttctttcatgggcaccaacctgcatttgtatgtgtcccgaatccacagtcgtactgattctaatggggacacagatcatggtagagaatctctccctcctcagtaaatgtacaactgcacctgtcatcatggaggtcatacatgcatacaaagaggtgtacaggtaccatcttgtatacacatatatacccacatgtacagacatacatttatgcacattcacgctgtttgtttcatatatacaggcataaaatagagtaaatacaggtagttttaaaagtacccttttgtgtgaattgactaccgttgtttgcaaacccgaaaataaaagacgttcattatgtatgaaaagtaactgatttgtattctgtgagcatgtaaaagcggaaagttagtgcttgttctaagattaccttcttgttgataaaccataaatgaatcatcaaagctcacaccaaatttttctatcaaataaaactagtgacagcttgtggctttttattagagctcgccacgaactagggtaaggtgagtgtcttagcatattttaatgcagttgcttactaaaggttttaaccgcacatgcacacacacacgctttcttatgcaatctatgtttgcacttgtgctttcagttagccttctgtaggaagtagaagtcatatgttgtctttgttgtagtgaaattatacagatagagttccatatattgtatttgtttcaatggtaaatccttttggaacatatagaatgcagagatttttttttccattaaaataaatgggtattggtggttaaaaaaaaaaaaaaaaa

SEQ ID NO: 592 - DNA, 2104 bp, Homo sapiens
ctctgccgagcctccttaaaactctgccgttaaaatgggggcgggtttttcaactcaaaaagcgctcaatttttttcttttcaaaaaaagctgatgaggtcggaaaaaagggagaagaaaccggcaccctctctgagaggcaacagaagcagcaattgtttcagcgaaaaaagcagcaagggagggagtgaaggaaaaaagcaaaaaagggggcgacacgcaagtgcctgtaggggtgaaaggagcagggaccggcgatctagggggggatcagctacaaaagaaactgtcactgggagcggtgcggccaaggaggaagcagtgctgccaggctctgctccagggcacagctggctggcggctgccctgtccgcagcaaaggggcacaggccggggaccgcgagaggtggcaaagtggcaccgggcgccgaggctgctgagcgctcgccgagacggcgaccggactggctgccccggaactgcggcgactctccctactcagaacttggcctacgtttcccaggactctccccatctccagaggcccccacaaaaccgggaaaggaaggaaaggacagcggcggcagcagctcaatgagtgcctacagcagaaagcctgaacgagctcggtcgtaggcgggaagttcccgggggggctgcccagtgcagccgcaatgctgccgcgagctgccccagcagtccgggctccgtagacgctttccgcatcactctccttcctcgggctgccgggagtcccgggacctggcggggccggcatgacgggcttctcgggggcccgccgcacgcccggcagcctccggagacgcgcgccgagcccggctcccacggcctctgaggctcggcggggctgcggctgcctggcgggcgggctccggagctttcctgagcggcattagcccacggcttggcccggacgcgaccaaaggctcttctggagaagcccagagcactgggcaatcgttacgacctgtaacttgagggccaccgaactgctactcccgttcgcctttggcgatcatcttttaaccctccggagcacgtcagcatccagccaccgcggcgctctcccagcagcggaggacccaggactatcccttcggcgagacggatggaaaccgagccccctggaggacctgcccctgcagttctgcctcacacggctcaagtcaccaccgtgaacaagggaccctaaagaatggccgagccttgggggaacgagttggcgtccgcagctgccaggggggacctagagcaacttactagtttgttgcaaaataatgtaaacgtcaatgcacaaaatggatttggaaggactgcgctgcaggttatgaaacttggaaatcccgagattgccaggagactgctacttagaggtgctaatcccgatttgaaagaccgaactggtttcgctgtcattcatgatgcggccagagcaggtttcctggacactttacagactttgctggagtttcaagctgatgttaacatcgaggataatgaagggaacctgcccttgcacttggctgccaaagaaggccacctccgggtggtggagttcctggtgaagcacacggccagcaatgtggggcatcggaaccataagggggacaccgcctgtgatttggccaggctctatgggaggaatgaggttgttagcctgatgcaggcaaacggggctgggggagccacaaatcttcaataaacgtggggagggctcccccacgttgcctctactttatcaattaactgagtagctctcctgacttttaatgtcatttgttaaaatacagttctgtcatatgttaagcagctaaattttctgaaactgcataagtgaaaatcttacaacaggcttatgaatatatttaagcaacatctttttaacctgcaaaatctgttctaacatgtaattgcagataactttgactttcttctgaatattttatctttccttggcttttcccttgcttccccttttgccaatctcaacacccaagttgaagactttgtttttaaaatggtttgtcctgatgcttttgtctaattaaaacactttcaaaacaggaaaaaaaaaaaaaaaaaa

SEQ ID NO: 593 - DNA, 1789 bp, Homo sapiens
tcgatgctccacgtaggagctggctcggctgccggctgcggtcagggccaccgtataaagagggcggcagacccgagcgcctaggactcgccgctgcccgcgccccgccgccgctgctgcccccagccccggccccaggcgtcccagccatggtccgcccaatgctcttgctcagcctcggcctcctggctggtctgctgccggcgctggccgcctgcccccagaactgccactgccacagcgacctgcagcacgtcatctgcgacaaggtggggctgcagaagatccccaaggtgtcagagaagaccaagctgctcaacctacagcgcaacaacttcccggtgctggctgccaattcgttccgggccatgccgaacctcgtgtcattgcacctgcagcactgccagatccgcgaggtggccgccggtgccttccgcggcctcaagcaacttatctacttgtacctgtcccataacgacatccgcgtcgtgcgtgccggtgccttcgacgacctgaccgagctgacctacctctacctggaccacaacaaggtcactgagctgccccgggggttgctctccccgctggtcaacctcttcatcttgcagctcaacaacaacaagatccgtgagctgcgcgcagggcccttccagggagccaaggacctgcgctggctctacctgtcggaaaacgcgttgagctccctgcagcccggggccctggacgacgtggagaacctcgccaaattccacgtggacaggaaccagctgtccagctacccctcagctgccctgagcaagctacgggtggtggaggagctgaagctgtcccacaaccccctgaaaagcatcccggacaatgccttccagtcctttggcagatacctggagaccctctggctggacaacaccaacctggagaagttctcagatggtgccttcctgggtgtaaccacgctgaaacacgtccatttggagaacaaccgcttgaaccagctaccctcgaacttccccttcgacagcctggagaccctcgcccttaccaataacccctggaagtgtacctgccagctccggggccttcggcggtggctggaagccaaggcctcccgcccagatgccacctgtgcctcacctgccaagttcaagggccagcacatccgtgacacggacgccttccgcagctgcaagttccccaccaagaggtccaagaaagctggccgccattaaacaggttctgacccagccagtcctggtgactggcctctgccttccaccggagagactactgaccttctcacctccgacccataccttctccccacagcctctgctgatgcacagagctgcctacacctagacacgtcctggcagggggcctcgggcactccactaccaacccagctccacccagcagtgtcctggggagaaggaaggctgagcctctccccagccttcatgccttccccaccctccagctcctcttggagaagctgttgctgagaccccccccccccccccaagtcaatcagaaccacaacaggttggtcatcaggatggccaccctcccaggatcatccttcctctgttctctttccctgccacgtggaaacaatcatcagatccttgccccaccccttgcttccagaaagggttttaaagcccatgccccaactctgccagcccccacctgccaggacgttctagcaggtcatcggtgctttgctgtccatcttcccatgctgcaatttcttcctgagatttctataaatataaatgtatgtatgtat

SEQ ID NO: 594 - DNA, 5947 bp, Homo sapiens
tctttagagcaaaaggtgaatcaaaggagagtcccagaaaacctgtgactgttgaagaaaattcatctgtgaatttttatattcaaggagtcagtatttatattcatcttttaaactgggaagatttatattttactttaaaacttcttgataataatttacaatgaatggacacagtgatgaagaaagtgttagaaacagtagtggagaatcaagccagtcggatgatgattctgggtcagcttcaggctctggatctggttcgagttctggaagcagtagtgatggaagcagtagccagtcaggtagcagtgactctgactccggatctgaatcaggcagtcagtcagagtctgagtcagacacttcccgagaaaacaaagttcaagcaaaaccaccgaaagttgatggagctgagttttggaaatctagtcctagtattctggccgttcagagatctgcaatcctcaagaagcagcaacagcagcagcagcaacaacaacatcaagcctcatctaatagcggatcagaagaggattcctctagcagtgaagattccgatgactcatcaagtgaggtcaaaaggaaaaagcataaagatgaagattggcaaatgtctgggtcaggatctccatctcagtctggttcagattcagaatctgaagaagagagagagaaaagcagttgtgatgaaacagaatctgattatgagccaaaaaacaaagtcaaaagcagaaaacctcaaaatagatctaagtcaaaaaatggaaagaagattcttggacaaaaaaagagacagattgattcatctgaggaggatgatgatgaagaagattatgataatgataaaagaagttctcgtcgccaagcaactgttaatgttagctataaggaggatgaagaaatgaaaacagattctgatgacctactggaagtctgtggagaggatgttcctcaacctgaggaagaggaatttgaaaccatagaaagatttatggattgtcggattgggagaaaaggagctactggtgctactacaaccatctatgcagttgaagcagatggtgacccaaatgcaggctttgaaaaaaacaaagaaccaggagagattcagtatttaattaaatggaaaggatggtcccatatccacaacacttgggagacagaagaaaccctcaagcagcagaatgttagaggaatgaaaaaattggataattataagaaaaaagatcaggaaacaaaaagatggttgaaaaatgcctctccagaagatgtggaatattataattgccagcaagaacttacagatgatctacataaacagtatcaaatagtgggacgtataattgctcattccaatcaaaagtcagcagctggttatcctgattattactgcaaatggcagggccttccatactcagagtgcagctgggaagatggagctctcatttccaaaaagtttcaagcatgcattgatgagtattttagcaggaaccaatcaaaaaccactccttttaaagattgcaaagtattaaaacaaaggccaaggtttgtagccctgaagaagcagccatcctatattggaggacatgagggcttagaattaagagattatcaactgaatggtttaaattggcttgctcattcttggtgcaaaggaaatagttgcatactcgctgatgaaatgggccttggaaaaacaatacagacgatctcatttctgaattatttgtttcatgaacatcaattatatggaccttttttattggtagtaccgctctccactcttacttcctggcaaagggaaattcagacttgggcttctcaaatgaatgctgtggtttatttaggtgacattaacagcagaaacatgataagaactcatgaatggacgcatcatcagaccaaacggttaaaatttaatatattgttaacaacttatgaaattttattaaaagataaggcattccttggaggtctaaattgggcatttataggtgttgatgaagcacaccgattaaagaatgatgactcccttctgtataaaactttaatagattttaaatccaatcatcgtctccttatcactggaactcctctacagaattccctcaaagagctctggtctttgctacatttcattatgccagaaaagttttcttcctgggaagattttgaagaagaacatggcaaagggagagaatatggttatgcaagccttcacaaggagcttgagccatttctgttacgccgagttaagaaagatgtggaaaaatctcttcctgccaaggttgagcagattttaagaatggaaatgagtgctttacagaaacaatattacaaatggattttaactaggaattacaaagccctcagcaaaggttccaagggcagtacctcaggctttttgaacattatgatggagctaaagaaatgttgtaaccattgctacctcattaaaccaccagataataatgaattctataataaacaggaggccttacaacacttaattcgtagtagcggaaaattgattcttcttgacaagctattaattcgcctaagagaacgaggcaatcgagttcttattttttcacaaatggtgcggatgttagatatacttgcagaatatttgaaatatcgtcaattcccctttcaaagattagatggatcaataaaaggagaactgaggaaacaagctctagatcattttaatgctgagggatcagaggatttttgctttttgctgtccacaagagctggaggtctagggattaatttagcctctgctgacactgttgttatatttgattccgattggaatccacagaatgatcttcaggcacaggctagagcccatcgaattggccaaaagaaacaggtgaatatttatcgtctagttacaaagggatcagttgaagaagatattcttgaaagggcgaaaaagaagatggttttagatcatcttgtaattcaaagaatggacacaactgggaagacagtactacatacaggttctgccccatcaagttctactcctttcaataaagaagagttatcagccattttaaagtttggtgctgaagaactttttaaggaacctgaaggagaagaacaagagccccaggaaatggatatagatgaaatcttgaagagagctgaaactcatgaaaatgaaccaggtcctttaactgtaggagatgaattgctttcccagttcaaggttgccaacttctcaaatatggatgaggatgacattgagttggaacctgaaagaaattcaaagaattgggaggaaattattccagaagatcaaagaagacgattagaagaagaagaaagacaaaaggaacttgaagaaatttatatgctcccaagaatgagaaattgtgcaaaacagattagtttcaatggaagtgaagggaggcgcagtagaagtaggagatactctggatctgatagtgattccatctcagaagggaaaaggccaaagaaacgtggaagaccacggactattcctcgggagaatattaaaggatttagtgatgcagaaattaggcggtttatcaagagctataagaaatttggtggtcctctggaaagattagatgcaattgctcgagatgctgagttagttgataagtcagaaacagaccttagacgactgggagaattggtacataatggttgcattaaagcattaaaggatagttcttcaggaacagaacgaacaggtggtagactcggaaaagtgaagggtccaacattccgaatatcaggagtacaggtgaatgccaaactagtcatctcccatgaagaagaattaatacctttgcacaaatccattccttctgatccagaagaaagaaagcagtatactatcccatgccacacaaaggcagctcattttgatatagactggggcaaagaagatgattccaatttgttaattggcatctatgaatatggatatggaagctgggaaatgattaaaatggatcctgacctcagtctaacacacaagattcttccagatgatcccgataaaaaaccacaagcaaaacagttgcagacccgtgcagactacctcatcaaattacttagtagagatcttgcaaaaaaagaagctctttctggtgcgggaagttcaaagaggagaaaagcaagagctaagaagaataaagcaatgaagtctataaaagtgaaagaggaaataaagagtgattcttctcctctgccttcagagaagtctgatgaagatgatgataaattgagtgaatccaagtctgatggtagggaaagatccaagaaatcttcagtgtcagatgctccagttcatatcacggcaagtggtgaaccagttcccatttctgaagaatctgaagagctggatcagaagacattcagcatttgtaaagaaagaatgaggcctgttaaagcagctttgaaacaacttgataggcctgagaaaggcctttcagaaagagaacaactagaacatactagacaatgtttaataaaaattggagaccatatcacagaatgtctaaaagagtatacaaatcctgaacaaattaagcaatggagaaaaaacctgtggatttttgtatctaagtttactgaatttgatgcaagaaaattacataaattatataagcatgctattaaaaaacggcaggagtctcagcaaaacagtgatcaaaacagcaacttgaatcctcacgtgattagaaatccagatgtggaaagattaaaagagaatacaaatcacgatgatagcagcagggacagttattcctctgatagacacttaactcagtaccatgatcatcataaagaccgacatcagggagattcttacaaaaaaagtgattccaggaaaagaccctattcttcttttagtaatggtaaagaccatcgtgattgggatcactacaagcaagacagcagatattacagtgacagagagaaacacagaaaactggatgatcacaggagtagagatcacaggtcaaatttggaaggaagtttaaaagatagatctcattctgatcatcgttctcactcagatcatcggttacattcagaccaccggtcaagttctgaatatacgcaccataaatcttccagggattataggtatcactcagactggcaaatggaccacagagcttccagcagtggccctaggtcaccactagatcagagatcttatggctccagatctccatttgaacattcagttgaacacaaaagtacaccggagcatacctggagtagtcggaaaacataacaaaaactgatacttcgtctttctggacttttcttttagccatatatcataaaccaacacagtaattgccttacatgacttgaaagatataaacagatcttctatcagtagcagtattgttacttctttccaggatgcaaggtctattatcccaacagaagagaaaatatttttatatttaaggattatgctgcactgtactacaaaattgtagtacttttttttgttttcttttttaaagaaatggaaaatgtttactattacagggacctcaacactgccctcccatacaggctggataaaactgtttttaagtcagtgattttagactgacctccatttaaattatgtttatatatgaactttactctgacctgtgatcatgtttcaggaaggaatgaaagagagttctttcttaataaagaaaaacactcaaggactttgttcatttccaaagctacttgtttacattgtacactgcgaccaccttgccgcttttcatcacaagcttgaatatttaaattctgtacttatatctgtaaaatagccaggaatttcctgtttgtgatctattatgcctttttacaaaaaaaatggctgtaaattattgtaaatattaaaggaactttccttacaaaaaaaaaaaaaaaaaaa

SEQ ID NO: 595 - DNA, 1925 bp, Homo sapiens
agtggagtgggacaggtatataaaggaagtacagggcctggggaagaggccctgtctaggtagctggcaccaggagccgtgggcaagggaagaggccacaccctgccctgctctgctgcagccagaatgggtgtgaaggcgtctcaaacaggctttgtggtcctggtgctgctccagtgctgctctgcatacaaactggtctgctactacaccagctggtcccagtaccgggaaggcgatgggagctgcttcccagatgcccttgaccgcttcctctgtacccacatcatctacagctttgccaatataagcaacgatcacatcgacacctgggagtggaatgatgtgacgctctacggcatgctcaacacactcaagaacaggaaccccaacctgaagactctcttgtctgtcggaggatggaactttgggtctcaaagattttccaagatagcctccaacacccagagtcgccggactttcatcaagtcagtaccgccattcctgcgcacccatggctttgatgggctggaccttgcctggctctaccctggacggagagacaaacagcattttaccaccctaatcaaggaaatgaaggccgaatttataaaggaagcccagccagggaaaaagcagctcctgctcagcgcagcactgtctgcggggaaggtcaccattgacagcagctatgacattgccaagatatcccaacacctggatttcattagcatcatgacctacgattttcatggagcctggcgtgggaccacaggccatcacagtcccctgttccgaggtcaggaggatgcaagtcctgacagattcagcaacactgactatgctgtggggtacatgttgaggctgggggctcctgccagtaagctggtgatgggcatccccaccttcgggaggagcttcactctggcttcttctgagactggtgttggagccccaatctcaggaccgggaattccaggccggttcaccaaggaggcagggacccttgcctactatgagatctgtgacttcctccgcggagccacagtccatagaaccctcggccagcaggtcccctatgccaccaagggcaaccagtgggtaggatacgacgaccaggaaagcgtcaaaagcaaggtgcagtacctgaaggataggcagctggcaggcgccatggtatgggccctggacctggatgacttccagggctccttctgcggccaggatctgcgcttccctctcaccaatgccatcaaggatgcactcgctgcaacgtagccctctgttctgcacacagcacgggggccaaggatgccccgtccccctctggctccagctggccgggagcctgatcacctgccctgctgagtcccaggctgagcctcagtctccctcccttggggcctatgcagaggtccacaacacacagatttgagctcagccctggtgggcagagaggtagggatggggctgtggggatagtgaggcatcgcaatgtaagactcgggattagtacacacttgttgatgattaatggaaatgtttacagatccccaagcctggcaagggaatttcttcaactccctgccccctagccctccttatcaaaggacaccattttggcaagctctatcaccaaggagccaaacatcctacaagacacagtgaccatactaattataccccctgcaaagccagcttgaaaccttcacttaggaacgtaatcgtgtcccctatcctacttccccttcctaattccacagctgctcaataaagtacaagagtttaacagtgtgttggcgctttgctttggtctatctttgagcgcccactagacccactggactcacctcccccatctcttctgggttccttcctctgagccttgggacccctgagcttgcagagatgaaggccgccatgtt

SEQ ID NO: 596 - DNA, 1322 bp, Homo sapiens
tagcttggcacgaggctcgggtcgttgtggtgcgctgtcttcccgcttgcgtcagggacctgcccgactcagtggccgccatggcatcagatgaaggcaaactttttgttggagggctgagttttgacaccaatgagcagtcgctggagcaggtcttctcaaagtacggacagatctctgaagtggtggttgtgaaagacagggagacccagagatctcggggatttgggtttgtcacctttgagaacattgacgacgctaaggatgccatgatggccatgaatgggaagtctgtagatggacggcagatccgagtagaccaggcaggcaagtcgtcagacaaccgatcccgtgggtaccgtggtggctctgccgggggccggggcttcttccgtgggggccgaggacggggccgtgggttctctagaggaggaggggaccgaggctatggggggaaccggttcgagtccaggagtgggggctacggaggctccagagactactatagcagccggagtcagagtggtggctacagtgaccggagctcgggcgggtcctacagagacagttacgacagttacgctacacacaacgagtaaaaacccttcctgctcaagatcgtccttccaatggctgtgtgtttaaagattgtgggagcttcgctgaacgttaatgtgtagtaaatgcacctccttgtattcccactttcgtagtcatttcggttctgatcttgtcaaacccagcctgaccgcttctgacgccgggatggcctcgttactagacttttctttttaaggaagtgctgtttttttttgagggttttcaaaacattttgaaaagcatttacttttttgaccacgagccatgagttttcaaaaaaatcgggggttgtgtgggtttttggtttttgttttagtttttggttgcgttgccttttttttttagtggggttggccccatgaagtgggtgccccactcacttctctgagatcgaacggactgtgaatccgctctttgtcggaagctgagcaagctgtggcttttttccaactccgtgtgacgtttctgagtgtagtgtggtaggacccggcgggtgtgcagcaactgccctggagccccagcccctgcgtccatctgtgctgtgcgccccacagtagacgtgcagacgtccctgagaggttcttgaagatgtttatttatattgtccttttttactggaagacgtacgcatactccatcgatgttgtatttgcagtggctgaggaattcttgtacgcagttttctttggctttacgagccgattaaaagaccgtgtgaaatg

SEQ ID NO: 597 - DNA, 1271 bp, Homo sapiens
gatcgcaggcgagattacgaggcgaggctcgcgcgcccgcccccgccctggcccccagtgcccacccggtccgcccggcacagccatgatcaaggcgatcctaatcttcaacaaccacgggaagccgcggctctccaagttctaccagccctacagtgaagatacacaacagcaaatcatcagggagactttccatttggtatctaagagagatgaaaatgtttgtaatttcctagaaggaggattattaattggaggatctgacaacaaactgatttatagacattatgcaacgttatattttgtcttctgtgtggattcttcagaaagtgaacttggcattttagatctaattcaagtatttgtggaaacattagacaaatgttttgaaaatgtctgtgagctggatttgattttccatgtagacaaggttcacaatattcttgcagaaatggtgatggggggaatggtattggagacaaatatgaatgagattgttacacaaattgatgcacaaaataagctggaaaaatctgaggctggcttagcaggagctccagcccgtgctgtatcagctgtaaagaatatgaatcttcctgagatcccaagaaatattaacattggtgacatcagtataaaagtgccaaacctgccctcttttaaataaaaatgtaaaaaggccactcccaggtaaaatccagggggaagagtcatctaagtttaccatgcagttgtttaccaaaaatagaggaggagagtcttaacttttgctcttggatttaagtcaaggtactgtatagaagttgtgtaaaatcagtatgaaagttcaatgttgctgttcttgctcagtgattttaaagaaattgagtagttcctatgtgatttttttttttcttttctaaactgcattcctgtgcccacctacggcatgcctctatgtattggctactacagtgttttaaaaagtgtttcagatatttctctaattatgtacaacctaaaatgttggtgttttgtatggatcacaagtgcagcattccttaattccttctgctatatgtcacacagttgttatttggagaaccaagtatgtattgcatgaaaacattatgacttttttctcttagtttaaataaactccaaggtaactggacttctaaagcacctttctgtttgcctgatatctactttagcaataattttttttacaaccctctgactcaacaaagtaaataaaagtatattttatcactaaaaaaaaaaaaaaaaaa

SEQ ID NO: 598 - DNA, 1225 bp, Homo sapiens
gcggctctctgatccagcccgggagaggaccgagctggaggagctgggtgtggggtgcgttgggctggtggggaggcctagtttgggtgcaagtaggtctgattgagcttgtgttgtgctgaagggacagccctgggtctaggggagagagtccctgagtgtgagacccgccttccccggtcccagcccctcccagttcccccagggacggccacttcctggtccccgacgcaaccatggctgaagaacaaccgcaggtcgaattgttcgtgaaggctggcagtgatggggccaagattgggaactgcccattctcccagagactgttcatggtactgtggctcaagggagtcaccttcaatgttaccaccgttgacaccaaaaggcggaccgagacagtgcagaagctgtgcccaggggggcagctcccattcctgctgtatggcactgaagtgcacacagacaccaacaagattgaggaatttctggaggcagtgctgtgccctcccaggtaccccaagctggcagctctgaaccctgagtccaacacagctgggctggacatatttgccaaattttctgcctacatcaagaattcaaacccagcactcaatgacaatctggagaagggactcctgaaagccctgaaggttttagacaattacttaacatcccccctcccagaagaagtggatgaaaccagtgctgaagatgaaggtgtctctcagaggaagtttttggatggcaacgagctcaccctggctgactgcaacctgttgccaaagttacacatagtacaggtggtgtgtaagaagtaccggggattcaccatccccgaggccttccggggagtgcatcggtacttgagcaatgcctacgcccgggaagaattcgcttccacctgtccagatgatgaggagatcgagctcgcctatgagcaagtggcaaaggccctcaaataagcccctcctgggactccctcaaccccctccattttctccacaaaggccctggtggtttccacattgctacccaatggacacactccaaaatggccagtgggcagggaatcctggagcacttgttccgggatggtgtggtggaagaggggatgagggaaagaaatggggggcctgggtcagatttttattgtggggtggggtgagtaggacaacatatttcagtaataaaatacagaataaaaatcaagtgtttttaaaaaaaa

SEQ ID NO: 599 - DNA, 5781 bp, Homo sapiens
cggcgctgctggaagatggcgagcggccgggacgagcggccgcattgcgtagggcggctcctgttgctcatgtgcctgctgctgctggggagctcggcccgggcggctcacatcaagaaggcggaggcgactaccacaactacgagcgcgggcgcgaggggccgagggcagttcgaccgctactaccacgaagaggagttggagtcggcgctgagggaggcggcggccgcgggcctccccggcctggcccgcctctttagcatcggccgctcggtggaaggccggccgctgtgggtgcttcgcctcaccgccggcctggggtcgctaatccctgagggcgacgcggggcctgacgctgccgggcccgacgctgcggggccgctgctgcccggccggccccaggtgaagctggtgggcaacatgcatggcgacgagaccgtgtcgcgccaggtgttgatctacttggcccgcgagctggcggcgctaccgcccggggacccgcgcctggtccgcctgctcaacaccaccgacgtgtacctgctgcccagcctcaaccccgatggcttcgagcgtgcccgcgagggcgactgtggcttcggcgacggcggcccgtccggggccagcggccgcgacaatagtcgcggccgcgacctcaaccgaagctttcccgaccagtttagcaccggcgaaccccccgccctggacgaggtgcccgaggtgcgcgccctcatcgagtggatccgcaggaacaagtttgtgctttctggaaatctgcatggtggctcagtggtagcaagctatccttttgatgattctccagaacataaggccactggaatctatagcaaaacctcagatgatgaagtatttaaatacttggcaaaagcttatgcttcaaaccaccccataatgaaaactggtgagcctcattgtccaggagatgaagacgagactttcaaagatggaatcacaaacggcgcacattggtatgatgtggaaggtggtatgcaagattacaattatgtgtgggccaactgttttgagatcacattagaactgtcttgttgcaagtacccacctgcttcacagcttcgacaggaatgggagaacaatcgtgagtctttgatcacattgattgaaaaggttcacattggagtgaaaggatttgttaaagattccataacaggatctgggttagagaatgcaaccatctcagtggctggtattaatcataatatcacaacaggcagatttggtgatttctaccgattacttgttcctggaacttacaaccttacagtagttttaactgggtatatgccattgactgttactaatgtagtggtgaaagaaggaccagccacagaggtggatttttctcttaggccaactgtaacttcagtaatccctgacacgacagaggctgtatcaactgctagcacagttgctatacctaatattctttctggaacatcatcctcctgccagccaattcagccaaaggactttcaccaccaccatttccctgatatggaaatcttcttgagaaggtttgccaatgaatatcctaacattacccggctttattccttgggaaaatcagtagagtcaagagaactttatgtgatggagatatctgataatccgggtgtccatgaaccaggtgaaccagaatttaagtacattggaaatatgcatggaaatgaagtggttggaagagaactgctgttgaacctcatagaatacctttgtaagaactttggaacagaccctgaagtcacagatttggttcataacactagaattcaccttatgccatccatgaatcctgatgggtatgaaaagtcccaggaaggagattcaataagtgtaattggcagaaacaacagcaacaactttgacctgaaccgaaatttcccagaccagtttgttcagatcacagatcctacgcaaccagaaactattgctgtaatgagctggatgaagtcctatccatttgtactttcagcaaacctgcatggaggttctttggtggttaactacccttttgatgatgatgaacaaggacttgccacatatagtaaatcaccagatgatgctgtgttccaacaaatagcactttcttattccaaggaaaattcccagatgtttcaaggtagaccttgcaagaatatgtatcctaatgaatattttcctcatggaataacaaatggagctagttggtataatgtgccaggaggaatgcaggactggaactatttacaaacaaattgctttgaagtgactattgaactaggttgtgtgaaatatccacttgagaaagagctgccaaacttttgggaacagaatcgaagatcactaatccagtttatgaaacaggttcatcagggcgtcagaggatttgttctagatgccacagatggcaggggtatattaaatgccaccattagtgttgctgagattaatcacccagtgactacttacaaaactggagattactggcgtctcttggttccaggaacttataaaatcacagcatctgctcgagggtataatccagttaccaagaatgtgactgtcaagagtgaaggcgctattcaggtcaacttcacacttgttcgatcctcaacagattcaaacaatgaatcaaagaaaggaaaaggggctagcagcagcaccaatgatgccagtgatccaactactaaagagtttgaaactttaattaaagacctttcagcggagaatggtttggaaagcctcatgttacgctcctcctcaaatctggctctggctctttatcgataccattcctacaaagacttatcagagtttctgagaggacttgtaatgaactatccacatattacaaatcttaccaatttgggacagagcactgaatatcgtcacatttggtcccttgaaatctccaataagcccaatgtatctgagcctgaagaaccaaagattcgttttgttgctggtatccatggaaatgcgccagttggaactgaactgcttttggctctggcagaatttctctgcctgaactacaaaaagaacccagctgttacccaattggttgacaggactaggattgtgattgtcccttctctaaatccagatgggcgagagagagctcaagagaaagactgtacttcaaaaataggacaaacaaatgctcgtggcaaagatttggatacagacttcacaaataatgcctcccaacctgagaccaaagccatcattgaaaatttgattcaaaaacagaactttagtctttctgttgccttagatggtggttccatgctggtcacatatccatatgacaagccagtacagacagtggaaaataaagagactctgaagcatttggcatctctttatgcaaataatcatccatccatgcacatgggtcagcccagttgcccaaataaatcagatgagaatattccaggaggagtaatgcgtggagcagaatggcatagtcacctgggcagcatgaaggattatagtgtcacctatggccattgtccggaaatcacagtatacacaagctgctgttactttcctagtgctgcacgactcccttccttgtgggcagacaataagagatctcttcttagtatgttagtggaggttcacaagggagttcatggatttgttaaagataagactggaaagccaatctctaaagcagtcattgtacttaatgaaggaataaaggtacaaacaaaagagggaggttatttccatgtactcttagcgccaggtgtccataacattattgccatcgctgatgggtaccagcaacaacattcacaggtctttgtgcatcatgatgcagctagttctgtggtgatagtctttgacacagataaccggatatttggtttgccaagggagcttgtggtaactgtatcaggtgctactatgtcggcattgatcctaacagcttgcattatttggtgcatctgctcaatcaagtctaatagacacaaggatggctttcatcggctcaggcagcatcatgatgagtatgaagatgaaattcgcatgatgtctaccggctccaagaagtccctcctaagccatgagttccaggatgaaacagacactgaagaggaaacattatattctagcaaacattgaaaaacacattttgcatatctcccagcataagtaccaagcaaaattacagttcctcttgggagaacactgcattaagaagagagactctcttgcttcttcaaagagctttgggaaattaaattgctaaatttgtattctctgtgaatttcactggcagttttgaacttcccttccttaaagtactctaaacctttaaaaaaaaatctgatttatgcagcagagatgggacagccactttttctttttaatttaagatgagctatttggagcttatgtaataatggcataaagccaactagaggatgttgtattttgcacatcagatgtttactagtggctttagtatttttctttgttttaaatggccaaaagaatccagaaacattaaggcagggacagcagtcagaatcgacataaagctttaaaaactcaaggttttttcaacctactgaggagtacttttctctagttgttaaatagctggagtttttcttattcaggtttaatggaggttgaattgatttttaaacacatataacagtaggaaatgaataaatgggcttctgcatttggctttctacctgttccaaggctagatcggaactggtagactacgctgtaagcaggatttcactacctctcttaaggtttagcaaacttctaaatagcccattttaagggagaacttactaactttattgtgaaaggtctaaatgcccacttgaatgaagctgagagagagatctagcaaaagctaaaactcatgttgtctatctttgaacttggtaaaaacccacaggtgctgctgcttatatctgtgaagcactagcttattctaggaatgcctgattctttaatattgcctaaatcggaacctttttctatgttgcacacatggttttcagatgacccagccatctacaagatctgaattctactgaaaatatctagaaatgtggaagagacctacttgcacattcttaacctgtatttgaacacaaaatatctatacttcatgctccagcccaagcctataccctgtaatagcatactattattgaaatcgcttgaccggtcttgttcacataggcctctgggagtgatttggttctttgccctaatgtttcatttgacggtctctttttgatcaaccaatttttctaaaagttcagtcgaaagcttttaagtatagcttcctcccttgaaaaaaaatgtaaactatgactgctgagtgataaaacactgtggtgtgaaagtgtcatcttcactgccaatcaggcaaagaccggaaagatttgcattttattatgtctgtcttatcatgcaatggaaatgatgctttttgtaagtatgcatcttaccaatgatgtaacggtttaatacctttgaatgttttaataaccaagttgctgctgaacttatactaaatcaggggaccaaaaaacttgctcttatcttctcaaattgtattctatatccattaatgtatcagttatcccaaagccttcaggtggaggggtttaccaccttcctaggtcgttcaaccaggttttgtgaggaatgcattcaaagtggctttataaaagaagattttctttagcaagaaaaaaaaaaaaaaaaaaaaaaaaaaaa

SEQ ID NO: 600 - DNA, 1702 bp, Homo sapiens
tgaaagggagtgagggaggagagatgagtggctattccagaacgacataaagaatttccagccttggacggacagctgggaacgtcttccaatttggactggtgtttacaagcgggaagctaggtggaccttggattttggcgggtgaagaggctaggttgtttaaggaggtggggcgcgtttcagtggctctctttgaaaaagcccagcaagatgtcagacctgctctcagtcttcctccacctcctccttctcttcaagttggttgccccggtgacctttcgccaccaccgctatgatgatcttgtgcggacgctgtacaaggtgcaaaacgaatgccccggcatcacgcgggtctacagcattgggcgcagcgtggaggggagacacctctacgtgctggagttcagcgaccaccctggaatccacgagcccttggaaccagaggtcaagtatgtggggaacatgcacggcaacgaagcgttgggccgcgagctgatgctgcagctgtcggagtttctgtgcgaggagttccggaacaggaaccagcgcatcgtccagctcatccaggacacgcgcattcacatcctgccatccatgaaccccgacggctacgaggtggctgctgcccagggcccaaacaagcctgggtatctagttggcaggaacaatgcaaatggagtggacctgaaccgcaacttccctgatctcaatacctatatctactataacgagaagtacggaggccccaaccaccacctgccccttccagacaactggaaaagtcaggtggaacccgagacccgggcggtgatccggtggatgcactccttcaactttgttctttcagccaatctccacggaggggcggtggtggccaattacccgtatgacaagtcctttgagcaccgggtccgaggggtccgccgcaccgccagcacccccacgcctgacgacaagctcttccagaagctggccaaggtctactcctatgcacatggatggatgttccaaggttggaactgcggagattacttcccagatggcatcaccaatggggcttcctggtattctctcagcaagggaatgcaagactttaattatctccataccaactgctttgagatcacgctggaactgagttgcgacaagtttccccccgaagaggagttacagcgggagtggctgggtaatcgggaagccctaatccagttcctggaacaggttcaccagggcatcaagggaatggtgcttgatgagaattacaataatctcgccaatgctgtcatttctgtcagtgggattaaccatgatgtcacttcaggtgaccatggtgattacttccggctgctgcttccaggtatctacactgttagtgccacagcacctgggtatgacccagagacagtaactgtgaccgtgggtcctgcggaaccaacgttggttaacttccacctcaaaagaagcatccctcaagtaagccctgtgaggagagctcccagcagaaggcacggagtcagagccaaagtgcagccccaagccagaaagaaagaaatggagatgaggcagctgcagagaggccctgcctgaaacccacagtgccaggcaacccttcagaaaggctttgctcctgctctcagatcagatcaagcattctttctattttattatctgggacatatttaaatacaaacatattcag

SEQ ID NO: 601 - DNA, 3748 bp, Homo sapiens
cgtctgtaaacacccagagactgtcatggagggggaggaggaggcggcggcggcgaagggaggcgtttggggccgcctccagggtccgctctgccattcctgaactggtccctcgtccccgtgactctggcatcagggaagcgaactgttaggcgagaggaggaggcagccagaaccatatccccttcttcctcggggcgggggccgggccaggccggctgagccgggggagggctccgggagggagtgcctggccaggccggcctgtctgccgcgatggatgacagtaaggtggttggaggcaaagtaaagaagcccggtaaacgtggtcggaagccagccaaaattgacttgaaagcaaaacttgagaggagccggcagagtgcaagagaatgccgagcccgaaaaaagctgagatatcagtatttggaagagttggtatccagtcgagaaagagctatatgtgccctcagagaggaactggaaatgtacaagcagtggtgcatggcaatggaccaaggaaaaatcccttctgaaataaaggccctactcactggagaagagcagaacaaatctcagcagaactcaagcaggcataccaaggctgggaagacagatgctaatagcaattcctggtgaagattatataaagatgagtcagtgattgaagccaatattctgattcccatggaagatggatgggcaagagtgtacttcttggctccatttactacctactgctcagtagtcatctctgtaaatctgcaatttctaccaaaatgtgtgatcgtagatctcaaaggatcttgctttaactttcaacacttagaaaatctacaaacattcagacctgtctgggttggtattgccacccatgacatttaacatgttgtgatgcttgaaaacacaggagtagagaaaatcgatgaagattgtatttttgcaccttaactccacattgctttattggttaatttatattctttccatgtaattcatgtaattgtatgtctgtgtgtgttttatgtgtcaccacctttcatgtttttgattgccctacaaagagaaaccaaatgagctgattactgactataagttctcagcctttatggacctaatcttatttttatttacttgagtaatgtttattctctgcatgaaccatgatttctcctgtgagccattccagcataagctgtgaatatgtattaacaaatatatacatttctatttttataatccataaggatatgcctgttttaaataacatacatattaacaatatctatcaggaaaaccctcaagacagcttctagttaaaacctttgttgctgtcctctcaaactatatttataaaaatttgctagggccaaatccatacttgcagaataattcatcaaattttatttttaagtgaaaagtaacctttcaggcatttcagcagcatacattgacaatctagggtatatatgtatgtatgtttcttattgtatgtctatatatgtatgtggggaggacaggagtgaatgttcacacacttttcttgcgtactcaactaaattggagaatgtttctgaagaaaattggatgaaattagctgctgagattgagtttctgccttaaaatctgaaacaaaaaaagggacaaattgctggtagatctactgactgtagccatcaccagaacacttagtttcttcccagacatgaatttcctgacaggctctgagccagaaacacactgtgggcgtgcatctggttcagccctggatatgcctccactgtggagggaagcattggaactggagttgtgcacagcaccgcagctagtgggcctggctgggggtgcagaagggcagggtagttctttccatttccccttgcagctacacttactttctccctgactaccaaatggagtgacggttgaagaatcaagctcataatatgatacacccagacagacccagaaatcttttgatttccccagcgagatacttaccactctctcttctctttcccatggttaaaacaggagttgtgttctctgtcgctgctaaattattcttcacttgagtgaagcaaatatttagcttccaaataaagtatattttgttctgaactggcagtttaagaggagataccgtagtctagattgtctttgaggtagaatatatgatggaccacatagtttaagattacaaggtactttccctcttctctcaggccatgcatttgaataaagtgcctcccttagcctgagctcctaaagacctcttgtacttggttgcaaactcagatctctagtctagtctagtctagtctagtctagtcatgtgtgactgtgtactgagataccactagcccagtttgctgggtctctatgttttggaagttgggggtttaataatatttaatgtctttttaggatcataaacataaataggtttgttgatattcaggccttcagaatttaagggttttaaatatagcattcagattgtaattggtatgtttttgccatctggtccactcaattgtatatttttattttgcaaaacaacccaaaacttactttaygttgctttgttcagtaccttttgaattcccccagaagagttgttttcaaaacaaacattccagaatgaatgtcgctcttcaatggaacgtctttattgtgcttgaagtatttcttctctggttgtaattctaaattacagagtcatttgagctttctcccctcccgctagtatctttacaggagcagggaagagcagtagaggatgtataattttgggcgaagttaaattacaatttatttgaggttattcctaaacctatttatttggtgttttggaggagatcacacactaagagaacgttgattgcctcggctattgtgctggctggacactttggtcacttttgaagcatgttaataaatgtcactgattaaaacagctggagcatttccttccctttccagtgaaggagcagcatagtgaaatcctggcacccctcacctttttgtgatgacaagatggctgacagtcacggagtccaggagaaggtgctgctctccttgctttctgagtaaacagagtaatgttttttttcttattttcccaaagaaagaaaagggggaaaatatatttgtatgtttagaccagccaaattctgtcattattttagtatcaacctgctgtatattagagcaactgaatataatatggaataagtttgaccaggtcaagttttaggatatagttgaatttctttaaaaagttttctattttatctaaaatctttctattatatctaaattagaatgatcatcctgcgcaaattcagattactgtttgctggctaattgacagtatttctcagcatcactatgtagcattctgttttagcatctttgaattatgatcatttgatttggctaattacaaaaagtacaggtttaaactggacttaccttgagttaaaggcaaagaaaatctaaaaacataaatgttatatttcacaagaaatcagttgcatattatccattacatatttagttttaaaaggaggagtcaccttgaattattttctgagtcaccttgagttatttgatctctcagcctgctttctcatctgtaaaaaaggggggaggataactttcacagggtaattggtaggctaaataggagttacagaaaactgttaaatagggaagaactacattaaatttaaatattcacatt

SEQ ID NO: 602 - DNA, 438 bp, Homo sapiens
ggcacgagggcccgtgccgccccagccgctgccgcctgcaccggacccggagccgccatgcccaagtgtcccaagtgcaacaaggaggtgtacttcgccgagagggtgacctctctgggcaaggactggcatcggccctgcctgaagtgcgagaaatgtgggaagacgctgacctctgggggccacgctgagcacgaaggcaaaccctactgcaaccacccctgctacgcagccatgtttgggcctaaaggctttgggcggggcggagccgagagccacactttcaagtaaaccaggtggtggagaccccatccttggctgcttgcagggccactgtccaggcaaatgccaggccttgtccccagatgcccagggctcccttgttgcccctaatgctctcagtaaacctgaacacttggaaaaaaaaaaaaaaaaaaa

SEQ ID NO: 603 - DNA, 1160 bp, Homo sapiens
gcgcgggccgaccgggcgcaccgaccatggcctccaaatgccccaagtgcgacaagaccgtgtacttcgccgagaaggtgagctccctggggaaggactggcacaagttctgcctcaagtgcgagcgctgcagcaagacgctgacgcccgggggccacgccgagcatgacgggaagccgttctgccacaagccgtgctacgccaccctgttcggacccaaaggcgtgaacatcgggggcgcgggctcctacatctacgagaagcccctggcggaggggccgcaggtcaccggccccatcgaggtccccgcggcccgagcagaggagcggaaggcgagcggccccccgaaggggcccagcagagcctccagtgtcaccactttcaccggggagcccaacacgtgcccgcgctgcagcaagaaggtgtacttcgctgagaaggtgacgtctctgggcaaggattggcaccggccctgcctgcgctgcgagcgctgcgggaagacactgacccccggcgggcacgcggagcacgacggccagccctactgccacaagccctgctatggaatcctcttcggacccaagggagtgaacaccggtgcggtgggcagctacatctatgaccgggaccccgaaggcaaggtccagccctaggctacagcggctctcatgatgtgggctcacctgcgccccagaccctgcaggggcccccctgcttggctctgctgggagagtgctcagccgcccagtcctgcctgcaagcccagggcgagtattggaggaggggcagccacgggcagagcaccatgcccatccccgagtctctggtgtgtctgccccctctggcatcctctgggcgtcccatgatcccttctgtgtctgcgtgtccgaatccccgtgtgaccctgtcccagcattttcccgccgaccctgcgtgtccccgtggcgctgtccgctctccctctcctgctgcccacccacctgccagtgttatttatgctcccttcgtgggtgatggccacgccctcaccatgtccctggcagagggcttcctccgggatcccctgcctggtgcccacactgcctcgcaagcgctcgccaccctcacgtggctcacctgctgttgagccttgtgctgtcaataaacggtttgaggattgc

SEQ ID NO: 604 - DNA, 648 bp, Homo sapiens
atgagcagctcagaggaggtgtcctggatttcctggttctgtgggctccgtggcaatgaattcttctgtgaagtggatgaagactacatccaggacaaatttaatcttactggactcaatgagcaggtccctcactaccgacaagctctagacatgatcttggacctggagcctgatgaagaactggaagacaaccccaaccagagtgacctgattgagcaggcagccgagatgctttatggattgatccacgcccgctacatccttaccaaccgtggcatcgcccagatgttggaaaagtaccagcaaggagactttggttactgtcctcgtgtgtactgtgagaaccagccaatgcttcccattggcctttcagacatcccaggtgaagccatggtgaagctctactgccccaagtgcatggatgtgtacacacccaagtcatcaagacaccatcacacggatggcgcctacttcggcactggtttccctcacatgctcttcatggtgcatcccgagtaccggcccaagagacctgccaaccagtttgtgcccaggctctacggtttcaagatccatgcgatggcctaccagctgcagctccaagccgccagcaacttcaagagcccagtcaagacgattcgctga

SEQ ID NO: 605 - DNA, 627 bp, Homo sapiens
gcggccgcaagctcggcactcacggctctgagggctccgacggcactgacggccatggcgcgttcgaacctcccgctggcgctgggcctggccctggtcgcattctgcctcctggcgctgccacgcgacgcccgggcccggccgcaggagcgcatggtcggagaactccgggacctgtcgcccgacgacccgcaggtgcagaaggcggcgcaggcggccgtggccagctacaacatgggcagcaacagcatctactacttccgagacacgcacatcatcaaggcgcagagccagctggtggccggcatcaagtacttcctgacgatggagatggggagcacagactgccgcaagaccagggtcactggagaccacgtcgacctcaccacttgccccctggcagcaggggcgcagcaggagaagctgcgctgtgactttgaggtccttgtggttccctggcagaactcctctcagctcctaaagcacaactgtgtgcagatgtgataagtccccgagggcgaaggccattgggtttggggccatggtggagggcacttcaggtccgtgggccgtatctgtcacaataaatggccagtgctgcttcttgcaaaaaaaaaaaaaaaaaaa

SEQ ID NO: 606 - DNA, 2109 bp, Homo sapiens
cgcgcagcgcgccggagtggtcggggcccgcggccgctcgcgcctctcgatgggcagctcgcacttgctcaacaagggcctgccgcttggcgtccgacctccgatcatgaacgggcccctgcacccgcggcccctggtggcattgctggatggccgggactgcacagtggagatgcccatcctgaaggacgtggccactgtggccttctgcgacgcgcagtccacgcaggagatccatgagaaggtcctgaacgaggctgtgggggccctgatgtaccacaccatcactctcaccagggaggacctggagaagttcaaagccctccgcatcatcgtccggattggcagtggttttgacaacatcgacatcaagtcggccggggatttaggcattgccgtctgcaacgtgcccgcggcgtctgtggaggagacggccgactcgacgctgtgccacatcctgaacctgtaccggcgggccacctggctgcaccaggcgctgcgggagggcacacgagtccagagcgtcgagcagatccgcgaggtggcgtccggcgctgccaggatccgcggggagaccttgggcatcatcggacttggtcgcgtggggcaggcagtggcgctgcgggccaaggccttcggcttcaacgtgctcttctacgacccttacttgtcggatggcgtggagcgggcgctggggctgcagcgtgtcagcaccctgcaggacctgctcttccacagcgactgcgtgaccctgcactgcggcctcaacgagcacaaccaccacctcatcaacgacttcaccgtcaagcagatgagacaaggggccttcctggtgaacacagcccggggtggcctggtggatgagaaggcgctggcccaggccctgaaggagggccggatccgcggcgcggccctggatgtgcacgagtcggaacccttcagctttagccagggccctctgaaggatgcacccaacctcatctgcaccccccatgctgcatggtacagcgagcaggcatccatcgagatgcgagaggaggcggcacgggagatccgcagagccatcacaggccggatcccagacagcctgaagaactgtgtcaacaaggaccatctgacagccgccacccactgggccagcatggaccccgccgtcgtgcaccctgagctcaatggggctgcctataggtaccctccgggcgtggtgggcgtggcccccactggcatcccagctgctgtggaaggtatcgtccccagcgccatgtccctgtcccacggcctgccccctgtggcccacccgccccacgccccttctcctggccaaaccgtcaagcccgaggcggatagagaccacgccagtgaccagttgtagcccgggaggagctctccagcctcggcgcctggggcagcgggcccggaaaccctcgaccagagtgtgtgagagcatgtgtgtggtggcccctggcactgcagagactggtccgggctgtcaggagggcgggagggcgcagcgctgggcctcgtgtcgcttgtcgtccgtcctgtgggcgctctgccctgtgtccttcgcgttcctcgttaagcagaagaagtcagtagttattctcccatgaacgttcttgtctgtgtacagtttttagaacattacaaaggatctgtttgcttagctgtcaacaaaaagaaaacctgaaggagcatttggaagtcaatttgaggtttttttttttggtttttttttttttgtattttggaacgtgccccagaatgaggcagttggcaaacttctcaggacaatgaatcttcccgtttttctttttatgccacacagtgcattgttttttctacctgcttgtcttatttttagcataatttagaaaaacaaaacaaaggctgtttttcctaattttggcatgaacccccccttgttccaaaatgaagacggcatcatcacgaagcagctccaaaaggaaaagcttggcaggtgccctcgtcctggggacgtggagggtggcacggtccccgcctgcaccagtgccgtcctgctgatgtggtaggctagcaatattttggttaaaatcatgtttgtggccgaacgggcccctgcacccg

SEQ ID NO: 607 - DNA, 1342 bp, Homo sapiens
cggctgtaatctcagaggcttgtttgctgagggtgcctgcgcacgtgcgacggctgctggttttgaaacatgaatctttcgctcgtcctggctgccttttgcttgggaatagcctccgctgttccaaaatttgaccaaaatttggatacaaagtggtaccagtggaaggcaacacacagaagattatatggcgcgaatgaagaaggatggaggagagcagtgtgggaaaagaatatgaaaatgattgaactgcacaatggggaatacagccaagggaaacatggcttcacaatggccatgaatgcttttcctgacatgaccaatgaagaattcaggcagatgatgggttgctttcgaaaccagaaattcaggaaggggaaagtgttccgtgagcctctgtttcttgatcttcccaaatctgtggattggagaaagaaaggctacgtgacgccagtgaagaatcagaaacagtgtggttcttgttgggcttttagtgcgactggtgctcttgaaggacagatgttccggaaaactgggaaacttgtctcactgagcgagcagaatctggtggactgttcgcgtcctcaaggcaatcagggctgcaatggtggcttcatggctagggccttccagtatgtcaaggagaacggaggcctggactctgaggaatcctatccatatgtagcagtggatgaaatctgtaagtacagacctgagaattctgttgctaatgacactggcttcacagtggtcgcacctggaaaggagaaggccctgatgaaagcagtcgcaactgtggggcccatctccgttgctatggatgcaggccattcgtccttccagttctacaaatcaggcatttattttgaaccagactgcagcagcaaaaacctggatcatggtgttctggtggttggctacggctttgaaggagcaaattcgaataacagcaagtattggctcgtcaaaaacagctggggtccagaatggggctcgaatggctatgtaaaaatagccaaagacaagaacaaccactgtggaatcgccacagcagccagctaccccaatgtgtgagctgatggatggtgaggaggaaggacttaaggacagcatgtctggggaaattttatcttgaaactgaccaaacgcttattgtgtaagataaaccagttgaatcattgaggatccaagttgagattttaattctgtgacatttttacaagggtaaaatgttaccactactttaattattgttatacacagctttatgatatcaaagactcattgcttaattctaagacttttgaattttcattttttaaaaagatgtacaaaacagttt

SEQ ID NO: 608 - DNA, 1647 bp, Homo sapiens
gaattccggaaaacaggccgcgcgggcggcagaggagccgggcgccgcaatggacgtgcgggcgctgccgtggctgccgtggctgctgtggctgctgtgccggggcggcggcgatgcggactcccgcgcccccttcaccccgacctggccgcggagccgcgagcgtgaagccgccgccttccgggaaagtcttaatagacatcgatacttgaattctttatttcccagtgaaaactccaccgccttctatggaataaatcagttttcctatttgtttcctgaagagtttaaagccatttatttaagaagcaaaccttccaagtttcccagatactcagcagaagtacatatgtccatccccaatgtgtctttgccgttaagatttgactggagggacaagcaggttgtgacacaagtgagaaaccagcagatgtgtggaggatgctgggccttcagcgtggtgggggcagtggaatctgcttatgcaataaaggggaagcccctggaagacctaagtgtccagcaggtcattgactgttcgtataataattatggctgcaatggaggctctactctcaatgctttgaactggttaaacaagatgcaagtaaaactggtgaaagattcagaatatccttttaaagcacaaaatggtctgtgccattacttttctggttcacattctggattttcaatcaaaggttattctgcatatgacttcagtgaccaagaagatgaaatggcaaaagcacttcttacctttggccctttggtagtcatagtagatgcagtgagctggcaagattatctgggaggcattatacagcatcactgctctagtggagaagcaaatcatgcagttctcataactgggtttgataaaacaggaagcactccatattggattgtgcggaattcctggggaagttcttggggagtagatggttatgcccatgtcaaaatgggaagtaatgtttgtggtattgcagattccgtttcttctatatttgtgtgacatgttgggcagatcaagagacagctacaaaaatgaaggttttcataatgcaatgtaacatagtacttcaaagtattattcaacttcaagtttcagcaactacctacaaaagattctaaggcctagtagtatttaaactaagtttcagaatgttcccttcttgtagagagatggacaaccaaagtcagtgggacaaactccagcacagaagcctgcgaggaagcctatggaatagtttcctgtcctgagacgaaattcagattaggagatattttaggcccctgcaactggggaaggctactgtttgtttttgtttgcttattatttatttgtttgtttattgtgagatatttcaggtgggatcaaagaggtcataagaatttattttcttttgtggggtgtaactactagctttagattacccctatacacaagaatggccaacctaaaattatgtgtgtcttgtacagttagttatattagcagccctctgagatggcgtatctatcggaaggatttcaaacaccaattgctttacctgaacaaatggtgcttaccctttgaacagcagagtgaccacgtagaaggaaggaaaagggcaaaatcgcttcagttaaactgaaaccgaattc

SEQ ID NO: 609 - DNA, 1131 bp, Homo sapiens
atggcactgactgcccacccctcctgcctcctggccctgttggtggcaggcctagcccaaggcatcagaggcccccttagggcccaggacctaggtccccagccgctagagctgaaagaggccttcaagttgttccagatccagttcaaccggagttacctgagcccagaagagcatgctcaccgcctggacatctttgcccacaacctggcccaggctcagaggctgcaggaggaggacttgggcacagctgagtttggggtgactccattcagtgacctcacagaggaggagtttggccagctctatggctatcggagggcagctggaggggtccccagcatgggcagagaaataaggtctgaagagccagaggagtcagtacctttcagctgtgactggcggaaggtggccggcgccatctcacccatcaaggaccagaaaaactgcaactgctgctgggccatggcagcggcaggcaacatagagaccctgtggcgcatcagtttctgggattttgtggacgtctccgtgcatgaactgctggactgtggccgctgtggggatggctgccacggtggcttcgtctgggacgcgttcataactgtcctcaacaacagcggcctggccagtgaaaaggactacccgttccagggcaaagtcagagcccacaggtgccaccccaagaagtaccagaaggtggcctggatccaggacttcatcatgctgcagaacaacgagcacagaattgcgcagtacctggccacttatggccccatcaccgtgaccatcaacatgaagccccttcagctataccggaaaggtgtgatcaaggccacacccaccacctgtgacccccagcttgtggaccactctgtcctgctggtgggttttggcagcgtcaagtcagaggaggggatatgggcagagacagtctcatcgcagtctcagcctcagcctccacaccccaccccatactggatcctgaagaactcctggggggcccaatggggagagaagggctatttccggctgcaccgagggagcaatacctgtggcatcaccaagttcccgctcactgcccgtgtgcagaaaccggatatgaagccccgagtctcctgccctccctga

SEQ ID NO: 610 - DNA, 1541 bp, Homo sapiens
aaatggtgaaagggggggaggggagaaaagaaaaaaaaaaaaagaaaggggaaaggggggaaaaataagaaaaagcgagacagaggcgctgccgcgtccgctcgcggggaaggctggggtcggccgggtgctaggccggggccgaggccgaggccggggcgggatccagagcgggagccggcgcgggatctgggactcggagcgggatccggagcgggacccaggagccggcgcggggccatggcgaggcgcgggccagggtggcggccgcttctgctgctcgtgctgctggcgggcgcggcgcagggcggcctctacttccgccggggacagacctgctaccggcctctgcggggggacgggctggctccgctggggcgcacgacatacccccggcctcatgagtacctgtccccagcggatctgcccaagagctgggactggcgcaatgtggatggtgtcaactatgccagcatcacccggaaccagcacatcccccaatactgcggctcctgctgggcccacgccagcaccagcgctatggcggatcggatcaacatcaagaggaagggagcgtggccctccaccctcctgtccgtgcagaacgtcatcgactgcggtaacgctggctcctgtgaagggggtaatgacctgtccgtgtgggactacgcccaccagcacggcatccctgacgagacctgcaacaactaccaggccaaggaccaggagtgtgacaagtttaaccaatgtgggacatgcaatgaattcaaagagtgccacgccatccggaactacaccctctggagggtgggagactacggctccctctctgggagggagaagatgatggcagaaatctacgcaaatggtcccatcagctgtggaataatggcaacagaaagactggctaactacaccggaggcatctatgccgaataccaggacaccacatatataaaccatgtcgtttccgtggctgggtggggcatcagtgatgggactgagtactggattgtccggaattcatggggtgaaccatggggcgagagaggctggctgaggatcgtgaccagcacctataaggatgggaagggcgccagatacaaccttgccatcgaggagcactgtacatttggggaccccatcgtttaaggccatgtcactagaagcgcagtttaagaaaaggcatggtgacccatgaccagaggggatcctatggttatgtgtgccaggctggctggcaggaactggggtggctatcaatattggatggcgaggacagcgtggtactggctgcgagtgttcctgagagttgaaagtgggatgacttatgacacttgcacagcatgctctgcctcacaatgatgcagtcagccacctggtgaagaagtgacctgcaacacaggaaacgatgggacctcagtcttcttcagcagaggacttgatattttgtatttggcaactgtgggcaataatatggcatttaagaggtgaaagagttcagacttatcaccattcttatgtcactttagaatcaaggg

SEQ ID NO: 611 - DNA, 3268 bp, Homo sapiens
gccggggaagtcatgctcgcttcacggaggcaatagctagccggtgtctgtgggaggttatgtttatttgagacttctccatcgggatcgcctggtgtcaccaagtgtccactggtactgaggtttgctgcctgccttcttgccatgtctaacgaagtagaaacaagtgcaaccaatggtcagcccgaccaacaggccgcaccaaaagcaccctcaaagaaggaaaaaaagaaaggccctgaaaagacagatgaatatctcctagcaaggttcaaaggcgatggcgtaaaatataaggccaagctgattggcattgatgatgtgccagatgcaagaggggataaaatgagccaagactctatgatgaaactaaagggaatggcggcacgtggtcggtctcagggacaacacaaacaaaggatctgggtcaacatttccctttctgggataaaaataattgatgagaaaactggggtaatagagcatgaacatccagtaaataagatttctttcattgcccgtgatgtgacagacaaccgggcatttggttacgtgtgtggaggagaaggccagcatcagttttttaccataaaaaccgggcaacaggctgaaccattagttgttgatcttaaagacctttttcaagttatctataatgtaaagaaaaaggaagaagaaaagaaaaagatagaggaagccagcaaagcagttgagaatgggagtgaggccctaaggattctagatgaccaaactaacaaactgaaatcgggtgttgaccagatggatttgtttggggacatgtctacacctcctgacctaaatagtccaacagaaagcaaagatatcctgttagtggatctaaactctgaaatcgacaccaatcagaattctttaagagaaaatccattcttaacaaacggcatcacctcctgttctcttcctcgaccaacgcctcaggcatccttcttgcctgaaaatgccttttctgccaatctcaacttctttcccacccctaatcctgatcctttccgtgacgatcctttcacacagccagaccaatcgacaccttcttcgtttgattctctcaaatctccagatcagaagaaagagaattcgagtagctcgtctactccgctgagtaatgggcccctgaatggtgatgttgactactttggtcagcaatttgaccagatctctaaccggactggcaaacaggaagctcaggcaggcccatggcccttttcaagttcgcaaacccagccagcagtgagaactcaaaatggggtatctgaaagagaacagaacggcttctctgtcaaatcctccccgaacccttttgtgggaagccctcccaaaggactgtccatacagaatggcgtaaagcaggacttggaaagctctgtccagtcctcaccacatgactccatagccattatcccacctccacaaagtaccaaaccaggaagaggcagaaggactgctaagtcttcagccaatgacttgcttgcatcagacatctttgctcctcccgtctcagaaccttcaggccaggcgtcacccacaggacaacctacagccctgcagcccaaccctctggatctcttcaaaacaagtgctcctgccccagtggggcccctggtgggtctaggtggtgtaactgtcacactccctcaggcaggaccatggaacacagcatctttggtcttcaatcagtccccttcaatggctccgggagccatgatgggtggtcaaccttcaggttttagtcagcccgtcatttttggtacaagtccagctgtttcaggttggaaccagccttcaccctttgcagcctcaactccccctccagtgcctgttgtctggggcccttctgcatctgtggcacccaatgcttggtcaacaacaagccctttggggaatccttttcagagcaatatttttccagctcctgctgtgtccactcagcccccatccatgcactcctctctcctggtcactcctcctcagccacctcccagagctggccctcccaaggacatctccagtgatgccttcactgccttagacccacttggggataaagagatcaaggatgtgaaagaaatgtttaaggatttccaactgcggcagccacctgctgtgcccgcgcggaagggagagcagacttcttctgggactttgagtgcctttgccagttatttcaacagcaaggttggcattcctcaggagaatgcagaccatgatgactttgatgctaatcaactattgaacaagatcaatgaaccaccaaagccagctcccagacaagtttccctgccagttaccaaatctactgacaatgcatttgagaaccctttctttaaagattcttttggttcatcacaagcctctgtggcttcttctcaacctgtatcttctgagatgtatagggatccatttggaaatccttttgcctaaattctgaacttggtctgcagaccatccagaggaataaaaaggttggccttagtagtcaaaaacaaagctgatagccagacacgttctgatttctgcccttgttccagctttgacgtattatctgttgccttatttctcattgcctcttctacttgtaaaatgcttttcactttctgtctaggttaaagctaaactgaatctatggctttaaataaattaagatcctaaactctctagcttaagtgtaaatgaagtacagtagtttccctactgaaccctacctcttgtgtccctggaaccttctagaacacctgccttctaccctctggttgggagatgcagccaccacatcccttcatatcatactgttttgaataaattttcaaatccttattgttcagagttgtttgggggttctgtttcagagcataaaacctaaaggttatagtagaacaaggcaccttcttaaaagaaatcttgcttcagaccatcagttacagagaatttcctaaagtaaaattgaagcaactacaacttctccttagacactttggaatctaaccacttaaggacctttttaaagagatagcttctcttctttctgaagatcaatttctcccaaggccaagattgtccttttctcccatttcttgctagctattgcaaatgagggaagaacattattcatctctcctccccttttttttctgattcttttttcagtcagttttgctcctgggttcaagtagtattaccaccctttcacaagcaacagactctcacagggcaaaaaaaaaaaaaaaaaaaaaaa

SEQ ID NO: 612 - DNA, 2271 bp, Homo sapiens
tggccggaattccggggagggagaagcccctttggcctgccttacggaagcctgcgagggagggtggtgtccactgcccagttccgtgtcccgatgcccagcgccacgcagcgcaagagtcaggagaagccgcgggagatcatggacgcggcggaagattatgctaaagagagatatggaatatcttcaatgatacaatcacaagaaaaaccagatcgagttttggttcgggttagagacttgacaatacaaaaagctgatgaagttgtttgggtacgtgcaagagttcatacaagcagagctaaagggaaacagtgcttcttagtcctacgtcagcagcagtttaatgtccaggctcttgtggcggtgggagaccatgcaagcaagcagatggttaaatttgctgccaacatcaacaaagagagcattgtggatgtagaaggtgttgtgagaaaagtgaatcagaaaattggaagctgtacacagcaagacgttgagttacatgttcagaagatttatgtgatcagtttggctgaaccccgtctgcccctgcagctggatgatgctgttcggcctgagcaagaaggagaagaggaaggaagagctactgttaaccaggatacaagattagacaacagagtcattgatcttaggacatcaactagtcaggcagtcttccgtctccagtctggcatctgccatctcttccgagaaactttaattaacaaaggttttgtggaaatccaaactcctaaaattatttcagctgccagtgaaggaggagccaatgtttttactgtgtcatattttaaaaataatgcatacctggctcagtccccacagctatataagcaaatgtgcatttgtgctgattttgagaaggttttctctattggaccagtattcagagcggaagactctaatacccatagacatctaactgagtttgttggtttggacattgaaatggcttttaattaccattaccacgaagttatggaagaaattgctgacaccatggtacaaatattcaaaggacttcaagaaaggtttcagactgaaattcaaacagtgaataaacagttcccatgtgagccattcaaatttttggagccaactctaagactagaatattgtgaagcattggctatgcttagggaagctggagtcgaaatgggagatgaagacgatctgagcacaccaaatgaaaagctgttgggtcatttggtaaaggaaaagtatgatacagatttttatattcttgataaatatccattggctgtaagacctttctataccatgcctgacccaagaaatcccaaacagtccaagtcttacgatatgttcatgagaggagaagaaatattgtcaggagctcaaagaatacatgatcctcaactgctaacagagagagctttacatcatggaaatgatttggagaaaattaaggcttacattgattccttccgctttggagcccctcctcatgctggtggaggcattggattggaacgagttactatgctgtttctgggattgcataatgttcgtcagacctccatgttccctcgtgatcccaaacgactcactccttaaattcacactttgccacttaactccagtgtggatgacagagcgagaccctgcctcaaaaaaaaaaaaaaaaaaaaaaaaaaaaaaaaaaaaaaaaaaaaaaaaaaaaaaaaaaaaaagaaagccacacttattcttttcagtaacctgctagtgcacaggctgtactttaggtacttaaaatatgcactagaataaatttgcaaggccctaaaatatcactgttatttttggagtaattcagtataggttcgtttaaaagagatttttataacttcagacatgcatcagtaggaaataacttgagaaattcatatggttatgttacaaattcatattctgttactacagtaaacgttaagagttttaaacagttaagattgtacaatttttcttcttttctatattacaagggccccagtgttaatgtcttagattttcagtatttgaacttatttttttaaattctgtcattgagataagaataattcaggtagcatctgaaattttaatgaatgtataattggcatatcatggaaaattaaccagaaagtatcagttcttaaaagttatgcctagaaattatgtaaagctaaactactggttagaaagtattcagtgtaatattgtattaatttgttaaattctaaacttgaatttcaataaaattttaaagct

SEQ ID NO: 613 - DNA, 1331 bp, Homo sapiens
cccacgcgtccgcccacgcgtccgcagaaatggattcgaaatatcagtgtgtgaagctgaatgatggtcacttcatgcctgtcctgggatttggcacctatgcgcctgcagaggttcctaaaagtaaagctttagaggccaccaaattggcaattgaagctggcttccgccatattgattctgctcatttatacaataatgaggagcaggttggactggccatccgaagcaagattgcagatggcagtgtgaagagagaagacatattctacacttcaaagctttggtgcaattcccatcgaccagagttggtccgaccagccttggaaaggtcactgaaaaatcttcaattggattatgttgacctctaccttattcattttccagtgtctgtaaagccaggtgaggaagtgatcccaaaagatgaaaatggaaaaatactatttgacacagtggatctctgtgccacgtgggaggccgtggagaagtgtaaagatgcaggattggccaagtccatcggggtgtccaacttcaaccgcaggcagctggagatgatcctcaacaagccagggctcaagtacaagcctgtctgcaaccaggtggaatgtcatccttacttcaaccagagaaaactgctggatttctgcaagtcaaaagacattgttctggttgcctatagtgctctgggatcccaccgagaagaaccatgggtggacccgaactccccggtgctcttggaggacccagtcctttgtgccttggcaaaaaagcacaagcgaaccccagccctgattgccctgcgctaccagctacagcgtggggttgtggtcctggccaagagctacaatgagcagcgcatcagacagaacgtgcaggtgtttgaattccagttgacttcagaggagatgaaagccatagatggcctaaacagaaatgtgcgatatttgacccttgatatttttgctggcccccctaattatccattttctgatgaatattaacatggagggcattgcatgaggtctgccagaaggccctgcgtgtggatggtgacacagaggatggctctatgctggtgactggacacatcgcctctggttaaatctctcctgcttggtgatttcagcaagctacagcaaagcccattggccagaaaggaaagacaataattttgttttttcattttgaaaaaattaaatgctctctcctaaaaaaaaaaaaaaaaaaaaaaaaaaaaaaaaaaaaaaaaaaaaaaaaaaaaaaaaaaaaaaaaaaaaaaaaaaaaaaaaaaaaaaaaaaaaaaaaaaaaaaaaaaaaaaaaaaaaaaaaaa

SEQ ID NO: 614 - DNA, 5322 bp, Homo sapiens
ctttccccttactccgctcccctcttttccctccctctcctccccttccctctgttctctcctcctcttcccctcccctcccccgtccggggcactctatattcaagccaccgtttcctgcttcacaaaatggccaccgcacgcgacacctacggtcacgtggcctgccgccctctcagtttcgggaatctgcctagctcccactaaggggaggctacccgcggaagagcgagggcagattagaccggagaaatcccaccacatctccaagcccgggaactgagagaggaagaagagtgaaggccagtgttaggaaaaaaaaaaacaaaaacaaaaaaaacgaaaaacgaaagctgagtgcatagagttggaaaggggagcgaatgcgtaaggttggaaaggggggcgaagaggcctaggttaacattttcaggcgtcttagccggtggaaagcgggagacgcaagttctcgcgagatctcgagaactccgaggctgagactagggttttagcggagagcacgggaagtgtagctcgagagaactgggacagcatttcgcaccctaagctccaaggcaggactgctaggggcgacaggactaagtaggaaatcccttgagcttagacctgagggagcgcgcagtagccgggcagaagtcgccgcgacagggaattgcggtgtgagagggagggcacacgttgtacgtgctgacgtagccggctttccagcgggtatattagatccgtggccgcgcggtgcgctccagagccgcagttctcccgtgagagggccttcgcggtggaacaaacactcgcttagcagcggaagactccgagttctcggtactcttcagggatgagtcatgtggcagtggaaaatgcgctcgggctggaccagcagtttgctggcctagacctgaactcttcagataatcagagtggaggaagtacagccagcaaagggcgctatattcctcctcatttaaggaaccgagaagctactagaggtttctacgataaagacagttcagggtggagttctagcaaagataaggatgcgtatagcagttttggatctcgtagtgattcaagagggaagtctagcttcttcagtgatcgtggaagtggatcaaggggaaggtttgatgatcgtggacggagtgattacgatggcattggcagccgtggtgacagaagtggctttggcaaatttgaacgtggtggaaacagtcgctggtgtgacaaatcagatgaagatgattggtcaaaaccactcccaccaagtgaacgcttggaacaggaactcttttctggaggcaacactgggattaattttgagaaatacgatgacattccagttgaggcaacaggcaacaactgtcctccacatattgaaagtttcagtgatgttgagatgggagaaattatcatgggaaacattgagcttactcgttatactcgcccaactccagtgcaaaagcatgctattcctattatcaaagagaaaagagacttgatggcttgtgcccaaacagggtctggaaaaactgcagcatttctgttgcccatcttgagtcagatttattcagatggtccaggcgaggctttgagggccatgaaggaaaatggaaggtatgggcgccgcaaacaatacccaatctccttggtattagcaccaacgagagagttggcagtacagatctacgaagaagccagaaaattttcataccgatctagagttcgtccttgcgtggtttatggtggtgccgatattggtcagcagattcgagacttggaacgtggatgccatttgttagtagccactccaggacgtctagtggatatgatggaaagaggaaagattggattagacttttgcaaatacttggtgttagatgaagctgatcggatgttggatatggggtttgagcctcagattcgtagaatagtcgaacaagatactatgcctccaaagggtgtccgccacactatgatgtttagtgctacttttcctaaggaaatacagatgctggctcgtgatttcttagatgaatatatcttcttggctgtaggaagagttggctctacctctgaaaacatcacacagaaagtagtttgggtggaagaatcagacaaacggtcatttctgcttgacctcctaaatgcaacaggcaaggattcactgaccttagtgtttgtggagaccaaaaagggtgcagattctctggaggatttcttataccatgaaggatacgcatgtaccagcatccatggagaccgttctcagagggatagagaagaggcccttcaccagttccgctcaggaaaaagcccaattttagtggctacagcagtagcagcaagaggactggacatttcaaatgtgaaacatgttatcaattttgacttgccaagtgatattgaagaatatgtacatcgtattggtcgtacgggacgtgtaggaaaccttggcctggcaacctcattctttaacgagaggaacataaatattactaaggatttgttggatcttcttgttgaagctaaacaagaagtgccgtcttggttagaaaacatggcttatgaacaccactacaagggtagcagtcgtggacgttctaagagtagcagatttagtggagggtttggtgccagagactaccgacaaagtagcggtgccagcagttccagcttcagcagcagccgcgcaagcagcagccgcagtggcggaggtggccacggtagcagcagaggatttggtggaggtggctatggaggcttttacaacagtgatggatatggaggaaattataactcccagggggttgactggtggggtaactgagcctgctttgcagtaggtcaccctgccaaacaagctaatatggaaaccacatgtaacttagccagactataccttgtgtagtttcaagaactcgcagtacattaccagctgtgattctccactgaaattttttttttaagggagctcaaggtcacaagaagaaatgaaaggaacaatcagcagccctgttcagaaggtggtttgaagacttcattgctgtagtttggattaactcccctcccgcctacccccatcccaaactgcatttataattttgtgactgaggatcatttgtttgttaatgtactgtgcctttaactatagacaactttttattttgatgtcctgttggctcagtaatgctcaagatatcaattgttttgacaaaataaatttactgaacttgggctaaaatcaaaccttggcacacaggtgtgatacaacttaacaggaatcatcgattcatccataaataatataaggaaaaacttatgcggtagcctgcattagggctttttgatacttgcagattgggggaaaacaacaaatgtcttgaagcatattaatggaattagtttctaatgtggcaaactgtattaagttaaagttctgatttgctcactctatcctggataggtatttagaacctgatagtctttaagccattccagtcatgatgaggtgatgtatgaatacatgcatacattcaaagcactgttttcaaagttaatgcaagtaaatacagcaattcctctttcaacgtttaggcagatcattaattatgagctagccaaatgtgggcatactattacagggaaagtttaaaggtctgataacttgaaaataggtttttaggagaattcatctacttagactttttaagtgcctgccataaatgaaattgaaatggtagaatggctgaccacagcaatgaccagccctcattagggccctggatgatttttggtctaataacgcatgctagtgttgatgttttttggtcagagggtatgaacaggaagaattaaatgcagcaggctttattttaaatgccgattcacattactctgttcaagctgcgttgagatgttaaactggcttactatagacttcgtaaaaatggctccagaaaagtaacaaactgaaatctttgagatcacacaggttggaaatatgtacataactgcacaaggtgtcaattctgctctacagtgcagttttagtcagttttagttgcataggtttccattgtatttatagtctgtttatgctaaatctggccaaagatgaacattgtccaccactaaaatgcctctgccactttgaattctgtgctaattttgtggccagaatgcggtgatcaaaacgctccatctttttacagtggcataggaagacggcaaaaatttcctaaagtgcaatagattttcaagtgtattgtgccttgttctaaaacttttattaagtaggtgcacttgacagtattgaggtcatttgttatggtgctatttcaattagtctaggtttaggcccttgtacattttgcccataactttttacaaagtacttcttttattgcacattcagagaattttatatatatgtcttgtgtgcgtgtccttaaacttccaatcttactttgtctcttggagattgttgaacgcagcttgtctaggaaggggatgggactagattctaaaatttatttgggaccatgggaatgatagttgggaagaaaactatttgcacacgacagatttctagatactttttgctgctagctttatgtaatatttattgaacattttgacaaatatttatttttgtaagcctaaaagtgattctttgaaagtttaaagaaacttgaccaaaagacagtacaaaaacactggcacttgaatgttgaatgtcaccgtatgcgtgaaattatatatttcggggtagtgtgagcttttaatgtttaagtcatattaaactcttaagtcaaattaagcagacccggcgttggcagtgtagccataactttctgatgttagtaaaaacaaaattggcgacttgaaattaaattatgccaaggttttgatacacttgtcttaagatattaatgaaacacttcaaaacactgatgtgaagtgtccagattctcagatgtttgttgtgtggattttgtttagttgtgtgtttttttttttttcagtgaatgtctggcacattgcaatcctcaaacatgtggttatctttgttgtattggcataatcagtgacttgtacattcagcaatagcatttgagcaagttttatcagcaagcaatattttcagttaataaggtttcaaaaatcatgtaaggatttaaacttgctgaatgtaaagattgaacctcaagtcactgtagctttagtaattgcttattgtattagtttagatgctagcactgcatgtgctgtgcatattctgattttattaaaataaaaaaaaaa

SEQ ID NO: 615 - DNA, 4199 bp, Homo sapiens
gaattccggccagagtcacacacggtcctaagagctgggcaccaggaagcgaaggctgatctgaagaagacacttgaatcatgggtgacgttaaaaattttctgtatgcctggtgtggcaaaaggaagatgaccccgacctatgaaattagagcagtggggaacaaaaacaggcagaaattcatgtgtgaggttcaggtggaaggttataattacactggcatggggaattccaccaataaaaaagatgcacaaagcaatgctgccagagactttgttaactatttggttcgaataaatgaaataaagagtgaagaagttccagcttttggggtagcatctccgcccccacttactgatactcctgacactacagcaaatgctgaaggagatttaccaacacaccatggaggacctcttctccacatcttggctctcaaagcagaaaataattctgaggtaggggcctctggctatggtgttcctgggcccacctgggaccgaggagccaacttgaaggattactactcaagaaaggaagaacaagaagtgcaagcgactctagaatcagaagaagtggatttaaatgctgggcttcatggaaactggaccttggaaaatgctaaagctcgtctaatccaatattttcagaaagaaaagatccaaggagaatataagtacacccaagtgggtcctgatcacaacaggagctttattgcagaaatgaccatttatatcaagcagctgggcagaaggatttttgcacgagaacatggatcaaataagaaattggcagcacagtcctgtgccctgtcacttgtcagacaactgtaccatcttggagtggttgaagcttacaccggacttacaaagaagaaggaaggagagacagtggagccttacaaagtaaacctctctcaagatttagagcatcagctgcaaaacatcattcaagagctaaatcttgagattttgcccccgcctgaagatccttctgtgccagttgcactcaacattggcaaattggctcagttcgaaccatctcagcgacaaaaccaagtgggtgtggttccttggtcacctccacaatccaactggaatccttggactagtagcaacattgatgaggggcctctggcttttgctactccagagcaaataagcatggacctcaagaatgaattgatgtaccagttggaacaggatcatgatttgcaagcaatcttgcaggagagagagttactgcctgtgaagaaatttgaaagtgagattctggaagcaatcagccaaaattcagttgtcattattagaggggctactggatgtgggaaaaccacacaggttccccagttcattctagatgactttatccagaatgaccgagcagcagagtgtaacatcgtagtaactcagcccagaagaatcagtgcggtttctgtggcagagcgagttgcatttgaaagaggagaagagcctggaaaaagctgtggatacagcgttcgatttgagtctgtacttcctcgtcctcatgccagtataatgttttgtactgtaggtgtgctcctgagaaaattagaagcaggcattcgaggaatcagtcatgtaattgtagatgaaatacatgaaagagatattaatactagcttccttctggtagtactgcgtgatgttgttcaggcttatcctgaagttcgcattgtttttatgtctgctactattgataccagcatgttttgtgaatatttcttcaattgcccatcattgaagttatggaggacttacccagttcaagaatattttctggaagactgcattcagatgacccactttgttcctccaccaaaagacaaaaagaagaaggataaggatgatgatggtggtgaggatgatgatgcaaattgcaacttgatctgtggtgatgaatatggtccagaaacaaggttgagcatgtctcaattgaacgaaaaggaaactccttttgaactcatcgaggctctacttaagtacattgaaacccttaatgttcctggagctgtgttggtttttttgcctggctggaatctgatttatactatgcagaagcatttggaaatgaatccacattttggaagccatcggtatcagattctacccctgcattctcagattcctcgagaggaacagcgcaaagtgtttgatccagtaccagttggagtaaccaaggttattttgtccacaaatattgctgaaacaagcattaccataaatgatgttgtttatgtcattgactcctgcaagcagaaagtgaaactcttcactgctcacaacaatatgaccaactattctaccgtatgggcatcaaaaacaaaccttgagcaacggaaagggcgagctggccggagtacggctggattctgctttcacctgtgcagccgagctcgttttgagagacttgaaacccacatgacaccagagatgttccgaacaccattgcatgaaattgctcttagcataaaacttctgcgtctaggaggaattggccaatttctggccaaagcaattgaacctccccctttggatgctgtgattgaagcagaacacactcttagagagcttgatgcattagatgccaatgatgagttgactcctttgggacgaatcctggctaaactccccattgagcctcgttttggcaaaatgatgataatggggtgtattttctacgtgggagatgctatctgtaccattgctgctgctacctgctttccagagcctttcgtcaatgaaggaaagcaactgggctatatccatcgaaattttgctggaaacagattttctgatcacgtagcccttttatcagtattccaagcctgggatgatgctagaatgggtggagaagaagcagagatacgtttttgtgagcacaaaagacttaatatggctacactaagaatgacctgggaagccaaagttcagctcaaagagattttgattaattctgggtttccagaagattgtttgttgacacaagtgtttactaacactggaccagataataatttggatgttgttatctccctcctggcctttggtgtgtaccccaatgtatgctatcataaggaaaagaggaagattctcaccactgaagggcgtaatgcacttatccacaaatcatctgttaattgtccttttagtagccaagacatgaattacccatctcccttctttgtatttggtgaaaagattcgaactcgagccatctctgctaaaggcatgactttagtaccccccctgcagttgcttctctttgcctccaagaaagtccaatctgatgggcagattgtgcttgtagatgactggattaaactgcaaatatctcatgaagctgctgcctgtatcactggtctccgggcagccatggaggctttggttgttgaagtaaccaaacaacctgctatcatcagccagttggaccccgtaaatgaacgtatgctgaacatgatccgtcagatctctgagccctcagctgctggtatcaaccttatgattggcagtacacggtatggagatggtccacgtcctcccaagatggcccgatacgacaatggaagcggatatagaaggggaggttctagttacagtggtggaggctatggcggtggatatagcagtggaggctatggtagcggaggctatggtggcagcgcaactccttcgggcaggatatgtgcaggtgttggtggaggctatagaggagtttcccgaggtggctttagaggcaactctggaggagactacagagggcctagtggaggctacagaggatctgggggattccagcgaggaggtggtaggggggcctatggaactggctacttggacattgaagaggaggtggcggctataaaacttggttatgtcagttctgtgtgtagacagtaaggaaaaaaaggcatgctatgtgttacgtgttttttccagtatgtttatttgccaccaaaaagtaaatgcattttcacccattctgtggttcattgtagtttaaggaaaccaagcatatagatgcattagtgattttgtttattttatgtaaaatataacgatcttcttttaaaaataccacagtttgtatttttctttaaggagtaaagatttgcctttaaataacttggtattttcctggctttcgtttaatacaatagaaaataaagtattacaccg

SEQ ID NO: 616 - DNA, 2465 bp, Homo sapiens
gagcagcgcggcctgacgggaccaaggcggcgggagtctgcggtcgttccctcggctgtggaccgggcggcacgcacgcggtgcagggtaacatggcggatgcggaagtaattattttgccaaagaaacataagaagaaaaaggagcggaagtcattgccagaagaagatgtagccgaaatacaacacgctgaagaatttcttatcaaacctgaatccaaagttgctaagttggacacgtctcagtggccccttttgctaaagaattttgataagctgaatgtaaggacaacacactatacacctcttgcatgtggttcaaatcctctgaagagagagattggggactatatcaggacaggtttcattaatcttgacaagccctctaacccctcttcccatgaggtggtagcctggattcgacggatacttcgggtggagaagacagggcacagtggtactctggatcccaaggtgactggttgtttaatcgtgtgcatagaacgagccactcgcttggtgaagtcacaacagagtgcaggcaaagagtatgtggggattgtccggctgcacaatgctattgaaggggggacccagctttctagggccctagaaactctgacaggtgccttattccagcgacccccacttattgctgcagtaaagaggcagctccgagtgaggaccatctacgagagcaaaatgattgaatacgatcctgaaagaagattaggaatcttttgggtgagttgtgaggctggcacctacattcggacattatgtgtgcaccttggtttgttattgggagttggtggtcagatgcaggagcttcggagggttcgttctggagtcatgagtgaaaaggaccacatggtgacaatgcatgatgtgcttgatgctcagtggctgtatgataaccacaaggatgagagttacctgcggcgagttgtttaccctttggaaaagctgttgacatctcataaacggctggttatgaaagacagtgcagtaaatgccatctgctatggggccaagattatgcttccaggtgttcttcgatatgaggacggcattgaggtcaatcaggagattgtggttatcaccaccaaaggagaagcaatctgcatggctattgcattaatgaccacagcggtcatctctacctgcgaccatggtatagtagccaagatcaagagagtgatcatggagagagacacttaccctcggaagtggggtttaggtccaaaggcaagtcagaagaagctgatgatcaagcagggccttctggacaagcatgggaagcccacagacagcacacctgccacctggaagcaggagtatgttgactacagtgagtctgccaaaaaagaggtggttgctgaagtggtaaaagccccgcaggtagttgccgaagcagcaaaaactgcgaagcggaagcgagagagtgagagtgaaagtgacgagactcctccagcagctcctcagttgatcaagaaggaaaagaagaagagtaagaaggacaagaaggccaaagctggtctggagagcggggccgagcctggagatggggacagtgataccaccaagaagaagaagaagaagaagaaagcaaaagaggtagaattggtttctgagtagtgaaggccacttgaagctggaggagaaactaaagccttattgagaaaacatgttatagatccttttgttgctgagagagtggaacataggtcctagacagggtgaagagttctggcacattttagctgctactttgagacctcggtgatgttacctggtgtggtcatcccatcttgtcctgttttaaggatatgggtggtgaaagatgaaagaggcagagtttatcccaatgacttctctgtttgagttgggaagcctcaccttcagacccagtaactgtccgcagctgtctgctagtggttgtcttaacatcgtagtcctagtttgcattttttaaatcccctctgtttaaaaggtttgtaaaacaaaaacaaaaaactaagtctgctcagtgaaatgctgtagaaccctaaataagtggtagaagagtgtcactgaattttgtctctgaattcagtataactgagttttgtccatgctggtgtctgggttataggcctgatgggcctggtagttttccatcttgttctggcctagaggtcagtcctttgcacttcctcaaagcttgtgtacagtgctcacctaaatccatctgactacttgttcctgtgccctcttgttttaggcctcgtttacttttaaaaaatgaaattgttcattgctgggagaagaatgttgtaatttttacttattaaagtcaacttgttaagttttttatgtattcctgttgggttttcttgttgatctcatgctagcagagcaaaaattgtaaaatattttgattaaaaatctagggacctttatgtcctatttggaattcgatatcaa

SEQ ID NO: 617 - DNA, 4459 bp, Homo sapiens
gtttctctctctccttctctctctctctctctctctcttttttttccgccctagctggggctgtgttggaggagaggaagaaagagagacagaggattgcattcatccgttacgttcttgaaatttcctaatagcaagaccagcgaagcggttgcacccttttcaatcttgcaaaggaaaaaaacaaaacaaaacaaaaaaaacccaagtccccttcccggcagtttttgccttaaagctgccctcttgaaattaattttttcccaggagagagatgtcttatcaggggaagaaaaatattccacgcatcacgagcgatcgtcttctgatcaaaggaggtaaaattgttaatgatgaccagtcgttctatgcagacatatacatggaagatgggttgatcaagcaaataggagaaaatctgattgtgccaggaggagtgaagaccatcgaggcccactcccggatggtgatccccggaggaattgacgtccacactcgtttccagatgcctgatcagggaatgacgtctgctgatgatttcttccaaggaaccaaggcggccctggctgggggaaccactatgatcattgaccacgttgttcctgagcctgggacaagcctgctcgctgcctttgaccagtggagggaatgggccgacagcaagtcctgctgtgactactctctgcatgtggacatcagcgagtggcataagggcatccaggaggagatggaagcgcttgtgaaggatcacggggtaaattccttcctcgtgtacatggctttcaaagatcgcttccagctaacggattgccagatttatgaagtactgagtgtgatccgggatattggcgccatagcccaagtccacgcagaaaatggcgacatcattgcagaggagcagcagaggatcctggatctgggcatcacgggccccgagggacatgtgctgagccgacctgaggaggtcgaggccgaagccgtgaatcgtgccatcaccatcgccaaccagaccaactgcccgctgtatatcaccaaggtgatgagcaaaagctctgctgaggtcatcgcccaggcacggaagaagggaactgtggtgtatggcgagcccatcactgccagcttgggaacggacggctcccattactggagcaagaactgggccaaggctgctgcctttgtcacctccccacccttgagccctgatccaaccactccagactttctcaactccttgctgtcctgtggagacctccaggtcacgggcagtgcccattgcacgtttaacactgcccagaaggctgtaggaaaggacaacttcaccctgattccggagggcaccaatggcactgaggagcggatgtccgtcatctgggacaaggctgtggtcactgggaagatggatgagaaccagtttgtggctgtgaccagcaccaatgcagccaaagtcttcaacctttacccccggaaaggccgcattgctgtgggatccgatgccgacctggtcatctgggaccccgacagcgttaaaaccatctctgccaagacacacaacagctctctcgagtacaacatctttgaaggcatggagtgccgcggctccccactggtggtcatcagccaggggaagattgtcctggaggacggcaccctgcatgtcaccgaaggctctggacgctacattccccggaagcccttccctgattttgtttacaagcgtatcaaggcaaggagcaggctggctgagctgagaggggttcctcgtggcctgtatgacggacctgtgtgtgaagtgtctgtgacgcccaagacagtcactccagcctcctcggccaagacgtctcctgccaagcagcaggccccacctgtccggaacctgcaccagtctggattcagtttgtctggtgctcagattgatgacaacattccccgccgcaccacccagcgtatcgtggcgccccccggtggccgtgccaacatcaccagcctgggctagagctcctgggctgtgcgtccactggggactggggatgggacacctgaggacattctgagacttctttcttccttcctttttttttttttgtttttttttttaagagcctgtgatagttactgtggagcagccagttcatggggtcccccttggggccccacaccccgtctctcaccaagagttactgattttgctcatccacttccctacacatctatgggtatcacacccaagactacccaccaagctcatacagggaaccacacccaacacttagacatgcgaacaagcagcccccagcgagggtctccttcgccttcaacctcctagtgtctgttagcatcttccttttcatggggggagggaagataaagtgaattgcccagagctgcctttttcttttctttttaaaaattttaagaagttttccttgtggggctggggaggggccggggtcagggagagtctttttttttttttttttaaatactaaattggaacatttaattccatattaatacaaggggtttgaactggacatcctaatgatgcaattacgtcatcacccagctgattccgggtggttggcaaactcatcgtgtctgtcctgagaggctccacaatgcccacccgcatcgccattctgtagtcttcagggtcagctgttgataaaggggcaggcttgcgttattggcctagattttgctgcagattaaatcctttgaggattctcttctcttttaccatttttctgcgtgctctcactctctctttctctctctagctttttaattcatgaatattttcgtgtctgtctctctctctctctgtgtttcctccagcccttgtctcggagacggtgttttcctcccttgccccattatcttttcacctcccaggtctaccatttcatggtggtcgttgggtccgcctaaaggatttgagcgtttgccattgcaagcatagtgctgtgtcatcctggtccatgtaggactggtgctaaccacctgccatcatgaggatgtgtgctagagtgtgggaccctggccaagtgcaggaatgggccatgccgtctcacccacagtatcacacgtggaaccgcagacagggcccagaagctttagaggtatgaggctgcagaaccggagagattttcctctgtgcagtgctctctggctaaagtcacggtcaaacctaaacaccgagcctcattaacccaagtgaaccaaccaaagtcaccagttcagaagtgctaagctaataggagtctgacccgagggcctgctgcttcctggttaagtatcttttgagattctagaacacatgggagctttttattttcggggaaaaaccgtatttttttcttgtccaattatttctaaagacacactacatagaaagaggccctataaactcaaaaagtcattgggaaacttaaagtctattctactttgcaagaggagaaatgtgttttatgaacgatagatcacatcagaactcctgtggggaggaaaccttataaattaaacacatggcccccttagagaccacaggtgatgtctgtctccatccttccctctccttttctgtcacctttccccctagctggctcctttggacctacccctgtccttgctgacttgtgttgcattgtattccaaacgtgtttacaggttctcttaagcaatgttgtatttgcaggcttttctgaataccaaatctgctttttgtaaagcgtaaaaacatcacaaagtaggtcattccatcaccacccttgtctctctacacattttgcctttggggatctggttggggttttgggttttttgttgttgttgtttatttgttattttaaaggtaaattgcacttttaaaaaaataattggttgacttaatatatttgctttttttctcacctgcacttagaggaaatttgaacaagttggaaaaaaacaatttttgtttcaattctaagaaacacttgcagctctagtattcacttgagtcttcctgtttttcctgtaccgggtcatggtaatttttggttgttttggttgttttcttaaaaaacaagttaaaacctgacgatttctgcaggctgtgtaagcatgtttacctgttggcttgctttgtgtgtctgttaaatgaatgtcatatgtaaatgctaaaataaatcgacagtgtctcagaactgaataactgcagtgacttgatgctctaaaacagtgtaggatttaagaatagatggtttttaatcctggaaattgtgattgtgacccatgagtggaggaactttcagttctaaagctgataaagtgtgtagccagaagagtacttttttttttgtaaccactgtcttgatggcaaaataattatggtaaaaaacaagtctcgtgtttattattccttaagaactctgtgttatattaccatggaacgcctaataaagcaaaatgtggttgtttc

SEQ ID NO: 618 - DNA, 5047 bp, Homo sapiens
ccgttgctgtcgccgttgctgtcgggggcgctgtgcgctgaggaaggcgcgggcgagccggagcagaagaaggagggagggagccagccgctgcagccaccaccgccaccatgtcctaccaaggcaagaagaacatcccgcggatcacgagtgaccgtctccttatcaagggaggcagaatcgtcaatgatgatcagtccttttatgctgatatttacatggaagatggcttaataaaacaaattggagacaatctgattgttcctggaggagtgaagaccattgaagccaatgggaagatggtgatccctggaggcatcgatgtccatactcacttccagatgccatataagggaatgaccacagtagatgacttcttccaagggacaaaggcggccttagcaggtggcaccaccatgatcattgaccatgtggtgcctgagcctgagtccagcctgactgaggcctatgagaaatggagagagtgggctgatgggaagagttgctgtgactatgccctgcatgtggacatcacccactggaatgacagcgtcaagcaggaagtgcagaacctcatcaaggacaaaggggttaactccttcatggtttatatggcttataaggatttgtatcaagtatctaacacagagctctatgagatcttcacctgcctgggagagctgggggccattgctcaagttcatgctgagaatggggatatcattgcccaggagcaaacccgcatgttggaaatggggataactggcccagaaggccatgtactgagcaggccagaagagctggaagctgaggctgtgttccgtgccatcaccattgccagccaaaccaattgccctctctacgtcacaaaggtcatgagcaagagtgcagctgacctcatctcacaagccaggaaaaaaggaaatgtagtctttggtgagcccatcactgccagcctcggcatagatggaacccattattggagcaagaactgggccaaggcggctgcatttgtgacatccccacccctgagccctgacccaactactccggactacatcaactccttgctggccagcggggatctgcagctatctgggagtgcccactgcaccttcagcactgcccagaaagcaattgggaaggacaacttcacagccattcctgagggcaccaatggtgtggaggagcggatgtctgtcatctgggacaaggctgtggccacagggaaaatggacgaaaaccagttcgtggctgtgacaagcacaaacgctgccaagatcttcaacctgtatccccgcaagggaagaatatctgtgggttctgacagcgacctcgtcatctgggatccagatgctgtgaagatcgtctctgccaagaaccaccagtctgcggcagagtacaacatctttgaagggatggagctgcgcggggctcctctggttgtcatctgccagggcaagatcatgctggaagatggcaacctgcacgtgacccagggggctggccgcttcataccctgcagcccgttctccgactatgtctacaagcgcattaaagcacggaggaagatggcagacctgcatgccgtcccaaggggcatgtacgatgggcctgtgtttgacctgaccaccacccccaaaggtggcacccccgcaggctctgctcggggctctcctactcggccgaacccacctgtgaggaatcttcatcagtcgggatttagcctgtcaggcacccaagtggatgagggggttcgctcagccagcaagcgcatcgtggcccccccaggcggccgttctaatatcacatctctgagttaagcaagccttcctcaaagagaggggcagaagcaagaagagattgttttgaagccaaaatggtacaccgatatttaagaaggaaagcgaatccaaacggttgtgatctaaagaatcaataagcctcaagccttatgtttctccaatgttacgctcgcttgcctagctttacgaatattgctttgttttctgtttatgcatagccttgatttgtttgactcccctccccccatttacatgcatgcaatcagacaggccactaaggtaaaagagtctgctctatcatagtgttgagagcgtgtgtagtgctgcatcttatgacaaggggacagacaagctgggacgtcagggaaatgaacaaaagggacgcaggttatttggggtgagtgggtggtgggagcctggagcaaggtggagggtgcagaggggctggggtagggcatgtaggagggaggtgggtgggtcaggtgagtggaaggggtgttgtatattgtgttgatgacgtacgttatttccatggaagatagccgctgtggcagctgtcacatcaccacagctccctagggtctgccgagaaggcaggcagtctttgggttctgttctttgtcacgtcccctacaagtaaattttgtttctttgaacgtttattaaaatgccaagacccaaccatttcttccacctgcttgattgtgccagtgtttgctcaggcctctttcttagtgttgctttcaaatccttctctttcctgggttgggaaggccaggcagggacagagcaaatgacacttctcttcctcttgccctccctgcctctttggtgctcttaaaagccagcagctgagaacatagcacaggcccacgtggtgagggcacccacagcttaaagacgcttccttctaaacacggcgaggtcacctctcactcttctgtctttgcaaaccgagaagagtggcatgcttctggcatcccaagtcaggattttagctcagatgaggcagaatgaagggcctctcttacaggcagtttgtgtttgattctctcgatcctggcacatccatgataaataggagtttttgaaagttggttttattaggtgttccctaatttttaccgtaataggtcatctcagcttatatgaaagtcaagtggggaactgggaaagccaaagtcagtcttgagcagagggagcacattttgtggacctggttccacctttccattccaaaccacctgtttccccttccattagcagaaactctgggggaactttgtgtctcagtcctagaatctccccaagtgagtggaagtgacatgatgcagtcttcctcatggggcacctgaaagaaattagtgtgggtgcttcgatctaccttgtctgtcagagttgaatatctctttccctatcatgctgcttctgaaaattcagttttggagcaagtcctgtgagcaagataagaatctatagaaccaagatgctcattttcagaagaaatatgttcaacctgggatcagacttccatgctctggggaatccaagtggtagcacctgtaaccctgtgtactaagtgctttgaagagaagagcaggcctcagacaccttttaattgcttaggagaaaccattgtctctgactgcaggtttgaataagttgaagaccagagaaaagtacacactgggctacaaaggaatttggagatagccaaggaacaggatttcccctagcaagctaccttctgttcaaatcatgaaaaaagactatttccccttagaatagggaagcttgctattttaaagctcttgtagtgcttttcttttaagggagatgtagtaaaagggaaaatgtagctcttagtttacacttcaaagatgtgggggtctttcagagaactaagaataacagttttatgtgcagagagagtttgccagatctgaagcatatacctcattgactaggctgttactttgggataggttgcagtaccagccacagccagcagatagaggaaaagacacacataaactcgcttctgagcgtccacttctgcactctctgctctgctgttactcagcccctgagtctgactcatctctgcacaacctctctgtgccatgaagataagtcttccatggccaaatcggtcatccgcactgcccttgggacttccgaagtgaaccattccaccagaacctttgattctgcacaagatttccttgctctgggaacaacccccaaatgcccttgggaggaacaacatgagctcaggaagcctctctttcttcacttaccattactaactctccaagcatagaaatccctgggaattgcgagaataactcccactattttaaaatttatattcagatttgtttcgtttcataagacacatcaaacaggcctatacaaaaggtttaggaaaagaaaacaatggtgagtcccggccctcttcgaattcactggcacctcatgcaagtgtaggaaggcacgctggatcgtctatctgattccaaagctgtcctttgccatctcatcccttggcctgccccccaaccctgaggatgcccctgccatccccccaacctcctcatattgcctctgaacccagatggcaatccatcccggttctctctgagggccacgggcttgggtagtggaaagggtgtttgggaaattgttaaatcagttacccgtagtagagctatttcttgtacttctaagttttctagaagtggaaggattgtagtcatcctgaaaatgggtttacttcaaaatccctcagccttgttcttcacgactgtctatactgagagtgtcatgtttccacaaagggctgacacctgagcctggattttcactcatccctgagaagccctttccagtagggtgggcaattcccaacttccttgccacaagcttcccaggctttctcccctggaaaactccagcttgagtcccagatacactcatgggctgccctgggcagccagcattcattgtaagttccctctttgaaaactggtgtgtgggtgttcagttctgtgtctggtgggtatggacagacagtaatctcctgtgatctgtgctagctgtgaggcagctctggaacgtgaagagctgtttggtttgaaccgtgaacaaaactgtgttttgagtttagctgacattaaagaaaaaagttcatcacgtgactgttaatgtaaacctggttattaaaataactatgaaattac

SEQ ID NO: 619 - DNA, 3171 bp, Homo sapiens
ggcacgagatgacaccaagcaaagcctacttagtttagatctccagaaattggctggtggaaaaaaatcaaacatgaagattgcagttttgttttgtttttttctgcttatcatttttcaaactgactttggaaaaaatgaagaaattcctaggaagcaaaggaggaagatctaccacagaaggttgaggaaaagttcaacctcacacaagcacagatcaaacagacagcttggaattcagcaaacaacagtttttacaccagtagcaagacttcctattgttaactttgattatagcatggaggaaaagtttgaatccttttcaagttttcctggagtagaatcaagttataatgtgttaccaggaaagaagggacactgtttggtaaagggcataaccatgtacaacaaagctgtgtggtcgcctgagccctgcactacctgcctctgctcagatggaagagttctttgtgatgaaaccatgtgccatccccagaggtgcccccaaacagttatacctgaaggggaatgctgcccggtctgctccgctactgtctcctattctctactcagtggtatagcattaaatgatagaaatgaattttctggtgattcttcagaacaaagagaacctaccaatttacttcataagcaactgccacctcctcaggtgggaatggaccgaatagtaagaaaagaagcacttcaatctgaggaggatgaagaagtgaaagaagaagatacagagcaaaagagagagacccctgaatctagaaatcaggggcaactttacagtgagggggacagcagaggaggagacagaaagcagaggcctggagaggagaggaggctggcacaccagcaacaacgccaaggaagggaggaggaggaggatgaggaggaggagggtgaggagggtgaggaggatgaggaggacgaggaggacccggtaagaggagatatgttccgaatgccctctcgatccccgcttcctgctcctcccagaggcacactgcgcctgccaagcgggtgctctctgtcctacaggaccatcagctgcatcaacgccatgcttacccagataccaccgctgacagcaccacagataacaagtctggagctcactggcaattccatcgcctccatcccagatgaagcatttaatggattaccaaatttggaaaggcttgatctgagtaaaaataatatcacttcttcaggcataggtccaaaagcattcaagcttctgaagaagttaatgcgtttgaatatggatggaaataatttgatacagattccttcacaattgccatctacattagaagaacttaaagtcaatgagaacaatcttcaggctatcgatgaagaaagtttatcagacttaaatcagttggtcaccttagaattggaaggaaacaatctcagtgaagccaatgtcaatcctttagctttcaaacctttgaagagcctagcctacttgcgtctgggaaaaaataaatttagaattataccgcagggtcttcctggttctattgaggaattatacctagaaaataaccaaattgaagaaataactgaaatttgtttcaatcataccagaaagatcaatgtcattgtactacgttataacaaaattgaagaaaataggattgctcctttagcctggataaatcaagaaaatctagaatccattgatctctcctacaacaagctctatcacgtcccgtcctatctacccaagtccttgctgcacctagtactccttgggaaccagattgaacggatccctggctatgtgtttggccacatggaaccaggcctggaatacttgtacctgtcatttaacaaacttgctgatgatggcatggaccgtgtctccttctatggggcatatcattctctgagagaattatttctggatcacaatgacttaaaatctataccacctgggatacaagaaatgaaagcactacattttctgaggctgaacaacaacaagatacggaacattcttccagaagaaatttgcaatgctgaagaggatgatgactcaaatctggaacatcttcatcttgaaaacaattatattaaaattagagaaataccatcttacacattttcatgcataagatcatactcaagtatcgttcttaaaccacaaaacatcaagtaattccaagttttcctttgctgtttataaactttactcatgtatttgtagtagctgcatttgtcattaataagagagacataatcctcctgttatactcagtatcattatatgctagtcaacctgattcactaacacacagatgaacaaccaaaatatacctaaaaggtatagtctctaggagttttattaatagtaaaggtaaaatctctcagtttcctacctctagaaagaggccatctcactagaataggatattatgcatactgagctagaccagaagagtctggaacaaaataaacacagcctttataatcaacttgaatactggtgttagctgagaactctgtaagtccctttaaaaattatgtatcttttggttcaagattaagaagcataatgacaacaaaaaaagcaggcagaatttatgaataagtgttgtttattattaaaacaataatttgttaatttcttataaggtcctgtgctataattactggtataaatataactgaatattggggtagctttcatttcttccattaattacatgtgtaaaattaaaacactactgtaatgttaatttcctggttttgaaaatcatattatggttatgtacattgttaacattaaggaaagctggcagaagggtgtgcataaattctatactctttttgaaacttttctataattctaaaattattttttaaagttaaacagtatattaagattaccttcactattcctcactcaagattaagacattttttgaaaagcagtagagtttgcttaaaatacaaattaattattcttgactataaccttgtaaaggtaaatctaatgtataaatttttgaaaaattttgcaccactggtcatagcatctatctcctttgccttaatttactgaaatacatcattttattcggttcaattgaaataaagctatgtctttactatgtattggccctaccaaaatcatatattaaaattttctaacat

SEQ ID NO: 620 - DNA, 2409 bp, Homo sapiens
atgcggggcgtgtggccgcccccggtgtccgccctgctgtcggcgctggggatgtcgacgtacaagcgggccacgctggacgaggaggacctggtggactcgctctccgagggcgacgcataccccaacggcctgcaggtgaacttccacagcccccggagtggccagaggtgctgggctgcacggacccaggtggagaagcggctggtggtgttggtggtacttctggcggcaggactggtggcctgcttggcagcactgggcatccagtaccagacaagatccccctctgtgtgcctgagcgaagcttgtgtctcagtgaccagctccatcttgagctccatggaccccacagtggacccctgccatgacttcttcagctacgcctgtgggggctggatcaaggccaacccagtccctgatggccactcacgctgggggaccttcagcaacctctgggaacacaaccaagcaatcatcaagcacctcctcgaaaactccacggccagcgtgagcgaggcagagagaaaggcgcaagtatactaccgtgcgtgcatgaacgagaccaggatcgaggagctcagggccaaacctctaatggagttgattgagaggctcgggggctggaacatcacaggtccctgggccaaggacaacttccaggacaccctgcaggtggtcaccgcccactaccgcacctcacccttcttctctgtctatgtcagtgccgattccaagaactccaacagcaacgtgatccaggtggaccagtctggcctgggcttgccctcgagagactattacctgaacaaaactgaaaacgagaaggtgctgaccggatatctgaactacatggtccagctggggaagctgctgggcggcggggacgaggaggccatccggccccagatgcagcagatcttggactttgagacggcactggccaacatcaccatcccacaggagaagcgccgtgatgaggagctcatctaccacaaagtgacggcagccgagctgcagaccttggcacccgccatcaactggttgccttttctcaacaccatcttctaccccgtggagatcaatgaatccgagcctattgtggtctatgacaaggaataccttgagcagatctccactctcatcaacaccaccgacagatgcctgctcaacaactacatgatctggaacctggtgcggaaaacaagctccttccttgaccagcgctttcaggacgccgatgagaagttcatggaagtcatgtacgggaccaagaagacctgtcttcctcgctggaagttttgcgtgagtgacacagaaaacaacctgggctttgcgttgggccccatgtttgtcaaagcaaccttcgccgaggacagcaagagcatagccaccgagatcatcctggagattaagaaggcatttgaggaaagcctgagcaccctgaagtggatggatgaggaaacccgaaaatcagccaaggaaaaggccgatgccatctacaacatgataggataccccaacttcatcatggatcccaaggagctggacaaagtgtttaatgactacactgcagttccagacctctactttgaaaatgccatgcggtttttcaacttctcatggagggtcactgccgatcagctcaggaaagcccccaacagagatcagtggagcatgaccccgcccatggtgaacgcctactactcgcccaccaagaatgagattgtgtttccggccgggatcctgcaggcaccattctacacacgctcctcacccaaggccttaaactttggtggcataggtgtcgtcgtgggccatgagctgactcatgcttttgatgatcaaggacgggagtatgacaaggacgggaacctccggccatggtggaagaactcatccgtggaggccttcaagcgtcagaccgagtgcatggtagagcagtacagcaactacagcgtgaacggggagccggtgaacgggcggcacaccctgggggagaacatcgccgacaacgggggtctcaaggcggcctatcgggcttaccagaactgggtgaagaagaacggggctgagcactcgctccccaccctgggcctcaccaataaccagctcttcttcctgggctttgcacaggtctggtgctccgtccgcacacctgagagctcccacgaaggcctcatcaccgatccccacagcccctctcgcttccgggtcatcggctccctctccaattccaaggagttctcagaacacttccgctgcccacctggctcacccatgaacccgcctcacaagtgcgaagtctggtaaggacgaagcggagagagccaagacggaggaggggaaggggctgaggacgagacccccatccagcctccagggcattgctcagcccgcttggccacc

SEQ ID NO: 621 - DNA, 1196 bp, Homo sapiens
ggaactcagtagacgaaggcggcggcgatggcggcggggatagtggcttctcgcagactccgcgacctactgacccggcgactgacaggctccaactacccgggactcagtattagccttcgcctcactggctcctctgcacaagaggaggcttccggagtagccctcggtgaagccccagaccacagctatgagtcccttcgtgtgacgtctgcgcagaaacatgttctgcatgtccagctcaaccggcccaacaagaggaatgccatgaacaaggtcttctggagagagatggtagagtgcttcaacaagatttcgagagacgctgactgtcgggcggtggtgatctctggtgcaggaaaaatgttcactgcaggtattgacctgatggacatggcttcggacatcctgcagcccaaaggagatgatgtggcccggatcagctggtacctccgtgacatcatcactcgataccaggagaccttcaacgtcatcgagaggtgccccaagcccgtgattgctgccgtccatgggggctgcattggcggaggtgtggaccttgtcaccgcctgtgacatccggtactgtgcccaggatgctttcttccaggtgaaggaggtggacgtgggtttggctgccgatgtaggaacactggagcgcctgcccaaggtcatcgggaaccagagcctggtcaacgagctggccttcaccgcccacaagatgatggctgacgaggccctggacagtgggctggtcagccgggtgttcccagacaaagaggtcatgctggatgctgccttacccctggcgcccgagatttccagcaagaccaccgtgttggtgcagagcaccaaggtcaacctgctgtattcccgcgaccattcggtggccgagagcctcaactacgtggcgtcctggaacatgagcatgctgcagacccaagacctcgtgaagtcggtccagcccacgactgagaacaaggaactgaaaaccgtcaccttctccaagctctgagagccctcgcgtcccagccccagccagggggccggccttgtcccgcctcatccacagaaagggaggatgggcgatgacagttgtttctatgccttctgacccagtttcccagtttataactttatgacaatgagtttctcaagcccaaggccttatcttcaccccacaaacaataaagcaaa

SEQ ID NO: 622 - DNA, 2687 bp, Homo sapiens
acggcgcgctgggctcacactgtcccgccgcggacgggctttgtggttgggggcgcgcgtgcgagtgccagtgagagtgtgggtgcgcgctgtgggccgcggcgcgggtgggtggccgtgcgttcttgcgagccggcctgcaggaggcgaggctcccctggcctcccgcacccagcggcggaccgagcccctggagggaagttgccgcagccgcccgggccgccggccctcctgtcccgcgccaggtacacagcttctcctagcatgacttcgatctgatcagcaaacaagaaaatttgtctcccgtagttctggggcgtgttcaccacctacaaccacagagctgtcatggctgccatctctacttccatccctgtaatttcacagccccagttcacagccatgaatgaaccacagtgcttctacaacgagtccattgccttcttttataaccgaagtggaaagcatcttgccacagaatggaacacagtcagcaagctggtgatgggacttggaatcactgtttgtatcttcatcatgttggccaacctattggtcatggtggcaatctatgtcaaccgccgcttccattttcctatttattacctaatggctaatctggctgctgcagacttctttgctgggttggcctacttctatctcatgttcaacacaggacccaatactcggagactgactgttagcacatggctcctgcgtcagggcctcattgacaccagcctgacggcatctgtggccaacttactggctattgcaatcgagaggcacattacggttttccgcatgcagctccacacacggatgagcaaccggcgggtagtggtggtcattgtggtcatctggactatggccatcgttatgggtgctatacccagtgtgggctggaactgtatctgtgatattgaaaattgttccaacatggcacccctctacagtgactcttacttagtcttctgggccattttcaacttggtgacctttgtggtaatggtggttctctatgctcacatctttggctatgttcgccagaggactatgagaatgtctcggcatagttctggaccccggcggaatcgggataccatgatgagtcttctgaagactgtggtcattgtgcttggggcctttatcatctgctggactcctggattggttttgttacttctagacgtgtgctgtccacagtgcgacgtgctggcctatgagaaattcttccttctccttgctgaattcaactctgccatgaaccccatcatttactcctaccgcgacaaagaaatgagcgccacctttaggcagatcctctgctgccagcgcagtgagaaccccaccggccccacagaaggctcagaccgctcggcttcctccctcaaccacaccatcttggctggagttcacagcaatgaccactctgtggtttagaacggaaactgagatgaggaaccagccgtcctctcttggaggataaacagcctccccctacccaattgccagggcaaggtggggtgtgagagaggagaaaagtcaactcatgtacttaaacactaaccaatgacagtatttgttcctggaccccacaagacttgatatatattgaaaattagcttatgtgacaaccctcatcttgatccccatcccttctgaaagtaggaagttggagctcttgcaatggaattcaagaacagactctggagtgtccatttagactacactaactagacttttaaaagattttgtgtggtttggtgcaagtcagaataaattctggctagttgaatccacaacttcatttatatacaggcttcccttttttatttttaaaggatacgtttcacttaataaacacgtttatgcctatcagcatgtttgtgatggatgagactatggactgcttttaaactaccataattccattttttcccttacataggaaaactgtaagttggaattatcttttgtttagaaagcatgcatgtaatgtatgtatgcagtatgccttacttaaaaagattaaaaggatactaatgttaaatcttctaggaaatagaacctagacttcaaagccagtatttgtttaggtcatgaagcaaacaatgctctaatcacaatattaactgtttaattaaaatgttgtaacaagtataaaacagggaatgtaagtttattaccaaagtgatatgtattccaaaaaagtcatagaagatgaagcactataatattgttcccatatatttaaaatacccaagtacattctaattaccagtatatcagaggaaaattttcgtagtctttgtaaaataatatactcatcatagaaaacttgaaaaatgcagaaatgtataaaaaagcaaaaatgattactgataatatcacaacccagaagtaaccacctttaaaaagcaacccccatgtatgcctatatgtgtattgtatactttttttacataattggagtcatactgtaaacagttttataagtagatctttttcattgcaaaattgccacattttcttatggcattaaaaattttacaaaaacataattttaatggctatattatattccatttaatggatgcaactcagtttatttaaccattcccatgttgttaactatttaggttgtttctaattttcattattataaagttgcagaaatttggtgt

SEQ ID NO: 623 - DNA, 1833 bp, Homo sapiens
ggcacgagggtttgccgccagaacacaggtgtcgtgaaaactacccctaaaagccaaaatgggaaaggaaaagactcatatcaacattgtcgtcattggacacgtagattcgggcaagtccaccactactggccatctgatctataaatgcggtggcatcgacaaaagaaccattgaaaaatttgagaaggaggctgctgagatgggaaagggctccttcaagtatgcctgggtcttggataaactgaaagctgagcgtgaacgtggtatcaccattgatatctccttgtggaaatttgagaccagcaagtactatgtgactatcattgatgccccaggacacagagactttatcaaaaacatgattacagggacatctcaggctgactgtgctgtcctgattgttgctgctggtgttggtgaatttgaagctggtatctccaagaatgggcagacccgagagcatgcccttctggcttacacactgggtgtgaaacaactaattgtcggtgttaacaaaatggattccactgagccaccctacagccagaagagatatgaggaaattgttaaggaagtcagcacttacattaagaaaattggctacaaccccgacacagtagcatttgtgccaatttctggttggaatggtgacaacatgctggagccaagtgctaacatgccttggttcaagggatggaaagtcacccgtaaggatggcaatgccagtggaaccacgctgcttgaggctctggactgcatcctaccaccaactcgtccaactgacaagcccttgcgcctgcctctccaggatgtctacaaaattggtggtattggtactgttcctgttggccgagtggagactggtgttctcaaacccggtatggtggtcacctttgctccagtcaacgttacaacggaagtaaaatctgtcgaaatgcaccatgaagctttgagtgaagctcttcctggggacaatgtgggcttcaatgtcaagaatgtgtctgtcaaggatgttcgtcgtggcaacgttgctggtgacagcaaaaatgacccaccaatggaagcagctggcttcactgctcaggtgattatcctgaaccatccaggccaaataagcgccggctatgcccctgtattggattgccacacggctcacattgcatgcaagtttgctgagctgaaggaaaagattgatcgccgttctggtaaaaagctggaagatggccctaaattcttgaagtctggtgatgctgccattgttgatatggttcctggcaagcccatgtgtgttgagagcttctcagactatccacctttgggtcgctttgctgttcgtgatatgagacagacagttgcggtgggtgtcatcaaagcagtggacaagaaggctgctggagctggcaaggtcaccaagtctgcccagaaagctcagaaggctaaatgaatattatccctaatacctgccaccccactcttaatcagtggtggaagaacggtctcagaactgtttgtttcaattggccatttaagtttagtagtaaaagactggttaatgataacaatgcatcgtaaaaccttcagaaggaaaggagaatgttttgtggaccactttggttttcttttttgcgtgtggcagttttaagttattagtttttaaaatcagtactttttaatggaaacaacttgaccaaaaatttgtcacagaattttgagacccattaaaaaagttaaatgagaaaaaaaaaaaaaaaaaaaaaaaaaaaaaaaaaaaaaaaaaaaaaaaaaaaaaaaaaaaaaaaaaaaaaaaaaaaaaaaaaaaaaaaaaaaaaa

SEQ ID NO: 624 - DNA, 2106 bp, Homo sapiens
gtatacgaaatcataaaatctcatagatgtatcctgagtagggcggggcccgtgaaaccctctgaatctgcggccaccacccggtaaggctaaatactaatcagacaccgatagtgaactagtaccgtgagggaaaggtgaaaagaacccgagaggggagtgaaatagattctgaaaccatttacttacaagtggtccatttacttacaagtgtcagagcacgttaaagtgtgatggcgtacatcttgcagtatgggccggcgagttatgttaatatgcaaggttaagcagaaaaaagcggagccgtagggaaaccgagtctgaatagggcgactttagtatattggcatatacccgaaatcaggtgatctatccatgagcaggttgaagcttaggtaaaactaagtggaggaccgaaccgtagtacgctaaaaagtgcccggatggacttgtggatagtggtgaaattccaatcgaacctggagatagctggttctcttcgaaatagctttagggctagcgtatagtattgtttaatgggggtagagcactgaatgtggaatggcggcatctagctgtactgactataatcaaactccgaataccattaaaattaagctatgcagtcggaacgtggtatcaccattgatatctccttgtggaaatttgagaccagcaagtactatgtgactatcattgatgccccaggacacagagactttatccaaaacatgattacagggacctctcaggctgactgtgctgtcctgattgttgctgctggtgttggtgaatttgaagctggtatctccaagaatgggcagacccgagagcatgcccttctggcttacacactgggtgtgaaacaactaattgtcggtgttaacaaaatggattccactgagccaccctacagccagaagagatatgaggaaattgttaaggaagtcagcacttacattaagaaaattggctacaaccccgacacagtagcatttgtgccaatttctggttggaatggtgacaacatgctggagccaagtgctaacatgccttggttcaagggatggaaagtcacccgtaaggatggcaatgccagtggaaccacgctgcttgaggctctggactgcatcctaccaccaactcgtccaactgacaagcccttgggcctgcctctccaggatgtctacaaaattggtggtattggtactgttcctgttggccgagtggagactggtgttctcaaacccggtatggtggtcacctttggtccagtcaacgttacaacggaagtaaaatctgtcgaaatgcaccatgaagctttgggtgaagctcttcctggggacaatgtgggcttcaatgtcaagaatgtgtctgtcaaggatgttcgtcgtggcaacgttgctggtgacagcaaaaatgacccaccaatggaagcagctggcttccctgctcaggtgattatcctgaaccatccaggccaaataagcgccggctatgcccctgtattggattgccacacggctcacattgcatgcaagtttgctgagctgaaggaaaagattgatcgccgttctggtaaaaagctggaagatggccctaaattcttgaagtctggtgatgctgccattgttgatatggttcctggcaagcccatgtgtgttgagagcttctcagactatccacctttgggctgctttgctgttcgtgatatgagacagacagttgcggtgggtgtcatcaaagcagtggacaagaaggctgctggagctggcaaggtcaccaagtctgcccagaaagctcagaaggctaaatgaatattatccctaatcctcccaccccactcttaatcagtggtggaagaccggtctcagaactgtttgtttcaattgccatttaagtttagtagtaaaagactggttaatgataacaatgcatcgtaaaacctttcagaaggaaaggagaatgttttgtggacacgttggttttcttttttgcgtgtggcagttttagttattagtttttaaaatcagtactttttaatggaaacaacttgacccccaaatttgtcacagaattttgggacccattaaaaggttaactggg

SEQ ID NO: 625 - DNA, 1953 bp, Homo sapiens
ggcacgagggccatctgcacggcagacggcaccatgaggcttggggagcccacctccaatgagactctgtcctgcgtcatcatctttgtcatcgtgtactacgccctgatggctggtgtggtacaccatgaggcttggggagcccacctccaatgagactctgtcctgcgtcatcatctttgtcatcgtgtactacgccctgatggctggtgtggtttggtttgtggtcctcacctatgcctggcacacttccttcaaagccctgggcaccacctaccagcctctctcgggcaagacctcctacttccacctgctcacctggtcactcccctttgtcctcactgtggcaatccttgctgtggcgcaggtggatggggactctgtgagtggcatttgttttgtgggctacaagaactaccgataccgtgcgggcttcgtgctggccccaatcggcctggtgctcatcgtggcagccttctcactcagcagcccggggtggttgctcttgatgaatcaccatggcggctgggaccctgtacacgtatcctgaaaactggagggccttcaaggctctcatcgctgctcagtacagcggggctcaggtccgcgtgctctccgcaccaccccacttccattttggccaaaccaaccgcacccctgaatttctccgcaaatttcctgccggcaaggtcccagcatttgagggtgatgatggattctgtgtgtttgagagcaacgccattgcctattatgtgagcaatgaggagctgcggggaagtactccagaggcagcagcccaggtggtgcagtgggtgagctttgctgattccgatatagtgcccccagccagtacctgggtgttccccaccttgggcatcatgcaccacaacaaacaggccactgagaatgcaaaggaggaagtgaggcgaattctggggctgctggatgcttacttgaagacgaggacttttctggtgggcgaacgagtgacattggctgacatcacagttgtctgcaccctgttgtggctctataagcaggttctagagccttctttccgccaggcctttcccaataccaaccgctggttcctcacctgcattaaccagccccagttccgggctgtcttgggcgaagtgaaactgtgtgagaagatggcccagtttgatgctaaaaagtttgcagagacccaacctaaaaaggacacaccacggaaagagaagggttcacgggaagagaagcagaagccccaggctgagcggaaggaggagaaaaaggcggctgcccctgctcctgaggaggagatggatgaatgtgagcaggcgctggctgctgagcccaaggccaaggaccccttcgctcacctgcccaagagtacctttgtgttggatgaatttaagcgcaagtactccaatgaggacacactctctgtggcactgccatatttctgggagcactttgataaggacggctggtccctgtggtactcagagtatcgcttccctgaagaactcactcagaccttcatgagctgcaatctcatcactggaatgttccagcgactggacaagctgaggaagaatgccttcgccagtgtcatcctttttggaaccaacaatagcagctccatttctggagtctgggtcttccgaggccaggagcttgcctttccgctgagtccagattggcaggtggactacgagtcatacacatggcggaaactggatcctggcagcgaggagacccagacgctggttcgagagtacttttcctgggagggggccttccagcatgtgggcaaagccttcaatcagggcaagatcttcaagtgaacatctcttgccatcacctagctgcctgcacctgcccttcagggagatgggggtcattaaaggaaactgaacattgaaaaaaaaaaaaaaaaaaaaaaaaaaaaaaaaaaaaaaaaaaaaa

SEQ ID NO: 626 - DNA, 1202 bp, Homo sapiens
ggcacgaggcgccatttgctgccgccgagcgtggacgcaggcggatctctgaagagctgggtcgccagcctctcccgcgcacgttgcctggcctccagcacctacttggtcccgcgcgctccctcgtgtcgcccctcggagcagcagccgccgcggtcgccgctacccggaaagaagtcagagacgccgcgagtcgccgccaccgccatgcccaagaataaaggtaaaggaggtaaaaacagacgcaggggtaagaatgagaatgaatctgaaaaaagagaactggtattcaaagaggatgggcaggagtatgctcaggtaatcaaaatgttgggaaatggacggctagaagcaatgtgtttcgatggtgtaaagaggttatgtcacatcagaggaaaattgagaaaaaaggtttggataaatacctcggacattattttggttggtctccgagactaccaggataacaaagctgatgtaattttaaaatacaatgcagacgaagctagaagtctgaaggcatacggcgagcttccagagcatgctaaaatcaatgaaactgatacatttggtcctggagatgatgatgaaattcagtttgatgacattggagatgatgatgaagatattgatgacatctaaattgaactcaacattttacattccatcttttctgaagattgtcctacaatttggattttgatcatgacaaagaagattaaaatttcattagcatgaatgcaatttgttaaagcagactgatttgtttctaagatatttttggtttttttaaaactgataataatgctgaattatcttaagtgagatgttaagcccactttgttcttttaatgtaatggagcttatgggtagaagaccatgtctactaattacaaaaaaaaaaaaaaaccatgattgctgcttttcctaccacttccagtaagaaaatgggtgttttgaagaaatcatttgccttgtctcacggaatctgattaagccctggcctcttgatgtatagagtcatggatattccagttacctagatattcccttgagattttgatacaatttgagggaggcagaagtctgcagttgaagaaaaaaaataagtctgtttgtcatatttaagtagcctgtgcgtatttttatactgattttgatatcatgttcttttcatagtcgtattttgccaccgtaaacat

SEQ ID NO: 627 - DNA, 1383 bp, Homo sapiens
ctagtttctaaggatcatgtctgcgagccaggattcccgatccagagacaatggccccgatgggatggagcccgaaggcgtcatcgagagtaactggaatgagattgttgacagctttgatgacatgaacctctcggagtcccttctccgtggcatctacgcctatggttttgagaagccctctgccatccagcagcgagccattctaccttgtatcaagggttatgatgtgattgctcaagcccaatctgggactgggaaaacggccacatttgccatatcgattctgcagcagattgaattagatctaaaagccacccaggccttggtcctagcacccactcgagaattggctcagcagatacagaaggtggtcatggcactaggagactacatgggcgcctcctgtcacgcctgtatcgggggcaccaacgtgcgtgctgaggtgcagaaactgcagatggaagctccccacatcatcgtgggtacccctggccgtgtgtttgatatgcttaaccggagatacctgtcccccaaatacatcaagatgtttgtactggatgaagctgacgaaatgttaagccgtggattcaaggaccagatctatgacatattccaaaagctcaacagcaacacccaggtagttttgctgtcagccacaatgccttctgatgtgcttgaggtgaccaagaagttcatgagggaccccattcggattcttgtcaagaaggaagagttgaccctggagggtatccgccagttctacatcaacgtggaacgagaggagtggaagctggacacactatgtgacttgtatgaaaccctgaccatcacccaggcagtcatcttcatcaacacccggaggaaggtggactggctcaccgagaagatgcatgctcgagatttcactgtatccgccatgcatggagatatggaccaaaaggaacgagacgtgattatgagggagtttcgttctggctctagcagagttttgattaccactgacctgctggccagaggcattgatgtgcagcaggtttctttagtcatcaactatgaccttcccaccaacagggaaaactatatccacagaatcggtcgaggtggacggtttggccgtaaaggtgtggctattaacatggtgacagaagaagacaagaggactcttcgagacattgagaccttctacaacacctccattgaggaaatgcccctcaatgttgctgacctcatctgaggggctgtcctgccacccagccccagccagggctcaatctctgggggctgaggagcagcaggaggggggagggaagggagccaagggatggacatcttgtcattttttttctttgaataaatgtcactttttgaggcaaaagaagg

SEQ ID NO: 628 - DNA, 1836 bp, Homo sapiens
atggcggcctcagcaaaaaagaagaataagaaggggaagactatctccctaacagactttctggctgaggatgggggtactggtggaggaagcacctatgtttccaaaccagtcagctgggctgatgaaacggatgacctggaaggagatgtttcgaccacttggcacagtaacgatgacgatgtgtatagggcgcctccaattgaccgttccatccttcccactgctccacgggctgctcgggaacccaatatcgaccggagccgtcttcccaaatcgccaccctacactgcttttctaggaaacctaccctatgatgttacagaagagtcaattaaggaattctttcgaggattaaatatcagtgcagtgcgtttaccacgtgaacccagcaatccagagaggttgaaaggttttggttatgctgaatttgaggacctggattccctgctcagtgccctgagtctcaatgaagagtctctaggtaacaggagaattcgagtggacgttgctgatcaagcacaggataaagacagggatgatcgttcttttggccgtgatagaaatcgggattctgacaaaacagatacagactggagggctcgtcctgctacagacagctttgatgactacccacctagaagaggtgatgatagctttggagacaagtatcgagatcgttatgattcagaccggtatcgggatgggtatcgggatgggtatcgggatggcccacgccgggatatggatcgatatggtggccgggatcgctatgatgaccgaggcagcagagactatgatagaggctatgattcccggataggcagtggcagaagagcatttggcagtgggtatcgcagggatgatgactacagaggaggcggggaccgctatgaagaccgatatgacagacgggatgatcggtcgtggagctccagagatgattactctcgggatgattataggcgtgatgatagaggtcccccccaaagacccaaactgaatctaaagcctcggagtactcctgaagaagatgattcctctgctagtacctcccagtccactcgagctgcttctatctttggaggggcaaagcctgttgacacagctgctagagaaagagaagtagaagaacggctacagaaggaacaagagaagttgcagcgtcagtggaatgagccaaaactagaacgacggcctcgggagagacacccaagctggcgaagtgaagaaactcaggaacgggaacggtcgaggacaggaagtgagtcatcacaaactgggacctccaccacatctagcagaaatgcacgaaggagagagagtgagaagtctctagaaaatgaaacactcaataaggaggaagattgccactctccaacttctaaacctcccaaacctgatcagcccctaaaggtaatgccagcccctccaccaaaggagaatgcttgggtgaagcgaagttctaaccctcctgctcgatctcagagctcagacacagagcagcagtcccctacaagtggtgggggaaaagtagctccagctcaaccatctgaggaaggaccaggaaggaaagatgaaaataaagtagatgggatgaatgccccaaaaggccaaactgggaactctagccgtggtccaggagacggagggaacagagaccactggaaggagtcagataggaaagatggcaaaaaggatcaagactccagatctgcacctgagccaaagaaacctgaggaaaatccagcttctaagttcagttctgcaagcaagtatgctgctctctctgttgatggtgaagatgaaaatgagggagaagattatgccgaatag

SEQ ID NO: 629 - DNA, 3820 bp, Homo sapiens
cagcagtgagtcggagctctatggaggtggcagcgggtaccgagtggcggctgcagcagcgactcctctgagctgagtttgaggccgtccccgactccttcctcccccttccctcccccttttttttgttttccgttcccctttcccctcccttccctatccccgacgaccggatcctgaggaggcagctgcggtggcagctgctgagttctcggtgaaggtatttcatttctcctgtcccctcccctccccaccccatctattaatattattcttttgaagattcttcgttgtcaagccgccaaagtggagagtgcgattgcagaagggggtgcttctcgtttcagtgcttcttcgggcggaggaggaagtaggggtgcacctcagcactatcccaagactgctggcaacagcgagttcctggggaaaaccccagggcaaaacgctcagaaatggattcctgcacgaagcactagacgagatgacaactccgcagcaaacaactccgcaaacgaaaaagaacgacatgatgcaatcttcaggaaagtaagaggcatactaaataagcttactcctgaaaagtttgacaagctatgccttgagctcctcaatgtgggtgtagagtctaaactcatccttaaaggggtcatactgctgattgtggacaaagccctagaagagccaaagtatagctcactgtatgctcagctatgtctgcgattggcagaagatgcaccaaactttgatggcccagcagcagagggtcaaccaggacagaagcaaagcaccacattcagacgcctcctaatttccaaattacaagatgaatttgaaaaccgaactagaaatgttgatgtctatgataagcgtgaaaatcccctcctccccgaggaggaggaacagagagccattgctaagatcaagatgttgggaaacatcaaattcattggagagcttggcaagcttgatcttattcacgaatctatccttcataagtgcatcaaaacacttttggaaaagaagaagagagtccaactcaaagatatgggagaggatttggagtgcctctgtcagataatgaggacagtgggacctagattagaccatgaacgagccaagtccttaatggatcagtactttgcccgaatgtgctccttgatgttaagtaaggaattgccagcaaggattcgtttcctgctgcaggataccgtagagttgcgagaacaccattgggttcctcgcaaggcttttcttgacaatggaccaaagacgatcaatcaaattcgtcaagatgcagtaaaagatctaggggtgtttattcctgctcctatggctcaagggatgagaagtgacttctttctggagggaccgttcatgccacccaggatgaaaatggatagggacccacttggaggacttgctgatatgtttggacaaatgccaggtagcggaattggtactggtccaggagttatccaggatagattttcacccaccatgggacgtcatcgttcaaatcaactcttcaatggccatgggggacacatcatgcctcccacacaatcgcagtttggagagatgggaggcaagtttatgaaaagccaggggctaagccagctctaccataaccagagtcagggactcttatcccagctgcaaggacagtcgaaggatatgccacctcggttttctaagaaaggacagcttaatgcagatgagattagcctgaggcctgctcagtcgttcctaatgaataaaaatcaagtgccaaagcttcagccccagataactatgattcctcctagtgcacaaccaccacgcactcaaacaccacctctgggacagacacctcagcttggtctcaaaactaatccaccacttatccaggaaaagcctgccaagaccagcaaaaagccaccaccgtcaaaggaagaactccttaaactaactgaaactgttgtgactgaatatctaaatagtggaaatgcaaatgaggctgtcaatggtgtaagagaaatgagggctcctaaacactttcttcctgagatgttaagcaaagtaatcatcctgtcactagatagaagcgatgaagataaagaaaaagcaagttctttgatcagtttactcaaacaggaagggatagccacaagtgacaacttcatgcaggctttcctgaatgtattggaccagtgtcccaaactggaggttgacatccctttggtgaaatcctatttagcacagtttgcagctcgtgccatcatttcagagctggtgagcatttcagaactagctcaaccactagaaagtggcacccattttcctctcttcctactttgtcttcagcagttagctaaattacaagatcgagaatggttaacagaactttttcaacaaagcaaggtcaatatgcagaaaatgctcccagaaattgatcagaataaggaccgcatgttggagattttggaaggaaagggactgagtttcttattcccactcctcaaattggagaaggaactgttgaagcaaataaagttggatccatcccctcaaaccatatataaatggattaaagataacatctctcccaaacttcatgtagataaaggatttgtgaacatcttaatgactagcttcttacagtacatttctagtgaagtaaacccccccagcgatgaaacagattcatcctctgctccttccaaagaacagttagagcaggaaaaacaactactactatctttcaagccagtaatgcagaaatttcttcatgatcacgttgatctacaagtcagtgccctgtatgctctccaggtgcactgctataacagcaacttcccaaaaggcatgttacttcgcttttttgtgcacttctatgacatggaaattattgaagaagaagctttcttggcttggaaagaagatataacccaagagtttccgggaaaaggcaaggctttgttccaggtgaatcagtggctaacctggttagaaactgctgaagaagaagaatcagaggaagaagctgactaaagaaccagccaaagccttaaattgtgcaaaacatactgttgctatgatgtaactgcatttgacctaaccactgcgaaaattcattccgctgtaatgttttcacaatatttaaagcagaagcacgtcagttaggatttccttctgcataaggtttttttgtagtgtaatgtcttaatcatagtctaccatcaaatattttaggagtatctttaatgtttagatagtatattagcagcatgcaataattacatcataagttctcaagcagaggcagtctattgcaaggaccttctttgctgccagttatcataggctgttttaagttagaaaactgaatagcaacactgaatactgtagaaatgcactttgctcagtaatacttgagttgttgcaatatttgattatccatttggttgttacagaaaaattcttaactgtaattgatggttgttgccgtaatagtatattgcctgtatttctacctctagtaatgggctttatgtgctagattttaatatccttgagcctgggcaagtgcacaagtctttttaaaagaaacatggtttacttgcacaaaactgatcagttttgagagatcgttaatgcccttgaagtggtttttgtgggtgtgaaacaaatggtgagaatttgaattggtccctcctattatagtattgaaattaagtctacttaatttatcaagtcatgttcatgccctgattttatatacttgtatctatcaataaacattgtgatacttgaaaaaaaaaaaaaaaaaaaaaaaaaaaaa

SEQ ID NO: 630 - DNA, 2786 bp, Homo sapiens
agcactctccagcctctcaccgcaaaattacacaccccagtacaccagcagaggaaacttataacctcgggaggcgggtccttcccctcagtgcggtcacatacttccagaagagcggaccagggctgctgccagcacctgccactcagagcgcctctgtcgctgggacccttcagaactctctttgctcacaagttaccaaaaaaaaaagagccaacatgttggtattgctggctggtatctttgtggtccacatcgctactgttattatgctatttgttagcaccattgccaatgtctggttggtttccaatacggtagatgcatcagtaggtctttggaaaaactgtaccaacattagctgcagtgacagcctgtcatatgccagtgaagatgccctcaagacagtgcaggccttcatgattctctctatcatcttctgtgtcattgccctcctggtcttcgtgttccagctcttcaccatggagaagggaaaccggttcttcctctcaggggccaccacactggtgtgctggctgtgcattcttgtgggggtgtccatctacactagtcattatgcgaatcgtgatggaacgcagtatcaccacggctattcctacatcctgggctggatctgcttctgcttcagcttcatcatcggcgttctctatctggtcctgagaaagaaataaggccggacgagttcatggggatctggggggtggggaggaggaagccgttgaatctgggagggaagtggaggttgctgtacaggaaaaaccgagataggggaggggggagggggaagcaaaggggggaggtcaaatcccaaaccattactgaggggattctctactgccaagcccctgccctggggagaaagtagttggctagtactttgatgctcccttgatggggtccagagagcctccctgcagccaccagacttggcctccagctgttcttagtgacacacactgtctggggccccatcagctgccacaacaccagccccacttctgggtcatgcactgaggtccacagacctactgcactgagttaaaatagcggtacaagttctggcaagagcagatactgtctttgtgctgaatacgctaagcctggaagccatcctgcccttctgacccaaagcaaaacatcacattccagtctgaagtgcctactggggggctttggcctgtgagccattgtccctctttggaacagatatttagctctgtggaattcagtgacaaaatgggaggaggaaagagagtttgtaaggtcatgctggtgggttagctaaaccaagaaggagaccttttcacaatggaaaacctgggggatggtcagagcccagtcgagacctcacacacggctgtccctcatggagacctcatgccatggtctttgctaggcctcttgctgaaagccaaggcagctcttctggagtttctctaaagtcactagtgaacaattcggtggtaaaagtaccacacaaactatgggatccaaggggcagtcttgcaacagtgccatgttagggttatgtttttaggattcccctcaatgcagtcagtgtttcttttaagtatacaacaggagagagatggacatggctcattgtagcacaatcctattactcttcctctaacatttttgaggaagttttgtctaattatcaatattgaggatcagggctcctaggctcagtggtagctctggcttagacaccacctggagtgatcacctcttggggaccctgcctatcccacttcacaggtgaggcatggcaattctggaagctgattaaaacacacataaaccaaaaccaaacaacaggcccttgggtgaaaggtgctatataattgtgaagtattaagcctaccgtatttcagccatgataagaacagagtgcctgcattcccaggaaaatacgaaaatcccatgagataaataaaaatataggtgatgggcagatcttttctttaaaataaaaaagcaaaaactcttgtggtacctagtcagatggtagacgagctgtctgctgccgcaggagcacctctatacaggacttagaagtagtatgttattcctggttaagcaggcattgctttgccctggagcagctattttaagccatctcagattctgtctaaaggggttttttgggaagacgttttctttatcgccctgagaagatctaccccagggagaatctgagacatcttgcctacttttctttattagctttctcctcatccatttcttttatacctttcctttttggggagttgttatgccatgatttttggtatttatgtaaaaggattattactaattctatttctctatgtttattctagttaaggaaatgttgagggcaagccaccaaattacctaggctgaggttagagagattggccagcaaaaactgtgggaagatgaactttgtcattatgatttcattatcacatgattatagaaggctgtcttagtgcaaaaaacatacttacatttcagacatatccaaagggaatactcacattttgttaagaagttgaactatgactggagtaaaccatgtattcccttatcttttactttttttctgtgacatttatgtctcatgtaatttgcattactctggtggattgttctagtactgtattgggcttcttcgttaatagattatttcatatactataattgtaaatattttgatacaaatgtttataactctagggatataaaaacagattctgattcccttcaaaaaaaaaaaa

SEQ ID NO: 631 - DNA, 799 bp, Homo sapiens
tcgcctcgcacccccagccagtccgtcgatccagctgccagcgcagccgccagcgccggcacatcccgctctgggctttaaacgtgacccctcgcctcgactcgccctgccctgtgaaaatgttggtgcttcttgctttcatcatcgccttccacatcacctctgcagccttgctgttcattgccaccgtcgacaatgcctggtgggtaggagatgagttttttgcagatgtctggagaatatgtaccaacaacacgaattgcacagtcatcaatgacagctttcaagagtactccacgctgcaggcggtccaggccaccatgatcctctccaccattctctgctgcatcgccttcttcatcttcgtgctccagctcttccgcctgaagcagggagagaggtttgtcctaacctccatcatccagctaatgtcatgtctgtgtgtcatgattgcggcctccatttatacagacaggcgtgaagacattcacgacaaaaacgcgaaattctatcccgtgaccagagaaggcagctacggctactcctacatcctggcgtgggtggccttcgcctgcaccttcatcagcggcatgatgtacctgatactgaggaagcgcaaatagagttccggagctgggttgcttctgctgcagtacagaatccacattcagataaccattttgtatataatcattattttttgaggtttttctagcaaacgtattgtttcctttaaaagccaaaaaaaaaaaaaaaaaaaaaaaaaaaaaaaaaaaagaaaaaaaaaaaaaaaaaaaaa

SEQ ID NO: 632 - DNA, 1812 bp, Homo sapiens
tagctaggcaggaagtcggcgcgggcggcgcggacagtatctgtgggtacccggagcacggagatctcgccggctttacgttcacctcggtgtctgcagcaccctccgcttcctctcctaggcgacgagacccagtggctagaagttcaccatgtctattctcaagatccatgccagggagatctttgactctcgcgggaatcccactgttgaggttgatctcttcacctcaaaaggtctcttcagagctgctgtgcccagtggtgcttcaactggtatctatgaggccctagagctccgggacaatgataagactcgctatatggggaagggtgtctcaaaggctgttgagcacatcaataaaactattgcgcctgccctggttagcaagaaactgaacgtcacagaacaagagaagattgacaaactgatgatcgagatggatggaacagaaaataaatctaagtttggtgcgaacgccattctgggggtgtcccttgccgtctgcaaagctggtgccgttgagaagggggtccccctgtaccgccacatcgctgacttggctggcaactctgaagtcatcctgccagtcccggcgttcaatgtcatcaatggcggttctcatgctggcaacaagctggccatgcaggagttcatgatcctcccagtcggtgcagcaaacttcagggaagccatgcgcattggagcagaggtttaccacaacctgaagaatgtcatcaaggagaaatatgggaaagatgccaccaatgtgggggatgaaggcgggtttgctcccaacatcctggagaataaagaaggcctggagctgctgaagactgctattgggaaagctggctacactgataaggtggtcatcggcatggacgtagcggcctccgagttcttcaggtctgggaagtatgacctggacttcaagtctcccgatgaccccagcaggtacatctcgcctgaccagctggctgacctgtacaagtccttcatcaaggactacccagtggtgtctatcgaagatccctttgaccaggatgactggggagcttggcagaagttcacagccagtgcaggaatccaggtagtgggggatgatctcacagtgaccaacccaaagaggatcgccaaggccgtgaacgagaagtcctgcaactgcctcctgctcaaagtcaaccagattggctccgtgaccgagtctcttcaggcgtgcaagctggcccaggccaatggttggggcgtcatggtgtctcatcgttcgggggagactgaagataccttcatcgctgacctggttgtggggctgtgcactgggcagatcaagactggtgccccttgccgatctgagcgcttggccaagtacaaccagctcctcagaattgaagaggagctgggcagcaaggctaagtttgccggcaggaacttcagaaaccccttggccaagtaagctgtgggcaggcaagcccttcggtcacctgttggctacacagacccctcccctcgtgtcagctcaggcagctcgaggcccccgaccaacacttgcaggggtccctgctagttagcgccccaccgccgtggagttcgtaccgcttccttagaacttctacagaagccaagctccctggagccctgttggcagctctagctttgcagtcgtgtaattggcccaagtcattgtttttctcgcctcactttccaccaagtgtctagagtcatgtgagcctcgtgtcatctccggggtggccacaggctagatccccggtggttttgtgctcaaaataaaaagcctcagtgacccatgag

SEQ ID NO: 633 - DNA, 2254 bp, Homo sapiens
caaccatatccaagcctttgcccgaatacatcctatctgccacacatccagcgtgaggtccctccagctacaaggtgggcaccatggcggagaagtttgactgccactactgcagggatcccttgcaggggaagaagtatgtgcaaaaggatggccaccactgctgcctgaaatgctttgacaagttctgtgccaacacctgtgtggaatgccgcaagcccatcggtgcggactccaaggaggtgcactataagaaccgcttctggcatgacacctgcttccgctgtgccaagtgccttcaacccttggccaatgagacctttgtggccaaggacaacaagatcctgtgcaacaagtgcaccactcgggaggacttccccaagtgcaaggggtgcttcaaggccattgtggcaggagatcaaaacgtggagtacaaggggaccgtctggcacaaagactgcttcacctgtagtaactgcaagcaagtcatcgggactggaagcttcttccctaagggggaggacttctactgcgtgacttgccatgagaccaagttggccaagcattgcgtgaagtgcaacaaggccatcacatctggaggaatcacttaccaggatcagccctggcatgccgattgctttgtgtgtgttacctgctctaagaagctggctgggcagcgtttcaccgctgtggaggaccagtattactgcgtggattgctacaagaacttcgtggccaagaagtgtgctggatgcaagaaccccatcactgggtttggtaaaggctccagtgtggtggcctatgaaggacaatcctggcacgactactgcttccactgcaaaaaatgctccgtgaatctggccaacaagcgctttgttttccaccaggagcaagtgtattgtcccgactgtgccaaaaagctgtaaactgacaggggctcctgtcctgtaaaagggcatttgaatctcgttctttgtgtccttactttctgccctataccatcaataggggaagagtggtccttcccttctttaaagttcctcccttccgtcttttctcccattttacagtattactcaaataagggcacacagtgatcatattagcatttagcaaaaagcaaccctgcagcaaagtgaatttctgtccggctgcaatttaaaaatgaaaacttaggtagattgactcttctgcatgtttctcatagagcagaaaagtgctaatcatttagccacttagtgatgtaagcaagaagcataggagataaaacccccactgagatgcctctcatgcctcagctgggacccaccgtgtagacacacgacatgcaagagttgcagcggctgctccaactcactgctcaccctcttctgtgagcaggaaagaaccctactgacatgcatggtttaacttcctcatcagaactctgcccttccttctgttcttttgtgctttcaaataactaacacgaacttccagaaaattaacatttgaacttagctgtaattctaaactgacctttccccgtactaacgtttggtttccccgtgtggcatgttttctgagcgttcctactttaaagcatggaacatgcaggtgatttgggaagtgtagaaagacctgagaaaacgagcctgtttcagaggaacatcgtcacaacgaatacttctggaagcttaacaaaactaaccctgctgtcctttttattgtttttaattaatatttttgttttaattgatagcaaaatagtttatgggtttggaaacttgcatgaaaatattttagccccctcagatgttcctgcagtgctgaaattcatcctacggaagtaaccgcaaaactctagagggggagttgagcaggcgccagggctgtcatcaacatggatatgacatttcacaacagtgactagttgaatcccttgtaacgtagtagttgtctgctctttgtccatgtgttaatgaggactgcaaagtcccttctgttgtgattcccaggacttttcctcaagaggaaatctggatttccacctaccgcttacctgaaatgcaggatcacctacttactgtattctacattattatatgacatagtataatgagacaatatcaaaagtaaacatgtaatgacaatacatactaacattcttgtaggagtggttagagaagctgatgcctcatttctacattctgtcattagctattatcatctaacgtttcagtgtatccttacagaaataaagcagcatatgaat

SEQ ID NO: 634 - DNA, 9432 bp, Homo sapiens
gccgtggctccggtagcagcaagttcgaaccccgctcccgctccgcttcggttctcgctccttcggcccttgggcctccaaacaccagtccccggcagctcgttgcgcattgcgctctccccgccaccaggatgccggtaaccgagaaggatctagctgaggacgcgccttggaagaagatccagcagaacacgttcacacgctggtgcaacgagcacctcaagtgcgtgaacaaacgcatcggcaacctgcagaccgacctgagcgacgggctgcggctcatcgcgctgctcgaggtgctcagccagaagcgcatgtaccgcaagtaccatcagcggcccacctttcgccagatgcagctcgagaatgtgtccgtggcgctcgagttcctggaccgtgagagcatcaagctcgtgtccatcgatagcaaagccattgtggatgggaacctgaagctcatcttgggtctggtgtggacgctgatcctccactactccatctccatgcccgtgtgggaggatgaaggggatgatgatgccaagaagcagacgccaaagcagaggctgctggggtggattcagaacaagatcccctacttgcccatcaccaactttaaccagaactggcaagacggcaaagccctgggagccctggtagacagctgtgctccaggtctgtgcccagactgggaatcctgggacccgcagaagcctgtggataatgcacgagaagccatgcagcaggcagatgactggctgggtgtcccacaggtcatcactcctgaagaaatcattcacccggatgtggacgagcactcagttatgacttacctgtcccagttccccaaagccaagctcaagccgggggctcctctcaaacccaaactcaacccgaagaaagccagggcctatggcagaggaatcgagcccactggaaacatggtgaagcagccagccaagttcactgtggacaccatcagcgccgggcaaggagacgtgatggtgtttgttgaggacccagaagggaacaaagaggaggcacaagtgacccctgacagcgacaagaacaagacatactctgtggagtatctgcccaaggtcaccgggctacacaaagtcacagtcctctttgcaggacagcacatctccaagagcccatttgaagtgagtgttgacaaggcccagggagatgccagtaaagtcactgcaaaaggtccagggttggaagctgtagggaacatcgccaataagcccacctactttgacatctatacggcaggagctggtgtgggtgacattggtgtggaggtggaagatccccaggggaagaacaccgtggagttgctcgtggaagacaaaggaaaccaggtgtatcgatgtgtgtacaaacccatgcagcctggccctcacgtggtcaagatcttctttgctggggacactattcctaagagtcccttcgttgtgcaggttggggaagcctgcaatccaaatgcctgccgggccagtggccgaggcctacaacccaaaggcgtccgtatccgggagaccacagatttcaaggttgacaccaaagctgcaggaagtggggagctcggggtaaccatgaagggtcctaagggtctggaggagctggtgaagcagaaagactttctggatggggtctacgcattcgagtattaccccagcaccccggggagatacagcattgccatcacatgggggggacaccacattccaaagagcccctttgaagttcaagttggccctgaagcgggtatgcagaaagtccgtgcttggggccctgggctccatggtgggattgtcgggcggtcagcggacttcgtggtagaatccattggctctgaagtggggtctctggggtttgccattgaaggcccctctcaggcaaagattgagtacaacgaccagaatgatggatcgtgtgatgtcaaatactggcccaaggagcctggcgaatatgctgttcacatcatgtgtgacgacgaagacatcaaggacagcccgtacatggccttcatccacccagccacgggaggctacaaccctgatctggttcgagcatacgggccaggtttggagaaatctggatgcattgtcaacaacctggccgagttcactgtggatcctaaggatgctggaaaagctcccttaaagatatttgctcaggatggggaaggccaacgcattgacatccagatgaagaaccggatggacggcacatatgcatgctcatacaccccggtgaaggccatcaagcacaccattgctgtggtctggggaggcgtgaacatcccgcacagcccctacagggtcaacatcgggcaaggtagccatcctcagaaggtcaaagtgtttgggccaggtgtggagagaagtggtctgaaggcaaatgaacctacacacttcacggtggactgtactgaggctggggaaggtgatgtcagtgttggcattaagtgtgatgcccgggtgttaagtgaagatgaggaagacgtggattttgacattattcacaatgccaatgatacgttcacagtcaaatatgtgcctcctgctgctgggcgatacactatcaaagttctctttgcatctcaggaaatccccgccagccctttcagagtcaaagttgacccttcccacgatgccagcaaagtgaaggcagaaggcccagggctcagcaaagcaggtgtggaaaatgggaaaccgacccacttcactgtctacaccaagggggctgggaaagccccgctcaacgtgcagttcaacagccctcttcctggcgatgcagtgaaggatttggatatcatcgataattatgactactctcacacggttaaatatacacccacccaacagggcaacatgcaggttctggtgacttacggtggcgatcccatccctaaaagccctttcactgtgggtgttgctgcaccgctggatctgagcaagataaaactcaatgggctggaaaacagggtggaagttgggaaggatcaggagttcaccgttgataccaggggggcaggaggccaggggaagctggacgtgacaatcctcagcccctctcggaaggtcgtgccatgcctagtgacacctgtgacaggccgggagaacagcacggccaagttcatccctcgggaggaggggctgtatgctgtagacgtgacctacgatggacaccctgtgcccgggagcccctacacagtggaggcctcgctgccaccagatcccagcaaggtgaaggcccacggtcccggcctcgaaggtggtctcgtgggcaagcctgccgagttcaccatcgataccaaaggagctggtactggaggtctgggcttaacggtggaaggtccgtgcgaggccaaaatcgagtgctccgacaatggtgatgggacctgctccgtctcttaccttcccacaaaacccggggagtacttcgtcaacatcctctttgaagaagtccacatacctgggtctcccttcaaagctgacattgaaatgccctttgacccctctaaagtcgtggcatcggggccaggtctcgagcacgggaaggtgggtgaagctggcctccttagcgtcaactgctcggaagcgggaccgggggccctgggcctggaagctgtctcggactcgggaacaaaagccgaagtcagtattcagaacaacaaagatggcacctacgcggtgacctacgtgcccctgacggccggcatgtacacgttgaccatgaagtatggtggcgaactcgtgccacacttccccgcccgggtcaaggtggagcccgccgtggacaccagcaggatcaaagtctttggaccaggaatagaagggaaagatgtgttccgggaagctaccaccgactttacagttgactctcggccgctgacccaggttgggggtgaccacatcaaggcccacattgccaacccctcaggggcctccaccgagtgctttgtcacagacaatgcggatgggacctaccaggtggaatacacaccctttgagaaaggtctccatgtagtggaggtgacatatgatgacgtgcctatcccaaacagtcccttcaaggtggctgtcactgaaggctgccagccatctagggtgcaagcccaaggacctggattgaaagaggcctttaccaacaagcccaatgtcttcaccgtggttaccagaggcgcaggaattggtgggcttggcataactgttgagggaccatcagagtcgaagataaattgcagagacaacaaggatggcagctgcagtgctgagtacattcctttcgcgccgggggattacgatgttaatatcacatatggaggagcccacatccctggcagccccttcagggttcctgtgaaggatgttgtggaccccagcaaggtcaagattgccggccccgggctgggctcaggcgtccgagcccgtgtcctgcagtccttcacggtggacagcagcaaggctggcctggctccgctggaagtgagggttctgggcccacgaggcttggtggagccagtgaacatggtggacaatggagatggcacacacacagtaacctacaccccatctcaggagggaccttacatggtctcagttaaatatgctgatgaagagattcctcgcagtcccttcaaggtcaaggtccttcccacatatgatgccagcaaagtgactgccagtggccccggccttagttcctatggtgtgcctgccagtctacctgtggactttgcaattgatgcccgagatgccggggaaggcctgcttgctgttcaaataacggaccaagaaggaaaacccaaaagagccattgtccatgacaataaagatggcacgtatgctgtcacctacatccccgacaagactgggcgctatatgattggagtcacctacgggggtgacgacatcccactttctccttatcgcatccgagccacacagacgggtgatgccagcaagtgcctggccacgggtcctggaatcgcctccactgtgaaaactggcgaagaagtaggctttgtggttgatgccaagactgccgggaagggtaaagtgacctgcacggttctgaccccagatggcactgaggccgaggccgatgtcattgagaatgaagatggaacctatgacatcttctacacagctgccaagccgggcacatatgtgatctatgtgcgcttcggtggtgttgatattcctaacagccccttcactgtcatggccacagatggggaagtcacagccgtggaggaggcaccggtaaatgcatgtccccctggattcaggccctgggtgaccgaagaggcctatgtcccagtgagtgacatgaacggcctgggatttaagccttttgacctggtcattccgtttgctgtcaggaaaggagaaatcactggagaggtccacatgccttctgggaagacagccacacctgagattgtggacaacaaggacggcacggtcactgttagatatgcccccactgaggtcgggctccatgagatgcacatcaaatacatgggcagccacatccctgagagcccactccagttctacgtgaactaccccaacagtggaagtgtttctgcatacggtccaggcctcgtgtatggagtggccaacaaaactgccaccttcaccatcgtcacagaggatgcaggagaaggtggtctggacttggctattgagggcccctcaaaagcagaaatcagctgcattgacaataaagatgggacatgcacagtgacctacctgccgactctgccaggcgactacagcattctggtcaagtacaatgacaagcacatccctggcagccccttcacagccaagatcacagatgacagcaggcggtgctcccaggtgaagttgggctcagccgctgacttcctgctcgacatcagtgagactgacctcagcagcctgacggccagcattaaggccccatctggccgagacgagccctgtctcctgaagaggctgcccaacaaccacattggcatctccttcatcccccgggaagtgggcgaacatctggtcagcatcaagaaaaatggcaaccatgtggccaacagccccgtgtctatcatggtggtccagtcggagattggtgacgcccgccgagccaaagtctatggccgcggcctgtcagaaggccggactttcgagatgtctgacttcatcgtggacacaagggatgcaggttatggtggcatatccttggcggtggaaggccccagcaaagtggacatccagacggaggacctggaagatggcacctgcaaagtctcctacttccctaccgtgcctggggtttatatcgtctccaccaaattcgctgacgagcacgtgcctgggagcccatttaccgtgaagatcagtggggagggaagagtcaaagagagcatcacccgcaccagtcgggccccgtccgtggccactgtcgggagcatttgtgacctgaacctgaaaatcccagaaatcaacagcagtgatatgtcggcccacgtcaccagcccctctggccgtgtgactgaggcagagattgtgcccatggggaagaactcacactgcgtccggtttgtgccccaggagatgggcgtgcacacggtcagcgtcaagtaccgtgggcagcacgtcaccggcagccccttccagttcaccgtggggccacttggtgaaggaggcgcccacaaggtgcgggcaggaggccctggcctggagagaggagaagcgggagtcccagctgagttcagcatttggacccgggaagcaggcgctggaggcctctccatcgctgttgagggccccagtaaggccgagattacattcgatgaccataaaaatgggtcgtgcggtgtatcttatattgcccaagagcctggtaactacgaggtgtccatcaagttcaatgatgagcacatcccggaaagcccctacctggtgccggtcatcgcaccctccgacgacgcccgccgcctcactgttatgagccttcaggaatcgggattaaaagttaaccagccagcatcctttgctataaggttgaatggcgcaaaaggcaagattgatgcaaaggtgcacagcccctctggagccgtggaggagtgccacgtgtctgagctggagccagataagtatgctgttcgcttcatccctcatgagaatggtgtccacaccatcgatgtcaagttcaatgggagccacgtggttggaagccccttcaaagtgcgcgttggggagcctggacaagcggggaaccctgccctggtgtccgcctatggcacgggactcgaagggggcaccacaggtatccagtcggaattctttattaacaccacccgagcaggtccagggacattatccgtcaccatcgaaggcccatccaaggttaaaatggattgccaggaaacacctgaagggtacaaagtcatgtacacccccatggctcctggtaactacctgatcagtgtcaaatacggtgggcccaaccacatcgtgggcagtcccttcaaggccaaggtgacaggccagcgtctagttagccctggctcagccaacgagacctcatccatcctggtggagtcagtgaccaggtcgtctacagagacctgctatagcgccattcccaaggcatcctcggacgccagcaaggtgacctctaagggggcagggctctcaaaggcctttgtgggccagaagagttccttcctggtggactgcagcaaagctggctccaacatgctgctgatcggggtccatgggcccaccaccccctgcgaggaggtctccatgaagcatgtaggcaaccagcaatacaacgtcacatacgtcgtcaaggagaggggcgattatgtgctggctgtgaagtggggggaggaacacatccctggcagcccttttcatgtcacagtgccttaaaacagttttctcaaatcctggagagagttcttgtggttgcttttgttgcttgtttgtaattcattttatacaaagccctccagcctgtttgtggggctgaaaccccatccctaaaatattgctgttgtaaaatgccttcagaaataagtcctagactggactcttgagggacatattggagaatcttaagaaatgcaagcttgttcagggggctgagaagatcctgagtacactaggtgcaaaccagaactcttggtggaacagaccagccactgcagcagacagaccaggaacacaatgagactgacatttcaaaaaaacaaaactggctagcctgagctgctggttcactcttcagcatttatgaaacaaggctaggggaagatgggcagagaaaaaggggacacctagtttggttgtcatttggcaaaggagatgacttaaaatccgcttaatctcttccagtgtccgtgttaatgtatttggctattagatcactagcactgctttaccgctcctcatcgccaacacccccatgctctgtggccttcttacacttctcagagggcagagtggcagccgggcaccctacagaaactcagagggcagagtggcagccaggcccacatgtctctcaagtacctgtcccctcgctctggtgattatttcttgcagaatcaccacacgagaccatcccggcagtcatggttttgctttagttttccaagtccgtttcagtcccttccttggtctgaagaaattctgcagtggcgagcagtttcccacttgccaaagatcccttttaaccaacactagcccttgtttttaacacacgctccagcccttcatcagcctgggcagtcttaccaaaatgtttaaagtgatctcagaggggcccatggattaacgccctcatcccaaggtccgtcccatgacataacactccacacccgccccagccaacttcatgggtcactttttctggaaaataatgatctgtacagacaggacagaatgaaactcctgcggctctttggcctgaaagttgggaatggttgggggagagaagggcagcagcttattggtggtcttttcaccattggcagaaacagtgagagctgtgtggtgcagaaatccagaaatgaggtgtagggaattttgcctgccttcctgcagacctgagctggctttggaatgaggttaaagtgtcagggacgttgcctgagcccaaatgtgtagtgtggtctgggcaggcagacctttaggttttgctgcttagtcctgaggaagtggccactcttgtggcaggtgtagtatctggggcgagtgttgggggtaaaagcccaccctacagaaagtggaacagcccggacctgatgtgaaaggaccacgggtgttgtaagctgggaccggaaccaaactggaatcaaacgcgactgtaaattgtatcttataacttattaaataaaacattgctccgtaaaaaaaaaaa

SEQ ID NO: 635 - DNA, 1476 bp, Homo sapiens
acggggcctgggcggsaggggcggtggctggagctcggtaaagctcgtgggaccccattgggggaatttgatccaaggaagcggtgattgccgggggaggagaagctcccagatccttgtgtccacttgcagcgggggaggcggagacgcggagcgggccttttggcgtccactgcgcggctgcaccctgccccatcctgccgggatcatggtctgcggcagcccgggagggatgctgctgctgcgggccgggctgcttgccctggctgctctctgcctgctccgggtgcccggggctcgggctgcagcctgtgagcccgtccgcatccccctgtgcaagtccctgccctggaacatgactaagatgcccaaccacctgcaccacagcactcaggccaacgccatcctggccatcgagcagttcgaaggtctgctgggcacccactgcagccccgatctgctcttcttcctctgtgccatgtacgcgcccatctgcaccattgacttccagcacgagcccatcaacccctgtaagtctgtgtgcgagcgggcccggcagggctgtgagcccatactcatcaagtaccgccactcgtggccggagaacctggcctgcgaggagctgccagtgtacgacaggggcgtgtgcatctctcccgaggccatcgttactgcggacggagctgattttcctatggattctagtaacggaaactgtagaggggcaagcagtgaacgctgtaaatgtaagcctattagagctacacagaagacctatttccggaacaattacaactatgtcattcgggctaaagttaaagagataaagactaagtgccatgatgtgactgcagtagtggaggtgaaggagattctaaagtcctctctggtaaacattccacgggacactgtcaacctctataccagctctggctgcctctgccctccacttaatgttaatgaggaatatatcatcatgggctatgaagatgaggaacgttccagattactcttggtggaaggctctatagctgagaagtggaaggatcgactcggtaaaaaagttaagcgctgggatatgaagcttcgtcatcttggactcagtaaaagtgattctagcaatagtgattccactcagagtcagaagtctggcaggaactcgaacccccggcaagcacgcaactaaatcccgaaatacaaaaagtaacacagtggacttcctattaagacttacttgcattgctggactagcaaaggaaaattgcactattgcacatcatattctattgtttactataaaaatcatgtgataactgattattacttctgtttctcttttggtttctgcttctctcttctctcaacccctttgtaatggtttgggggcagactcttaagtatattgtgagttttctatttcactaatcatgagaaaaactgttcttttgcaataataataaattaaacatgctgtta

SEQ ID NO: 636 - DNA, 2650 bp, Homo sapiens
catctcgcacttccaactgccctgtaaccaccaactgcccttattccggctgggacccaggacttcaagccatgtgggtcttgtttctgctcagcgggctcggcgggctgcggatggacagtaattttgatagtttacctgtgcaaattacagttccggagaaaatacggtcaataataaaggaaggaattgaatcgcaggcatcctacaaaattgtaattgaagggaaaccatatactgtgaatttaatgcaaaaaaactttttaccccataattttagagtttacagttatagtggcacaggaattatgaaaccacttgaccaagattttcagaatttctgccactaccaagggtatattgaaggttatccaaaatctgtggtgatggttagcacatgtactggactcaggggcgtactacagtttgaaaatgttagttatggaatagaacccctggagtcttcagttggctttgaacatgtaatttaccaagtaaaacataagaaagcagatgtttccttatataatgagaaggatattgaatcaagagatctgtcctttaaattacaaagcgcagagccacagcaagattttgcaaagtatatagaaatgcatgttatagttgaaaaacaattgtataatcatatggggtctgatacaactgttgtcgctcaaaaagttttccagttgattggattgacgaatgctatttttgtttcatttaatattacaattattctgtcttcattggagctttggatagatgaaaataaaattgcaaccactggagaagctaatgagttattacacacatttttaagatggaaaacatcttatcttgttttacgtcctcatgatgtggcatttttacttgtttacagagaaaagtcaaattatgttggtgcaacctttcaagggaagatgtgtgatgcaaactatgcaggaggtgttgttctgcaccccagaaccataagtctggaatcacttgcagttattttagctcaattattgagccttagtatggggatcacttatgatgacattaacaaatgccagtgctcaggagctgtctgcattatgaatccagaagcaattcatttcagtggtgtgaagatctttagtaactgcagcttcgaagactttgcacattttatttcaaagcagaagtcccagtgtcttcacaatcagcctcgcttagatccttttttcaaacagcaagcagtgtgtggtaatgcaaagctggaagcaggagaggagtgtgactgtgggactgaacaggattgtgcccttattggagaaacatgctgtgatattgccacatgtagatttaaagccggttcaaactgtgctgaaggaccatgctgcgaaaactgtctatttatgtcaaaagaaagaatgtgtaggccttcctttgaagaatgcgacctccctgaatattgcaatggatcatctgcatcatgcccagaaaaccactatgttcagactgggcatccgtgtggactgaatcaatggatctgtatagatggagtttgtatgagtggggataaacaatgtacagacacatttggcaaagaagtagagtttggcccttcagaatgttattctcaccttaattcaaagactgatgtatctggaaactgtggtataagtgattcaggatacacacagtgtgaagctgacaatctgcagtgcggaaaattaatatgtaaatatgtaggtaaatttttattacaaattccaagagccactattatttatgccaacataagtggacatctctgcattgctgtggaatttgccagtgatcatgcagacagccaaaagatgtggataaaagatggaacttcttgtggttcaaataaggtttgcaggaatcaaagatgtgtgagttcttcatacttgggttatgattgtactactgacaaatgcaatgatagaggtgtatgcaataacaaaaagcactgtcactgtagtgcttcatatttacctccagattgctcagttcaatcagatctatggcctggtgggagtattgacagtggcaattttccacctgtagctataccagccagactccctgaaaggcgctacattgagaacatttaccattccaaaccaatgagatggccatttttcttattcattcctttctttattattttctgtgtactgattgctataatggtgaaagttaatttccaaaggaaaaaatggagaactgaggactattcaagcgatgagcaacctgaaagtgagagtgaacctaaagggtagtctggacaacagagatgccatgatatcacttcttctagagtaattatctgtgatggatggacacaaaaaaatggaaagaaaagaatgtacattacctggtttcctgggattcaaacctgcatattgtgattttaatttgaccagaaaatatgatatatatgtataatttcacagataatttacttatttaaaaatgcatgataatgagttttacattacaaatttctgtttttttaaagttatcttacgctatttctgttggttagtagacactaattctgtcagtaggggcatggtataaggaaatatcataatgtaatgaggtggtactatgattaaaagccactgttacatttcaaaaaaaaaaaaaaaaa

SEQ ID NO: 637 - DNA, 2743 bp, Homo sapiens
gcgggccgttatccatttgtgttgttcgccagctaggcctggcctcgtcccgcttcgctcggtcggtctcgcgcgcccccatagccttgctagagggttagcgttagccttaagtgtgcgaatccgaggagcagcgacagactcgagaccacgctccttcctcgggaaggaggcggcacctcgcgtttgaggcccgcctgcgtttgaggcccgcctgcgcttgcggcccgcctgcgcttgaggcctgtctgcgtttgagatctcattgggcgtgattgaggaatttggggaggtttttgggcggtattgaggacgagggggtccgttagtcagcatagaatcctggagcgggaatccctcaccgtctaaatggcgtcgggggcgggacctccgggatctggcttccgcgggccgccgccggccctgaaacgtgagggatagctgagatgaggcagctactgggatggcccccatgcgcatttacatgcagtccgactgccgagctttcgaggcagcaggatttaccgtccacattcctcactactaaccaagcttttagaacagatctcacaagaacctagaggtcggtattttttcgatttaaatttgcctgttactgacgttaacgtctttcgcctagtgagcagtagccaacatgtcagggtgggagtcatattacaaaaccgagggcgatgaagaagcagaggaagaacaagaagagaaccttgaagcaagtggagactataaatattcaggaagagatagtttgatttttttggttgatgcctccaaggctatgtttgaatctcagagtgaagatgagttgacaccttttgacatgagcatccagtgtatccaaagtgtgtacatcagtaagatcataagcagtgatcgagatctcttggctgtggtgttctatggtaccgagaaagacaaaaattcagtgaattttaaaaatatttacgtcttacaggagctggataatccaggtgcaaaacgaattctagagcttgaccagtttaaggggcagcagggacaaaaacgtttccaagacatgatgggccacggatctgactactcactcagtgaagtgctgtgggtctgtgccaacctctttagtgatgtccaattcaagatgagtcataagaggatcatgctgttcaccaatgaagacaacccccatggcaatgacagtgccaaagccagccgggccaggaccaaagccggtgatctccgagatacaggcatcttccttgacttgatgcacctgaagaaacctgggggctttgacatatccttgttctacagagatatcatcagcatagcagaggatgaggacctcagggttcactttgaggaatccagcaagctagaagacctgttgcggaaggttcgcgccaaggagaccaggaagcgagcactcagcaggttaaagctgaagctcaacaaagatatagtgatctctgtgggcatttataatctggtccagaaggctctcaagcctcctccaataaagctctatcgggaaacaaatgaaccagtgaaaaccaagacccggacctttaatacaagtacaggcggtttgcttctgcctagcgataccaagaggtctcagatctatgggagtcgtcagattatactggagaaagaggaaacagaagagctaaaacggtttgatgatccaggtttgatgctcatgggtttcaagccgttggtactgctgaagaaacaccattacctgaggccctccctgttcgtgtacccagaggagtcgctggtgattgggagctcaaccctgttcagtgctctgctcatcaagtgtctggagaaggaggttgcagcattgtgcagatacacaccccgcaggaacatccctccttattttgtggctttggtgccacaggaagaagagttggatgaccagaaaattcaggtgactcctccaggcttccagctggtctttttaccctttgctgatgataaaaggaagatgccctttactgaaaaaatcatggcaactccagagcaggtgggcaagatgaaggctatcgttgagaagcttcgcttcacatacagaagtgacagctttgagaaccccgtgctgcagcagcacttcaggaacctggaggccttggccttggatttgatggagccggaacaagcagtggacctgacattgcccaaggttgaagcaatgaataaaagactgggctccttggtggatgagtttaaggagcttgtttacccaccagattacaatcctgaagggaaagttaccaagagaaaacacgataatgaaggttctggaagcaaaaggcccaaggtggagtattcagaagaggagctgaagacccacatcagcaagggtacgctgggcaagttcactgtgcccatgctgaaagaggcctgccgggcttacgggctgaagagtggtctgaagaagcaggagctgctggaagccctcaccaagcacttccaggactgaccagaggccgcgcgtccagctgcccttccgcagtgtggccaggctgcctggccttgtcctcagccagttaaaatgtgtttctcctgagctaggaagagtctacccgacataagtcgagggactttatgtttttgaggctttctgttgccatggtgatggtgtagccctcccactttgctgttctttactttactgcctgaataaagagccctaagtttgtactaaaaaaaaaaaaaaaaaaaaaaaaaaaaaaaaaaa

SEQ ID NO: 638 - DNA, 1975 bp, Homo sapiens
ggagcaagatggcggcgcgagtgctgcgcgcccgcggagcggcctgggccggcggcctcctgcagcgggcggccccctgcagcctcctgcccaggctccggacatggacatcttccagcaacagatctcgagaagacagctggctaaaatccttatttgtccggaaagttgatccaagaaaagatgcccactccaatctcctagccaaaaaggaaacaagcaatctatacaaattacagtttcacaatgttaaaccggaatgcctagaagcatacaacaaaatttgtcaagaggtgttgccaaagattcacgaagataaacactacccttgtactttggtggggacttggaacacgtggtatggcgagcaggaccaagctgtccacctctggaggtatgaaggaggctatccagccctcacagaagtcatgaataaactcagagaaaataaggaatttttggaatttcgtaaggcaagaagtgacatgcttctctccaggaagaatcagctcctgttggagttcagtttctggaatgagcctgtgccaagatccggacctaatatatatgaactcaggtcttaccaactccgaccaggaaccatgattgaatggggcaattactgggctcgtgcaatccgcttcagacaggatggtaacgaagccgtcggaggattcttctctcagattgggcagctgtacatggtgcaccatctttgggcttacagggatcttcagaccagggaagacatacggaatgcagcatggcacaaacatggctgggaggaattggtatattacacagttccacttattcaggaaatggaatccagaatcatgatcccactgaagacctcgcccctccagtaaagctgtagagtttctatgtgcctacatacatttctgtgacaagtatttgtcgtaaattaattttaattgtgtatcaagtgaaaaagaaacactgaggttttaagctgctgtatatagcttgtgagaaacctcttttctttaaaatttacataatcacaagaaaggaaagaattacagttggactgattgtgacagtgccttgtcgtcctctttgaaacaccccgtgttgtccagtataccttataacacttagccacttctccccaccctccagaaggggtccacgttgaattctgaatcatcttgaaaataagattccaaccacaaaaaaaatttagccatttctttactaaaaaaaaccaaaaaacaaatctgttttataatcacagatttttagacaaatttcttgtatcaggaagaaatacaaattttgtcatgtttctcaagcagtttttctgagtagtttctgaggaggaacaaattacaagtgtacccaataactgaaaatgttttaactcactctcatttgtaagcagtccacatagtagacaatgggttttccaagctgggcaaggtacatttaatcagtaaatcagtttcacatcatgtattgtgatgtttcaatgtgagacacaaaaacaatggcttgaaacttgtgtatcatatgtgattttgaaatgaacaccttgaatagcactaatttttatttgtggtatttttctataacaaaacaagtagctctaggaaaagaggttttattttgtaaacgatcatttgtgacctcagacactctctggctaatattttaataagctcacagcagataattctgagatcatgggtgaggggtggtgcatgttgagatttaaattggcataaagctgcatactttttgtctagctgtttgatttcattttttaatatagtatgccaattttgtgactgttaccatgtgaaagtcctgttgaaatgaacaattgtctgccccacaatcaagaatgtatgtgtaaagtgtgaataaatctcatatcaaatgtcaaacttttacatgtgaatgattttctcaaagaacatagaaaaggcaataaaatcctcttaatttccac

SEQ ID NO: 639 - DNA, 2225 bp, Homo sapiens
cggcggcggcggtggcggcggcgactgctgcggtgaaggaggaggaggagccgagcgggcgctggcaccgaggcctgaccatggacgaggaatacgatgtgatcgtgctggggaccggtctcaccgaatgcatcctgtcgggcatcatgtctgtgaacgggaagaaggtgctgcacatggaccggaacccctactacgggggcgagagctcctccatcacacccctggaggagctgtataagcgttttcagttgctggaggggccccctgagtcgatgggccgaggccgagactggaatgttgacctgattcccaaattcctcatggctaacgggcagctggtaaagatgctactgtatacagaggtgactcgctacctggacttcaaggtggtggagggcagctttgtctacaaggggggcaagatctacaaagtgccgtccactgagactgaggccttggcttccaatctgatgggcatgtttgagaaacggcgcttccgcaagttcctggtgtttgtggcaaacttcgatgagaatgaccccaagacctttgagggcgttgacccccagactaccagcatgcgtgacgtctaccggaagtttgatctgggccaggatgtcatcgatttcactggccatgccctggcgctctaccgcactgatgactacctggaccagccctgccttgagaccgtcaaccgcatcaagttgtacagtgagtccctggcccggtatggcaagagcccatatttatacccgctctacggcttgggcgagctgccccagggttttgcaagattgagtgccatctatggggggacatatatgctgaacaaacctgtggatgacatcatcatggagaacggcaaggtggtgggcgtgaagtctgagggagaggtggcccgctgcaagcagctgatctgtgaccccagctacatcccggaccgtgtgcggaaggctggccaggttatccgcatcatctgtatccttagccaccccatcaagaacaccaacgacgccaactcctgccaaataatcatcccccagaaccaggtcaacaggaagtcagacatctacgtgtgcatgatctcctatgcacacaacgtggcggcccagggcaagtacatagctattgccagcactactgtggagaccacggaccctgaaaaggaggtggagccggctctggagctgttggagcccattgaccagaagtttgtggctatcagtgacttgtatgagcccattgatgatggttgtgagagccaggtgttctgttcctgctcctacgatgccaccacacactttgagacaacctgcaacgacatcaaagacatctacaaacgcatggctggcacggcctttgactttgagaacatgaagcgcaaacagaacgacgtctttggagaagctgagcagtgattgtggccgcccccagcccctgctgccccagcctgtgtctgttctcctcgagggctccagcatcctctgcttcccccaccacgttcccatcacccacctcattgatccactgaccaaatccttaaccctagcgatggcttgggagatggggggttggatagcatcctctttcttggcccttccttatcctaggaaaagagggttcctctccttgtgtgtgtctcttccccccacccctaattcttctgctctgtttgggaagacgtggaggaaaaggtgacttctgcccccaccgctcttacccccactgtagtggcctttggagatgcccccacctcccccccaccaactctcgcgtgttggagagaaggggccctcccagcacaaagttgcattcctccccccctaatttattctaatttattaactttgacccaccctttctgagcctgcagccttcccgtgtggcctgagggctgtcgagtgagctgccccagccccctcccagcccttgcccagcctgggggagtggggaaggcttgggcatggccccgttggaggttgatttgctgttttgtttcttgtctttgtgttctgtggtacttgctgagagaaaagaaaagtgagccaagcagaaggaggtggaaaacggacccaaaccccagtgtgccctgccccatgcctttcctttagtggtgggaaacccttatcttgcaaagtgaatgtgtccccttccccaccctctagtgtatttcacagaaaacaaaacctcccaataaaacggttgaaacctgaaaaaaa

SEQ ID NO: 640 - DNA, 4422 bp, Homo sapiens
aggaggaggagggtgagagagaagctgggagagcagagaaaaggggccaccggtcgcccccccgcttccccgcacgcgctctccagccgcggccgcccgcctgccgcggtcaccccggcctctgcctctgtcccccagtgatcggatcaaggcgctgagcgaggccctgcctgcggggcggccatgcggcggtgacaggagcgcgaccgacacgcacgggcccctcgccccctctcgcctcccgtccgctcgccagctcccctcagccgaggctgctccgcggcggccgcagcccgcgcgcggcccacactcgcctcccctcggcacccccggccccggagctgcctggaggcggccgcactcggggatcatggcccaagttgcaatgtccaccctccccgttgaagatgaggagtcctcggagagcaggatggtggtgacattcctcatgtcagctctcgagtccatgtgtaaagaactggccaagtccaaagccgaagtggcctgcattgcagtgtatgaaacagacgtgtttgtcgtcggaactgaaagaggacgtgcttttgtcaataccagaaaggattttcaaaaagattttgtaaaatattgtgttgaagaagaagaaaaagctgcagagatgcataaaatgaaatctacaacccaggcaaatcggatgagtgtagatgctgtagaaattgaaacactcagaaaaacagttgaggactatttctgcttttgctatgggaaagctttaggcaaatccacagtggtacctgtaccatatgagaagatgctgcgagaccagtcggctgtggtagtgcaggggcttccggaaggtgttgcctttaaacaccccgagaactatgatcttgcaaccctgaaatggattttggagaacaaagcagggatttcattcatcattaagagaccttttttagagccaaagaagcatgtaggtggtcgtgtgatggtaacagatgctgacaggtcaatactatctccaggtggaagttgtggccccatcaaagtgaaaactgaacccacagaagattctggcatttccctggaaatggcagctgtgacagtaaaggaagaatcagaagatcctgattattatcaatataacattcaaggaagccaccattcttcagagggcaatgaaggcacagaaatggaagtaccagcagaagatgatgattattctccaccgtctaagagaccaaaggccaatgagctaccgcagccaccagtcccggaacccgccaatgctgggaagcggaaagtgagggagttcaacttcgagaaatggaatgctcgcatcactgatctacgtaaacaagttgaagaattgtttgaaaggaaatatgctcaagccataaaagccaaaggtccggtgacgatcccgtaccctcttttccagtctcatgttgaagatctttatgtagaaggacttcctgaaggaattccttttagaaggccatctacttacggaattcctcgcctggagaggatattacttgcaaaggaaaggattcgttttgtgattaagaaacatgagcttctgaattcaacacgtgaagatttacagcttgataaaccagcttcaggagtaaaggaagaatggtatgccagaatcactaaattaagaaagatggtggatcagcttttctgcaaaaaatttgcggaacgcttggggagcactgaagccaaggctgtaccgtaccaaaaatttgaggcacacccgaatgatctgtacgtggaaggactgccagaaaacattcctttccgaagtccctcatggtatggaatcccaaggctggaaaaaatcattcaagtgggcaatcgaattaaatttgttattaaaagaccagaacttctgactcacagtaccactgaagttactcagccaagaacgaatacaccagtcaaagaagattggaatgtcagaattaccaagctacggaagcaagtggaagagatttttaatttgaaatttgctcaagctcttggactcaccgaggcagtaaaagtaccatatcctgtgtttgaatcaaacccggagttcttgtatgtggaaggcttgccagaggggattcccttccgaagccctacctggtttggaattccacgacttgaaaggatcgtccgcgggagtaataaaatcaagttcgttgttaaaaaacctgaactagttatttcctacttgcctcctgggatggctagtaaaataaacactaaagctttgcagtcccccaaaagaccacgaagtcctgggagtaattcaaaggttcctgaaattgaggtcaccgtggaaggccctaataacaacaatcctcaaacctcagctgttcgaaccccgacccagactaacggttctaacgttcccttcaagccacgagggagagagttttcctttgaggcctggaatgccaaaatcacggacctaaaacagaaagttgaaaatctcttcaatgagaaatgtggggaagctcttggccttaaacaagctgtgaaggtgccgttcgcgttatttgagtctttcccggaagacttttatgtggaaggcttacctgagggtgtgccattccgaagaccatcgacttttggcattccgagactggagaagatactcagaaacaaagccaaaattaagttcatcattaaaaagcccgaaatgtttgagacggcgattaaggagagcacctcctctaagagccctcccagaaaaataaattcatcacccaatgttaatactactgcatcaggtgttgaagaccttaacatcattcaggtgacaattccagatgatgataatgaaagactctcgaaagttgaaaaagctagacagctaagagaacaagtgaatgacctctttagtcggaaatttggtgaagctattggtatgggttttcctgtgaaagttccctacaggaaaatcacaattaaccctggctgtgtggtggttgatggcatgcccccgggggtgtccttcaaagcccccagctacctggaaatcagctccatgagaaggatcttagactctgccgagtttatcaaattcacggtcattagaccatttccaggacttgtgattaataaccagctggttgatcagagtgagtcagaaggccccgtgatacaagaatcagctgaaccaagccagttggaagttccagccacagaagaaataaaagagactgatggaagctctcagatcaagcaagaaccagaccccacgtggtagacctcttccctcctaggcttaaagtatcagtggttgagaagagcttttcggacctgttactaccccaagctgtgtaatataccttggtataacagaaataccttctatacaaacctttttttctacttttagatagaaatgtctactttttcagcagttctgtgaattaaagagcagagtgactgtgggtctggaatggctggtgtacttgggaatgtactatcaggattttacagcaatgctgggaaatgacagggaaaatgacaggaatgaatctcaccagattttttatgtactcagcagagccttgagttacggtgtttattttccaatcaagtgaagatatctcctacttctcctactggaacatctcagcttctgcagtgaagaaaaattcctgtgatagttcagttctttagtttttctatttgaaaaaaaaaaaatcatttaaatgatcctttgttcacggctctccttaatgactgagtgaacagttcctatctgtatatttgactaaaccttttcctaagctatctctcatggttcctatgtttttttatcataattaaaagcaaaaccatctggatcacctaacagtcagaggtcagtatctcagcgtgtgaattatagaggaatacagagagaacctctcccactttttacttttcgtccaaataaaatgcatggtgtaccagaagttgaagatcgggttgaggattggggctagctcgatgacactaaggccccaacatcgcgggacctgctgtggcgcggattcttaggaacgctgttctagccggccccctctccaggggtcgccgtggccggcattatttcctagttcttcttgtaaccctgaggtgccagcgcggggagtgaggaggggtcagggggctaaggatgcaacctctgacgttctgcgccttcctaggagagtcttacatgtgttgagatttcacaagcaatgcgagttgtaaaataccagctctacaagaaactaggctctgtgacggcatagttttcagtagctttatcacaatattcacaatggagaattatatgacatggtagcagaaataggcccttttatgtgttgcttctattttacctcaaattgtagatatagggtaatcaataaaatccatccatgcctttcacacactaaaaaaaaaaaaaaa

SEQ ID NO: 641 - DNA, 3594 bp, Homo sapiens
aggactttggcgagggggcagccattttggggggtgctgatggatacctgcggggtcggctatgttgccctgggggaggccggccccgtggggaacatgactgtggtagactctcctggacaagaggtgctaaatcagcttgatgtcaagacctcttcagaaatgaccagtgcagaggcttccgtagagatgtcattacctacccctttgcctggatttgaggattctcctgatcagaggaggctccctccagagcaggaaagcctctccagactggaacagccagatctttcttcagagatgtcaaaggtctcaaagcctagggcctcaaagcctggccggaagagaggtggtaggacacgaaaaggccccaaaaggccccaacagcctaatcctccatcagccccactggttcctggtctcttagatcaatccaaccctctgtccacccccatgcctaagaaacgaggtcgaaagtccaaggcagagctgctgctgctgaagttgtcaaaagacctagatcggccagaatctcaatctccaaagaggccccctgaggactttgagaccccttctggggaacgaccccgccgaagggctgcccaagtggcacttctgtatcttcaggaactggctgaagagctctcaacagccctgcctgcccctgtgtcctgtcctgagggccccaaggtgagcagccccaccaaaccgaagaagatccggcagccagcagcctgtccaggtggagaagaggtggatggtgctccacgggatgaagacttttttctccaggttgaggctgaagatgtggaagaaagtgagggcccaagtgagagctcatctgaacctgagcctgtagtgccccgaagcaccccacgaggatctacttcagggaaacagaaaccacactgccgaggaatggctcccaatggcttaccaaatcatatcatggctcctgtttggaagtgcctccatctcaccaaggacttccgagagcagaaacattcatactgggagtttgctgagtggattcctttagcctggaagtggcacttgttatctgagcttgaggccgctccctacctgccccaggaggagaagtctccattgttttctgtacaacgtgaagggctacctgaagatggcaccctctaccgaataaacagatttagctcgatcacagcacatccagagcgctgggatgtgtccttcttcacggggggaccgctctgggctctggactggtgcccagtgccagagggggcaggagcctcgcaatatgtggctcttttctccagccctgacatgaatgagacacacccactgagccagcttcattcgggtcctgggctgctccagctctggggccttgggaccttgcagcaagaaagctgtcctggcaacagggcccactttgtctatgggattgcttgtgacaacggctgcatctgggacctcaagttctgccccagtggagcatgggaacttccaggcacccctcggaaggctcctctcctgccccggttgggtctcttggctctggcctgctcagacgggaaagtactgctattcagtctaccccatccggaggccctgctggctcagcaacccccagatgcagtgaagcctgccatatataaggtacaatgtgtggcaactctgcaggtggggtctatgcaagctacagacccctctgagtgtggtcagtgccttagcctggcctggatgcctaccaggccccaccaacacctagctgctggatattataatggcatggtggttttctggaaccttcccactaactcacccctgcagcggatacggctctctgatggctccttaaagctctaccccttccagtgtttcctagcccatgaccaggctgtgcgtacccttcaatggtgcaaagctaacagccatttccttgtctctgcggggagtgaccggaaaatcaaattctgggaccttcgacgtccttacgaacccataaactctatcaagcgcttcttgagtacagaactggcctggctgcttccctacaatggtgtcactgtggctcaggacaactgctatgcctcttatggactctgtgggattcattatattgacgctggttaccttggtttcaaggcctacttcactgctcctcgaaaaggcaccgtttggagtctttcaggatccgactggcttgggacaatagctgcaggagatatatccggggagctcattgctgctatattaccagatatggcactgaatccaataaatgtcaagcgacctgtagagcgaagatttcctatatataaagcagatctgataccgtatcaggacagtcctgaaggtccagaccattcttctgcttcatctggggtccccaaccctcccaaggctcgaacttacactgaaactgtcaaccatcactacttgctctttcaagacacagatttgggttcattccatgatctgctccgtagagaaccaatgctgcgcatgcaggagggagaggggcattctcaactctgcctggacaggctgcagctggaggctattcataaggtacgtttcagcccaaacctggactcctatggatggctggtatctggggggcagtcagggctggttcgaatccattttgtccgtggactcgcctccccactgggccaccgtatgcagcttgaaagccgagcccacttcaatgctatgttccaaccatcctcccccactagacggcctggcttctctccaaccagccatcgccttctgcccactccctagccttggcccacaccagatccttggagtgaagtcggtcaagaacaaatggcccctatgcacagagccataggaactgggggccttccctggacagtgatcatgccaggcctggacctttaggcctgcctccccaggactccttagatcccactctttctacagacttctgtgatcacagccccctgcgggcaggggggctctccctccaccaactctcaaggctcctcagcctaagactatggctcatgagaaacactcaggcctgacctaggcttgggagtcaaactgctcatattgagcatattgttaagtgggtaaagccaagtaaaggtactgggtgtttttgtgaccacttgtgaatgggtgtatggagaactgaaaagggtatctgcatgaaggctcctgtctgactattccaggatccaatattactgccttctgaaacttcctctttagggtaaccatcatgtatgcccacgagggtgatagtaattcgtgagactgaagttgcttagagtacttctttgaccaaggaataccacagacaccctaccgatagaacagtggctcagatcttacttgctcctgcttacgaagtattcccaatcactggtcatctgaccctacttgaacactcctgaacagtcatgttttttaaaatcttcctttatatcaagtcagagagtatacttctataaatttcactcatggatgttaggaaatctagtcatcttccctgtgattgccctgttaagtatttaaccatagctatcatgtgtttcccaaatcttctctagattaaatatcttcagttacttc

SEQ ID NO: 642 - DNA, 2036 bp, Homo sapiens
gccatggggcgctgggcctgggtccccagcccctggcccccaccggggctgggccccttcctcctcctcctcctgctgctgctgctgctgccacgggggttccagccccagcctggcgggaaccgtacggagtccccagaacctaatgccacagcgacccctgcgatccccactatcctggtgacctctgtgacctctgagaccccagcaacaagtgctccagaggcagagggaccccaaagtggggggctcccgcccccgcccagggcagttccctcgagcagtagcccccaggcccaagcactcaccgaggacgggaggccctgcaggttccccttccgctacgggggccgcatgctgcatgcctgcacttcggagggcagtgcacacaggaagtggtgtgccacaactcacaactacgaccgggacagggcctggggctactgtgtggaggccaccccgcctccagggggcccagctgccctggatccctgtgcctccggcccctgcctcaatggaggctcctgctccaatacccaggacccccagtcctatcactgcagctgcccccgggccttcaccggcaaggactgcggcacagagaaatgctttgatgagacccgctacgagtacctggaggggggcgaccgctgggcccgcgtgcgccagggccacgtggaacagtgcgagtgcttcgggggccggacctggtgcgaaggcacccgacatacagcttgtctgagcagcccttgcctgaacgggggcacctgccacctgatcgtggccaccgggaccaccgtgtgtgcctgcccaccaggcttcgctggacggctctgcaacatcgagcctgatgagcgctgcttcttggggaacggcactgggtaccgtggcgtggccagcacctcagcctcgggcctcagctgcctggcctggaactccgatctgctctaccaggagctgcacgtggactccgtgggcgccgcggccctgctgggcctgggcccccatgcctactgccggaatccggacaatgacgagaggccctggtgctacgtggtgaaggacagcgcgctctcctgggagtactgccgcctggaggcctgcgaatccctcaccagagtccaactgtcaccggatctcctggcgaccctgcctgagccagcctccccggggcgccaggcctgcggcaggaggcacaagaagaggacgttcctgcggccacgtatcatcggcggctcctcctcgctgcccggctcgcacccctggctggccgccatctacatcggggacagcttctgcgccgggagcctggtccacacctgctgggtggtgtcggccgcccactgcttctcccacagcccccccagggacagcgtctccgtggtgctgggccagcacttcttcaaccgcacgacggacgtgacgcagaccttcggcatcgagaagtacatcccgtacaccctgtactcggtgttcaaccccagcgaccacgacctcgtcctgatccggctgaagaagaaaggggaccgctgtgccacacgctcgcagttcgtgcagcccatctgcctgcccgagcccggcagcaccttccccgcaggacacaagtgccagattgcgggctggggccacttggatgagaacgtgagcggctactccagctccctgcgggaggccctggtccccctggtcgccgaccacaagtgcagcagccctgaggtctacggcgccgacatcagccccaacatgctctgtgccggctacttcgactgcaagtccgacgcctgccagggggactcaggggggcccctggcctgcgagaagaacggcgtggcttacctctacggcatcatcagctggggtgacggctgcgggcggctccacaagccgggggtctacacccgcgtggccaactatgtggactggatcaacgaccggatacggcctcccaggcggcttgtggctccctcctgaccctccagcgggacaccctggttcccaccattccctgccttgctgacaataaagatatttccaag

SEQ ID NO: 643 - DNA, 3933 bp, Homo sapiens
cacgaggcagcactctcttcgtcgcttcggccagtgtgtcgggctgggccctgacaagccacctgaggagaggctcggagccgggcccggaccccggcgattgccgcccgcttctctctagtctcacgaggggtttcccgcctcgcacccccacctctggacttgcctttccttctcttctccgcgtgtggagggagccagcgcttaggccggagcgagcctgggggccgcccgccgtgaagacatcgcggggaccgattcaccatggagggcgccggcggcgcgaacgacaagaaaaagataagttctgaacgtcgaaaagaaaagtctcgagatgcagccagatctcggcgaagtaaagaatctgaagttttttatgagcttgctcatcagttgccacttccacataatgtgagttcgcatcttgataaggcctctgtgatgaggcttaccatcagctatttgcgtgtgaggaaacttctggatgctggtgatttggatattgaagatgacatgaaagcacagatgaattgcttttatttgaaagccttggatggttttgttatggttctcacagatgatggtgacatgatttacatttctgataatgtgaacaaatacatgggattaactcagtttgaactaactggacacagtgtgtttgattttactcatccatgtgaccatgaggaaatgagagaaatgcttacacacagaaatggccttgtgaaaaagggtaaagaacaaaacacacagcgaagcttttttctcagaatgaagtgtaccctaactagccgaggaagaactatgaacataaagtctgcaacatggaaggtattgcactgcacaggccacattcacgtatatgataccaacagtaaccaacctcagtgtgggtataagaaaccacctatgacctgcttggtgctgatttgtgaacccattcctcacccatcaaatattgaaattcctttagatagcaagactttcctcagtcgacacagcctggatatgaaattttcttattgtgatgaaagaattaccgaattgatgggatatgagccagaagaacttttaggccgctcaatttatgaatattatcatgctttggactctgatcatctgaccaaaactcatcatgatatgtttactaaaggacaagtcaccacaggacagtacaggatgcttgccaaaagaggtggatatgtctgggttgaaactcaagcaactgtcatatataacaccaagaattctcaaccacagtgcattgtatgtgtgaattacgttgtgagtggtattattcagcacgacttgattttctcccttcaacaaacagaatgtgtccttaaaccggttgaatcttcagatatgaaaatgactcagctattcaccaaagttgaatcagaagatacaagtagcctctttgacaaacttaagaaggaacctgatgctttaactttgctggccccagccgctggagacacaatcatatctttagattttggcagcaacgacacagaaactgatgaccagcaacttgaggaagtaccattatataatgatgtaatgctcccctcacccaacgaaaaattacagaatataaatttggcaatgtctccattacccaccgctgaaacgccaaagccacttcgaagtagtgctgaccctgcactcaatcaagaagttgcattaaaattagaaccaaatccagagtcactggaactttcttttaccatgccccagattcaggatcagacacctagtccttccgatggaagcactagacaaagttcacctgagcctaatagtcccagtgaatattgtttttatgtggatagtgatatggtcaatgaattcaagttggaattggtagaaaaactttttgctgaagacacagaagcaaagaacccattttctactcaggacacagatttagacttggagatgttagctccctatatcccaatggatgatgacttccagttacgttccttcgatcagttgtcaccattagaaagcagttccgcaagccctgaaagcgcaagtcctcaaagcacagttacagtattccagcagactcaaatacaagaacctactgctaatgccaccactaccactgccaccactgatgaattaaaaacagtgacaaaagaccgtatggaagacattaaaatattgattgcatctccatctcctacccacatacataaagaaactactagtgccacatcatcaccatatagagatactcaaagtcggacagcctcaccaaacagagcaggaaaaggagtcatagaacagacagaaaaatctcatccaagaagccctaacgtgttatctgtcgctttgagtcaaagaactacagttcctgaggaagaactaaatccaaagatactagctttgcagaatgctcagagaaagcgaaaaatggaacatgatggttcactttttcaagcagtaggaattggaacattattacagcagccagacgatcatgcagctactacatcactttcttggaaacgtgtaaaaggatgcaaatctagtgaacagaatggaatggagcaaaagacaattattttaataccctctgatttagcatgtagactgctggggcaatcaatggatgaaagtggattaccacagctgaccagttatgattgtgaagttaatgctcctatacaaggcagcagaaacctactgcagggtgaagaattactcagagctttggatcaagttaactgagctttttcttaatttcattcctttttttggacactggtggctcactacctaaagcagtctatttatattttctacatctaattttagaagcctggctacaatactgcacaaacttggttagttcaatttttgatcccctttctacttaatttacattaatgctcttttttagtatgttctttaatgctggatcacagacagctcattttctcagttttttggtatttaaaccattgcattgcagtagcatcattttaaaaaatgcacctttttatttatttatttttggctagggagtttatccctttttcgaattatttttaagaagatgccaatataatttttgtaagaaggcagtaacctttcatcatgatcataggcagttgaaaaatttttacaccttttttttcacattttacataaataataatgctttgccagcagtacgtggtagccacaattgcacaatatattttcttaaaaaataccagcagttactcatggaatatattctgcgtttataaaactagtttttaagaagaaattttttttggcctatgaaattgttaaacctggaacatgacattgttaatcatataataatgattcttaaatgctgtatggtttattatttaaatgggtaaagccatttacataatatagaaagatatgcatatatctagaaggtatgtggcatttatttggataaaattctcaattcagagaaatcatctgatgtttctatagtcactttgccagctcaaaagaaaacaataccctatgtagttgtggaagtttatgctaatattgtgtaactgatattaaacctaaatgttctgcctaccctgttggtataaagatattttgagcagactgtaaacaagaaaaaaaaaatcatgcattcttagcaaaattgcctagtatgttaatttgctcaaaatacaatgtttgattttatgcactttgtcgctattaacatcctttttttcatgtagatttcaataattgagtaattttagaagcattattttaggaatatatagttgtcacagtaaatatcttgttttttctatgtacattgtacaaatttttcattccttttgctctttgtggttggatctaacactaactgtattgttttgttacatcaaataaacatcttctgtggaaaaaaaaaaaaaaaaaaaa

SEQ ID NO: 644 - DNA, 2160 bp, Homo sapiens
agccccctgcccctcgccgccccccgccgcctgcctgggccgggccgaggatgcggcgcagcgcctcggcggccaggcttgctcccctccggcacgcctgctaacttcccccgctacgtccccgttcgcccgccgggccgccccgtctccccgcggcctccgggtccgggtcctccaggacggccaggccgtgccgccgtgtgccctccgccgctcgcccgcgcgccgcgcgctccccgcctgcgcccagcgccccgcgcccgcgccccagtcctcgggcggtccatgctgcccctctgcctcgtggccgccctgctgctggccgccgggcccgggccgagcctgggcgacgaagccatccactgcccgccctgctccgaggagaagctggcgcgctgccgcccccccgtgggctgcgaggagctggtgcgagaggcgggctgcggctgttgcgccacttgcgccctgggcttggggatgccctgcggggtgtacaccccccgttgcggctcgggcctgcgctgctacccgccccgaggggtggagaagcccctgcacacactgatgcacgggcaaggcgtgtgcatggagctggcggagatcgaggccatccaggaaagcctgcagccctctgacaaggacgagggtgaccaccccaacaacagcttcagcccctgtagcgcccatgaccgcaggtgcctgcagaagcacttcgccaaaattcgagaccggagcaccagtgggggcaagatgaaggtcaatggggcgccccgggaggatgcccggcctgtgccccagggctcctgccagagcgagctgcaccgggcgctggagcggctggccgcttcacagagccgcacccacgaggacctctacttcatccccatccccaactgcgaccgcaacggcaacttccaccccaagcagtgtcacccagctctggatgggcagcgtggcaagtgctggtgtgtggaccggaagacgggggtgaagcttccggggggcctggagccaaagggggagctggactgccaccagctggctgacagctttcgagagtgaggcctgccagcaggccagggactcagcgtcccctgctactcctgtgctctggaggctgcagagctgacccagagtggagtctgagtctgagtcctgtctctgcctgcggcccagaagtttccctcaaatgcgcgtgtgcacgtgtgcgtgtgcgtgcgtgtgtgtgtgtttgtgagcatgggtgtgcccttggggtaagccagagcctggggtgttctctttggtgttacacagcccaagaggactgagactggcacttagcccaagaggtctgagccctggtgtgtttccagatcgatcctggattcactcactcactcattccttcactcatccagccacctaaaaacatttactgaccatgtactacgtgccagctctagttttcagccttgggaggttttattctgacttcctctgattttggcatgtggagacactcctataaggagagttcaagcctgtgggagtagaaaaatctcattcccagagtcagaggagaagagacatgtaccttgaccatcgtccttcctctcaagctagcccagagggtgggagcctaaggaagcgtggggtagcagatggagtaatggtcacgaggtccagacccactcccaaagctcagacttgccaggctccctttctcttcttccccaggtccttcctttaggtctggttgttgcaccatctgcttggttggctggcagctgagagccctgctgtgggagagcgaagggggtcaaaggaagacttgaagcacagagggctagggaggtggggtacatttctctgagcagtcagggtgggaagaaagaatgcaagagtggactgaatgtgcctaatggagaagacccacgtgctaggggatgaggggcttcctgggtcctgttcccctaccccatttgtggtcacagccatgaagtcaccgggatgaacctatccttccagtggctcgctccctgtagctctgcctccctctccatatctccttcccctacacctccctccccacacctccctactcccctgggcatcttctggcttgactggatggaaggagacttaggaacctaccagttggccatgatgtcttttctt

SEQ ID NO: 645 - DNA, 1124 bp, Homo sapiens
gccgctgccaccgcaccccgccatggagcggccgtcgctgcgcgccctgctcctcggcgccgctgggctgctgctcctgctcctgcccctctcctcttcctcctcttcggacacctgcggcccctgcgagccggcctcctgcccgcccctgcccccgctgggctgcctgctgggcgagacccgcgacgcgtgcggctgctgccctatgtgcgcccgcggcgagggcgagccgtgcgggggtggcggcgccggcagggggtactgcgcgccgggcatggagtgcgtgaagagccgcaagaggcggaagggtaaagccggggcagcagccggcggtccgggtgtaagcggcgtgtgcgtgtgcaagagccgctacccggtgtgcggcagcgacggcaccacctacccgagcggctgccagctgcgcgccgccagccagagggccgagagccgcggggagaaggccatcacccaggtcagcaagggcacctgcgagcaaggtccttccatagtgacgccccccaaggacatctggaatgtcactggtgcccaggtgtacttgagctgtgaggtcatcggaatcccgacacctgtcctcatctggaacaaggtaaaaaggggtcactatggagttcaaaggacagaactcctgcctggtgaccgggacaacctggccattcagacccggggtggcccagaaaagcatgaagtaactggctgggtgctggtatctcctctaagtaaggaagatgctggagaatatgagtgccatgcatccaattcccaaggacaggcttcagcatcagcaaaaattacagtggttgatgccttacatgaaataccagtgaaaaaaggtgaaggtgccgagctataaacctccagaatattattagtctgcatggttaaaagtagtcatggataactacattacctgttcttgcctaataagtttcttttaatccaatccactaacactttagttatattcactggttttacacagagaaatacaaaataaagatcacacatcaagactatctacaaaaatttattatatatttacagaagaaaagcatgcatatcattaaacaaataaaatactttttatcacaaaaaaaaaaaaaaaa

SEQ ID NO: 646 - DNA, 1887 bp, Homo sapiens
gcgcacggcctgtccgctgcacaccagcttgttggcgtcttcgtcgccgcgctcgccccgggctactcctgcgcgccacaatgagctcccgcatcgccagggcgctcgccttagtcgtcacccttctccacttgaccaggctggcgctctccacctgccccgctgcctgccactgccccctggaggcgcccaagtgcgcgccgggagtcgggctggtccgggacggctgcggctgctgtaaggtctgcgccaagcagctcaacgaggactgcagcaaaacgcagccctgcgaccacaccaaggggctggaatgcaacttcggcgccagctccaccgctctgaaggggatctgcagagctcagtcagagggcagaccctgtgaatataactccagaatctaccaaaacggggaaagtttccagcccaactgtaaacatcagtgcacatgtattgatggcgccgtgggctgcattcctctgtgtccccaagaactatctctccccaacttgggctgtcccaaccctcggctggtcaaagttaccgggcagtgctgcgaggagtgggtctgtgacgaggatagtatcaaggaccccatggaggaccaggacggcctccttggtaaggagctgggattcgatgcctccgaggtggagttgacgagaaacaatgaattgattgcagttggaaaaggcagctcactgaagcggatccctgtttttggaatggagcctcgcatccgatacaaccctttacaaggccagaaatgtattgttcaaacaacttcatggtcccagtgctcaaagacctgtggaactggtatctccacacgagttaccaatgacaaccctgagtgccgccttgtgaaagaaacccggatttgtgaggtgcggccttgtggacagccagtgtacagcagcctgaaaaagggcaagaaatgcagcaagaccaagaaatcccccgaaccagtcaggtttacttacgctggatgtttgagtgtgaagaaataccggcccaagtactgcggttcctgcgtggacggccgatgctgcacgccccagctgaccaggactgtgaagatgcggttccgctgcgaagatggggagacattttccaagaacgtcatgatgatccagtcctgcaaatgcaactacaactgcccgcatgccaatgaagcagcgtttcccttctacaggctgttcaatgacattcacaaatttagggactaaatgctacctgggtttccagggcacacctagacaaacaagggagaagagtgtcagaatcagaatcatggagaaaatgggcgggggtggtgtgggtgatgggactcattgtagaaaggaagccttgctcattcttgaggagcattaaggtatttcgaaactgccaagggtgctggtgcggatggacactaatgcagccacgattggagaatactttgcttcatagtattggagcacatgttactgcttcattttggagcttgtggagttgatgactttctgttttctgtttgtaaattatttgctaagcatattttctctaggcttttttccttttggggttctacagtcgtaaaagagataataagattagttggacagtttaaagcttttattcgtcctttgacaaaagtaaatgggagggcattccatcccttcctgaagggggacactccatgagtgtctgtgagaggcagctatctgcactctaaactgcaaacagaaatcaggtgttttaagactgaatgttttatttatcaaaatgtagcttttggggagggaggggaaatgtaatactggaataatttgtaaatgattttaattttatattcagtgaaaagattttatttatggaattaaccatttaataaagaaatatttacct

SEQ ID NO: 647 - DNA, 1102 bp, Homo sapiens
gcctggacagtcagcaaggaattgtctcccagtgcattttgccctcctggctgccaactctggctgctaaagcggctgccacctgctgcagtctacacagcttcgggaagaggaaaggaacctcagaccttccagatcgcttcctctcgcaacaaactatttgtcgcaggaataaagatggctgctgaaccagtagaagacaattgcatcaactttgtggcaatgaaatttattgacaatacgctttactttatagctgaagatgatgaaaacctggaatcagattactttggcaagcttgaatctaaattatcagtcataagaaatttgaatgaccaagttctcttcattgaccaaggaaatcggcctctatttgaagatatgactgattctgactgtagagataatgcaccccggaccatatttattataagtatgtataaagatagccagcctagaggtatggctgtaactatctctgtgaagtgtgagaaaatttcaactctctcctgtgagaacaaaattatttcctttaaggaaatgaatcctcctgataacatcaaggatacaaaaagtgacatcatattctttcagagaagtgtcccaggacatgataataagatgcaatttgaatcttcatcatacgaaggatactttctagcttgtgaaaaagagagagacctttttaaactcattttgaaaaaagaggatgaattgggggatagatctataatgttcactgttcaaaacgaagactagctattaaaatttcatgccgggcgcagtggctcacgcctgtaatcccagccctttgggaggctgaggcgggcagatcaccagaggtcaggtgttcaagaccagcctgaccaacatggtgaaacctcatctctactaaaaatactaaaaattagctgagtgtagtgacgcatgccctcaatcccagctactcaagaggctgaggcaggagaatcacttgcactccggaggtagaggttgtggtgagccgagattgcaccattgcgctctagcctgggcaacaacagcaaaactccatctcaaaaaataaaataaataaataaacaaataaaaaattcataatgtg

SEQ ID NO: 648 - DNA, 4737 bp, Homo sapiens
ctgaggccggcgctgcaggcagcggcggctgcgcggtgaacgaggcggcctgcgcggcggagtgctgagtcccgatccccggctctgtccggcccacggatcctcaagcccgggccccgggcccggccccagcctcagccctgagcgtctcggggcggatggcgcggggcggcgggggcgggcggtgctgagccctgcgcgggccatggcctcggcctgcggggcgccgggcccggggggcgccctgggcagccaggccccctcctggtaccaccgcgacctgagccgggcggccgcggaggagctgctggcccgggcgggccgcgatggcagcttcctggtccgagacagcgagagcgtggcgggggccttcgcgctctgcgtcctgtatcagaagcatgtgcacacgtatcgcattctgcctgatggagaagatttcttggctgtgcagacctcgcagggtgtgcctgtgcgccgcttccagaccctgggtgagctcatcggcctgtacgcccagcccaaccagggccttgtgtgcgccctgcttcttcctgtagagggtgagcgagagccggacccaccggatgaccgggatgcctcagatggggaggatgagaagcccccgctgcccccgcgctctggctccaccagcatttctgcccccactgggcccagcagtcccctgccagctcctgagactcccacagctccagctgctgagagtgctcccaatgggctgagcaccgtctcgcacgactacctgaaaggcagctatgggctggacctggaagctgtgaggggtggagccagccacctgccccacctcacccgtaccctcgctacctcatgccggaggctgcacagtgaggtggacaaggtcctgtcaggcctggagatcctgtccaaggtgtttgaccagcagagctcgcccatggtgacccgccttttgcagcagcagaacctgccacagacaggggagcaggaactagagagcctggtgctgaagctgtcagtgctaaaggacttcctgtcaggcatccagaagaaggccctgaaggccctacaggacatgagctccacagcacccccagctccgcagccatccacacgtaaggccaagaccatccccgtgcaggcctttgaggtgaagctagatgtgaccctgggtgacctgaccaagattgggaagtcacagaagttcacgctgagcgtggatgtggagggtgggcggctggtgctgctgcggagacagcgggactcccaggaggactggaccaccttcacgcacgaccgcatccgccagctcattaagtcccagcgtgtccagaacaagctgggtgttgtgtttgagaaggagaaggaccggactcagcgcaaggacttcatctttgtcagtgcccggaagcgggaggccttctgccagctgttgcagctcatgaagaacaagcactccaagcaggacgagcccgacatgatctcagtcttcataggcacctggaacatgggaagtgtaccacctccaaaaaacgtgacatcctggttcacatcgaagggtctggggaagaccctggacgaggtcacagtgaccataccccatgacatctatgtctttgggacccaggagaactcagtgggcgaccgcgagtggctggacctactgcgcgggggcctcaaggagcttacggatctggattaccgcccgattgccatgcaatcactgtggaatatcaaggtggcagtgctggtcaagccagagcacgagaaccgtatcagccatgtcagtacgtccagtgtgaagactggcatcgccaacaccctggggaacaagggggctgtgggcgtctccttcatgtttaatggcacctcatttggctttgtgaattgtcacctcacctcgggaaatgagaagacggctcggaggaaccaaaactacttggacatcctgcggctgctctcgctgggcgaccggcagctcaatgcctttgacatctctctgcgtttcacacacctcttctggtttggggacctcaactaccgcctggacatggatatccaggagatcctgaactacatcagcaggaaagagtttgagcccctcctcagggtggaccagctcaacctggagcgggagaagcacaaggtcttccttcgattcagtgaggaggagatctccttcccacccacctaccgctatgagcggggttcccgggacacatatgcctggcacaagcagaagccaactggggtccggaccaatgtgccctcatggtgtgaccggattctgtggaaatcctaccctgaaactcacatcatctgcaattcttatggttgcactgatgacatcgtcaccagcgaccattcccccgtgtttgggacatttgaggttggagttacctcccagttcatctccaagaaagggctctcaaagacttcagaccaggcctacattgagtttgagagcatcgaggccattgtgaagacagccagccgcaccaagttcttcatcgagttctactctacctgcctggaggaatacaagaagagctttgagaatgatgcccagagcagtgacaacatcaacttcctcaaagtgcagtggtcttcacgccagctgcccacgctcaaaccaattctggctgatatcgagtacctgcaggaccagcacctcctgctcacagtcaagtccatggatggctatgaatcctatggggagtgtgtggttgcactcaaatccatgatcggcagcacggcccaacagttcctgaccttcctatcccaccgtggcgaggagacaggcaatatcagaggctccatgaaggtgcgggtgcccacggagcgcctgggcacccgtgagcggctctacgagtggatcagcattgataaggatgaggcaggagcaaagagcaaagccccctctgtgtcccgagggagccaggagcccaggtcagggagccgcaagccagccttcacagaggcctcctgcccgctctccaggttatttgaagaaccagagaaaccgccaccaacggggaggcccccagccccaccccgagcagctccccgggaggagcccttgacccccaggttgaagccagagggagctcctgaaccagaaggggtggcggcccccccacccaagaacagcttcaataaccctgcctactacgtccttgaaggggtcccgcaccagctgctgcccccggagccaccctcgcctgccagggcccctgtcccatctgccaccaagaacaaagtggccattacagtgcctgctccacagcttgggcaccaccggcaccctcgtgtgggagaggggagttcttcagatgaggagtctggaggcacactgccccctccagactttccacctccaccactgccggactcagccatcttcctgccccccagcctggatcctttaccagggccagtggtccggggccgtggtggggctgaggcccgtggcccaccacctcccaaggcccatccaaggcctccactgcccccaggcccctcaccagccagcactttcctgggggaagtgggcagtggggatgaccggtcctgctcggtgctgcagatggccaagacgctgagcgaggtggactatgcccctgctgggcctgcacgctcagcgctcctcccaggccccctggagctgcagcccccccggggactgccctcggactatggccggcccctcagcttccctccaccccgcatccgggagagcatccaggaagacctggcagaggaggctccgtgcctgcagggcgggcgggccagcgggctgggcgaggcaggcatgagtgcctggctgcgggccatcggcttggagcgctatgaggagggcctggtgcataatggctgggacgacctggagtttctcagtgacatcaccgaggaggacttggaggaggctggggtgcaggacccggctcacaagcgcctccttctggacaccctgcagctcagcaagtgatagcggaggcaccacgaagctgtgaactcagagcccctccctgctaccaaggcccagctatggccccagggttgaaaagttatgagggtcagggcagtatctctctgcctatttattggggtgcctatttattggggatctgcattccccgctgcccaatcatttgcaatgccctaattagggcatcctgcccctcgccttttaggctcaggacggaaggtcagttgccatggttaccgaggaccctggttactctggtgctgtcctgttttactggaccccgcctcccagccccaggggtgcctgtgggggtccatttgggtacgtctgggcccccactttcaccagtttctgcggccttccaccgggcctgaaccacagcggaggagctccgctaagacctccccacccccgctgggggtgggggcgggtgtccgtccggaaatgaaggaatagcccgaggaccgggctggggtttatttaaactgttctgtgtgggtctggggagggagagcaccttaatattattggggttggttggggtggggcaggatctcagccataaagtgccagtttgcttagttctcactgtctcctggtctgtgctgccctgctctggggatgcacggcggcagggtgggggagggaggttcctcgcaggtctcagcccgggacagggtcttgcaagcagcctcctgggcagtcgtaagggttgcggcgtgatgtcttcaataaattaagttttatttggaaaa

SEQ ID NO: 649 - DNA, 1510 bp, Homo sapiens
ggactcccttttctttggcaagatggcggagtacgacttgactactcgcatcgcgcactttttggatcggcatctagtctttccgcttcttgaatttctctctgtaaaggagatatataatgaaaaggaattattacaaggtaaattggaccttcttagtgataccaacatggtagactttgctatggatgtatacaaaaacctttattctgatgatattcctcatgctttgagagagaaaagaaccacagtggttgcacaactgaaacagcttcaggcagaaacagaaccaattgtgaagatgtttgaagatccagaaactacaaggcaaatgcagtcaaccagggatggtaggatgctctttgactacctggcggacaagcatggttttaggcaggaatatttagatacactctacagatatgcaaaattccagtacgaatgtgggaattactcaggagcagcagaatatctttatttttttagagtgctggttccagcaacagatagaaatgctttaagttcactctggggaaagctggcctctgaaatcttaatgcagaattgggatgcagccatggaagaccttacacggttaaaagagaccatagataataattctgtgagttctccacttcagtctcttcagcagagaacatggctcattcactggtctctgtttgttttcttcaatcaccccaaaggtcgcgataatattattgacctcttcctttatcagccacaatatcttaatgcaattcagacaatgtgtccacacattcttcgctatttgactacagcagtcataacaaacaaggatgttcgaaaacgtcggcaggttctaaaagatctagttaaagttattcaacaggagtcttacacatataaagacccaattacagaatttgttgaatgtttatatgttaactttgactttgatggggctcagaaaaagctgagggaatgtgaatcagtgcttgtgaatgacttcttcttggtggcttgtcttgaggatttcattgaaaatgcccgtctcttcatatttgagactttctgtcgcatccaccagtgtatcagcattaacatgttggcagataaattgaacatgactccagaagaagctgaaaggtggattgtaaatttgattagaaatgcaagactggatgccaagattgattctaaattaggtcatgtggttatgggtaacaatgcagtctcaccctatcagcaagtgattgaaaagaccaaaagcctttcctttagaagccagatgttggccatgaatattgagaagaaacttaatcagaatagcaggtcagaggctcctaactgggcaactcaagattctggcttctactgaagaaccataaagaaaagatgaaaaaaaaaactatcaaagaaagatgaaataataaaactattatataaagggtgacttacattttggaaacaacatattacgtataaattttgaagaattggaataaaattgattcattttaaaaaaaaa

SEQ ID NO: 650 - DNA, 3344 bp, Homo sapiens
ggtacagctgcgcgtctgcgggaataggtgcagcgggcccttggcgggggactctgagggaggagctggggacggcgaccctaggagagttctttggggtgactttcaagatggactctactctaacagcaagtgaaatccggcagcgatttatagatttcttcaagaggaacgagcatacgtatgttcactcgtctgccaccatcccattggatgaccccactttgctctttgccaatgcaggcatgaaccagtttaaacccattttcctgaacacaattgacccatctcaccccatggcaaagctgagcagagctgccaatacccagaagtgcatccgggctgggggcaaacaaaatgacctggacgatgtgggcaaggatgtctatcatcacaccttcttcgagatgctgggctcttggtcttttggagattactttaaggaattggcatgtaagatggctctggaactcctcacccaagagtttggcattcccattgaaagactttatgttacttactttggcggggatgaagcagctggcttagaagcagatctggaatgcaaacagatctggcaaaatttggggctggatgacaccaaaatcctcccaggcaacatgaaggataacttctgggagatgggtgacacgggcccctgtggtccttgcagtgagatccactacgaccggattggtggtcgggacgccgcacatcttgtcaaccaggacgaccctaatgtgctggagatctggaaccttgtgttcatccagtataacagggaagctgatggcattctgaaacctcttcccaagaaaagcattgacacagggatgggcctggaacgactggtatctgtgctgcagaataagatgtccaactatgacactgacctttttgtcccttactttgaagccattcagaagggcacaggtgcccgaccatacactgggaaagttggtgctgaggatgccgatgggattgacatggcctaccgggtgctggctgaccatgctcggaccatcactgtggcactggctgatggtggccggcctgacaacacagggcgtggatatgtgttgagacggattctccgccgagctgtccgatacgcccatgaaaagctcaatgccagcaggggcttctttgctacgttagtggatgttgtcgtccagtccctgggagatgcatttcctgagctgaagaaggacccagacatggtgaaggacatcattaatgaagaagaggtgcagtttctcaagactctcagcagagggcgtcgcatcctggacaggaaaattcagagcctgggagacagcaagaccattcccggagacactgcttggctcctctatgacacctatgggtttccagtggatctgactggactgattgctgaagagaagggcctggtggtagacatggatggctttgaagaggagaggaaactggcccagctgaaatcacagggcaagggagctggtggggaagacctcattatgctggacatttacgctatcgaagagctccgggcacggggtctggaggtcacagatgattccccaaagtacaattaccatttggactccagtggtagctatgtatttgagaacacagtggctacggtgatggctctgcgcagggagaagatgttcgtggaagaggtgtccacaggccaggagtgtggagtggtgctggacaagacctgtttctatgctgagcaaggaggccagatctatgacgaaggctacctggtgaaggtggatgacagcagtgaagataaaacagagtttacagtgaagaatgctcaggtccgaggagggtatgtgctacacattggaaccatctacggtgacctgaaagtgggggatcaggtctggctgtttattgatgagccccgacgaagacccatcatgagcaaccacacagctacgcacattctgaacttcgccctgcgctcagtgcttggggaagctgaccagaaaggctcattggttgctcctgaccgcctcagatttgactttactgccaagggagccatgtccacccaacagatcaagaaggctgaagagattgctaatgagatgattgaggcagccaaggccgtctatacccaggattgccccctggcagcagcgaaagccatccagggcctacgggctgtgtttgatgagacctatcctgaccctgtgcgagtcgtctccattggggtcccggtgtccgagttgctggatgacccctctgggcctgctggctccctgacttctgttgagttctgtgggggaacgcacctgcggaactcgagtcatgcaggagcttttgtgatcgtgacggaagaagccattgccaagggtatccggaggattgtggctgtcacaggtgccgaggcccagaaggccctcaggaaagcagagagcttgaagaaatgtctctctgtcatggaagccaaagtgaaggctcagactgctccaaacaaggatgtgcagagggagatcgctgaccttggagaggccctggccactgcagtcatcccccagtggcagaaggatgaattgcgggagactctcaaatccctaaagaaggtcatggatgacttggaccgagccagcaaagccgatgtccagaaacgagtgttagagaagacgaagcagttcatcgacagcaaccccaaccagcctcttgtcatcctggagatggagagcggcgcctcagccaaggccctgaatgaagccttgaagctcttcaagatgcactcccctcagacttctgccatgctcttcacggtggacaatgaggctggcaagatcacgtgcctgtgtcaagtcccccagaatgcagccaatcggggcttaaaagccagcgagtgggtgcagcaggtgtcaggcttgatggacggtaaaggtggtggcaaggatgtgtctgcacaggccacaggcaagaacgttggctgcctgcaggaggcgctgcagctggccacttccttcgcccagctgcgcctcggggatgtaaagaactgagtggggaaggaggaggctcccactggatccatccgtccagccaagagctcttcatctgctacaagaacatttgaatcttgggacctttaaagagcccctcctaacccagcagtaactggaacacacttgggagcagtcctatgtctcagtgccccttaaatttctgccctgagccctccacgtcagtgccatcggtctagaaccactaaccccgcattgctgttgatcgtcacgctcgcatctatagataacggctctccagacctgagctttccgcgtcagcaagtaggaatcgtttttgctgcagagaataaaaggaccacgtgc

SEQ ID NO: 651 - DNA, 1919 bp, Homo sapiens
gtctcagtcgccgctgccagctctcgcactctgttcttccgccgctccgccgtcgcgtttctctgccggtcgcaatggaagaagagatcgccgcgctggtcattgacaatggctccggcatgtgcaaagctggttttgctggggacgacgctccccgagccgtgtttccttccatcgtcgggcgccccagacaccagggcgtcatggtgggcatgggccagaaggactcctacgtgggcgacgaggcccagagcaagcgtggcatcctgaccctgaagtaccccattgagcatggcatcgtcaccaactgggacgacatggagaagatctggcaccacaccttctacaacgagctgcgcgtggccccggaggagcacccagtgctgctgaccgaggcccccctgaaccccaaggccaacagagagaagatgactcagattatgtttgagaccttcaacaccccggccatgtacgtggccatccaggccgtgctgtccctctacgcctctgggcgcaccactggcattgtcatggactctggagacggggtcacccacacggtgcccatctacgagggctacgccctcccccacgccatcctgcgtctggacctggctggccgggacctgaccgactacctcatgaagatcctcactgagcgaggctacagcttcaccaccacggccgagcgggaaatcgtgcgcgacatcaaggagaagctgtgctacgtcgccctggacttcgagcaggagatggccaccgccgcatcctcctcttctctggagaagagctacgagctgcccgatggccaggtcatcaccattggcaatgagcggttccggtgtccggaggcgctgttccagccttccttcctgggtatggaatcttgcggcatccacgagaccaccttcaactccatcatgaagtgtgacgtggacatccgcaaagacctgtacgccaacacggtgctgtcgggcggcaccaccatgtacccgggcattgccgacaggatgcagaaggagatcaccgccctggcgcccagcaccatgaagatcaagatcatcgcacccccagagcgcaagtactcggtgtggatcggtggctccatcctggcctcactgtccaccttccagcagatgtggattagcaagcaggagtacgacgagtcgggcccctccatcgtccaccgcaaatgcttctaaacggactcagcagatgcgtagcatttgctgcatgggttaattgagaatagaaatttgcccctggcaaatgcacacacctcatgctagcctcacgaaactggaataagccttcgaaaagaaattgtccttgaagcttgtatctgatatcagcactggattgtagaacttgttgctgattttgaccttgtattgaagttaactgttccccttggtatttgtttaataccctgtacatatctttgagttcaacctttagtacgtgtggcttggtcacttcgtggctaaggtaagaacgtgcttgtggaagacaagtctgtggcttggtgagtctgtgtggccagcagcctctgatctgtgcagggtattaacgtgtcagggctgagtgttctgggatttctctagaggctggcaagaaccagttgttttgtcttgcgggtctgtcagggttggaaagtccaagccgtaggacccagtttcctttcttagctgatgtctttggccagaacaccgtgggctgttacttgctttgagttggaagcggtttgcatttacgcctgtaaatgtattcattcttaatttatgtaaggttttttttgtacgcaattctcgattctttgaagagatgacaacaaattttggttttctactgttatgtgagaacattaggccccagcaacacgtcattgtgtaaggaaaaataaaagtgctgccgtaacc

SEQ ID NO: 652 - DNA, 969 bp, Homo sapiens
gaactggtggcagtgagagacttcggcggacatggctcccagcgtgccagcggcagaacccgagtatcctaaaggcatccgggccgtgctgctggggcctcccggggccggtaaagggacccaggcacccagattggctgaaaacttctgtgtctgccatttagctactggggacatgctgagggccatggtggcttctggctcagagctaggaaaaaagctgaaggcaactatggatgctgggaaactggtgagtgatgaaatggtagtggagctcattgagaagaatttggagacccccttgtgcaaaaatggttttcttctggatggcttccctcggactgtgaggcaggcagaaatgctcgatgacctcatggagaagaggaaagagaagcttgattctgtgattgaattcagcatcccagactctctgctgatccgaagaatcacaggaaggctgattcaccccaagagtggccgttcctaccacgaggagttcaaccctccaaaagagcccatgaaagatgacatcaccggggaacccttgatccgtcgatcagatgataatgaaaaggccttgaaaatccgcctgcaagcctaccacactcaaaccaccccactcatagagtactacaggaaacgggggatccactccgccatcgatgcatcccagacccccgatgtcgtgttcgcaagcatcctagcagccttctccaaagccacatgtaaagacttggttatgtttatctaatgttgggtccaagaaggaatttctttccatccctgtgaggcaatgggtgggaatgataggacaggcaaagagaagcttcctcaggctagcaaaaatatcatttgatgtattgattaaaaaagcacttgcttgatgtatctttggcgtgtgtgctactctcatctgtgtgtatgtgtgttgtgtgtgtgtgtgtgtgcatcgcaatatcgtgttccact

SEQ ID NO: 653 - DNA, 1262 bp, Homo sapiens
ctcagttcacagctgccctgttgcagggaggcggtggcccttctgttgctagaccgagcctgtgggatataccaaggcagaggagcccatagccatgaggagcctcggggccctgctcttgctgctgagcgcctgcctggcggtgagcgctggccctgtgccaacgccgcccgacaacatccaagtgcaggaaaacttcaatatctctcggatctatgggaagtggtacaacctggccatcggttccacctgcccctggctgaagaagatcatggacaggatgacagtgagcacgctggtgctgggagagggcgctacagaggcggagatcagcatgaccagcactcgttggcggaaaggtgtctgtgaggagacgtctggagcttatgagaaaacagatactgatgggaagtttctctatcacaaatccaaatggaacataaccatggagtcctatgtggtccacaccaactatgatgagtatgccattttcctgaccaagaaattcagccgccatcatggacccaccattactgccaagctctacgggcgggcgccgcagctgagggaaactctcctgcaggacttcagagtggttgcccagggtgtgggcatccctgaggactccatcttcaccatggctgaccgaggtgaatgtgtccctggggagcaggaaccagagcccatcttaatcccgagagtccggagggctgtgctaccccaagaagaggaaggatcagggggtgggcaactggtaactgaagtcaccaagaaagaagattcctgccagctgggctactcggccggtccctgcatgggaatgaccagcaggtatttctataatggtacatccatggcctgtgagactttccagtacggcggctgcatgggcaacggtaacaacttcgtcacagaaaaggagtgtctgcagacctgccgaactgtggcggcctgcaatctccccatagtccggggcccctgccgagccttcatccagctctgggcatttgatgctgtcaaggggaagtgcgtcctcttcccctacgggggctgccagggcaacgggaacaagttctactcagagaaggagtgcagagagtactgcggtgtccctggtgatggtgatgaggagctgctgcgcttctccaactgacaactggccggtctgcaagtcagaggatggccagtgtctgtcccggggtcctgtggcaggcagcgccaagcaacctgggtccaaataaaaactaaattgtaaactcctg

SEQ ID NO: 654 - DNA, 3414 bp, Homo sapiens
gcttacacagtatggccggcgacattagctagcgctcgctctactctctctaacgggaaagcagcggaatacaagagactgaactgtatctgcctctatttccaaaagactcacgttcaactttcgctcacacaaagccgggaaaattttattagtcctttttttaaaaaaagttaatataaaattatagcaaaaaaaaaaaggaacctgaactttagtaacacagctggaacaatcgcagcggcggcggcagcggcgggagaagaggtttaatttagttgattttctgtggttgttggttgttcgctagtctcacggtgatggaagctgcacattttttcgaagggaccgagaagctgctggaggtttggttctcccggcagcagcccgacgcaaaccaaggatctggggatcttcgcactatcccaagatctgagtgggacatacttttgaaggatgtgcaatgttcaatcataagtgtgacaaaaactgacaagcaggaagcttatgtactcagtgagagtagcatgtttgtctccaagagacgtttcattttgaagacatgtggtaccaccctcttgctgaaagcactggttcccctgttgaagcttgctagggattacagtgggtttgactcaattcaaagcttcttttattctcgtaagaatttcatgaagccttctcaccaagggtacccacaccggaatttccaggaagaaatagagtttcttaatgcaattttcccaaatggagcaggatattgtatgggacgtatgaattctgactgttggtacttatatactctggatttcccagagagtcgggtaatcagtcagccagatcaaaccttggaaattctgatgagtgagcttgacccagcagttatggaccagttctacatgaaagatggtgttactgcaaaggatgtcactcgtgagagtggaattcgtgacctgataccaggttctgtcattgatgccacaatgttcaatccttgtgggtattcgatgaatggaatgaaatcggatggaacttattggactattcacatcactccagaaccagaattttcttatgttagctttgaaacaaacttaagtcagacctcctatgatgacctgatcaggaaagttgtagaagtcttcaagccaggaaaatttgtgaccaccttgtttgttaatcagagttctaaatgtcgcacagtgcttgcttcgccccagaagattgaaggttttaagcgtcttgattgccagagtgctatgttcaatgattacaattttgtttttaccagttttgctaagaagcagcaacaacagcagagttgattaagaaaaatgaagaaaaaacgcaaaaagagaacacatgtagaaggtggtggatgctttctagatgtcgatgctgggggcagtgctttccataaccaccactgtgtagttgcagaaagccctagatgtaatgatagtgtaatcattttgaattgtatgcattattatatcaaggagttagatatcttgcatgaatgctctcttctgtgtttaggtattctctgccactcttgctgtgaaattgaagtggatgtagaaaaaaccttttactatatgaaactttacaacacttgtgaaagcaactcaatttggtttatgcacagtgtaatatttctccaagtatcatccaaaattccccacagacaaggctttcgtcctcattaggtgttggcctcagcctaaccctctaggactgttctattaaattgctgccagaattttacatccagttacctccactttctagaacatattctttactaatgttattgaaaccaatttctacttcatactgatgtttttggaaacagcaattaaagtttttcttccatagttgagtccttagaaaatgattccagttactcattttgcatattgctatttaacattattggaccctgcatttatagtcctttgatttcttccctctccctggtgtctcccccaagaccccaaataaagcaataccctgttaacactgtgggtttatatactaattctataccccagatggggaattaggggggagatggtccctgggcttaatattctttaaagggcatgggaatttagcctctcttttattgtaatgtgctcttttggaaaatagttggttagcagggagaccagagttgtagattgagattgggtgtactggctgttctgtggaaaacatacattctgtgttcctcgaataagtgaaattgagcttctaatgagatgcacccctttactaacttgatgatgatataaaattcatttttatttagttaattaccagagagatttagcataattttgcttctggattcagtaaatcaagtcagcttggatcattcaccttaacttttcctttagcagccctttccactagtttcccattaagtagtgttctataaactttgatccaaagcagaatcaatgtcttttccatctcgtgacttaaagttctgtgactgtgatgcatgtgagtgttccgacttcatctgttcctcttaactacggtgtttcccttaccgatcggcattcataggatgaaatgaatgactgtcccagaatgagaatttgtccagattattcagataaacatcataaagagaataacattataaataagtagaatatgaataaatagaataataaaattccaaaatactcaatgggaaatgactagtaatataggctttcaagagttggtacctttacgtatatttgcagattctctgggattttaaggaactgagaaaacagaaaagttgactaaattttatatttcttgtcctctaaatattttgataatttctggattgatgcagtgatgtttttcgttccttgtatttataaatgaaaacctttttttggtgtttctaaacctaaaatctacttggtttgaaatcaagtggttggaacactgtttgacttttatttgaagcatgttgttgattgaaaatttcattgaggaagttttcaatcagtgtgatcagtttgattctgtaatgagcacagcacctaatattttgaggagctctgttttgaggaccaatgcttaaggtggaccttgttgctaaacaatatcccaatagatttgttgacttgaggtctggtttggttttgtttttgttttgttttggttttgttttgtttcccaatagaattaagaattctaatgttgaaaaactgtataaatttttatgggacaaagcctagaaaagagaaatgtagtttgaatcataatctaaatcatcgtatgataggaaggaaaagttttggtgccataatttctcctttcactggtgttggacttaaatcagttgaaatgtatttctgtaccacaatttacgcttcaataaaagtttaattgtctagtgag

SEQ ID NO: 655 - DNA, 2374 bp, Homo sapiens
aggcggcagagaggagactatggaacgtcaggtgctgctgagcgagcccgaggaggcggcggctctgtatcggggccttagccgccagcccgcgctgagcgccgcctgcctgggcccggaggtcaccacacagtacggcggccagtaccggacggtgcacactgagtggacccagagggacctggaacgcatggagaacattcgattctgccgccaatacctggtgttccatgacggggactcagtggtgtttgccggacctgcaggcaacagtgtggagacccggggggaactgctgagcagagagtctccttcaggcagcatgaaagctgtgctgcgcaaggctggaggcacgggccctggggaagagaagcagttcctggaggtctgggagaagaaccggaagctcaagagtttcaacctatcagtgctggagaaacatgggcctgtttatgaggatgactgttttggctgcctgtcctggtcgcactcggagacacacttgttgtatgtggcagagaggaagcgccccaaggccgagtccttctttcagaccaaagccttggacgtcagtgccagcgatgatgagatagccaggctgaagaagccagaccaacccatcaagggggatcagtttgtgttttacgaagactggggagaaaacatggtttccaaaagcatccctgtgctctgcgtgctggatgtcgagagtggcaacatctctgtgcttgagggggtccctgagaatgtgtcccctggacaggcattttgggcccctggagatgctggtgtggtgtttgtgggctggtggcatgagcccttccggttgggcatccgcttttgcaccaatcgcaggtcagccctgtattatgtggacctcatcggggggaagtgtgagctcctctcggatgactccctggctgtctcttctccccggctgagcccagaccaatgtcgcattgtctacctgcagtacccatctctgatcccccatcaccaatgcagccagctgtgcctgtatgactggtataccaaggttacctcagtggtggtagatgttgtgcctcggcagctgggagagaacttctctgggatctactgcagccttctgcctttgggatgctggtcagctgacagccagagagtggtctttgactcggctcagcgcagccggcaggacctgtttgctgtggacacccaagtgggcactgtgacctccctcacagctggagggtcaggtgggagctggaagttgctcacaattgaccaggacctcatggtggcacagttttccacacccagcctacctccaaccctgaaagttgggttcctgccttctgcagggaaggagcagtcagtgttgtgggtgtccctggaggaggccgagcccattcccgacatccactggggcatccgggtgctacagccacccccagagcaagagaatgtgcagtatgctggccttgactttgaagcaatcctgctgcagcctggcagccctccagataagacccaagtgcccatggtggtcatgccccacggggggccccattcatcctttgtcactgcctggatgctgttcccagccatgctttgcaagatgggctttgcggtactactagtgaactatcgtggctccacgggctttggccaggacagcatcctctccctcccaggcaatgtgggccaccaggatgtgaaggatgtccagtttgcagtggaacaggtgctccaggaggaacactttgatgcaagccatgtggcccttatgggtggttcccatggtggcttcatttcctgccacttgattggtcagtacccagagacctacagggcctgcgtggcccggaaccccgtgatcaacatcgcctccatgttgggctccactgacatccctgactggtgcgtggtggaggctggctttcctttcagcagtgactgcctgccagacctcagcgtgtgggctgagatgctggacaaatcgcccatcagatacatccctcaggtgaagacaccactgttactgatgttgggccaggaggaccggcgtgtgcccttcaagcagggcatggagtattaccgtgccctcaagacccggaatgtgcctgttcggctcctgctctatcccaaaagcacccacgcattatcagaggtggaggtggagtcagacagcttcatgaatgctgtgctctggctacgcacacacttgggcagctgaagccctgccattctgcatgagctgatcagcctgtgccacacttcgctcttgaggagctcaacggtctggcagggcagcaggaggctttctgggctctggactccacggatgcgtgggcagaggaatgtgggctatgtagtcataataaattaggac

SEQ ID NO: 656 - DNA, 3727 bp, Homo sapiens
gtcgcggtgtgctaagcgaggagtccgagtgtgtgagcttgagagccgcgcgctagagcgacccggcgagggatggcggccaccgggaccgcggccgccgcagccacgggcaggctcctgcttctgctgctggtggggctcacggcgcctgccttggcgctggccggctacatcgaggctcttgcagccaatgccggaacaggatttgctgttgctgagcctcaaatcgcaatgttttgtgggaagttaaatatgcatgtgaacattcagactgggaaatgggaacctgatccaacaggcaccaagagctgctttgaaacaaaagaagaagttcttcagtactgtcaggagatgtatccagagctacagatcacaaatgtgatggaggcaaaccagcgggttagtattgacaactggtgccggagggacaaaaagcaatgcaagagtcgctttgttacacctttcaagtgtctcgtgggtgaatttgtaagtgatgtcctgctagttccagaaaagtgccagtttttccacaaagagcggatggaggtgtgtgagaatcaccagcactggcacacggtagtcaaagaggcatgtctgactcagggaatgaccttatatagctacggcatgctgctcccatgtggggtagaccagttccatggcactgaatatgtgtgctgccctcagacaaagattattggatctgtgtcaaaagaagaggaagaggaagatgaagaggaagaggaagaggaagatgaagaggaagactatgatgtttataaaagtgaatttcctactgaagcagatctggaagacttcacagaagcagctgtggatgaggatgatgaggatgaggaagaaggggaggaagtggtggaggaccgagattactactatgacaccttcaaaggagatgactacaatgaggagaatcctactgaacccggcagcgacggcaccatgtcagacaaggaaattactcatgatgtcaaagctgtctgctcccaggaggcgatgacggggccctgccgggccgtgatgcctcgttggtacttcgacctctccaagggaaagtgcgtgcgctttatatatggtggctgcggcggcaacaggaacaattttgagtctgaggattattgtatggctgtgtgtaaagcgatgattcctccaactcctctgccaaccaatgatgttgatgtgtatttcgagacctctgcagatgataatgagcatgctcgcttccagaaggctaaggagcagctggagattcggcaccgcaaccgaatggacagggtaaagaaggaatgggaagaggcagagcttcaagctaagaacctccccaaagcagagaggcagactctgattcagcacttccaagccatggttaaagctttagagaaggaagcagccagtgagaagcagcagctggtggagacccacctggcccgagtggaagctatgctgaatgaccgccgtcggatggctctggagaactacctggctgccttgcagtctgacccgccacggcctcatcgcattctccaggccttacggcgttatgtccgtgctgagaacaaagatcgcttacataccatccgtcattaccagcatgtgttggctgttgacccagaaaaggcggcccagatgaaatcccaggtgatgacacatctccacgtgattgaagaaaggaggaaccaaagcctctctctgctctacaaagtaccttatgtagcccaagaaattcaagaggaaattgatgagctccttcaggagcagcgtgcagatatggaccagttcactgcctcaatctcagagacccctgtggacgtccgggtgagctctgaggagagtgaggagatcccaccgttccaccccttccaccccttcccagccctacctgagaacgaagacactcagccggagttgtaccacccaatgaaaaaaggatctggagtgggagagcaggatgggggactgatcggtgccgaagagaaagtgattaacagtaagaataaagtggatgaaaacatggtcattgacgagactctggatgttaaggaaatgattttcaatgccgagagagttggaggcctcgaggaagagcgggaatccgtgggcccactgcgggaggacttcagtctgagtagcagtgctctcattggcctgctggtcatcgcagtggccattgccacggtcatcgtcatcagcctggtgatgctgaggaagaggcagtatggcaccatcagccacgggatcgtggaggttgatccaatgctcaccccagaagagcgtcacctgaacaagatgcagaaccatggctatgagaaccccacctacaaatacctggagcagatgcagatttaggtggcagggagcgcggcagccctggcggagggatgcaggtgggccggaagatcccacgattccgatcgactgccaagcagcagccgctgccaggggctgcgtctgacatcctgacctcctggactgtaggactatataaagtactactgtagaactgcaatttccattcttttaaatgggtgaaaaatggtaatataacaatatatgatatataaaccttaaatgaaaaaaatgatctattgcagatatttgatgtagttttcttttttaaattaatcagaaaccccacttccattgtattgtctgacacatgctctcaatatataataaatgggaaatgtcgattttcaataatagacttatatgcaggctgtcgttccggttatgttgtgtaagtcaactcttcagcctcattcactgtcctggcttttatttaaagaaaaaaaaggcagtattccctttttaaatgagctttcaggaagttgctgagaaatggggtggaatagggaactgtaatggccactgaagcacgtgagagaccctcgcaaaatgatgtgaaaggaccagtttcttgaagtccagtgtttccacggctggatacctgtgtgtctccataaaagtcctgtcaccaaggacgttaaaggcattttattccagcgtcttctagagagcttagtgtatacagatgagggtgtccgctgctgctttccttcggaatccagtgcttccacagagattagcctgtagcttatatttgacattcttcactgtctgttgtttacctaccgtagctttttaccgttcacttccccttccaactatgtccagatgtgcaggctcctcctctctggactttctccaaaggcactgaccctcggcctctactttgtcccctcacctccaccccctcctgtcaccggccttgtgacattcactcagagaagaccacaccaaggaggggccgcggctggcccaggagagaacacggggaggtttgtttgtgtgaaaggaaagtagtccaggctgtccctgaaactgagtctgtggacactgtggaaagctttgaacaattgtgttttcgtcacaggagtctttgtaatgcttgtacagttgatgtcgatgctcactgcttctgctttttctttctttttattttaaaaaatctgaaggttctggtaacctgtggtgtatttttattttcctgtgactgtttttgttttgtttttttcctttttcctcccctttagccctattcatgtctctacccactatgcacagattaaacttcacctacaaactccttaatatgatctgtggagaatgtacacagtttaaacacatcaataaatactttaacttccaa

SEQ ID NO: 657 - DNA, 809 bp, Homo sapiens
atgcctgtcttcatcttgaaagaaaagctccaggtcccttctccagccacccagccccaagatggtgatgctgctgctgctgctttccgcactggctggcctcttcggtgcggcagagggacaagcatttcatcttgggaagtgccccaatcctccggtgcaggagaattttgacgtgaataagtatctcggaagatggtacgaaattgagaagatcccaacaacctttgagaatggacgctgcatccaggccaactactcactaatggaaaacggaaagatcaaagtgttaaaccaggagttgagagctgatggaactgtgaatcaaatcgaaggtgaagccaccccagttaacctcacagagcctgccaagctggaagttaagttttcctggtttatgccatcggcaccgtactggatcctggccaccgactatgagaactatgccctcgtgtattcctgtacctgcatcatccaactttttcacgtggattttgcttggatcttggcaagaaaccctaatctccctccagaaacagtggactctctaaaaaatatcctgacttctaataacattgatgtcaagaaaatgacggtcacagaccaggtgaactgccccaagctctcgtaaccaggttctacagggaggctgcacccactccatgttacttctgcttcgctttcccctaccccacccccccccataaagacaaaccaatcaaccacgacaaaggaagttgacctaaacatgtaaccatgccctaccctgttaccttgctagctgcaaaataaacttgttgctgacctgc

SEQ ID NO: 658 - DNA, 1466 bp, Homo sapiens
agccccaagcttaccacctgcacccggagagctgtgtgtcaccatgtgggtcccggttgtcttcctcaccctgtccgtgacgtggattggtgctgcacccctcatcctgtctcggattgtgggaggctgggagtgcgagaagcattcccaaccctggcaggtgcttgtggcctctcgtggcagggcagtctgcggcggtgttctggtgcacccccagtgggtcctcacagctgcccactgcatcaggaacaaaagcgtgatcttgctgggtcggcacagcctgtttcatcctgaagacacaggccaggtatttcaggtcagccacagcttcccacacccgctctacgatatgagcctcctgaagaatcgattcctcaggccaggtgatgactccagccacgacctcatgctgctccgcctgtcagagcctgccgagctcacggatgctgtgaaggtcatggacctgcccacccaggagccagcactggggaccacctgctacgcctcaggctggggcagcattgaaccagaggagttcttgaccccaaagaaacttcagtgtgtggacctccatgttatttccaatgacgtgtgtgcgcaagttcaccctcagaaggtgaccaagttcatgctgtgtgctggacgctggacagggggcaaaagcacctgctcgggtgattctgggggcccacttgtctgtaatggtgtgcttcaaggtatcacgtcatggggcagtgaaccatgtgccctgcccgaaaggccttccctgtacaccaaggtggtgcattaccggaagtggatcaaggacaccatcgtggccaacccctgagcacccctatcaaccccctattgtagtaaacttggaaccttggaaatgaccaggccaagactcaagcctccccagttctactgacctttgtccttaggtgtgaggtccagggttgctaggaaaagaaatcagcagacacaggtgtagaccagagtgtttcttaaatggtgtaattttgtcctctctgtgtcctggggaatactggccatgcctggagacatatcactcaatttctctgaggacacagataggatggggtgtctgtgttatttgtggggtacagagatgaaagaggggtgggatccacactgagagagtggagagtgacatgtgctggacactgtccatgaagcactgagcagaagctggaggcacaacgcaccagacactcacagcaaggatggagctgaaaacataacccactctgtcctggaggcactgggaagcctagagaaggctgtgagccaaggagggagggtcttcctttggcatgggatggggatgaagtaaggagagggactggaccccctggaagctgattcactatggggggaggtgtattgaagtcctccagacaaccctcagatttgatgatttcctagtagaactcacagaaataaagagctgttatactgtg

SEQ ID NO: 659 - DNA, 1814 bp, Homo sapiens
gcaaaaccaacgcctggctcggagcagcagcctctgaggtgtccctggccagtgtccttccacctgtccacaagcatggggaacatcttcgccaacctcttcaagggcctttttggcaaaaaagaaatgcgcatcctcatggtgggcctggatgctgcagggaagaccacgatcctctacaagcttaagctgggtgagatcgtgaccaccattcccaccataggcttcaacgtggaaaccgtggagtacaagaacatcagcttcactgtgtgggacgtgggtggccaggacaagatccggcccctgtggcgccactacttccagaacacacaaggcctgatcttcgtggtggacagcaatgacagagagcgtgtgaacgaggcccgtgaggagctcatgaggatgctggccgaggacgagctccgggatgctgtcctcctggtgttcgccaacaagcaggacctccccaacgccatgaatgcggccgagatcacagacaagctggggctgcactcactacgccacaggaactggtacattcaggccacctgcgccaccagcggcgacgggctctatgaaggactggactggctgtccaatcagctccggaaccagaagtgaacgcgacccccctccctctcactcctcttgccctctgctttactctcatgtggcaaacgtgcggctcgtggtgtgagtgccagaagctgcctccgtggtttggtcaccgtgtgcatcgcaccgtgctgtaaatgtggcagacgcagcctgcggccaggctttttatttaatgtaaatagtttttgtttccaatgaggcagtttctggtactcctatgcaatattactcagctttttttattgtaaaaagaaaaatcaactcactgttcagtgctgagaggggatgtaggcccatgggcacctggcctccaggagtcgctgtgttgggagagccggccacgcccttggcttagagctgtgttgaaatccattttggtggttggttttaacccaaactcagtgcattttttaaaatagttaagaatccaagtcgagaacacttgaacacacagaagggagaccccgcctagcatagatttgcagttacggcctggatgccagtcgccagcccagctgttcccctcgggaacatgaggtggtggtggcgcagcagactgcgatcaattctgcatggtcacagtagagatccccgcaactcgcttgtccttgggtcaccctgcattccatagccatgtgcttgtccctgtgctcccacggttcccaggggccaggctgggagcccacagccaccccactatgccgcaggccgccctacccaccttcaggcagcctatgggacgcaggccccatctgtccctcggtccgcgtgtggccagagtggtccgtcgtccccaacactcgtgctcgctcagacactttggcaggatgtctggggcctcaccagcaggagcgcgtgcaagccgggcaggcggtccacctagacccacagcccctcgggagcaccccacctctgtgtgtgatgtagctttctctccctcagcctgcaagggtccgatttgccatcgaaaaagacaacctctacttttttcttttgtattttgataaacactgaagctggagctgttaaatttatcttggggaaacctcagaactggtctatttggtgtcgtaggaacctcttactgctttcaatacacgattagtaatcaactgttttgtatacttgttttcagttttcatttcgacaaacaagcactgtaattatagctattagaataaaatctcttaactatt

SEQ ID NO: 660 - DNA, 3595 bp, Homo sapiens
ggaggtgggaagtatcccgggctgggggtgggggtacgccgcacagctccagtcgccgtcgcggcttccggtgctaggtggagggaaggaaggagggagccggggagtgggccagggcagcagccgggctgaagtcggcttggggagccagagggagcggagcggaacctgcggggcagaggcggcggccgcagcggcgcagctgatagcaggaacaggatcaagtcttccataccagggaccaggccaaaaccagactgccactgcccctacttgggccccactgtccccagaaagcagctgctgtgatcatgggcaatatctttggaaaccttctcaagagcctgattgggaagaaggagatgcgcatcctgatggtgggcctggatgccgcaggaaagaccaccatcctatacaagctgaaactgggggagatcgtcaccaccatccctaccattgggttcaatgtggagacagtggagtataagaacatcagctttacagtgtgggatgtgggtggccaggacaagattcgacccctctggagacactacttccagaacacccaagggttgatatttgtggtcgacagcaatgatcgggagcgagtaaatgaggcccgggaagagctgatgagaatgctggcggaggacgagctccgggatgctgtactccttgtctttgcaaacaaacaggatctgcctaatgctatgaacgctgctgagatcacagacaagctgggcctgcattcccttcgtcaccgtaactggtacattcaggccacctgtgccaccagcggggacgggctgtacgaaggcctggactggctggccaatcagctcaaaaacaagaagtgaaagccagacagccctaacaaagcaccccacccacccctgacatacctactgtcaccctgccccagtcctaccccttcctctccatgcaagtgtggccagggccctgggtatcatgtccacatgcccagcaagagccttgcctcccctgcctcccctcctttttcctgtccacctatatgaccaatccctaattgctgtcctgatgatgagtcattccaatttactggatttaaaacaaaaagttgttacggtttcatggggtggcccctctctctctctcacctctgggtttcgggaggtcgagtggggtattctctttgtttggcagtggttgctgtcctcttggcatctgagtcctttccctgtccccacaagcccttctactccctgtttgcctttcctttgccaccctctccctgttttacatggaaattgcacgggcctctctgtgtttgcgtgcatgtgtgcgcctgtatatacatgtatagagagatatatttgtgggggccggggggagcggggagggggtggagtgaagctcagggcttgcagccaggacactgcccactggagcctgtcatctgccccttccgtgttggtgagattaagggaagaaggtgggagggcattagtcaagccggactgccccagtctttgactggttaccctcctctctgcaggtaggtttttctggatgataggacagatgatggattcttcaccaccattttccttgtactcttctctccacccttcttagggctggaggatggcatttatctctagatgactgttcccaaggagatgccactctgctctgccttactgttgggaaggagagaggaacccactcactcttatcagcttagagtgttcaactgatccttccccaccatcttcagatctgttcctctggagcttgactggggggtggggatggcaagtccatggtgtgtgttagggacccagggcattgggggaagggaggcgaaggcctgaggttttccatcttcattctcttttgttattaggagaaggtgaggcatgggccaatcccattcctgccttccagtgccccaccacccttctgatcttaggggttggatgggtcatctgtccttggtcagaattttctcaccctagtactcctactggcctgaccagggctgactgggtattctaatgaggagctgggaagtggggtgacatagctgaccttagtatcaacccccctcttctccaactcttgttttctagtccaggatatgctaaaggacgaagattttctattgtttccaggccctcagaccatccttgctgtcccttcaccctccatgcccctgccatcctcactcacttctcataaatggatctgggggttagagtggaggaaataaaatcctgaagtggttgtcagtgcttgtgggatgcagtggtcttcaggattctccccgcattattatgtagttgttcagaagctgttgctactgcgtctctctgtctgcagggggcacttgttcctgaggtcctcgcctgggtcctgacttctgtagtttctgtgaagacgtggctgtcctgtgggctcctgtgtgtgctggctgcgcctgagctccgagacagctgcccataacctgctaaggtcagggcccagggccccccacagcatggctgagggaccccttcccagtagggctgtcccaagccccactccatggggccaggtttcctggccacttttgttgatagcagatggatcaatattagtaaccccatccaagattgaactgtgaaagagaggttccaggggtatctccctcagtgccagttacttagtgatgtgttacccaggatgcagcaggtgtgtgcaggtatcttgctctctaggcctgtgtgtgtgtgtgagtgtgtgtgtatatgggtgtgggtgtgtttgtgtgtggtggttgtggggggggtgttggaggttctatttcatttaaaaatgtattcatttccctggccccacagatgcttccctccatactttttatttgctctgtttcctcagatttattttgtcttgccccattgcctctccttccttgaactctttccttttcaatctcaactcattcactgctgttgctcatttgcccttttccatgtattttttcctacttaggattttccactctatctttgtggttcatgaggactttgcctcttctcctgcctcattccctgactttctctagttagatgtcagtcctaaataggttttcctcacttcaggcctcacccctcaccttgtttttttgggggctccagggaccaatctggggctggaaatgttaggaggttgccttggtgctgccccagatctgtccagcagggggcagtaagtgatcttggtagtatccctggctgctaagcccttggcaggggtggtcctttctacattcccattcacttaacagctcttttgggattgggtgtttcattccatttctgcccactccctctcctctcctctctggtaggtttaattttatgctttccctgattccagctttctgcttcctgaggactcccgctccccccaccccaaagtttgtctgtggtgttatagtggtaactgcagttcctcctctggaatgtagactgtatatgtttaataactcaccttctctatccttgctcaaaatgtgggataacgcgatgactgtgaccctggttggaaattaaacttgttttatgca

SEQ ID NO: 661 - DNA, 1610 bp, Homo sapiens
ccgcgccagtcgcctagcaggtcctctaccggcttattcctgtgccggatcttcatcggcacaggggccactgagacgtttctgcctccctctttcttcctccgctctttctcttccctctcgtttagtttgcctggagcttgaaaggagaaagcacggggtcgccccaaaccccttctgcttctgcccatcacaagtgccactaccgccatgggcctcactatctcctccctcttctcccgactatttggcaagaagcagatgcgcattttgatggttggattggatgctgctggcaagacaaccattctgtataaactgaagttaggggagatagtcaccaccattcctaccattggttttaatgtggaaacagtagaatataagaacatttgtttcacagtatgggatgttggtggtcaagatagaattaggcctctctggaagcattacttccagaatacccagggtcttatttttgtggtagatagcaacgatcgtgaaagaattcaggaagtagcagatgagctgcagaaaatgcttctggtagatgaattgagagatgcagtgctgctactttttgcaaacaaacaggatttgccaaatgctatggccatcagtgaaatgacagataaactagggcttcagtctcttcgtaacagaacatggtatgttcaagccacttgtgcaacacaaggaactggtctgtatgaaggacttgactggctgtcaaatgagctttcaaaacgttaaatgaaattggatatctaaccaaggacatgtttgataaaattggtctaggcttgttacaacaaaattagtttgtatcttggttattaaacagtatctgggactggtttgggcagaatattaaacttattttgttgccaattattgtttaccgagtataatgttgctatttagcaatgtgcttggttttaaagaaattctccttgggaaaaaagtatcctcttttaattttacttcccataagcgtaaatgcctggacatagctcttgtgaacctttaaataaattgtttgagtgtttttgagccccagacaaataatgttttaaagttatcccttgctactttactgatacctttatcattcctgagacagtttgctaatttaaaaatgtagcattccatttgtatttatttctctcccttgccaaaaagattttctaatactgcttgtaccagccagagaaagatccaaaacactactcagctctcttgcactgaggaaatttttccccctacattgactcctggcctacatcagccaaacttaaccttggtggggtttggatttgatagccaattagttctgtgctggttgcaaagaattgatatttagatggtttttaatactcagcagattgtcttcccatattgtgtcttttttatgttgcatgttgcttttgttatcagcctgattttttgctcagtatatgatagttctgctgatgttttgtttattgggcagacatatcttcattaagagtttttggaaaactcatcaaattcgatgaatacattttcttcataacccatttggaattattcctaataaaatgataaaatacgtaaaaaaaaaggaattc

SEQ ID NO: 662 - DNA, 1777 bp, Homo sapiens
ggctaccctcgccccgcccgcggtcctccgtcggttctctcattagtccacggtctggtcttcagctacccgccttcgtctccgagtttgcgactcgcgggaccggcgtccccggcgcgaagaggctggactcggattcgttgcctgagcaatggctgccatccggaagaaactggtgattgttggtgatggagcctgtggaaagacatgcttgctcatagtcttcagcaaggaccagttcccagaggtgtatgtgcccacagtgtttgagaactatgtggcagatatcgaggtggatggaaagcaggtagagttggctttgtgggacacagctgggcaggaagattatgatcgcctgaggcccctctcctacccagataccgatgttatactgatgtgtttttccatcgacagccctgatagtttagaaaacatcccagaaaagtggaccccagaagtcaagcatttctgtcccaacgtgcccatcatcctggttgggaataagaaggatcttcggaatgatgagcacacaaggcgggagctagccaagatgaagcaggagccggtgaaacctgaagaaggcagagatatggcaaacaggattggcgcttttgggtacatggagtgttcagcaaagaccaaagatggagtgagagaggtttttgaaatggctacgagagctgctctgcaagctagacgtgggaagaaaaaatctggttgccttgtcttgtgaaaccttgctgcaagcacagcccttatgcggttaattttgaagtgctgtttattaatcttagtgtatgattactggcctttttcatttatctataatttacctaagattacaaatcagaagtcatcttgctaccagtatttagaagccaactatgattattaacgatgtccaacccgtctggcccaccagggtccttttgacactgctctaacagccctcctctgcactcccacctgacacaccaggcgctaattcaaggaatttcttaacttcttgcttctttctagaaagagaaacagttggtaacttttgtcaattaggctgtaactactttataactaacatgtcctgccctattatctgtcagctgcaaggtactctggtgagtcaccacttcagggctttactccgtaacagattttgttggcatagctctggggtgggcagttttgaaaatgggctcaaccagaaaagcccaagttcatgcagctgtggcagagttacagttctgtggtttcatgttagttaccttatagttactgtgtaattagtgccacttaatgtatgttaccaaaaataaatatatctacccagactagatgtagtattttgtataattggattctaatactgtcatctcaagaagtgtatggtttaaagaagtgtattggaaataaagtcagatggaaattcattttaaattcccgtttgtcacttttctgataaaagatggccatattaccccttttcggccccatgtatctcagtaccccatggagctgggctaagtaaataggaattggtttcacgcctcaggcaattagacactttggaagatggcataacctgtctcacctggacttaagcgtctggctctaattcacagtgctctttctcctcactgtatccaggttccctcccagaggagccaccagttctcatgggtggcactcagtctctcttctctccagctgactaaactttttttctgtaccagttaatttttccaactactaatagaataaaggcagttttctaaaaaaa

SEQ ID NO: 663 - DNA, 902 bp, Homo sapiens
ctccggggcccatggggctcctgaccattctgaagaagatgaagcagaaagagcgggagctgcgactgctcatgcttggcctggacaatgctggaaagacaaccatcctgaagaagttcaatggggaggacatcgacaccatctccccaacgctgggcttcaacatcaagaccctggagcaccgaggattcaagctgaacatctgggatgtgggtggccagaagtccctgcggtcctactggcggaactactttgagagcaccgatggcctcatctgggtagtggacagcgcagaccgccagcgcatgcaggactgccagcgggagctccagagcctgctggtggaggagcgcctggccggagcaaccctcctcatctttgctaataagcaggacctgcctggagcactgtcctctaacgccatccgcgaggccctggagctggactccatccgcagccaccactggtgcatccagggctgcagcgccgtcaccggggagaacctgctgccgggcatcgactggctcctggatgacatttccagccgcattttcacagctgactgaaccactccagatgccccccacctagcagtccaggtccctcaaccttcaccaaacactacccatggggggttgggagtcagccggccaaactaacactccccctcctccaccccagcctgctgctgctactgctgccgctgctgctctgtggccacccggctcccatggcgggaggctgtgccctggctgtctctctggctcctgacctggcctttggctaccataccaagaagagagggctgggcggggaggagctgctactgctgctaccgaggctgtgggcctcatccttcactcagttgtgaaataaaccgctccttgccccgaaaaaaaaaa

SEQ ID NO: 664 - DNA, 2015 bp, Homo sapiens
gttttctactttgcccgcccacagatgtagttttctctgcgcgtgtgcgttttccctcctcccccgccctcagggtccacggccaccatggcgtattaggggcagcagtgcctgcggcagcattggcctttgcagcggcggcagcagcaccaggctctgcagcggcaacccccagcggcttaagccatggcgtgagtaccggggcgggtcgtccagctgtgctcctggggccggcgcgggttttggattggtggggtgcggcctggggccagggcggtgccgccaagggggaagcgatttaacgagcgcccgggacgcgtggtctttgcttgggtgtccccgagacgctcgcgtgcctgggatcgggaaagcgtagtcgggtgcccggactgcttccccaggagccctacagccctcggaccccgagccccgcaaggtcccaggggtcttggctgttgccccacgaaacgtgcaggaaccaagatggcggcggcagggcggcggcgcgggcgtgagtcaagggcgggcggtgggcggggcgcggccgctggccgtatttggacgtggggacggagcgctttcctcttggcggccggtggaagaatcccctggtctccgtgagcgtccattttgtggaacctgagttgcaagcagggaggggcaaatacaactgccctgttcccgattctctagatggccgatctagagaagtcccgcctcataagtggaaggatgaaattctcagaacagctaacctctaatgggagttggcttctgattctcattcaggcttctcacggcattcagcagcagcgttgctgtaaccgacaaagacaccttcgaattaagcacattcctcgattccagcaaagcaccgcaacatgaccgaaatgagcttcctgagcagcgaggtgttggtgggggacttgatgtcccccttcgacccgtcgggtttgggggctgaagaaagcctaggtctcttagatgattacctggaggtggccaagcacttcaaacctcatgggttctccagcgacaaggctaaggcgggctcctccgaatggctggctgtggatgggttggtcagtccctccaacaacagcaaggaggatgccttctccgggacagattggatgttggagaaaatggatttgaaggagttcgacttggatgccctgttgggtatagatgacctggaaaccatgccagatgaccttctgaccacgttggatgacacttgtgatctctttgcccccctagtccaggagactaataagcagcccccccagacggtgaacccaattggccatctcccagaaagtttaacaaaacccgaccaggttgcccccttcaccttcttacaacctcttcccctttccccaggggtcctgtcctccactccagatcattcctttagtttagagctgggcagtgaagtggatatcactgaaggagataggaagccagactacactgcttacgttgccatgatccctcagtgcataaaggaggaagacaccccttcagataatgatagtggcatctgtatgagcccagagtcctatctggggtctcctcagcacagcccctctaccaggggctctccaaataggagcctcccatctccaggtgttctctgtgggtctgcccgtcccaaaccttacgatcctcctggagagaagatggtagcagcaaaagtaaagggtgagaaactggataagaagctgaaaaaaatggagcaaaacaagacagcagccactaggtaccgccagaagaagagggcggagcaggaggctcttactggtgagtgcaaagagctggaaaagaagaacgaggctctaaaagagagggcggattccctggccaaggagatccagtacctgaaagatttgatagaagaggtccgcaaggcaagggggaagaaaagggtcccctagttgaggatagtcaggagcgtcaatgtgcttgtacatagagtgctgtagctgtgtgttccaataaattattttgtaggg

SEQ ID NO: 665 - DNA, 2208 bp, Homo sapiens
gaattcatgctaaattgctggaaggctgcgtctctgctgtggtgtcagttccggatgcctcatcgccaggggcgcgccgcagccacccaccctccggaccgcggcagctgctgacccgccatcgccatggcccgcgggaaagccaaggaggagggcagctggaagaaattcatctggaactcagagaagaaggagtttctgggcaggaccggtggcagttggtttaagatccttctattctacgtaatattttatggctgcctggctggcatcttcatcggaaccatccaagtgatgctgctcaccatcagtgaatttaagcccacatatcaggaccgagtggccccgccaggattaacacagattcctcagatccagaagactgaaatttcctttcgtcctaatgatcccaagagctatgaggcatatgtactgaacatagttaggttcctggaaaagtacaaagattcagcccagagggatgacatgatttttgaagattgtggcgatgtgcccagtgaaccgaaagaacgaggagactttaatcatgaacgaggagagcgaaaggtctgcagattcaagcttgaatggctgggaaattgctctggattaaatgatgaaacttatggctacaaagagggcaaaccgtgcattattataaagctcaaccgagttctaggcttcaaacctaagcctcccaagaatgagtccttggagacttacccagtgatgaagtataacccaaatgtccttcccgttcagtgcactggcaagcgagatgaagataaggataaagttggaaatgtggagtattttggactgggcaactcccctggttttcctctgcagtattatccgtactatggcaaactcctgcagcccaaatacctgcagcccctgctggccgtacagttcaccaatcttaccatggacactgaaattcgcatagagtgtaaggcgtacggtgagaacattgggtacagtgagaaagaccgttttcagggacgttttgatgtaaaaattgaagttaagagctgatcacaagcacaaatctttcccactagccatttaataagttaaaaaaagatacaaaaacaaaaacctactagtcttgaacaaactgtcatacgtatgggacctacacttaatctatatgctttacactagctttctgcatttaataggttagaatgtaaattaaagtgtagcaatagcaacaaaatatttattctactgtaaatgacaaaagaaaaagaaaaattgagccttgggacgtgcccatttttactgtaaattatgattccgtaactgaccttgtagtaagcagtgtttctggcccctaagtattgctgccttgtgtattttatttagtgtacagtactacaggtgcatactctggtcatttttcaagccatgttttattgtatctgttttctactttatgtgagcaaggtttgctgtccaaggtgtaaatattcaacgggaataaaactggcatggtaattttttttttttgtttgttttttgttttttggctctttcaaaggtaatggcccatcgatgagcatttttaacatactccatagtcttttcctgtggtgttaggtctttatttttatttttttcctgggggctggggtgggggtttgtcatgggggaactgccctttaaattttaagtgacactacagaaaaacacaaaaaggtgatgggttgtgttatgcttgtattgaatgctgtcttgacatctcttgccttgtcctccggtatgttctaaagctgtgtctgagatctggatctgcccatcactttggcctagggacagggctaattaatttgctttatacattttcttttactttccttttttcctttctggaggcatcacatgctggtgctgtgtctttatgaatgttttaaccattttcatggtggaagaattttatatttatgcagttgtacaattttatttttttctgcaagaaaaagtgtaatgtatgaaataaaccaaagtcacttgtttgaaaataaatctttattttgaactttataaaagcaatgcagtaccccatagactggtgttaaatgttgtctacagtgcaaaatccatgttctaacatatgtaataattgccaggagtacagtgctcttgttgatcttgtattcagtcaggttaaaacaacggacaataaaagaatgaaccgaattc

SEQ ID NO: 666 - DNA, 1679 bp, Homo sapiens
atgacgaagaacgagaagaagtccctcaaccagagcctggccgagtggaagctcttcatctacaacccgaccaccggagaattcctggggcgcaccgccaagagctggggtttgatcttgctcttctacctagttttttatgggttcctggctgcactcttctcattcacgatgtgggttatgcttcagactctcaacgatgaggttccaaaataccgtgaccagattcctagcccaggactcatggtttttccaaaaccagtgaccgcattggaatatacattcagtaggtctgatccaacttcgtatgcagggtacattgaagaccttaagaagtttctaaaaccatatactttagaagaacagaagaacctcacagtctgtcctgatggagcactttttgaacagaagggtccagtttatgttgcatgtcagtttcctatttcattacttcaagcatgcagtggtatgaatgatcctgattttggctattctcaaggaaacccttgtattcttgtgaaaatgaacagaataattggattaaagcctgaaggagtgccaaggatagattgtgtttcaaagaatgaagatataccaaatgtagcagtttatcctcataatggaatgatagacttaaaatatttcccatattatgggaaaaaactgcatgttgggtatctacagccattggttgctgttcaggtcagctttgctcctaacaacactgggaaagaagtaacagttgagtgcaagattgatggatcagccaacctaaaaagtcaggatgatcgtgacaagtttttgggacgagttatgttcaaaatcacagcacgtgcatagtatgagtaggatatctccacagagtaaatgttgtgttgtctgtcttcattttgtaacagctggaccttccattctagaattatgagaccaccttggagaaaggtgtgtggtacatgacattgggttacatcataacgtgcttccagatcatagtgttcagtgtcctctgaagtaactgcctgttgcctctgctgccctttgaaccagtgtacagtcgccagatagggaccggtgaacacctgattccaaacatgtaggatgggggtcttgtcctctttttatgtggtttaattgccaagtgtctaaagcttaatatgccgtgctatgtaaatattttatggatataacaactgtcatattttgatgtcaacagagttttagggataaaatggtacccggccaacatcaagtgactttatagctgcaagaaatgtggtatgtggagaagttctgtatgtgaggaaggaaaaaaagaaaataaaagtgtgtttgaaaaatattatcttgggttctttgtaaaatttattttttacatgctgaattagcctcgatctttttgattaagagcacaaacttttttttgtaaaacatgtaaaaaaaaaaactgggattaatttttagtgttggaactgcctcttattttaggctgtagataaaatagcatttttaggttagccagtgtgactatgcacctaattttttatgagattaaattcataagacttaatttgtacaatagtttgtgaaatatcttgttactgcttttatttagcagactgtggactgtaataaagtatataaattgtgaaatataaaaacttggaacttattcaaagctt

SEQ ID NO: 667 - DNA, 1178 bp, Homo sapiens
gcggccgcgggggggcccttgtgggggaaaaggccccggaacgaggccggcccgcgagggcccgcgctcccctcctccccggcggccgcactcacccactccggaatcggccctgtcgcccccgcccgcactccagagccggctgagaacggcagcggcgagggctccacgtgcagcgtctctccgggtaagacctgcagctcccgcgactagaagtgtgaggtcccagggcccttcccgcggaatcggcgctgagaagccccaacccccctcccgcctcccaggcaccttcgggtccaggactacaactcccggcagggtgcgcaaaacgaccgcccaaggcaacggaggctcacgaggtacaaggaagcacaacgccccaatccgctttgttttacacagtctcactttccctgcacctttatacacttcgataaccctaacgaacaggacgctgactcggaggggagcttgaactaggggaaaggccactcaaagagcgcatgcgtacagagcaaggtttcaaggaggggaaaaagaacgggtcaaattaggcgaagaaaagatggcggaggctgtgccaggggacccggaagcacttaccctccacttcctcctcctgtttggcttctgtctcacctagacccgtccggtcgcagactgtctccgagacgcttcctgtccgaatcagcatgattcttcagaggctcttcaggttctcctctgtcattcggtcagccgtctcagtccatttgcggaggaacattggtgttacagcagtggcatttaataaggaacttgatcctatacagaaactctttgtggacaagattagagaatacaaatctaagcgacagacatctggaggacctgttgatgctagttcagagtatcagcaagagctggagagggagctttttaagctcaagcaaatgtttggtaatgcagacatgaatacatttcccaccttcaaatttgaagatcccaaatttgaagtcatcgaaaaaccccaggcctgaagaaataaagtaaaattaatctggtaatttgtcacggattagttgtacaactagttagaagtttcagaataaacatgcatttcataactgtcaaatgttcttttaattctgagtccaaataaattatttggtgatgttgaaaaaaaaaaaaaaaaaaaa

SEQ ID NO: 668 - DNA, 1807 bp, Homo sapiens
gaattctttcttcagcccatgtaaacatgaaaataagggttaaaaatgacttcattatggggaaaagggacaggatgcaaattgttcaaattccgggtggccgctgctccggcctccggggccttgcggagactcaccccttcagcgtcgctgcccccagctcagctcttactgcgggccgtccgacggcggtcccatcctgtcagggactatgcggcgcaaacatctccttcgccaaaagcaggcgccgccaccgggcgcatcgtggcggtcattggcgcagtggtggacgtccagtttgatgagggactaccaccaattctaaatgccctggaagtgcaaggcagggagaccagactggttttggaggtggcccagcatttgggtgagagcacagtaaggactattgctatggatggtacagaaggcttggttagaggccagaaagtactggattctggtgcaccaatcaaaattcctgttggtcctgagactttgggcagaatcatgaatgtcattggagaacctattgatgaaagaggtcccatcaaaaccaaacaatttgctcccattcatgctgaggctccagagttcatggaaatgagtgttgagcaggaaattctggtgactggtatcaaggttgtcgatctgctagctccctatgccaagggtggcaaaattgggctttttggtggtgctggagttggcaagactgtactgatcatggagttaatcaacaatgtcgccaaagcccatggtggttactctgtgtttgctggtgttggtgagaggacccgtgaaggcaatgatttataccatgaaatgattgaatctggtgttatcaacttaaaagatgccacctctaaggtagcgctggtatatggtcaaatgaatcaaccacctggtgctcgtgcccgggtagctctgactgggctgactgtggctgaatacttcagagaccaagaaggtcaagatgtactgctatttattgataacatctttcgcttcacccaggctggttcagaggtgtctgcattattgggccgaatcccttctgctgtgggctatcagcctaccctggccactgacatgggcactatgcaggaaagaattaccactaccaagaagggatctatcacctctgtacaggctatctatgtgcctgctgatgacttgactgaccctgcccctgctactacgtttgcccatttggatgctaccactgtactgtcgcgtgccattgctgagctgggcatctatccagctgtggatcctctagactccacctctcgtatcatggatcccaacattgttggcagtgagcattacgatgttgcccgtggggtgcaaaagatcctgcaggactacaaatccctccaggatatcattgccatcctgggtatggatgaactttctgaggaagacaagttgaccgtgtcccgtgcacggaaaatacagcgtttcttgtctcagccattccaggttgctgaggtcttcacaggtcatatggggaagctggtacccctgaaggagaccatcaaaggattccagcagattttggcaggtgaatatgaccatctcccagaacaggccttctatatggtgggacccattgaagaagctgtggcaaaagctgataagctggctgaagagcattcatcgtgaggggtctttgtcctctgtacttgtctctctccttgcccctaacccaaaaagcttcatttttctatataggctgcacaagagccttgattgaagatatattctttctgaacagtatttaaggtttccaataaaatcggaattc

SEQ ID NO: 669 - DNA, 1134 bp, Homo sapiens
cgctaagattgctacctggactttcgttgaccatgctgtcccgggtggtactttccgccgccgccacagcggccccctctctgaagaatgcagccttcctaggtccaggggtattgcaggcaacaaggacctttcatacagggcagccacaccttgtccctgtaccacctcttcctgaatacggaggaaaagttcgttatggactgatccctgaggaattcttccagtttctttatcctaaaactggtgtaacaggaccctatgtactcggaactgggcttgtcttgtacgctttatccaaagaaatatatgtgattagcgcagagaccttcactgccctatcagtactaggtgtaatggtctatggaattaaaaaatatggtccctttgttgcagactttgctgataaactcaatgagcaaaaacttgcccaactagaagaggcgaagcaggcttccatccaacacatccagaatgcaattgatacggagaagtcacaacaggcactggttcagaagcgccattacctttttgatgtgcaaaggaataacattgctatggctttggaagttacttaccgggaacgactgtatagagtatataaggaagtaaagaatcgcctggactatcatatatctgtgcagaacatgatgcgtcgaaaggaacaagaacacatgataaattgggtggagaagcacgtggtgcaaagcatctccacacagcaggaaaaggagacaattgccaagtgcattgcggacctaaagctgctggcaaagaaggctcaagcacagccagttatgtaaatgtatctatcccaattgagtcagctagaaacagttgactgactaaatggaaactagtctatttgacaaagtctttctgtgttggtgtctactgaagttatagtttacccttcctaaaaatgaaaagtttgtttcatatagtgagagaacgaaatctctatcggccagtcagatgtttctcatccttcttgctctgcctttgagttgttccgtgatcattctgaataagcatttgcctttataaaaacttgctgcctgactaaagattaacaggttatagtttaaatttgtaattaattctaccatcttgcaataaagtgacaattgaatg

SEQ ID NO: 670 - DNA, 4567 bp, Homo sapiens
gacagcctctgggtcctcggtcggtacagtctctgcacctcgcgccccagcaggtaaactaacattatggatttttccaagctacccaaaatactcgatgaagataaagaaagcacatttggttatgtgcatggggtctcaggacctgtggttacagcctgtgacatggcgggtgcagccatgtatgagctggtgagagtgggccacagcgaattggttggagagattattcgattggagggtgacatggctactattcaggtgtatgaagaaacttctggtgtgtctgttggagatcctgtacttcgcactggtaaacccctctctgtagagcttggtcctggcattatgggagccatttttgatggtattcaaagacctttgtcggatatcagcagtcagacccaaagcatctacatccccagaggagtaaacgtgtctgctcttagcagagatatcaaatgggactttacaccttgcaaaaacctacgggttggtagtcatatcactggcggagacatttatggaattgtcagtgagaactcgcttatcaaacacaaaatcatgttacccccacgaaacagaggaactgtaacttacattgctccacctgggaattatgatacctctgatgttgtcttggagcttgaatttgaaggtgtaaaggagaagttcaccatggtgcaagtatggcctgtacgtcaagttcgacctgtcactgagaagctgccagccaatcatcctctgttgactggccagagagtccttgatgccctttttccgtgtgtccagggaggaactactgctatccctggagcctttggctgtggaaagacagtgatatcacagtctctatccaagtattctaacagtgatgtaatcatctatgtaggatgtggtgaaagaggaaatgagatgtctgaagtcctccgggacttcccagagctcacaatggaggttgatggtaaggtagagtcaattatgaagaggacagctttggtagccaatacctccaatatgcctgttgctgctagagaagcctctatttatactggaatcacactgtcagagtacttccgtgacatgggctatcatgtcagtatgatggctgactctacctctagatgggctgaggcccttagagaaatctctggtcgtttagctgaaatgcctgcagatagtggatatccagcctatcttggtgcccgtctggcctcgttttatgaacgagcaggcagggtgaaatgtcttggaaatcctgaaagagaagggagtgtcagcattgtaggagcagtttctccacctggtggtgatttttctgatccagttacatctgccactcttggtatcgttcaggtgttctggggcttagataagaaactagctcaacgtaagcatttcccctctgtcaattggctcatcagctacagcaagtatatgcgtgccttggatgaatactatgacaaacacttcacagagttcgttcctctgaggacgaaagctaaggaaattctgcaggaagaagaagacctggcagaaattgtacagcttgtgggaaaggcttctttggcagaaacagataaaatcactctggaggtagcaaaacttatcaaagatgatttcctacaacaaaatggatatactccttatgacaggttctgcccattctacaagacagtagggatgctgtccaacatgattgcattttatgatatggctcgtagagctgttgaaaccactgcccagagtgacaataaaatcacatggtccattattcgtgagcacatgggagacatcctctataaactttcctccatgaaattcaaggatccactgaaagatggtgaggcaaagatcaaaagcgactatgcacaacttcttgaagacatgcagaatgcattccgtagccttgaagattagaagccttgaagattacaactgtgatttccttttcctcagcaagctcctatgtgtatattttcctgaatttctcatctcaaaccctttgcttctttattgtgcagctttgagactagtgcctatgtgtgttatttgtttccctgtttttttggtaggtcttatataaaacaaacattcctttgttctagtgttgtgaagggcctccctcttcctttatctgaagtggtgaatatagtaaatatacattctggttacactactgtaaacttgtatgtagggtgatgaccctctttgtcctaggtgtaccctttcctcatctctattaaattgtaaacaggactactgcatgtactctctttgcagtgaatttggaatggaaggccaggtttctataacttttgaacaggtactttgtgaaatgactcaatttctattgtggtaagctcattggcagcttagcattttgcaaaggaattgctttgcaggaaatatttaattttcaaaaacataatgattaatgttccaattatgcatcacttcccccagtataaatcaggaatgtttgtgagaaaccattgggaactatactctttttatttttattttttattttttttattattttttttttggggacggagtgtccctcttgttgcccaggctggagtgcaatggcgtgatcttggctcactgcagccttcgcctcccgggttcaagtgattctcctgcctcagcctcccgagtagctgggattacaggcatgctccaccatgcccagctaattttgtatttttagtagaaacggggtttcaccatattggtcaggctggtctcgaactccagacctcaggtgatccgcccacctcggcctcccaaactgctgggattacaggcgtgagccaccgcgcctggccagggactatactctttttaaaatagacatttgtggggctcacacaatatatgaaatagtaccctctaaaaaagagaaaaaaaaaatcaggcggtcaaacttagagcaacattgtcttattaaagcatagtttatttcactagaaaaaatttaatatcaaggactattacatacttcattactaggaagttctttttaaaatgacacttaaaacaatcactgaaaacttgatccacatcacaccctgtttattttccttaaacatcttggaagcctaagcttctgagaatcatgtggcaagtgtgatgggcagtaaaataccagagaagatgtttagtagcaattaaaggctgtttgcacctttaaggaccagctgggctgtagtgattcctggggccagagtggcattatgtttttacaaaataatgacatatgtcacatgtttgcatgtttgtttgcttgttgaatttttgaacagccagttgaccaatcatagaaagtattactttctttcatatggtttttggttcactggcttaagaggtttctcagaatatctatggccacagcagcataccagtttccatcctaataggaatgaaattaattttgtatctactgataacagaatctgggtcacatgaaaaaaaatcattttatccgtcttttaagtatatgtttaaaataataatttatgtgtctgcatattgcagaacagctctgagagcaacagtttcccattaactctttctgaccaatagtgctggcaccgttgcttcctctttgggaagaggaaagggtgtgtgaacatggctaacaatcttcaaatacccaaattgtgatagcataaataaagtatttattttatgcctcagtatattattatttaattttttaggtaatgcctatctcttggtctattaaggaaagaagcaatcagtagagaattcaggatagttttgtttaaattcttgcagattacatgtttttacagtggcctgctattgaggaaaggtattcttctatacaacttgttttaacctttgagaacattgacagaaattatgcaatggtttgttgagatacggacttgatggtgctgtttaatcagtttgcttccaaagtggcctactcaagaggccctaagactggtagaaattaaaaggatttcaaaaactttctattcctttcttaaacctaccagcaaactaggattgtgatagcaatgaatggtatgatgaagaaagtttgaccaaatttgtttttttgttgttgttgttgttttgaatttgaaatcattcttattccctttaagaatgtttatgtatgagtgtgaagatgctagcgaacctatgctcagatattcatcgtaagtctcccttcacctgttacagagtttcagatcggtcactgatagtatgtatttctttagtaagaatgtgttaaaattacaatgatcttttaaaaagatgatgcagttctgtatttattgtgctgtgtctggtcctaagtggagccaattaaacaagtttcatatgtatttttccagtgttgaatctcacacactgtactttgaaaatttccttccatcctgaataacgaatagaagaggccatatatattgcctccttatccttgagatttcactacctttatgttaaaagttgtgtataattgttaaaatctgtgaaagaataaaaagtggatttaaattaaaaaaaaaaaaaaaaaaaa

SEQ ID NO: 671 - DNA, 1126 bp, Homo sapiens
gttctgcggtgctggtatttagagcgcagcggctgacgggccggatcgccttcgccgccgcccgcccgcaaaccttcgtgcccggcccgtcctcgcccccgcctccgccaccgcctcggcccgcagagcttgccccctccccacccgcagacatgtccgagtccaagagcggccccgagtatgcttcgtttttcgccgtcatgggcgcctcggccgccatggtcttcagcgccctgggcgctgcctatggcacagccaagagcggtaccggcattgcggccatgtctgtcatgcggccggagcagatcatgaagtccatcatcccagtggtcatggctggcatcatcgccatctacggcctggtggtggcagtcctcatcgccaactccctgaatgacgacatcagcctctacaagagcttcctccagctgggcgccggcctgagcgtgggcctgagcggcctggcagccggctttgccatcggcatcgtgggggacgctggcgtgcggggcaccgcccagcagccccgactattcgtgggcatgatcctgattctcatcttcgccgaggtgctcggcctctacggtctcatcgtcgccctcatcctctccacaaagtagaccctctccgagcccaccagccacagaatattatgtaaagaccacccctcctcattccagaacgaacagcctgacacatacgcacggggccgccgcccccagtagttggtcttgtacatgcgcagtgtcctagtgcccatcgtctgtttccccggccttgcccccgcccgccccgtgccgtggacatctgggcccactcatcgcccctccaggcccccggcgccccaccccctagagtgctctgtgtatgcggatgatttagaattgtcatttctctttactggatgtttatttataaagatctggcctgttcctgcgtctgcggagcggcccttgtctcccagctatctataaccttagctagagtgtcgccttgtgggttcctgttgctgagacttcctggatggagccgccctcaccgccgggcccgtggccctgcgcggagctgtgtccaataaagttcttggatgtgaaaaaaaaaaaaaaaaaaaaaaaaaaaaaaaaaa

SEQ ID NO: 672 - DNA, 1126 bp, Homo sapiens; identical to SEQ ID NO: 671

SEQ ID NO: 673 - DNA, 1330 bp, Homo sapiens
aggaaccggaacccgcggttataaagtaaaggaacccgagatctgcgcaggggttccctttgccgatttctctcacctcacctttcaaacctaaactcgagcctactgttcaccggcctagcattgctctcgccatggctctcagcgatgctgacgtgcaaaagcagataaagcatatgatggctttcattgaacaagaagccaatgagaaagcagaagaaatagatgcaaaggcagaagaagagttcaacatagagaaaggtcggcttgtgcaaacccaaagactaaagattatggaatattatgagaagaaagagaaacagattgagcagcagaagaaaattcagatgtccaatttgatgaatcaagcgagactcaaagtcctcagagcaagagatgaccttatcacagacctactaaatgaagcaaaacagagactcagcaaggtggtaaaagatacaaccaggtaccaagtgctgctggatggactggttctccagggtttgtaccagttgctggagccccgaatgattgttcgttgcaggaaacaagatttccctctggtaaaggctgcagtgcagaaggcaattcctatgtacaaaattgccaccaaaaacgatgttgatgtccaaattgaccaggagtcctacctgcctgaagacatagctggtggagttgagatctataatggagatcgtaaaataaaggtttccaacaccctggaaagccggctggatctcatagcccagcagatgatgccagaagtccggggagccttgtttggtgcaaatgccaacaggaagtttttggactaagccttcaggaggtggagctcgtcgtcagctctcctgctgtgatgtggaagcttctgatatttgaagaaacacgaatgtctctgtagcttcctcttcactgccccagtattgctctgtatttatcagcgatgcccctctgtcactcatgccttgcctaattgttcacaatggtggaaagcttcatgtaatatgatcaggacccacctccagttcttctgaaagtgtgacagtgtccagccggttctgcagcactaggggagggggcagatggtggttgcatgggcttcctgggtctccactctccgtctggcctaaaggtgatgtatttggtgtttggccctgcagtccccactcttgaggcttaaggcgcatgtggcacaccactccttccagcagtagtcgctttactgttacctgtttaggcctagaagttttccctcatctgtaaatgtgatttaaaatctaagccatgaatatgctttatttattaaaagagttatgcggatttaatgtga

SEQ ID NO: 674 - DNA, 756 bp, Homo sapiens
atgacccggctgacagtcctggccctgctggctggtctgctggcgtcctcgagggccggctccagcccccttttggacatcgttggcggccggaaggcgaggccccgccagttcccgttcctggcctccattcagaatcaaggcaggcacttctgcgggggtgccctgatccatgcccgcttcgtgatgaccgcggccagctgcttccaaagccagaaccccggggttagcaccgtggtgctgggtgcctatgacctgaggcggcgggagaggcagtcccgccagacgttttccatcagcagcatgagcgagaatggctacgacccccagcagaacctgaacgacctgatgctgcttcagctggaccgtgaggccaacctcaccagcagcgtgacgatactgccactgcctctgcagaacgccacggtggaagccggcaccagatgccaggtggccggctgggggagccagcgcagtggggggcgtctctcccgttttcccaggtttgtcaacgtgactgtgacccccgaggaccagtgtcgccccaacaacgtgtgcaccggtgtgctcacccgccgcggtggcatctgcaatggggacgggggcacccccctcgtctgcgagggcctggcccacggcgtggcctccttttccctggggccctgtggccgaggccctgacttcttcacccgagtggcgctcttccgagactggatcgatggtgttctcaacaacccgggaccggggccagcctag

SEQ ID NO: 675 - DNA, 2477 bp, Homo sapiens
aggggaagggaatgtgaccaggtctaggtctggagtttcagcttggacactgagccaagcagacaagcaaagcaagccaggacacaccatcctgccccaggcccagcttctctcctgccttccaacgccatggggagcaatctcagcccccaactctgcctgatgccctttatcttgggcctcttgtctggaggtgtgaccaccactccatggtctttggcccagccccagggatcctgctctctggagggggtagagatcaaaggcggctccttccgacttctccaagagggccaggcactggagtacgtgtgtccttctggcttctacccgtaccctgtgcagacacgtacctgcagatctacggggtcctggagcaccctgaagactcaagaccaaaagactgtcaggaaggcagagtgcagagcaatccactgtccaagaccacacgacttcgagaacggggaatactggccccggtctccctactacaatgtgagtgatgagatctctttccactgctatgacggttacactctccggggctctgccaatcgcacctgccaagtgaatggccggtggagtgggcagacagcgatctgtgacaacggagcggggtactgctccaacccgggcatccccattggcacaaggaaggtgggcagccagtaccgccttgaagacagcgtcacctaccactgcagccgggggcttaccctgcgtggctcccagcggcgaacgtgtcaggaaggtggctcttggagcgggacggagccttcctgccaagactccttcatgtacgacacccctcaagaggtggccgaagctttcctgtcttccctgacagagaccatagaaggagtcgatgctgaggatgggcacggcccaggggaacaacagaagcggaagatcgtcctggacccttcaggctccatgaacatctacctggtgctagatggatcagacagcattggggccagcaacttcacaggagccaaaaagtgtctagtcaacttaattgagaaggtggcaagttatggtgtgaagccaagatatggtctagtgacatatgccacataccccaaaatttgggtcaaagtgtctgaagcagacagcagtaatgcagactgggtcacgaagcagctcaatgaaatcaattatgaagaccacaagttgaagtcagggactaacaccaagaaggccctccaggcagtgtacagcatgatgagctggccagatgacgtccctcctgaaggctggaaccgcacccgccatgtcatcatcctcatgactgatggattgcacaacatgggcggggacccaattactgtcattgatgagatccgggacttgctatacattggcaaggatcgcaaaaacccaagggaggattatctggatgtctatgtgtttggggtcgggcctttggtgaaccaagtgaacatcaatgctttggcttccaagaaagacaatgagcaacatgtgttcaaagtcaaggatatggaaaacctggaagatgttttctaccaaatgatcgatgaaagccagtctctgagtctctgtggcatggtttgggaacacaggaagggtaccgattaccacaagcaaccatggcaggccaagatctcagtcattcgcccttcaaagggacacgagagctgtatgggggctgtggtgtctgagtactttgtgctgacagcagcacattgtttcactgtggatgacaaggaacactcaatcaaggtcagcgtaggaggggagaagcgggacctggagatagaagtagtcctatttcaccccaactacaacattaatgggaaaaaagaagcaggaattcctgaattttatgactatgacgttgccctgatcaagctcaagaataagctgaaatatggccagactatcaggcccatttgtctcccctgcaccgagggaacaactcgagctttgaggcttcctccaactaccacttgccagcaacaaaaggaagagctgctccctgcacaggatatcaaagctctgtttgtgtctgaggaggagaaaaagctgactcggaaggaggtctacatcaagaatggggataagaaaggcagctgtgagagagatgctcaatatgccccaggctatgacaaagtcaaggacatctcagaggtggtcacccctcggttcctttgtactggaggagtgagtccctatgctgaccccaatacttgcagaggtgattctggcggccccttgatagttcacaagagaagtcgtttcattcaagttggtgtaatcagctggggagtagtggatgtctgcaaaaaccagaagcggcaaaagcaggtacctgctcacgcccgagactttcacatcaacctctttcaagtgctgccctggctgaaggagaaactccaagatgaggatttgggttttctataaggggtttcctgctggacaggggcgtgggattgaattaaaacagctgcgacaac

SEQ ID NO: 676 - DNA, 2367 bp, Homo sapiens
tctctccacaaactgcccaggagtgagtagctgctttcggtccgccggacacaccggacagatagacgtgcggacggcccaccaccccagcccgccaactagtcagcctgcgcctggcgcctcccctctccaggtccatccgccatgtggcccctgtggcgcctcgtgtctctgctggccctgagccaggccctgccctttgagcagagaggcttctgggacttcaccctggacgatgggccattcatgatgaacgatgaggaagcttcgggcgctgacacctcaggcgtcctggacccggactctgtcacacccacctacagcgccatgtgtcctttcggctgccactgccacctgcgggtggttcagtgctccgacctgggtctgaagtctgtgcccaaagagatctcccctgacaccacgctgctggacctgcagaacaacgacatctccgagctccgcaaggatgacttcaagggtctccagcacctctacgccctcgtcctggtgaacaacaagatctccaagatccatgagaaggccttcagcccactgcggaagctgcagaagctctacatctccaagaaccacctggtggagatcccgcccaacctacccagctccctggtggagctccgcatccacgacaaccgcatccgcaaggtgcccaagggagtgttcagcgggctccggaacatgaactgcatcgagatgggcgggaacccactggagaacagtggctttgaacctggagccttcgatggcctgaagctcaactacctgcgcatctcagaggccaagctgactggcatccccaaagacctccctgagaccctgaatgaactccacctagaccacaacaaaatccaggccatcgaactggaggacctgcttcgctactccaagctgtacaggctgggcctaggccacaaccagatcaggatgatcgagaacgggagcctgagcttcctgcccaccctccgggagctccacttggacaacaacaagttggccagggtgccctcagggctcccagacctcaagctcctccaggtggtctatctgcactccaacaacatcaccaaagtgggtgtcaacgacttctgtcccatgggcttcggggtgaagcgggcctactacaacggcatcagcctcttcaacaaccccgtgccctactgggaggtgcagccggccactttccgctgcgtcactgaccgcctggccatccagtttggcaactacaaaaagtagaggcagctgcagccaccgcggggcctcagtgggggtctctggggaacacagccagacatcctgatggggaggcagagccaggaagctaagccagggcccagctgcgtccaacccagccccccacctcgggtccctgaccccagctcgatgccccatcaccgcctctccctggctcccaagggtgcaggtgggcgcaaggcccggcccccatcacatgttcccttggcctcagagctgcccctgctctcccaccacagccacccagaggcaccccatgaagcttttttctcgttcactcccaaacccaagtgtccaaggctccagtcctaggagaacagtccctgggtcagcagccaggaggcggtccataagaatggggacagtgggctctgccagggctgccgcacctgtccagacacacatgttctgttcctcctcctcatgcatttccagcctttcaaccctccccgactctgcggctcccctcagcccccttgcaagttcatggcctgtccctcccagacccctgctccactggcccttcgaccagtcctcccttctgttctctctttccccgtccttcctctctctctctctctctctctgtgtgtgtgtgtgtgtgtgtgtgtgtgtgtgtgtgtgtgtgtgtgtgtgtcttgtgcttcctcagacctttctcgcttctgagcttggtggcctgttccctccatctctccgaacctggcttcgcctgtccctttcactccacaccctctggccttctgccttgagctgggactgctttctgtctgtccggcctgcacccagcccctgcccacaaaaccccagggacagcggtctccccagcctgccctgctcaggccttgcccccaaacctgtactgtcccggaggaggttgggaggtggaggcccagcatcccgcgcagatgacaccatcaaccgccagagtcccagacaccggttttcctagaagcccctcacccccactggcccactggtggctaggtctccccttatccttctggtccagcgcaaggaggggctgcttctgaggtcggtggctgtctttccattaaagaaacaccgtgcaacgtgaaaaaaaaaaaaaaaaaaaaa

SEQ ID NO: 677 - DNA, 2943 bp, Homo sapiens
gcaactgggggcgccccggacgaccatgagagataaggactgagggccaggaaggggaagcgagcccgccgagaggtggcggggactgctcacgccaagggccacagcggccgcgctccggcctcgctccgccgctccacgcctcgcgggatccgcgggggcagcccggccgggcggggatgccggggctggggcggagggcgcagtggctgtgctggtggtgggggctgctgtgcagctgctgcgggcccccgccgctgcggccgcccttgcccgctgccgcggccgccgccgccggggggcagctgctgggggacggcgggagccccggccgcacggagcagccgccgccgtcgccgcagtcctcctcgggcttcctgtaccggcggctcaagacgcaggagaagcgggagatgcagaaggagatcttgtcggtgctggggctcccgcaccggccccggcccctgcacggcctccaacagccgcagcccccggcgctccggcagcaggaggagcagcagcagcagcagcagctgcctcgcggagagccccctcccgggcgactgaagtccgcgcccctcttcatgctggatctgtacaacgccctgtccgccgacaacgacgaggacggggcgtcggagggggagaggcagcagtcctggccccacgaagcagccagctcgtcccagcgtcggcagccgcccccgggcgccgcgcacccgctcaaccgcaagagccttctggcccccggatctggcagcggcggcgcgtccccactgaccagcgcgcaggacagcgccttcctcaacgacgcggacatggtcatgagctttgtgaacctggtggagtacgacaaggagttctcccctcgtcagcgacaccacaaagagttcaagttcaacttatcccagattcctgagggtgaggtggtgacggctgcagaattccgcatctacaaggactgtgttatggggagttttaaaaaccaaacttttcttatcagcatttatcaagtcttacaggagcatcagcacagagactctgacctgtttttgttggacacccgtgtagtatgggcctcagaagaaggctggctggaatttgacatcacggccactagcaatctgtgggttgtgactccacagcataacatggggcttcagctgagcgtggtgacaagggatggagtccacgtccacccccgagccgcaggcctggtgggcagagacggcccttacgataagcagcccttcatggtggctttcttcaaagtgagtgaggtccacgtgcgcaccaccaggtcagcctccagccggcgccgacaacagagtcgtaatcgctctacccagtcccaggacgtggcgcgggtctccagtgcttcagattacaacagcagtgaattgaaaacagcctgcaggaagcatgagctgtatgtgagtttccaagacctgggatggcaggactggatcattgcacccaagggctatgctgccaattactgtgatggagaatgctccttcccactcaacgcacacatgaatgcaaccaaccacgcgattgtgcagaccttggttcaccttatgaaccccgagtatgtccccaaaccgtgctgtgcgccaactaagctaaatgccatctcggttctttactttgatgacaactccaatgtcattctgaaaaaatacaggaatatggttgtaagagcttgtggatgccactaactcgaaaccagatgctggggacacacattctgccttggattcctagattacatctgccttaaaaaaacacggaagcacagttggaggtgggacgatgagactttgaaactatctcatgccagtgccttattacccaggaagattttaaaggacctcattaataatttgctcacttggtaaatgacgtgagtagttgttggtctgtagcaagctgagtttggatgtctgtagcataaggtctggtaactgcagaaacataaccgtgaagctcttcctaccctcctcccccaaaaacccaccaaaattagttttagctgtagatcaagctatttggggtgtttgttagtaaatagggaaaataatctcaaaggagttaaatgtattcttggctaaaggatcagctggttcagtactgtctatcaaaggtagattttacagagaacagaaatcggggaagtggggggaacgcctctgttcagttcattcccagaagtccacaggacgcacagcccaggccacagccagggctccacggggcgcccttgtctcagtcattgctgttgtatgttcgtgctggagttttgttggtgtgaaaatacacttatttcagccaaaacataccatttctacacctcaatcctccatttgctgtactctttgctagtaccaaaagtagactgattacactgaggtgaggctacaaggggtgtgtaaccgtgtaacacgtgaaggcagtgctcacctcttctttaccagaacggttctttgaccagcacattaacttctggactgccggctctagtaccttttcagtaaagtggttctctgcctttttactatacagcataccacgccacagggttagaaccaacgaagaaaataaaatgagggtgcccagcttataagaatggtgttagggggatgagcatgctgtttatgaacggaaatcatgatttccctgtagaaagtgaggctcagattaaattttagaatattttctaaatgtctttttcacaatcatgtgactgggaaggcaatttcatactaaactgattaaataatacatttataatctacaactgtttgcacttacagctttttttgtaaatataaactataatttattgtctattttatatctgttttgctgtggcgttggggggggggccgggcttttgggggggggggtttgtttggggggtgtcgtggtgtgggcgggcgg

SEQ ID NO: 678 - DNA, 1881 bp, Homo sapiens
acttccgcccggcgcgagaccgaagctggcggctggtcggttgcaggcaacatgtcggaaggaaacgccgccggacgcccagcacggcagggcccggaccttctcctgactggggcccgggggtcatcgggcggcggcggcctcccctcacccccggccgttccctccatccgttccagggacctaaccctcgggggagtcaagaagaaaaccttcaccccaaatatcatcagtcggaagatcaaggaagagcccaaggaagaagtaactgtcaagaaggagaagcgtgaaagggacagagaccgacaacgagaggggcatggacgagggcgacgccgtccagaagtgatccagtctcactccatctttgagcagggcccagctgaaatgatgaagaaaaaagggaactgggataagacagtggatgtgtcagacatgggaccttctcatatcatcaacatcaaaaaagagaagagagagacagacgaagaaactaaacagatcttgcgtatgctggagaaggacgatttcctcgatgaccccggcctgaggaacgacactcgaaatatgcctgtgcagctgccgctggctcactcaggatggctttttaaggaagaaaatgacgaaccagatgttaaaccttggctggctggccccaaggaagaggacatggaggtggacatacctgctgtgaaagtgaaagaggagccacgagatgaggaggaagaggccaagatgaaggctcctcccaaagcagccaggaagactccaggcctcccgaaggatgtatctgtggcagagctgctgagggagctgagcctcaccaaggaagaggaactgctgtttctgcagctgccagacaccctccctggccagccacccacccaggacatcaagcctatcaagacagaggtgcagggcgaggacggacaggtggtgctcatcaagcaggagaaagaccgagaagccaaattggcagagaatgcttgtaccctggctgacctgacagagggtcaggttggcaagctactcatccgcaagtctggaagggtgcaactcctcttgggcaaggtgactctggacgtgaccatgggaactgcctgctccttcctgcaggagctggtgtccgtgggccttggagacagtaggacaggggagatgacagtcctgggacacgtgaagcacaaacttgtatgttcccctgattttgaatccctcttggatcacaaacaccggtaaaatgagcaggtggaggaggacggcgcctgtgcccacgctgctgcctgctccagacattttgttcttgaatctgtgagacccagaagggcccactgagcccactcactccacctttggcaaccattgttccaggtcccccagggcttcctcccacagcagctgtgaatggcacagtgaccttcctgcagcgtggagatggcacatccttgctgctggggacttggccctgctatttatttttgtatttatgtcttaatctcttccactgatgcatcctccaagggtagatggggagggtctgtgtgaaggggccggcttctcttggtgcctgctgggttgcaggggcaggaagcgtgtggactgcagcttctgctggtgctccccccgtcctcctggaggcagtataggagagagagcaaggattgagtctgagacttaagcactcggtcccagcttgccagttcctggttctgtgtccttggaaaactacctaacctttctgagcctcctatactatccgacacaaatggggatgatacctacctccagggttggcgtgaggattcatgggctattatagatgaaaactgcacaaggccagaactagcaggcactcaataaacgttcatgtcctttttctct

SEQ ID NO: 679 - DNA, 1673 bp, Homo sapiens
ggaggagcggctgctgctgctgctgctgctgctggtggcccctttgcagatgtattgctgtccttgaatattagcccatttgaaaacgcctgggaagttcagccatcagtatgtccaagtacaaacttattatgttaagacatggagagggtgcttggaataaggagaaccgtttttgtagctgggtggatcagaaactcaacagcgaaggaatggaggaagctcggaactgtgggaagcaactcaaagcgttaaactttgagtttgatcttgtattcacatctgtccttaatcggtccattcacacagcctggctgatcctggaagagctaggccaggaatgggtgcctgtggaaagctcctggcgtctaaatgagcgtcactatggggccttgatcggtctcaacagggagcagatggctttgaatcatggtgaagaacaagtgaggctctggagaagaagctacaatgtaaccccgcctcccattgaggagtctcatccttactaccaagaaatctacaacgaccggaggtataaagtatgcgatgtgcccttggatcaactgccacggtcggaaagcttaaaggatgttctggagagactccttccctattggaatgaaaggattgctcccgaagtattacgtggcaaaaccattctgatatctgctcatggaaatagcagtagggcactcctaaaacacctggaaggtatctcagatgaagacatcatcaacattactcttcctactggagtccccattcttctggaattggatgaaaacctgcgtgctgttgggcctcatcagttcctgggtgaccaagaggcgatccaagcagccattaagaaagtagaagatcaaggaaaagtgaaacaagctaaaaaatagtctttctcaactgttggctaagaagaaatgcaaaagaagtggcataggagtgtgttatgggtgctgaactctctctctttttccccgattttccagagctaggctgtggagtagagtttgtataggtaactaggtaacttattgtggcccagataaggctttaggatgcctcagtgcttatgtcatagccttatgagttagctttcttgctagccccctagtcggtcaccaaactagtaactagtggggcttaatgaaggtcataagtttctgagatgggagagcaacaagtagagatgaagttaaaggtatttatcattcaagaaatcattattgagtcaccaattgacaggcactattctaatcagtagttcactttaatatttaataagattttctgggataacagtaagggatattagataatataccgtatgtatttattactagtcttttcctctaggaaaagggatactttgataattaaggccagaggcccattagttgagaaagtcacagatatatttctccaagaaagccaacaaccaccaccacaatgacagaaatgacaacaaggccctttaacttgtcttctagtttagagacatccttcatttgacatttagtagaattcctctttggccacaagaataagcagcaaataaacaactatggctgttgaggttctcattttggtttgttttaattttttgaactttgggtacctgtaattagtttaaaaataaagttcctgataataaagtgactgaaaatggcatcccc

SEQ ID NO: 680 - DNA, 1638 bp, Homo sapiens
gccgcgggcggcggcggcagcggttggaggttgtaggaccggcgaggaataggaatcatggcggctgcgctgttcgtgctgctgggattcgcgctgctgggcacccacggagcctccggggctgccggcacagtcttcactaccgtagaagaccttggctccaagatactcctcacctgctccttgaatgacagcgccacagaggtcacagggcaccgctggctgaaggggggcgtggtgctgaaggaggacgcgctgcccggccagaaaacggagttcaaggtggactccgacgaccagtggggagagtactcctgcgtcttcctccccgagcccatgggcacggccaacatccagctccacgggcctcccagagtgaaggccgtgaagtcgtcagaacacatcaacgagggggagacggccatgctggtctgcaagtcagagtccgtgccacctgtcactgactgggcctggtacaagatcactgactctgaggacaaggccctcatgaacggctccgagagcaggttcttcgtgagttcctcgcagggccggtcagagctacacattgagaacctgaacatggaggccgaccccggccagtaccggtgcaacggcaccagctccaagggctccgaccaggccatcatcacgctccgcgtgcgcagccacctggccgccctctggcccttcctgggcatcgtggctgaggtgctggtgctggtcaccatcatcttcatctacgagaagcgccggaagcccgaggacgtcctggatgatgacgacgccggctctgcacccctgaagagcagcgggcagcaccagaatgacaaaggcaagaacgtccgccagaggaactcttcctgaggcaggtggcccgaggacgctccctgctccgcgtctgcgccgccgccggagtccactcccagtgcttgcaagattccaagttctcacctcttaaagaaaacccaccccgtagattcccatcatacacttccttcttttttaaaaaagttgggttttctccattcaggattctgttccttaggattttttccttctgaagtgtttcacgagagcccgggagctgctgccctgcggccccgtctgtggctttcagcctctgggtctgagtcatggccgggtgggcggcacagccttctccactggccggagtcagtgccaggtccttgccctttgtggaaagtcacaggtcacacgaggggccccgtgtcctgcctgtctgaagccaatgctgtctggttgcgccatttttgtgcttttatgtttaattttatgagggccacgggtctgtgttcgactcagcctcagggacgactctgacctcttggccacagaggactcacttgcccacaccgagggcgaccccgtcacagcctcaagtcactcccaagccccctccttgtctgtgcatccgggggcagctctggagggggtttgctggggaactggcgccatcgccgggactccagaaccgcagaagcctccccagctcacccctggaggacggccggctctctatagcaccagggctcacgtgggaacccccctcccacccaccgccacaataaagatcgcccccacctccaccctcaaaaaaaaaaaaaaaaaaaaaaa

SEQ ID NO: 681 - DNA, 1783 bp, Homo sapiens
cctctcggagctggaaatgcagctattgagatcttcgaatgctgcggagctggaggcggaggcagctggggaggtccgagcgatgtgaccaggccgccatcgctcgtctcttcctctctcctgccgcctcctgtgtcgaaaataacttttttagtctaaagaaagaaagacaaaagtagtcgtccgcccctcacgccctctcttcctctcagccttccgcccggtgaggaagcccggggtggctgctccgccgtcggggccgcgccgccgagccccagcgccccgggccgcccccgcacgccgcccccatgcatcccttctacacccgggccgccaccatgataggcgagatcgccgccgccgtgtccttcatctccaagtttctccgcaccaaggggctgacgagcgagcgacagctgcagaccttcagccagagcctgcaggagctgctggcagaacattataaacatcactggttcccagaaaagccatgcaagggatcgggttaccgttgtattcgcatcaaccataaaatggatcctctgattggacaggcagcacagcggattggactgagcagtcaggagctgttcaggcttctcccaagtgaactcacactctgggttgacccctatgaagtgtcctacagaattggagaggatggctccatctgtgtgctgtatgaagcctcaccagcaggaggtagcactcaaaacagcaccaacgtgcaaatggtagacagccgaatcagctgtaaggaggaacttctcttgggcagaacgagcccttccaaaaactacaatatgatgactgtatcaggttaagatatagtctgtggatggatcatctgatgatgatccataaatttgatttttgctttgggtgggctcctcttggggatggattatggaatttaaaccatgtcacagctgtgaagatctggcacaagatagaatggtaaaaaaaaaaaaaaattttaagtgacagtgccatagtttggacagtacctttcaatgattaattttaatagcctgtgagtccaagtaaatgatcactttatttgctagggagggaagtcctagggtggtttcagtttctcccagacatacctaaatttttacatcaatccttttaaagaaaatctgtatttcaaagaatctttctctgcagtaaatctcgcaggggaatttgcactattacacttgaaagttgttattgttaaccttttcggcagcttttaataggaaagttaaacgttttaaacatggtagtactggaaattttacaagacttttacctagcacttaaatatgtataaatgtacataaagacaaactagtaagcatgacctggggaaatggtcagaccttgtattgtgtttttggccttgaaagtagcaagtgaccagaatctgccatggcaacaggctttaaaaaagacccttaaaaagacactgtctcaactgtggtgttagcaccagccagctctctgtacatttgctagcttgtagttttctaagactgagtaaacttcttatttttagaaagtggaggtctggtttgtaactttccttgtacttaattgggtaaaagtcttttccacaaaccaccatctattttgtgaactttgttagtcatcttttatttggtaaattatgaactggtgtaaatttgtacagttcatgtatattgattgtggcaaagttgtacagatttctatattttggatgagaaatttttcttctctctataataaatcgtttcttatcttggcatttttaacc

SEQ ID NO: 682 - DNA, 2386 bp, Homo sapiens
tgcacgaagacgctgtcgggagagcccaggattcaacacgggccttgagaaatgtggctcttgtacctcctggtgccggccctgttctgcagggcaggaggctccattcccatccctcagaagttatttggggaggtgacttcccctctgttccccaagccttaccccaacaactttgaaacaaccactgtgatcacagtccccacgggatacagggtgaagctcgtcttccagcagtttgacctggagccttctgaaggctgcttctatgattatgtcaagatctctgctgataagaaaagcctggggaggttctgtgggcaactgggttctccactgggcaaccccccgggaaagaaggaatttatgtcccaagggaacaagatgctgctgaccttccacacagacttctccaacgaggagaatgggaccatcatgttctacaagggcttcctggcctactaccaagctgtggaccttgatgaatgtgcttcccggagcaaattaggggaggaggatccccagccccagtgccagcacctgtgtcacaactacgttggaggctacttctgttcctgccgtccaggctatgagcttcaggaagacaggcattcctgccaggctgagtgcagcagcgagctgtacacggaggcatcaggctacatctccagcctggagtaccctcggtcctacccccctgacctgcgctgcaactacagcatccgggtggagcggggcctcaccctgcacctcaagttcctggagccttttgatattgatgaccaccagcaagtacactgcccctatgaccagctacagatctatgccaacgggaagaacattggcgagttctgtgggaagcaaaggccccccgacctcgacaccagcagcaatgctgtggatctgctgttcttcacagatgagtcgggggacagccggggctggaagctgcgctacaccaccgagatcatcaagtgcccccagcccaagaccctagacgagttcaccatcatccagaacctgcagcctcagtaccagttccgtgactacttcattgctacctgcaagcaaggctaccagctcatagaggggaaccaggtgctgcattccttcacagctgtctgccaggatgatggcacgtggcatcgtgccatgcccagatgcaagatcaaggactgtgggcagccccgaaacctgcctaatggtgacttccgttacaccaccacaatgggagtgaacacctacaaggcccgtatccagtactactgccatgagccatattacaagatgcagaccagagctggcagcagggagtctgagcaaggggtgtacacctgcacagcacagggcatttggaagaatgaacagaagggagagaagattcctcggtgcttgccagtgtgtgggaagcccgtgaaccccgtggaacagaggcagcgcatcatcggagggcaaaaagccaagatgggcaacttcccctggcaggtgttcaccaacatccacgggcgcgggggcggggccctgctgggcgaccgctggatcctcacagctgcccacaccctgtatcccaaggaacacgaagcgcaaagcaacgcctctttggatgtgttcctgggccacacaaatgtggaagagctcatgaagctaggaaatcaccccatccgcagggtcagcgtccacccggactaccgtcaggatgagtcctacaattttgagggggacatcgccctgctggagctggaaaatagtgtcaccctgggtcccaacctcctccccatctgcctccctgacaacgataccttctacgacctgggcttgatgggctatgtcagtggcttcggggtcatggaggagaagattgctcatgacctcaggtttgtccgtctgcccgtagctaatccacaggcctgtgagaactggctccggggaaagaataggatggatgtgttctctcaaaacatgttctgtgctggacacccatctctaaagcaggacgcctgccagggggatagtgggggcgtttttgcagtaagggacccgaacactgatcgctgggtggccacgggcatcgtgtcctggggcatcgggtgcagcaggggctatggcttctacaccaaagtgctcaactacgtggactggatcaagaaagagatggaggaggaggactgagcccagaattcactaggttcgaatccagagagcagtgtggaaaaaaaaaaacaaaaaacaactgaccagttgttgataaccactaagagtctctattaaaattactgatgcagaaagaccgtgtgtgaaattctctttcctgtagtcccattgatgtactttacctgaaacaaccaaagggcccctttctttcttctgaggattgcagaggatatag

SEQ ID NO: 683 - DNA, 2647 bp, Homo sapiens
gggccggagttcctgcagagggagcgtcaaggccctgtgctgctgtccctgggggccagaggggttgcccagcatgcccactggcaggagagagggaactgacccacttgctcctaccagcttctgaaggctccaaagtccggagtgcagaaagccaggaccaagagacaggcagctcaccagggtggacaaatcgccagagatgtggtgcattgtcctgttttcacttttggcatgggtttatgctgagcctaccatgtatggggagatcctgtcccctaactatcctcaggcatatcccagtgaggtagagaaatcttgggacatagaagttcctgaagggtatgggattcacctctacttcacccatctggacattgagctgtcagagaactgtgcgtatgactcagtgcagataatctcaggagacactgaagaagggaggctctgtggacagaggagcagtaacaatccccactctccaattgtggaagagttccaagtcccatacaacaaactccaggtgatctttaagtcagacttttccaatgaagagcgttttacggggtttgctgcatactatgttgccacagacataaatgaatgcacagattttgtagatgtcccttgtagccacttctgcaacaatttcattggtggttacttctgctcctgccccccggaatatttcctccatgatgacatgaagaattgcggagttaattgcagtggggatgtattcactgcactgattggggagattgcaagtcccaattatcccaaaccatatccagagaactcaaggtgtgaataccagatccggttggagaaagggttccaagtggtggtgaccttgcggagagaagattttgatgtggaagcagctgactcagcgggaaactgccttgacagtttagtttttgttgcaggagatcggcaatttggtccttactgtggtcatggattccctgggcctctaaatattgaaaccaagagtaatgctcttgatatcatcttccaaactgatctaacagggcaaaaaaagggctggaaacttcgctatcatggagatccaatgccctgccctaaggaagacactcccaattctgtttgggagcctgcgaaggcaaaatatgtctttagagatgtggtgcagataacctgtctggatgggtttgaagttgtggagggacgtgttggtgcaacatctttctattcgacttgtcaaagcaatggaaagtggagtaattccaaactgaaatgtcaacctgtggactgtggcattcctgaatccattgagaatggtaaagttgaagacccagagagcactttgtttggttctgtcatccgctacacttgtgaggagccatattactacatggaaaatggaggaggtggggagtatcactgtgctggtaacgggagctgggtgaatgaggtgctgggcccggagctgccgaaatgtgttccagtctgtggagtccccagagaaccctttgaagaaaaacagaggataattggaggatccgatgcagatattaaaaacttcccctggcaagtcttctttgacaacccatgggctggtggagcgctcattaatgagtactgggtgctgacggctgctcatgttgtggagggaaacagggagccaacaatgtatgttgggtccacctcagtgcagacctcacggctggcaaaatccaagatgctcactcctgagcatgtgtttattcatccgggatggaagctgctggaagtcccagaaggacgaaccaattttgataatgacattgcactggtgcggctgaaagacccagtgaaaatgggacccaccgtctctcccatctgcctaccaggcacctcttccgactacaacctcatggatggggacctgggactgatctcaggctggggccgaacagagaagagagatcgtgctgttcgcctcaaggcggcaaggttacctgtagctcctttaagaaaatgcaaagaagtgaaagtggagaaacccacagcagatgcagaggcctatgttttcactcctaacatgatctgtgctggaggagagaagggcatggatagctgtaaaggggacagtggtggggcctttgctgtacaggatcccaatgacaagaccaaattctacgcagctggcctggtgtcctgggggccccagtgtgggacctatgggctctacacacgggtaaagaactatgttgactggataatgaagactatgcaggaaaatagcaccccccgtgaggactaatccagatacatcccaccagcctctccaagggtggtgaccaatgcattaccttctgttccttatgatattctcattatttcatcatgactgaaagaagacacgagcgaatgatttaaatagaacttgattgttgagacgccttgctagaggtagagtttgatcatagaattgtgctggtcatacatttgtggtctgactccttggggtcctttccccggagtacctattgtagataacactatgggtggggcactcctttcttgcactattccacagggataccttaattctttgtttcctctttacctgttcaaaattccatttacttgatcattctcagtatccactgtctatgtacaataaaggatgtttataagc

SEQ ID NO: 684 - DNA, 1128 bp, Homo sapiens
agtccgagtggagagagcgagctgagtggttgtgtggtcgcgtctcggaaaccggtagcgcttgcagcatggctgaccaactgactgaagagcagattgcagaattcaaagaagctttttcactatttgacaaagatggtgatggaactataacaacaaaggaattgggaactgtaatgagatctcttgggcagaatcccacagaagcagagttacaggacatgattaatgaagtagatgctgatggtaatggcacaattgacttccctgaatttctgacaatgatggcaagaaaaatgaaagacacagacagtgaagaagaaattagagaagcattccgtgtgtttgataaggatggcaatggctatattagtgctgcagaacttcgccatgtgatgacaaaccttggagagaagttaacagatgaagaagttgatgaaatgatcagggaagcagatattgatggtgatggtcaagtaaactatgaagagtttgtacaaatgatgacagcaaagtgaagaccttgtacagaatgtgttaaatttcttgtacaaaattgtttatttgccttttctttgtttgtaacttatctgtaaaaggtttctccctactgtcaaaaaaatatgcatgtatagtaattaggacttcattcctccatgttttcttcccttatcttactgtcattgtcctaaaaccttattttagaaaattgatcaagtaacatgttgcatgtggcttactctggatatatctaagcccttctgcacatctaaacttagatggagttggtcaaatgagggaacatctgggttatgccttttttaaagtagttttctttaggaactgtcagcatgttgttgttgaagtgtggagttgtaactctgcgtggactatggacagtcaacaatatgtacttaaaagttgcactattgcaaaacgggtgtattatccaggtactcgtacactatttttttgtactgctggtcctgtaccagaaacattttcttttattgttacttgctttttaaactttgtttagccacttaaaatctgcttatggcacaatttgcctcaaaatccattccaagttgtatatttgttttccaataaaaaaattacaatttaccc

SEQ ID NO: 685 - DNA, 1221 bp, Homo sapiens
cgcaggctggaaggaagacgaacctacgaagcagagatctgaagacagcatgtacacagccattccccagagtggctctccattcccaggctcagtgcaggatccaggcctgcatgtgtggcgggtggagaagctgaagccggtgcctgtggcgcaagagaaccagggcgtcttcttctcgggggactcctacctagtgctgcacaatggcccagaagaggtttcccatctgcacctgtggataggccagcagtcatcccgggatgagcagggggcctgtgccgtgctggctgtgcacctcaacacgctgctgggagagcggcctgtgcagcaccgcgaggtgcagggcaatgagtctgacctcttcatgagctacttcccacggggcctcaagtaccaggaaggtggtgtggagtcagcatttcacaagacctccacaggagccccagctgccatcaagaaactctaccaggtgaaggggaagaagaacatccgtgccaccgagcgggcactgaactgggacagcttcaacactggggactgcttcatcctggacctgggccagaacatcttcgcctggtgtggtggaaagtccaacatcctggaacgcaacaaggcgagggacctggccctggccatccgggacagtgagcgacagggcaaggcccaggtggagattgtcactgatggggaggagcctgctgagatgatccaggtcctgggccccaagcctgctctgaaggagggcaaccctgaggaagacctcacagctgacaaggcaaatgcccaggccgcagctctgtataaggtctctgatgccactggacagatgaacctgaccaaggtggctgactccagcccctttgcccttgaactgctgatatctgatgactgctttgtgctggacaacgggctctgtggcaagatctatatctggaaggggcgaaaagcgaatgagaaggagcggcaggcagccctgcaggtggccgagggcttcatctcgcgcatgcagtacgccccgaacactcaggtggagattctgcctcagggccgtgagagtcccatcttcaagcaatttttcaaggactggaaatgagggtgggcgtcttcctgccccatgctcccctgccccccaccacctgcctgcttgcttctctggctgcctggtcagtgcagaggtgccccctgcagatgttcaataaaggagacaagtgctttccc

SEQ ID NO: 686 - DNA, 3419 bp, Homo sapiens
ttccctccggtgaatcatcgctcgcagcggcggcgcccgcagtggccgcagcagcgcgccgggccctggccgcgccccagccgagcgcagcgcggagtcgccccgacctttctctgcgcagtacggccgccgggaccgcagcatggcgggcatcgcggccaagctggcgaaggaccgggaggcggccgaggggctgggctcccacgagagggccatcaagtacctcaaccaggactacgaggcgctgcggaacgagtgcctggaggccgggacgctcttccaggacccgtccttcccggccatcccctcggccctgggcttcaaggagttggggccctactccagcaaaacccggggcatgagatggaagcgccccacggagatctgcgctgacccccagtttatcattggaggagccacccgcacagacatctgccaaggagccctaggtgactgctggctgctggcagccattgcctccctcaccttgaatgaagaaatcctggctcgagtcgtccccctaaaccagagcttccaggaaaactatgcagggatctttcacttccagttctggcaatacggcgagtgggtggaggtggtggtggatgacaggctgcccaccaaggacggggagctgctctttgtgcattcagccgaagggagcgagttctggagcgccctgctggagaaggcatacgccaagatcaacggatgctatgaagctctatcagggggtgccaccactgagggcttcgaagacttcaccggaggcattgctgagtggtatgagttgaagaagccccctcccaacctgttcaagatcatccagaaagctctgcaaaaaggctctctccttggctgctccatcgacatcaccagcgccgcggactcggaggccatcacgtttcagaagctggtgaaggggcacgcgtactcggtcaccggagccgaggaggttgaaagtaacggaagcctacagaaactgatccgcatccgaaatccctggggagaagtggagtggacagggcggtggaatgacaactgcccaagctggaacactatagacccagaggagagggaaaggctgaccagacggcatgaagatggagaattctggatgtctttcagtgacttcctgaggcactattcccgcctggagatctgtaacctgaccccagacactctcaccagcgatacctacaagaagtggaaactcaccaaaatggatgggaactggaggcggggctccaccgcgggaggttgcaggaactacccgaacacattctggatgaaccctcagtacctgatcaagctggaggaggaggatgaggacgaggaggatggggagagcggctgcaccttcctggtggggctcattcagaagcaccgacggcggcagaggaagatgggcgaggacatgcacaccatcggctttggcatctatgaggttccagaggagttaagtgggcagaccaacatccacctcagcaaaaacttcttcctgacgaatcgcgccagggagcgctcagacaccttcatcaacctccgggaggtgctcaaccgcttcaagctgccgccaggagagtacattctcgtgccttccaccttcgaacccaacaaggatggggatttctgcatccgggtcttttctgaaaagaaagctgactaccaagctgtcgatgatgaaatcgaggccaatcttgaagagttcgacatcagcgaggatgacattgatgatggagtcaggagactgtttgcccagttggcaggagaggatgcggagatctctgcctttgagctgcagaccatcctgagaagggttctagcaaagcgccaagatatcaagtcagatggcttcagcatcgagacatgcaaaattatggttgacatgctagattcggacgggagtggcaagctggggctgaaggagttctacattctctggacgaagattcaaaaataccaaaaaatttaccgagaaatcgacgttgacaggtctggtaccatgaattcctatgaaatgcggaaggcattagaagaagcaggtttcaagatgccctgtcaactccaccaagtcatcgttgctcggtttgcagatgaccagctcatcatcgattttgataattttgttcggtgtttggttcggctggaaacgctattcaagatatttaagcagctggatcccgagaatactggaacaatagagctcgaccttatctcttggctctgtttctcagtactttgaagttataactaatctgcctgaagacttctcatgatggaaaatcagccaaggactaagcttccatagaaatacactttgtatctggacctcaaaattatgggaacatttacttaaacggatgatcatagctgaaaataatgatactgtcaatttgagatagcagaagtttcacacatcaaagtaaaagatttgcatatcattatactaaatgcaaatgagtcgcttaacccttgacaaggtcaaagaaagctttaaatctgtaaatagtatacactttttacttttacacactttcctgttcatagcaatattaaatcaggaaaaaaaaatgcagggaggtatttaacagctgagcaaaaacattgagtcgctctcaaaggacacgaggcccttggcagggaatatttaaagcaacttcaagtttaaaatgcagctgttgattctaccaaacaacagtccaagattaccatttcccatgagccaactgggaaacatggtatatcatgaagtaatcttgtcaaggcatctggagagtccaggagaggagactcacctctgtcgcttgggttaaacaagagacaggttttgtagaatattgattggtaatagtaaatcgttctccttacaatcaagttcttgaccctattcggccttatacatctggtcttacaaagaccaaagggatcctgcgcttgatcaactgaaccagtatgccaaaaccaggcatccaatttgtaaaccaattatgataaaggacaaaataagctgtttgccacctcaaaactttatgaacttcaccaccactagtgtctgtccatggagttagaggggacatcacttagaagttcttatagaaaggacacaagtttgtttcctggctttaccttgggaaaatgctagcaacattatagaaattttgccttgttgccttatcttcttccaaatgtactgttaaataaaaataaagggttaccccatgcaatcacaccatgccatgttttccttcctggagggcagccccacaggacggtttatgagcacacaattatagcttgtttctactttaacagggtatgctgcctctgtaaattcatgtattcaaaggaaaagacaccttgcctataattaaaatgtggaactataaaattttttaaaatccaaaaaaaaaaaaaaa

SEQ ID NO: 687 - DNA, 1478 bp, Homo sapiens
gcgggcgacacgagggccgcggtgcagtgtccgacccgagagttgcggcctgagtcaccggccccgccctccggagccggacgctccgggaggcccgggagcggcagtggaaccgactcccagaactccggacgtgtgcggcgcagtgagtcgcagccatgttcctggttaactcgttcttgaagggcggcggcggcggcggcgggggaggcgggggcctgggtgggggcctgggaaatgtgcttggaggcctgatcagcggggccgggggcggcggcggcggcggcggcggcggcggcggtggtggaggcggcggtggcggtggaacggccatgcgcatcctaggcggagtcatcagcgccatcagcgaggcggctgcgcagtacaacccggagcccccgcccccacgcacacattactccaacattgaggccaacgagagtgaggaggtccggcagttccggagactctttgcccagctggctggagatgacatggaggtcagcgccacagaactcatgaacattctcaataaggttgtgacacgacaccctgatctgaagactgatggttttggcattgacacatgtcgcagcatggtggccgtgatggatagcgacaccacaggcaagctgggctttgaggaattcaagtacttgtggaacaacatcaaaaggtggcaggccatatacaaacagttcgacactgaccgatcagggaccatttgcagtagtgaactcccaggtgcctttgaggcagcagggttccacctgaatgagcatctctataacatgatcatccgacgctactcagatgaaagtgggaacatggattttgacaacttcatcagctgcttggtcaggctggacgccatgttccgtgccttcaaatctcttgacaaagatggcactggacaaatccaggtgaacatccaggagtggctgcagctgactatgtattcctgaactggagccccagacccgccccctcaccgccttgctataggagtcacctggagcctcggtctctcccagggccgatcctgtctgcagtcacatctttgtggggcctgctgacccacaagcttttgttctctcagtacttgttacccagcttctcaacatccagggcccaatttgccctgcctggagttccccctggctctaggacactctaacaagctctgtccacgggtctccccattcccaccaggccctgcacacacccactccgtaacctctcccctgtacctgtgccaagcctagcacttgtgatgcctccatgccccgagggcctctctcagttctgggaggatgactccagtccctgcacgccctggcacacccttcacggttgctacccaggcggccaagctccagaccgtgccagacccaggtgccccagtgcctttgtctatattctgctcccagcctgccaggccaggaggaaataaacatgccccagttgctgatctctaa

SEQ ID NO: 688 - DNA, 1853 bp, Homo sapiens
gaattcggggggagtctccctgacttccagcaacaatccttgagtctgggactgccctggcctaagatgggccagtttctatcttcgactttcttggagggctcaccggccacagtgtggcacgataagctttgtgacggtgaacgcagaggagcaagagaagcagttcgtatcttccaggaccaagcaaaagctaaagaagaaaaactagagaagtgtggtgaggatgatgaaacaatcccatctgagtacagattaaaaccagccacggataaagatggaaaaccactattgccagagcctgaagaaaaacccaagcctcggagtgaatcagaactcattgatgaactttcagaagattttgaccggtctgaatgtaaagagaaaccatctaagccaactgaaaagacagaagaatctaaggccgctgctccagctcctgtgtcggaggctgtgtctcggacctccatgtgtagtatacagtcagcaccccctgagccggctaccttgaagggcacagtgccagacgatgctgtagaagccttggctgatagcctggggaaaaaggaagcagatccagaagatggaaaacctgtgatggataaagtcaaggagaaggccaaagaagaagaccgtgaaaagcttggtgaaaaagaagaaacaattcctcctgattatagattagaagaggtcaaggataatgatggaaagccactcctgccaaaagagtctaaggaacagcttccacccatgagtgaagacttccttctggatgctttgtctgaggacttctctggtccacaaaatgcttcatctcttaaatttgaagatgctaaacttgctgctgccatctctgaagtggtttcccaaaccccagcttcaacgacccaagctggagccccaccccgtgatacctcgagtgacaaagacctcgatgatgccttggataaactctctgacagtctagaacaaaggcagcctgacccagatgagaacaaaccaatggaagataaagtaaaggaaaaagctaaagctgaacatagagacaagcttggagagagagatgacactatcccacctgaatacagacatctcctggatgataatggacaggacaaaccagtgaagccacctacaaagaaatcagaggattcaaagaaacctgcagatgaccaagaccccattgatgctctctcaggagatctggacagctgtccctccactacagaaacctcacagaacacagcaaaggataagtgcaagaaggctgcttccagctccaaagcacctaagaatggaggtaaagcgaaggattcagcaaagacaacagaggaaacttccaagccaaaagatgactaaagaaatacaagttaaggtatctggtatctgcatgtaaaatcttcagctggtggatggtgacttttgaagaacaaaaggctttggcaacagaaaacaattgttctgggtgatttctagaatggtttttgttgagtctctgaacatcctaaatattggtttgttattcttttccagaaagaaaatgaatttgactggttcacctgtgtactgagtattgataaactttgaatttttttaattgccttcaattgggagagaaagctttatatttgtgtgaggacttctgcatcttacagtcagcacagaacacactgagacttgaatcaagtcagcaacagagcaaaataaaggttagataagtccttgtgtagcaaatttcgagcataagaaataaaatctaattaattcttagggtaaaaaaaaaaaaaaaaaaaaaaaaaaaaaaaaaaaaaaaaaaaaaaaaaaaaaaaaaaaaaaaaaaaaaaaaaaaaaaa

SEQ ID NO: 689 - DNA, 2279 bp, Homo sapiens
tgcctgctgagggtggagacccacgagccgaggcctcctgcagtgttctgcacagcaaaccgcacgctatggctgacagccgggatcccgccagcgaccagatgcagcactggaaggagcagcgggccgcgcagaaagctgatgtcctgaccactggagctggtaacccagtaggagacaaacttaatgttattacagtagggccccgtgggccccttcttgttcaggatgtggttttcactgatgaaatggctcattttgaccgagagagaattcctgagagagttgtgcatgctaaaggagcaggggcctttggctactttgaggtcacacatgacattaccaaatactccaaggcaaaggtatttgagcatattggaaagaagactcccatcgcagttcggttctccactgttgctggagaatcgggttcagctgacacagttcgggaccctcgtgggtttgcagtgaaattttacacagaagatggtaactgggatctcgttggaaataacacccccattttcttcatcagggatcccatattgtttccatcttttatccacagccaaaagagaaatcctcagacacatctgaaggatccggacatggtctgggacttctggagcctacgtcctgagtctctgcatcaggtttctttcttgttcagtgatcgggggattccagatggacatcgccacatgaatggatatggatcacatactttcaagctggttaatgcaaatggggaggcagtttattgcaaattccattataagactgaccagggcatcaaaaacctttctgttgaagatgcggcgagactttcccaggaagatcctgactatggcatccgggatctttttaacgccattgccacaggaaagtacccctcctggactttttacatccaggtcatgacatttaatcaggcagaaacttttccatttaatccattcgatctcaccaaggtttggcctcacaaggactaccctctcatcccagttggtaaactggtcttaaaccggaatccagttaattactttgctgaggttgaacagatagccttcgacccaagcaacatgccacctggcattgaggccagtcctgacaaaatgcttcagggccgcctttttgcctatcctgacactcaccgccatcgcctgggacccaattatcttcatatacctgtgaactgtccctaccgtgctcgagtggccaactaccagcgtgatggcccgatgtgcatgcaggacaatcagggtggtgctccaaattactaccccaacagctttggtgctccggaacaacagccttctgccctggagcacagcatccaatattctggagaagtgcggagattcaacactgccaatgatgataacgttactcaggtgcgggcattctatgtgaacgtgctgaatgaggaacagaggaaacgtctgtgtgagaacattgccggccacctgaaggatgcacaaattttcatccagaagaaagcggtcaagaacttcactgaggtccaccctgactacgggagccacatccaggctcttctggacaagtacaatgctgagaagcctaagaatgcgattcacacctttgtgcagtccggatctcacttggcggcaagggagaaggcaaatctgtgaggccggggccctgcacctgtgcagcgaagcttagcgttcatccgtgtaacccgctcatcactggatgaagattctcctgtgctagatgtgcaaatgcaagctagtggcttcaaaatagagaatcccactttctatagcagattgtgtaacaattttaatgctatttccccaggggaaaatgaaggttaggatttaacagtcatttaaaaaaaaaatttgttttgacggatgattggattattcatttaaaatgattagaaggcaagtttctagctagaaatatgattttatttgacaaaatttgttgaaattatgtatgtttacatatcacctcatggcctattatattaaaatatggctataaatatataaaaagaaaagataaagatgatctactcagaaatttttatttttctaaggttctcataggaaaagtacatttaatacagcagtgtcatcagaagataacttgagcaccgtcatggcttaatgtttattcctgataataattgatcaaattcatttttttcactggagttacattaatgttaattcagcactgatttcacaacagatcaatttgtaattgcttacatttttacaataaataatctgtacgtaagaaca

SEQ ID NO: 690 - DNA, 2704 bp, Homo sapiens
gggagaaacgttctcactcgctctctgctcgctgcgggcgctccccgccctctgctgccagaaccttggggatgtgcctagacccggcgcagcacacgtccgggccaaccgcgagcagaacaaacctttggcgggcggccaggaggctccctcccagccaccgcccccctccagcgcctttttttccccccatacaatacaagatcttccttcctcagttcccttaaagcacagcccagggaaacctcctcacagttttcatccagccacgggccagcatgtctgggggcaaatacgtagactcggagggacatctctacaccgttcccatccgggaacagggcaacatctacaagcccaacaacaaggccatggcagacgagctgagcgagaagcaagtgtacgacgcgcacaccaaggagatcgacctggtcaaccgcgaccctaaacacctcaacgatgacgtggtcaagattgactttgaagatgtgattgcagaaccagaagggacacacagttttgacggcatttggaaggccagcttcaccaccttcactgtgacgaaatactggttttaccgcttgctgtctgccctctttggcatcccgatggcactcatctggggcatttacttcgccattctctctttcctgcacatctgggcagttgtaccatgcattaagagcttcctgattgagattcagtgcatcagccgtgtctattccatctacgtccacaccgtctgtgacccactctttgaagctgttgggaaaatattcagcaatgtccgcatcaacttgcagaaagaaatataaatgacatttcaaggatagaagtatacctgattttttttccttttaattttcctggtgccaatttcaagttccaagttgctaatacagcaacaatttatgaattgaattatcttggttgaaaataaaaagatcactttctcagttttcataagtattatgtctcttctgagctatttcatctatttttggcagtctgaatttttaaaacccatttaaatttttttccttacctttttatttgcatgtggatcaaccatcgctttattggctgagatatgaacatattgttgaaaggtaatttgagagaaatatgaagaactgaggaggaaaaaaaaaaaaaagaaaagaaccaacaacctcaactgcctactccaaaatgttggtcattttatgttaagggaagaattccagggtatggccatggagtgtacaagtatgtgggcagattttcagcaaactcttttcccactgtttaaggagttagtggattactgccattcacttcataatccagtaggatccagtgatccttacaagttagaaaacataatcttctgccttctcatgatccaactaatgccttactcttcttgaaattttaacctatgatattttctgtgcctgaatatttgttatgtagataacaagacctcagtgccttcctgtttttcacattttccttttcaaatagggtctaactcagcaactcgctttaggtcagcagcctccctgaagaccaaaattagaatatccatgacctagttttccatgcgtgtttctgactctgagctacagagtctggtgaagctcacttctgggcttcatctggcaacatctttatccgtagtgggtatggttgacactagcccaatgaaatgaattaaagtggaccaatagggctgagctctctgtgggctggcagtcctggaagccagctttccctgcctctcatcaactgaatgaggtcagcatgtctattcagcttcgtttattttcaagaataatcacgctttcctgaatccaaactaatccatcaccggggtggtttagtggctcaacattgtgttcccatttcagctgatcagtgggcctccaaggaggggctgtaaaatggaggccattgtgtgagcctatcagagttgctgcaaacctgacccctgctcagtaaagcacttgcaaccgtctgttatgctgtgacacatggcccctccccctgccaggagctttggacctaatccaagcatccctttgcccagaaagaagatgggggaggaggcagtaataaaaagattgaagtattttgctggaataagttcaaattcttctgaactcaaactgaggaatttcacctgtaaacctgagtcgtacagaaagctgcctggtatatccaaaagctttttattcctcctgctcatattgtgattctgcctttggggacttttcttaaaccttcagttatgatttttttttcatacacttattggaactctgcttgatttttgcctcttccagtcttcctgacactttaattaccaacctgttacctactttgactttttgcatttaaaacagacactggcatggatatagttttacttttaaactgtgtacataactgaaaatgtgctatactgcatactttttaaatgtaaagatatttttatctttatatgaagaaaatcacttaggaaatggctttgtgattcaatctgtaaactgtgtattccaagacatgtctgttctacatagatgcttagtccctcatgcaaatcaattactggtccaaaagattgctgaaattttatatgcttactgatatattttacaattttttatcatgcatgtcctgtaaaggttacaagcctgcacaataaaaatgtttaacggtt

SEQ ID NO: 691 - DNA, 1476 bp, Homo sapiens
actgtacacatgctagggtccaggacagcaggaccaagccagcagaaacagcctcagcctaccgcagactggcctggctatactggacaatgccactcctcctgtacacctgtcttctctggctgcccaccagcggcctctggaccgtccaggccatggatcctaacgctgcttatgtgaacatgagtaaccatcaccggggcctggcttcagccaacgttgactttgccttcagcctgtataagcacctagtggccttgagtcccaaaaagaacattttcatctcccctgtgagcatctccatggccttagctatgctgtccctgggcacctgtggccacacacgggcccagcttctccagggcctgggtttcaacctcactgagaggtctgagactgagatccaccagggtttccagcacctgcaccaactctttgcaaagtcagacaccagcttagaaatgactatgggcaatgccttgtttcttgatggcagcctggagttgctggagtcattctcagcagacatcaagcactactatgagtcagaggtcttggctatgaatttccaggactgggcaacagccagcagacagatcaacagctatgtcaagaataagacacaggggaaaattgtcgacttgttttcagggctggatagcccagccatcctcgtcctggtcaactatatcttcttcaaaggcacatggacacagccctttgacctggcaagcaccagggaggagaacttctatgtggacgagacaactgtggtgaaggtgcccatgatgttgcagtcgagcaccatcagttaccttcatgactcagagctcccctgccagctggtgcagatgaactacgtgggcaatgggactgtcttcttcatccttccggacaaggggaagatgaacacagtcatcgctgcactgagccgggacacgattaacaggtggtccgcaggcctgaccagcagccaggtggacctgtacattccaaaggtcaccatctctggagtctatgaccttggagatgtgctggaggaaatgggcattgcagacttgttcaccaaccaggcaaatttctcacgcatcacccaggacgcccagctgaagtcatcaaaggtggtccataaagctgtgctgcaactcaatgaggagggtgtggacacagctggctccactggggtcaccctaaacctgacgtccaagcctatcatcttgcgtttcaaccagcccttcatcatcatgatcttcgaccacttcacctggagcagccttttcctggcgagggttatgaacccagtgtaagagaccacccacccagagcctcagcactgtctgactttgggaaccagggatcccacagaaatgttttggagagcgggaggtttcccccaatctcctccaagttcttctccctccaaccagagttgtgtctaactttaggcatcttttaataaatgtcattgcgactctg

SEQ ID NO: 692 - DNA, 2010 bp, Homo sapiens
cgagaagacccggatagttcctcccggccacgccgcgccggctctgggcactcagcatcgtttccttttcctccgctggagcagctatggcggcggtgaagaccctgaaccccaaggccgaggtggcccgagcgcaggcggcgctggcggtcaacatcagcgcagcgcggggtctgcaggacgtgctaaggaccaacctggggcccaagggcaccatgaagatgctcgtttctggcgctggagacatcaaacttactaaagacggcaatgtgctgcttcacgaaatgcaaattcaacacccaacagcttccttaatagcaaaggtagcaacagcccaggatgatataactggtgatggtacgacttctaatgtcctaatcattggagagctgctgaaacaggcggatctctacatttctgaaggccttcatcctagaataatcactgaaggatttgaagctgcaaaggaaaaggcccttcagtttttggaagaagtcaaagtaagcagagagatggacagggaaacacttatagatgtggccagaacatctcttcgtactaaagttcatgctgaacttgcagatgtcttaacagaggctgtagtggactccattttggccattaaaaagcaagatgaacctattgatctcttcatgattgagatcatggagatgaaacataaatctgaaactgatacaagcttaatcagagggcttgttttggaccacggagcacggcatcctgatatgaagaaaagggtggaggatgcatacatcctcacttgtaacgtgtcattagagtatgagaaaacagaagtgaattctggctttttttacaagagtgcagaagagagagaaaaactcgtgaaagctgaaagaaaattcattgaagatagggttaaaaaaataatagaactgaaaaggaaagtctgtggcgattcagataaaggatttgttgttattaatcaaaagggaattgaccccttttccttagatgctctttcaaaagaaggcatagtcgctctgcgcagagctaaaaggagaaatatggagaggctgactcttgcttgtggtggggtagccctgaattcttttgacgacctaagtcctgactgcttgggacatgcaggacttgtatatgagtatacattgggagaagagaagtttacctttattgagaaatgtaacaaccctcgttctgtcacattattgatcaaaggaccaaataagcacacactcactcagatcaaagatgcagtgagggacggcttgagggctgtcaaaaatgctattgatgatggctgtgtggttccaggtgctggtgccgtggaagtggcaatggcagaagccctgattaaacataagcccagtgtaaagggcagggcacagcttggagtccaagcatttgctgatgcattgctcattattcccaaggttcttgctcagaactctggttttgaccttcaggaaacattagttaaaattcaagcagaacattcagaatcaggtcagcttgtgggtgtggacctgaacacaggtgagccaatggtggcagcagaagtaggcgtatgggataactattgtgtaaagaaacagcttcttcactcctgcactgtgattgccaccaacattctcttggttgatgagatcatgcgagctggaatgtcttctctgaaaggttgaattgaagcttcctctgtatctgaatcttgaagactgcaaagtgatcctgaggattacagctgtggaatttttgtccaagcttcaaataattttgaaagaaattttcccatatgaaaaaaggagagaacactggcatctgttgaaatttggaagttctgaaattatagtatttttaaaaattgcactgaagtgtatacacataaagcaggtcttttatccagtgaacaggatgttttgctttagcagcagtgacataaaattccatgttagataagcatatgttacttaccttgttattaaatatttcttgaaaagcaggccacgaagg

SEQ ID NO: 693 - DNA, 1192 bp, Homo sapiens
cgcgccccccagtcccgcacccgttcggcccaggctaagttagccctcaccatgccggtcaaaggaggcaccaagtgcatcaaatacctgctgttcggatttaacttcatcttctggcttgccgggattgctgtccttgccattggactatggctccgattcgactctcagaccaagagcatcttcgagcaagaaactaataataataattccagcttctacacaggagtctatattctgatcggagccggcgccctcatgatgctggtgggcttcctgggctgctgcggggctgtgcaggagtcccagtgcatgctgggactgttcttcggcttcctcttggtgatattcgccattgaaatagctgcggccatctggggatattcccacaaggatgaggtgattaaggaagtccaggagttttacaaggacacctacaacaagctgaaaaccaaggatgagccccagcgggaaacgctgaaagccatccactatgcgttgaactgctgtggtttggctgggggcgtggaacagtttatctcagacatctgccccaagaaggacgtactcgaaaccttcaccgtgaagtcctgtcctgatgccatcaaagaggtcttcgacaataaattccacatcatcggcgcagtgggcatcggcattgccgtggtcatgatatttggcatgatcttcagtatgatcttgtgctgtgctatccgcaggaaccgcgagatggtctagagtcagcttacatccctgagcaggaaagtttacccatgaagattggtgggattttttgtttgtttgttttgttttgtttgttgtttgttgtttgtttttttgccactaattttagtattcattctgcattgctagataaaagctgaagttactttatgtttgtcttttaatgcttcattcaatattgacatttgtagttgagcggggggtttggtttgcttggtttatatttttcagttgtttgtttttgcttgttatattaagcagaaatcctgcaatgaaaggtactatatttgctagactctagacaagatattgtacataaaagaatttttttgtctttaaatagatacaaatgtctatcaactttaatcaagttgtaacttatattgaagacaatttgatacataataaaaaattatgacaatgaaaaaaaaaaaaaaaaaaaaaaagg

SEQ ID NO: 694 - DNA, 1040 bp, Homo sapiens
cgacgagccatggttgctgggagcgacgcggggcgggccctgggggtcctcagcgtggtctgcctgctgcactgctttggtttcatcagctgtttttcccaacaaatatatggtgttgtgtatgggaatgtaactttccatgtaccaagcaatgtgcctttaaaagaggtcctatggaaaaaacaaaaggataaagttgcagaactggaaaattctgaattcagagctttctcatcttttaaaaatagggtttatttagacactgtgtcaggtagcctcactatctacaacttaacatcatcagatgaagatgagtatgaaatggaatcgccaaatattactgataccatgaagttctttctttatgtgcttgagtctcttccatctcccacactaacttgtgcattgactaatggaagcattgaagtccaatgcatgataccagagcattacaacagccatcgaggacttataatgtactcatgggattgtcctatggagcaatgtaaacgtaactcaaccagtatatattttaagatggaaaatgatcttccacaaaaaatacagtgtactcttagcaatccattatttaatacaacatcatcaatcattttgacaacctgtatcccaagcagcggtcattcaagacacagatatgcacttatacccataccattagcagtaattacaacatgtattgtgctgtatatgaatggtattctgaaatgtgacagaaaaccagacagaaccaactccaattgattggtaacagaagatgaagacaacagcataactaaattattttaaaaactaaaaagccatctgatttctcatttgagtattacaatttttgaacaactgttggaaatgtaacttgaagcagctgctttaagaagaaatacccactaacaaagaacaagcattagttttggctgtcatcaacttattatatgactaggtgcttgctttttttgtcagtaaattgtttttactgatgatgtagatacttttgtaaataaatgtaaatatgtacacaagtg

SEQ ID NO: 695 - DNA, 873 bp, Homo sapiens
tagagagccccggagccgcggcgggagaggaacgcgcagccagccttgggaagcccaggcccggcagccatggcggtggaaggaggaatgaaatgtgtgaagttcttgctctacgtcctcctgctggccttttgcgcctgtgcagtgggactgattgccgtgggtgtcggggcacagcttgtcctgagtcagaccataatccagggggctacccctggctctctgttgccagtggtcatcatcgcagtgggtgtcttcctcttcctggtggcttttgtgggctgctgcggggcctgcaaggagaactattgtcttatgatcacgtttgccatctttctgtctcttatcatgttggtggaggtggccgcagccattgctggctatgtgtttagagataaggtgatgtcagagtttaataacaacttccggcagcagatggagaattacccgaaaaacaaccacactgcttcgatcctggacaggatgcaggcagattttaagtgctgtggggctgctaactacacagattgggagaaaatcccttccatgtcgaagaaccgagtccccgactcctgctgcattaatgttactgtgggctgtgggattaatttcaacgagaaggcgatccataaggagggctgtgtggagaagattgggggctggctgaggaaaaatgtgctggtggtagctgcagcagcccttggaattgcttttgtcgaggttttgggaattgtctttgcctgctgcctcgtgaagagtatcagaagtggctacgaggtgatgtaggggtctggtctcctcagcctcctcatctgggggagtggaatagtatcctccaggtttttcaattaaacggattattttttcagaccg

SEQ ID NO: 696 - DNA, 892 bp, Homo sapiens
gcgcgccagtttcaggatgcagggtctaggagaggagccgcaatcgtgtctggggccccagccaggctggccggagctcctgtttccgctgctctgctgcctgcccggggtaccaacatggcccagaagcgtcctgcctgcaccctgaagcctgagtgtgtccagcagctgctggtttgctcccaggaggccaagaagtcagcctactgcccctacagtcactttcctgtgggggctgccctgctcacccaggaggggagaatcttcaaagggtgcaacatagaaaatgcctgctacccgctgggcatctgtgctgaacggaccgctatccagaaggccgtctcagaagggtacaaggatttcagggcaattgctatcgccagtgacatgcaagatgattttatctctccatgtggggcctgcaggcaagtcatgagagagtttggcaccaactggcccgtgtacatgaccaagccggatggtacgtatattgtcatgacggtccaggagctgctgccctcctcctttgggcctgaggacctgcagaagactcagtgacagccagagaatgcccactgcctgtaacagccacctggagaacttcataaagatgtctcacagccctggggacacctgcccagtggccccagcctacagggactgggcaaagatgatgtttccagattacactccagcctgagtcagcacccctcctagcaacctgccttgggacttagaacaccgccgcccccctgccccacctttcctttccttcctgtgggccctctttcaaagtccagcctagtctggactgcttccccatcagccttcccaaggttctatcctgttccgagcaacttttctaattataaacatcacagaacatcctgga

SEQ ID NO: 697 - DNA, 2319 bp, Homo sapiens
agtgcgagatccgctgctgctgaggagaggagcgtcaacagcagcaccatggtagctcaacagaagaaccttgaaggctatgtgggatttgccaatctcccaaatcaagtatacagaaaatcggtgaagagaggttttgaattcacgcttatggtagtgggtgaatctggattgggaaagtcgacattaatcaactcattattcctcacagatttgtattctccagagtatccaggtccttctcatagaattaaaaagactgtacaggtggaacaatccaaagttttaatcaaagaaggtggtgttcagttgctgctcacaatagttgataccccaggatttggagatgcagtggataatagtaattgctggcagcctgttatcgactacattgatagtaaatttgaggactacctaaatgcagaatcacgagtgaacagacgtcagatgcctgataacagggtgcagtgttgtttatacttcattgctccttcaggacatggacttaaaccattggatattgagtttatgaagcgtttgcatgaaaaagtgaatatcatcccacttattgccaaagcagacacactcacaccagaggaatgccaacagtttaaaaaacagataatgaaagaaatccaagaacataaaattaaaatatacgaatttccagaaacagatgatgaagaagaaaataaacttgttaaaaagataaaggaccgtttacctcttgctgtggtaggtagtaatactatcattgaagttaatggcaaaagggtcagaggaaggcagtatccttggggtattgctgaagttgaaaatggtgaacattgtgattttacaatcctaagaaatatgaagataagaacacacatgcaggacttgaaagatgttactaataatgtccactatgagaactacagaagcagaaaacttgcagctgtgacttataatggagttgataacaacaagaataaagggcagctgactaagagccctctggcacaaatggaagaagaaagaagggagcatgtagctaaaatgaagaagatggagatggagatggagcaggtgtttgagatgaaggtcaaagaaaaagttcaaaaactgaaggactctgaagctgagctccagcggcgccatgagcaaatgaaaaagaatttggaagcacagcacaaagaattggaggaaaaacgtcgtcagttcgaggatgagaaagcaaactgggaagctcaacaacgtattttagaacaacagaactcttcaagaaccttggaaaagaacaagaagaaagggaagatcttttaaactctctattgaccaccagttaacgtattagttgccaatatgccagcttggacatcagtgtttgttggatccgtttgaccaatttgcaccagttttatccataatgatggatttaacagcatgacaaaaattatttttttttttgttcttgatggagattaagatgccttgaattgtctagggtgttctgtacttagaaagtaagagctctaagtacctttcctacattttctttttttattaaacagatatcttcagtttaatgcaagagaacattttactgttgtacaatcatgttctggtggtttgattgtttacaggatattccaaaataaaaggactctggaagattttcattgaggataaattgccataatatgatgcaaactgtgcttctctatgataattacaatacaaaggttccattcagtgcagcatatacaataatgtaatttagtctaacacagttgaccctattttttgacacttccattgtttaaaaatacacatggaaaaaaaaaaaccctatatgcttactgtgcacctagagcttttttataacaacgtctttttgtttgtttgttttggattctttaaatatatattattctcatttagtgccctctttagccagaatctcattactgcttcatttttgtaataacatttaatttagatattttccatcatattggcactgctaaaatagaatatagcatctttcatatggtaggaaccaacaaggaaactttcctttaactccctttttacactttatggtaagtagcagggggggaaatgcatttatagatcatttctaggcaaaattgtgaagctaatgaccaacctgtttctacctatatgcagtctctttattttactagaaatgggaatcatggcctcttgaagagaaaaaagtcaccattctgcatttagctgtattcatatattgctatttctgtattttttgtttgtattgtaaaaaattcacataataaacgatggttgtgatgt

SEQ ID NO: 698 - DNA, 3654 bp, Homo sapiens
agatgccgcgggggccgctcgcagccgccgctgacttgtgaatgggaccgggactggggccgggactgacaccgcagcgcttgccctgcgccagggactggcggctcggaggttgcgtccaccctcaagggccccagaaatcactgtgttttcagctcagcggccctgtgacattccttcgtgttgtcatttgttgagtgaccaatcagatgggtggagtgtgttacagaaattggcagcaagtatccaatgggtgaagaagaagctaactggggacgtgggcagccctgacgtgatgagctcaaccagcagagacattccatcccaagagaggtctgcgtgacgcgtccgggaggccaccctcagcaagaccaccgtacagttggtggaaggggtgacagctgcattctcctgtgcctaccacgtaaccaaaaatgaaggagaactactgtttacaagccgccctggtgtgcctgggcatgctgtgccacagccatgcctttgccccagagcggcgggggcacctgcggccctccttccatgggcaccatgagaagggcaaggaggggcaggtgctacagcgctccaagcgtggctgggtctggaaccagttcttcgtgatagaggagtacaccgggcctgaccccgtgcttgtgggcaggcttcattcagatattgactctggtgatgggaacattaaatacattctctcaggggaaggagctggaaccatttttgtgattgatgacaaatcagggaacattcatgccaccaagacgttggatcgagaagagagagcccagtacacgttgatggctcaggcggtggacagggacaccaatcggccactggagccaccgtcggaattcattgtcaaggtccaggacattaatgacaaccctccggagttcctgcacgagacctatcatgccaacgtgcctgagaggtccaatgtgggaacgtcagtaatccaggtgacagcttcagatgcagatgaccccacttatggaaatagcgccaagttagtgtacagtatcctcgaaggacaaccctatttttcggtggaagcacagacaggtatcatcagaacagccctacccaacatggacagggaggccaaggaggagtaccacgtggtgatccaggccaaggacatgggtggacatatgggcggactctcagggacaaccaaagtgacgatcacactgaccgatgtcaatgacaacccaccaaagtttccgcagagcgtataccagatgtctgtgtcagaagcagccgtccctggggaggaagtaggaagagtgaaagctaaagatccagacattggagaaaatggcttagtcacatacaatattgttgatggagatggtatggaatcgtttgaaatcacaacggactatgaaacacaggagggggtgataaagctgaaaaagcctgtagattttgaaaccaaaagagcctatagcttgaaggtagaggcagccaacgtgcacatcgacccgaagtttatcagcaatggccctttcaaggacactgtgaccgtcaagatctcagtagaagatgctgatgagccccctatgttcttggccccaagttacatccacgaagtccaagaaaatgcagctgctggcaccgtggttgggagagtgcatgccaaagaccctgatgctgccaacagcccgataaggtattccatcgatcgtcacactgacctcgacagatttttcactattaatccagaggatggttttattaaaactacaaaacctctggatagagaggaaacagcctggctcaacatcactgtctttgcagcagaaatccacaatcggcatcaggaagccaaagtcccagtggccattagggtccttgatgtcaacgataatgctcccaagtttgctgccccttatgaaggtttcatctgtgagagtgatcagaccaagccactttccaaccagccaattgttacaattagtgcagatgacaaggatgacacggccaatggaccaagatttatcttcagcctaccccctgaaatcattcacaatccaaatttcacagtcagagacaaccgagataacacagcaggcgtgtacgcccggcgtggagggttcagtcggcagaagcaggacttgtaccttctgcccatagtgatcagcgatggcggcatcccgcccatgagtagcaccaacaccctcaccatcaaagtctgcgggtgcgacgtgaacggggcactgctctcctgcaacgcagaggcctacattctgaacgccggcctgagcacaggcgccctgatcgccatcctcgcctgcatcgtcattctcctggtcattgtagtattgtttgtgaccctgagaaggcaaaagaaagaaccactcattgtctttgaggaagaagatgtccgtgagaacatcattacttatgatgatgaagggggtggggaagaagacacagaagcctttgatattgccaccctccagaatcctgatggtatcaatggatttatcccccgcaaagacatcaaacctgagtatcagtacatgcctagacctgggctccggccagcgcccaacagcgtggatgtcgatgacttcatcaacacgagaatacaggaggcagacaatgaccccacggctcctccttatgactccattcaaatctacggttatgaaggcaggggctcagtggccgggtccctgagctccctagagtcggccaccacagattcagacttggactatgattatctacagaactggggacctcgttttaagaaactagcagatttgtatggttccaaagacacttttgatgacgattcttaacaataacgatacaaatttggccttaagaactgtgtctggcgttctcaagaatctagaagatgtgtaaacaggtatttttttaaatcaaggaaaggctcatttaaaacaggcaaagttttacagagaggatacatttaataaaactgcgaggacatcaaagtggtaaatactgtgaaataccttttctcacaaaaaggcaaatattgaagttgtttatcaacttcgctagaaaaaaaaaacacttggcatacaaaatatttaagtgaaggagaagtctaacgctgaactgacaatgaagggaaattgtttatgtgttatgaacatccaagtctttcttcttttttaagttgtcaaagaagcttccacaaaattagaaaggacaacagttctgagctgtaatttcgccttaaactctggacactctatatgtagtgcatttttaaacttgaaatatataatattcagccagcttaaacccatacaatgtatgtacaatacaatgtacaattatgtctcttgagcatcaatcttgttactgctgattcttgtaaatctttttgcttctactttcatcttaaactaatacgtgccagatataactgtcttgtttcagtgagagacgccctatttctatgtcatttttaatgtatctatttgtacaattttaaagttcttattttagtatacgtataaatatcagtattctgacatgtaagaaaatgttacggcatcacacttatattttatgaacattgtactgttgctttaatatgagcttcaatataagaagcaatctttgaaataaaaaaagatttttttttaaaaaaaa

SEQ ID NO: 699 - DNA, 1556 bp, Homo sapiens
cggtcagatttgtgtgtgcaccgcgtctccagcgatcccggatccactgcgctgccaggggcctgggggtgggtctcttgctgtctctgcgacgacatccttacgtttcggcactctaatgctgggtttgtgcgtgtgtgtctgcttagcggtctagcgggctgttaggctccctcgcccccagctccttggctcgctcagctcctccaccgcagcccagcagtgagacgcgcgcgcagccagctccccacgagatggaacagaccgaagtgctgaagccacggaccctggctgatctgatccgcatcctgcaccagctctttgccggcgatgaggtcaatgtagaggaggtgcaggccatcatggaagcctacgagagcgaccccatcgagtgggcaatgtacgccaagttcgaccagtacaggtatacccgaaatcttgtggatcaaggaaatggaaaatttaatctgatgattctctgttggggtgaaggacatggcagcagtattcatgatcataccaactcccactgctttctgaagatgctacagggaaatctaaaggagacattatttgcctggcctgacaaaaaatccaatgagatggtcaagaagtctgaaagagtcttgagggaaaaccagtgtgcctacatcaatgattccattggcttacatcgagtagagaacatcagccatacggaacctgctgtgagccttcacttgtacagtccaccttttgatacatgccatgcctttgatcaaagaacaggacataaaaacaaagtcacaatgacattccatagtaaatttggaatcagaactccaaatgcaacttcgggctcgctggagaacaactaaggggcaccaaaccctctgaggttttactttaaggttcgctgtatgtttgccttggacaaaaaggctacctaccacgtgctatccagtaatatacttaaataagccaatacttagatctactgtaaggcagatgctaattataaggcattaagtaagcaaatagtgccctcagctactgcagaagaaaagtcccactgaggaaaagaaagtcttgtgatttttaaaggcaagttttcaagtgctctcatagttctatcctctaattccattaaatccatactaggagcgtcagtgagggttttcatagcttttggaaatactttggtctctgaactgtaattagcaagaagtaaaaacagaaacgtcaaacgtcaaatgtttgctttgttacctggaggactaaatgtagatgtctttagtatactttgtatgttcttaaatattggaagataattttgtgaatctgtagattttattttttcagtcttaccttacaaatttcttttctatgaataatagaggaactcacggcactctgccacttgttaatgaaaggaagtgcagaggatttagaaaagtacatgatccccagaccacaacaaaccaaaacataaactcatgtctgtgtcccatggtcatagtcaaagattttgtactgctaaaattaccaaataatttaaataaagtggatttgaacac

SEQ ID NO: 700 - DNA, 1838 bp, Homo sapiens
aattcttcacctcttttctcagctccctgcagcatgggtgctgggccctccttgctgctcgccgccctcctgctgcttctctccggcgacggcgccgtgcgctgcgacacacctgccaactgcacctatcttgacctgctgggcacctgggtcttccaggtgggctccagcggttcccagcgcgatgtcaactgctcggttatgggaccacaagaaaaaaaagtagtggtgtaccttcagaagctggatacagcatatgatgaccttggcaattctggccatttcaccatcatttacaaccaaggctttgagattgtgttgaatgactacaagtggtttgccttttttaagtataaagaagagggcagcaaggtgaccacttactgcaacgagacaatgactgggtgggtgcatgatgtgttgggccggaactgggcttgtttcaccggaaagaaggtgggaactgcctctgagaatgtgtatgtcaacacagcacaccttaagaattctcaggaaaagtattctaataggctctacaagtatgatcacaactttgtgaaagctatcaatgccattcagaagtcttggactgcaactacatacatggaatatgagactcttaccctgggagatatgattaggagaagtggtggccacagtcgaaaaatcccaaggcccaaacctgcaccactgactgctgaaatacagcaaaagattttgcatttgccaacatcttgggactggagaaatgttcatggtatcaattttgtcagtcctgttcgaaaccaagcatcctgtggcagctgctactcatttgcttctatgggtatgctagaagcgagaatccgtatactaaccaacaattctcagaccccaatcctaagccctcaggaggttgtgtcttgtagccagtatgctcaaggctgtgaaggcggcttcccataccttattgcaggaaagtacgcccaagattttgggctggtggaagaagcttgcttcccctacacaggcactgattctccatgcaaaatgaaggaagactgctttcgttattactcctctgagtaccactatgtaggaggtttctatggaggctgcaatgaagccctgatgaagcttgagttggtccatcatgggcccatggcagttgcttttgaagtatatgatgacttcctccactacaaaaaggggatctaccaccacactggtctaagagaccctttcaacccctttgagctgactaatcatgctgttctgcttgtgggctatggcactgactcagcctctgggatggattactggattgttaaaaacagctggggcaccggctggggtgagaatggctacttccggatccgcagaggaactgatgagtgtgcaattgagagcatagcagtggcagccacaccaattcctaaattgtagggtatgccttccagtatttcataatgatctgcatcagttgtaaaggggaattggtatattcacagactgtagactttcagcagcaatctcagaagcttacaaatagatttccatgaagatatttgtcttcagaattaaaactgcccttaattttaatatacctttcaatcggccactggccatttttttctaagtattcaattaagtgggaattttctggaagatggtcagctatgaagtaatagagtttgcttaatcatttgtaattcaaacatgctatattttttaaaatcaatgtgaaaacatagacttatttttaaattgtaccaatcacaagaaaataatggcaataattatcaaaacttttaaaatagatgctcatatttttaaaataaagttttaaaaataactgc

SEQ ID NO: 701 - DNA, 1676 bp, Homo sapiens
gaattccgccgctgaccgaggcgtgcaaagactccagaattggaggcatgatgaagactctgctgctgtttgtggggctgctgctgacctgggagagtgggcaggtcctgggggaccagacggtctcagacaatgagctccaggaaatgtccaatcagggaagtaagtacgtcaataaggaaattcaaaatgctgtcaacggggtgaaacagataaagactctcatagaaaaaacaaacgaagagcgcaagacactgctcagcaacctagaagaagccaagaagaagaaagaggatgccctaaatgagaccagggaatcagagacaaagctgaaggagctcccaggagtgtgcaatgagaccatgatggccctctgggaagagtgtaagccctgcctgaaacagacctgcatgaagttctacgcacgcgtctgcagaagtggctcaggcctggttggccgccagcttgaggagttcctgaaccagagctcgcccttctacttctggatgaatggtgaccgcatcgactccctgctggagaacgaccggcagcagacgcacatgctggatgtcatgcaggaccacttcagccgcgcgtccagcatcatagacgagctcttccaggacaggttcttcacccgggagccccaggatacctaccactacctgcccttcagcctgccccaccggaggcctcacttcttctttcccaagtcccgcatcgtccgcagcttgatgcccttctctccgtacgagcccctgaacttccacgccatgttccagcccttccttgagatgatacacgaggctcagcaggccatggacatccacttccacagcccggccttccagcacccgccaacagaattcatacgagaaggcgacgatgaccggactgtgtgccgggagatccgccacaactccacgggctgcctgcggatgaaggaccagtgtgacaagtgccgggagatcttgtctgtggactgttccaccaacaacccctcccaggctaagctgcggcgggagctcgacgaatccctccaggtcgctgagaggttgaccaggaaatacaacgagctgctaaagtcctaccagtggaagatgctcaacacctcctccttgctggagcagctgaacgagcagtttaactgggtgtcccggctggcaaacctcacgcaaggcgaagaccagtactatctgcgggtcaccacggtggcttcccacacttctgactcggacgttccttccggtgtcactgaggtggtcgtgaagctctttgactctgatcccatcactgtgacggtccctgtagaagtctccaggaagaaccctaaatttatggagaccgtggcggagaaagcgctgcaggaataccgcaaaaagcaccgggaggagtgagatgtggatgttgcttttgcaccttacgggggcatcttgagtccagctccccccaagatgagctgcagccccccagagagagctctgcacgtcaccaagtaaccaggccccagcctccaggcccccaactccgcccagcctctccccgctctggatcctgcactctaacactcgactctgctgctcatgggaagaacagaattgctcctgcatgcaactaattcaataaaactgtcttgtgagctgaaaaaaaaaaaaaaaaaaaaaaaaaaggaattc

SEQ ID NO: 702 - DNA, 744 bp, Homo sapiens
atgctgcttcttcctctccccctgctgctctttctcttgtgctccagagctgaagctggggagatcatcgggggcacagaatgcaagccacattcccgcccctacatggcctacctggaaattgtaacttccaacggtccctcaaaattttgtggtggtttccttataagacggaactttgtgctgacggctgctcattgtgcaggaaggtctataacagtcacccttggagcccataacataacagaggaagaagacacatggcagaagcttgaggttataaagcaattccgtcatccaaaatataacacttctactcttcaccacgatatcatgttactaaagttgaaggagaaagccagcctgaccctggctgtggggacactccccttcccatcacaattcaactttgtcccacctgggagaatgtgccgggtggctggctggggaagaacaggtgtgttgaagccgggctcagacactctgcaagaggtgaagctgagactcatggatccccaggcctgcagccacttcagagactttgaccacaatcttcagctgtgtgtgggcaatcccaggaagacaaaatctgcatttaagggagactctgggggccctcttctgtgtgctggggtggcccagggcatcgtatcctatggacggtcggatgcaaagccccctgctgtcttcacccgaatctcccattaccggccctggatcaaccagatcctgcaggcaaattaa

SEQ ID NO: 703 - DNA, 5060 bp, Homo sapiens
acgcagagcgctgctgggctgccgggtctcccgcttcctcctcctgctccaagggcctcctgcatgagggcgcggtagagacccggacccgcgccgtgctcctgccgtttcgctgcgctccgcccgggcccggctcagccaggccccgcggtgagccatgattcgcctcggggctccccagtcgctggtgctgctgacgctgctcgtcgccgctgtccttcggtgtcagggccaggatgtccaggaggctggcagctgtgtgcaggatgggcagaggtataatgataaggatgtgtggaagccggagccctgccggatctgtgtctgtgacactgggactgtcctctgcgacgacataatctgtgaagacgtgaaagactgcctcagccctgagatccccttcggagagtgctgccccatctgcccaactgacctcgccactgccagtgggcaaccaggaccaaagggacagaaaggagaacctggagacatcaaggatattgtaggacccaaaggacctcctgggcctcagggacctgcaggggaacaaggacccagaggggatcgtggtgacaaaggtgaaaaaggtgcccctggacctcgtggcagagatggagaacctgggacccctggaaatcctggcccccctggtcctcccggcccccctggtccccctggtcttggtggaaactttgctgcccagatggctggaggatttgatgaaaaggctggtggcgcccagttgggagtaatgcaaggaccaatgggccccatgggacctcgaggacctccaggccctgcaggtgctcctgggcctcaaggatttcaaggcaatcctggtgaacctggtgaacctggtgtctctggtcccatgggtccccgtggtcctcctggtccccctggaaagcctggtgatgatggtgaagctggaaaacctggaaaagctggtgaaaggggtccgcctggtcctcagggtgctcgtggtttcccaggaaccccaggccttcctggtgtcaaaggtcacagaggttatccaggcctggacggtgctaagggagaggcgggtgctcctggtgtgaagggtgagagtggttccccgggtgagaacggatctccgggcccaatgggtcctcgtggcctgcctggtgaaagaggacggactggccctgctggcgctgcgggtgcccgaggcaacgatggtcagccaggccccgcaggtcctccgggtcctgtcggtcctgctggtggtcctggcttccctggtgctcctggagccaagggtgaagccggccccactggtgcccgtggtcctgaaggtgctcaaggtcctcgcggtgaacctggtactcctgggtcccctgggcctgctggtgcctccggtaaccctggaacagatggaattcctggagccaaaggatctgctggtgctcctggcattgctggtgctcctggcttccctgggccacggggtcctcctggccctcaaggtgcaactggtcctctgggcccgaaaggtcagacgggtgaacctggtattgctggcttcaaaggtgaacaaggccccaagggagaacctggccctgctggcccccagggagcccctggacccgctggtgaagaaggcaagagaggtgcccgtggagagcctggtggcgttgggcccatcggtccccctggagaaagaggtgctcccggaaaccgcggtttcccaggtcaagatggtctggcaggtcccaagggagcccctggagagcgagggcccagtggtcttgctggccccaagggagccaacggtgaccctggccgtcctggagaacctggccttcctggagcccggggtctcactggccgccctggtgatgctggtcctcaaggcaaagttggcccttctggagcccctggtgaagatggtcgtcctggacctccaggtcctcagggggctcgtgggcagcctggtgtcatgggtttccctggccccaaaggtgccaacggtgagcctggcaaagctggtgagaagggactgcctggtgctcctggtctgaggggtcttcctggcaaagatggtgagacaggtgctgcaggaccccctggccctgctggacctgctggtgaacgaggcgagcagggtgctcctgggccatctgggttccagggacttcctggccctcctggtcccccaggtgaaggtggaaaaccaggtgaccagggtgttcccggtgaagctggagcccctggcctcgtgggtcccaggggtgaacgaggtttcccaggtgaacgtggctctcccggtgcccagggcctccagggtccccgtggcctccccggcactcctggcactgatggtcccaaaggtgcatctggcccagcaggcccccctggcgcacagggccctccaggtcttcagggaatgcctggcgagaggggagcagctggtatcgctgggcccaaaggcgacaggggtgacgttggtgagaaaggccctgagggagcccctggaaaggatggtggacgaggcctgacaggtcccattggcccccctggcccagctggtgctaacggcgagaagggagaagttggacctcctggtcctgcaggaagtgctggtgctcgtggcgctccgggtgaacgtggagagactggcccccccggaccagcgggatttgctgggcctcctggtgctgatggccagcctggggccaagggtgagcaaggagaggccggccagaaaggcgatgctggtgcccctggtcctcagggcccctctggagcacctgggcctcagggtcctactggagtgactggtcctaaaggagcccgaggtgcccaaggccccccgggagccactggattccctggagctgctggccgcgttggacccccaggctccaatggcaaccctggaccccctggtccccctggtccttctggaaaagatggtcccaaaggtgctcgaggagacagcggcccccctggccgagctggtgaacccggcctccaaggtcctgctggaccccctggcgagaagggagagcctggagatgacggtccctctggtgccgaaggtccaccaggtccccagggtctggctggtcagagaggcatcgtcggtctgcctgggcaacgtggtgagagaggattccctggcttgcctggcccatcgggtgagcccggcaagcagggtgctcctggagcatctggagacagaggtcctcctggccccgtgggtcctcctggcctgacgggtcctgcaggtgaacccggacgagagggaagccccggtgctgatggcccccctggcagagatggcgctgctggagtcaagggtgatcgtggtgagactggtgctgtgggagctcctggagcccctgggccccctggctcccctggccccgctggtccaactggcaagcaaggagacagaggagaagctggtgcacaaggccccatgggaccctcaggaccagctggagcccggggaatccagggtcctcaaggccccagaggtgacaaaggagaggctggagagcctggcgagagaggcctgaagggacaccgtggcttcactggtctgcagggtctgcccggccctcctggtccttctggagaccaaggtgcttctggtcctgctggtccttctggccctagaggtcctcctggccccgtcggtccctctggcaaagatggtgctaatggaatccctggccccattgggcctcctggtccccgtggacgatcaggcgaaaccggtcctgctggtcctcctggaaatcctgggccccctggtcctccaggtccccctggccctggcatcgacatgtccgcctttgctggcttaggcccgagagagaagggccccgaccccctgcagtacatgcgggccgaccaggcagccggtggcctgagacagcatgacgccgaggtggatgccacactcaagtccctcaacaaccagattgagagcatccgcagccccgagggctcccgcaagaaccctgctcgcacctgcagagacctgaaactctgccaccctgagtggaagagtggagactactggattgaccccaaccaaggctgcaccttggacgccatgaaggttttctgcaacatggagactggcgagacttgcgtctaccccaatccagcaaacgttcccaagaagaactggtggagcagcaagagcaaggagaagaaacacatctggtttggagaaaccatcaatggtggcttccatttcagctatggagatgacaatctggctcccaacactgccaacgtccagatgaccttcctacgcctgctgtccacggaaggctcccagaacatcacctaccactgcaagaacagcattgcctatctggacgaagcagctggcaacctcaagaaggccctgctcatccagggctccaatgacgtggagatccgggcagagggcaatagcaggttcacgtacactgccctgaaggatggctgcacgaaacataccggtaagtggggcaagactgttatcgagtaccggtcacagaagacctcacgcctccccatcattgacattgcacccatggacataggagggcccgagcaggaattcggtgtggacatagggccggtctgcttcttgtaaaaacctgaacccagaaacaacacaatccgttgcaaacccaaaggacccaagtactttccaatctcagtcactctaggactctgcactgaatggctgacctgacctgatgtccattcatcccaccctctcacagttcggacttttctcccctctctttctaagagacctgaactgggcagactgcaaaataaaatctcggtgttctatttatttattgtcttcctgtaagaccttcgggtcaaggcagaggcaggaaactaactggtgtgagtcaaatgccccctgagtgactgcccccagcccaggccagaagacctcccttcaggtgccgggcgcaggaactgtgtgtgtcctacacaatggtgctattctgtgtcaaacacctctgtattttttaaaacatcaattgatattaaaaatgaaaagattattggaaagt

SEQ ID NO: 704 - DNA, 4164 bp, Homo sapiens
cactctggctgggagcagaaggcagcctcggtctctgggcggcggcggcggccctctctgccctggccgcgctgtgtggtgaccgcaggcccgagacatgagggcggcccgtgctctgctgcccctgctgctgcaggcctgctggacagccgcgcaggatgagccggagaccccgagggccgtggccttccaggactgccccgtggacctgttctttgtgctggacacctctgagagcgtggccctgaggctgaagccctacggggccctcgtggacaaagtcaagtccttcaccaagcgcttcatcgacaacctgagggacaggtactaccgctgtgaccgaaacctggtgtggaacgcaggcgcgctgcactacagtgacgaggtggagatcatccaaggcctcacgcgcatgcctggcggccgcgacgcactcaaaagcagcgtggacgcggtcaagtactttgggaagggcacctacaccgactgcgctatcaagaaggggctggagcagctcctcgtggggggctcccacctgaaggagaataagtacctgattgtggtgaccgacgggcaccccctggagggctacaaggaaccctgtggggggctggaggatgctgtgaacgaggccaagcacctgggcgtcaaagtcttctcggtggccatcacacccgaccacctggagccgcgtctgagcatcatcgccacggaccacacgtaccggcgcaacttcacggcggctgactggggccagagccgcgacgcagaggaggccatcagccagaccatcgacaccatcgtggacatgatcaaaaataacgttgagcaagtgtgctgctccttcgaatgccagcctgcaagaggacctccgggcctccggggcgaccccggctttgagggagaacgaggcaagccggggctcccaggagagaagggagaagccggagatcctggaagacccggggacctcggacctgttgggtaccagggaatgaagggagaaaaagggagccgtggggagaagggctccaggggaccaaagggctacaagggagagaagggcaagcgtggcatcgacggggtggacggcgtgaagggggagatggggtacccaggcctgccaggctgcaagggctcgccgggttttgacggcattcaaggaccccctggccccaagggagaccccggcgcctttggactgaaaggagaaaagggcgagcctggagctgacggggaggccgggagaccaggagctcggggaccatctggagacgaggggccagccggagagcctgggccccccggagagaaaggagaggcgggcgacgaggggaacccaggacctgacggtgcccccggggagcggggtggccctggagagagaggaccacgggggaccccaggcccgcggggaccaagaggagaccctggtgaagctggcccgcagggtgatcagggaagagaagggcccgttggtgtccctggagacccgggcgaggctggccctatcggacctaaaggctaccgaggcgatgagggtcccccagggtccgagggtgccagaggagccccaggacctgccggaccccctggagacccggggctgatgggagaaaggggagaagacggccccgctggaaatggcaccgagggcttccccggcttccccgggtatcccgggaacaggggcgctcccgggataaacggcacgaagggctaccccggcctcaagggggacgagggagaagccggggaccccggagacgataacaacgacattgcaccccgaggagtcaaaggagcaaaggggtaccggggtcccgagggcccccagggacccccaggacaccaaggaccgcctgggccggacgaatgcgagattttggacatcatcatgaaaatgtgctcttgctgtgaatgcaagtgcggccccatcgacctcctgttcgtgctggacagctcagagagcattggcctgcagaacttcgagattgccaaggacttcgtcgtcaaggtcatcgaccggctgagccgggacgagctggtcaagttcgagccagggcagtcgtacgcgggtgtggtgcagtacagccacagccagatgcaggagcacgtgagcctgcgcagccccagcatccggaacgtgcaggagctcaaggaagccatcaagagcctgcagtggatggcgggcggcaccttcacgggggaggccctgcagtacacgcgggaccagctgctgccgcccagcccgaacaaccgcatcgccctggtcatcactgacgggcgctcagacactcagagggacaccacaccgctcaacgtgctctgcagccccggcatccaggtggtctccgtgggcatcaaagacgtgtttgacttcatcccaggctcagaccagctcaatgtcatttcttgccaaggcctggcaccatcccagggccggcccggcctctcgctggtcaaggagaactatgcagagctgctggaggatgccttcctgaagaatgtcaccgcccagatctgcatagacaagaagtgtccagattacacctgccccatcacgttctcctccccggctgacatcaccatcctgctggacggctccgccagcgtgggcagccacaactttgacaccaccaagcgcttcgccaagcgcctggccgagcgcttcctcacagcgggcaggacggaccccgcccacgacgtgcgggtggcggtggtgcagtacagcggcacgggccagcagcgcccagagcgggcgtcgctgcagttcctgcagaactacacggccctggccagtgccgtcgatgccatggactttatcaacgacgccaccgacgtcaacgatgccctgggctatgtgacccgcttctaccgcgaggcctcgtccggcgctgccaagaagaggctgctgctcttctcagatggcaactcgcagggcgccacgcccgctgccatcgagaaggccgtgcaggaagcccagcgggcaggcatcgagatcttcgtggtggtcgtgggccgccaggtgaatgagccccacatccgcgtcctggtcaccggcaagacggccgagtacgacgtggcctacggcgagagccacctgttccgtgtccccagctaccaggccctgctccgcggtgtcttccaccagacagtctccaggaaggtggcgctgggctagcccaccctgcacgccggcaccaaaccctgtcctcccacccctccccactcatcactaaacagagcccaagcttggaaagccaggacacaacgctgctgcctgctttgtgcagggtcctccggggctcagccctgagttggcatcacctgcgcagggccctctggggctcagctctgagctagtgtcacctgcacagggccctctgaggctcagccctgagctggcgtcacctgtgcagggccctctggggctcagccctgagctggcctcacctgggttccccaccccgggctctcctgccctgccctcctgcccgccctccctcctgcctgcgcagctccttccctaggcacctctgtgctgcatcccaccagcctgagcaagacgcctctcggggcctgtgccgcactagcctccctctcctctgtccccatagctggtttttcccaccaatcctcacctaacagttactttacaattaaactcaaagcaagctcttctcctcagcttggggcagccattggcctctgtctcgttttgggaaaccaaggtcaggaggccgttgcagacataaatctcggcgactcggccccgtctcctgagggtcctgctggtgaccggcctggaccttggccctacagccctggaggccgctgctgaccagcactgaccccgacctcagagagtactcgcaggggcgctggctgcactcaagaccctcgagattaacggtgctaaccccgtctgctcctccctcccgcagagactggggcctggactggacatgagagccccttggtgccacagagggctgtgtcttactagaaacaacgcaaacctctccttcctcagaatagtgatgtgttcgacgttttatcaaaggccccctttctatgttcatgttagttttgctccttctgtgtttttttctgaaccatatccatgttgctgacttttccaaataaaggttttcactcctc

SEQ ID NO: 705 - DNA, 3439 bp, Homo sapiens
gcgcccgcgcctcgggccgtcgggagcggagcctcctcgggaccaggacttcagggccacaggtgctgccaagatgctccagggcacctgctccgtgctcctgctctggggaatcctgggggccatccaggcccagcagcaggaggtcatctcgccggacactaccgagagaaacaacaactgcccagagaagaccgactgccccatccacgtgtacttcgtgctggacacctcggagagcgtcaccatgcagtcccccacggacatcctgctcttccacatgaagcagttcgtgccgcagttcatcagccagctgcagaacgagttctacctggaccaggtggcgctgagctggcgctacggcggcctgcacttctctgaccaggtggaggtgttcagcccaccgggcagcgaccgggcctccttcatcaagaacctgcagggcatcagctccttccgccgcggcaccttcaccgactgcgcgctggccaacatgacggagcagatccggcaggaccgcagcaagggcaccgtccacttcgccgtggtcatcaccgacggccacgtcaccggcagcccctgcgggggcatcaagctgcaggccgagcgggcccgcgaggagggcatccggctcttcgccgtggcccccaaccagaacctgaaggagcagggcctgcgggacatcgccagcacgccgcacgagctctaccgcaacgactacgccaccatgctgcccgactccaccgagatcaaccaggacaccatcaaccgcatcatcaaggtcatgaaacacgaagcctacggagagtgctacaaggtgagctgcctggaaatccctgggccctctgggcccaagggctaccgtggacagaagggtgccaagggcaacatgggtgagccgggagagcctggccagaagggaagacagggagacccgggcatcgaaggccccattggattcccaggacccaagggcgttcctggcttcaaaggagagaagggtgaatttggagccgacggtcgcaagggggcccctggcctggctggcaagaacgggaccgatggacagaagggcaagctggggcgcatcggacctcctggctgcaagggagaccctggaaaccggggccccgacggttacccgggggaagcagggagtccaggggagcgaggagaccaaggcggcaagggggaccctggccgcccaggacgcagagggcccccgggagaaatcggggccaagggaagcaaggggtatcaaggcaacaatggagccccaggaagtcctggtgtgaaaggagccaagggcgggcctgggccccgcggacccaaaggcgagccggggcgcaggggagaccccggcaccaagggcagcccaggcagcgatggccccaagggggagaagggggaccctggccctgagggcccccgcggcctggctggagaggttggcaacaaaggagccaagggagaccgaggcttgcctggacccagaggcccccagggagctcttggggagcccggaaagcagggatctcggggagaccccggtgatgcaggaccccgtggagactcaggacagccaggccccaagggagaccccggcaggcctggattcagctacccaggaccccgaggagcacccggagaaaaaggcgagcccggcccacgcggccccgagggaggccgaggcgactttggcttgaaaggagaacctgggaggaaaggagagaaaggagagcctgcggatcctggtccccctggtgagccaggccctcgggggccaagaggagtcccaggacccgagggtgagcccggcccccctggagaccccggtctcacggagtgtgacgtcatgacctacgtgagggagacctgcgggtgctgcgactgtgagaagcgctgtggcgccctggacgtggtcttcgtcatcgacagctccgagagcattgggtacaccaacttcacactggagaagaacttcgtcatcaacgtggtcaacaggctgggtgccatcgctaaggaccccaagtccgagacagggacgcgtgtgggcgtggtgcagtacagccacgagggcacctttgaggccatccagctggacgacgaacatatcgactccctgtcgagcttcaaggaggctgtcaagaacctcgagtggattgcgggcggcacctggacaccctcagccctcaagtttgcctacgaccgcctcatcaaggagagccggcgccagaagacacgtgtgtttgcggtggtcatcacggacgggcgccacgaccctcgggacgatgacctcaacttgcgggcgctgtgcgatcgcgacgtcacagtgacggccatcggcatcggggacatgttccacgagaagcacgagagtgaaaacctctactccatcgcctgcgacaagccacagcaggtgcgcaacatgacgctgttctccgacctggtcgctgagaagttcatcgatgacatggaggacgtcctctgcccggaccctcagatcgtgtgcccagaccttccctgccaaacagagctgtccgtggcacagtgcacgcagcggcccgtggacatcgtcttcctgctggacggctccgagcggctgggtgagcagaacttccacaaggcccggcgcttcgtggagcaggtggcgcggcggctgacgctggcccggagggacgacgaccctctcaacgcacgcgtggcgctgctgcagtttggtggccccggcgagcagcaggtggccttcccgctgagccacaacctcactgccatccacgaggcgctggagaccacacaatacctgaactccttctcgcacgtgggcgcaggcgtggtgcacgccatcaatgccatcgtgcgcagcccgcgtggcggggcccggaggcacgcagagctgtccttcgtgttcctcacggacggcgtcacgggcaacgacagtctgcacgagtcggcgcactccatgcgcaagcagaacgtggtacccaccgtgctggccttgggcagcgacgtggacatggacgtgctcaccacgctcagcctgggtgaccgcgccgccgtgttccacgagaaggactatgacagcctggcgcaacccggcttcttcgaccgcttcatccgctggatctgctagcgccgccgcccgggccccgcagtcgagggtcgtgagcccaccccgtccatggtgctaagcgggcccgggtcccacacggccagcaccgctgctcactcggacgacgccctgggcctgcacctctccagctcctcccacggggtccccgtagccccggcccccgcccagccccaggtctccccaggccctccgcaggctgcccggcctccctccccctgcagccatcccaaggctcctgacctacctggcccctgagctctggagcaagccctgacccaataaaggctttgaacccaaaaaaaaaaa

SEQ ID NO: 706 - DNA, 2796 bp, Homo sapiens
agcgccgggagactctgccgtcggtgcgtgcgcggacacgcacccgtcccccttggtctcgccgccagccatggccgccgctacggcctccccccgcagcctccttgttctcctccaggtggtagtgctcgctctggcgcagattagaggtccaccgggagagcggggccccccgggtcccccgggaccgccgggagtgcctggatccgacggcatcgacggtgacaatgggccccctggaaaagctggccctccgggacccaagggcgagcctggcaaagctgggccagatgggccagacgggaagcccgggattgatggtttaactggagccaagggggagcctggccccatggggatccctggagtcaagggccagcccgggcttcctggtcctcctggccttccgggccctggttttgctggacctcctgggcctcctggacctgttggcctccctggtgagattggaatccgaggccccaagggggaccctggaccagatggaccatcggggcccccaggaccccctgggaaacctggtcgcccgggaaccatccagggtctggaaggcagtgcggatttcctgtgtccaaccaactgtccacccggaatgaaaggtcccccagggctgcagggagtgaaggggcatgcgggcaaacgcgggattctgggtgatcctggccaccaggggaagccgggtcccaagggagatgtgggtgcctctggagagcaaggcatccctggaccaccgggtccccagggcatcaggggctacccaggcatggcagggcccaagggagagacgggccctcatggatataaaggcatggtgggcgctatcggtgccactgggccaccgggtgaggaaggtcctaggggaccgccaggccgagctggggagaagggtgacgagggcagcccaggtattcgtggaccccaggggatcacaggcccgaaaggagcaacgggccccccaggcatcaacggcaaggatgggaccccaggcacgcctggcatgaagggcagtgcaggacaggcgggacagcccggaagtccaggccaccagggcctagcgggtgtgccaggccagcctgggacaaaaggaggccctggagaccagggtgagccgggcccgcagggccttcctggattctctggtccccctgggaaagagggagagccagggcctcgaggagaaattggtccccagggcatcatgggacagaagggtgaccaaggcgagaggggtccagtggggcaaccaggccctcagggaaggcagggccctaagggggagcagggcccccccggaattccagggccccaaggcttgccaggcgtcaaaggagacaagggctccccagggaagaccgggccccgcggcaaagtgggtgacccaggggtggccggcctccccggagagaaaggcgagaagggcgagtccggcgagccggggcccaagggacagcaaggagtacgtggagaacccggctaccctggccccagcggggatgcgggcgccccaggggttcagggctaccctggtccccccggccctcgaggactggccgggaaccgaggcgtgccaggacagcccgggagacagggcgtggagggccgggatgccactgaccagcacatcgtggatgtggcgctgaagatgctgcaagagcaactggcagaggtcgccgtgagtgccaagcgggaagccctgggtgcggtgggcatgatgggtcctccaggacctcctgggccccctgggtacccaggcaagcagggcccccatgggcaccctggccctcggggcgttcctggcatcgtgggagccgtgggtcagatcggcaacacggggcccaagggaaaacgtggagagaagggtgatccaggagaagtgggacgggggcaccccgggatgcctgggcccccagggatcccaggactccctggccggcctggccaggcaatcaacggcaaggatggagatcgagggtccccaggggctccaggagaggcaggtcgacctggcctgccaggccccgtggggctgccgggcttctgtgaacctgccgcctgccttggagcttcggcctatgcctctgcccgccttacagagcctggatccatcaaggggccttgagcatcaggcccagacagagcctggaggcatcctggcgggaaggaccaggtcccctctggtggacatgcacccatccccagtccaggaaaccatctcccccaggaccttctgtctgggactcaggagtcctaaggaaaaggaattctaaaacatgggggaaggggaggtagagcactgatgggtgaaaaagtgaggccaacacacagggcaagtggtgtcgatggagtcgaagcgctgaaggaatagggcggctttccttccagcgagcatcattcggctgttaccaaaacaaacatcttaatctgcaccttcctccactggccatcttgtccttgggtcagtgggacatgggcacctcgggaggcccgggccctgcccagctacagttccacccctcagcttgaggaccaatactgaggtctatgccagttcctgatcccatctcactctctggacctactaggtgactgctgctggggtgactcccctgaggcggctatacccttaagccagccccactacttccttccctgcctcccagctcagtatttaaacatcatctcccttctctttctcgcataactccccacccctttctccccgatccacccaggcctttctgtaaataaaagctcccaagttgggtacaaaccagg

SEQ ID NO: 707 - DNA, 2511 bp, Homo sapiens
ccgacgccgcagctcagactccgctcagccatggccgggccgcgcgcgtgcgccccgctcctgctcctgctcctgctcggggagcttctggcggccgccggggcgcagagagtgggactccccggcccccccggccccccagggccgcccggcaagcccggccaggacggcattgacggagaagctggtcctccaggtctgcctgggcccccgggaccaaagggggccccaggaaagccggggaaaccaggagaggctgggctgccgggactgccgggtgtggatggtctgactggacgagatggaccccctggacccaagggtgcccctggggaacggggaagtctgggacccccggggccgcccgggctggggggcaaaggcctccctggaccccccggagaggcaggagtgagcggccccccaggtgggatcggcctccgcggccccccgggacctcctggactccccggcctccctggtcccccaggacctcccggaccccctggacacccaggagttctccctgaaggcgctactgaccttcagtgcccaagtatctgcccgccaggtcccccagggccccctggaatgccagggttcaagggacccactggctacaaaggcgagcagggggaagtcggcaaggacggcgagaagggtgaccctggcccccctgggcccgccggcctcccgggcagcgtggggctgcagggcccccggggattacgaggactgccagggccactcgggccccctggggaccggggtcccattgggttccgagggccgcctgggatcccaggagcgcctgggaaagcgggtgaccgaggcgagaggggcccagaagggttccgcggccccaagggtgacctcggcagacctggtcccaagggaacccccggagtggccgggccaagcggagagccgggcatgccgggcaaggacggccagaatggcgtgccaggactcgatggccagaagggagaggctggtcgcaacggtgctccgggagagaagggccccaacgggctgccgggcctccctggacgagcggggtccaaaggcgagaagggagaacggggcagagctggggagctgggtgaggccggcccctctggagagccaggcgtccctggagatgctggcatgcctggggagcgcggtgaggctggccaccggggctcagcgggggccctcggcccacaaggccctcccggagcccctggtgtccgaggcttccagggccagaagggcagcatgggagaccccggccttccaggcccccagggcctccgaggtgacgtgggcgaccggggtccgggaggtgccgcaggccctaagggagaccagggtattgcaggttccgacggtcttcctggggataaaggagaactgggtcccagcggcctggtcggacccaaaggagagtctggcagtcgaggggagctgggccccaaaggcacccagggtcccaacggcaccagcggtgttcagggtgtccccgggccccccggtcctctgggcctgcagggcgtcccgggtgttcctggcatcacggggaagccgggagttccggggaaggaggccagcgagcagcgcatcagggagctgtgtggggggatgatcagcgaacaaattgcacagttagccgcgcacctaaggaagcctttggcacccgggtccattggtcggcccggtccagctggcccccctgggcccccaggacccccaggctccattggtcaccctggcgctcgaggaccccctggataccgcggtcccactggggagctgggagaccccgggcccagaggaaaccagggtgacagaggagacaaaggcgcggcaggagcagggctggacgggcctgaaggagaccaggggccccaaggaccccaaggcgtgcccggcaccagcaaggacggccaggacggtgctcccggcgagcctgggcctcccggagatcctgggcttccaggtgccattggggcccaggggacaccggggatctgcgacacctcagcctgccaaggagccgtgttaggaggggtcggggagaaatcaggctctcgaagctcataaaattcaacgtgaggaagcaagtgacaaggacgcccgaagcacagtggacggtcatgaaggagcgggggtgtggcaggcgggtgacgtccaggagagggagcgcccctggctgcccctcggccgccgactggacgcgcgggccttgccagcgagcaccctcatcgggctgtcgcctgacagcatacctcaaaaggccctagctaataaacctgtaagcccagcatttgagagaaggtagggtgtgtatatataaaaggttgtgtacaactccacgaggtgaaaaatattcagtaacttgtttacatagcatttgtgtaaagactatgatctcatcccaataaaatgatatattaaaccttcagattaatgactggctacagagtaacaaaaaataaagaatttaatgtacagtaaattctctcccat

SEQ ID NO: 708 - DNA, 6319 bp, Homo sapiens
acacagtactctcagcttgttggtggaagcccctcatctgccttcattctgaaggcagggcccggcagaggaaggatcagagggtcgcggccggagggtcccggccggtggggccaactcagagggagaggaaagggctagagacacgaagaacgcaaaccatcaaatttagaagaaaaagccctttgactttttccccctctccctccccaatggctgtgtagcaaacatccctggcgataccttggaaaggacgaagttggtctgcagtcgcaatttcgtgggttgagttcacagttgtgagtgcggggctcggagatggagccgtggtcctctaggtggaaaacgaaacggtggctctgggatttcaccgtaacaaccctcgcattgaccttcctcttccaagctagagaggtcagaggagctgctccagttgatgtactaaaagcactagattttcacaattctccagagggaatatcaaaaacaacgggattttgcacaaacagaaagaattctaaaggctcagatactgcttacagagtttcaaagcaagcacaactcagtgccccaacaaaacagttatttccaggtggaactttcccagaagacttttcaatactatttacagtaaaaccaaaaaaaggaattcagtctttccttttatctatatataatgagcatggtattcagcaaattggtgttgaggttgggagatcacctgtttttctgtttgaagaccacactggaaaacctgccccagaagactatcccctcttcagaactgttaacatcgctgacgggaagtggcatcgggtagcaatcagcgtggagaagaaaactgtgacaatgattgttgattgtaagaagaaaaccacgaaaccacttgatagaagtgagagagcaattgttgataccaatggaatcacggtttttggaacaaggattttggatgaagaagtttttgagggggacattcagcagtttttgatcacaggtgatcccaaggcagcatatgactactgtgagcattatagtccagactgtgactcttcagcacccaaggctgctcaagctcaggaacctcagatagatgagtatgcaccagaggatataatcgaatatgactatgagtatggggaagcagagtataaagaggctgaaagtgtaacagagggacccactgtaactgaggagacaatagcacagacggaggcaaacatcgttgatgattttcaagaatacaactatggaacaatggaaagttaccagacagaagctcctaggcatgtttctgggacaaatgagccaaatccagttgaagaaatatttactgaagaatatctaacgggagaggattatgattcccagaggaaaaattctgaggatacactatatgaaaacaaagaaatagacggcagggattctgatcttctggtagatggagatttaggcgaatatgatttttatgaatataaagaatatgaagataaaccaacaagcccccctaatgaagaatttggtccaggtgtaccagcagaaactgatattacagaaacaagcataaatggccatggtgcatatggagagaaaggacagaaaggagaaccagcagtggttgagcctggtatgcttgtcgaaggaccaccaggaccagcaggacctgcaggtattatgggtcctccaggtctacaaggccccactggaccccctggtgaccctggcgataggggccccccaggacgtcctggcttaccaggggctgatggtctacctggtcctcctggtactatgttgatgttaccgttccgttatggtggtgatggttccaaaggaccaaccatctctgctcaggaagctcaggctcaagctattcttcagcaggctcggattgctctgagaggcccacctggcccaatgggtctaactggaagaccaggtcctgtgggggggcctggttcatctggggccaaaggtgagagtggtgatccaggtcctcagggccctcgaggcgtccagggtccccctggtccaacgggaaaacctggaaaaaggggtcgtccaggtgcagatggaggaagaggaatgccaggagaacctggggcaaagggagatcgagggtttgatggacttccgggtctgccaggtgacaaaggtcacaggggtgaacgaggtcctcaaggtcctccaggtcctcctggtgatgatggaatgaggggagaagatggagaaattggaccaagaggtcttccaggtgaagctggcccacgaggtttgctgggtccaaggggaactccaggagctccagggcagcctggtatggcaggtgtagatggccccccaggaccaaaagggaacatgggtccccaaggggagcctgggcctccaggtcaacaagggaatccaggacctcagggtcttcctggtccacaaggtccaattggtcctcctggtgaaaaaggaccacaaggaaaaccaggacttgctggacttcctggtgctgatgggcctcctggtcatcctgggaaagaaggccagtctggagaaaagggggctctgggtccccctggtccacaaggtcctattggatacccgggcccccggggagtaaagggagcagatggtgtcagaggtctcaagggatctaaaggtgaaaagggtgaagatggttttccaggattcaaaggtgacatgggtctaaaaggtgacagaggagaagttggtcaaattggcccaagaggggaagatggccctgaaggacccaaaggtcgagcaggcccaactggagacccaggtccttcaggtcaagcaggagaaaagggaaaacttggagttccaggattaccaggatatccaggaagacaaggtccaaagggttccactggattccctgggtttccaggtgccaatggagagaaaggtgcacggggagtagctggcaaaccaggccctcggggtcagcgtggtccaacgggtcctcgaggttcaagaggtgcaagaggtcccactgggaaacctgggccaaagggcacttcaggtggcgatggccctcctggccctccaggtgaaagaggtcctcaaggacctcagggtccagttggattccctggaccaaaaggccctcctggaccaccaggaaggatgggctgcccaggacaccctgggcaacgtggggagactggatttcaaggcaagaccggccctcctgggccagggggagtggttggaccacagggaccaaccggtgagactggtccaataggggaacgtgggcatcctggccctcctggccctcctggtgagcaaggtcttcctggtgctgcaggaaaagaaggtgcaaagggtgatccaggtcctcaaggtatctcagggaaagatggaccagcaggattacgtggtttcccaggggaaagaggtcttcctggagctcagggtgcacctggactgaaaggaggggaaggtccccagggcccaccaggtccagttggctcaccaggagaacgtgggtcagcaggtacagctggcccaattggtttaccagggcgcccgggacctcagggtcctcctggtccagctggagagaaaggtgctcctggagaaaaaggtccccaagggcctgcagggagagatggagttcaaggtcctgttggtctcccagggccagctggtcctgccggctcccctggggaagacggagacaagggtgaaattggtgagccgggacaaaaaggcagcaagggtgacaagggagaaaatggccctcccggtcccccaggtcttcaaggaccagttggtgcccctggaattgctggaggtgatggtgaaccaggtcctagaggacagcaggggatgtttgggcaaaaaggtgatgagggtgccagaggcttccctggacctcctggtccaataggtcttcagggtctgccaggcccacctggtgaaaaaggtgaaaatggggatgttggtccatgggggccacctggtcctccaggcccaagaggccctcaaggtcccaatggagctgatggaccacaaggacccccaggttctgttggttcagttggtggtgttggagaaaagggtgaacctggagaagcaggaaacccagggcctcctggggaagcaggtgtaggcggtcccaaaggagaaagaggagagaaaggggaagctggtccacctggagctgctggacctccaggtgccaaggggccgccaggtgatgatggccctaagggtaacccgggtcctgttggttttcctggagatcctggtcctcctggggaacttggccctgcaggtcaagatggtgttggtggtgacaagggtgaagatggagatcctggtcaaccgggtcctcctggcccatctggtgaggctggcccaccaggtcctcctggaaaacgaggtcctcctggagctgcaggtgcagagggaagacaaggtgaaaaaggtgctaagggggaagcaggtgcagaaggtcctcctggaaaaaccggcccagtcggtcctcagggacctgcaggaaagcctggtccagaaggtcttcggggcatccctggtcctgtgggagaacaaggtctccctggagctgcaggccaagatggaccacctggtcctatgggacctcctggcttacctggtctcaaaggtgaccctggctccaagggtgaaaagggacatcctggtttaattggcctgattggtcctccaggagaacaaggggaaaaaggtgaccgagggctccctggaactcaaggatctccaggagcaaaaggggatgggggaattcctggtcctgctggtcccttaggtccacctggtcctccaggcttaccaggtcctcaaggcccaaagggtaacaaaggctctactggacccgctggccagaaaggtgacagtggtcttccagggcctcctgggcctccaggtccacctggtgaagtcattcagcctttaccaatcttgtcctccaaaaaaacgagaagacatactgaaggcatgcaagcagatgcagatgataatattcttgattactcggatggaatggaagaaatatttggttccctcaattccctgaaacaagacatcgagcatatgaaatttccaatgggtactcagaccaatccagcccgaacttgtaaagacctgcaactcagccatcctgacttcccagatggtgaatattggattgatcctaaccaaggttgctcaggagattccttcaaagtttactgtaatttcacatctggtggtgagacttgcatttatccagacaaaaaatctgagggagtaagaatttcatcatggccaaaggagaaaccaggaagttggtttagtgaatttaagaggggaaaactgctttcatacttagatgttgaaggaaattccatcaatatggtgcaaatgacattcctgaaacttctgactgcctctgctcggcaaaatttcacctaccactgtcatcagtcagcagcctggtatgatgtgtcatcaggaagttatgacaaagcacttcgcttcctgggatcaaatgatgaggagatgtcctatgacaataatccttttatcaaaacactgtatgatggttgtacgtccagaaaaggctatgaaaagactgtcattgaaatcaatacaccaaaaattgatcaagtacctattgttgatgtcatgatcaatgactttggtgatcagaatcagaagttcggatttgaagttggtcctgtttgttttcttggctaagattaagacaaagaacatatcaaatcaacagaaaatataccttggtgccaccaacccattttgtgccacatgcaagttttgaataaggatggtatagaaaacaacgctgcatatacaggtaccatttaggaaataccgatgcctttgtgggggcagaatcacatggcaaaagctttgaaaatcataaagatataagttggtgtggctaagatggaaacagggctgattcttgattcccaattctcaactctccttttcctatttgaatttctttggtgctgtagaaaacaaaaaaagaaaaatatatattcataaaaaatatggtgctcattctcatccatccaggatgtactaaaacagtgtgtttaataaattgtaattattttgtgtacagttctatactgttatctgtgtccatttccaaaacttgcacgtgtccctgaattccatctgactctaattttatgagaattgcagaactctgatggcaataaatatatgtattatgaaaaaataaagttgtaatttctgatgactctaagtccctttctttggttaataataaaatgcctttgtatat

SEQ ID NO: 709 - DNA, 5222 bp, Homo sapiens
ttctgcccgccgccgccgctgccgagcgccgcctttgttccctgcaggaagggcgagcgcgcgggccagcgctcagccagcgcctcacgacccttcgtcctccgctaagctccaacgctctgctcgactagccgcgcgccttccggggctccgcagacccgcgagatggcaccaaggaggaacaacgggcagtgctggtgtctgctgatgctgctctcggtctccacgcccctccctgctgtcacccagacccgcggtgcgacagagactgcttcccagggtcacctggacctcacgcagctcatcggtgtcccgctgccctcgtccgtatcctttgtcacaggctatggtggcttcccggcctacagtttcgggcctggtgccaatgttggccgcccagccaggactctcatcccatccaccttcttcagggacttcgccatcagggtcgtggtgaagcccagcagcacccgtggtggcgtgctcttcgccatcactgacgccttccagaaggtcatctacctgggcctgcggctctcaggtgtggaggacggccaccagcggatcatcctctactacacggagccaggctcccatgtgtcccaagaagctgctgccttctcggtgcctgtgatgacccacaggtggaaccgcttcgccatgattgtccagggtgaggaagtgaccctcctcgtgaactgtgaggagcacagccgcatccccttccagcggtcctcccaggctttggcttttgagtccagcgctggaatcttcatgggcaatgcaggagctacagggctcgagagattcactggctccctccagcagctcaccgtgcaccccgaccccaggactcccgaggagctgtgtgaccctgaagagtcctcggcatctggagagaccagtgggctgcaggaggcagacggagtagctgagatcttagaagccgtcacctacactcaagcctcgcccaaagaagcaaaagttgaacccataaacacacctccaactccatcctccccctttgaagacatggaactttctggtgaacctgtacccgaggggaccctggaaaccaccaacatgagcatcatccagcacagcagccccaaacaagggtctggtgagatcctgaatgacacactggagggggttcattctgtggatggtgaccccattactgacagcggctcaggggctggggccttccttgacattgctgaagaaaagaatttagcagcaacagcagcggggctggccgaggtgcccatcagcactgctggagaagcagaggccagcagtgtgcccaccgggggaccaaccctctctatgtccacggagaacccagaggaaggggtcactccaggtccagataatgaagagcgtttacgagcaacagcagcaggggaggccgaggcactcgccagcatgcctggggaagtggaggccagtggtgtggcccccggggagctggacctctccatgtccgcccagagcctcggggaagaggccactgtgggtccaagcagtgaagacagtttaacaacagctgcagctgcaaccgaagtgtccctcagtacttttgaggatgaggaagccagtggggtccccacagatggcctggctcccctcacagccaccatggcccctgagcgggcagtcacttctggtcctggtgatgaagaagacttggcagcagccacaacagaggagcccctcatcacagctgggggtgaagagtccggcagccctccccctgatgggccaccgctgcccctgcccacagtggctcctgaaagatggatcactccagctcaaagagaacatgtgggaatgaaaggacaggctgggcccaaaggagaaaagggtgatgctggggaggagcttcctggccctcctgaaccttctgggcctgttggacccacggcaggagcagaagcagagggctctggcctaggctggggctcggacgtcggctctggctctggtgacctggtgggcagtgagcagctgctgagaggtcctccaggacccccagggccacctggcttacctgggattccaggaaaaccaggaactgatgttttcatgggaccccctggatctcctggagaggatggacctgctggtgaacctgggcccccgggccctgagggacagcctggagttgatggagccaccggccttcccgggatgaaaggggagaagggagcaagagggcctaatggctcagttggtgaaaagggtgaccctggcaacagaggcttacctggacccccggggaaaaagggacaagctggccctcctggggtcatgggacccccagggcctcctggaccccctgggcccccaggccctggatgcacaatgggacttggattcgaggataccgaaggctctggaagcacccagctattgaatgaacccaaactctccagaccaacggctgcaattggtctcaaaggagagaaaggagaccggggacccaagggagaaagggggatggatggagccagtattgtgggaccccctgggccgagagggccacctgggcacatcaaggtcttgtctaattccttgatcaatatcacccatggattcatgaatttctcggacattcctgagctggtggggcctccggggccggacgggttgcctgggctgccaggatttccaggtcctagaggaccaaaaggtgacactggtttacctggctttccaggactaaaaggagaacagggcgagaagggagagccgggtgccatcctgacagaggacattcctctggaaaggctgatggggaaaaagggtgaacctggaatgcatggagccccaggaccaatggggcccaaaggaccaccaggacataaaggagaatttggccttcccgggcgacctggtcgcccaggactgaatggcctcaagggtaccaaaggagatccaggggtcattatgcagggcccacctggcttacctggccctccaggcccccctgggccacctggagctgtgattaacatcaaaggagccattttcccaatacccgtccgaccacactgcaaaatgccagttgatactgctcatcctgggagtccagagctcatcacttttcacggtgttaaaggagagaaaggatcctggggtcttcctggctcaaagggagaaaaaggcgaccagggagcccagggaccaccaggtcctccacttgatctagcttacctgagacactttctgaacaacttgaagggggagaatggagacaaggggttcaaaggtgaaaaaggagaaaaaggagacattaatggcagcttccttatgtctgggcctccaggcctgcccggaaatccaggcccggctggccaaaaaggggagacagtcgttgggccccaaggacccccaggtgctcctggtctgcctgggccacctggctttggaagacctggtgatcctgggccaccggggcccccggggccaccaggacctccagctatcctgggagcagctgtggcccttccaggtccccctggccctccaggacagccagggcttcccggatccagaaacctggtcacagcattcagcaacatggatgacatgctgcagaaagcgcatttggttatagaaggaacattcatctacctgagggacagcactgagtttttcattcgtgttagagatggctggaaaaaattacagctgggagaactgatccccattcctgccgacagccctccaccccctgcgctttccagcaacccacatcagcttctgcctccaccaaaccctatttcaagtgccaattatgagaagcctgctctgcatttggctgctctgaacatgccattttctggggacattcgagctgattttcagtgcttcaagcaggccagagctgcaggactgttgtccacctaccgagcattcttatcttcccatttgcaagatctgtccaccattgtgaggaaagcagagagatacagccttcccatagtgaacctcaagggccaagtactttttaataattgggactcaattttttctggccacggaggtcagttcaatatgcatattccaatatactcctttgatggtcgagacataatgacagatccttcttggccccagaaagtcatttggcatggctccagcccccatggcgtccgccttgtggataactactgtgaagcatggcgaaccgcggacacagcggtcacgggacttgcctccccgctgagcacggggaagattctggaccagaaagcatacagctgtgctaatcggctaattgtcctatgtatcgaaaacagtttcatgacagacgctaggaagtaatggccttctgatgattcttaaagagttttcaattttttcttatgtgaagagttgacactgaaatctaaaatgtttaattgttgtaaatattacagtttttttttttttactacatattctttacaacagcaaccaaagaaaacatacctcaatacactcaaaactgaagacatagaggactcagatcaaagacaaaatctgatccatatattggtgctagattctgcaggaaaccccagcagtgtgaacgcatcccaacataggttaagagcaagttgaaaacaaaggccagattctgccactgcatccttcagacagttatatcctccttttaaaccattgttgttgagtgtaagatgtccttcatgttttcttataaagtcagtgtttagaaatgttaccctttctaagttatatacagatcaaatgcttttttctttcacgtacatccatcatttgcaactgctgttcgtacacagaaacaggactgctcaaatgatcctatttgtattttctgatgctatcagactctaatgtttttttccctaaaatattattgccatcatgctttaggaatttttatatttttacacaatcatattttagtatggtgtctgtttatgtaactctgacttgctggaaaagttgaaactccaaataatctgaaactagaaaagaaatagcacataattactaccttccccttggcggctctcctcccccaacccccaccccacaattttatgacttccatttggcaattgttgaattataactgcgactgaaacaaacaggttcatagagatgaattttctgagaaacatatatctacatgttgtataattggattttttttccatgtaagtgaacataaaaacatcttttccggg

SEQ ID NO: 710 - DNA, 1804 bp, Homo sapiens
gcggtggtggacacgtcgagccgggtagaagtggaggggccgttcgaagagtcgtgagggggtgacgggttaagattcggagagagaggtgctagtggctggacttgacctggaaagaatcttctgctgactctcaacttttcctggaaaaaatggatcattcccaccatatggggatgagctatatggactccaacagtaccatgcaaccttctcaccatcacccaaccacttcagcctcacactcccatggtggaggagacagcagcatgatgatgatgcctatgaccttctactttggctttaagaatgtggaactactgttttccggtttggtgatcaatacagctggagaaatggctggagcttttgtggcagtgtttttactagcaatgttctatgaaggactcaagatagcccgagagagcctgctgcgtaagtcacaagtcagcattcgctacaattccatgcctgtcccaggaccaaatggaaccatccttatggagacacacaaaactgttgggcaacagatgctgagctttcctcacctcctgcaaacagtgctgcacatcatccaggtggtcataagctacttcctcatgctcatcttcatgacctacaacgggtacctctgcattgcagtagcagcaggggccggtacaggatacttcctcttcagctggaagaaggcagtggtagtggatatcacagagcattgccattgacatcaaactctatggcgtggccttatcgattgcagtgggaagttgttgaagacttgaagacgtgattcctgctccaatcatcccttcttgctcctctttgtgcacgtacacacacacacacacacacacacacacacacacacccctgctcaacagaggtttagtttacagtctctgaactaaagtagtaacctcccaaattgttttttctaataagctgagattcccatttctcttaaggagaagccacccatgagatgtcttttccttctccatcatcttagagccaagttatatgttcttgtctaatccatgtagctttttgttcaatgacttgatcatctgcttcctttttgaatttttaacagatagtaagtaaatttggtggttttttcccctgggtcagtgatggaaaggggttaacttcagccaggattgatggcagctgagggaaattcttgcccaactaaacccagaactcaaacttaacattagaaaataaggtccagggccggacacagtggcccatgcctgtaatcccagcactttggggggccaaggcaggctggatcacctgaggacaggagttcgagaccagtctggccaacatggggaaaccccgtctctactaaaaatacaaaaattagccgggcatggtggtgggcgcctgtaatcccagctactcagaaggctgaggcaggagaatcacttgaacctaggaggcggaggttgcagtgagccaagatggcgccattgcactccagcctgggtgacaagagtgaaactccatctcaaaaaaaaagaaaagaaggtccagcttttggattcaatgagtgggaaatacattgtgcctttctctagatgtgatacgttataccaaaatctttgtagtgtgcagagcggtggtttgagactaaatacaggcttagaacttgcagagtgtgtattcttggatggctgatgcatcgacttgcattcccacttaacactttgattagccatgaacttgccaatcaaaaaatgacaatcaatttgagaaaatagaaatagatatttttaaataaaaccattcacagttt

SEQ ID NO: 711 - DNA, 802 bp, Homo sapiens
cgacgttcgcagcgctacccttttccgctccacggtgacctccgtgcggccgggtgcgggcggagtcttcctcgatcccgtggtgctccgcggcgcggccttgctctcttccggtcgcgggacaccgggtgtagagggcggtcgcggcgggcagtggcggcagaatgttggctaccagggtatttagcctagttggcaagcgagcaatttccacctctgtgtgtgtacgagctcatgaaagtgttgtgaagagcgaagacttttcgctcccagcttatatggatcggcgtgaccaccccttgccggaggtggcccatgtcaagcacctgtctgccagccagaaggcactgaaggagaaggagaaggcctcctggagcagcctctccatggatgagaaagtcgagttgtatcgcattaagttcaaggagagctttgctgagatgaacaggggctcgaacgagtggaagacggttgtgggcggtgccatgttcttcatcggtttcaccgcgctcgttatcatgtggcagaagcactatgtgtacggccccctcccgcaaagctttgacaaagagtgggtggccaagcagaccaagaggatgctggacatgaaggtgaaccccatccagggcttagcctccaagtgggactacgaaaagaacgagtggaagaagtgagagatgctggcctgcgcctgcacctgcgcctggctctgtcaccgccatgcaactccatgcctatttactggaaacctgttatgccaaacagttgtaccactgctaataaatgaccagtttacctgaaa

SEQ ID NO: 712 - DNA, 578 bp, Homo sapiens
cctcctgggagggagctgaagccgctcgcaagactcccgtagtccccacctctctcagcttccggctggtagtagttccgcttcctgtccgactgtggtgtctttgctgagggtcacattgagctgcaggttgaatccggggtgcctttaggattcagcaccatggcggaagacatggagaccaaaatcaagaactacaagaccgccccttttgacagccgcttccccaaccagaaccagactagaaactgctggcagaactacctggacttccaccgctgtcagaaggcaatgaccgctaaaggaggcgatatctctgtgtgcgaatggtaccagcgtgtgtaccagtccctctgccccacatcctgggtcacagactgggatgagcaacgggctgaaggcacgtttcccgggaagatctgaactggctgcatctccctttcctctgtcctccatccttctcccaggatggtgaagggggacctggtacccagtgatccccaccccaggatcctaaatcatgacttacctgctaataaaaactcattggaaaagtgaaaaaaaaaaaaaaaaaaaaa

SEQ ID NO: 713 - DNA, 448 bp, Homo sapiens
caaggtcgtgaaaaaaaaggtcttggtgaggtgccgccatttcatctgtcctcattctctgcgcctttcgcagagcttccagcagcggtatgttgggccagagcatccggaggttcacaacctctgtggtccgtaggagccactatgaggagggccctgggaagaatttgccattttcagtggaaaacaagtggtcgttactagctaagatgtgtttgtactttggatctgcatttgctacacccttccttgtagtaagacaccaactgcttaaaacataaggatgtttcagttcctccatttaacagatatgaagagcattttaagaggtgcagcctctggaagtggatcaaactagaactcatatgccatactagatatgtttgtcaataaacttatgacgtgaaaaaaaaaaaaaaaaaaaaaaaaaaaaaaaaaaaaaaaaaaa

SEQ ID NO: 714 - DNA, 1380 bp, Homo sapiens
cagcagcatgcgggggttgctggtgttgagtgtcctgttgggggctgtctttggcaaggaggactttgtggggcatcaggtgctccgaatctctgtagccgatgaggcccaggtacagaaggtgaaggagctggaggacctggagcacctgcagctggacttctggcgggggcctgcccaccctggctcccccatcgacgtccgagtgcccttccccagcatccaggcggtcaagatctttctggagtcccacggcatcagctatgagaccatgatcgaggacgtgcagtcgctgctggacgaggagcaggagcagatgttcgccttccggtcccgggcgcgctccaccgacacttttaactacgccacctaccacaccctggaggagatctatgacttcctggacctgctggtggcggagaacccgcaccttgtcagcaagatccagattggcaacacctatgaagggcgtcccatttatgtgctgaagttcagcacggggggcagtaagcgtccagccatctggatcgacacgggcatccattcccgggagtgggtcacccaggccagtggggtctggtttgcaaagaagatcactcaagactatgggcaggatgcagctttcaccgccattctcgacaccttggacatcttcctggagatcgtcaccaaccctgatggctttgccttcacgcacagcacgaatcgcatgtggcgcaagactcggtcccacacagcaggctccctctgtattggcgtggaccccaacaggaactgggacgctggctttgggttgtccggagccagcagtaacccctgctcggagacttaccacggcaagtttgccaattccgaagtggaggtcaagtccattgtagactttgtgaaggaccatgggaacatcaaggccttcatctccatccacagctactcccagctcctcatgtatccctatggctacaaaacagaaccagtccctgaccaggatgagctggatcagctttccaaggctgctgtgacagccctggcctctctctacgggaccaagttcaactatggcagcatcatcaaggcaatttatcaagccagtggaagcactattgactggacctacagccagggcatcaagtactccttcaccttcgagctccgggacactgggcgctatggcttcctgctgccagcctcccagatcatccccacagccaaggagacgtggctggcgcttctgaccatcatggagcacaccctgaatcacccctactgagctgaccctttgacacccttcttgtcctcctctctggccccatccaggcaaccaaataaagtttgagtgtaccaggaacagaatcctggggcttgcaaaaaaaaaaaaaaaaa

SEQ ID NO: 715 - DNA, 1306 bp, Homo sapiens
ggccatgaggttgatcctgttttttggtgccctttttgggcatatctactgtctagaaacatttgtgggagaccaagttcttgagattgtaccaagcaatgaagaacaaattaaaaatctgctacaattggaggctcaagaacatctccagcttgatttttggaaatcacccaccaccccaggggagacagcccacgtccgagttcccttcgtcaacgtccaggcagtcaaagtgttcttggagtcccagggaattgcctattccatcatgattgaagacgtgcaggtcctgttggacaaagagaatgaagaaatgctttttaataggagaagagaacggagtggtaacttcaattttggggcctaccataccctggaagagatttcccaagaaatggataacctcgtggctgagcaccctggtctagtgagcaaagtgaatattggctcttcttttgagaaccggcctatgaacgtgctcaagttcagcaccggaggagacaagccagctatctggctggatgctgggatccatgctcgagagtgggttacacaagctacggcactttggacagcaaataagattgtttctgattatggaaaggacccatccatcacttccattctggacgccctggatatcttcctcctgccagtcacaaaccctgatggatacgtgttctctcaaaccaaaaatcgtatgtggcggaagacccggtccaaggtatctggaagcctctgtgttggtgtggatcctaaccggaactgggatgcaggttttggaggacctggagccagcagcaacccttgctctgattcataccacggacccagtgccaactctgaagttgaagtgaaatccatagtggacttcatcaagagtcatggaaaagtcaaggccttcattatcctccacagctattcccagctgctgatgttcccctatgggtacaaatgtaccaagttagatgactttgatgagctgagtgaagtggcccaaaaggctgcccaatctctgagaagcctgcatggcaccaagtacaaagtgggaccaatctgctctgtcatctaccaagccagtggaggaagcattgactggtcctatgattatggcatcaagtactcatttgcctttgaactgagagacacagggcgctacggcttcctcttgccagcccgtcagatcctgcccacagccgaggagacctggcttggcttgaaggcaatcatggagcatgtgcgagaccacccctattagggccctggggaagaaacaagagccattaaaatctctttggtttgaagc

SEQ ID NO: 716 - DNA, 1633 bp, Homo sapiens
aaagaagaaccatgaggctcatcctgcctgtgggtttgattgctaccactcttgcaattgctcctgtccgctttgacagggagaaggtgttccgcgtgaagccccaggatgaaaaacaagcagacatcataaaggacttggccaaaaccaatgagcttgacttctggtatccaggtgccacccaccacgtagctgctaatatgatggtggatttccgagttagtgagaaggaatcccaagccatccagtctgccttggatcaaaataaaatgcactatgaaatcttgattcatgatctacaagaagagattgagaaacagtttgatgttaaagaagatatcccaggcaggcacagctacgcaaaatacaataattgggaaaagattgtggcttggactgaaaagatgatggataagtatcctgaaatggtctctcgtattaaaattggatctactgttgaagataatccactatatgttctgaagattggggaaaagaatgaaagaagaaaggctatttttatggattgtggcattcacgcacgagaatgggtctccccagcattctgccagtggtttgtctatcaggcaaccaaaacttatgggagaaacaaaattatgaccaaactcttggaccgaatgaatttttacattcttcctgtgttcaatgttgatggatatatttggtcatggacaaagaaccgcatgtggagaaaaaatcgttccaagaaccaaaactccaaatgcatcggcactgacctcaacaggaattttaatgcttcatggaactccattcctaacaccaatgacccatgtgcagataactatcggggctctgcaccagagtccgagaaagagacgaaagctgtcactaatttcattagaagccacctgaatgaaatcaaggtttacatcaccttccattcctactcccagatgctattgtttccctatggatatacatcaaaactgccacctaaccatgaggacttggccaaagttgcaaagattggcactgatgttctatcaactcgatatgaaacccgctacatctatggcccaatagaatcaacaatttacccgatatcaggttcttctttagactgggcttatgacctgggcatcaaacacacatttgcctttgagctccgagataaaggcaaatttggttttctccttccagaatcccggataaagccaacgtgcagagagaccatgctagctgtcaaatttattgccaagtatatcctcaagcatacttcctaaagaactgccctctgtttggaataagccaattaatccttttttgtgcctttcatcagaaagtcaatcttcagttatccccaaatgcagcttctatttcacctgaatccttctcttgctcatttaagtcccatgttactgctgtttgcttttacttactttcagtagcaccataacgaagtagctttaagtgaaaccttttaactacctttctttgctccaagtgaagtttggacccagcagaaagcattattttgaaaggtgatatacagtggggcacagaaaacaaatgaaaaccctcagtttctcacagattttcaccatgtggcttcatcaatttatgtgctaatacaataaaataaaatgcactt

SEQ ID NO: 717 - DNA, 1332 bp, Homo sapiens
cggactagacctggtcagacacaatgttggcactcttggttctggtgactgtggccctggcatctgctcatcatggtggtgagcactttgaaggcgagaaggtgttccgtgttaacgttgaagatgaaaatcacattaacataatccgcgagttggccagcacgacccagattgacttctggaagccagattctgtcacacaaatcaaacctcacagtacagttgacttccgtgttaaagcagaagatactgtcactgtggagaatgttctaaagcagaatgaactacaatacaaggtactgataagcaacctgagaaatgtggtggaggctcagtttgatagccgggttcgtgcaacaggacacagttatgagaagtacaacaagtgggaaacgatagaggcttggactcaacaagtcgccactgagaatccagccctcatctctcgcagtgttatcggaaccacatttgagggacgcgctatttacctcctgaaggttggcaaagctggacaaaataagcctgccattttcatggactgtggtttccatgccagagagtggatttctcctgcattctgccagtggtttgtaagagaggctgttcgtacctatggacgtgagatccaagtgacagagcttctcgacaagttagacttttatgtcctgcctgtgctcaatattgatggctacatctacacctggaccaagagccgattttggagaaagactcgctccacccatactggatctagcattggcacagaccccaacagaaattttgatgctggttggtgtgaaattggagcctctcgaaacccctgtgatgaaacttactgtggacctgccgcagagtctgaaaaggagaccaaggccctggctgatttcatccgcaacaaactctcttccatcaaggcatatctgacaatccactcgtactcccaaatgatgatctacccttactcatatgcttacaaactcggtgagaacaatgctgagttgaatgccctggctaaagctactgtgaaagaacttgcctcactgcacggcaccaagtacacatatggcccgggagctacaacaatctatcctgctgctgggggctctgacgactgggcttatgaccaaggaatcagatattccttcacctttgaacttcgagatacaggcagatatggctttctccttccagaatcccagatccgggctacctgcgaggagaccttcctggcaatcaagtatgttgccagctacgtcctggaacacctgtactagttgagaaagctgatggccttgtttcaaaattctcatttttcatttcttttctttcttg

SEQ ID NO: 718 - DNA, 1723 bp, Homo sapiens
gttgtacagaaaattgctgttgggatgaagctttgcagccttgcagtccttgtacccattgttctcttctgtgagcagcatgtcttcgcgtttcagagtggccaagttctagctgctcttcctagaacctctaggcaagttcaagttctacagaatcttactacaacatatgagattgttctctggcagccggtaacagctgaccttattgtgaagaaaaaacaagtccatttttttgtaaatgcatctgatgtcgacaatgtgaaagcccatttaaatgtgagcggaattccatgcagtgtcttgctggcagacgtggaagatcttattcaacagcagatttccaacgacacagtcagcccccgagcctccgcatcgtactatgaacagtatcactcactaaatgaaatctattcttggatagaatttataactgagaggcatcctgatatgcttacaaaaatccacattggatcctcatttgagaagtacccactctatgttttaaaggtttctggaaaagaacaaacagccaaaaatgccatatggattgactgtggaatccatgccagagaatggatctctcctgctttctgcttgtggttcataggccatataactcaattctatgggataatagggcaatataccaatctcctgaggcttgtggatttctatgttatgccggtggttaatgtggacggttatgactactcatggaaaaagaatcgaatgtggagaaagaaccgttctttctatgcgaacaatcattgcatcggaacagacctgaataggaactttgcttccaaacactggtgtgaggaaggtgcatccagttcctcatgctcggaaacctactgtggactttatcctgagtcagaaccagaagtgaaggcagtggctagtttcttgagaagaaatatcaaccagattaaagcatacatcagcatgcattcatactcccagcatatagtgtttccatattcctatacacgaagtaaaagcaaagaccatgaggaactgtctctagtagccagtgaagcagttcgtgctattgagaaaactagtaaaaataccaggtatacacatggccatggctcagaaaccttatacctagctcctggaggtggggacgattggatctatgatttgggcatcaaatattcgtttacaattgaacttcgagatacgggcacatacggattcttgctgccggagcgttacatcaaacccacctgtagagaagcttttgccgctgtctctaaaatagcttggcatgtcattaggaatgtttaatgcccctgattttatcattctgcttccgtattttaatttactgattccagcaagaccaaatcattgtatcagattatttttaagttttatccgtagttttgataaaagattttcctattccttggttctgtcagagaacctaataagtgctactttgccattaaggcagactagggttcatgtctttttaccctttaaaaaaaattgtaaaagtctagttacctactttttctttgattttcgacgtttgactagccatctcaagcaactttcgacgtttgactagccatctcaagcaagtttaatcaaagatcatctcacgctgatcattggatcctactcaacaaaaggaagggtggtcagaagtacattaaagatttctgctccaaattttcaataaatttctgcttgtgcctttagaaataca

SEQ ID NO: 719 - DNA, 2443 bp, Homo sapiens
aaatggcgtgcccgtctctccgccggccccctgcctcgcagtggtttctcctgcagctcccctgggctccgcggccagtagtgcagcccgtggagccgcggctttgcccgtctcctctgggtggccccagtgcgcgggctgacactcattcagccggggaaggtgaggcgagtagaggctggtgcggaacttgccgcccccagcagcgccggcgggctaagcccagggccgggcagacaaaagaggccgcccgcgtaggaaggcacggccggcggcggcggagcgcagcgatggccgggcgagggggcagcgcgctgctggctctgtgcggggcactggctgcctgcgggtggctcctgggcgccgaagcccaggagcccggggcgcccgcggcgggcatgaggcggcgccggcggctgcagcaagaggacggcatctccttcgagtaccaccgctaccccgagctgcgcgaggcgctcgtgtccgtgtggctgcagtgcaccgccatcagcaggatttacacggtggggcgcagcttcgagggccgggagctcctggtcatcgagctgtccgacaaccctggcgtccatgagcctggtgagcctgaatttaaatacattgggaatatgcatgggaatgaggctgttggacgagaactgctcattttcttggcccagtacctatgcaacgaataccagaaggggaacgagacaattgtcaacctgatccacagtacccgcattcacatcatgccttccctgaacccagatggctttgagaaggcagcgtctcagcctggtgaactcaaggactggtttgtgggtcgaagcaatgcccagggaatagatctgaaccggaactttccagacctggataggatagtgtacgtgaatgagaaagaaggtggtccaaataatcatctgttgaaaaatatgaagaaaattgtggatcaaaacacaaagcttgctcctgagaccaaggctgtcattcattggattatggatattccttttgtgctttctgccaatctccatggaggagaccttgtggccaattatccatatgatgagacgcggagtggtagtgctcacgaatacagctcctccccagatgacgccattttccaaagcttggcccgggcatactcttctttcaacccggccatgtctgaccccaatcggccaccatgtcgcaagaatgatgatgacagcagctttgtagatggaaccaccaacggtggtgcttggtacagcgtacctggagggatgcaagacttcaattaccttagcagcaactgttttgagatcaccgtggagcttagctgtgagaagttcccacctgaagagactctgaagacctactgggaggataacaaaaactccctcattagctaccttgagcagatacaccgaggagttaaaggatttgtccgagaccttcaaggtaacccaattgcgaatgccaccatctccgtggaaggaatagaccacgatgttacatccgcaaaggatggtgattactggagattgcttatacctggaaactataaacttacagcctcagctccaggctatctggcaataacaaagaaagtggcagttccttacagccctgctgctggggttgattttgaactggagtcattttctgaaaggaaagaagaggagaaggaagaattgatggaatggtggaaaatgatgtcagaaactttaaatttttaaaaaggcttctagttagctgctttaaatctatctatataatgtagtatgatgtaatgtggtcttttttttagattttgtgcagttaatacttaacattgatttattttttaatcatttaaatattaatcaactttccttaaaataaatagcctcttaggtaaaaatataagaacttgatatatttcattctcttatatagtattcattttcctacctatattacacaaaaaagtatagaaaagatttaagtaattttgccatcctaggcttaaatgcaatattcctggtattatttacaatgcagaattttttgagtaattctagctttcaaaaattagtgaagttcttttactgtaattggtgacaatgtcacataatgaatgctattgaaaaggttaacagatacagctcggagttgtgagcactctactgcaagacttaaatagttcagtataaattgtcgtttttttcttgtgctgactaactataagcatgatcttgttaatgcatttttgatgggaagaaaaggtacatgtttacaaagaggttttatgaaaagaataaaaattgacttcttgcttgtacatataggagcaatactattatattatgtagtccgttaacactacttaaaagtttagggttttctcttggttgtagagtggcccagaattgcattctgaatgaataaaggttaaaaaaaaatccccagtgaaaaaaaa

SEQ ID NO: 720 - DNA, 2085 bp, Homo sapiens
gcatttcttccttctgcgtatgggacaggaccctttctggaatgggggtcttatgacctacaatcaaacaagaacatggacttcccgtgcctctggctagggctgttgctgcctttggtagctgcgctggatttcaactaccaccgccaggaagggatggaagcgtttttgaagactgttgcccaaaactacagttctgtcactcacttacacagtattgggaaatctgtgaaaggtagaaacctgtgggttcttgttgtggggcggtttccaaaggaacacagaattgggattccagagttcaaatacgtggcaaatatgcatggagatgagactgttgggcgggagctgctgctccatctgattgactatctcgtaaccagtgatggcaaagaccctgaaatcacaaatctgatcaatagtacccggatacacatcatgccttccatgaacccagatggatttgaagccgtcaaaaagcctgactgttactacagcatcggaagggaaaattataaccagtatgacttgaatcgaaatttccccgatgcttttgaatataataatgtctcaaggcagcctgaaactgtggcagtcatgaagtggctgaaaacagagacgtttgtcctctctgcaaacctccatggtggtgccctcgtggccagttacccatttgataatggtgttcaagcaactggggcattatactcccgaagcttaacgcctgatgatgatgtttttcaatatcttgcacatacctatgcttcaagaaatcccaacatgaagaaaggagacgagtgtaaaaacaaaatgaactttcctaatggtgttacaaatggatactcttggtatccactccaaggtggaatgcaagattacaactacatctgggcccagtgttttgaaattacgttggagctgtcatgctgtaaatatcctcgtgaggagaagcttccatccttttggaataataacaaagcctcattaattgaatatataaagcaggtgcacctaggtgtaaagggtcaagtttttgatcagaatggaaatccattacccaatgtaattgtggaagtccaagacagaaaacatatctgcccctatagaaccaacaaatatggagagtattatctccttctcttgcctgggtcttatattataaatgttacagtccctggacatgatccacacatcacaaaggtgattattccggagaaatcccagaacttcagtgctcttaaaaaggatattctacttccattccaagggcaattggattctatcccagtatcaaatccttcatgcccaatgattcctctatacagaaatttgccagaccactcagctgcaacaaagcctagtttgttcttatttttagtgagtcttttgcacatattcttcaaataaagtaaaatgtgaaactcaacccacatcaccacctggaatcagggattgctcactccaggttactgcaaccctaactcactctagtgggaccttgactggagaaactccacgatcttcctgaagaagagaaatggatgtttccaaattccacaataagcaatatgtggtgataatgaaaagaatgattcagtcttgacggtgaatggaagacacttacctaacaagtactgctcatttacactcaaattaatcttgaagtagtcttaaaatgtgtaagaagttaaaacttgagaagcaaaaaatgcctgcaaaaagaagatcattttgtatacagagaaccggatgaatataagcaatgaagatgaacatttattgatcttctacatacaagacttcaccataaggccaggagcagtgctcacgccttgtaatcccagcactttgggaggccaaggtgggcggatcaccttgaggtcaggagttcaagaccagcctgaccaacatggtgaaaccctgtctctactaaatattagcggggtgtggtggcgggcacctgtagtcgcagcctttcgggaggctgagacaggagaatcgcttgaaccctagaggcggagtttgcagtgagccgagatagtgccattgtactccagcttgggcaacagagtaagactctgtctc

SEQ ID NO: 721 - DNA, 4489 bp, Homo sapiens
tggcgatacattcacacaggaacagctatgccatgtttacgaattccggttttgaaaaaactttcgttgacagttacacaaagggtcacttcctccccagcgacacatgggcctctcaaaggagaggagggagtaagtcccacggtagggccagtggttgctccctgggttttggaatcatttctgcggagctttcaaggccagaccctgggcttagggtcgagactttatagcagtgacagccagacccagcaagatggctgcgaccgtgaaaccctgggcggcgatccgggtgcgcatcatgagctgagagcgctggctgttgccccggtggaaggagtagaggccgtaggtgagggcggccgccgtggccaggcaacctatgggtaccaccgggttctcgcgggcaagtcaagctgggaggaccaaggccgggcagccgggagcacccaaggcaggaaaatgaggtggctgcttctctattatgctctgtgcttctccctgtcaaaggcttcagcccacaccgtggagctaaacaatatgtttggccagatccagtcgcctggttatccagactcctatcccagtgattcagaggtgacttggaatatcactgtcccagatgggtttcggatcaagctttacttcatgcacttcaacttggaatcctcctacctttgtgaatatgactatgtgaaggtagaaactgaggaccaggtgctggcaaccttctgtggcagggagaccacagacacagagcagactcccggccaggaggtggtcctctcccctggctccttcatgtccatcactttccggtcagatttctccaatgaggagcgtttcacaggctttgatgcccactacatggctgtggatgtggacgagtgcaaggagagggaggacgaggagctgtcctgtgaccactactgccacaactacattggcggctactactgctcctgccgcttcggctacatcctccacacagacaacaggacctgccgagtggagtgcagtgacaacctcttcactcaaaggactggggtgatcaccagccctgacttcccaaacccttaccccaagagctctgaatgcctgtataccatcgagctggaggagggtttcatggtcaacctgcagtttgaggacatatttgacattgaggaccatcctgaggtgccctgcccctatgactacatcaagatcaaagttggtccaaaagttttggggcctttctgtggagagaaagccccagaacccatcagcacccagagccacagtgtcctgatcctgttccatagtgacaactcgggagagaaccggggctggaggctctcatacagggctgcaggaaatgagtgcccagagctacagcctcctgtccatgggaaaatcgagccctcccaagccaagtatttcttcaaagaccaagtgctcgtcagctgtgacacaggctacaaagtgctgaaggataatgtggagatggacacattccagattgagtgtctgaaggatgggacgtggagtaacaagattcccacctgtaaaattgtagactgtagagccccaggagagctggaacacgggctgatcaccttctctacaaggaacaacctcaccacatacaagtctgagatcaaatactcctgtcaggagccctattacaagatgctcaacaataacacaggtatatatacctgttctgcccaaggagtctggatgaataaagtattggggagaagcctacccacctgccttccagtgtgtgggctccccaagttctcccggaagctgatggccaggatcttcaatggacgcccagcccagaaaggcaccactccctggattgccatgctgtcacacctgaatgggcagcccttctgcggaggctcccttctaggctccagctggatcgtgaccgccgcacactgcctccaccagtcactcgatccgaaagatccgaccctacgtgattcagacttgctcagcccttctgacttcaaaatcatcctgggcaagcattggaggctccggtcagatgaaaatgaacagcatctcggcgtaaaacacaccactctccaccccaagtatgatcccaacacattcgagaatgacgtggctctggtggagctgttggagagcccagtgctgaatgccttcgtgatgcccatctgtctgcctgagggaccccagcaggaaggagccatggtcatcgtcagcggctggggaaagcagttcttgcaaaggttcccagagaccctgatggagattgaaatcccgattgttgaccacagcacctgccagaaggcttatgccccgctgaagaagaaagtgaccagggacatgatctgtgctggggagaaggaagggggaaaggacgcctgttcgggtgactctggaggccccatggtgaccctgaatagagaaagaggccagtggtacctggtgggcactgtgtcctggggtgatgactgtgggaagaaggaccgctacggagtatactcttacatccaccacaacaaggactggatccagagggtcaccggagtgaggaactgaatttggctcctcagccccagcaccaccagctgtgggcagtcagtagcagaggacgatcctccgatgaaagcagccatttctcctttccttcctcccatcccccctccttcggcctatccattactgggcaatagagcaggtatcttcacccccttttcactctctttaaagagatggagcaagagagtggtcagaacacaggccgaatccaggctctatcacttactagttttcagttctgggcaggtgacttcatctcttcgaacttcagtttcttcataagatggaaatgctataccttacctacctcgtaaaagtctgatgaggaaaagattaactaatagatgcatagcacttaacagagtgcatagcatacactgttttcaataaatgcaccttagcagaaggtcgatgtgtctaccaggcagacgaagctctcttacaaacccctgcctgggtcttagcattgatcagtgacacacctctcccctcaaccttgaccatctccatctgcccttaaatgctgtatgcttttttgccaccgtgcaacttgcccaacatcaatcttcaccctcatccctaaaaaagtaaaacagacaaggttctgagtcctgtggtatgtcccctagcaaatgtagctaggaacatgcactagatgccagattgcgggagggcctgagagaagcagggacaggagggagcctggggattgtggtttgggaaggcagacacctggttctagaactagctctgcccttagccccctgtatgaccctatgcaagtcctcctccctcatctcaaagggtcctccaagctctgacgatctaagatacaataaagccattttccccctgataagatgaggtaaagccaatgtaaccaaaaggcaaaaattacaatcggttcaaaggaactttgatgcagacaaaatgctgctgctgctgctcctgaaatacccacccctttccactacgggtgggttcccaagaacatggaacaggcaaagtgtgagccaaaggatccttccttattcctaagcagagcatctgctctgggccctggcctccttcccttcttgggaaactgggctgcatgaaggtgggccctggtagtttgtaccccaaggcccctatactcttccttcctatgtccacagctgaccccaagcagccgttccccgactcctcacccctgagcctcaccctgaactccctcatcttgcaaggccataagtgttttccaagcaaaatgcctctcccatcctctctcaggaagcttctagagactttatgccctccagagctccaagatataagccctccaagggatcagaagctccaagttcctgtcttctgttttatagaaattgatcttccctgggggactttaactcttgacctgtatgcagctgttggagtaattccaggtctcttgaaaaaaaagaggaagataatggagaatgagaacatatatatatatatattaagccccaggctgaatacccagggacagcaattcacagcctgcctctggttctataaacaagtcattctacctctttgtgccctgctgtttattctgtaaggggaaggtggcaatgggacccagctccatcagacacttgtcaagctagcagaaactccattttcaatgccaaagaagaactgtaatgctgttttggaatcatcccaaggcatcccaaaacaccatatcttcccatttcaagcactgcctgggcacaccccaacatcccaggctgtggtggctcctgtgggaactacctagatgaagagagtatcatttataccttctaggagctcctattgggagacatgaaacatatgtaattgactaccatgtaatagaacaaaccctgccaagtgctgctttggaaagtcatggaggtaaaagaaagacccgaaattc

SEQ ID NO: 722 - DNA, 1492 bp, Homo sapiens
ttaggctgtaattaggggatttgggaggagaactttcctggtgacgctttgcttttcttctgctcttggtgagaaagtgcctccttcttcccaggatcaggacctctgccatccagcgccacaaagagacattctgcacacacactcacacacacacacacacacacactctcacactcgcccagagacaaacttaaggtgaggagaaagagcgctagcttcacttgatctccagcttccaacttaagcagaacttgagagcatccgaactcctggatttcaggacaagtgaagaagattctttgggctataaagatgaagagtctacttcttctggtgctgatttcaatctgctgggctgatcatctttcagacaactatactctggatcatgacagagctattcacatccaagcagaaaatggcccccatctacttgtggaagcagagcaagccaaggtgttttcacacagaggtggcaatgttacactgccatgtaaattttatcgagaccctacagcatttggctcaggaatccataaaatccgaattaagtggaccaagctaacttcggattacctcaaggaagtggatgtttttgtttccatgggataccacaaaaaaacctatggaggctaccagggtagagtgtttctgaagggaggcagtgatagtgatgcttctctggtcatcacagacctcactctggaagattatgggagatataagtgtgaggtgattgaaggattagaagatgatactgttgtggtagcactggacttacaaggtgtggtattcccttactttccacgactggggcgctacaatctcaattttcacgaggcgcagcaggcgtgtctggaccaggatgctgtgatcgcctccttcgaccagctgtacgacgcctggcggggcgggctggactggtgcaatgccggctggctcagtgatggctctgtgcaatatcccatcacaaagcccagagagccctgtgggggccagaacacagtgcccggagtcaggaactacggattttgggataaagataaaagcagatatgatgttttctgttttacatccaatttcaatggccgtttttactatctgatccaccccaccaaactgacctatgatgaagcggtgcaagcttgtctcaatgatggtgctcagattgcaaaagtgggccagatatttgctgcctggaaaattctcggatatgaccgctgtgatgcgggctggttggcggatggcagcgtccgctaccccatctctaggccaagaaggcgctgcagtcctactgaggctgcagtgcgcttcgtgggttttccagataaaaagcataagctgtatggtgtctactgcttcagagcatacaactgaatgtgcccttagagcgcactagttttaaagtcattaagaacatgtgaaaggtgttttttttttccaatatgaactcatgcaagttaccaaaactgtgataacccttttttac

SEQ ID NO: 723 - DNA, 981 bp, Homo sapiens
tcaacacaacttgcttctctccagacttgggcttaaggctctgataaccatgaggcttctcattctcacctgtcttgtggctgttgctcttgccaggcctaaacttcctcttagatacccagaacgccttcagaatccatcagagagcagtgagcctataccattagaatcaagagaggaatacatgaatggtatgaacaggcagagaaacattctgagagaaaaacagactgatgaaatcaaggatactaggaatgagtctactcagaactgtgttgtggcagagcctgagaagatggaatccagcatcagttcatcgagtgaggaaatgtctctcagtaagtgtgcggaacagttttgtagactgaacgaatacaaccaacttcagctgcaagctgcccatgcccaggagcaaattcgcagaatgaatgaaaacagccatgtccaagtgcctttccagcagctcaaccaacttgctgcctacccctatgctgtttggtactatccacaaatcatgcagtatgttcctttcccaccgttttccgacatctccaatcccactgctcatgaaaattatgaaaaaaataacgtcatgctacagtggtgatatgattgaaaatttcattctctgaatttctcctctcaaggaaaaccatcttatctgaagactggactgttgttttagaatagtaaaatcccatattgaaggaaattgttctttttgagttatctacttaatagcatatcattctttttcttaagctaaattttcctagagagtttattgtctaaatttcagttgtgtcttgccatatggagggcacctaatcagagggtattaaagtgtttactaagttttctagtggacattttgtttaaaaagtctttgaattgccagttctgtaagtgccatcaattaaaatagttttgtgcagtgacagagattttcttttttcttttcaataaattacactttaaggc

SEQ ID NO: 724 - DNA, 2080 bp, Homo sapiens
ggcacgagggtaaaggcctccgtgttccgtttcctgccgccctcctccgtagccttgcctagtgtaggagccccgaggcctccgtcctcttcccagaggtgtcggggcttggccccagcctccatcttcgtctctcaggatggcgagtagcagcggctccaaggctgaattcattgtcggagggaaatataaactggtacggaagatcgggtctggctccttcggggacatctatttggcgatcaacatcaccaacggcgaggaagtggcagtgaagctagaatctcagaaggccaggcatccccagttgctgtacgagagcaagctctataagattcttcaaggtggggttggcatcccccacatacggtggtatggtcaggaaaaagactacaatgtactagtcatggatcttctgggacctagcctcgaagacctcttcaatttctgttcaagaaggttcacaatgaaaactgtacttatgttagctgaccagatgatcagtagaattgaatatgtgcatacaaagaattttatacacagagacattaaaccagataacttcctaatgggtattgggcgtcactgtaataagttattccttattgattttggtttggccaaaaagtacagagacaacaggacaaggcaacacataccatacagagaagataaaaacctcactggcactgcccgatatgctagcatcaatgcacatcttggtattgagcagagtcgccgagatgacatggaatcattaggatatgttttgatgtattttaatagaaccagcctgccatggcaagggctaaaggctgcaacaaagaaaaaaaaatatgaaaagattagtgaaaagaagatgtccacgcctgttgaagttttatgtaaggggtttcctgcagaatttgcgatgtacttaaactattgtcgtgggctacgctttgaggaagccccagattacatgtatctgaggcagctattccgcattcttttcaggaccctgaaccatcaatatgactacacatttgattggacaatgttaaagcagaaagcagcacagcaggcagcctcttccagtgggcagggtcagcaggcccaaacccccacaggcaagcaaactgacaaaaccaagagtaacatgaaaggtttctaagcatgaattgaggaacagaagaagcagagcagatgatcggagcagcatttgtttctccccaaatctagaaattttagttcatatgtacactagccagtggttgtggacaaccatttacttggtgtaaagaacttaatttcagtataaactgactctgggcagcattggtgatgctgtatcctgagttgtagcctctgtaattgtgaatattaactgagatagtgaaacatggtgtccggttttctattgcattttttcaagtggaaaagttaactaaatggttgacacacaaaaattggtggagaaattgtgcatatgccaatttttttgttaaaaccttttgttttgaactatactgctttgagatctcatttcagaagaacggcatgaacagtcttcagccacagttgtgatggttgttaaatgctcacaattgtgcattcttagggtttttccatccctggggtttgcaagttgttcacttaaaacattcttaaaatggttggcttcttgtctgcaagccagctgatatggtagcaaccaaagattccagtgtttgagcatatgaaagactctgcctgcttaattgtgctagaaataacagcatctaaagtgaagacttaagaaaaacttagtgactactagattatccttaggactctgcattaactctataatgttcttggtattaaaaaaaaagcatatttgtcacagaaatttagttaacatcttacaactgaacatgtatgtatgttgcttagataaatgtaatcactgtaaacatctatatgatctgggattttgtttttattttgaaatgggagcttttttgtttacaagttcattaaaaactaaaaactgtttctgtaaaaaaaaaaaaaaaaaaaaaaaaaaaaaaaaaaaaaaaaaaaaaaaaaaaaaaaaaaa

SEQ ID NO: 725 - DNA, 2030 bp, Homo sapiens
gcgcgatggcggcggctcctttaggcagctgaaaggggatttaggcccggaagatccgagtccatccgcggcggggagagggcaagcgggaccggtaggggccggagcagcggcggcggcgctcggactgtcccatccgccccgtattgaggcgctgggagcggcggggcgacaggaaagcgatggtgaaagcggggccgtgaggggggcggagccgggagccggacccgcagtagcggcagcagcggcgccgcctcccagagttcagacccaggaagcggccgggagggcaggagcgaatcgggccgccgccgccatggagctgagagtcgggaacaggtaccggctgggccggaagatcggcagcggctccttcggagacatctatctcggtacggacattgctgcaggagaagaggttgccatcaagcttgaatgtgtcaaaaccaaacaccctcagctccacattgagagcaaaatctacaagatgatgcagggaggagtgggcatccccaccatcagatggtgcggggcagagggggactacaacgtcatggtgatggagctgctggggccaagcctggaggacctcttcaacttctgctccaggaaattcagcctcaaaaccgtcctgctgcttgctgaccaaatgatcagtcgcatcgaatacattcattcaaagaacttcatccaccgggatgtgaagccagacaacttcctcatgggcctggggaagaagggcaacctggtgtacatcatcgacttcgggctggccaagaagtaccgggatgcacgcacccaccagcacatcccctatcgtgagaacaagaacctcacggggacggcgcggtacgcctccatcaacacgcaccttggaattgaacaatcccgaagagatgacttggagtctctgggctacgtgctaatgtacttcaacctgggctctctcccctggcaggggctgaaggctgccaccaagagacagaaatacgaaaggattagcgagaagaaaatgtccacccccatcgaagtgttgtgtaaaggctacccttccgaatttgccacatacctgaatttctgccgttccttgcgttttgacgacaagcctgactactcgtacctgcggcagcttttccggaatctgttccatcgccagggcttctcctatgactacgtgttcgactggaacatgctcaaatttggtgccagccgggccgccgatgacgccgagcgggagcgcagggaccgagaggagcggctgagacactcgcggaacccggctacccgcggcctcccttccacagcctccggccgcctgcgggggacgcaggaagtggctccccccacacccctcacccctacctcacacacggctaacacctccccccggcccgtctccggcatggagagagagcggaaagtgagtatgcggctgcaccgcggggcccccgtcaacatctcctcgtccgacctcacaggccgacaagatacctctcgcatgtccacctcacagattcctggtcgggtggcttccagtggtcttcagtctgtcgtgcaccgatgagaactctccttattgctgtgaagggcagacaatgcatggctgatctactctgttaccaatggctttactagtgacacgtcccccggtctaggatcgaaatgttaacaccgggagctctccaggccactcacccagcgacgctcgtgggggaaacatactaaacggacagactccaagagctgccaccgctggggctgcactgcggccccccacgtgaactcggttgtaacggggctgggaagaaaagcagagagagaattgcagagaatcagactccttttccagggcctcagctccctccagtggtggccgccctgtactccctgacgattccactgtaactaccaatcttctacttggttaagacagttttgtatcattttgctaaaaattattggcttaaatctgtgtaaagaaaaaaaaaaaaaaaaaaaaaaaaaaaaaaaaaaaaaaaaaaaaaaaaaaa

SEQ ID NO: 726 - DNA, 7918 bp, Homo sapiens
  misc_feature (7434)..(7434): n is a, c, g, or t
atgcagtccggccgcggccccccacttccagcccccggcctggccttggctttgaccctgactatgttggccagacttgcatccgcggcttccttcttcggtgagaaccacctggaggtgcctgtggccacggctctgaccgacatagacctgcagctgcagttctccacgtcccagcccgaagccctccttctcctggcagcaggcccagctgaccacctcctgctgcagctctactctggacgcctgcaggtcagacttgttctgggccaggaggagctgaggctgcagactccagcagagacgctgctgagtgactccatcccccacactgtggtgctgactgtcgtagagggctgggccacgttgtcagtcgatgggtttctgaacgcctcctcagcagtcccaggagcccccctagaggtcccctatgggctctttgttgggggcactgggacccttggcctgccctacctgaggggaaccagccgacccctgaggggttgcctccatgcagccaccctcaatggccgcagcctcctccggcctctgacccccgatgtgcatgagggctgtgctgaagagttttctgccagtgatgatgtggccctgggcttctctgggccccactctctggctgccttccctgcctggggcactcaggacgaaggaaccctagagtttacactcaccacacagagccggcaggcacccttggccttccaggcagggggccggcgtggggacttcatctatgtggacatatttgagggccacctgcgggccgtggtggagaagggccagggtaccgtattgctccacaacagtgtgcctgtggccgatgggcagccccatgaggtcagtgtccacatcaatgctcaccggctggaaatctccgtggaccagtaccctacgcatacttcgaaccgaggagtcctcagctacctggagccacggggcagtctccttctcggggggctggatgcagaggcctctcgtcacctccaggaacaccgcctgggcctgacaccagaggccaccaatgcctccctgctgggctgcatggaagacctcagtgtcaatggccagaggcgggggctgcgggaagctttgctgacgcgcaacatggcagccggctgcaggctggaggaggaggagtatgaggacgatgcctatggccattatgaagctttctccaccctggctcccgaggcttggccagccatggagctgcctgagccatgcgtgcctgagccagggctgcctcctgtctttgccaatttcacccagctgctgactatcagcccactggtggtggccgagggtggcacagcctggcttgagtggaggcatgtgcagcccacgctggacctgatggaggctgagctgcgcaaatcccaggtgctgttcagcgtgacccgaggggcacactatggcgagctcgagctggacatcctgggtgcccaggcacgaaaaatgttcaccctcctggacgtggtgaaccgcaaggcccgcttcatccacgatggctctgaggacacctccgaccagctggtgctggaggtgtcggtgacggctcgggtgcccatgccctcatgccttcggaggggccaaacatacctcctgcccatccaggtcaaccctgtcaatgacccaccccacatcatcttcccacatggcagcctcatggtgatcctggaacacacgcagaagccgctggggcctgaggttttccaggcctatgacccggactctgcctgtgagggcctcaccttccaggtccttggcacctcctctggcctccccgtggagcgccgagaccagcctggggagccggcgaccgagttctcctgccgggagttggaggccggcagcctagtctatgtccactgcggtggtcctgcacaggacttgacgttccgggtcagcgatggactgcaggccagccccccggccacgctgaaggtggtggccatccggccggccatacagatccaccgcagcacagggttgcgactggcccaaggctctgccatgcccatcttgcccgccaacctgtcggtggagaccaatgccgtggggcaggatgtgagcgtgctgttccgcgtcactggggccctgcagtttggggagctgcagaagcatagtacaggtggggtggagggtgctgagtggtgggccacacaggcgttccaccagcgggatgtggagcagggccgcgtgaggtacctgagcactgacccacagcaccacgcttacgacaccgtggagaacctggccctggaggtgcaggtgggccaggagatcctgagcaatctgtccttcccagtgaccatccagagagccactgtgtggatgctgcggctggagccactgcacactcagaacacccagcaggagaccctcaccacagcccacctggaggccaccctggaggaggcaggcccaagccccccaaccttccattatgaggtggttcaggctcccaggaaaggcaaccttcaactacagggcacaaggctgtcagatggccagggcttcacccaggatgacatacaggctggccgggtgacctatggggccacagctcgtgcctcagaggcagtcgaggacaccttccgtttccgtgtcacagctccaccatatttctccccactctataccttccccatccacattggtggtgacccagatgcgcctgtcctcaccaatgtcctcctcgtggtgcctgagggtggtgagggtgtcctctctgctgaccacctctttgtcaagagtctcaacagtgccagctacctctatgaggtcatggagcggccccgccttgggaggttggcttggcgtgggacacaggacaagaccactatggtgacatccttcaccaatgaagacctgttgcgtggccggctggtctaccagcatgatgactccgagaccacagaagatgatatcccatttgttgctacccgccagggcgagagcagtggtgacatggcctgggaggaggtacggggtgtcttccgagtggccatccagcccgtgaatgaccacgcccctgtgcagaccatcagccggatcttccatgtggcccggggtgggcggcggctgctgactacagacgacgtggccttcagcgatgctgactcgggctttgctgacgcccagctggtgcttacccgcaaggacctcctctttggcagtatcgtggccgtagatgagcccacgcggcccatctaccgcttcacccaggaggacctcaggaagaggcgagtactgttcgtgcactcaggggctgaccgtggctggatccagctgcaggtgtccgacgggcaacaccaggccactgcgctgctggaggtgcaggcctcggaaccctacctccgtgtggccaacggctccagccttgtggtccctcaaggaggccagggcaccatcgacacggccgtgctccacctggacaccaacctcgacatccgcagtggggatgaggtccactaccacgtcacagctggccctcgctggggacaactagtccgggctggtcagccagccacagccttctcccagcaggacctgctggatggggccgttctctatagccacaatggcagcctcagccccgaagacaccatggccttctccgtggaagcagggccagtgcacacggatgccaccctacaagtgaccattgccctagagggcccactggccccactgaagctggtccggcacaagaagatctacgtcttccagggagaggcagctgagatcagaagggaccagctggaggcagcccaggaggcagtgccacctgcagacatcgtattctcagtgaagagcccaccgagtgccggctacctggtgatggtgtcgcgtggcgccttggcagatgagccacccagcctggaccctgtgcagagcttctcccaggaggcagtggacacaggcagggtcctgtacctgcactcccgccctgaggcctggagcgatgccttctcgctggatgtggcctcaggcctgggtgctcccctcgagggcgtccttgtggagctggaggtgctgcccgctgccatcccactagaggcgcaaaacttcagcgtccctgagggtggcagcctcaccctggcccctccactgctccgtgtctccgggccctacttccccactctcctgggcctcagcctgcaggtgctggagccaccccagcatggacccctgcagaaggaggacggacctcaagccaggaccctcagcgccttctcctggagaatggtggaagagcagctgatccgctacgtgcatgacgggagcgagacactgacagacagttttgtcctgatggctaatgcctccgagatggatcgccagagccatcctgtggccttcactgtcactgtcctgcctgtcaatgaccaaccccccatcctcactacaaacacaggcctgcagatgtgggagggggccactgcgcccatccctgcggaggctctgaggagcacggacggcgactctgggtctgaggatctggtctacaccatcgagcagcccagcaacgggcgggtagtgctgcggggggcgccgggcactgaggtgcgcagcttcacgcaggcccagctggacggcgggctcgtgctgttctcacacagaggaaccctggatggaggcttcccgttccgcctctctgacggcgagcacacttcccccggacacttcttccgagtgacggcccagaagcaagtgctcctctcgctgaagggcagccagacactgactgtctgcccagggtccgtccagccactcagcagtcagaccctcagggccagctccagcgcaggcactgacccccagctcctgctctaccgtgtggtgcggggcccccagctaggccggctgttccacgcccagcaggacagcacaggggaggccctggtgaacttcactcaggcagaggtctacgctgggaatattctgtatgagcatgagatgccccccgagcccttttgggaggcccatgataccctagagctccagctgtcctcgccgcctgcccgggacgtggccgccacccttgctgtggctgtgtcttttgaggctgcctgtccccagcgccccagccacctctggaagaacaaaggtctctgggtccccgagggccagcgggccaggatcaccgtggctgctctggatgcctccaatctcttggccagcgttccatcaccccagcgctcagagcatgatgtgctcttccaggtcacacagttccccagccggggccagctgttggtgtccgaggagcccctccatgctgggcagccccacttcctgcagtcccagctggctgcagggcagctagtgtatgcccacggcggtgggggcacccagcaggatggcttccactttcgtgcccacctccaggggccagcaggggcctccgtggctggaccccaaacctcagaggcctttgccatcacggtgagggatgtaaatgagcggccccctcagccacaggcctctgtcccactccggctcacccgaggctctcgtgcccccatctcccgggcccagctgagtgtggtggacccagactcagctcctggggagattgagtacgaggtccagcgggcaccccacaacggcttcctcagcctggtgggtggtggcctggggcccgtgacccgcttcacgcaagccgatgtggattcagggcggctggccttcgtggccaacgggagcagcgtggcaggcatcttccagctgagcatgtctgatggggccagcccacccctgcccatgtccctggctgtggacatcctaccatccgccatcgaggtgcagctgcgggcacccctggaggtgccccaagctttggggcgctcctcactgagccagcagcagctccgggtggtttcagatcgggaggagccagaggcagcataccgcctcatccagggaccccagtatgggcatctcctggtgggcgggcggcccacctcggccttcagccaattccagatagaccagggcgaggtggtctttgccttcaccaacttctcctcctctcatgaccacttcagagtcctggcactggctaggggtgtcaatgcatcagccgtagtgaacgtcactgtgagggctctgctgcatgtgtgggcaggtgggccatggccccagggtgccaccctgcgcctggaccccaccgtcctagatgctggcgagctggccaaccgcacaggcagtgtgccgcgcttccgcctcctggagggaccccggcatggccgcgtggtccgcgtgccccgagccaggacggagcccgggggcagccagctggtggagcagttcactcagcaggaccttgaggacgggaggctggggctggaggtgggcaggccagaggggagggcccccggccccgcaggtgacagtctcactctggagctgtgggcacagggcgtcccgcctgctgtggcctccctggactttgccactgagccttacaatgctgcccggccctacagcgtggccctgctcagtgtccccgaggccgcccggacggaagcagggaagccagagagcagcacccccacaggcgagccaggccccatggcatccagccctgagcccgctgtggccaagggaggcttcctgagcttccttgaggccaacatgttcagcgtcatcatccccatgtgcctggtacttctgctcctggcgctcatcctgcccctgctcttctacctccgaaaacgcaacaagacgggcaagcatgacgtccaggtcctgactgccaagccccgcaacggcctggctggtgacaccgagacctttcgcaaggtggagccaggccaggccatcccgctcacagctgtgcctggccaggggccccctccaggaggccagcctgacccagagctgctgcagttctgccggacacccaaccctgcccttaagaatggccagtactgggtgtgaaggcctggcctgggcccagatgctgatcgggccagggacaggcttgcccatgtcccgggccccattgcttccatgcccggtgctgtctgagtatccccagagcaagagagacctggagacaccaggggtggagggtcctgggagatagtcccaggggtccgggacagagtggagtcaagagctggaacctccctcagctcactccgagcctggagaactgcaggggccaaggtggaggcaggcttaagttcagtcctcctgccctggagctggtttgggctgtcaaaaccagggtaacctcctacatgggtcatgactctgggtcctgggtctgtgaccttgggtaagtcgcgcctgacccaggctgctaagagggcaaggagaaggaagtaccctggggagggaagggacagaggaagctattcctggcttttctactccaacccaggccaccctttgtctctnccccagagttgagaaaaaaacttcctcccctggttttttagggagatggtatcccctggagtagagggcaagaggagagagcgcctccagtctagaaggcataagccaataggataatatattcagggtgcagggtgggtaggttgctctggggatgggtttatttaagggagattgcaaggaagctatttaacatggtgctgagctagccaggactgatggagcccctgggggtgtgggatggaggagggtctgcagccagttcattcccagggccccatcttgatgggccaagggctaaacatgcatgtgtcagtggctttggagcaggctaggctggggctcatcgagggtctcaggccgaggccactgtagtgccagtgcccccctgaggactagggcaggcagctgggggcacttggttccatggagcctggataaacagtgctttggaggctctggaaaaaaaaaaaaaaaaaaaaaa

SEQ ID NO: 727 - DNA, 2312 bp, Homo sapiens
tccagtgacggagccgcccggccgacagccccgagacgacagcccggcgcgtcccggtccccacctccgaccaccgccagcgctccaggccccgcgctccccgctcgccgccaccgcgccctccgctccgcccgcagtgccaaccatgaccgccgccagtatgggccccgtccgcgtcgccttcgtggtcctcctcgccctctgcagccggccggccgtcggccagaactgcagcgggccgtgccggtgcccggacgagccggcgccgcgctgcccggcgggcgtgagcctcgtgctggacggctgcggctgctgccgcgtctgcgccaagcagctgggcgagctgtgcaccgagcgcgacccctgcgacccgcacaagggcctcttctgtgacttcggctccccggccaaccgcaagatcggcgtgtgcaccgccaaagatggtgctccctgcatcttcggtggtacggtgtaccgcagcggagagtccttccagagcagctgcaagtaccagtgcacgtgcctggacggggcggtgggctgcatgcccctgtgcagcatggacgttcgtctgcccagccctgactgccccttcccgaggagggtcaagctgcccgggaaatgctgcgaggagtgggtgtgtgacgagcccaaggaccaaaccgtggttgggcctgccctcgcggcttaccgactggaagacacgtttggcccagacccaactatgattagagccaactgcctggtccagaccacagagtggagcgcctgttccaagacctgtgggatgggcatctccacccgggttaccaatgacaacgcctcctgcaggctagagaagcagagccgcctgtgcatggtcaggccttgcgaagctgacctggaagagaacattaagaagggcaaaaagtgcatccgtactcccaaaatctccaagcctatcaagtttgagctttctggctgcaccagcatgaagacataccgagctaaattctgtggagtatgtaccgacggccgatgctgcaccccccacagaaccaccaccctgccggtggagttcaagtgccctgacggcgaggtcatgaagaagaacatgatgttcatcaagacctgtgcctgccattacaactgtcccggagacaatgacatctttgaatcgctgtactacaggaagatgtacggagacatggcatgaagccagagagtgagagacattaactcattagactggaacttgaactgattcacatctcatttttccgtaaaaatgatttcagtagcacaagttatttaaatctgtttttctaactgggggaaaagattcccacccaattcaaaacattgtgccatgtcaaacaaatagtctatcttccccagacactggtttgaagaatgttaagacttgacagtggaactacattagtacacagcaccagaatgtatattaaggtgtggctttaggagcagtgggagggtaccagcagaaaggttagtatcatcagatagctcttatacgagtaatatgcctgctatttgaagtgtaattgagaaggaaaattttagcgtgctcactgacctgcctgtagccccagtgacagctaggatgtgcattctccagccatcaagagactgagtcaagttgttccttaagtcagaacagcagactcagctctgacattctgattcgaatgacactgttcaggaatcggaatcctgtcgattagactggacagcttgtggcaagtgaatttcctgtaacaagccagattttttaaaatttatattgtaaatattgtgtgtgtgtgtgtgtgtgtatatatatatatatatgtacagttatctaagttaatttaaagttgtttgtgcctttttatttttgtttttaatgctttgatatttcaatgttagcctcaatttctgaacaccataggtagaatgtaaagcttgtctgatcgttcaaagcatgaaatggatacttatatggaaattctctcagatagaatgacagtccgtcaaaacagattgtttgcaaaggggaggcatcagtgtccttggcaggctgatttctaggtaggaaatgtggtagctcacgctcacttttaatgaacaaatggcctttattaaaaactgagtgactctatatagctgatcagttttttcacctggaagcatttgtttctactttgatatgactgtttttcggacagtttatttgttgagagtgtgaccaaaagttacatgtttgcacctttctagttgaaaataaagtatattttttctaaaaaaaaaaaaaaacgacagcaacggaattc

SEQ ID NO: 728 - DNA, 3454 bp, Homo sapiens
ggaaatgactgctgtccatgcaggcaacataaacttcaagtgggatcctaaaagtctagagatcaggactctggcagttgagagactgttggagcctcttgttacacaggttacaacccttgtaaacaccaatagtaaagggccctctaataagaagagaggtcgttctaagaaggcccatgttttggctgcatctgttgaacaagcaactgagaatttcttggagaagggggataaaattgcaaaagagagccagtttctcaaggaggagcttgtggttgctgtagaagatgttcgaaaacaaggtgatttgatgaaggctgctgctggagagttcgcagatgatccctgctcttctgtgaagcgaggcaacatggttcgggcagctcgagctttgctctctgctgttacccggttgctcattttggctgacatggcagatgtctacaaattacttgttcagctgaaagttgtggaagatggtatattgaaactgaggaatgctggcaatgaacaagacttagggaatcagtataaagccctaaaacctgaagtggataagctgaacattatggcagcaaaaagacaacaggaattgaaagatgttgggcatcgtgatcagatggctgcggctagaggaatcctgcagagcaacgttccgatcctctatactgcatcccaggcatgcctacagcaccctgatgtcgcagcctataaggccaacagggacctgatatacaagcagctgcagcaggcggtcacagggatttccaatgcagcccaggccactgcctcagacgatgcctcacagcaccagggtggaggaggaggagaactggcatatgcactcaataactttgacaaacaaatcattgtggaccccttgagcttcagcgaggagcgctttaggccttccctggaggagcgtctggaaagcatcattagtggggctgccttgatggccgactcgtcctgcacgcgtgatgaccgtcgtgagcgaattgtggcagagtgtaatgctgtccgccaggcctgcaggacctgcgtttcggagtacatgggcaatgctggacgtaaagaaagaagtgatgcactcaattctgcaatagataaaatgaccaagaagaccagggacttgcgtagacagcttcgcaaagctgtcatggaccacgtttcagattctttcctggaaaccaatgttccacttttggtattgattgaagctgcaaagaatggaaatgagaaagaagttaaggaatatgcccaagttttccgtgaacatgccaacaaattgattgaggttgccaacttggcctgttccatctcaaataatgaagaaggtgtaaagcttgttcgaatgtctgcaagccagttagaagccggttgtcctcaggttattaatgctgcaacctgggctttagcaccaaaaccacagagtaaactggcccaagagaacatggatctttttaaagaacaatgggaaaaacaagtccgtgttctcacagatgctgtcgatgacattacttccattgatgacttcttggctgtctcagagaatcacattttggaagatgtgaacaaatgtgtcattgctctccaagagaaggatgtggatggcctggaccgcacagctggtgcaattcgaggccgggcagcccgggtcattcacgtagtcacctcagagatggacaactatgagccaggagtctacacagagaaggttctggaagccactaagctgctctccaacacagtcatgccacgttttactgagcaagtagaagcagccgtggaagccctcagctcggaccctgcccagcccatggatgagaatgagtttatcgatgcttcccgcctggtatatgatggcatccgggacatcaggaaagcagtgctgatgataaggacccctgaggagttggatgactctgactttgagacagaggattttgatgtcagaagcgagacgagcgtccagacagaagacgatcagctgatagctggccagagtgcccgggcgatcatggctcagcttccccaggagcaaaaagcgaagattcgggaacaggtggccagcttccaggaagaaaagagcaagctggatgctgaagtgtccaaatgggacgacagtggcaatgacatcattgtgctggccaagcagatgtgcatgattatgatggagatgacagactttacccgaggtaaaggaccactcaaaaatacatcggatgtcatcagtgctgccaagaaaattgctgaggcaggatccaggatggacaagcttggccggaccattcgagaccattgccccgactcggcttgcaagcaggacctgctggcctacctgcaacgcatcgccctctactgccaccagctgaacatctgcagcaaggtcaaggccgaggtgcagaatctcggcggggagcttgttgtctctggggtggacagcgccatgtccctgatccaggcagccaagaacttgatgaatgctgtggtgcagacagtgaaggcatcctacgtcgcctctaccaaataccaaaagtcacagggtatggcttccctcaaccttcctgctgtgtcaatgaagatgaaggcaccagagaaaaagccattggtgaagagagagaaacaggatgagacacagaccaagattaaacgggcatctcagaagaagcacgtgaacccagtgcaggccctcagcgagttcaaagctatggacagcatctaagtctgcccaggccggccgcccccacccctctggctcctgaatatcagtcactgttcgtcactcaaatgaatttgctaaatacaacactgatactagattccacagggaaatgggcagactgaaccagtccaggtggtgaattttccaagaacatagtttaagttgattaaaaatgcttttagaatgcaggagcctacttctagctgtattttttgtatgcttaaataaaataaaattcataaccaagagatccacattagcttgttagtaatgctctgaccaagccgagatgccattctcttagtgatggcggcgttaggtttgagagaaggaattggctcaacttcagttgagagggtgcagtccagacagcttgactgcttttaaatgaccaaagatgacctgtggtaagcaacctggcatcttaggaagcagtccttgagaaggcatgttccagaaaggtctctgaggacaaactcactcagtaaaacataatgtatcatgaagaaaactgattctctatgacatgaaatgaaaattttaatgcattgttataattactaatgtacgctgctgcaggacattaataaagttgcttttttaggctacagtgtctcgatgccataatcagaacacactttttttcctctttctcccagcttcaaatgcacaattcatcattgggctcacttctaataactgcagtgtttccgccttgcgttgcag

SEQ ID NO: 729 - DNA, 865 bp, Homo sapiens
ccctgccagcggcaccatggctttcctctggctcctctcctgctgggccctcctgggtaccaccttcggctgcggggtccccgccatccaccctgtgctcagcggcctgtccaggatcgtgaatggggaggacgccgtccccggctcctggccctggcaggtgtccctgcaggacaaaaccggcttccacttctgcgggggctccctcatcagcgaggactgggtggtcaccgctgcccactgcggggtcaggacctccgacgtggtcgtggctggggagtttgaccagggctctgacgaggagaacatccaggtcctgaagatcgccaaggtcttcaagaaccccaagttcagcattctgaccgtgaacaatgacatcaccctgctgaagctggccacacctgcccgcttctcccagacagtgtccgccgtgtgcctgcccagcgccgacgacgacttccccgcggggacactgtgtgccaccacaggctggggcaagaccaagtacaacgccaacaagacccctgacaagctgcagcaggcagccctgcccctcctgtccaatgccgaatgcaagaagtcctggggcaggaggatcaccgacgtgatgatctgtgccggggccagtggcgtctcctcctgcatgggcgactctggcggtcccctggtctgccaaaaggatggagcctggaccctggtgggcattgtgtcctggggcagcgacacctgctccacctccagccctggcgtgtacgcccgtgtcaccaagctcataccttgggtgcagaagatcctggctgccaactgagcccgcggctccctccgaccctgctccccacagagcctcagtaaacccatggaacac

SEQ ID NO: 730 - DNA, 1184 bp, Homo sapiens
atctgccacgatgttgctgctcagcctgaccctaagcctggttctcctcggctcctcctggggctgcggcattcctgccatcaaaccggcactgagcttcagccagaggattgtcaacggggagaatgcagtgttgggctcctggccctggcaggtgtccctgcaggacagcagcggcttccacttctgcggtggttctctcatcagccagtcctgggtggtcactgctgcccactgcaatgtcagccctggccgccattttgttgtcctgggcgagtatgaccgatcatcaaacgcagagcccttgcaggttctgtccgtctctcgggccattacacaccctagctggaactctaccaccatgaacaatgacgtgacgctgctgaagctcgcctcgccagcccagtacacaacacgcatctcgccagtttgcctggcatcctcaaacgaggctctgactgaaggcctcacgtgtgtcaccaccggctggggtcgcctcagtggcgtgggcaatgtgacaccagcacatctgcagcaggtggctttgcccctggtcactgtgaatcagtgccggcagtactggggctcaagtatcactgactccatgatctgtgcaggtggcgcaggtgcctcctcgtgccagggtgactccggaggccctcttgtctgccagaagggaaacacatgggtgcttattggtattgtctcctggggcaccaaaaactgcaatgtgcgcgcacctgctgtgtatactcgagttagcaagttcagcacctggatcaaccaggtcatagcctacaactgagctcaccacaggccctccccagctcaacccattaaagacccaggccctgtcccatcatgcattcatgtctgtcttcctggctcaggagaaagaagaggctgttgagggtccgactccctacttggacttctggcacagaaggggctgagtgactccttgagtagcagtggctcttcctagagtagccatgccgaggccggggcccccacccctcctccagggcaaccccttggtcctacagcaagaagccagaactgttggaatgaatggcagccctccctggagaggcagcctgtttactgaatacagaggatacgtttacaaactgaatacgcataataaataactgcacattctccatccaaaaaaaaaaaaaaaa

SEQ ID NO: 731 - DNA, 1996 bp, Homo sapiens
tccggcaacgccaaccgctccgctgcgcgcaggctgggctgcaggctctcggctgcagcgctgggctggtgtgcagtggtgcgaccacggctcacggcagcctcagccacccagatgtaagcgatctggttcccacctcagcctcccgagtagtggatctaggatccggcttccaacatgtggcagctctgggcctccctctgctgcctgctggtgttggccaatgcccggagcaggccctctttccatcccctgtcggatgagctggtcaactatgtcaacaaacggaataccacgtggcaggccgggcacaacttctacaacgtggacatgagctacttgaagaggctatgtggtaccttcctgggtgggcccaagccaccccagagagttatgtttaccgaggacctgaagctgcctgcaagcttcgatgcacgggaacaatggccacagtgtcccaccatcaaagagatcagagaccagggctcctgtggctcctgctgggccttcggggctgtggaagccatctctgaccggatctgcatccacaccaatgcgcacgtcagcgtggaggtgtcggcggaggacctgctcacatgctgtggcagcatgtgtggggacggctgtaatggtggctatcctgctgaagcttggaacttctggacaagaaaaggcctggtttctggtggcctctatgaatcccatgtagggtgcagaccgtactccatccctccctgtgagcaccacgtcaacggctcccggcccccatgcacgggggagggagatacccccaagtgtagcaagatctgtgagcctggctacagcccgacctacaaacaggacaagcactacggatacaattcctacagcgtctccaatagcgagaaggacatcatggccgagatctacaaaaacggccccgtggagggagctttctctgtgtattcggacttcctgctctacaagtcaggagtgtaccaacacgtcaccggagagatgatgggtggccatgccatccgcatcctgggctggggagtggagaatggcacaccctactggctggttgccaactcctggaacactgactggggtgacaatggcttctttaaaatactcagaggacaggatcactgtggaatcgaatcagaagtggtggctggaattccacgcaccgatcagtactgggaaaagatctaatctgccgtgggcctgtcgtgccagtcctgggggcgagatcggggtagaaatgcattttattctttaagttcacgtaagatacaagtttcaggcagggtctgaaggactggattggccaaacatcagacctgtcttccaaggagaccaagtcctggctacatcccagcctgtggttacagtgcagacaggccatgtgagccaccgctgccagcacagagcgtccttccccctgtagactagtgccgtgggagtacctgctgcccagctgctgtggccccctccgtgatccatccatctccagggagcaagacagagacgcaggatggaaagcggagttcctaacaggatgaaagttcccccatcagttcccccagtacctccaagcaagtagctttccacatttgtcacagaaatcagaggagagatggtgttgggagccctttggagaacgccagtctccaggtccccctgcatctatcgagtttgcaatgtcacaacctctctgatcttgtgctcagcatgattctttaatagaagttttatttttcgtgcactctgctaatcatgtgggtgagccagtggaacagcgggagcctgtgctggtttgcagattgcctcctaatgacgcggctcaaaaggaaaccaagtggtcaggagttgtttctgacccactgatctctactaccacaaggaaaatagtttaggagaaaccagcttttactgtttttgaaaaattacagcttcaccctgtcaagttaacaaggaatgcctgtgccaataaaaggtttctccaacttga

SEQ ID NO: 732 - DNA, 2126 bp, Homo sapiens
ggcacgaggaagcgcacggcctcggcgaccctctccgacccggccgccgccgccatgcagccctccagccttctgccgctcgccctctgcctgctggctgcacccgcctccgcgctcgtcaggatcccgctgcacaagttcacgtccatccgccggaccatgtcggaggttgggggctctgtggaggacctgattgccaaaggccccgtctcaaagtactcccaggcggtgccagccgtgaccgaggggcccattcccgaggtgctcaagaactacatggacgcccagtactacggggagattggcatcgggacgcccccccagtgcttcacagtcgtcttcgacacgggctcctccaacctgtgggtcccctccatccactgcaaactgctggacatcgcttgctggatccaccacaagtacaacagcgacaagtccagcacctacgtgaagaatggtacctcgtttgacatccactatggctcgggcagcctctccgggtacctgagccaggacactgtgtcggtgccctgccagtcagcgtcgtcagcctctgccctgggcggtgtcaaagtggagaggcaggtctttggggaggccaccaagcagccaggcatcaccttcatcgcagccaagttcgatggcatcctgggcatggcctacccccgcatctccgtcaacaacgtgctgcccgtcttcgacaacctgatgcagcagaagctggtggaccagaacatcttctccttctacctgagcagggacccagatgcgcagcctgggggtgagctgatgctgggtggcacagactccaagtattacaagggttctctgtcctacctgaatgtcacccgcaaggcctactggcaggtccacctggaccaggtggaggtggccagcgggctgaccctgtgcaaggagggctgtgaggccattgtggacacaggcacttccctcatggtgggcccggtggatgaggtgcgcgagctgcagaaggccatcggggccgtgccgctgattcagggcgagtacatgatcccctgtgagaaggtgtccaccctgcccgcgatcacactgaagctgggaggcaaaggctacaagctgtccccagaggactacacgctcaaggtgtcgcaggccgggaagaccctctgcctgagcggcttcatgggcatggacatcccgccacccagcgggccactctggatcctgggcgacgtcttcatcggccgctactacactgtgtttgaccgtgacaacaacagggtgggcttcgccgaggctgcccgcctctagttcccaaggcgtccgcgcgccagcacagaaacagaggagagtcccagagcaggaggcccctggcccagcggcccctcccacacacacccacacactcgcccgcccactgtcctgggcgccctggaagccggcggcccaagcccgacttgctgttttgttctgtggttttcccctccctgggttcagaaatgctgcctgcctgtctgtctctccatctgtttggtgggggtagagctgatccagagcacagatctgtttcgtgcattggaagaccccacccaagcttggcagccgagctcgtgtatcctggggctcccttcatctccagggagtcccctccccggccctaccagcgcccgctgggctgagcccctaccccacaccaggccgtcctcccgggccctcccttggaaacctgccctgcctgagggcccctctgcccagcttgggcccagctgggctctgccaccctacctgttcagtgtcccgggcccgttgaggatgaggccgctagaggcctgaggatgagctggaaggagtgagaggggacaaaacccaccttgttggagcctgcagggtggtgctgggactgagccagtcccaggggcatgtattggcctggaggtggggttgggattgggggctggtgccagccttcctctgcagctgacctctgttgtcctccccttgggcggctgagagccccagctgacatggaaatacagttgttggcctccggcctcccctcaaaaaaaaaaaaaaaaaaaaaaaaaaaaaaaaaaaaaaaaaaaaaaaaaaaaaaaaaaaaaaaaaaaaaaaaaaaaaaaaaaaaa

SEQ ID NO: 733 - DNA, 2158 bp, Homo sapiens
ggagagaagaaaggagggggcaagggagaagctgctggtcggactcacaatgaaaacgctccttcttttgctgctggtgctcctggagctgggagaggcccaaggatcccttcacagggtgcccctcaggaggcatccgtccctcaagaagaagctgcgggcacggagccagctctctgagttctggaaatcccataatttggacatgatccagttcaccgagtcctgctcaatggaccagagtgccaaggaacccctcatcaactacttggatatggaatacttcggcactatctccattggctccccaccacagaacttcactgtcatcttcgacactggctcctccaacctctgggtcccctctgtgtactgcactagcccagcctgcaagacgcacagcaggttccagccttcccagtccagcacatacagccagccaggtcaatctttctccattcagtatggaaccgggagcttgtccgggatcattggagccgaccaagtctctgtggaaggactaaccgtggttggccagcagtttggagaaagtgtcacagagccaggccagacctttgtggatgcagagtttgatggaattctgggcctgggatacccctccttggctgtgggaggagtgactccagtatttgacaacatgatggctcagaacctggtggacttgccgatgttttctgtctacatgagcagtaacccagaaggtggtgcggggagcgagctgatttttggaggctacgaccactcccatttctctgggagcctgaattgggtcccagtcaccaagcaagcttactggcagattgcactggataacatccaggtgggaggcactgttatgttctgctccgagggctgccaggccattgtggacacagggacttccctcatcactggcccttccgacaagattaagcagctgcaaaacgccattggggcagcccccgtggatggagaatatgctgtggagtgtgccaaccttaacgtcatgccggatgtcaccttcaccattaacggagtcccctataccctcagcccaactgcctacaccctactggacttcgtggatggaatgcagttctgcagcagtggctttcaaggacttgacatccaccctccagctgggcccctctggatcctgggggatgtcttcattcgacagttttactcagtctttgaccgtgggaataaccgtgtgggactggccccagcagtcccctaaggaggggccttgtgtctgtgcctgcctgtctgacagaccttgaatatgttaggctggggcattctttacacctacaaaaagttattttccagagaatgtagctgtttccagggttgcaacttgaattaagaccaaacagaacatgagaatacacacacacacacacatatacacacacacacacttcacacatacacaccactcccaccaccgtcatgatggaggaattacgttatacattcatattttgtattgatttttgattatgaaaatcaaaaattttcacatttgattatgaaaatctccaaacatatgcacaagcagagatcatggtataataaatccctttgcaactccactcagccctgacaacccatccacacacggccaggcctgtttatctacactgctgcccactcctctctccagctccacatgctgtacctggatcattctgaagcaaattccgagcattacatcattttgtccataaatatttctaacatccttaaatatacaatcggaattcaagcatctcccattgtcccacaaatgtttggctgtttttgtagttggattgtttgtattaggattcaagcaaggcccatatattgcatttatttgaaatgtctgtaagtctctttccatctacagagtttagcacatttgaacgttgctggttgaaatcccgaggtgtcatttgacatggttctctgaacttatctttcctataaaatggtagttagatctggaggtctgattttgtggcaaaaatacttcctaggtggtgctgggtacttcttgttgcatcctgtcaggaggcagataatgctggtgcctctctattggtaatgttaagactgctgggtgggtttggagttcttggctttaatcattcattacaaagttcagcatttt

SEQ ID NO: 734 - DNA, 857 bp, Homo sapiens
caggaaagatgcagccactcctgcttctgctggcctttctcctacccactggggctgaggcaggggagatcatcggaggccgggagagcaggccccactcccgcccctacatggcgtatcttcagatccagagtccagcaggtcagagcagatgtggagggttcctggtgcgagaagactttgtgctgacagcagctcattgctggggaagcaatataaatgtcaccctgggcgcccacaatatccagagacgggaaaacacccagcaacacatcactgcgcgcagagccatccgccaccctcaatataatcagcggaccatccagaatgacatcatgttattgcagctgagcagaagagtcagacggaatcgaaacgtgaacccagtggctctgcctagagcccaggagggactgagacccgggacgctgtgcactgtggccggctggggcagggtcagcatgaggaggggaacagatacactccgagaggtgcagctgagagtgcagagggataggcagtgcctccgcatcttcggttcctacgacccccgaaggcagatttgtgtgggggaccggcgggaacggaaggctgccttcaagggggattccggaggccccctgctgtgtaacaatgtggcccacggcatcgtctcctatggaaagtcgtcaggggttcctccagaagtcttcaccagggtctcaagtttcctgccctggataaggacaacaatgagaagcttcaaactgctggatcagatggagacccccctgtgactgactcttcttctcggggacacaggccagctccacagtgttgccagagccttaataaacgtccacagagtataaataacc

SEQ ID NO: 735 - DNA, 1575 bp, Homo sapiens
agaaccgcgacctccgcaaccttgagcggcatccgtggagtgcgcctgcagctacgaccgcagcaggaaagcgccgccggccaggcccagctgtggccggacagggactggaagagaggacgcggtcgagtaggtgtgcaccagccctggcaacgagagcgtctaccccgaactctgctggccttgaggtggggaagccggggagggcagttgaggaccccgcggaggcgcgtgactggttgagcgggcaggccagcctccgagccgggtggacacaggttttaaaacatgaatcctacactcatccttgctgccttttgcctgggaattgcctcagctactctaacatttgatcacagtttagaggcacagtggaccaagtggaaggcgatgcacaacagattatacggcatgaatgaagaaggatggaggagagcagtgtgggagaagaacatgaagatgattgaactgcacaatcaggaatacagggaagggaaacacagcttcacaatggccatgaacgcctttggagacatgaccagtgaagaattcaggcaggtgatgaatggctttcaaaaccgtaagcccaggaaggggaaagtgttccaggaacctctgttttatgaggcccccagatctgtggattggagagagaaaggctacgtgactcctgtgaagaatcagggtcagtgtggttcttgttgggcttttagtgctactggtgctcttgaaggacagatgttccggaaaactgggaggcttatctcactgagtgagcagaatctggtagactgctctgggcctcaaggcaatgaaggctgcaatggtggcctaatggattatgctttccagtatgttcaggataatggaggcctggactctgaggaatcctatccatatgaggcaacagaagaatcctgtaagtacaatcccaagtattctgttgctaatgacaccggctttgtggacatccctaagcaggagaaggccctgatgaaggcagttgcaactgtggggcccatttctgttgctattgatgcaggtcatgagtccttcctgttctataaagaaggcatttattttgagccagactgtagcagtgaagacatggatcatggtgtgctggtggttggctacggatttgaaagcacagaatcagataacaataaatattggctggtgaagaacagctggggtgaagaatggggcatgggtggctacgtaaagatggccaaagaccggagaaaccattgtggaattgcctcagcagccagctaccccactgtgtgagctggtggacggtgatgaggaaggacttgactggggatggcgcatgcatgggaggaattcatcttcagtctaccagcccccgctgtgtcggatacacactcgaatcattgaagatccgagtgtgatttgaattctgtgatattttcacactggtaaatgttacctctattttaattactgctataaataggtttatattattgattcacttactgactttgcattttcgtttttaaaaggatgtataaatttttacctgtttaaataaaatttaatttcaaatgt

SEQ ID NO: 736 - DNA, 3535 bp, Homo sapiens
atttccggggtaagatggctgcagtccgtatgctgagaacctggagcaggaatgcggggaagctgatttgtgttcgctattttcaaacatgtggtaatgttcatgttttgaagccaaattatgtgtgtttctttggttatccttcattcaagtatagtcatccacatcacttcctgaaaacaactgctgctctccgtggacaggttgttcagttcaagctctcagacattggagaagggattagagaagtaactgttaaagaatggtatgtaaaagaaggagatacagtgtctcagtttgatagcatctgtgaagttcaaagtgataaagcttctgttaccatcactagtcgttatgatggagtcattaaaaaactctattataatctagacgatattgcctatgtggggaagccattagtagacatagaaacggaagctttaaaagattcagaagaagatgttgttgaaactcctgcagtgtctcatgatgaacatacacaccaagagataaagggccgaaaaacactggcaactcctgcagttcgccgtctggcaatggaaaacaatattaagctgagtgaagttgttggctcaggaaaagatggcagaatacttaaagaagatatcctcaactatttggaaaagcagacaggagctatattgcctccttcacccaaagttgaaattatgccacctccaccaaagccaaaagacatgactgttcctatactagtatcaaaacctccggtattcacaggcaaagacaaaacagaacccataaaaggctttcaaaaagcaatggtcaagactatgtctgcagccctgaagatacctcattttggttattgtgatgagattgaccttactgaactggttaagctccgagaagaattaaaacccattgcatttgctcgtggaattaaactctcctttatgcctttcttcttaaaggctgcttccttgggattactacagtttcctatccttaacgcttctgtggatgaaaactgccagaatataacatataaggcttctcataacattgggatagcaatggatactgagcagggtttgattgtccctaatgtgaaaaatgttcagatctgctctatatttgacatcgccactgaactgaaccgcctccagaaattgggctctgtgggtcagctcagcaccactgatcttacaggaggaacatttactctttccaacattggatcaattggtggtacctttgccaaaccagtgataatgccacctgaagtagccattggggcccttggatcaattaaggccattccccgatttaaccagaaaggagaagtatataaggcacagataatgaatgtgagctggtcagctgatcacagagttattgatggtgctacaatgtcacgcttctccaatttgtggaaatcctatttagaaaacccagcttttatgctactagatctgaaatgaagactgataagacattcttgaactttttgagcttccaaagagtatgtaaaccctagctgtgccagcacatgttcatctttacaatttatattgtaaacgatttgtatcgtatgattaaggatctaaggcacaatatttgtcactgttctattagactttttactgaaaatgaataatggtgtaatggttctcctggggctgtcacattttataggtcagagtgtgacttcttaatatggtgctgatgtttttgtgtcaatggcttgaaactggcaagattaacaaaattaggccgggcatggtggctcacgcctgtaatccagcactttgggaggcccaggtggggcgatcacctgaggttagaagtttgagaccagcctggccaacatggtgaaacctggcctctacctaaaaaatacaaaattgaccgggtgtggtggtgggtaccgctacttgggaggctgaggcaggagaatcgcttgaacctgggaggtggaggttgcagtgagctgagatcgtgctattgcactccagcctgggcgacagagcaagacgccatctcaaaaacaaaaaaaacaaaattcatgttactaaaagacaggtagccatatacagacagtatatgccctattttttttaactgactcttaatgaaactttaattttacttaattaagaaatggaatttatatacaaaaatattttccatttccgttattatgctaattgttgtatgaaataagtgcaattatacttctcttttgagatatccaagagtatattcttgctctgtatagagaatatcatctgatagtgtcttatttatattaattaatgtctttgaaaagggaaaagtataaactggccttaaaattgtccaattatagttttataaccagtctattaaaggtgtttgtttaaaatggatatagttttagatttgtggtaatgctttggtattttcttggggaagaccttcacctttgcaaacttccctcatgtaaggaaggtactttaaatgtagcagccactgacatttctttttttaaaaaaaatttgagaagtctacttccttttaacttttttggtcttcagctaaaaaataggataagaaattaaggtctattccattctccatatcctgggtaagaatgtaaataagaggagaaggaagagtctaatagtaattatggatataaaaaataagaaattttgtatagaaatgaaggtttcataatgatcattttgttaaaggtctactttaatcagaaatagcaacgagatgaatgtatccaacatttcaatttgcattcggaaatccatgttgtttctaatattgtccagttgaaaactgtatgccaaaattagttgtttaagtgaagttttgtgacagaaaaaaggttgttttaatatctacttggtttttctcaaaatggaaataattttaaaatcaggaaagaataaatcagccaggtgtgatgacttgtaactgtaatcccagttataggggaggctgaagcaggaggatcacttgaggccaggagtttgagaccagcctgggcaacatagtgagatcccatctcaaaaaacattatttttaaaattagcctggtggctcacgcctgtaatcccagcactttgggaggccgaggtggccagatcacctgaggtcaggagttcgagaccaccctggccaacatggtgaaaccccatctctacagttttgtaaaaatacaaaaattacctgggcctggtgcacaggcctgtagtcccagctacttgggaggctgaggcaggagaattgcttgagcccaagaggtggaggttacagtgagcagagatcacaccactgcactccagcctgggtggcagagcaacacttcgtctcagaaaaaaaaaaaaaaaccaaaaaccaaaaagccaagtgtggtggtgtgcacctatagtcccagctactcaggaagctgagacaagaggatcaattgagcccaggagttcaaagctgtagtgagctgtcattgtgccactatcctccagtatgggtgacagagtgagacctggtctctaaaaat

SEQ ID NO: 737 - DNA, 1751 bp, Homo sapiens
tttaactgtgctatggagtagaagcaggaggttttcaacctagtcacagagcagcacctaccccctcctcctttccacacctgcaaactcttttacttgggctgaatatttagtgtaattacatctcagctttgagggctcctgtggcaaattcccggattaaaaggttccctggttgtgaaaatacatgagataaatcatgaaggccactatcatcctccttctgcttgcacaagtttcctgggctggaccgtttcaacagagaggcttatttgactttatgctagaagatgaggcttctgggataggcccagaagttcctgatgaccgcgacttcgagccctccctaggcccagtgtgccccttccgctgtcaatgccatcttcgagtggtccagtgttctgatttgggtctggacaaagtgccaaaggatcttccccctgacacaactctgctagacctgcaaaacaacaaaataaccgaaatcaaagatggagactttaagaacctgaagaaccttcacgcattgattcttgtcaacaataaaattagcaaagttagtcctggagcatttacacctttggtgaagttggaacgactttatctgtccaagaatcagctgaaggaattgccagaaaaaatgcccaaaactcttcaggagctgcgtgcccatgagaatgagatcaccaaagtgcgaaaagttactttcaatggactgaaccagatgattgtcatagaactgggcaccaatccgctgaagagctcaggaattgaaaatggggctttccagggaatgaagaagctctcctacatccgcattgctgataccaatatcaccagcattcctcaaggtcttcctccttcccttacggaattacatcttgatggcaacaaaatcagcagagttgatgcagctagcctgaaaggactgaataatttggctaagttgggattgagtttcaacagcatctctgctgttgacaatggctctctggccaacacgcctcatctgagggagcttcacttggacaacaacaagcttaccagagtacctggtgggctggcagagcataagtacatccaggttgtctaccttcataacaacaatatctctgtagttggatcaagtgacttctgcccacctggacacaacaccaaaaaggcttcttattcgggtgtgagtcttttcagcaacccggtccagtactgggagatacagccatccaccttcagatgtgtctacgtgcgctctgccattcaactcggaaactataagtaattctcaagaaagccctcatttttataacctggcaaaatcttgttaatgtcattgctaaaaaataaataaaagctagatactggaaacctaactgcaatgtggatgttttacccacatgacttattatgcataaagccaaatttccagtttaagtaattgcctacaataaaaagaaattttgcctgccattttcagaatcatcttttgaagctttctgttgatgttaactgagctactagagatattcttatttcactaaatgtaaaatttggagtaaatatatatgtcaatatttagtaaagcttttcttttttaatttccaggaaaaaataaaaagagtatgagtcttctgtaattcattgagcagttagctcatttgagataaagtcaaatgccaaacactagctctgtattaatccccatcattactggtaaagcctcatttgaatgtgtgaattcaatacaggctatg

SEQ ID NO: 738 - DNA, 4221 bp, Homo sapiens
cagcggcagtggagttcgctgcgcgctgttgggggccacctgtcttttcgcttgtgtccctctttctagtgtcgcgctcgagtcccgacgggccgctccaagcctcgacatgtcgtacaactacgtggtaacggcccagaagcccaccgccgtgaacggctgcgtgaccggacactttacttcggccgaagacttaaacctgttgattgccaaaaacacgagattagagatctatgtggtcaccgccgaggggcttcggcccgtcaaagaggtgggcatgtatgggaagattgcggtcatggagcttttcaggcccaagggggagagcaaggacctgctgtttatcttgacagcgaagtacaatgcctgcatcctggagtataaacagagtggcgagagcattgacatcattacgcgagcccatggcaatgtccaggaccgcattggccgcccctcagagaccggcattattggcatcattgaccctgagtgccggatgattggcctgcgtctctatgatggccttttcaaggttattccactagatcgcgataataaagaactcaaggccttcaacatccgcctggaggagctgcatgtcattgatgtcaagttcctatatggttgccaagcacctactatttgctttgtctaccaggaccctcaggggcggcacgtaaaaacctatgaggtgtctctccgagaaaaggaattcaataagggcccttggaaacaggaaaatgtcgaagctgaagcttccatggtgatcgcagtcccagagccctttgggggggccatcatcattggacaggagtcaatcacctatcacaatggtgacaaatacctggctattgcccctcctatcatcaagcaaagcacgattgtgtgccacaatcgagtggaccctaatggctcaagatacctgctgggagacatggaaggccggctcttcatgctgcttttggagaaggaggaacagatggatggcaccgtcactctcaaggatctccgtgtagaactccttggagagacctctattgctgagtgcttgacataccttgataatggtgttgtgtttgtcgggtctcgcctgggtgactcccagcttgtgaagctcaacgttgacagtaatgaacaaggctcctatgtagtggccatggaaacctttaccaacttaggacccattgtcgatatgtgcgtggtggacctggagaggcaggggcaggggcagctggtcacttgctctggggctttcaaggaaggttctttgcggatcatccggaatggaattggaatccacgagcatgccagcattgacttaccaggcatcaaaggattatggccactgcggtctgaccctaatcgtgagacttatgacactttggtgctctcttttgtgggccagacaagagttctcatgttaaatggagaggaggtagaagaaaccgaactgatgggtttcgtggatgatcagcagactttcttctgtggcaacgtggctcatcagcagcttatccagatcacttcagcatcggtgaggttggtctctcaagaacccaaagctctggtcagtgaatggaaggagcctcaggccaagaacatcagtgtggcctcctgcaatagcagccaggtggtggtggctgtaggcagggccctctactatctgcagatccatcctcaggagctccggcagatcagccacacagagatggaacatgaagtggcttgcttggacatcaccccattaggagacagcaatggactgtcccctctttgtgccattggcctctggacggacatctcggctcgtatcttgaagttgccctcttttgaactactgcacaaggagatgctgggtggagagatcattcctcgctccatcctgatgaccacctttgagagtagccattacctcctttgtgccttgggagatggagcgcttttctactttgggctcaacattgagacaggtctgttgagcgaccgtaagaaggtgactttgggcacccagcccaccgtattgaggacttttcgttctctttctaccaccaacgtctttgcttgttctgaccgccccactgtcatctatagcagcaaccacaaattggtcttctcaaatgtcaacctcaaggaagtgaactacatgtgtcccctcaattcagatggctatcctgacagcctggcgctggccaacaatagcaccctcaccattggcaccatcgatgagatccagaagctgcacattcgcacagttcccctctatgagtctccaaggaagatctgctaccaggaagtgtcccagtgtttcggggtcctctccagccgcattgaagtccaagacacgagtgggggcacgacagccttgaggcccagcgctagcacccaggctctgtccagcagtgtaagctccagcaagctgttctccagcagcactgctcctcatgagacctcctttggagaagaggtggaggtgcataacctacttatcattgaccaacacacctttgaagtgcttcatgcccaccagtttctgcagaatgaatatgccctcagtctggtttcctgcaagctgggcaaagaccccaacacttacttcattgtgggcacagcaatggtgtatcctgaagaggcagagcccaagcagggtcgcattgtggtctttcagtattcggatggaaaactacagactgtggctgaaaaggaagtgaaaggggccgtgtactctatggtggaatttaacgggaagctgttagccagcatcaatagcacggtgcggctctatgagtggacaacagagaaggacgtgcgcactgagtgcaaccactacaacaacatcatggccctctacctgaagaccaagggcgacttcatcctggtgggcgaccttatgcgctcagtgctgctgcttgcctacaagcccatggaaggaaactttgaagagattgctcgagactttaatcccaactggatgagtgctgtggaaatcttggatgatgacaattttctgggggctgaaaatgcctttaacttgtttgtgtgtcaaaaggatagcgctgccaccactgacgaggagcggcagcacctccaggaggttggtcttttccacctgggcgagtttgtcaatgtcttttgccacggctctctggtaatgcagaatctgggtgagacttccacccccacacaaggctcggtgctcttcggcacggtcaacggcatgatagggctggtgacctcactgtcagagagctggtacaacctcctgctggacatgcagaatcgactcaataaagtcatcaaaagtgtggggaagatcgagcactccttctggagatcctttcacaccgagcggaagacagaaccagccacaggtttcatcgacggtgacttgattgagagtttcctggatattagccgccccaagatgcaggaggtggtggcaaacctacagtatgacgatggcagcggtatgaagcgagaggccactgcagacgacctcatcaaggttgtggaggagctaactcggatccattagccaagggcagggggcccctttgctgaccctccccaaaggctttgccctgctgccctccccctcctctccaccatcgtcttcttggccatgggaggcctttccctaagccagctgcccccagagccacagttcccctatgtggaagtggggcgggcttcatagagacttgggaatgagctgaaggtgaaacattttctccctggatttttaccagtctcacatgattccagccatcaccttagaccaccaagccttgattggtgttgccagttgtcctccttccggggaaggattttgcagttctttggctgaaaggaagctgtgcgtgtgtgtgtgtgtatgtgtgtgtgtgtatgtgtatctcacactcatgcattgtcctctttttatttagattggcagtgtagggagttgtgggtagtggggaagagggttaggagggtttcattgtctgtgaagtgagaccttccttttacttttcttctattgcctctgagagcatcaggcctagaggcctgactgccaagccatgggtagcctgggtgtaaaacctggagatggtggatgatccccacgccacagcccttttgtctctgcaaactgccttcttcggaaagaagaaggtgggaggatgtgaattgttagtttctgagttttaccaaataaagtagaatataagaagaaaaaaa

SEQ ID NO: 739 - DNA, 1071 bp, Homo sapiens
gcagttctggtcctcctaggagcggccgcctgcgcggcgcggccccgtggtcggatgctgggcggcagagaggccgaggcgcacgcgcggccctacatggcgtcggtgcagctgaacggcgcgcacctgtgcgcaggcgtcctggtggcggagcggtgggtgctgagcgcggcgcactgcctggaggacgcggccgacgggaaggtgcaggttctcctgggcgcgcactccctgtcgcagccggagccctccaagcgcctgtacgacgtgctccgcgcagtgccccacccggacagccagcccgacaccatcgaccacgacctcctgctgctacagctgtcggagaaggccacactgggccctgctgtgcgccccctgccctggcagcgcgtggaccgcgacgtggcaccgggaactctctgcgacgtggccggctggggcatagtcaaccacgcgggccgccgcccggacagcctgcagcacgtgctcttgccagtgctggaccgcgccacctgcaaccggcgcacgcaccacgacggcgccatcaccgagcgcttgatgtgcgcggagagcaatcgccgggacagctgcaagggtgactccgggggcccgctggtgtgcgggggcgtgctcgagggcgtggtcacctcgggctcgcgcgtttgcggcaaccgcaagaagcccgggatctacacccgcgtggcgagctatgcggcctggatcgacagcgtcctggcctagggtgccggggcctgaaggtcagggtcacccaagcaacaaagtcccgagcaatgaagtcatccactcctgcatctggttggtctttattgagcacctactatatgcagaaggggaggccgaggtgggaggatcattggatctcaggagttggagatcagcatgggccacgtagcgcgactccatctctacaaataaataaaaattagctgggcaattggcgggcatggaggtgggtgcttgtagttccagctactcaggaggctgaggtgggaggatgacttgaacgcaggaggctgaggctgcagtgagttgtgattgcaccactgccct

SEQ ID NO: 740 - DNA, 767 bp, Homo sapiens
aacggtgcgctggagcgagtgagcagcgatacctagggcggaagtgctctcggcggaagtgatcgctgtgtgaatcgtgggtgggatggccgcgggccgcctctttctaagtcggcttcgagcacccttcagttccatggccaagagcccactcgagggcgtttcctcctccagaggcctgcacgcggggcgcgggccccgaaggctctccatcgaaggcaacattggcctgcactgcccaaagtcttggaaacttgctggatatgatgtaccgggagccagcacgatggtcctacacattccagacattttcctttttgagccgcctgaaagtacagctggagcccttccctgagaaactcttacaggccaggaagccagtacagatctttgagaggtctgtgtacagtgacaggctccactttgaggctctgatgaacattccagtgctggtgttggatgtcaatgatgatttttctgaggaagtaaccaaacaagaagacctcatgagagaggtaaacacctttgtaaagaatctgtaaccaataccatgaagttcaggctgtgatctgggctccctgactttctgaagctagaaaaatgttgtgtctcccaaccacctttccatccccagcccctctcatccctggagcactctgccgctcaagagctggtttgttaattattgttagactttgccattgttttcttttgtacctgaagcattttgaaaataaagtttacttaagttatgcttgtttttctaa

SEQ ID NO: 741 - DNA, 3445 bp, Homo sapiens
gagtgactccaccgcccggagcagcggtgcaggacgcgcgtctccgccgcccgcggtgacttctgcctgcgctccttctctgaacgctcacttccgaggagacgccgacgatgaagacaccgtggaaggttcttctgggactgctgggtgctgctgcgcttgtcaccatcatcaccgtgcccgtggttctgctgaacaaaggcacagatgatgctacagctgacagtcgcaaaacttacactctaactgattacttaaaaaatacttatagactgaagttatactccttaagatggatttcagatcatgaatatctctacaaacaagaaaataatatcttggtattcaatgctgaatatggaaacagctcagttttcttggagaacagtacatttgatgagtttggacattctatcaatgattattcaatatctcctgatgggcagtttattctcttagaatacaactacgtgaagcaatggaggcattcctacacagcttcatatgacatttatgatttaaataaaaggcagctgattacagaagagaggattccaaacaacacacagtgggtcacatggtcaccagtgggtcataaattggcatatgtttggaacaatgacatttatgttaaaattgaaccaaatttaccaagttacagaatcacatggacggggaaagaagatataatatataatggaataactgactgggtttatgaagaggaagtcttcagtgcctactctgctctgtggtggtctccaaacggcacttttttagcatatgcccaatttaacgacacagaagtcccacttattgaatactccttctactctgatgagtcactgcagtacccaaagactgtacgggttccatatccaaaggcaggagctgtgaatccaactgtaaagttctttgttgtaaatacagactctctcagctcagtcaccaatgcaacttccatacaaatcactgctcctgcttctatgttgataggggatcactacttgtgtgatgtgacatgggcaacacaagaaagaatttctttgcagtggctcaggaggattcagaactattcggtcatggatatttgtgactatgatgaatccagtggaagatggaactgcttagtggcacggcaacacattgaaatgagtactactggctgggttggaagatttaggccttcagaacctcattttacccttgatggtaatagcttctacaagatcatcagcaatgaagaaggttacagacacatttgctatttccaaatagataaaaaagactgcacatttattacaaaaggcacctgggaagtcatcgggatagaagctctaaccagtgattatctatactacattagtaatgaatataaaggaatgccaggaggaaggaatctttataaaatccaacttagtgactatacaaaagtgacatgcctcagttgtgagctgaatccggaaaggtgtcagtactattctgtgtcattcagtaaagaggcgaagtattatcagctgagatgttccggtcctggtctgcccctctatactctacacagcagcgtgaatgataaagggctgagagtcctggaagacaattcagctttggataaaatgctgcagaatgtccagatgccctccaaaaaactggacttcattattttgaatgaaacaaaattttggtatcagatgatcttgcctcctcattttgataaatccaagaaatatcctctactattagatgtgtatgcaggcccatgtagtcaaaaagcagacactgtcttcagactgaactgggccacttaccttgcaagcacagaaaacattatagtagctagctttgatggcagaggaagtggttaccaaggagataagatcatgcatgcaatcaacagaagactgggaacatttgaagttgaagatcaaattgaagcagccagacaattttcaaaaatgggatttgtggacaacaaacgaattgcaatttggggctggtcatatggagggtacgtaacctcaatggtcctgggatcgggaagtggcgtgttcaagtgtggaatagccgtggcgcctgtatcccggtgggagtactatgactcagtgtacacagaacgttacatgggtctcccaactccagaagacaaccttgaccattacagaaattcaacagtcatgagcagagctgaaaattttaaacaagttgagtacctccttattcatggaacagcagatgataacgttcactttcagcagtcagctcagatctccaaagccctggtcgatgttggagtggatttccaggcaatgtggtatactgatgaagaccatggaatagctagcagcacagcacaccaacatatatatacccacatgagccacttcataaaacaatgtttctctttaccttagcacctcaaaataccatgccatttaaagcttattaaaactcatttttgttttcattatctcaaaactgcactgtcaagatgatgatgatctttaaaatacacactcaaatcaagaaacttaaggttacctttgttcccaaatttcatacctatcatcttaagtagggacttctgtcttcacaacagattattaccttacagaagtttgaattatccggtcgggttttattgtttaaaatcatttctgcatcagctgctgaaacaacaaataggaattgtttttatggaggctttgcatagattccctgagcaggattttaatctttttctaactggactggttcaaatgttgttctcttctttaaagggatggcaagatgtgggcagtgatgtcactagggcagggacaggataagagggattagggagagaagatagcagggcatggctgggaacccaagtccaagcataccaacacgagcaggctactgtcagctcccctcggagaagagctgttcacagccagactggcacagttttctgagaaagactattcaaacagtctcaggaaatcaaatatgcaaagcactgacttctaagtaaaaccacagcagttgaaaagactccaaagaaatgtaagggaaactgccagcaacgcaggcccccaggtgccagttatggctataggtgctacaaaaacacagcaagggtgatgggaaagcattgtaaatgtgcttttaaaaaaaaatactgatgttcctagtgaaagaggcagcttgaaactgagatgtgaacacatcagcttgccctgttaaaagatgaaaatatttgtatcacaaatcttaacttgaaggagtccttgcatcaatttttcttatttcatttctttgagtgtcttaattaaaagaatattttaacttccttggactcattttaaaaaatggaacataaaatacaatgttatgtattattattcccattctacatactatggaatttctcccagtcatttaataaatgtgccttcattttttc

SEQ ID NO: 742 - DNA, 717 bp, Homo sapiens
gggagcatggacctcagtcttctctgggtacttatgcccctagtcaccatggcctggggccagtatggcgattatggatacccataccagcagtatcatgactacagcgatgatgggtgggtgaatttgaatcggcaaggcttcagctaccagtgtccccaggggcaggtgatagtggccgtgaggagcatcttcagtaagaaggaaggttctgacagacaatggaactacgcctgcatgcccacgccacagagcctcggggaacccacggagtgctggtgggaggagatcaacagggctggcatggaatggtaccagacgtgctccaacaatgggctggtggcaggattccagagccgctacttcgagtcagtgctggatcgggagtggcagttttactgttgtcgctacagcaagaggtgcccatattcctgctggctaacaacagaatatccaggtcactatggtgaggaaatggacatgatttcctacaattatgattactatatccgaggagcaacaaccactttctctgcagtggaaagggatcgccagtggaagttcataatgtgccggatgactgaatacgactgtgaatttgcaaatgtttagatttgccacataccaaatctgggtgaaaggaaaggggccctccagctttccactgcagagaaagtggttgttgctcctcggtatatgtaatcataattgtagatc

SEQ ID NO: 743 - DNA, 5879 bp, Homo sapiens
ggcaggtctcgctctcggcaccctcccggcgcccgcgttctcctggccctgcccggcatcccgatggccgccgctgggccccggcgctccgtgcgcggagccgtctgcctgcatctgctgctgaccctcgtgatcttcagtcgtgatggtgaagcctgcaaaaaggtgatacttaatgtaccttctaaactagaggcagacaaaataattggcagagttaatttggaagagtgcttcaggtctgcagacctcatccggtcaagtgatcctgatttcagagttctaaatgatgggtcagtgtacacagccagggctgttgcgctgtctgataagaaaagatcatttaccatatggctttctgacaaaaggaaacagacacagaaagaggttactgtgctgctagaacatcagaagaaggtatcgaagacaagacacactagagaaactgttctcaggcgtgccaagaggagatgggcacctattccttgctctatgcaagagaattccttgggccctttcccattgtttcttcaacaagttgaatctgatgcagcacagaactatactgtcttctactcaataagtggacgtggagttgataaagaacctttaaatttgttttatatagaaagagacactggaaatctattttgcactcggcctgtggatcgtgaagaatatgatgtttttgatttgattgcttatgcgtcaactgcagatggatattcagcagatctgcccctcccactacccatcagggtagaggatgaaaatgacaaccaccctgttttcacagaagcaatttataattttgaagttttggaaagtagtagacctggtactacagtgggggtggtttgtgccacagacagagatgaaccggacacaatgcatacgcgcctgaaatacagcattttgcagcagacaccaaggtcacctgggctcttttctgtgcatcccagcacaggcgtaatcaccacagtctctcattatttggacagagaggttgtagacaagtactcattgataatgaaagtacaagacatggatggccagttttttggattgataggcacatcaacttgtatcataacagtaacagattcaaatgataatgcacccactttcagacaaaatgcttatgaagcatttgtagaggaaaatgcattcaatgtggaaatcttacgaatacctatagaagataaggatttaattaacactgccaattggagagtcaattttaccattttaaagggaaatgaaaatggacatttcaaaatcagcacagacaaagaaactaatgaaggtgttctttctgttgtaaagccactgaattatgaagaaaaccgtcaagtgaacctggaaattggagtaaacaatgaagcgccatttgctagagatattcccagagtgacagccttgaacagagccttggttacagttcatgtgagggatctggatgaggggcctgaatgcactcctgcagcccaatatgtgcggattaaagaaaacttagcagtggggtcaaagatcaacggctataaggcatatgaccccgaaaatagaaatggcaatggtttaaggtacaaaaaattgcatgatcctaaaggttggatcaccattgatgaaatttcagggtcaatcataacttccaaaatcctggatagggaggttgaaactcccaaaaatgagttgtataatattacagtcctggcaatagacaaagatgatagatcatgtactggaacacttgctgtgaacattgaagatgtaaatgataatccaccagaaatacttcaagaatatgtagtcatttgcaaaccaaaaatggggtataccgacattttagctgttgatcctgatgaacctgtccatggagctccattttatttcagtttgcccaatacttctccagaaatcagtagactgtggagcctcaccaaagttaatgatacagctgcccgtctttcatatcagaaaaatgctggatttcaagaatataccattcctattactgtaaaagacagggccggccaagctgcaacaaaattattgagagttaatctgtgtgaatgtactcatccaactcagtgtcgtgcgacttcaaggagtacaggagtaatacttggaaaatgggcaatccttgcaatattactgggtatagcactgctcttttctgtattgctaactttagtatgtggagtttttggtgcaactaaagggaaacgttttcctgaagatttagcacagcaaaacttaattatatcaaacacagaagcacctggagacgatagagtgtgctctgccaatggatttatgacccaaactaccaacaactctagccaaggtttttgtggtactatgggatcaggaatgaaaaatggagggcaggaaaccattgaaatgatgaaaggaggaaaccagaccttggaatcctgccggggggctgggcatcatcataccctggactcctgcaggggaggacacacggaggtggacaactgcagatacacttactcggagtggcacagttttactcaaccccgtctcggtgaaaaattgcatcgatgtaatcagaatgaagaccgcatgccatcccaagattatgtcctcacttataactatgagggaagaggatctccagctggttctgtgggctgctgcagtgaaaagcaggaagaagatggccttgactttttaaataatttggaacccaaatttattacattagcagaagcatgcacaaagagataatgtcacagtgctacaattaggtctttgtcagacattctggaggtttccaaaaataatattgtaaagttcaatttcaacatgtatgtatatgatgatttttttctcaattttgaattatgctactcaccaatttatatttttaaagccagttgttgcttatcttttccaaaaagtgaaaaatgttaaaacagacaactggtaaatctcaaactccagcactggaattaaggtctctaaagcatctgctcttttttttttttacggatattttagtaataaatatgctggataaatattagtccaacaatagctaagttatgctaatatcacattattatgtattcactttaagtgatagtttaaaaaataaacaagaaatattgagtatcactatgtgaagaaagttttggaaaagaaacaatgaagactgaattaaattaaaaatgttgcagctcataaagaattgggactcacccctactgcactaccaaattcatttgactttggaggcaaaatgtgttgaagtgccctatgaagtagcaattttctataggaatatagttggaaataaatgtgtgtgtgtatattattattaatcaatgcaatatttaaaatgaaatgagaacaaagaggaaaatggtaaaaacttgaaatgaggctggggtatagtttgtcctacaatagaaaaaagagagagcttcctaggcctgggctcttaaatgctgcattataactgagtctatgaggaaatagttcctgtccaatttgtgtaatttgtttaaaattgtaaataaattaaacttttctggtttctgtgggaaggaaatagggaatccaatggaacagtagctttgctttgcagtctgtttcaagatttctgcatccacaagttagtagcaaactggggaatactcgctgcagctggggttccctgctttttggtagcaagggtccagagatgaggtgtttttttcggggagctaataacaaaaacattttaaaacttacctttactgaagttaaatcctctattgctgtttctattctctcttatagtgaccaacatctttttaatttagatccaaataaccatgtcctcctagagtttagaggctagagggagctgaggggaggatcttactgaaagcaccctggggagattgattgtccttaaacctaagccccacaaacttgacacctgatcaggtctgggagctacaaaatttcatttttctcctcactgcccttcttctgagtggcattggcctgaatcaaggaaagccaggccttgtgggcccccttctttcggctttctgctaaagcaacacctccagcagagattcccttaagtgactccaggttttccaccatccttcagcgtgaattaatttttaatcagtttgctttctccagagaaattttaaaataatagaagaaatagaaattttgaatgtataaaagaaaaagatcaagttgtcattttagaacagagggaactttgggagaaagcagcccaagtaggttatttgtacagtcagagggcaacaggaagatgcaggccttcaagggcaaggagaggccacaaggaatatgggtgggagtaaaagcaacatcgtctgcttcatactttttcctaggcttggcactgccttttcctttctcaggccaatggcaactgccatttgagtccggtgagggatcagccaacctcttctctatggctcaccttatttggagtgagaaatcaaggagacagagctgactgcatgatgagtctgaaggcatttgcaggatgagcctgaactggttgtgcagaacaaacaaggcattcatgggaattgttgtattccttctgcagccctccttctgggcactaagaaggtctatgaattaaatgcctatctaaaattctgatttattcctacattttctgttttctaatttgaccctaaaatctatgtgttttagacttagactttttattgccccccccccctttttttttgagacggagtctcgctctgacgcacaggctggagtgcagtggctccgatctctgctcactgaaagctccgcctcccgggttcatgccattctcctgcctcagcctcctgagtagctgggactacaggcgcccaccaccacgcccggctaattttttgtatttttaatagagacggggtttcactgtgttagccaggatggtctcgatctcctgacctcgtgatccgcctgcctcggcctcccaaagtgctgggattacaggcatgacccaccgctcccggccttgttttccgtttaaagtcgtcttcttttaatgtaatcattttgaacatgtgtgaaagttgatcatacgaattggatcaatcttgaaatactcaaccaaaagacagtcgagaagccagggggagaaagaactcagggcacaaaatattggtctgagaatggaattctctgtaagcctagttgctgaaatttcctgctgtaaccagaagccagttttatctaacggctactgaaacacccactgtgttttgctcactccctcactcaccgatcaaaacctgctacctccccaagactttactagtgccgataaactttctcaaagagcaaccagtatcacttccctgtttataaaacctctaaccatctctttgttctttgaacatgctgaaaaccacctggtctgcatgtatgcccgaatttgtaattcttttctctcaaatgaaaatttaattttagggattcatttctatattttcacatatgtagtattattatttccttatatgtgtaaggtgaaatttatggtatttgagtgtgcaagaaaatatatttttaaagctttcatttttcccccagtgaatgatttagaattttttatgtaaatatacagaatgttttttcttacttttataaggaagcagctgtctaaaatgcagtggggtttgttttgcaatgttttaaacagagttttagtattgctattaaaagaagttactttgcttttaaagaaacttggctgcttaaaataagcaaaaattggatgcataaagtaatatttacagatgtggggagatgtaataaaacaatattaacttggaaaaaaaaaaaaaaaaaaa

SEQ ID NO: 744 - DNA, 3516 bp, Homo sapiens
tcgagggtgcgatggcgcggacgcgggaccgcgtacgcctgctgcttctcctgatctgctttaacgttggaagtggacttcacttacaggtcttaagcacaagaaatgaaaataagctgcttcctaaacatcctcatttagtgcggcaaaagcgcgcctggatcaccgcccccgtggctcttcgggagggagaggatctgtccaagaagaatccaattgccaagatacattctgatcttgcagaagaaagaggactcaaaattacttacaaatacactggaaaagggattacagagccaccttttggtatatttgtctttaacaaagatactggagaactgaatgttaccagcattcttgatcgagaagaaacaccattttttctgctaacaggttacgctttggatgcaagaggaaacaatgtagagaaacccttagagctacgcattaaggttcttgatatcaatgacaacgaaccagtgttcacacaggatgtctttgttgggtctgttgaagagttgagtgcagcacatactcttgtgatgaaaatcaatgcaacagatgcagatgagcccaataccctgaattcgaaaatttcctatagaatcgtatctctggagcctgcttatcctccagtgttctacctaaataaagatacaggagagatttatacaaccagtgttaccttggacagagaggaacacagcagctacactttgacagtagaagcaagagatggcaatggagaagttacagacaaacctgtaaaacaagctcaagttcagattcgtattttggatgtcaatgacaatatacctgtagtagaaaataaagtgcttgaagggatggttgaagaaaatcaagtcaatgtagaagttacgcgcataaaagtgttcgatgcagatgaaataggttctgataattggctggcaaattttacatttgcatcaggaaatgaaggaggttatttccacatagaaacagatgctcaaactaacgaaggaattgtgacccttattaaggaagtagattatgaagaaatgaagaatcttgacttcagtgttattgtcgctaataaagcagcttttcacaagtcgattaggagtaaatacaagcctacacccattcccatcaaggtcaaagtgaaaaatgtgaaagaaggcattcattttaaaagcagcgtcatctcaatttatgttagcgagagcatggatagatcaagcaaaggccaaataattggaaattttcaagcttttgatgaggacactggactaccagcccatgcaagatatgtaaaattagaagatagagataattggatctctgtggattctgtcacatctgaaattaaacttgcaaaacttcctgattttgaatctagatatgttcaaaatggcacatacactgtaaagattgtggccatatcagaagattatcctagaaaaaccatcactggcacagtccttatcaatgttgaagacatcaacgacaactgtcccacactgatagagcctgtgcagacaatctgtcacgatgcagagtatgtgaatgttactgcagaggacctggatggacacccaaacagtggccctttcagtttctccgtcattgacaaaccacctggcatggcagaaaaatggaaaatagcacgccaagaaagtaccagtgtgctgctgcaacaaagtgagaaaaagcttgggagaagtgaaattcagttcctgatttcagacaatcagggttttagttgtcctgaaaagcaggtccttacactcacagtttgtgaggttctgcatggcagcggctgcagggaagcacagcatgactcctatgtgggcctgggacccgcagcaattgcgctcatgattttggcctttctgctcctgctattggtaccacttttactgctgatgtgccattgcggaaagggcgccaaagcgtttacccccatacctggcaccatagagatgctgcatccttggaataatgaaggagcaccacctgaagacaaggtggtgccatcatttctgccagtggatcaagggggcagtctagtaggaagaaatggagtaggaggtatggccaaggaagccacgatgaaaggaagtagctctgcttccattgtcaaagggcaacatgagatgtccgagatggatggaaggtgggaagaacacagaagcctgctttctggtagagctacccagtttacaggggccacaggcgctatcatgaccactgaaaccacgaagaccgcaagggccacaggggcttccagagacatggccggagctcaggcagctgctgttgcactgaacgaagaattcttaagaaattatttcactgataaagcggcctcttacactgaggaagatgaaaatcacacagccaaagattgccttctggtttattctcaggaagaaactgaatcgctgaatgcttctattggttgttgcagttttattgaaggagagctagatgaccgcttcttagatgatttgggacttaaattcaagacgctagctgaagtttgcctgggtcaaaaaatagatataaataaggaaattgagcagagacaaaaacctgccacagaaacaagtatgaacacagcttcacattcactctgtgagcaaactatggttaattcagagaatacctactcctctggcagtagcttcccagttccaaaatctttgcaagaagccaatgcagagaaagtaactcaggaaatagtcactgaaagatctgtgtcttctaggcaggcgcaaaaggtagctacacctcttcctgacccaatggcttctagaaatgtgatagcaacagaaacttcctatgtcacagggtccactatgccaccaaccactgtgatcctgggtcctagccagccacagagccttattgtgacagagagggtgtatgctccagcttctaccttggtagatcagccttatgctaatgaaggtacagttgtggtcactgaaagagtaatacagcctcatgggggtggatcgaatcctctggaaggcactcagcatcttcaagatgtaccttacgtcatggtgagggaaagagagagcttccttgcccccagctcaggtgtgcagcctactctggccatgcctaatatagcagtaggacagaatgtgacagtgacagaaagagttctagcacctgcttccactctgcaatccagttaccagattcccactgaaaattctatgacggctaggaacaccacggtgtctggagctggagtccctggccctctgccagattttggtttagaggaatctggtcattctaattctaccataaccacatcttccaccagagtcaccaagcatagcactgtacagcattcttactcctaaacagcagtcagccacaaactgacccagagtttaattagcagtgactaatttcatgtttccaatgtacctgatttttcatgagccttacagacacacagagacacatacacattgatcttaaaatttttctcagtcactgatatgcaaagga

SEQ ID NO: 745 - DNA, 1006 bp, Homo sapiens
cgtctcctcgctcgccttctggctctgccatgccctgctctgaagagacacccgccatttcacccagtaagcgggcccggcctgcggaggtgggcggcatgcagctccgctttgcccggctctccgagcacgccacggcccccacccggggctccgcgcgcgccgcgggctacgacctgtacagtgcctatgattacacaataccacctatggagaaagctgttgtgaaaacggacattcagatagcgctcccttctgggtgttatggaagagtggctccacggtcaggcttggctgcaaaacactttattgatgtaggagctggtgtcatagatgaagattatagaggaaatgttggtgttgtactgtttaattttggcaaagaaaagtttgaagtcaaaaaaggtgatcgaattgcacagctcatttgcgaacggattttttatccagaaatagaagaagttcaagccttggatgacaccgaaaggggttcaggaggttttggttccactggaaagaattaaaatttatgccaagaacagaaaacaagaagtcatacctttttcttaaaaaaaaaaaaagtttttgcttcaagtgttttggtgttttgcacttctgtaaacttactagctttaccttctaaaagtactgcattttttacttttttttatgatcaaggaaaagatcattaaaaaaaaacacaaaagaagtttttctttgtgtttggatcaaaaagaaactttgtttttccgcaattgaaggttgtatgtaaatctgctttgtggtgacctgatgtaaacagtgtcttcttaaaatcaaatgtaaatcaattacagattaaaaaaaaaaagcctgtatttaactcatatgatctcccttcagcaacttattttgctttaattgctttaaatcttaagcaatattttttattcagtaaacaaattctttcacaaggtacaaaatcttgcataagctgaactaaaataaaaatgaaaaggagagatta

SEQ ID NO: 746 - DNA, 961 bp, Homo sapiens
ggacaatttgtgggccatttaattcagggcccccaattcgtacgtggagaagtgggaatgcaaaagtactttgacctttaaccttcggtccggcgcggtggagggaaacgcctccgtctctatataaggaattttccggtctcttcgggtcctttttcctctcttcagcgtggggcgcccacaatttgcgcgctctctttctgctgctccccagctctcggatacagccgacaccatgggtttcggagacctgaaaagccctgccggcctccaggtgctcaacgattacctggcggacaagagctacatcgaggggtatgtgccatcacaagcagatgtggcagtatttgaagccgtgtccagcccaccgcctgccgacttgtgtcatgccctacgttggtataatcacatcaagtcttacgaaaaggaaaaggccagcctgccaggagtgaagaaagctttgggcaaatatggtcctgccgatgtggaagacactacaggaagtggagctacagatagtaaagatgatgatgacattgacctctttggatctgatgatgaggaggaaagtgaagaagcaaagaggctaagggaagaacgtcttgcacaatatgaatcaaagaaagccaaaaaacctgcacttgttgccaagtcttccatcttactagatgtgaaaccttgggatgatgagacagatatggcgaaattagaggagtgcgtcagaagcattcaagcagacggcttagtctggggctcatctaaactagttccagtgggatacggaattaagaaacttcaaatacagtgtgtagttgaagatgataaagttggaacagatatgctggaggagcagatcactgcttttgaggactatgtgcagtccatggatgtggctgctttcaacaagatctaaaatccatcctggatcatggcatttaaataaaagattgaaagattaaaa

SEQ ID NO: 747 - DNA, 3075 bp, Homo sapiens
atggttaattttacggtggatcagatccgcgccatcatggacaagaaggccaacatccgcaacatgtctgtcatcgcccacgtggaccatggcaagtccacgctgacagactccctggtgtgcaaggcgggcatcatcgcctcggcccgggccggggagacacgcttcactgatacccggaaggacgagcaggagcgttgcatcaccatcaagtcaactgccatctccctcttctacgagctctcggagaatgacttgaacttcatcaagcagagcaaggacggtgccggcttcctcatcaacctcattgactcccccgggcatgtcgacttctcctcggaggtgactgctgccctccgagtcaccgatggcgcattggtggtggtggactgcgtgtcaggcgtgtgcgtgcagacggagacagtgctgcggcaggccattgccgagcgcatcaagcctgtgctgatgatgaacaagatggaccgcgccctgctggagctgcagctggagcccgaggagctctaccagactttccagcgcatcgtggagaacgtgaacgtcatcatctccacctacggcgagggcgagagcggccccatgggcaacatcatgatcgatcctgtcctcggtaccgtgggctttgggtctggcctccacgggtgggccttcaccctgaagcagtttgccgagatgtatgtggccaagttcgccgccaagggggagggccagttggggcctgccgagcgggccaagaaagtagaggacatgatgaagaagctgtggggtgacaggtactttgacccagccaacggcaagttcagcaagtcagccaccagccccgaagggaagaagctgccacgcaccttctgccagctgatcctggaccccatcttcaaggtgtttgatgcgatcatgaatttcaagaaagaggagacagcaaaactgatagagaaactggacatcaaactggacagcgaggacaaggacaaagaaggcaaacccctgctgaaggctgtgatgcgccgctggctgcctgccggagacgccttgttgcagatgatcaccatccacctgccctcccctgtgacggcccagaagtaccgctgcgagctcctgtacgaggggcccccggacgacgaggctgccatgggcattaaaagctgtgaccccaaaggccctcttatgatgtatatttccaaaatggtgccaacctccgacaaaggtcggttctacgcctttggacgagtcttctcggggctggtctccactggcctgaaggtcaggatcatggggcccaactatacccctgggaagaaggaggacctctacctgaagccaatccagagaacaatcttgatgatgggccgctacgtggagcccatcgaggatgtgccttgtgggaacattgtgggcctcgtgggcgtggaccagttcctggtgaagacgggcaccatcaccaccttcgagcacgcgcacaacatgcgggtgatgaagttcagcgtcagccctgttgtcagagtggccgtggaggccaagaacccggctgacctgcccaagctggtggaggggctgaagcggctggccaagtccgaccccatggtgcagtgcatcatcgaggagtcgggagagcatatcatcgcgggcgccggcgagctgcacctggagatctgcctgaaggacctggaggaggaccacgcctgcatccccatcaagaaatctgacccggtcgtctcgtaccgcgagacggtcagtgaagagtcgaacgtgctctgcctctccaagtcccccaacaagcacaaccggctgtacatgaaggcgcggcccttccccgacggcctggccgaggacatcgataaaggcgaggtgtccgcccgtcaggagctcaagcagcgggcgcgctacctggccgagaagtacgagtgggacgtggctgaggcccgcaagatctggtgctttgggcccgacggcaccggccccaacatcctcaccgacatcaccaagggtgtgcagtacctcaacgagatcaaggacagtgtggtggccggcttccagtgggccaccaaggagggcgcactgtgtgaggagaacatgcggggtgtgcgcttcgacgtccacgacgtcaccctgcacgccgacgccatccaccgcggagggggccagatcatccccacagcacggcgctgcctctatgccagtgtgctgaccgcccagccacgcctcatggagcccatctaccttgtggagatccagtgtccagagcaggtggtcggtggcatctacggggttttgaacaggaagcggggccacgtgttcgaggagtcccaggtggccggcacccccatgtttgtggtcaaggcctatctgcccgtcaacgagtcctttggcttcaccgctgacctgaggtccaacacgggcggccaggcgttcccccagtgtgtgtttgaccactggcagatcctgcccggagaccccttcgacaacagcagccgccccagccaggtggtggcggagacccgcaagcgcaagggcctgaaagaaggcatccctgccctggacaacttcctggacaaattgtaggcggcccttcctgcagcgcctgccgccccggggactcgcagcacccacagcaccacgtcctcgaattctcagacgacacctggagactgtcccgacacagcgacgctcccctgagaggtttctggggcccgctgcgtgccatcactcaaccataacacttgatgccgtttctttcaatatttatttccagagtccggaggcagcagacacgccctcttagtagggacttaatgggccggtcggggagggggaggcgggatgggacacccaacactttttccatttcttcagagggaaactcagatgtccaaactaattttaacaaacgcattaagaggtttatttgggtacatggcccgcagtggcttttgccccagaaaggggaaaggaacacgcgggtagatgatttctagcaggcaggaagtcctgtgcggtgtcaccatgagcactcagctgtactagtgccattggaataataaatttgataaggtgtgaaaa

SEQ ID NO: 748 - DNA, 3132 bp, Homo sapiens
ccgcagaacttggggagccgccgccgccatccgccgccgcagccagcttccgccgccgcaggaccggcccctgccccagcctccgcagccgcggcgcgtccacgcccgcccgcgcccagggcgagtcggggtcgccgcctgcacgcttctcagtgttccccgcgccccgcatgtaacccggccaggcccccgcaacggtgtcccctgcagctccagccccgggctgcacccccccgccccgacaccagctctccagcctgctcgtccaggatggccgcggccaaggccgagatgcagctgatgtccccgctgcagatctctgacccgttcggatcctttcctcactcgcccaccatggacaactaccctaagctggaggagatgatgctgctgagcaacggggctccccagttcctcggcgccgccggggccccagagggcagcggcagcaacagcagcagcagcagcagcgggggcggtggaggcggcgggggcggcagcaacagcagcagcagcagcagcaccttcaaccctcaggcggacacgggcgagcagccctacgagcacctgaccgcagagtcttttcctgacatctctctgaacaacgagaaggtgctggtggagaccagttaccccagccaaaccactcgactgccccccatcacctatactggccgcttttccctggagcctgcacccaacagtggcaacaccttgtggcccgagcccctcttcagcttggtcagtggcctagtgagcatgaccaacccaccggcctcctcgtcctcagcaccatctccagcggcctcctccgcctccgcctcccagagcccacccctgagctgcgcagtgccatccaacgacagcagtcccatttactcagcggcacccaccttccccacgccgaacactgacattttccctgagccacaaagccaggccttcccgggctcggcagggacagcgctccagtacccgcctcctgcctaccctgccgccaagggtggcttccaggttcccatgatccccgactacctgtttccacagcagcagggggatctgggcctgggcaccccagaccagaagcccttccagggcctggagagccgcacccagcagccttcgctaacccctctgtctactattaaggcctttgccactcagtcgggctcccaggacctgaaggccctcaataccagctaccagtcccagctcatcaaacccagccgcatgcgcaagtatcccaaccggcccagcaagacgcccccccacgaacgcccttacgcttgcccagtggagtcctgtgatcgccgcttctcccgctccgacgagctcacccgccacatccgcatccacacaggccagaagcccttccagtgccgcatctgcatgcgcaacttcagccgcagcgaccacctcaccacccacatccgcacccacacaggcgaaaagcccttcgcctgcgacatctgtggaagaaagtttgccaggagcgatgaacgcaagaggcataccaagatccacttgcggcagaaggacaagaaagcagacaaaagtgttgtggcctcttcggccacctcctctctctcttcctacccgtccccggttgctacctcttacccgtccccggttactacctcttatccatccccggccaccacctcatacccatcccctgtgcccacctccttctcctctcccggctcctcgacctacccatcccctgtgcacagtggcttcccctccccgtcggtggccaccacgtactcctctgttccccctgctttcccggcccaggtcagcagcttcccttcctcagctgtcaccaactccttcagcgcctccacagggctttcggacatgacagcaaccttttctcccaggacaattgaaatttgctaaagggaaaggggaaagaaagggaaaagggagaaaaagaaacacaagagacttaaaggacaggaggaggagatggccataggagaggagggttcctcttaggtcagatggaggttctcagagccaagtcctccctctctactggagtggaaggtctattggccaacaatcctttctgcccacttccccttccccaattactattccctttgacttcagctgcctgaaacagccatgtccaagttcttcacctctatccaaagaacttgatttgcatggattttggataaatcatttcagtatcatctccatcatatgcctgaccccttgctcccttcaatgctagaaaatcgagttggcaaaatggggtttgggcccctcagagccctgccctgcacccttgtacagtgtctgtgccatggatttcgtttttcttggggtactcttgatgtgaagataatttgcatattctattgtattatttggagttaggtcctcacttgggggaaaaaaaaaaaaaaaagccaagcaaaccaatggtgatcctctattttgtgatgatgctgtgacaataagtttgaacctttttttttgaaacagcagtcccagtattctcagagcatgtgtcagagtgttgttccgttaacctttttgtaaatactgcttgaccgtactctcacatgtggcaaaatatggtttggtttttcttttttttttttgaaagtgttttttcttcgtccttttggtttaaaaagtttcacgtcttggtgccttttgtgtgatgccccttgctgatggcttgacatgtgcaattgtgagggacatgctcacctctagccttaaggggggcagggagtgatgatttgggggaggctttgggagcaaaataaggaagagggctgagctgagcttcggttctccagaatgtaagaaaacaaaatctaaaacaaaatctgaactctcaaaagtctatttttttaactgaaaatgtaaatttataaatatattcaggagttggaatgttgtagttacctactgagtaggcggcgatttttgtatgttatgaacatgcagttcattattttgtggttctattttactttgtacttgtgtttgcttaaacaaagtgactgtttggcttataaacacattgaatgcgctttattgcccatgggatatgtggtgtatatccttccaaaaaattaaaacgaaaataaagtagctgcgattggg

SEQ ID NO: 749 - DNA, 1864 bp, Homo sapiens
gtggtttttcggatcatgtctggtggctccgcggattataacagagaacatggcggcccagagggaatggaccccgatggtgtcatcgagagcaactggaatgagattgttgataactttgatgatatgaatttaaaggagtctctccttcgtggcatctatgcttacggttttgagaagccttccgctattcagcagagagctattattccctgtattaaagggtatgatgtgattgctcaagctcagtcaggtactggcaagacagccacatttgctatttccatcctgcaacagttggagattgagttcaaggagacccaagcactagtattggcccccaccagagaactggctcaacagatccaaaaggtaattctggcacttggagactatatgggagccacttgtcatgcctgcattggtggaacaaatgttcgaaatgaaatgcaaaaactgcaggctgaagcaccacatattgttgttggtacacccgggagagtgtttgatatgttaaacagaagatacctttctccaaaatggatcaaaatgtttgttttggatgaagcagatgaaatgttgagccgtggttttaaggatcaaatctatgagattttccaaaaactaaacacaagtattcaggttgtgtttgcttctgccacaatgccaactgatgtgttggaagtgaccaaaaaattcatgagagatccaattcgaattctggtgaaaaaggaagaattgacccttgaaggaatcaaacagttttatattaatgttgagagagaggaatggaagttggatacactttgtgacttgtacgagacactgaccattacacaggctgttatttttctcaatacgaggcgcaaggtggactggctgactgagaagatgcatgccagagacttcacagtttctgctctgcatggtgacatggaccagaaggagagagatgttatcatgagggaattccggtcagggtcaagtcgtgttctgatcactactgacttgttggctcgcgggattgatgtgcaacaagtgtctttggttataaattatgatctacctaccaatcgtgaaaactatattcacagaattggcagagggggtcgatttgggaggaaaggtgtggctataaactttgttactgaagaagacaagaggattcttcgtgacattgagactttctacaatactacagtggaggagatgcccatgaatgtggctgaccttatttaattcctgggatgagagttttggatgcagtgctcgctgttgctgaataggcgatcacaacgtgcattgtgcttctttctttgggaatatttgaatcttgtctcaatgctcataacggatcagaaatacagattttgatagcaaagcgacgttagtcgtgagctcttgtgaggaaagtcattggctttatcctctttagagttagactgttggggtgggtataaaagatggggtctgtaaaatctttctttcttagaaatttatttcctagttctgtagaaatggttgtattagatgttctctatcatttaataatatacttgtggactaaaagatataagtgctgtataaaatcagccaattatgttaaactagcatatctgcctttattgtgtttgtcattagcctgagtagaaaggcctttaaaatttttttagaaagcatttgaatgcattttgtttggtattgtatttattcaataaagtatttaattagtgctaagtgtgaactggaccctgttgctaagccccagcaagcaatcctaggtagggtttaatccccagtaaaattgccatattgcacatgtcttaatgaagtttgaatgttaaataaattgtatattcacttt

SEQ ID NO: 750 - DNA, 1826 bp, Homo sapiens
tacctgaccccagccatttcccttctagaaattgttctacagacatatgtaataacatatacaaaaggttattctttcagcagtgtttgtcagagcgagaacattccagagagctgttgcgcagccattggtacctgtattggggaaacatagcatacaatcaagaagcttacagcctcagtggcgaaaattttttcatgtcagagaccgagaactcttgcagtcgtttatgtcatcccttcttctccagacagaagataccaaaaagttgcaatcaaagatctcttcatcttattgataaagccactaataagccaaaatgtctgtcaatgtcaaccgcagcgtgtcagaccagttctatcgctacaagatgccccgtctgattgccaaggttgagggcaaaggcaatggaatcaagacagttatagtcaacatggttgacgttgcaaaggcgcttaatcggcctccaacgtatcccaccaaatattttggttgtgagctgggagcacagacccagtttgatgttaagaatgaccgttacattgtcaatggatctcatgaggcgaataagctgcaagacatgttggatggattcattaaaaaatttgttctctgtcctgaatgtgagaatcctgaaacagatttgcatgtcaatccaaagaagcaaacaataggtaattcttgtaaagcctgtggctatcgaggcatgcttgacacacatcataaactctgcacattcattctcaaaaacccacctgagaatagtgacagtggtacaggaaagaaagaaaaagaaaagaaaaacagaaagggcaaagacaaggaaaatggctccgtatccagcagtgagacaccaccaccaccaccaccaccaaatgaaattaatcctcctccacatacaatggaagaagaggaggatgatgactcgggagaagatacaactgaggaagctcaaaggcgtcgaatggatgaaatcagtgaccatgcaaaagttctgacactcagtgatgatttggaaagaacaattgaggagagggtcaatatcctctttgattttgttaagaaaaagaaagaagagggtgttattgattcatctgacaaagaaatcgttgctgaagcagaaagactggatgtaaaagccatgggccctcttgttctaactgaagttctttttaatgagaagattagagaacagattaagaaatacaggcgccatttcctacgattttgtcacaacaacaaaaaagcccaacggtaccttcttcatggtttggagtgtgtggtagcaatgcatcaagctcagcttatctccaagattccacatatcttgaaggagatgtacgatgcagaccttttagaagaagaggtcatcatcagctggtcggaaaaggcctctaagaaatatgtctccaaagaacttgccaaagagattcgtgtcaaagcagaaccatttataaaatggttgaaggaggcagaggaagaatcttctggtggcgaagaagaagatgaagatgagaacattgaggtggtgtattcgaaggctgccagtgtaccgaaagttgagactgtaaagtcagacaacaaggatgacgacatcgatattgatgccatttaaagggatggatgcaacctagcttaacagtataatgctgcaaattttcctccattatcagccagaagtgcaacatgtatgtgcaaaagctaaaatggcttaacatcatgctacactttacactaaaaatctattactgtgagtgtgaaaaactagtggtggacacatttggatcacatttatacagttataaaaataaaggtttgattttggt

SEQ ID NO: 751 - DNA, 1299 bp, Homo sapiens
ggcacgagggcggcggcggcggtagaggcggcggcggcggcggcagcgggctcggaggcagcggttgggctcgcggcgagcggacggggtcgagtcagtgcgttcgcgcgagttggaatcgaagcctcttaaaatggcagatgacttggacttcgagacaggagatgcaggggcctcagccaccttcccaatgcagtgctcagcattacgtaagaatggctttgtggtgctcaaaggccggccatgtaagatcgtcgagatgtctacttcgaagactggcaagcacggccacgccaaggtccatctggttggtattgacatctttactgggaagaaatatgaagatatctgcccgtcaactcataatatggatgtccccaacatcaaaaggaatgacttccagctgattggcatccaggatgggtacctatcactgctccaggacagcggggaggtacgagaggaccttcgtctccctgagggagaccttggcaaggagattgagcagaagtacgactgtggagaagagatcctgatcacggtgctgtctgccatgacagaggaggcagctgttgcaatcaaggccatggcaaaataactggctcccaggatggcggtggtggcagcagtgatcctctgaacctgcagaggccccctccccgagcctggcctggctctggcccggtcctaagctggactcctcctacacaatttatttgacgttttattttggttttccccaccccctcaatctgtcggggagcccctgcccttcacctagctcccttggccaggagcgagcgaagctgtggccttggtgaagctgccctcctcttctcccctcacactacagccctggtgggggagaagggggtgggtgctgcttgtggtttagtcttttttttttttttttttttttttttaaattcaatctggaatcagaaagcggtggattctggcaaatggtccttgtgccctccccactcatccctggtctggtcccctgttgcccatagccctttaccctgagcaccaccccaacagactggggaccagccccctcgcctgcctgtgtctctccccaaacccctttagatggggagggaagaggaggagaggggaggggacctgccccctcctcaggcatctgggagggccctgcccccatgggctttacccttccctgcgggctctctccccgacacatttgttaaaatcaaacctgaataaaactacaagtttaatatgaaaaaaaaaaaaaaaaaaaaaaaaaaaaaaaaaaaaaaaaaaaaaaaaaaa

SEQ ID NO: 752 - DNA, 777 bp, Homo sapiens
atgctggtcctttatggacacagcacccaggaccttccggaaaccaatgcccgcgtagtcggagggactgaggccgggaggaattcctggccctctcagatttccctccagtaccggtctggaggttcccggtatcacacctgtggagggacccttatcagacagaactgggtgatgacagctgctcactgcgtggattaccagaagactttccgcgtggtggctggagaccataacctgagccagaatgatggcactgagcagtacgtgagtgtgcagaagatcgtggtgcatccatactggaacagcgataacgtggctgccggctatgacatcgccctgctgcgcctggcccagagcgttaccctcaatagctatgtccagctgggtgttctgccccaggagggagccatcctggctaacaacagtccctgctacatcacaggctggggcaagaccaagaccaatgggcagctggcccagaccctgcagcaggcttacctgccctctgtggactatgccatctgctccagctcctcctactggggctccactgtgaagaacaccatggtgtgtgctggtggagatggagttcgctctggatgccagggtgactctgggggccccctccattgcttggtgaatggcaagtattctctccatggagtgaccagctttgtgtccagccggggctgtaatgtctccaggaagcctacagtcttcacccaggtctctgcttacatctcctggataaataatgtcatcgcctccaactga

SEQ ID NO: 753 - DNA, 920 bp, Homo sapiens
gcacggaggggcagagaccccggagccccagccccaccatgaccctcggccgccgactcgcgtgtcttttcctcgcctgtgtcctgccggccttgctgctggggggcaccgcgctggcctcggagattgtggggggccggcgagcgcggccccacgcgtggcccttcatggtgtccctgcagctgcgcggaggccacttctgcggcgccaccctgattgcgcccaacttcgtcatgtcggccgcgcactgcgtggcgaatgtaaacgtccgcgcggtgcgggtggtcctgggagcccataacctctcgcggcgggagcccacccggcaggtgttcgccgtgcagcgcatcttcgaaaacggctacgaccccgtaaacttgctcaacgacatcgtgattctccagctcaacgggtcggccaccatcaacgccaacgtgcaggtggcccagctgccggctcagggacgccgcctgggcaacggggtgcagtgcctggccatgggctggggccttctgggcaggaaccgtgggatcgccagcgtcctgcaggagctcaacgtgacggtggtgacgtccctctgccgtcgcagcaacgtctgcactctcgtgaggggccggcaggccggcgtctgtttcggggactccggcagccccttggtctgcaacgggctaatccacggaattgcctccttcgtccggggaggctgcgcctcagggctctaccccgatgcctttgccccggtggcacagtttgtaaactggatcgactctatcatccaacgctccgaggacaacccctgtccccacccccgggacccggacccggccagcaggacccactgagaagggctgcccgggtcacctcagctgcccacacccacactctccagcatctggcacaataaacattctctgttttgt

SEQ ID NO: 754 - DNA, 3000 bp, Homo sapiens
tccaattcaaaaagaaagtctctgacgttagttagtttaatttaacatctttttatgtgtaacacttgactttggaagcaaaaatgaactttgcggagagagagggctctaagagatactgcattcaaacgaaacatgtggccattctctgtgcggtggtggtgggtgtaggattaatagtgggacttgccgtgggcttgaccagatcgtgtgactccagcggggacggcgggccgggcactgcgccagctccttcccacctgccttcttccacggccagcccctcaggtcctcctgcccaggaccaggacatctgcccggccagtgaggatgagagcggacagtggaaaaactttcgactgccggacttcgtcaacccagtccactacgacctgcacgtgaagcccctgttggaggaggacacctacacgggcaccgtgagcatctccatcaacctgagcgctcccacccggtacctgtggctgcacctccgggagaccaggatcacccggctcccggagctgaagaggccctctggggaccaggtgcaagtccggaggtgtttcgagtacaaaaagcaggagtacgtggtggtcgaggcggaggaagagcttacccccagcagtggagatggcctgtatctcctgaccatggagttcgccggctggctgaacggctccctcgtgggattttatagaaccacctacacggagaacggacgagtcaagagcatagcggccaccgatcatgaaccaacagatgccaggaaatcttttccttgttttgatgagcccaacaaaaaggcaacttatacaatatctatcacccatcccaaagaatacggagcactttcaaatatgccagtggcgaaagaagagtcagtggatgataaatggactcgaacaacttttgagaagtctgtccccatgagcacgtacctggtgtgctttgctgtacatcaatttgactctgtaaagagaatatcaaatagtggaaaacctcttacaatttatgtccagccagagcaaaagcacacagccgaatatgctgcaaacataactaaaagtgtgtttgattattttgaagaatactttgctatgaattattctcttcctaaattagataaaatcgctattccagattttggcactggtgccatggagaactggggactcatcacgtacagagaaacgaacctgctttatgaccctaaggaatcagcctcatcaaaccaacagagggtggccactgtggttgcccatgaacttgtgcatcagtggtttggaaatattgtgaccatggactggtgggaagacttgtggctaaatgaaggatttgcttctttctttgagtttctgggagtaaaccatgcagaaacagactggcaaatgcgtgaccaaatgttacttgaagatgtattacctgttcaagaggatgattctttgatgtcttcgcatccaattattgtgactgtgacaacccctgatgaaataacatctgtttttgatggaatatcctatagcaagggatcttctattttgagaatgcttgaagactggataaaaccagagaattttcaaaaaggatgtcagatgtacttggaaaaataccaattcaagaatgcaaaaacttctgatttttgggcagcactggaagaggcaagtaggctaccagtgaaagaagtaatggacacctggaccagacagatgggttatcctgtgcttaacgtgaacggtgtcaagaacatcacacagaaacgctttttgttggacccaagagctaacccttctcagcccccttcagatcttggttatacatggaatatcccagttaaatggactgaagataatataacaagcagtgtgttatttaataggtcagaaaaagaaggaatcactttgaactcctctaatcctagtggaaatgcttttctcaaaataaacccagatcatattgggttttatcgtgtaaattatgaagtagcaacttgggactcgatagctacagcgctctccttgaaccacaagacattttcttcagcagatcgtgcaagtcttattgatgatgcttttgccttggcaagagctcaacttctagattataaggtggctttgaacttgaccaagtatctcaaaagggaagagaattttttaccatggcagagagtaatttcagctgtaacctacatcattagcatgtttgaagatgataaagagctatatcctatgattgaggaatacttccaaggtcaagtgaagcctattgcagattctctgggatggaatgatgctggagaccatgtcacaaagttactccgttcctccgtgttagggtttgcgtgcaagatgggagacagagaagccttgaacaatgcttcctcgttatttgagcagtggctaaatgggactgtaagccttcccgtaaatctcaggcttctggtgtatcggtatgggatgcagaactctggcaatgagatttcatggaactacactcttgagcaataccagaaaacttcattagctcaagaaaaagaaaaactgctgtatggattagcatcagtgaagaacgttactcttttgtcaaggtatttggatttgctcaaggacacgaaccttattaaaactcaggatgtgtttacagtcattcgatatatctcatataacagctatgggaagaacatggcctggaattggatacaactcaactgggactatctagtcaacagatatacactcaataacagaaaccttggccgaattgtcacaatagcagagccattcaacactgaactgcaactgtggcagatggagagcttttttgcaaaatatccacaagctggagcaggagaaaaacctagggaacaagtgctggaaacagtgaaaaacaatatagagtggctaaaacaacatagaaacaccatcagagaatggttttttaatttacttgagagtggttaatgtattcaaatgttagagtttaattttgtgaatctattgtttc

SEQ ID NO: 755 - DNA, 852 bp, Homo sapiens
caccctgtaagtggctgcggcgggaagatggcggagctgcgcgtgctcgtagctgtcaagagggtcatcgactacgccgtgaagatccgagtgaagcctgacaggaccggtgtggtcacggatggtgtgaagcactccatgaaccccttctgtgagatcgcggtggaggaggctgtgcggctcaaggagaagaagctggtgaaggaggtcatcgccgtcagctgtgggcctgcacagtgccaggagacgattcgtaccgccctggccatgggtgcagaccgaggtatccacgtggaggtgcccccagcagaagcagaacgcttgggtcccctgcaggtggctcgggtcctggccaagctggcagagaaggagaaggtggacctggtgctgctgggcaaacaggccatcgatgatgactgtaaccagacagggcagatgacagctggatttcttgactggccacagggcacattcgcctcccaggtgacgctggagggggacaagttgaaagtggagcgggagatcgatgggggcctggagaccctgcgcctgaagctgccagctgtggtgacagctgacctgaggctcaacgagccccgctacgccacgctgcccaacatcatgaaagccaagaagaagaagatcgaggtgatcaagcctggggacctgggtgtggacctgacctccaagctctctgtgatcagtgtggaggacccgccccagcgcacggccggcgtcaaggtggagaccactgaggacctggtggccaagctgaaggagattgggcggatttgagcccctcccagagatggcaataaaactgactctcaacatcaaaaaaaaaaaaaaaaa

SEQ ID NO: 756 - DNA, 3592 bp, Homo sapiens
ggcggggggcgcacagagccagaggggcttgcgagcggcggctgagggaccgcggggagggggcgccgagcggctccagcgcagagactctcactgcacgccggaggccccttcctcgctccgcccgcgcgaccgcgcgccccagtcccgccccgccccgctaaccgccccagacacagcgctcgccgagggtcgcttggaccctgatcttacccgtgggcaccctgcgctctgcctgccgcgaagaccggctccccgacccgcagaagtcaggagagagggtgaagcggagcagcccgaggcggggcagcctcccggagcagcgccgcgcagagcccgggacaatggggccgcggcggctgctgctggtggccgcctgcttcagtctgtgcggcccgctgttgtctgcccgcacccgggcccgcaggccagaatcaaaagcaacaaatgccaccttagatccccggtcatttcttctcaggaaccccaatgataaatatgaaccattttgggaggatgaggagaaaaatgaaagtgggttaactgaatacagattagtctccatcaataaaagcagtcctcttcaaaaacaacttcctgcattcatctcagaagatgcctccggatatttgaccagctcctggctgacactctttgtcccatctgtgtacaccggagtgtttgtagtcagcctcccactaaacatcatggccatcgttgtgttcatcctgaaaatgaaggtcaagaagccggcggtggtgtacatgctgcacctggccacggcagatgtgctgtttgtgtctgtgctcccctttaagatcagctattacttttccggcagtgattggcagtttgggtctgaattgtgtcgcttcgtcactgcagcattttactgtaacatgtacgcctctatcttgctcatgacagtcataagcattgaccggtttctggctgtggtgtatcccatgcagtccctctcctggcgtactctgggaagggcttccttcacttgtctggccatctgggctttggccatcgcaggggtagtgcctctcgtcctcaaggagcaaaccatccaggtgcccgggctcaacatcactacctgtcatgatgtgctcaatgaaaccctgctcgaaggctactatgcctactacttctcagccttctctgctgtcttcttttttgtgccgctgatcatttccacggtctgttatgtgtctatcattcgatgtcttagctcttccgcagttgccaaccgcagcaagaagtcccgggctttgttcctgtcagctgctgttttctgcatcttcatcatttgcttcggacccacaaacgtcctcctgattgcgcattactcattcctttctcacacttccaccacagaggctgcctactttgcctacctcctctgtgtctgtgtcagcagcataagctcgtgcatcgaccccctaatttactattacgcttcctctgagtgccagaggtacgtctacagtatcttatgctgcaaagaaagttccgatcccagcagttataacagcagtgggcagttgatggcaagtaaaatggatacctgctctagtaacctgaataacagcatatacaaaaagctgttaacttaggaaaagggactgctgggaggttaaaaagaaaagtttataaaagtgaataacctgaggattctattagtccccacccaaactttattgattcacctcctaaaacaacagatgtacgacttgcatacctgctttttatgggagctgtcaagcatgtatttttgtcaattaccagaaagataacaggacgagatgacggtgttattccaagggaatattgccaatgctacagtaataaatgaatgtcacttctggatatagctaggtgacatatacatacttacatgtgtgtatatgtagatgtatgcacacacatatattatttgcagtgcagtatagaataggcactttaaaacactctttccccgcaccccagcaattatgaaaataatctctgattccctgatttaatatgcaaagtctaggttggtagagtttagccctgaacatttcatggtgttcatcaacagtgagagactccatagtttgggcttgtaccacttttgcaaataagtgtattttgaaattgtttgacggcaaggtttaagttattaagaggtaagacttagtactatctgtgcgtagaagttctagtgttttcaattttaaacatatccaagtttgaattcctaaaattatggaaacagatgaaaagcctctgttttgatatgggtagtattttttacattttacacactgtacacataagccaaaactgagcataagtcctctagtgaatgtaggctggctttcagagtaggctattcctgagagctgcatgtgtccgcccccgatggaggactccaggcagcagacacatgccagggccatgtcagacacagattggccagaaaccttcctgctgagcctcacagcagtgagactggggccactacatttgctccatcctcctgggattggctgtgaactgatcatgtttatgagaaactggcaaagcagaatgtgatatcctaggaggtaatgaccatgaaagacttctctacccatcttaaaaacaacgaaagaaggcatggacttctggatgcccatccactgggtgtaaacacatctagtagttgttctgaaatgtcagttctgatatggaagcacccattatgcgctgtggccactccaataggtgctgagtgtacagagtggaataagacagagacctgccctcaagagcaaagtagatcatgcatagagtgtgatgtatgtgtaataaatatgtttcacacaaacaaggcctgtcagctaaagaagtttgaacatttgggttactatttcttgtggttataacttaatgaaaacaatgcagtacaggacatatattttttaaaataagtctgatttaattgggcactatttatttacaaatgttttgctcaatagattgctcaaatcaggttttcttttaagaatcaatcatgtcagtctgcttagaaataacagaagaaaatagaattgacattgaaatctaggaaaattattctataatttccatttacttaagacttaatgagactttaaaagcattttttaacctcctaagtatcaagtatagaaaatcttcatggaattcacaaagtaatttggaaattaggttgaaacatatctcttatcttacgaaaaaatggtagcattttaaacaaaatagaaagttgcaaggcaaatgtttatttaaaagagcaggccaggcgcggtggctcacgcctgtaatcccagcactttgggaggctgaggcgggtggatcacgaggtcaggagatcgagaccatcctggctaacacggtgaaacccgtctctactaaaaatgcaaaaaaaattagccgggcgtggtggcaggcacctgtagtcccagctactcgggaggctgaggcaggagactggcgtgaacccaggaggcggaccttgtagtgagccgagatcgcgccactgtgctccagcctgggcaacagagcaagactccatctc

SEQ ID NO: 757 - DNA, 2153 bp, Homo sapiens
aagactgcgagctccccgcaccccctcgcactccctctggccggcccagggcgccttcagcccaacctccccagccccacgggcgccacggaacccgctcgatctcgccgccaactggtagacatggagacccctgcctggccccgggtcccgcgccccgagaccgccgtcgctcggacgctcctgctcggctgggtcttcgcccaggtggccggcgcttcaggcactacaaatactgtggcagcatataatttaacttggaaatcaactaatttcaagacaattttggagtgggaacccaaacccgtcaatcaagtctacactgttcaaataagcactaagtcaggagattggaaaagcaaatgcttttacacaacagacacagagtgtgacctcaccgacgagattgtgaaggatgtgaagcagacgtacttggcacgggtcttctcctacccggcagggaatgtggagagcaccggttctgctggggagcctctgtatgagaactccccagagttcacaccttacctggagacaaacctcggacagccaacaattcagagttttgaacaggtgggaacaaaagtgaatgtgaccgtagaagatgaacggactttagtcagaaggaacaacactttcctaagcctccgggatgtttttggcaaggacttaatttatacactttattattggaaatcttcaagttcaggaaagaaaacagccaaaacaaacactaatgagtttttgattgatgtggataaaggagaaaactactgtttcagtgttcaagcagtgattccctcccgaacagttaaccggaagagtacagacagcccggtagagtgtatgggccaggagaaaggggaattcagagaaatattctacatcattggagctgtggtatttgtggtcatcatccttgtcatcatcctggctatatctctacacaagtgtagaaaggcaggagtggggcagagctggaaggagaactccccactgaatgtttcataaaggaagcactgttggagctactgcaaatgctatattgcactgtgaccgagaacttttaagaggatagaatacatggaaacgcaaatgagtatttcggagcatgaagaccctggagttcaaaaaactcttgatatgacctgttattaccattagcattctggttttgacatcagcattagtcactttgaaatgtaacgaatggtactacaaccaattccaagttttaatttttaacaccatggcaccttttgcacataacatgctttagattatatattccgcacttaaggattaaccaggtcgtccaagcaaaaacaaatgggaaaatgtcttaaaaaatcctgggtggacttttgaaaagcttttttttttttttttttttgagacggagtcttgctctgttgcccaggctggagtgcagtagcacgatctcggctcacttgcaccctccgtctctcgggttcaagcaattgtctgcctcagcctcccgagtagctgggattacaggtgcgcactaccacgccaagctaatttttgtattttttagtagagatggggtttcaccatcttggccaggctggtcttgaattcctgacctcagtgatccacccaccttggcctcccaaagatgctagtattatgggcgtgaaccaccatgcccagccgaaaagcttttgaggggctgacttcaatccatgtaggaaagtaaaatggaaggaaattgggtgcatttctaggacttttctaacatatgtctataatatagtgtttaggttcttttttttttcaggaatacatttggaaattcaaaacaattgggcaaactttgtattaatgtgttaagtgcaggagacattggtattctgggcagcttcctaatatgctttacaatctgcactttaactgacttaagtggcattaaacatttgagagctaactatatttttataagactactatacaaactacagagtttatgatttaaggtacttaaagcttctatggttgacattgtatatataattttttaaaaaggtttttctatatggggattttctatttatgtaggtaatattgttctatttgtatatattgagataatttatttaatatactttaaataaaggtgactgggaattgtt

SEQ ID NO: 758 - DNA, 574 bp, Homo sapiens
cagtgacgtgacacgcagcccacggtctgtactgacgcgccctcgcttcttcctctttctcgactccatcttcgcggtagctgggaccgccgttcagtcgccaatatgcagctctttgtccgcgcccaggagctacacaccttcgaggtgaccggccaggaaacggtcgcccagatcaaggctcatgtagcctcactggagggcattgccccggaagatcaagtcgtgctcctggcaggcgcgcccctggaggatgaggccactctgggccagtgcggggtggaggccctgactaccctggaagtagcaggccgcatgcttggaggtaaagtccatggttccctggcccgtgctggaaaagtgagaggtcagactcctaaggtggccaaacaggagaagaagaagaagaagacaggtcgggctaagcggcggatgcagtacaaccggcgctttgtcaacgttgtgcccacctttggcaagaagaagggccccaatgccaactcttaagtcttttgtaattctggctttctctaataaaaaagccacttagttcagtcaaaaaaaaaaaaaaaaa

SEQ ID NO: 759 - DNA, 6802 bp, Homo sapiens
cggccccagaaaacccgagcgagtagggggcggcgcgcaggagggaggagaactgggggcgcgggaggctggtgggtgtcgggggtggagatgtagaagatgtgacgccgcggcccggcgggtgccagattagcggacggctgcccgcggttgcaacgggatcccgggcgctgcagcttgggaggcggctctccccaggcggcgtccgcggagacacccatccgtgaaccccaggtcccgggccgccggctcgccgcgcaccaggggccggcggacagaagagcggccgagcggctcgaggctgggggaccgcgggcgcggccgcgcgctgccgggcgggaggctggggggccggggccggggccgtgccccggagcgggtcggaggccggggccggggccgggggacggcggctccccgcgcggctccagcggctcggggatcccggccgggccccgcagggaccatggcagccgggagcatcaccacgctgcccgccttgcccgaggatggcggcagcggcgccttcccgcccggccacttcaaggaccccaagcggctgtactgcaaaaacgggggcttcttcctgcgcatccaccccgacggccgagttgacggggtccgggagaagagcgaccctcacatcaagctacaacttcaagcagaagagagaggagttgtgtctatcaaaggagtgtgtgctaaccgttacctggctatgaaggaagatggaagattactggcttctaaatgtgttacggatgagtgtttcttttttgaacgattggaatctaataactacaatacttaccggtcaaggaaatacaccagttggtatgtggcactgaaacgaactgggcagtataaacttggatccaaaacaggacctgggcagaaagctatactttttcttccaatgtctgctaagagctgattttaatggccacatctaatctcatttcacatgaaagaagaagtatattttagaaatttgttaatgagagtaaaagaaaataaatgtgtatagctcagtttggataattggtcaaacaattttttatccagtagtaaaatatgtaaccattgtcccagtaaagaaaaataacaaaagttgtaaaatgtatattctcccttttatattgcatctgctgttacccagtgaagcttacctagagcaatgatctttttcacgcatttgctttattcgaaaagaggcttttaaaatgtgcatgtttagaaacaaaatttcttcatggaaatcatatacattagaaaatcacagtcagatgtttaatcaatccaaaatgtccactatttcttatgtcattcgttagtctacatgtttctaaacatataaatgtgaatttaatcaattcctttcatagttttataattctctggcagttccttatgatagagtttataaaacagtcctgtgtaaactgctggaagttcttccacagtcaggtcaattttgtcaaacccttctctgtacccatacagcagcagcctagcaactctgctggtgatgggagttgtattttcagtcttcgccaggtcattgagatccatccactcacatcttaagcattcttcctggcaaaaatttatggtgaatgaatatggctttaggcggcagatgatatacatatctgacttcccaaaagctccaggatttgtgtgctgttgccgaatactcaggacggacctgaattctgattttataccagtctcttcaaaaacttctcgaaccgctgtgtctcctacgtaaaaaaagagatgtacaaatcaataataattacacttttagaaactgtatcatcaaagattttcagttaaagtagcattatgtaaaggctcaaaacattaccctaacaaagtaaagttttcaatacaaattctttgccttgtggatatcaagaaatcccaaaatattttcttaccactgtaaattcaagaagcttttgaaatgctgaatatttctttggctgctacttggaggcttatctacctgtacatttttggggtcagctctttttaacttcttgctgctctttttcccaaaaggtaaaaatatagattgaaaagttaaaacattttgcatggctgcagttcctttgtttcttgagataagattccaaagaacttagattcatttcttcaacaccgaaatgctggaggtgtttgatcagttttcaagaaacttggaatataaataattttataattcaacaaaggttttcacattttataaggttgatttttcaattaaatgcaaatttgtgtggcaggatttttattgccattaacatatttttgtggctgctttttctacacatccagatggtccctctaactgggctttctctaattttgtgatgttctgtcattgtctcccaaagtatttaggagaagccctttaaaaagctgccttcctctaccactttgctggaaagcttcacaattgtcacagacaaagatttttgttccaatactcgttttgcctctatttttcttgtttgtcaaatagtaaatgatatttgcccttgcagtaattctactggtgaaaaacatgcaaagaagaggaagtcacagaaacatgtctcaattcccatgtgctgtgactgtagactgtcttaccatagactgtcttacccatcccctggatatgctcttgttttttccctctaatagctatggaaagatgcatagaaagagtataatgttttaaaacataaggcattcatctgccatttttcaattacatgctgacttcccttacaattgagatttgcccataggttaaacatggttagaaacaactgaaagcataaaagaaaaatctaggccgggtgcagtggctcatgcctatattccctgcactttgggaggccaaagcaggaggatcgcttgagcccaggagttcaagaccaacctggtgaaaccccgtctctacaaaaaaacacaaaaaatagccaggcatggtggcgtgtacatgtggtctcagatacttgggaggctgaggtgggagggttgatcacttgaggctgagaggtcaaggttgcagtgagccataatcgtgccactgcagtccagcctaggcaacagagtgagactttgtctcaaaaaaagagaaattttccttaataagaaaagtaatttttactctgatgtgcaatacatttgttattaaatttattatttaagatggtagcactagtcttaaattgtataaaatatcccctaacatgtttaaatgtccatttttattcattatgctttgaaaaataattatggggaaatacatgtttgttattaaatttattattaaagatagtagcactagtcttaaatttgatataacatctcctaacttgtttaaatgtccatttttattctttatgcttgaaaataaattatggggatcctatttagctcttagtaccactaatcaaaagttcggcatgtagctcatgatctatgctgtttctatgtcgtggaagcaccggatgggggtagtgagcaaatctgccctgctcagcagtcaccatagcagctgactgaaaatcagcactgcctgagtagttttgatcagtttaacttgaatcactaactgactgaaaattgaatgggcaaataagtgcttttgtctccagagtatgcgggagacccttccacctcaagatggatatttcttccccaaggatttcaagatgaattgaaatttttaatcaagatagtgtgctttattctgttgtattttttattattttaatatactgtaagccaaactgaaataacatttgctgttttataggtttgaagaacataggaaaaactaagaggttttgtttttatttttgctgatgaagagatatgtttaaatatgttgtattgttttgtttagttacaggacaataatgaaatggagtttatatttgttatttctattttgttatatttaataatagaattagattgaaataaaatataatgggaaataatctgcagaatgtgggtttcctggtgtttcctctgactctagtgcactgatgatctctgataaggctcagctgctttatagttctctggctaatgcagcagatactcttcctgccagtggtaatacgattttttaagaaggcagtttgtcaattttaatcttgtggatacctttatactcttagggtattattttatacaaaagccttgaggattgcattctattttctatatgaccctcttgatatttaaaaaacactatggataacaattcttcatttacctagtattatgaaagaatgaaggagttcaaacaaatgtgtttcccagttaactagggtttactgtttgagccaatataaatgtttaactgtttgtgatggcagtattcctaaagtacattgcatgttttcctaaatacagagtttaaataatttcagtaattcttagatgattcagcttcatcattaagaatatcttttgttttatgttgagttagaaatgccttcatatagacatagtctttcagacctctactgtcagttttcatttctagctgctttcagggttttatgaattttcaggcaaagctttaatttatactaagcttaggaagtatggctaatgccaacggcagtttttttcttcttaattccacatgactgaggcatatatgatctctgggtaggtgagttgttgtgacaaccacaagcactttttttttttttaaagaaaaaaaggtagtgaatttttaatcatctggactttaagaaggattctggagtatacttaggcctgaaattatatatatttggcttggaaatgtgtttttcttcaattacatctacaagtaagtacagctgaaattcagaggacccataagagttcacatgaaaaaaatcaattcatttgaaaaggcaagatgcaggagagaggaagccttgcaaacctgcagactgctttttgcccaatatagattgggtaaggctgcaaaacataagcttaattagctcacatgctctgctctcacgtggcaccagtggatagtgtgagagaattaggctgtagaacaaatggccttctctttcagcattcacaccactacaaaatcatcttttatatcaacagaagaataagcataaactaagcaaaaggtcaataagtacctgaaaccaagattggctagagatatatcttaatgcaatccattttctgatggattgttacgagttggctatataatgtatgtatggtattttgatttgtgtaaaagttttaaaaatcaagctttaagtacatggacatttttaaataaaatatttaaagacaatttagaaaattgccttaatatcattgttggctaaatagaataggggacatgcatattaaggaaaaggtcatggagaaataatattggtatcaaacaaatacattgatttgtcatgatacacattgaatttgatccaatagtttaaggaataggtaggaaaatttggtttctatttttcgatttcctgtaaatcagtgacataaataattcttagcttattttatatttccttgtcttaaatactgagctcagtaagttgtgttaggggattatttctcagttgagactttcttatatgacattttactatgttttgacttcctgactattaaaaataaatagtagaaacaattttcataaagtgaagaattatataatcactgctttataactgactttattatatttatttcaaagttcatttaaaggctactattcatcctctgtgatggaatggtcaggaatttgttttctcatagtttaattccaacaacaatattagtcgtatccaaaataacctttaatgctaaactttactgatgtatatccaaagcttctccttttcagacagattaatccagaagcagtcataaacagaagaataggtggtatgttcctaatgatattatttctactaatggaataaactgtaatattagaaattatgctgctaattatatcagctctgaggtaatttctgaaatgttcagactcagtcggaacaaattggaaaatttaaatttttattcttagctataaagcaagaaagtaaacacattaatttcctcaacatttttaagccaattaaaaatataaaagatacacaccaatatcttcttcaggctctgacaggcctcctggaaacttccacatatttttcaactgcagtataaagtcagaaaataaagttaacataactttcactaacacacacatatgtagatttcacaaaatccacctataattggtcaaagtggttgagaatatattttttagtaattgcatgcaaaatttttctagcttccatcctttctccctcgtttcttctttttttgggggagctggtaactgatgaaatcttttcccaccttttctcttcaggaaatataagtggttttgtttggttaacgtgatacattctgtatgaatgaaacattggagggaaacatctactgaatttctgtaatttaaaatattttgctgctagttaactatgaacagatagaagaatcttacagatgctgctataaataagtagaaaatataaatttcatcactaaaatatgctattttaaaatctatttcctatattgtatttctaatcagatgtattactcttattatttctattgtatgtgttaatgattttatgtaaaaatgtaattgcttttcatgagtagtatgaataaaattgattagtttgtgttttcttgtctcccgaaaaaaaaaaaaaaaaaaaaaaaaaaaaaa

SEQ ID NO: 760 - DNA, 5723 bp, Homo sapiens
gcagccgccacattcaacaggcagcagcgcagcgggcgcgccgctggggagagcaagcggcccgcggcgtccgtccgtccttccgtccgcggccctgtcagctggagcgcggcgcaggctctgccccggcccggcggctctggccggccgtccagtccgtgcggcggaccccgaggagcctcgatgtggatggccccgcgaagttaagttctgggctcgcgcttccactccgccgcgccttcctcccagtttccgtccgctcgccgcaccggcttcgttcccccaaatctcggaccgtcccttcgcgccccctccccgtccgcccccagtgctgcgttctccccctcttggctctcctgcggctgggggaggggcgggggtcaccatggccgaggcgcctcaggtggtggagatcgacccggacttcgagccgctgccccggccgcgctcgtgcacctggccgctgcccaggccggagtttagccagtccaactcggccacctccagcccggcgccgtcgggcagcgcggctgccaaccccgacgccgcggcgggcctgccctcggcctcggctgccgctgtcagcgccgacttcatgagcaacctgagcttgctggaggagagcgaggacttcccgcaggcgcccggctccgtggcggcggcggtggcggcggcggccgccgcggccgccaccggggggctgtgcggggacttccagggcccggaggcgggctgcctgcacccagcgccaccgcagcccccgccgcccgggccgctgtcgcagcacccgccggtgccccccgccgccgctgggccgctcgcggggcagccgcgcaagagcagctcgtcccgccgcaacgcgtggggcaacctgtcctacgccgacctcatcaccaaggccatcgagagctcggcggagaagcggctcacgctgtcgcagatctacgagtggatggtcaagagcgtgccctacttcaaggataagggtgacagcaacagctcggcgggctggaagaattcaattcgtcataatctgtccctacacagcaagttcattcgtgtgcagaatgaaggaactggaaaaagttcttggtggatgctcaatccagagggtggcaagagcgggaaatctcctaggagaagagctgcatccatggacaacaacagtaaatttgctaagagccgaagccgagctgccaagaagaaagcatctctccagtctggccaggagggtgctggggacagccctggatcacagttttccaaatggcctgcaagccctggctctcacagcaatgatgactttgataactggagtacatttcgccctcgaactagctcaaatgctagtactattagtgggagactctcacccattatgaccgaacaggatgatcttggagaaggggatgtgcattctatggtgtacccgccatctgccgcaaagatggcctctactttacccagtctgtctgagataagcaatcccgaaaacatggaaaatcttttggataatctcaaccttctctcatcaccaacatcattaactgtttcgacccagtcctcacctggcaccatgatgcagcagacgccgtgctactcgtttgcgccaccaaacaccagtttgaattcacccagcccaaactaccaaaaatatacatatggccaatccagcatgagccctttgccccagatgcctatacaaacacttcaggacaataagtcgagttatggaggtatgagtcagtataactgtgcgcctggactcttgaaggagttgctgacttctgactctcctccccataatgacattatgacaccagttgatcctggggtagcccagcccaacagccgggttctgggccagaacgtcatgatgggccctaattcggtcatgtcaacctatggcagccaggcatctcataacaaaatgatgaatcccagctcccatacccaccctggacatgctcagcagacatctgcagttaacgggcgtcccctgccccacacggtaagcaccatgccccacacctcgggtatgaaccgcctgacccaagtgaagacacctgtacaagtgcctctgccccaccccatgcagatgagtgccctggggggctactcctccgtgagcagctgcaatggctatggcagaatgggccttctccaccaggagaagctcccaagtgacttggatggcatgttcattgagcgcttagactgtgacatggaatccatcattcggaatgacctcatggatggagatacattggattttaactttgacaatgtgttgcccaaccaaagcttcccacacagtgtcaagacaacgacacatagctgggtgtcaggctgagggttagtgagcaggttacacttaaaagtacttcagattgtctgacagcaggaactgagagaagcagtccaaagatgtctttcaccaactcccttttagttttcttggttaaaaaaaaaaacaaaaaaaaaaaccctcctttttttcctttcgtcagacttggcagcaaagacatttttcctgtacaggatgtttgcccaatgtgtgcaggttatgtgctgctgtagataaggactgtgccattggaaatttcattacaatgaagtgccaaactcactacaccatataattgcagaaaagattttcagatcctggtgtgctttcaagttttgtatataagcagtagatacagattgtatttgtgtgtgtttttggtttttctaaatatccaattggtccaaggaaagtttatactctttttgtaatactgtgatgggcctcatgtcttgataagttaaacttttgtttgtactacctgttttctgcggaactgacggatcacaaagaactgaatctccattctgcatctccattgaacagccttggacctgttcacgttgccacagaattcacatgagaaccaagtagcctgttatcaatctgctaaattaatggacttgttaaacttttggaaaaaaaaagattaaatgccagctttgtacaggtcttttctatttttttttgtttattttgttatttgcaaatttgtacaaacatttaaatggttctaatttccagataaatgatttttgatgttattgttgggacttaagaacatttttggaatagatattgaactgtaataatgttttcttaaaactagagtctactttgttacatagtcagcttgtaaattttgtggaaccacaggtatttggggcagcattcataattttcattttgtattctaactggattagtactaattttatacatgcttaactggtttgtacactttgggatgctacttagtgatgtttctgactaatcttaaatcattgtaattagtacttgcatattcaacgtttcaggccctggttgggcaggaaagtgatgtatagttatggacactttgcgtttcttatttaggataacttaatatgtttttatgtatgtattttaaagaaatttcatctgcttctactgaactatgcgtactgcatagcatcaagtcttctctagagacctctgtagtcctgggaggcctcataatgtttgtagatcagaaaagggagatctgcatctaaagcaatggtcctttgtcaaacgagggattttgatccacttcaccattttgagttgagctttagcaaaagtttcccctcataattctttgctcttgtttcagtccaggtggaggttggttttgtagttctgccttgaggaattatgtcaacactcatacttcatctcattctcccttctgccctgcagattagattacttagcacactgtggaagtttaagtggaaggagggaatttaaaaatgggacttgagtggtttgtagaatttgtgttcataagttcagatgggtagcaaatggaatagaacttacttaaaaattggggagatttatttgaaaaccagctgtaagttgtgcattgagattatgttaaaagccttggcttaagaatttgaaaatttctttagcctgtagcaacctaaactgtaattcctatcattatgttttattactttccaattacctgtaactgacagaccaaattaattggctttgtgtcctatttagtccatcagtattttcaagtcatgtggaaagcccaaagtcatcacaatgaagagaacaggtgcacagcactgttcctcttgtgttcttgagaaggatctaatttttctgtatatagcccacatcacacttgctttgtcttgtatgttaattgcatcttcattggcttggtatttcctaaatgtttaacaagaacacaagtgttcctgataagatttcctacagtaagccagctgtattgtaagcttcccaccgtgatgatcatttttttgaagattcattgaacagccaccactctatcatcctcattttggggcagtccaagacatagctggttttagaaacccaagttcctctaagcacagcctcccgggtatgtaactgaacttggtgccaaagtacttgtgtactaatttctattactacgtactgtcactttcctcccgtgccattactgcatcataatacaaggaacctcagagcccccatttgttcattaaagaggcaactacagccaaaatcactgttaaaatcttactacttcatggagtagctcttaggaaaatatatcttcctcctgagtctgggtaattatacctctcccaagcccccattgtgtgttgaaatcctgtcatgaatccttggtagctctctgagaacagtgaagtccagggaaaggcatctggtctgtctggaaagcaaacattatgtggcctctggtagtttttttcctgtaagaatactgactttctggagtaatgagtatatatcagttattgtacatgattgctttgtgaaatgtgcaaatgatatcacctatgcagccttgtttgatttattttctctggtttgtactgttattaaaagcatattgtattatagagctattcagatattttaaatataaagatgtattgtttccgtaatatagacgtatggaatatatttaggtaatagatgtattacttggaaagttctgctttgacaaactgacaaagtctaaatgagcacatgtatcccagtgagcagtaaatcaatggaacatcccaagaagaggataaggatgcttaaaatggaaatcattctccaacgatatacaaattggacttgttcaactgctggatatatgctaccaataaccccagccccaacttaaaattcttacattcaagctcctaagagttcttaatttataactaattttaaaagagaagtttcttttctggttttagtttgggaataatcattcattaaaaaaaatgtattgtggtttatgcgaacagaccaacctggcattacagttggcctctccttgaggtgggcacagcctggcagtgtggccaggggtggccatgtaagtcccatcaggacgtagtcatgcctcctgcatttcgctacccgagtttagtaacagtgcagattccacgttcttgttccgatactctgagaagtgcctgatgttgatgtacttacagacacaagaacaatctttgctataattgtataaagccataaatgtacataaattatgtttaaatggcttggtgtctttcttttctaattatgcagaataagctctttattaggaattttttgtgaagctattaaatacttgagttaa

SEQ ID NO: 761 - DNA, 2863 bp, Homo sapiens
cggaattcaagaaacacaaaatgcagtgggcgtccctcctgctgctggcagggctcttctccctctcccaggcccagtatgaagatgaccctcattggtggttccactacctccgcagccagcagtccacctactacgatccctatgacccttacccgtatgagacctacgagccttacccctatggggtggatgaagggccagcctacacctacggctctccatcccctccagatccccgcgactgcccccaggaatgcgactgcccacccaacttcctcacggccatgtactgtgacaatcgcaacctcaagtacctgcccttcgttccctcccgcatgaagtatgtgtacttccagaacaaccagatcacctccatccaggaaggcgtctttgacaatgccacagggctgctctggattgctctccacggcaaccagatcaccagtgataaggtgggcaggaaggtcttctccaagctgaggcacctggagaggctgtacctggaccacaacaacctgacccggatgcccggtcccctgcctcgatccctgagagagctccatctcgaccacaaccagatctcacgggtccccaacaatgctctggaggggctggagaacctcacggccttgtacctccaacacgatgagatccaggaagtgggcagttccatgaggggcctccggtcactgatcttgctggacctgagttataaccaccttcggaaggtgcctgatgggctgccctcagctcttgagcagctgtacatggagcacaacaatgtctacaccgtccccgatagctacttccggggggcgcccaagctgctgtatgtgcggctgtcccacaacagtctaaccaacaatggcctggcctccaacaccttcaattccagcagcctccttgagctagacctctcctacaaccagctgcagaagatccccccagtcaacaccaacctggagaacctctacctccaaggcaataggatcaatgagttctccatcagcagcttctgcaccgtggtggacgtcgtgaacttctccaagctgcaggtcgtgcgcctggacgggaacgagatcaagcgcagcgccatgcctgccgacgcgcccctctgcctgcgccttgccagcctcatcgagatctgagcagccctggcaccgggtactgggcggagagcccccgtggcatttggcttgatggtttggtttggcttatggaagatctgggacagaccgtgtgacagaagtccacgggcaccctctgtagtcttctttcctgtaggtggggttagggggggcgatcagggacaggcagccttctgctgaggacataggcagaagctcactcttttccagggacagaagtggtggtagatggaaggatccctggatgttccaaccccataaatctcacggctcttaagttcttcccaatgatctgaggtcatggaacttcaaaagtggcatgggcaatagtatataaccatacttttctaacaatccctggctgtctgtgagcagcacttgacagctctccctctgtgctgggctggtcgtgcagttactctgggctcccatttgttgcttctcaaaatatacctcttgcccagctgcctcttctgaaatccacttcacccactccactttcctccacagatgcctcttctgtgccttaagcagagtcaggagaccccaaggcatgtgagcatctgcccagcaacctgtggagacaacccacactgtgtctgagggtgaaaggacaccaggagtcacttctatacctccctaacctcacccctggaaagccaccagattggaggtcaccagcatgatgataatattcatgacctgatgtgggaggagacagccaacctcaggcttagatcaatgtatagggctatattttggcagctgggtagctctttgaaggtggataagacttcagaagaggaaaggccagactttgcttaccatcagcatctgcaatgggccaaacacacctcaaattggctgagttgagaaagcagccccagtagttccattcttgcccagcactttctgcattccaaacagcatcctacctgggtttttatccacaaaggtagcggccacatggtttttaaagtatgagaaacacagtttgtcctctccttttatccaagcaggaagattctatatcctgatggtagagacagactccaggcagccctggacttgctagcccaaagaaggaggatgtggttaatctgtttcacctggtttgtcctaaggccatagttaaaaagtaccagctctggctggggtccgtgaagcccaggccaggcagccaaatcttgcctgtgctgggcatacaaccctctgctttcacatctctgagctatatcctcattagtgaaggtggcttttgctttatagtttggctggggagcacttaattcttcccatttcaaaaggtaatgttgcctggggcttaacccacctgccctttgggcaaggttgggacaaagccatctgggcagtcaggggcaaggactgttggaggagagttagcccaagtataggctctgcccagatgccatcacatccctgatactgtgtatgctttgaagcaccttccctgagaagggaagaggggatctttggactacgttcttggctccagacctggaatccacaaaagccaaaccagctcatttcaacaaaggagctccgatgtgaggggcaaggctgccccctgccccagggctcttcagaaagcatctgcatgtgaacaccatcatgcctttataaaggatccttattacaggaaaagcatgagtggtggctaacctgaccaataaagttattttatgattgcc

SEQ ID NO: 762 - DNA, 801 bp, Homo sapiens
caccgcaccctcggactgccccaaggcccccgccgccgctccagcgccgcgcagccaccgccgccgccgccgcctctccttagtcgccgccatgacgaccgcgtccacctcgcaggtgcgccagaactaccaccaggactcagaggccgccatcaaccgccagatcaacctggagctctacgcctcctacgtttacctgtccatgtcttactactttgaccgcgatgatgtggctttgaagaactttgccaaatactttcttcaccaatctcatgaggagagggaacatgctgagaaactgatgaagctgcagaaccaacgaggtggccgaatcttccttcaggatatcaagaaaccagactgtgatgactgggagagcgggctgaatgcaatggagtgtgcattacatttggaaaaaaatgtgaatcagtcactactggaactgcacaaactggccactgacaaaaatgacccccatttgtgtgacttcattgagacacattacctgaatgagcaggtgaaagccatcaaagaattgggtgaccacgtgaccaacttgcgcaagatgggagcgcccgaatctggcttggcggaatatctctttgacaagcacacctgggagacagtgataatgaaagctaagcctcgggctaatttcccatagccgtggggtgacttcctggtcaccaaggcagtgcatgcatgttggggtttcctttaccttttctataagttgtaccaaaacatccacttaagttctttgatttgtaccattccttcaaataaagaaatttggtaccc

SEQ ID NO: 763 - DNA, 1283 bp, Homo sapiens
ctctctgctcctcctgttcgacagtcagccgcatcttcttttgcgtcgccagccgagccacatcgctcagacaccatggggaaggtgaaggtcggagtcaacggatttggtcgtattgggcgcctggtcaccagggctgcttttaactctggtaaagtggatattgttgccatcaatgaccccttcattgacctcaactacatggtttacatgttccaatatgattccacccatggcaaattccatggcaccgtcaaggctgagaacgggaagcttgtcatcaatggaaatcccatcaccatcttccaggagcgagatccctccaaaatcaagtggggcgatgctggcgctgagtacgtcgtggagtccactggcgtcttcaccaccatggagaaggctggggctcatttgcaggggggagccaaaagggtcatcatctctgccccctctgctgatgcccccatgttcgtcatgggtgtgaaccatgagaagtatgacaacagcctcaagatcatcagcaatgcctcctgcaccaccaactgcttagcacccctggccaaggtcatccatgacaactttggtatcgtggaaggactcatgaccacagtccatgccatcactgccacccagaagactgtggatggcccctccgggaaactgtggcgtgatggccgcggggctctccagaacatcatccctgcctctactggcgctgccaaggctgtgggcaaggtcatccctgagctgaacgggaagctcactggcatggccttccgtgtccccactgccaacgtgtcagtggtggacctgacctgccgtctagaaaaacctgccaaatatgatgacatcaagaaggtggtgaagcaggcgtcggagggccccctcaagggcatcctgggctacactgagcaccaggtggtctcctctgacttcaacagcgacacccactcctccacctttgacgctggggctggcattgccctcaacgaccactttgtcaagctcatttcctggtatgacaacgaatttggctacagcaacagggtggtggacctcatggcccacatggcctccaaggagtaagacccctggaccaccagccccagcaagagcacaagaggaagagagagaccctcactgctggggagtccctgccacactcagtcccccaccacactgaatctcccctcctcacagttgccatgtagaccccttgaagaggggaggggcctagggagccgcaccttgtcatgtaccatcaataaagtaccctgtgctcaacc

SEQ ID NO: 764 - DNA, 2742 bp, Homo sapiens
gtcactcgtataaaaacctatgctttgaaggttctcgtgtgtctcggcctgcaggtctcgctcagagctgtgtccctgaacatccaccctgctggggtggcttgacgcacttctgtgcaaatctgttcgctcgcaaccctacctacctctctcccgaaccggagaaaaccttcggcggggtccttccgggttttgtgtcgaatctgcggcggcgacccggcgccgcgtcacgcggtggtgaatgtgcggcagtacgcgcgccgcgtcgtttacgcggcgatttcatcatgctccgagccggcggcgcgcgccgcttccgtcgccaccctctctggacagcccagggccgcaggctcatgccctctccgcgtccagtgctgcttagaggtgctcgcgccgctctgctgctgctgctgccgccccggctcttagcccgaccctcgctcctcctccgccggtccctcagcgcggcctcctgcgccccgatctccttgcccgccgccgcctcccggagcagcatggacggcgcgggggctgaggaggtgctggcacctctgaggctagcagtgcgccagcagggagatcttgtgcgaaaactcaaagaagataaagcaccccaagtagacgtagacaaagcagtggctgagctcaaagcccgcaagagggttctggaagcaaaggagctggcgttacagcccaaagatgatattgtagaccgagcaaaaatggaagataccctgaagaggaggtttttctatgatcaagcttttgctatttatggaggtgttagtggtctgtatgactttgggccagttggctgtgctttgaagaacaatattattcagacctggaggcagcactttatccaagaggaacagatcctggagatcgattgcaccatgctcacccctgagccagttttaaagacctctggccatgtagacaaatttgctgacttcatggtgaaagacgtaaaaaatggagaatgttttcgtgctgaccatctattaaaagctcatttacagaaattgatgtctgataagaagtgttctgtcgaaaagaaatcagaaatggaaagtgttttggcccagcttgataactatggacagcaagaacttgcggatctttttgtgaactataatgtaaaatctcccattactggaaatgatctatcccctccagtgtcttttaacttaatgttcaagactttcattgggcctggaggaaacatgcctgggtacttgagaccagaaactgcacaggggattttcttgaatttcaaacgacttttggagttcaaccaaggaaagttgccttttgctgctgcccagattggaaattcttttagaaatgagatctcccctcgatctggactgatcagagtcagagaattcacaatggcagaaattgagcactttgtagatcccagtgagaaagaccaccccaagttccagaatgtggcagaccttcacctttatttgtattcagcaaaagcccaggtcagcggacagtccgctcggaaaatgcgcctgggagatgctgttgaacagggtgtgattaataacacagtattaggctatttcattggccgcatctacctctacctcacgaaggttggaatatctccagataaactccgcttccggcagcacatggagaatgagatggcccattatgcctgtgactgttgggatgcagaatccaaaacatcctacggttggattgagattgttggatgtgctgatcgttcctgttatgacctctcctgtcatgcacgagccaccaaagtcccacttgtagctgagaaacctctgaaagaacccaaaacagtcaatgttgttcagtttgaacccagtaagggagcaattggtaaggcatataagaaggatgcaaaactggtgatggagtatcttgccatttgtgatgagtgctacattacagaaatggagatgctgctgaatgagaaaggggaattcacaattgaaactgaagggaaaacatttcagttaacaaaagacatgatcaatgtgaagagattccagaaaacactatatgtggaagaagttgttccgaatgtaattgaaccttccttcggcctgggtaggatcatgtatacggtatttgaacatacattccatgtacgagaaggagatgaacagagaacattcttcagtttccctgctgtagttgctccattcaaatgttccgtcctcccactgagccaaaaccaggagttcatgccatttgtcaaggaattatcggaagccctgaccaggcatggagtatctcacaaagtagacgattcctctgggtcaatcggaaggcgctatgccaggactgatgagattggcgtggcttttggtgtcaccattgactttgacacagtgaacaagaccccccacactgcaactctgagggaccgtgactcaatgcggcagataagagcagagatctctgagctgcccagcatagtccaagacctagccaatggcaacatcacatgggctgatgtggaggccaggtatcctctgtttgaagggcaagagactggtaaaaaagagacaatcgaggaatgaggacaattttgacaacttttgaccacttgcgctaataaaaaaaaaaaaactactcttatgtccactttacaaaagaaaacagcattgtgattactcccagggaccgtattttatcttcagtggctgcctgattttacccccacaattaaagttgaaggaatcctga

SEQ ID NO: 765 - DNA, 2828 bp, Homo sapiens
agcagccggcacggggacagccggccgcacaacggatctgcaggcgcggagcaaaatgcacccgccgcgccgcgcggtcctgcagccccgccacggccccgcggcccgcacccccccggggcgacagtgagcctctcccgccaccaccgggggccgagcggagggctctcgggtgggagagcgggaccagatctcgacagctgttcatttccaggaagccaccgcagccagagcgaaaggggaccttctgccaccagcggggcatcagccagcggcgcgcatggatttatgaagacactcatgcaagaagtgggcaggacttggacaaacttttccaccggctccgcgtccgccgctccccgcgcctcgtctcctttcccctcctctcccggcggccgccgctgcccgcgatggtggccgcgctgctgggcggcggcggcgaggcccgcggggggacagtgccgggcgcctggctgtgcctgatggcgctgctgcagctgctgggctcggcgccgcggggatcggggctggcgcacggccgccgcctcatctgctggcaggcgctgctgcagtgccagggggagccggagtgcagctacgcctacaaccagtacgccgaggcgtgcgcgccggtgctggcgcagcacggcgggggcgacgcgcccggggccgccgccgccgctttcccggcctcggccgcctctttctcgtcgcgctggcgctgcccgagtcactgcatctcggccctcattcagctcaaccacacgcgccgcgggcccgccctggaggactgtgactgcgcgcaggacgagaactgcaagtccaccaagcgcgccattgagccgtgcctgccccggacgagcggcggcggcgcgggcggccccggcgcgggcggggtcatgggctgcaccgaggcccggcggcgctgcgaccgcgacagccgctgcaacctggcgctgagccgctacctgacctactgcggcaaagtcttcaacgggctgcgctgcacggacgaatgccgcaccgtcattgaggacatgctggctatgcccaaggtggcgctgctcaacgactgcgtgtgcgacggcctcgagcggcccatctgcgagtcggtcaaggagaacatggcccgcctgtgcttcggcgccgagctgggcaacggccccggcagcagcggctcggacgggggcctggacgactactacgatgaggactacgatgacgagcagcgcaccgggggcgcgggtggtgagcagccgctggacgacgacgacggcgtcccgcacccaccgcgcccgggcagcggcgctgctgcatcgggcggccgcggggacctgccctatgggcctgggcgcaggagcagcggcggcggcggccgcttggcgccccggggcgcctggaccccactcgcctccatcttgctgctgctgcttgggccgctcttttagccctcgcgccccccgccgttggctgcgggagagcccgcgtcccactcccgtgctcgcctcgaccccgcgccgggcacctgtggcttgggacagatagaagggatggttggggatacttcccaaaactttttccaagtcaacttggtgtagccggttccccggccacgactctgggcacttcccctgaagctcctctccggagcttgacttcttggacctcctcccccgccccaattccaagctccagaaactcccaactcgtctgccgtccagaaagctagctgcagtgttcaggacgtccgggaggaagcaagcatgtgggggacagaacagtagtcctggactcgaaagggaaggtgctgaccagtggggccttagcaatttgaagggttgggaaggaggaattatatttgcaaaggggctgtctattagcatatttcctttgagggggcaaaaaaaagtgccagtatcgacttttacagattgtggccagtgaggatattataatcctatgtaaacagaaaagtcccacttaccgattcattctttcactgtttgtatctgcgcccagaattctcagtgacgtgggggtgagggtgggtggcgattgccttagagggaacccctaaattggttttggataagtttgagcccttgaccttaatttcattgctaccactctgatctcttagcacatttcttaggattaagggtccaaaaatgctgatctaaggggttgccatggtgttgaacaatgcaactttttatttaaaaaagctctgcactgccatgtatgaaagtctctttatgatgtttgtttttttgtcatttttgttctttacatcaagaaattttatgtttaaatatgcggagaatgtatattgcctctgctcctatcagggttgctaaaccctggtacatcgtatataaaatgtattaaaactggggtttgttaccagttgctgtactttgtatatagaatttttataaattgtatgcttcagaaataatttatttttaaaaagaaattaaaagttttaaactcacatccatattacacctttcccccctgaaatgtatagaatccatttgtcatcaggaatcaaaacccacagtccattgtgaagtgtgctatatttagaacagtcttaaaatgtacagtgtattttatagaattgaagttaacattcttattttcaagagaatttatggacgttgtagaaatgtacaaatgcatttccaaactgccttaaacgttgtatttttatagacatgtttttttaaaaatcctaagtttttaaataactatggatttgtgtattttttttggttatttgttttattaaaacatgtacatcagtaaagagttttaaacaatga

SEQ ID NO: 766 - DNA, 2881 bp, Homo sapiens
acagaagtgctagaagccagtgctcgtgaactaaggagaaaaagaacagacaagggaacagcctggacatggcatcagagatccacatgacaggcccaatgtgcctcattgagaacactaatgggcgactgatggcgaatccagaagctctgaagatcctttctgccattacacagcctatggtggtggtggcaattgtgggcctctaccgcacaggcaaatcctacctgatgaacaagctggctggaaagaaaaagggcttctctctgggctccacggtgcagtctcacactaaaggaatctggatgtggtgtgtgccccaccccaagaagccaggccacatcctagttctgctggacaccgagggtctgggagatgtagagaagggtgacaaccagaatgactcctggatcttcgccctggccgtcctcctgagcagcaccttcgtgtacaatagcataggaaccatcaaccagcaggctatggaccaactgtactatgtgacagagctgacacatagaatccgatcaaaatcctcacctgatgagaatgagaatgaggttgaggattcagctgactttgtgagcttcttcccagactttgtgtggacactgagagatttctccctggacttggaagcagatggacaacccctcacaccagatgagtacctgacatactccctgaagctgaagaaaggtaccagtcaaaaagatgaaacttttaacctgcccagactctgtatccggaaattcttcccaaagaaaaaatgctttgtctttgatcggcccgttcaccgcaggaagcttgcccagctcgagaaactacaagatgaagagctggaccccgaatttgtgcaacaagtagcagacttctgttcctacatctttagtaattccaaaactaaaactctttcaggaggcatccaggtcaacgggcctcgtctagagagcctggtgctgacctacgtcaatgccatcagcagtggggatctgccgtgcatggagaacgcagtcctggccttggcccagatagagaactcagctgcagtgcaaaaggctattgcccactatgaacagcagatgggccagaaggtgcagctgcccacagaaagcctccaggagctgctggacctgcacagggacagtgagagagaggccattgaagtcttcatcaggagttccttcaaagatgtggaccatctatttcaaaaggagttagcggcccagctagaaaaaaagcgggatgacttttgtaaacagaatcaggaagcatcatcagatcgttgctcaggtttacttcaggtcattttcagtcctctagaagaagaagtgaaggcgggaatttattcgaaaccagggggctatcgtctctttgttcagaagctacaagacctgaagaaaaagtactatgaggaaccgaggaaggggatacaggctgaagagattctgcagacatacttgaaatccaaggagtctatgactgatgcaattctccagacagaccagactctcacagaaaaagaaaaggagattgaagtggaacgtgtgaaagctgagtctgcacaggcttcagcaaaaatgttgcaggaaatgcaaagaaagaatgagcagatgatggaacagaaggagaggagttatcaggaacacttgaaacaactgactgagaagatggagaacgacagggtccagttgctgaaagagcaagagaggaccctcgctcttaaacttcaggaacaggagcaactactaaaagagggatttcaaaaagaaagcagaataatgaaaaatgagatacaggatctccagacgaaaatgagacgacgaaaggcatgtaccataagctaaagaccagagccttcctgtcacccctaaccaaggcataattgaaacaattttagaatttggaacaagcgtcactacatttgataataattagatcttgcatcataacaccaaaagtttataaaggcatgtggtacaatgatcaaaatcatgttttttcttaaaaaaaaaaaaaagactgtaaattgtgcaacaaagatgcatttacctctgtatcaactcaggaaatctcataagctggtaccactcaggagaagtttattcttccagatgaccagcagtagacaaatggatactgagcagagtcttaggtaaaagtcttgggaaatatttgggcattggtctggccaagtctacaatgtcccaatatcaaggacaaccaccctagcttcttagtgaagacaatgtacagttatccattagatcaagactacacggtctatgagcaataatgtgatttctggacattgcccatgtataatcctcactgatgatttcaagctaaagcaaaccaccttatacagagatctagaatctctttatgttctccagaggaaggtggaagaaaccatgggcaggagtaggaattgagtgataaacaattgggctaatgaagaaaacttctcttattgttcagttcatccagattataacttcaatgggacactttagaccattagacaattgacactggattaaacaaattcacataatgccaaatacacaatgtatttatagcaacgtataatttgcaaagatggactttaaaagatgctgtgtaactaaactgaaataattcaattacttattatttagaatgttaaagcttatgatagtcttttctaattcttaacactcatacttgaaatctttccgagtttccccagaagagaatatgggattttttttgacatttttgacccatttaataatgctcttgtgtttacctagtatatgtagactttgtcttatgtgtcaaaagtcctaggaaagtggttgatgtttcttatagcaattaaaaattatttttgaactga

SEQ ID NO: 767 - DNA, 3082 bp, Homo sapiens
agggagtcgtgtcggcgccaccccggcccccgagcccgcagattgcccaccgaagctcgtgtgtgcacccccgatcccgccagccactcgcccctggcctcgcgggccgtgtctccggcatcatgtgtggtatatttgcttacttaaactaccatgttcctcgaacgagacgagaaatcctggagaccctaatcaaaggccttcagagactggagtacagaggatatgattctgctggtgtgggatttgatggaggcaatgataaagattgggaagccaatgcctgcaaaacccagcttattaagaagaaaggaaaagttaaggcactggatgaagaagttcacaagcaacaagatatggatttggatatagaatttgatgtacaccttggaatagctcatacccgttgggcaacacatggagaacccagtcctgtcaatagccacccccagcgctctgataaaaataatgaatttatcgttattcacaatggaatcatcaccaactacaaagacttgaaaaagtttttggaaagcaaaggctatgacttcgaatctgaaacagacacagagacaattgccaagctcgttaagtatatgtatgacaatcgggaaagtcaagataccagctttactaccttggtggagagagttatccaacaattggaaggtgcttttgcacttgtgtttaaaagtgttcattttcccgggcaagcagttggcacaaggcgaggtagccctctgttgattggtgtacggagtgaacataaactttctactgatcacattcctatactctacagaacaggcaaagacaagaaaggaagctgcaatctctctcgtgtggacagcacaacctgccttttcccggtggaagaaaaagcagtggagtattactttgcttctgatgcaagtgctgtcatagaacacaccaatcgcgtcatctttctggaagatgatgatgttgcagcagtagtggatggacgtctttctatccatcgaattaaacgaactgcaggagatcaccccggacgagctgtgcaaacactccagatggaactccagcagatcatgaagggcaacttcagttcatttatgcagaaggaaatatttgagcagccagagtctgtcgtgaacacaatgagaggaagagtcaactttgatgactatactgtgaatttgggtggtttgaaggatcacataaaggagatccagagatgccggcgtttgattcttattgcttgtggaacaagttaccatgctggtgtagcaacacgtcaagttcttgaggagctgactgagttgcctgtgatggtggaactagcaagtgacttcctggacagaaacacaccagtctttcgagatgatgtttgctttttccttagtcaatcaggtgagacagcagatactttgatgggtcttcgttactgtaaggagagaggagctttaactgtggggatcacaaacacagttggcagttccatatcacgggagacagattgtggagttcatattaatgctggtcctgagattggtgtggccagtacaaaggcttataccagccagtttgtatcccttgtgatgtttgcccttatgatgtgtgatgatcggatctccatgcaagaaagacgcaaagagatcatgcttggattgaaacggctgcctgatttgattaaggaagtactgagcatggatgacgaaattcagaaactagcaacagaactttatcatcagaagtcagttctgataatgggacgaggctatcattatgctacttgtcttgaaggggcactgaaaatcaaagaaattacttatatgcactctgaaggcatccttgctggtgaattgaaacatggccctctggctttggtggataaattgatgcctgtgatcatgatcatcatgagagatcacacttatgccaagtgtcagaatgctcttcagcaagtggttgctcggcaggggcggcctgtggtaatttgtgataaggaggatactgagaccattaagaacacaaaaagaacgatcaaggtgccccactcagtggactgcttgcagggcattctcagcgtgatccctttacagttgctggctttccaccttgctgtgctgagaggctatgatgttgatttcccacggaatcttgccaaatctgtgactgtagagtgaggaatatctatacaaaatgtacgaaactgtatgattaagcaacacaagacaccttttgtatttaaaaccttgatttaaaatatcaccccttgaagcctttttttagtaaatccttatttatatatcagttataattattccactcaatatgtgatttttgtgaagttacctcttacattttcccagtaatttgtggaggactttgaataatggaatctatattggaatctgtatcagaaagattctagctattattttctttaaagaatgctgggtgttgcatttctggaccctccacttcaatctgagaagacaatatgtttctaaaaattggtacttgtttcaccatacttcattcagaccagtgaaagagtagtgcatttaattggagtatctaaagccagtggcagtgtatgctcatacttggacagttagggaagggtttgccaagttttaagagaagatgtgatttattttgaaatttgtttctgttttgtttttaaatcaaactgtaaaacttaaaactgaaaaattttattggtaggatttatatctaagtttggttagccttagtttctcagacttgttgtctattatctgtaggtggaagaaatttaggaagcgaaatattacagtagtgcattggtgggtctcaatccttaacatatttgcacaattttatagcacaaactttaaattcaagctgctttggacaactgacaatatgattttaaatttgaagatgggatgtgtacatgttgggtatcctactactttgtgttttcatctcctaaaagtgttttttatttccttgtatctgtagtcttttattttttaaatgactgctgaatgacatattttatcttgttctttaaaatcacaacacagagctgctattaaattaatattgatat

SEQ ID NO: 768 - DNA, 1540 bp, Homo sapiens
gccctcggccccgggccggcccgccccgcctcggccgccgcctggcgagccgccgggtccccgctcggccggtggccgaggccggagggccgcggcgggcggcggccgaggcggctccggccagggccgggccgggggccggggggcggcggcgggcaggcggccgcgtcggccggggccgggacgatgactctggagtccatgatggcgtgttgcctgagcgatgaggtgaaggagtccaagcggatcaacgccgagatcgagaagcagctgcggcgggacaagcgcgacgcccggcgcgagctcaagctgctgctgctcggcacgggcgagagcgggaagagcacgttcatcaagcagatgcgcatcatccacggcgccggctactcggaggaggacaagcgcggcttcaccaagctcgtctaccagaacatcttcaccgccatgcaggccatgatccgggccatggagacgctcaagatcctctacaagtacgagcagaacaaggccaatgcgctcctgatccgggaggtggacgtggagaaggtgaccaccttcgagcatcagtacgtcagtgccatcaagaccctgtgggaggacccgggcatccaggaatgctacgaccgcaggcgcgagtaccagctctccgactctgccaagtactacctgaccgacgttgaccgcatcgccaccttgggctacctgcccacccagcaggacgtgctgcgggtccgcgtgcccaccaccggcatcatcgagtaccctttcgacctggagaacatcatcttccggatggtggatgtggggggccagcggtcggagcggaggaagtggatccactgctttgagaacgtgacatccatcatgtttctcgtcgccctcagcgaatacgaccaagtcctggtggagtcggacaacgagaaccggatggaggagagcaaagccctgttccggaccatcatcacctacccctggttccagaactcctccgtcatcctcttcctcaacaagaaggacctgctggaggacaagatcctgtactcgcacctggtggactacttccccgagttcgatggtccccagcgggagccccaggcggcgcgggagttcatcctgaagatgttcgtggacctgaaccccgacagcgacaagatcatctactcacacttcacgtgtgccaccgacacggagaacatccgcttcgtgttcgcggccgtgaaggacaccatcctgcagctcaacctcaaggagtacaacctggtctgagcgccccaggcccagggagacgggatggagacacggggcaggaccttccttccacggagcctgcgctgccgggcgggtggcgctgccgagtccgggccggggctctgccgcgggaggagattttttttttttcatatttttaacaaatggtttttatttcacagttatcaggggatgtacatctctccctccgtacacttcgcgcaccttctcaccttttgtcaacggcaaaggcagcctttttctggccttgacttatggctcgcttttttct

SEQ ID NO: 769 - DNA, 1702 bp, Homo sapiens
ccggcagtcccgagtgcttcccgcagagggctggtggtgggagcggagtggagtcgggcggggccgaagccgggccgtgggcgtagatgggggccgggcggcggcggagcggcggaacgcgggatgggctgcaccgtgagcgccgaggacaaggcggcggccgagcgctctaagatgatcgacaagaacctgcgggaggacggagagaaggcggcgcgggaggtgaagttgctgctgttgggtgctggggagtcagggaagagcaccatcgtcaagcagatgaagatcatccacgaggatggctactccgaggaggaatgccggcagtaccgggcggttgtctacagcaacaccatccagtccatcatggccattgtcaaagccatgggaaacctgcagatcgactttgccgacccctccagagcggacgacgccaggcagctatttgcactgtcctgcaccgccgaggagcaaggcgtgctccctgatgacctgtccggcgtcatccggaggctctgggctgaccatggtgtgcaggcctgctttggccgctcaagggaataccagctcaacgactcagctgcctactacctgaacgacctggagcgtattgcacagagtgactacatccccacacagcaagatgtgctacggacccgcgtaaagaccacggggatcgtggagacacacttcaccttcaaggacctacacttcaagatgtttgatgtgggtggtcagcggtctgagcggaagaagtggatccactgctttgagggcgtcacagccatcatcttctgcgtagccttgagcgcctatgacttggtgctagctgaggacgaggagatgaaccgcatgcatgagagcatgaagctattcgatagcatctgcaacaacaagtggttcacagacacgtccatcatcctcttcctcaacaagaaggacctgtttgaggagaagatcacacacagtcccctgaccatctgcttccctgagtacacaggggccaacaaatatgatgaggcagccagctacatccagagtaagtttgaggacctgaataagcgcaaagacaccaaggagatctacacgcacttcacgtgcgccaccgacaccaagaacgtgcagttcgtgtttgacgccgtcaccgatgtcatcatcaagaacaacctgaaggactgcggcctcttctgaggggcagcggggcctggcgggatgggccaccgccgaatttgtaccccccaacccctgaggaagatgggggcaagaagatcacgctccccgcctgttcccccgccgcttttctcctctttcctctctttgttctcagctccccctgtcccctcagctccaaacgtaggggaggggttcgcacaggcctccctgtttgaagcctgcccttgtctgagatgctggtaatggccatggtacccccttctgggcatctgttctggtttttaaccattgtcttgttctgtgatgaggggaggggggcacatgctgagtctcccaaggctgcgtctggaggggcccctgcttctccagcctggacccccagctttgcccaacaccagcccctgccccagcccaagtccaaatgtttacgggagcctcctgcccagtcccccaaccccagccgctcggaggccccaaaggaaaaagcacaagaagcgtgagacgccaccattcctggaaaccacagtcc

SEQ ID NO: 770 - DNA, 1856 bp, Homo sapiens
agccaaaagaggaagggaccggcctcccacgtccacagggacctgacttccacctctctgcccagatttgcttatgtcactgtcgccccgggacggggaggtggggagctgagggcaagtcgcgcccgcccctgaaatcccagccgcctagcgattggctgcaagggtctcggcttggccgcggattaatcacacccgagggcttgaaaggtggctgggagcgccggacacctcagacggacggtggccagggatcaggcagcggctcaggcgaccctgagtgtgcccccaccccgccatggcccggctgctgcaggcgtcctgcctgctttccctgctcctggccggcttcgtctcgcagagccggggacaagagaagtcgaagatggactgccatggtggcataagtggcaccatttacgagtacggagccctcaccattgatggggaggagtacatccccttcaagcagtatgctggcaaatacgtcctctttgtcaacgtggccagctactgaggcctgacgggccagtacattgaactgaatgcactacaggaagagcttgcaccattcggtctggtcattctgggctttccctgcaaccaatttggaaaacaggaaccaggagagaactcagagatccttcctaccctcaagtatgtccgaccaggtggaggctttgtccctaatttccagctctttgagaaaggggatgtcaatggagagaaagagcagaaattctacactttcctaaagaactcctgtcctcccacctcggagctcctgggtacatctgaccgcctcttctgggaacccatgaaggttcacgacatccgctggaactttgagaagttcctggtggggccagatggtatacccatcatgcgctggcaccaccggaccacggtcagcaacgtcaagatggacatcctgtcctacatgaggcggcaggcagccctgggggtcaagaggaagtaactgaaggccgtctcatcccatgtccaccatgtaggggagggactttgttcaggaagaaatccgtgtctccaaccacactatctacccatcacagacccctttcctatcactcaaggccccagcctggcacaaatggatgcatacagttctgtgtactgccaggcatgtgggtgtgggtgcaatgtgggtgtttacacacatgcctacaggtatgcgtgattgtgtgtgtgtgcatgggtgtacagccacgtgtctacctatgtgtctttctgggaatgtgtaccatctgtgtgcctgcagctgtgtagtgctggacagtgacaaccctttctctccagttctccactccaatgataatagttcacttatacctaaacccaaaggaaaaaccagctctaggtccaattgttctgctctaactgatacctcaaccttggggccagcatctcccactgcctccaaatattagtaactatgactgacgtccccagaagtttctgggtctaccacactccccaaccccccactcctacttcctgaagggccctcccaaggctacatccccaccccacagttctccctgagagagatcaacctccctgagatcaaccaaggcagatgtgacagcaagggccacggaccccatggcaggggtggcgtcttcatgagggaggggcccaaagcccttgtgggcggacctcccctgagcctgtctgaggggccagcccttagtgcattcaggctaaggcccctgggcagggatgccacccctgctccttcggaggacgtgccctcacccctcactggtccactggcttgagactcaccccgtctgcccagtaaaagcctttctgcagcaaaaaaaaaaaaaaaaaaa

SEQ ID NO: 771 - DNA, 896 bp, Homo sapiens
cggggaggcgcggaaagccgacgcgcgtccattggtcggctggacgaggggaggagccgctggctcccagccccgccgcgatgagcctcggccgcctttgccgcctactgaagccggcgctgctctgtggggctctggccgcgcctggcctggccgggaccatgtgcgcgtcccgggacgactggcgctgtgcgcgctccatgcacgagttttccgccaaggacatcgacgggcacatggttaacctggacaagtaccggggcttcgtgtgcatcgtcaccaacgtggcctcccagtgaggcaagaccgaagtaaactacactcagctcgtcgacctgcacgcccgatacgctgagtgtggtttgcggatcctggccttcccgtgtaaccagttcgggaagcaggagccagggagtaacgaagagatcaaagagttcgccgcgggctacaacgtcaaattcgatatgttcagcaagatctgcgtgaacggggacgacgcccacccgctgtggaagtggatgaagatccaacccaagggcaagggcatcctgggaaatgccatcaagtggaacttcaccaagttcctcatcgacaagaacggctgcgtggtgaagcgctacggacccatggaggagcccctggtgatagagaaggacctgccccactatttctagctccacaagtgtgtggccccgcccgagcccctgcccacgcccttggagccttccaccggcactcatgacggcctgcctgcaaacctgctggtggggcagacccgaaaatccagcgtgcaccccgccggaggaaggtcccatggcctgctgggcttggctcggcgcccccacccctggctaccttgtgggaataaacagacaaattagaaaaaaaaaaaaaaa

SEQ ID NO: 772 - DNA, 1109 bp, Homo sapiens
gccagtgaattcgggggctcagccctcctccctcccttccccctgcttcaggctgctgagcactgagcagcgctcagaatggaagccatcgccaaatatgacttcaaagctactgcagacgacgagctgagcttcaaaaggggggacatcctcaaggttttgaacgaagaatgtgatcagaactggtacaaggcagagcttaatggaaaagacggcttcattcccaagaactacatagaaatgaaaccacatccgtggttttttggcaaaatccccagagccaaggcagaagaaatgcttagcaaacagcggcacgatggggcctttcttatccgagagagtgagagcgctcctggggacttctccctctctgtcaagtttggaaacgatgtgcagcacttcaaggtgctccgagatggagccgggaagtacttcctctgggtggtgaagttcaattctttgaatgagctggtggattatcacagatctacatctgtctccagaaaccagcagatattcctgcgggacatagaacaggtgccacagcagccgacatacgtccaggccctctttgactttgatccccaggaggatggagagctgggcttccgccggggagattttatccatgtcatggataactcagaccccaactggtggaaaggagcttgccacgggcagaccggcatgtttccccgcaattatgtcacccccgtgaaccggaacgtctaagagtcaagaagcaattatttaaagaaagtgaaaaatgtaaaacacatacaaaagaattaaacccacaagctgcctctgacagcagcctgtgagggagtgcagaacacctggccgggtcaccctgtgaccctctcactttggttggaactttagggggtgggagggggcgttggatttaaaaatgccaaaacttacctataaattaagaagagtttttattacaaattttcactgctgctcctctttcccctcctttgtcttttttttcatccttttttctcttctgtccatcagtgcatgacgtttaaggccacgtatagtcctagctgacgccaataataaaaaacaagaaaccaaaaaaaaaaaacccgaattca

SEQ ID NO: 773 - DNA, 1109 bp, Homo sapiens; identical to SEQ ID NO: 772

SEQ ID NO: 774 - DNA, 2178 bp, Homo sapiens
gtagtctgagcgctacccggttgctgctgcccaaggaccgcggagtcggacgcaggcagaccatgtggaccctggtgagctgggtggccttaacagcagggctggtggctggaacgcggtgcccagatggtcagttctgccctgtggcctgctgcctggaccccggaggagccagctacagctgctgccgtccccttctggacaaatggcccacaacactgagcaggcatctgggtggcccctgccaggttgatgcccactgctctgccggccactcctgcatctttaccgtctcagggacttccagttgctgccccttcccagaggccgtggcatgcggggatggccatcactgctgcccacggggcttccactgcagtgcagacgggcgatcctgcttccaaagatcaggtaacaactccgtgggtgccatccagtgccctgatagtcagttcgaatgcccggacttctccacgtgctgtgttatggtcgatggctcctgggggtgctgccccatgccccaggcttcctgctgtgaagacagggtgcactgctgtccgcacggtgccttctgcgacctggttcacacccgctgcatcacacccacgggcacccaccccctggcaaagaagctccctgcccagaggactaacagggcagtggccttgtccagctcggtcatgtgtccggacgcacggtcccggtgccctgatggttctacctgctgtgagctgcccagtgggaagtatggctgctgcccaatgcccaacgccacctgctgctccgatcacctgcactgctgcccccaagacactgtgtgtgacctgatccagagtaagtgcctctccaaggagaacgctaccacggacctcctcactaagctgcctgcgcacacagtgggggatgtgaaatgtgacatggaggtgagctgcccagatggctatacctgctgccgtctacagtcgggggcctggggctgctgcccttttacccaggctgtgtgctgtgaggaccacatacactgctgtcccgcggggtttacgtgtgacacgcagaagggtacctgtgaacaggggccccaccaggtgccctggatggagaaggccccagctcacctcagcctgccagacccacaagccttgaagagagatgtcccctgtgataatgtcagcagctgtccctcctccgatacctgctgccaactcacgtctggggagtggggctgctgtccaatcccagaggctgtctgctgctcggaccaccagcactgctgcccccagggctacacgtgtgtagctgaggggcagtgtcagcgaggaagcgagatcgtggctggactggagaagatgcctgcccgccgggcttccttatcccaccccagagacatcggctgtgaccagcacaccagctgcccggtggggcagacctgctgcccgagcctgggtgggagctgggcctgctgccagttgccccatgctgtgtgctgcgaggatcgccagcactgctgcccggctggctacacctgcaacgtgaaggctcgatcctgcgagaaggaagtggtctctgcccagcctgccaccttcctggcccgtagccctcacgtgggtgtgaaggacgtggagtgtggggaaggacacttctgccatgataaccagacctgctgccgagacaaccgacagggctgggcctgctgtccctaccgccagggcgtctgttgtgctgatcggcgccactgctgtcctgctggcttccgctgcgcagccaggggtaccaagtgtttgcgcagggaggccccgcgctgggacgcccctttgagggacccagccttgagacagctgctgtgagggacagtactgaagactctgcagccctcgggaccccactcggagggtgccctctgctcaggcctccctagcacctccccctaaccaaattctccctggaccccattctgagctccccatcaccatgggaggtggggcctcaatctaaggccttccctgtcagaagggggttgtggcaaaagccacattacaagctgccatcccctccccgtttcagtggaccctgtggccaggtgcttttccctatccacaggggtgtttgtgtgtgtgcgcgtgtgcgtttcaataaagtttgtacactttcaaaaaaaaaaaaaaaaaaaaaaaaaaaaaa

SEQ ID NO: 775 - DNA, 2690 bp, Homo sapiens
ggcacgagcaccatcgctgctggagcagctgccttcaggccctgcgccgcctccggagtccatggccggcacgcgctgggtactcggggcgctgctccggggctgcggctgtaactgcagcagctgccggcgcaccggcgccgcctgcctgcccttctactccgccgcgtcctaccctgccctccgtgcctctctgctgccgcagtcgctggcggcggcggccgccgtcccgacgcgcagctacagccaggagtccaaaactacttacctggaagaccttccaccaccccctgagtatgaattggccccgtccaagttagaagaggaagtggatgatgtctttctcattcgagctcaaggactgccctggtcatgcactatggaagatgtgcttaactttttttcagactgcagaatccgcaacggtgagaatggaatacattttctcctaaacagagatgggaaacgaaggggtgatgccttaattgaaatggagtcagagcaggatgtgcagaaagccttagagaagcaccgcatgtacatgggccagcggtatgtggaagtatatgagataaacaatgaagatgtggatgccttaatgaagagcttgcaggtcaaatcttcgcctgtggtaaatgatggtgtggttcgtttgagaggacttccttatagttgcaatgagaaagacattgtagacttctttgcaggactgaatatagttgacattacttttgtgatggactatagagggaggcgaaaaacaggggaagcctatgtgcaatttgaagaaccagaaatggccaaccaagccctgttgaaacacagggaagaaattggtaatcgatacatcgagatatttccaagcagaaggaatgaagttcgaacacatgtcggttcttataagggaaagaaaatcgcatcttttcctactgctaagtatataactgagccagaaatggtctttgaagaacatgaagtaaatgaggtatttcaacccatgacagcttttgaaagtgagaaggaaatagaattgcctaaggaggtgccagaaaagcttccagaggctgctgattttggaactacgtcttctctgcattttgtccacatgagaggattacctttccaagccaatgcccaagacattataaacttttttgctccactcaagcctgttagaatcaccatggaatacagctccagtgggaaggccactggagaagctgatgtgcactttgagacccatgaggatgctgttgcagcgatgctcaaggatcggtcccacgttcatcataggtatattgaactgttcctgaattcatgtccaaaaggaaaataagactctaggggctccagataataagggtgaagcaagaagcatttcatttgcacatctttcttggacttgggatatacagttccagtttattagcagcaactgctagggaaatgattttggtgttttgggttaattgcttctaagaaaagtttcatagtggactgtttagaagaagaaatgaaagatccagtttgggattatgaaataaaccacaaattaaaatttttgtttaaactgtccaggatctgatttaaaaatatggtctttgttttatatgattaaatggtttgttttcatagatgatatgttactcattgtaaagaccacatatttttattcagcagtgttctttaaacggtttcatttaaaaagtaactttttttttttgcctgtgaattgagtgctctgatgtaaaacttctcatggagtgaaacagtgatttattttaaccaaacattcaccaaagcaaagaacggtttcagacctttgaactggtatggtttggcagaatagttttaaattttgctgtatttgattacttagagataggaatttttaaaaatcaaaacaaaaaataccacagcttagtgtaaatgacaatttggcggttttatgtctttagaaatgttttgcctttctaagccttgtgctaaaggcgtataacggtggtgcctatctacttaagggggcattctagtcttaacttaaaagttgtctaaactgtccctccctggctttttttggtttggggtagacctaagggtgtttgttagtctcaaaactgtgaagtgacatgtcagaacagtccagactggtaagaaaattaatggcttcacttgaatttaaaccagctctagataggaaaaaaatcagtctcctcatttgctttttaaatggagtagtacatcccatattttagaacaagtaggggtgccttgcttaaataaaaatagcatttaatgtataattgtgtgaagggtttatggataaagctgtacttctgtcacaatgtggcagtactttctgctttaatattaaacagcttgttatttaaatattggacaaaatggctggcttcaaaatatagtcattaataaactaactttatgtgcacctgtgtaggagaatcaaaatcctgtatgctttctttgccttgttcctgttctcagggtgacgactgccaccaggagatgcagttctagttcttaaaattaaatttgcccaggtttctgacaggtgatacctggaagagagactatgtcttctcttacttaatacataaccatctttgattaccagctaagatgcgaaatcactgtactgtagtcaataaatgaagacttgtttcaggctg

SEQ ID NO: 776 - DNA, 2587 bp, Homo sapiens
ggcacacacgaggaggagggttgagctgctgccgccgccgcctctgtcgtcgtcgcgagtgtggagtcgggactggagctgctgccgcggcgacgccggggatctttgtcgctagctcccggcccttctgccccgccgccttccctcagtcagcgttgcccactcctctccggccgggcgcccctgcctccatttctcgctctctgtccaccacacacacggcccccccgatcatggatccgggcagtggcggcggcggcggcggcggcggcggcggcgggagcagcagcggcagcagcagcagcgactcggcgcctgactgctgggaccaggcggacatggaagcccccgggccgggcccttgcggcggcggcggcttccctggcggcggcggccgaggcccagcgggagaacctcagcgcggccttcagccggcaactcaacgtcaacgccaagcccttcgtgcccaacgtccacgccgccgagttcgtgccgtccttcctgcggggcccggcagcgccgccacccccagctggcggcgccgccaataaccacggagccggcagcggcgcgggaggccgtgcggcacctgtggaatcctctcaagaggaacagtcattgtgtgaaggttcaaattcagctgttagcatggaactttcagaacctattgtagaaaatggagagacagaaatgtctccagaagaatcatgggagcacaaagaagaaataagtgaagcagagccagggggtggttccttgggagatggaaggccgccagaggaaagtgcccatgaaatgatggaggaggaagaggaaatcccaaaacctaagtctgtggttgcaccgccaggtgctcctaagaaagagcatgtaaatgtagtattcattgggcacgtagatgctggcaagtcaaccattggaggacaaataatgtatttgactggaatggttgacaaaaggacgcttgaaaagtatgaaagagaagctaaagagaaaaacagagaaacttggtacttgtcttgggccttagacacaaatcaggaagaacgagacaagggtaaaacagtagaagtgggtcgtgcctattttgaaaccgaaaagaagcatttcacaattctagatgcccctggccacaagagttttgtcccaaatatgattggtggtgcctctcaagctgatttggctgtgctggtaatctcagccaggaaaggagagtttgaaactggatttgaaaaaggaggacagacaagagaacatgcaatgttggcaaagacagcaggtgtaaaacacctaattgtgctaattaataagatggatgatccaacagtaaattggagcaatgagagatatgaagaatgtaaggagaaactagtgccatttttgaaaaaagttggcttcaatcccaaaaaggacattcactttatgccctgctcaggacttactggagcaaatctcaaagagcagtcggatttctgtccttggtacattggattaccgtttattccatatctggataatttgccgaacttcaatagatcagttgatggaccaatcaggctgccaattgtggataagtacaaggatatgggcactgtggtcctgggaaagctggaatcaggatctatttgtaaaggccagcagcttgtgatgatgccaaacaagcacaacgtggaagttcttggaatactttccgatgatgtagagactgataccgtagccccaggtgaaaacctcaaaatcagactgaaaggaattgaagaagaggagattcttccagggtttatactttgtgatcctaataatctttgtcattctggacgcacatttgatgcccagatagtgattatagagcacaaatccatcatctgcccaggctataatgcggtgctgcatattcatacctgtattgaggaggtggaaataacagccttaatctgcttggtagacaaaaaatcaggagaaaaaagtaagacccgaccccgttttgtgaaacaagatcaagtatgcattgctcgcttaaggacagcaggaaccatctgccttgagacctttaaagacttccctcagatgggtcgtttcaccttaagagatgagggtaagaccattgcaattggaaaagttctgaaactggttccagagaaagactaagcattttcttgatgaccctgcacaatactgtgaggaaaattgactgcagaagcctacttcacaccgccttctcttattttctgcccattgataaacctctccccatattttgcaaagaggaaattcacagcaaaagtccacattatgtcagctttctcatattgagagctctgctatgccactgttgaatttttcccaagattcctgtccctagccctcacttcaaactctgcttccttggacagatttggcaatagctttgtaagtgatgtggacataattgcctacaataatgaaaacctacaggaatttttttatttttcattttccccttaggcatatttagtatttttcccccaggccagatcattcgtgagtgtgcgagtgtgtgtgcacatgttacaaaggcaactaccatgttaataaaatattcaatttg

SEQ ID NO: 777 - DNA, 1381 bp, Homo sapiens
atgcgcgatctcccggagcatgcgcagcagcggcgccgacgcggggcggtgcctggtgaccgcgcgcgctcccggaagtgtgccggcgtcgcgcgaaggttcagcagggagccgtgggccgggcgcgcggttcccggcacgtgtctcggcacgtggcagcgcgcctggccctgggcttggaggcgccggcgccctggatccgccggccgtggtcgccgagtcggtgtcgtccttgaccatcgccgacgcgttcattgcagccggcgagagctcagctccgaccccgccgcgccccgcgcttcccaggaggttcatctgctccttccctgactgcagcgccaattacagcaaagcctggaagcttgacgcgcacctgtgcaagcacacgggggagagaccatttgtttgtgactatgaagggtgtggcaaggccttcatcagggactaccatctgagccgccacattctgactcacacaggagaaaagccgtttgtttgtgcagccaatggctgtgatcaaaaattcaacacaaaatcaaacttgaagaaacattttgaacgcaaacatgaaaatcaacaaaaacaatatatatgcagttttgaagactgtaagaagacctttaagaaacatcagcagctgaaaatccatcagtgccagaataccaatgaacctctattcaagtgtacccaggaaggatgtgggaaacactttgcatcacccagcaagctgaaacgacatgccaaggcccacgagggctatgtatgtcaaaaaggatgttcctttgtggcaaaaacatggacggaacttctgaaacatgtgagagaaacccataaagaggaaatactatgtgaagtatgccggaaaacatttaaacgcaaagattaccttaagcaacacatgaaaactcatgccccagaaagggatgtatgtcgctgtccaagagaaggctgtggaagaacctatacaactgtgtttaatctccaaagccatatcctctccttccatgaggaaagccgcccttttgtgtgtgaacatgctggctgtggcaaaacatttgcaatgaaacaaagtctcactaggcatgctgttgtacatgatcctgacaagaagaaaatgaagctcaaagtcaaaaaatctcgtgaaaaacgggagtttggcctctcatctcagtggatatatcctcccaaaaggaaacaagggcaaggcttatctttgtgtcaaaacggagagtcacccaactgtgtggaagacaagatgctctcgacagttgcagtacttacccttggctaagaactgcactgctttgtttaaaggactgcagaccaaggagtcgagctttctctcagagcatgcttttctttattaaaattactgatgcag

SEQ ID NO: 778 - DNA, 3531 bp, Homo sapiens
cgcttcgggcaggggtgcggtcttgcaataggaagccgagcgtcttgcaagcttcccgtcggcaccagctactcggccccgcaccctacctggtgcattccctagacacctccggggtccctacctggagatccccggagccccccttcctgcgccagccatgcctttaaaccgcactttgtccatgtcctcactgccaggactggaggactgggaggatgaattcgacctggagaacgcagtgctcttcgaagtggcctgggaggtggctaacaaggtgggtggcatctacacggtgctgcagacgaaggcgaaggtgacaggggacgaatggggcgacaactacttcctggtggggccgtacacggagcagggcgtcaggacccaggtggaactgctggaggcccccaccccggccctgaagaggacactggattccatgaacagcaagggctgcaaggtgtatttcgggcgctggctgatcgagggaggccctctggtggtgctcctggacgtgggtgcctcagcttgggccctggagcgctggaagggagagctctgggatatctgcaacatcggagtgccgtggtacgaccgcgaggccaacgacgctgtcctctttggctttctgaccacctggttcctgggtgagttcctggcacagagtgaggagaagccacatgtggttgctcacttccatgagtggttggcaggcgttggactctgcctgtgtcgtgcccggcgactgcctgtagcaaccatcttcaccacccatgccacgctgctggggcgctacctgtgtgccggtgccgtggacttctacaacaacctggagaacttcaacgtggacaaggaagcaggggagaggcagatctaccaccgatactgcatggaaagggcggcagcccactgcgctcacgtcttcactactgtgtcccagatcaccgccatcgaggcacagcacttgctcaagaggaaaccagatattgtgacccccaatgggctgaatgtgaagaagttttctgccatgcatgagttccagaacctccatgctcagagcaaggctcgaatccaggagtttgtgcggggccatttttatgggcatctggacttcaacttggacaagaccttatacttctttatcgccggccgctatgagttctccaacaagggtgctgacgtctttctggaggcattggctcggctcaactatctgctcagagtgaacggcagcgagcagacagtggttgccttcttcatcatgccagcgcggaccaacaatttcaacgtggaaaccctcaaaggccaagctgtgcgcaaacagctttgggacacggccaacacggtgaaggaaaagttcgggaggaagctttatgaatccttactggttgggagccttcccgacatgaacaagatgctggataaggaagacttcactatgatgaagagagccatctttgcaacgcagcggcagtctttcccccctgtgtgcacccacaatatgctggatgactcctcagaccccatcctgaccaccatccgccgaatcggcctcttcaatagcagtgccgacagggtgaaggtgattttccacccggagttcctctcctccacaagccccctgctccctgtggactatgaggagtttgtccgtggctgtcaccttggagtcttcccctcctactatgagccttggggctacacaccggctgagtgcacggttatgggaatccccagtatctccaccaatctctccggcttcggctgcttcatggaggaacacatcgcagacccctcagcttacggtatctacattcttgaccggcggttccgcagcctggatgattcctgctcgcagctcacctccttcctctacagtttctgtcagcagagccggcggcagcgtatcatccagcggaaccgcacggagcgcctctccgaccttctggactggaaatacctaggccggtactatatgtctgcgcgccacatggcgctgtccaaggcctttccagagcacttcacctacgagcccaacgaggcggatgcggcccaggggtaccgctacccacggccagcctcggtgccaccgtcgccctcgctgtcacgacactccagcccgcaccagagtgaggacgaggaggatccccggaacgggccgctggaggaagacggcgagcgctacgatgaggacgaggaggccgccaaggaccggcgcaacatccgtgcaccagagtggccgcgccgagcgtcctgcacctcctccaccagcggccgcaagcgcaactctgtggacacggccacctccagctcactcagcaccccgagcgagcccctcagccccaccagctccctgggcgaggagcgtaactaagtccgccccaccacactccccgcctgtcctgcctctctgctccagagagaggatgcagaggggtgctgctcctaaacccccgatccagatctgcacggggtgcggccccgcagtgcccccacccagtccgccaaacactccaccccctccagctccagtttccaagttcctgcactcctgaatccacaaagccgtgcctttctctggctccagaatatgcataatcagcgccctggagtcccctgggcctggaccgcttcccagaggccaggaaatctgccattactctgcggtggtgccagaggttttaggaaacctggcatggtgctttcaggtctggggcttttagagccccccgtgtggcttacaaattctacagcatacagagcaggccacgctcaggcccggcatgcgggccaccaagttctggaaaccacgtggtgtccctgcgaatggggcgatcaagtccagagccggggcactttcagagtttgaaggtaactgagagcagatggtcctccatttcaactccagaagtggggctctgggagggatgttctagccctccctggctgtcagagccaggctctgcctggaggatccctccatccggctcctgtcatcccctacactttggccaagcaagaggtggtagaaccacttggctgctcattccttctggaggacacacagtctcagtccagatgccttcctgtctttctggtcctttctggaccagatcctactcttcctttctaaatctgagatctccctccagggaatccgcctgcagaggacagagctggctgtcttcccccacccctaacctggcttattcccaactgctctgcccactgtgaaaccactaggttctaggtcctggcttctagatctggaaccttaccacgttactgcatactgatccctttcccatgatccagaactgaggtcactgggttctagaacccccacatttacctcgaggctcttccatccccaaactgtgccctgccttcagctttggtgaaagggagggcccctcatgtgtgctgtgctgtgtctgcaccgcttggtttgcagttgagaggggagggcaggaggggtgtgattggagtgtgtccggagatgagatgaaaaaaatacatctatatttaaga

SEQ ID NO: 779 - DNA, 1040 bp, Homo sapiens
aacacatttcatctgggcttcttaaatctaaatctttaaaatgactaagttttcttccttttctctgtttttcctaatagttggggcttatatgactcatgtgtgtttcaatatggaaattattggagggaaagaagtgtcacctcattccaggccatttatggcctccatccagtatggcggacatcacgtttgtggaggtgttctgattgatccacagtgggtgctgacagcagcccactgccaatatcggtttaccaaaggccagtctcccactgtggttttaggcgcacactctctctcaaagaatgaggcctccaaacaaacactggagatcaaaaaatttataccattctcaagagttacatcagatcctcaatcaaatgatatcatgctggttaagcttcaaacagccgcaaaactcaataaacatgtcaagatgctccacataagatccaaaacctctcttagatctggaaccaaatgcaaggttactggctggggagccaccgatccagattcattaagaccttctgacaccctgcgagaagtcactgttactgtcctaagtcgaaaactttgcaacagccaaagttactacaacggcgacccttttatcaccaaagacatggtctgtgcaggagatgccaaaggccagaaggattcctgtaagggtgactcagggggccccttgatctgtaaaggtgtcttccacgctatagtctctggaggtcatgaatgtggtgttgccacaaagcctggaatctacaccctgttaaccaagaaataccagacttggatcaaaagcaaccttgtcccgcctcatacaaattaagttacaaataattttattggatgcacttgcttcttttttcctaatatgctcgcaggttagagttgggtgtaagtaaagcagagcacatatggggtccatttttgcacttgtaagtcattttattaaggaatcaagttctttttcacttgtatcactgatgtatttctaccatgctggttttattctaaataaaatttagaagact

SEQ ID NO: 780 - DNA, 1585 bp, Homo sapiens
acagcagttacactgcggcgggcgtctgttctagtgtttgagccgtcgtgcttcaccggtctacctcgctagcatgtcgggccgcggcaagactggcggcaaggcccgcgccaaggccaagtcgcgctcgtcgcgcgccggcctccagttcccagtgggccgtgtacaccggctgctgcggaagggccactacgccgagcgcgttggcgccggcgcgccagtgtacctggcggcagtgctggagtacctcaccgctgagatcctggagctggcgggcaatgcggcccgcgacaacaagaagacgcgaatcatcccccgccacctgcagctggccatccgcaacgacgaggagctcaacaagctgctgggcggcgtgacgatcgcccagggaggcgtcctgcccaacatccaggccgtgctgctgcccaagaagaccagcgccaccgtggggccgaaggcgccctcgggcggcaagaaggccacccaggcctcccaggagtactaagagggcccgcgccgcggccggccgccccagctccccatgccaccacaaaggcccttttaagggccaccaccgccctcatggaaagagctgagccgcttcagactgcggggcaagcgggccgcggctcccttcccctcccctcccctcgcccgccttcgccgcccggcctcgagtccccgcccgcccccgctcccgtcccgcaccgcctgccgcgtcggcctcgggcctgccctgtccgccgtccgccctccggtagggttcgggccttccggatgcggcttgggcgctcttcggggacctccgtggcgcggaagacccgagcctgccggggggaggccggcggcgccgcacctgcccgcctcggcgttcgtgactcagccgccccatcccgagtcgctaaggggctgcggggaggccgcagcaccttctggaagacttggccttccgctctgacgcagggccgaggtgggcagtccaggccgagagccggcggccctgaaggtgagtgaggccctcggcagctgcagccggggtgtctggtacccccccggcgtggtgcttagcccaggactttcagacggccgctggccgggaggctttggtgggagagacgcgatcgccgatttcggtctggcgccccttctgcggccgggacccaggcctttcacatcagctctccctccatcttcattcataggtctgcgctggggccgggacgaagcacttggtaacaggcacatcttcctcccgagtgactgcctcctaggaggacatttaggggagggcagaggcctgcagtttggcttcacggctggctatgtggacagcaagagtcgttttgcggaacgcgactggcagccaggcctgtcgggcccccgacgccgccccatttcccttccagcaaactcaactcggcaatccaagcacctagataccagcacaagtcggttaatccctgtctggactgagcctccgttggcttctgaactggaattctgcagctaacccttccacgactagaaccttaggcattggggagttttagatggactaattttattaaaggattgtttttttttt

SEQ ID NO: 781 - DNA, 873 bp, Homo sapiens
cgcagtttgaatcgcggtgcgacgaaggagtaggtggtgggatctcaccgtgggtccgattagccttttctctgccttgcttgcttgagcttcagcggaattcgaaatggctggcggtaaggctggaaaggactccggaaaggccaagacaaaggcggtttcccgctcgcagagagccggcttgcagttcccagtgggccgtattcatcgacacctaaaatctaggacgaccagtcatggacgtgtgggcgcgactgccgctgtgtacagcgcagccatcctggagtacctcaccgcagaggtacttgaactggcaggaaatgcatcaaaagacttaaaggtaaagcgtattacccctcgtcacttgcaacttgctattcgtggagatgaagaattggattctctcatcaaggctacaattgctggtggtggtgtcattccacacatccacaaatctctgattgggaagaaaggacaacagaagactgtctaaaggatgcctggattccttgttatctcaggactctaaatactctaacagctgtccagtgttggtgattccagtggactgtatctctgtgaaaaacacaattttgcctttttgtaattctatttgagcaagttggaagtttaattagctttccaaccaaccaaatttctgcattcgagtcttaaccatatttaagtgttactgtggcttcaaagaagctattgattctgaagtagtgggttttgattgagttgactgtttttaaaaaactgtttggattttaattgtgatgcagaagttatagtaacaaacatttggttttgtacagacattatttccactctggtggataagttcaataaaggtcatatcccaaactaaaa

SEQ ID NO: 782 - DNA, 1305 bp, Homo sapiens
ttttcttttgacttgtttgtggatggaatgtttacagacatttctaattactgctttaattaaataaattggatcaaaggccgttcgaggtatttttgttttgccgtttgtcgctcagaattggcattttgagaggtgattgatactgctaacaattttctagtactctagtttgtttcaagaagagattttgggtagacgtaatcttcacctttcaaattatataacaatacgaacattattttttatactgatcataatttccagatttggggagggggtgatcgtggcaggaaaagttgtatgtttgttagttgcatatggtgatttttgatttttcaatgctggtaggtaagtaaggaggtctctgtaccatggctcgtacaaagcagactgcccgcaaatcgaccggtggtaaagcacccaggaagcaactggctacaaaagccgctcgcaagagtgcgccctctactggaggggtgaagaaacctcatcgttacaggcctggtactgtggcgctccgtgaaattagacgttatcagaagtccactgaacttctgattcgcaaacttcccttccagcgtctggtgcgagaaattgctcaggactttaaaacagatctgcgcttccagagcgcagctatcggtgctttgcaggaggcaagtgaggcctatctggttggcctttttgaagacaccaacctgtgtgctatccatgccaaacgtgtaacaattatgccaaaagacatccagctagcacgccgcatacgtggagaacgtgcttaagaatccactatgatgggaaacatttcattctcaaaaaaaaaaaaaaaatttctcttcttcctgttattggtagttctgaacgttagatattttttttccatggggtcaaaggtacctaagtatatgattgcgagtggaaaaataggggacagaaatcaggtattggcagtttttccattttcatttgtgtgtgaatttttaatataaatgcggagacgtaaagcattaatgcaagttaaaatgtttcagtgaacaagtttcagcggttcaactttataataattataaataaacctgttaaatttttctggacaatgccagcatttggatttctttaaaacaagtaaatttcttattgatggcaactaaatggtgtttgtagcatttttatcatacagtagattccatccattcactatacttttctaactgagttgtcctacatgcaagtacatgtttttaatgttgtctgtcttctgtgctgttcctgtaagtttgctattaaaatacattaaactat

SEQ ID NO: 783 - DNA, 1266 bp, Homo sapiens
tgttaatgaaagcagattcaaagcaacaccaccaccactgaagtatttttagttatataagattggaactaccaagcatgtggctcctggtcagtgtaattctaatctcacggatatcctctgttgggggagaagcaacattttgtgattttccaaaaataaaccatggaattctatatgatgaagaaaaatataagccattttcccaggttcctacaggggaagttttctattactcctgtgaatataattttgtgtctccttcaaaatcattttggactcgcataacatgcacagaagaaggatggtcaccaacaccaaagtgtctcagactgtgtttctttccttttgtggaaaatggtcattctgaatcttcaggacaaacacatctggaaggtgatactgtgcaaattatttgcaacacaggatacagacttcaaaacaatgagaacaacatttcatgtgtagaacggggctggtccacccctcccaaatgcaggtccactgacacttcctgtgtgaatccgcccacagtacaaaatgcttatatagtgtcgagacagatgagtaaatatccatctggtgagagagtacgttatcaatgtaggagcccttatgaaatgtttggggatgaagaagtgatgtgtttaaatggaaactggacggaaccacctcaatgcaaagattctacgggaaaatgtgggccccctccacctattgacaatggggacattacttcattcccgttgtcagtatatgctccagcttcatcagttgagtaccaatgccagaacttgtatcaacttgagggtaacaagcgaataacatgtagaaatggacaatggtcagaaccaccaaaatgcttacatccgtgtgtaatatcccgagaaattatggaaaattataacatagcattaaggtggacagccaaacagaagctttatttgagaacaggtgaatcagctgaatttgtgtgtaaacggggatatcgtctttcatcacgttctcacacattgcgaacaacatgttgggatgggaaactggagtatccaacttgtgcaaaaagatagaatcaatcataaaatgcacacctttattcagaactttagtattaaatcagttcttaatttaatttttaagtattgttttactcctttttattcatacgtaaaattttggattaatttgtgaaaatgtaattataagctgagaccggtggctctcttcttaaaagcaccatattaaaacttggaaaactggaaaact

SEQ ID NO: 784 - DNA, 1529 bp, Homo sapiens
ccccagacgccgaggatggccgtcatggcgccccgaaccctcctcctgctactctcgggggccctggccctgacccagacctgggcgggctcccactccatgaggtatttcttcacatccgtgtcccggcccggccgcggggagccccgcttcatcgccgtgggctacgtggacgacacgcagttcgtgcggttcgacagcgacgccgcgagccagaagatggagccgcgggcgccgtggatagagcaggaggggccggagtattgggaccaggagacacggaatatgaaggcccactcacagactgaccgagcgaacctggggaccctgcgcggctactacaaccagagcgaggacggttctcacaccatccagataatgtatggctgcgacgtggggccggacgggcgcttcctccgcgggtaccggcaggacgcctacgacggcaaggattacatcgccctgaacgaggacctgcgctcttggaccgcggcggacatggcagctcagatcaccaagcgcaagtgggaggcggtccatgcggcggagcagcggagagtctacctggagggccggtgcgtggacgggctccgcagatacctggagaacgggaaggagacgctgcagcgcacggacccccccaagacacatatgacccaccaccccatctctgaccatgaggccaccctgaggtgctgggccctgggcttctaccctgcggagatcacactgacctggcagcgggatggggaggaccagacccaggacacggagctcgtggagaccaggcctgcaggggatggaaccttccagaagtgggcggctgtggtggtgccttctggagaggagcagagatacacctgccatgtgcagcatgagggtctgcccaagcccctcaccctgagatgggagctgtcttcccagcccaccatccccatcgtgggcatcattgctggcctggttctccttggagctgtgatcactggagctgtggtcgctgccgtgatgtggaggaggaagagctcagatagaaaaggagggagttacactcaggctgcaagcagtgacagtgcccagggctctgatgtgtctctcacagcttgtaaagtgtgagacagctgccttgtgtgggactgagaggcaagagttgttcctgcccttccctttgtgacttgaagaaccctgactttgtttctgcaaaggcacctgcatgtgtctgtgttcgtgtaggcataatgtgaggaggtggggagagcaccccacccccatgtccaccatgaccctcttcccacgctgacctgtgctccctctccaatcatctttcctgttccagagaggtggggctgaggtgtctccatctctgtctcaacttcatggtgcactgagctgtaacttcttccttccctattaaaattagaacctgagtataaatttactttctcaaattcttgccatgagaggttgatgagttaattaaaggagaagattcctaaaatttgagagacaaaattaatggaacgcatgagaac

SEQ ID NO: 785 - DNA, 1192 bp, Homo sapiens
cagatccatcaggtccaagctgtgttgactaccactgcttttcccttcgtctcaattatgtcttggaagaaggctttgcggatccctggaggccttcgggtagcaactgtgaccttgatgctggcgatgctgagcaccccggtggctgagggcagagactctcccgaggatttcgtgtaccagtttaagggcatgtgctacttcaccaacgggacggagcgcgtgcgtcttgtgaccagatacatctataaccgagaggagtacgcacgcttcgacagcgacgtgggggtgtatcgggcggtgacgccgctggggccgcctgacgccgagtactggaacagccagaaggaagtcctggagaggacccgggcggagttggacacggtgtgcagacacaactaccagttggagctccgcacgaccttgcagcggcgagtggagcccacagtgaccatctccccatccaggacagaggccctcaaccaccacaacctgctggtctgctcagtgacagatttctatccagcccagatcaaagtccggtggtttcggaatgaccaggaggagacaactggcgttgtgtccaccccccttattaggaacggtgactggaccttccagatcctggtgatgctggaaatgactccccagcgtggagacgtctacacctgccacgtggagcaccccagcctccagaaccccatcatcgtggagtggcgggctcagtctgaatctgcccagagcaagatgctgagtggcattggaggcttcgtgctggggctgatcttcctcgggctgggccttattatccatcacaggagtcagaaagggctcctgcactgactcctgagactattttaactgggattggttatcacttttctgtaacgcctgcttgtccctgcccagaattcccagctgcctgtgtcagcctgtcccccgagatcagagtcctaccgtggctgtcacgcagccaccaggtcatctcctttcatccccacctcaaggctgatggctgtgaccctgcttcctgcactgacccagagcctctgcctgtgcacggccagctgcgtctactgaggccccaaggggtttctgtttctattctctcctcagactgctcaagagaagcacatgaaaaccattacctgactttagagcttttttacataattaaacatgatcctgagtt

SEQ ID NO: 786 - DNA, 1182 bp, Homo sapiens
tagttctccctgagtgagacttgcctgcttctctggcccctggtcctgtcctgttctccagcatggtgtgtctgaagctccctggaggctcctgcatgacagcgctgacagtgacactgatggtgctgagctccccactggctttggctggggacacccgaccacgtttcttgtggcagcttaagtttgaatgtcatttcttcaatgggacggagcgggtgcggttgctggaaagatgcatctataaccaagaggagtccgtgcgcttcgacagcgacgtgggggagtaccgggcggtgacggagctggggcggcctgatgccgagtactggaacagccagaaggacctcctggagcagaggcgggccgcggtggacacctactgcagacacaactacggggttggtgagagcttcacagtgcagcggcgagttgagcctaaggtgactgtgtatccttcaaagacccagcccctgcagcaccacaacctcctggtctgctctgtgagtggtttctatccaggcagcattgaagtcaggtggttccggaacggccaggaagagaaggctggggtggtgtccacaggcctgatccagaatggagattggaccttccagaccctggtgatgctggaaacagttcctcggagtggagaggtttacacctgccaagtggagcacccaagtgtgacgagccctctcacagtggaatggagagcacggtctgaatctgcacagagcaagatgctgagtggagtcgggggcttcgtgctgggcctgctcttccttggggccgggctgttcatctacttcaggaatcagaaaggacactctggacttcagccaacaggattcctgagctgaaatgcagatgaccacattcaaggaagaaccttctgtcccagctttgcagaatgaaaagctttcctgcttggcagttattcttccacaagagagggctttctcaggacctggttgctactggttcggcaactgcagaaaatgtcctcccttgtggcttcctcagctcctgcccttggcctgaagtcccagcattgatgacagcgcctcatcttcaacttttgtgctcccctttgcctaaaccgtatggcctcccgtgcatctgtactcaccctgtacgacaaacacattacattattaaatgtttctcaaagatggagtt

SEQ ID NO: 787 - DNA, 1840 bp, Homo sapiens
cccattaggtgacaggtttttagagaagccaatcacgtcgccgcggtcctggttctaaagtcctcgctcacccacccggactcattctccccagacgccaaggatggtggtcatggcgccccgaaccctcttcctgctgctctcgggggccctgaccctgaccgagacctgggcgggctcccactccatgaggtatttcagcgccgccgtgtcccggcccggccgcggggagccccgcttcatcgccatgggctacgtggacgacacgcagttcgtgcggttcgacagcgactcggcgtgtccgaggatggagccgcgggcgccgtgggtggagcaggaggggccggagtattgggaagaggagacacggaacaccaaggcccacgcacagactgacagaatgaacctgcagaccctgcgcggctactacaaccagagcgaggccagttctcacaccctccagtggatgattggctgcgacctggggtccgacggacgcctcctccgcgggtatgaacagtatgcctacgatggcaaggattacctcgccctgaacgaggacctgcgctcctggaccgcagcggacactgcggctcagatctccaagcgcaagtgtgaggcggccaatgtggctgaacaaaggagagcctacctggagggcacgtgcgtggagtggctccacagatacctggagaacgggaaggagatgctgcagcgcgcggacccccccaagacacacgtgacccaccaccctgtctttgactatgaggccaccctgaggtgctgggccctgggcttctaccctgcggagatcatactgacctggcagcgggatggggaggaccagacccaggacgtggagctcgtggagaccaggcctgcaggggatggaaccttccagaagtgggcagctgtggtggtgccttctggagaggagcagagatacacgtgccatgtgcagcatgaggggctgccggagcccctcatgctgagatggaagcagtcttccctgcccaccatccccatcatgggtatcgttgctggcctggttgtccttgcagctgtagtcactggagctgcggtcgctgctgtgctgtggagaaagaagagctcagattgaaaaggagggagctactctcaggctgcaagtaagtatgaaggaggctgatccctgagatccttgggatcttgtgtttgggagccatgggggagctcacccaccccacaattcctcctctggccacatctcctgtggtctctgaccaggtgctgtttttgttctactctaggcagtgacagtgcccagggctctaatgtgtctctcacggcttgtaaatgtgacaccccggggggcctgatgtgtgtgggttgttgaggggaacaggggacatagctgtgctatgaggtttctttgacttcaatgtattgagcatgtgatgggctgtttaaagtgtcacccctcactgtgactgatatgaatttgttcatgaatatttttctgtagtgtgaaacagctgccctgtgtgggactgagtggcaagtccctttgtgacttcaagaaccctgacttctctttgtgcagagaccagcccacccctgtgcccaccatgaccctcttcctcatgctgaactgcattccttccccaatcacctttcctgttccagaaaaggggctgggatgtctccgtctctgtctcaaatttgtggtccactgagctataacttacttctgtattaaaattagaatctgagtgtaaatttactttttcaaattatttccaagagagattgatgggttaattaaaggagaagattcctgaaatttgagagacaaaataaa

SEQ ID NO: 788 - DNA, 1207 bp, Homo sapiens
gagacagcgccggggcaagtgagagccggacgggcactgggcgactctgtgcctcgctgaggaaaaataactaaacatgggcaaaggagatcctaagaagccgagaggcaaaatgtcatcatatgcattttttgtgcaaacttgtcgggaggagcataagaagaagcacccagatgcttcagtcaacttctcagagttttctaagaagtgctcagagaggtggaagaccatgtctgctaaagagaaaggaaaatttgaagatatggcaaaggcggacaaggcccgttatgaaagagaaatgaaaacctatatccctcccaaaggggagacaaaaaagaagttcaaggatcccaatgcacccaagaggcctccttcggccttcttcctcttctgctctgagtatcgcccaaaaatcaaaggagaacatcctggcctgtccattggtgatgttgcgaagaaactgggagagatgtggaataacactgctgcagatgacaagcagccttatgaaaagaaggctgcgaagctgaaggaaaaatacgaaaaggatattgctgcatatcgagctaaaggaaagcctgatgcagcaaaaaagggagttgtcaaggctgaaaaaagcaagaaaaagaaggaagaggaggaagatgaggaagatgaagaggatgaggaggaggaggaagatgaagaagatgaagatgaagaagaagatgatgatgatgaataagttggttctagcgcagtttttttttcttgtctataaagcatttaacccccctgtacacaactcactccttttaaagaaaaaaattgaaatgtaaggctgtgtaagatttgtttttaaactgtacagtgtctttttttgtatagttaacacactaccgaatgtgtctttagatagccctgtcctggtggtattttcaatagccactaaccttgcctggtacagtatgggggttgtaaattggcatggaaatttaaagcaggttcttgttggtgcacagcacaaattagttatatatggggatggtagttttttcatcttcagttgtctctgatgcagcttatacgaaataattgttgttctgttaactgaataccactctgtaattgcaaaaaaaaaaaaagttgcagctgttttgttgacattctgaatgcttctaagtaaatacaattttttttattaaaaaaaaaaaaaaaaaaaaaaaaa

SEQ ID NO: 789 - DNA, 1277 bp, Homo sapiens
gatgtggcccgtggcctagctcgtcaagttgccgtggcgcggagaactctgcaaaacaagaggctgaggattgcgttagagataaaccagttcacgccggagccccgtgagggaagcgtctccgttgggtccggccgctctgcgggactctgaggaaaagctcgcaccaggtggacgcggatctgtcaacatgggtaaaggagaccccaacaagccgcggggcaaaatgtcctcgtacgccttcttcgtgcagacctgccgggaagagcacaagaagaaacacccggactcttccgtcaatttcgcggaattctccaagaagtgttcggagagatggaagaccatgtctgcaaaggagaagtcgaagtttgaagatatggcaaaaagtgacaaagctcgctatgacagggagatgaaaaattacgttcctcccaaaggtgataagaaggggaagaaaaaggaccccaatgctcctaaaaggccaccatctgccttcttcctgttttgctctgaacatcgcccaaagatcaaaagtgaacaccctggcctatccattggggatactgcaaagaaattgggtgaaatgtggtctgagcagtcagccaaagataaacaaccatatgaacagaaagcagctaagctaaaggagaaatatgaaaaggatattgctgcatatcgtgccaagggcaaaagtgaagcaggaaagaagggccctggcaggccaacaggctcaaagaagaagaacgaaccagaagatgaggaggaggaggaggaagaagaagatgaagatgaggaggaagaggatgaagatgaagaataaatggctatcctttaatgatgcgtgtggaatgtgtgtgtgtgctcaggcaattattttgctaagaatgtgaattcaagtgcagctcaatactagcttcagtataaaaactgtacagatttttgtatagctgataagattctctgtagagaaaatacttttaaaaaatgcaggttgtagctttttgatgggctactcatacagttagattttacagcttctgatgttgaatgttcctaaatatttaatggtttttttaatttctgtgtgtatggtagcacagcaaacttgtaggaattagtatcaatagtaaattttgggttttttaggatgttgcatttcgtttttttaaaaaaaattttgtaataaaattatgtatattatttctattgtctttgtcttaatatgctaagttaattttcactttaaaaaagccatttgaagaccaaaaaaaaaaaaa

SEQ ID NO: 790 - DNA, 1769 bp, Homo sapiens
gagagggcgaaggtaggctggcagatacgttcgtcagcttgctcctttctgcccgtggacgccgccgaagaagcatcgttaaagtctctcttcaccctgccgtcatgtctaagtcagagtctcctaaagagcccgaacagctgaggaagctcttcattggagggttgagctttgaaacaactgatgagagcctgaggagccattttgagcaatggggaacgctcacggactgtgtggtaatgagagatccaaacaccaagcgctctaggggctttgggtttgtcacatatgccactgtggaggaggtggatgcagctatgaatgcaaggccacacaaggtggatggaagagttgtggaaccaaagagagctgtctccagagaagattctcaaagaccaggtgcccacttaactgtgaaaaagatatttgttggtggcattaaagaagacactgaagaacatcacctaagagattattttgaacagtatggaaaaattgaagtgattgaaatcatgactgaccgaggcagtggcaagaaaaggggctttgcctttgtaacctttgacgaccatgactccgtggataagattgtcattcagaaataccatactgtgaatggccacaactgtgaagttagaaaagccctgtcaaagcaagagatggctagtgcttcatccagccaaagaggtcgaagtggttctggaaactttggtggtggtcgtggaggtggtttcggtgggaatgacaacttcggtcgtggaggaaacttcagtggtcgtggtggctttggtggcagccgtggtggtggtggatatggtggcagtggggatggctataatggatttggcaatgatggaagcaattttggaggtggtggaagctacaatgattttgggaattacaacaatcagtcttcaaattttggacccatgaagggaggaaattttggaggcagaagctctggcccctatggcggtggaggccaatactttgcaaaaccacgaaaccaaggtggctatggcggttccagcagcagcagtagctatggcagtggcagaagattttaattaggaaacaaagcttagcaggagaggagagccagagaagtgacagggaagctacaggttacaacagatttgtgaactcagccaagcacagtggtggcagggcctagctgctacaaagaagacatgttttagacaaatactcatgtgtatgggcaaaaaactcgaggactgtatttgtgactaattgtataacaggttattttagtttctgttctgtggaaagtgtaaagcattccaacaaagggttttaatgtagatttttttttttgcaccccatgctgttgattgctaaatgtaacagtctgatcgtgacgctgaataaatgtcttttttttaatgtgctgtgtaaagttagtctactcttaagccatcttggtaaatttccccaacagtgtgaagttagaattccttcagggtgatgccaggttctatttggaatttatatacaacctgcttgggtggagaagccattgtcttcggaaaccttggtgtagttgaactgatagttactgttgtgacctgaagttcaccattaaaagggattacccaagcaaaatcatggaatggttataaaagtgattgttggcacatcctatgcaatatatctaaattgaataatggtaccagataaaattatagatgggaatgaagcttgtgtatccattatcatgtgtaatcaataaacgatttaattctcttgaa

SEQ ID NO: 791 - DNA, 1714 bp, Homo sapiens
agtagcagcagcgccgggtcccgtgcggaggtgctcctcgcagagttgtttctcgagcagcggcagttctcactacagcgccaggacgagtccggttcgtgttcgtccgcggagatctctctcatctcgctcggctgcgggaaatcgggctgaagcgactgagtccgcgatggagagagaaaaggaacagttccgtaagctctttattggtggcttaagctttgaaaccacagaagaaagtttgaggaactactacgaacaatggggaaagcttacagactgtgtggtaatgagggatcctgcaagcaaaagatcaagaggatttggttttgtaactttttcatccatggctgaggttgatgctgccatggctgcaagacctcattcaattgatgggagagtagttgagccaaaacgtgctgtagcaagagaggaatctggaaaaccaggggctcatgtaactgtgaagaagctgtttgttggcggaattaaagaagatactgaggaacatcaccttagagattactttgaggaatatggaaaaattgataccattgagataattactgataggcagtctggaaagaaaagaggctttggctttgttacttttgatgaccatgatcctgtggataaaatcgtattgcagaaataccataccatcaatggtcataatgcagaagtaagaaaggctttgtctagacaagaaatgcaggaagttcagagttctaggagtggaagaggaggcaactttggctttggggattcacgtggtggcggtggaaatttcggaccaggaccaggaagtaactttagaggaggatctgatggatatggcagtggacgtggatttggggatggctataatgggtatggaggaggacctggaggtggcaattttggaggtagccccggttatggaggaggaagaggaggatatggtggtggaggacctggatatggcaaccagggtgggggctacggaggtggttatgacaactatggaggaggaaattatggaagtggaaattacaatgattttggaaattataaccagcaaccttctaactacggtccaatgaagagtggaaactttggtggtagcaggaacatggggggaccatatggtggaggaaactatggtccaggaggcagtggaggaagtgggggttatggtgggaggagccgatactgagcttcttcctatttgccatgggcttcactgtataaataggagaggatgagagcccagaggtaacagaacagcttcaggttatcgaaataacaatgttaaggaaactcttatctcagtcatgcataaatatgcagtgatatggcagaagacaccagagcagatgcagagagccattttgtgaatggattggattatttaataacattaccttactgtggaggaaggattgtaaaaaaaaatgcctttgagacagtttcttagctttttaattgttgtttctttctagtggtctttgtaagagtgtagaagcattccttctttgataatgttaaatttgtaagtttcaggtgacatgtgaaaccttttttaagatttttctcaaagttttgaaaagctattagccaggatcatggtgtaataagacataacgtttttcctttaaaaaaatttaagtgcgtgtgtagagttaagaagctgttgtacatttatgatttaataaaataattctaaaggaaaaaa

SEQ ID NO: 792 - DNA, 1783 bp, Homo sapiens
tcgagcccgctttccagggaccctacctgagggcccacaggtgaggcagcctggcctagcaggccccacgccaccgcctctgcctccaggccgcccgctgctgcggggccaccatgctcctgcccaggcctggagactgacccgaccccggcactacctcgaggctccgcccccacctgctggaccccagggtcccaccctggcccaggaggtcagccagggaatcattaacaagaggcagtgacatggcgcagaaggagggtggccggactgtgccatgctgctccagacccaaggtggcagctctcactgcggggaccctgctacttctgacagccatcggggcggcatcctgggccattgtggctgttctcctcaggagtgaccaggagccgctgtacccagtgcaggtcagctctgcggacgctcggctcatggtctttgacaagacggaagggacgtggcggctgctgtgctcctcgcgctccaacgccagggtagccggactcagctgcgaggagatgggcttcctcagggcactgacccactccgagctggacgtgcgaacggcgggcgccaatggcacgtcgggcttcttctgtgtggacgaggggaggctgccccacacccagaggctgctggaggtcatctccgtgtgtgattgccccagaggccgtttcttggccgccatctgccaagactgtggccgcaggaagctgcccgtggaccgcatcgtgggaggccgggacaccagcttgggccggtggccgtggcaagtcagccttcgctatgatggagcacacctctgtgggggatccctgctctccggggactgggtgctgacagccgcccactgcttcccggagcggaaccgggtcctgtcccgatggcgagtgtttgccggtgccgtggcccaggcctctccccacggtctgcagctgggggtgcaggctgtggtctaccacgggggctatcttccctttcgggaccccaacagcgaggagaacagcaacgatattgccctggtccacctctccagtcccctgcccctcacagaatacatccagcctgtgtgcctcccagctgccggccaggccctggtggatggcaagatctgtaccgtgacgggctggggcaacacgcagtactatggccaacaggccggggtactccaggaggctcgagtccccataatcagcaatgatgtctgcaatggcgctgacttctatggaaaccagatcaagcccaagatgttctgtgctggctaccccgagggtggcattgatgcctgccagggcgacagcggtggtccctttgtgtgtgaggacagcatctctcggacgccacgttggcggctgtgtggcattgtgagttggggcactggctgtgccctggcccagaagccaggcgtctacaccaaagtcagtgacttccgggagtggatcttccaggccataaagactcactccgaagccagcggcatggtgacccagctctgaccggtggcttctcgctgcgcagcctccagggcccgaggtgatcccggtggtgggatccacgctgggccgaggatgggacgtttttcttcttgggcccggtccacaggtccaaggacaccctccctccagggtcctctcttccacagtggcgggcccactcagccccgagaccacccaacctcaccctcctgacccccatgtaaatattgttctgctgtctgggactcctgtctaggtgcccctgatgatgggatgctctttaaataataaagatggttttgatt

SEQ ID NO: 793 - DNA, 2202 bp, Homo sapiens
cacgcttgccgccgccccgcagaaatgcttcggttacccacagtctttcgccagatgagaccggtgtccagggtactggctcctcatctcactcgggcttatgccaaagatgtaaaatttggtgcagatgcccgagccttaatgcttcaaggtgtagaccttttagccgatgctgtggccgttacaatggggccaaagggaagaacagtgattattgagcagggttggggaagtcccaaagtaacaaaagatggtgtgactgttgcaaagtcaattgacttaaaagataaatacaagaacattggagctaaacttgttcaagatgttgccaataacacaaatgaagaagctggggatggcactaccactgctactgtactggcacgctctatagccaaggaaggcttcgagaagattagcaaaggtgctaatccagtggaaatcaggagaggtgtgatgttagctgttgatgctgtaattgctgaacttaaaaagcagtctaaacctgtgaccacccctgaagaaattgcacaggttgctacgatttctgcaaacggagacaaagaaattggcaatatcatctctgatgcaatgaaaaaagttggaagaaagggtgtcatcacagtaaaggatggaaaaacactgaatgatgaattagaaattattgaaggcatgaagtttgatcgaggctatatttctccatactttattaatacatcaaaaggtcagaaatgtgaattccaggatgcctatgttctgttgagtgaaaagaaaatttctagtatccagtccattgtacctgctcttgaaattgccaatgctcaccgtaagcctttggtcataatcgctgaagatgttgatggagaagctctaagtacactcgtcttgaataggctaaaggttggtcttcaggttgtggcagtcaaggctccagggtttggtgacaatagaaagaaccagcttaaagatatggctattgctactggtggtgcagtgtttggagaagagggattgaccctgaatcttgaagacgttcagcctcatgacttaggaaaagttggagaggtcattgtgaccaaagacgatgccatgctcttaaaaggaaaaggtgacaaggctcaaattgaaaaacgtattcaagaaatcattgagcagttagatgtcacaactagtgaatatgaaaaggaaaaactgaatgaacggcttgcaaaactttcagatggagtggctgtgctgaaggttggtgggacaagtgatgttgaagtgaatgaaaagaaagacagagttacagatgcccttaatgctacaagagctgctgttgaagaaggcattgttttgggagggggttgtgccctccttcgatgcattccagccttggactcattgactccagctaatgaagatcaaaaaattggtatagaaattattaaaagaacactcaaaattccagcaatgaccattgctaagaatgcaggtgttgaaggatctttgatagttgagaaaattatgcaaagttcctcagaagttggttatgatgctatggctggagattttgtgaatatggtggaaaaaggaatcattgacccaacaaaggttgtgagaactgctttattggatgctgctggtgtggcctctctgttaactacagcagaagttgtagtcacagaaattcctaaagaagagaaggaccctggaatgggtgcaatgggtggaatgggaggtggtatgggaggtggcatgttctaactcctagactagtgctttacctttattaatgaactgtgacaggaagcccaaggcagtgttcctcaccaataacttcagagaagtcagttggagaaaatgaagaaaaaggctggctgaaaatcactataaccatcagttactggtttcagttgacaaaatatataatggtttactgctgtcattgtccatgcctacagataatttattttgtatttttgaataaaaaacatttgtacattcctgatactgggtacaagagccatgtaccagtgtactgctttcaacttaaatcactgaggcatttttactactattctgttaaaatcaggattttagtgcttgccaccaccagatgagaagttaagcagcctttctgtggagagtgagaataattgtgtacaaagtagagaagtatccaattatgtgacaacctttgtgtaataaaaatttgtttaa

SEQ ID NO: 794 - DNA, 538 bp, Homo sapiens
gctacactagagcagagtacgagtctgaggcggagggagtaatggcaggacaagcgtttagaaagtttcttccactctttgaccgagtattggttgaaaggagtgctgctgaaactgtaaccaaaggaggcattatgcttccagaaaaatctcaaggaaaagtattgcaagcaacagtagtcgctgttggatcgggttctaaaggaaagggtggagagattcaaccagttagcgtgaaagttggagataaagttcttctcccagaatatggaggcaccaaagtagttctagatgacaaggattatttcctatttagagatggtgacattcttggaaagtacgtagactgaaataagtcactattgaaatggcatcaacatgatgctgcccattccactgaagttctgaaatctttcgtcatgtaaataatttccatatttctcttttataataaactaatgataactaatgacatccagtgtctccaaaattgtttccttgtactgatataaacacttccaaataaaaatatgtaaat

SEQ ID NO: 795 - DNA, 7560 bp, Homo sapiens
accggccacagcctgcctactgtcacccgcctctcccgcgcgcagatacacgcccccgcctccgtgggcacaaaggcagcgctgctggggaactcgggggaacgcgcacgtgggaaccgccgcagctccacactccaggtacttcttccaaggacctaggtctctcgcccatcggaaagaaaataattctttcaagaagatcagggacaactgatttgaagtctactctgtgcttctaaatccccaattctgctgaaagtgaatccctagagccctagagccccagcagcacccagccaaacccacctccaccatgggggccatgactcagctgttggcaggtgtctttcttgctttccttgccctcgctaccgaaggtggggtcctcaagaaagtcatccggcacaagcgacagagtggggtgaacgccaccctgccagaagagaaccagccagtggtgtttaaccacgtttacaacatcaagctgccagtgggatcccagtgttcggtggatctggagtcagccagtggggagaaagacctggcaccgccttcagagcccagcgaaagctttcaggagcacacagtagatggggaaaaccagattgtcttcacacatcgcatcaacatcccccgccgggcctgtggctgtgccgcagcccctgatgttaaggagctgctgagcagactggaggagctggagaacctggtgtcttccctgagggagcaatgtactgcaggagcaggctgctgtctccagcctgccacaggccgcttggacaccaggcccttctgtagcggtcggggcaacttcagcactgaaggatgtggctgtgtctgcgaacctggctggaaaggccccaactgctctgagcccgaatgtccaggcaactgtcaccttcgaggccggtgcattgatgggcagtgcatctgtgacgacggcttcacgggcgaggactgcagccagctggcttgccccagcgactgcaatgaccagggcaagtgcgtgaatggagtctgcatctgtttcgaaggctacgccggggctgactgcagccgtgaaatctgcccagtgccctgcagtgaggagcacggcacatgtgtagatggcttgtgtgtgtgccacgatggctttgcaggcgatgactgcaacaagcctctgtgtctcaacaattgctacaaccgtggacgatgcgtggagaatgagtgcgtgtgtgatgagggtttcacgggcgaagactgcagtgagctcatctgccccaatgactgcttcgaccggggccgctgcatcaatggcacctgctactgcgaagaaggcttcacaggtgaagactgcgggaaacccacctgcccacatgcctgccacacccagggccggtgtgaggaggggcagtgtgtatgtgatgagggctttgccggtttggactgcagcgagaagaggtgtcctgctgactgtcacaatcgtggccgctgtgtagacgggcggtgtgagtgtgatgatggtttcactggagctgactgtggggagctcaagtgtcccaatggctgcagtggccatggccgctgtgtcaatgggcagtgtgtgtgtgatgagggctatactggggaggactgcagccagctacggtgccccaatgactgtcacagtcggggccgctgtgtcgagggcaaatgtgtatgtgagcaaggcttcaagggctatgactgcagtgacatgagctgccctaatgactgtcaccagcacggccgctgtgtgaatggcatgtgtgtttgtgatgacggctacacaggggaagactgccgggatcgccaatgccccagggactgcagcaacaggggcctctgtgtggacggacagtgcgtctgtgaggacggcttcaccggccctgactgtgcagaactctcctgtccaaatgactgccatggccagggtcgctgtgtgaatgggcagtgcgtgtgccatgaaggatttatgggcaaagactgcaaggagcaaagatgtcccagtgactgtcatggccagggccgctgcgtggacggccagtgcatctgccacgagggcttcacaggcctggactgtggccagcactcctgccccagtgactgcaacaacttaggacaatgcgtctcgggccgctgcatctgcaacgagggctacagcggagaagactgctcagaggtgtctcctcccaaagacctcgttgtgacagaagtgacggaagagacggtcaacctggcctgggacaatgagatgcgggtcacagagtaccttgtcgtgtacacgcccacccacgagggtggtctggaaatgcagttccgtgtgcctggggaccagacgtccaccatcatccaggagctggagcctggtgtggagtactttatccgtgtatttgccatcctggagaacaagaagagcattcctgtcagcgccagggtggccacgtacttacctgcacctgaaggcctgaaattcaagtccatcaaggagacatctgtggaagtggagtgggatcctctagacattgcttttgaaacctgggagatcatcttccggaatatgaataaagaagatgagggagagatcaccaaaagcctgaggaggccagagacctcttaccggcaaactggtctagctcctgggcaagagtatgagatatctctgcacatagtgaaaaacaatacccggggccctggcctgaagagggtgaccaccacacgcttggatgcccccagccagatcgaggtgaaagatgtcacagacaccactgccttgatcacctggttcaagcccctggctgagatcgatggcattgagctgacctacggcatcaaagacgtgccaggagaccgtaccaccatcgatctcacagaggacgagaaccagtactccatcgggaacctgaagcctgacactgagtacgaggtgtccctcatctcccgcagaggtgacatgtcaagcaacccagccaaagagaccttcacaacaggcctcgatgctcccaggaatcttcgacgtgtttcccagacagataacagcatcaccctggaatggaggaatggcaaggcagctattgacagttacagaattaagtatgcccccatctctggaggggaccacgctgaggttgatgttccaaagagccaacaagccacaaccaaaaccacactcacaggtctgaggccgggaactgaatatgggattggagtttctgctgtgaaggaagacaaggagagcaatccagcgaccatcaacgcagccacagagttggacacgcccaaggaccttcaggtttctgaaactgcagagaccagcctgaccctgctctggaagacaccgttggccaaatttgaccgctaccgcctcaattacagtctccccacaggccagtgggtgggagtgcagcttccaagaaacaccacttcctatgtcctgagaggcctggaaccaggacaggagtacaatgtcctcctgacagccgagaaaggcagacacaagagcaagcccgcacgtgtgaaggcatccactgaacaagcccctgagctggaaaacctcaccgtgactgaggttggctgggatggcctcagactcaactggaccgcggctgaccaggcctatgagcactttatcattcaggtgcaggaggccaacaaggtggaggcagctcggaacctcaccgtgcctggcagccttcgggctgtggacataccgggcctcaaggctgctacgccttatacagtctccatctatggggtgatccagggctatagaacaccagtgctctctgctgaggcctccacaggggaaactcccaatttgggagaggtcgtggtggccgaggtgggctgggatgccctcaaactcaactggactgctccagaaggggcctatgagtactttttcattcaggtgcaggaggctgacacagtagaggcagcccagaacctcaccgtcccaggaggactgaggtccacagacctgcctgggctcaaagcagccactcattataccatcaccatccgcggggtcactcaggacttcagcacaacccctctctctgttgaagtcttgacagaggaggttccagatatgggaaacctcacagtgaccgaggttagctgggatgctctcagactgaactggaccacgccagatggaacctatgaccagtttactattcaggtccaggaggctgaccaggtggaagaggctcacaatctcacggttcctggcagcctgcgttccatggaaatcccaggcctcagggctggcactccttacacagtcaccctgcacggcgaggtcaggggccacagcactcgaccccttgctgtagaggtcgtcacagaggatctcccacagctgggagatttagccgtgtctgaggttggctgggatggcctcagactcaactggaccgcagctgacaatgcctatgagcactttgtcattcaggtgcaggaggtcaacaaagtggaggcagcccagaacctcacgttgcctggcagcctcagggctgtggacatcccgggcctcgaggctgccacgccttatagagtctccatctatggggtgatccggggctatagaacaccagtactctctgctgaggcctccacagccaaagaacctgaaattggaaacttaaatgtttctgacataactcccgagagcttcaatctctcctggatggctaccgatgggatcttcgagacctttaccattgaaattattgattccaataggttgctggagactgtggaatataatatctctggtgctgaacgaactgcccatatctcagggctaccccctagtactgattttattgtctacctctctggacttgctcccagcatccggaccaaaaccatcagtgccacagccacgacagaggccctgccccttctggaaaacctaaccatttccgacattaatccctacgggttcacagtttcctggatggcatcggagaatgcctttgacagctttctagtaacggtggtggattctgggaagctgctggacccccaggaattcacactttcaggaacccagaggaagctggagcttagaggcctcataactggcattggctatgaggttatggtctctggcttcacccaagggcatcaaaccaagcccttgagggctgagattgttacagaagccgaaccggaagttgacaaccttctggtttcagatgccaccccagacggtttccgtctgtcctggacagctgatgaaggggtcttcgacaattttgttctcaaaatcagagataccaaaaagcagtctgagccactggaaataaccctacttgcccccgaacgtaccagggacttaacaggtctcagagaggctactgaatacgaaattgaactctatggaataagcaaaggaaggcgatcccagacagtcagtgctatagcaacaacagccatgggctccccaaaggaagtcattttctcagacatcactgaaaattcggctactgtcagctggagggcacccacggcccaagtggagagcttccggattacctatgtgcccattacaggaggtacaccctccatggtaactgtggacggaaccaagactcagaccaggctggtgaaactcatacctggcgtggagtaccttgtcagcatcatcgccatgaagggctttgaggaaagtgaacctgtctcagggtcattcaccacagctctggatggcccatctggcctggtgacagccaacatcactgactcagaagccttggccaggtggcagccagccattgccactgtggacagttatgtcatctcctacacaggcgagaaagtgccagaaattacacgcacggtgtccgggaacacagtggagtatgctctgaccgacctcgagcctgccacggaatacacactgagaatctttgcagagaaagggccccagaagagctcaaccatcactgccaagttcacaacagacctcgattctccaagagacttgactgctactgaggttcagtcggaaactgccctccttacctggcgacccccccgggcatcagtcaccggttacctgctggtctatgaatcagtggatggcacagtcaaggaagtcattgtgggtccagataccacctcctacagcctggcagacctgagcccatccacccactacacagccaagatccaggcactcaatgggcccctgaggagcaatatgatccagaccatcttcaccacaattggactcctgtaccccttccccaaggactgctcccaagcaatgctgaatggagacacgacctctggcctctacaccatttatctgaatggtgataaggctcaggcgctggaagtcttctgtgacatgacctctgatgggggtggatggattgtgttcctgagacgcaaaaacggacgcgagaacttctaccaaaactggaaggcatatgctgctggatttggggaccgcagagaagaattctggcttgggctggacaacctgaacaaaatcacagcccaggggcagtacgagctccgggtggacctgcgggaccatggggagacagcctttgctgtctatgacaagttcagcgtgggagatgccaagactcgctacaagctgaaggtggaggggtacagtgggacagcaggtgactccatggcctaccacaatggcagatccttctccacctttgacaaggacacagattcagccatcaccaactgtgctctgtcctacaaaggggctttctggtacaggaactgtcaccgtgtcaacctgatggggagatatggggacaataaccacagtcagggcgttaactggttccactggaagggccacgaacactcaatccagtttgctgagatgaagctgagaccaagcaacttcagaaatcttgaaggcaggcgcaaacgggcataaattggagggaccactgggtgagagaggaataaggcggcccagagcgaggaaaggattttaccaaagcatcaatacaaccagcccaaccatcggtccacacctgggcatttggtgagaatcaaagctgaccatggatccctggggccaacggcaacagcatgggcctcacctcctctgtgatttctttctttgcaccaaagacatcagtctccaacatgtttctgttttgttgtttgattcagcaaaaatctcccagtgacaacatcgcaatagttttttacttctcttaggtggctctgggatgggagaggggtaggatgtacaggggtagtttgttttagaaccagccgtattttacatgaagctgtataattaattgtcattatttttgttagcaaagattaaatgtgtcattggaagccatccctttttttacatttcatacaacagaaaccagaaaagcaatactgtttccattttaaggatatgattaatattattaatataataatgatgatgatgatgatgaaaactaaggatttttcaagagatctttctttccaaaacatttctggacagtacctgattgtattttttttttaaataaaagcacaagtacttttgaaaaaaaaccggaattc

SEQ ID NO: 796 - DNA, 640 bp, Homo sapiens
attctgagccgagcccggtgccaagcgcagctagctcagcaggcggcagcggcggcctgagcttcagggcagccagctcctcccggtctcgccttcctcgcggtcagcatgaaagccttcagtcccgtgaggtccgttaggaaaaacagcctgtcggaccacagcctgggcatctcccggagcaaaacccctgtggacgacccgatgagcctgctatacaacatgaacgactgctactccaagctcaaggagctggtgcccagcatcccccagaacaagaaggtgagcaagatggaaatcctgcagcacctcatcgactacatcttggacctgcagatcgccctggactcgcatcccactattgtcagcctgcatcaccagagacccgggcagaaccagcgctccaggacgccgctgaccaccctcaacacggatatcagcatcctgtccttgcaggcttctgaattcccttctgagttaatgtcaaatgacagcaaagcactgtgtggctgaataagcggtgttcatgatttcttttattctttgcacaacaacaacaacaacaaattcacggaatcttttaagtgctgaacttatttttcaaccatttcacaaggaggacaagttgaatggacctttt

SEQ ID NO: 797 - DNA, 982 bp, Homo sapiens
agacaattttcagcaggaagaagtagaaaggataaaatggatcctgcaccacgggaacctcacagcacctcacttcttttggttttctttctctttggggcacctctggactcactccccagcatgaaggcgctgagcccggtgcgcggctgctacgaggcggtgtgctgcctgtcggaacgcagtctggccatcgcccggggccgagggaagggcccggcagctgaggagccgctgagcttgctggacgacatgaaccactgctactcccgcctgcgggaactggtacccggagtcccgagaggcactcagcttagccaggtggaaatcctacagcgcgtcatcgactacattctcgacctgcaggtagtcctggccgagccagcccctggaccccctgatggcccccaccttcccatccagacagccgagctcgctccggaacttgtcatctccaacgacaaaaggagcttttgccactgactcggccgtgtcctgacacctccagaacgcaggtgctggcgcccgttctgcctgggaccccgggaacctctcctgccggaagccggacggcagggatgggccccaacttcgccctgcccacttgacttcaccaaatcccttcctggagactgaacctggtgctcaggagcgaaggactgtgaacttgtggcctgaagagccagagctagctctggccaccagctgggcgacgtcaccctgctcccaccccaccccaagttctaaggtcttttcagagcgtggaggtgtggaaggagtggctgctctccaaactatgccaaggcggcggcagagctggtcttctggtctccttggagaaaggttctgttgccctgatttatgaactctataatagagtatataggttttgtaccttttttacaggaaggtgactttctgtaacaatgcgatgtatattaaactttttataaaagttaacattttgcataataaacgattt

SEQ ID NO: 798 - DNA, 952 bp, Homo sapiens
gcagctgcgctgcgactgctctggaaggagaggacggggcacaaaccctgaccatgaccccccacaggctgctgccaccgctgctgctgctgctagctctgctgctcgctgccagcccaggaggcgccttggcgcggtgcccaggctgcgggcaaggggtgcaggcgggttgtccagggggctgcgtggaggaggaggatggggggtcgccagccgagggctgcgcggaagctgagggctgtctcaggagggaggggcaggagtgcggggtctacacccctaactgcgccccaggactgcagtgccatccgcccaaggacgacgaggcgcctttgcgggcgctgctgctcggccgaggccgctgccttccggcccgcgcgcctgctgttgcagaggagaatcctaaggagagtaaaccccaagcaggcactgcccgcccacaggatgtgaaccgcagagaccaacagaggaatccaggcacctctaccacgccctcccagcccaattctgcgggtgtccaagacactgagatgggcccatgccgtagacatctggactcagtgctgcagcaactccagactgaggtctaccgaggggctcaaacactctacgtgcccaattgtgaccatcgaggcttctaccggaagcggcagtgccgctcctcccaggggcagcgccgaggtccctgctggtgtgtggatcggatgggcaagtccctgccagggtctccagatggcaatggaagctcctcctgccccactgggagtagcggctaaagctgggggatagaggggctgcagggccactggaaggaacatggagctgtcatcactcaacaaaaaaccgaggccctcaatccaccttcaggccccgccccatgggcccctcaccgctggttggaaagagtgttggtgttggctggggtgtcaataaagctgtgcttggggtcaaa

SEQ ID NO: 799 - DNA, 1840 bp, Homo sapiens
tccacacacacaaaaaacctgcgcgtgaggggggaggaaaagcagggcctttaaaaaggcaatcacaacaacttttgctgccaggatgcccttgctttggctgagaggatttctgttggcaagttgctggattatagtgaggagttcccccaccccaggatccgaggggcacagcgcggcccccgactgtccgtcctgtgcgctggccgccctcccaaaggatgtacccaactctcagccagagatggtggaggccgtcaagaagcacattttaaacatgctgcacttgaagaagagacccgatgtcacccagccggtacccaaggcggcgcttctgaacgcgatcagaaagcttcatgtgggcaaagtcggggagaacgggtatgtggagatagaggatgacattggaaggagggcagaaatgaatgaacttatggagcagacctcggagatcatcacgtttgccgagtcaggaacagccaggaagacgctgcacttcgagatttccaaggaaggcagtgacctgtcagtggtggagcgtgcagaagtctggctcttcctaaaagtccccaaggccaacaggaccaggaccaaagtcaccatccgcctcttccagcagcagaagcacccgcagggcagcttggacacaggggaagaggccgaggaagtgggcttaaagggggagaggagtgaactgttgctctctgaaaaagtagtagacgctcggaagagcacctggcatgtcttccctgtctccagcagcatccagcggttgctggaccagggcaagagctccctggacgttcggattgcctgtgagcagtgccaggagagtggcgccagcttggttctcctgggcaagaagaagaagaaagaagaggagggggaagggaaaaagaagggcggaggtgaaggtggggcaggagcagatgaggaaaaggagcagtcgcacagacctttcctcatgctgcaggcccggcagtctgaagaccaccctcatcgccggcgtcggcggggcttggagtgtgatggcaaggtcaacatctgctgtaagaaacagttctttgtcagtttcaaggacatcggctggaatgactggatcattgctccctctggctatcatgccaactactgcgagggtgagtgcccgagccatatagcaggcacgtccgggtcctcactgtccttccactcaacagtcatcaaccactaccgcatgcggggccatagcccctttgccaacctcaaatcgtgctgtgtgcccaccaagctgagacccatgtccatgttgtactatgatgatggtcaaaacatcatcaaaaaggacattcagaacatgatcgtggaggagtgtgggtgctcatagagttgcccagcccagggggaaagggagcaagagttgtccagagaagacagtggcaaaatgaagaaatttttaaggtttctgagttaaccagaaaaatagaaattaaaaacaaaacaaaacaaaaaaaaaaacaaaaaaaaacaaaagtaaattaaaaacaaacctgatgaaacagatgaaacagatgaaggaagatgtggaaatcttagcctgccttagccagggctcagagatgaagcagtgaagagacagattgggagggaaagggagaatggtgtaccctttatttcttctgaaatcacactgatgacatcagttgtttaaacggggtattgtcctttccccccttgaggttcccttgtgagcttgaatcaaccaatctgatctgcagtagtgtggactagaacaacccaaatagcatctagaaagccatgagtttgaaagggcccatcacaggcactttcctagcctaat

SEQ ID NO: 800 - DNA, 3498 bp, Homo sapiens
gggctcgaacgcgcagcgcacgggaaccggtcccgctgcttgggtcaggttcgccggtcgcgggagccccgccgtgcagtcggaggaacacgtggccatcagtaatcatgagcaacccattcgcacaccttgctgagccattggatcctgtacaaccaggaaagaaattcttcaatttgaataaattggaggattcaagatatgggcgcttaccattttcgatcagagttcttctggaagcagccattcggaattgtgatgagtttttggtgaagaaacaggatattgaaaatattctacattggaatgtcactcagcacaagaacatagaagtgccatttaagcctgctcgtgtcatcctgcaggactttacgggtgtgcccgctgtggttgactttgctgcaatgcgtgatgctgtgaaaaagttaggaggagatccagagaaaataaaccctgtctgccctgctgatcttgtaatagatcattccatccaggttgatttcaacagaagggcagacagtttacagaagaatcaagacctggaatttgaaagaaatagagagcgatttgaatttttaaagtggggttcccaggcttttcacaacatgcggattattccccctggctcaggaatcatccaccaggtgaatttggaatatttggcaagagtggtatttgatcaggatggatattattacccagacagcctcgtgggcacagactcgcacactaccatgattgatggcttgggcattcttggttggggtgtcggtggtattgaagcagaagctgtcatgctgggtcagccaatcagtatggtgcttcctcaggtgattggctacaggctgatggggaagccccaccctctggtaacatccactgacatcgtgctcaccattaccaagcacctccgccaggttggggtagtgggcaaatttgtcgagttcttcgggcctggagtagcccagttgtccattgctgaccgagctacgattgctaacatgtgtccagagtacggagcaactgctgcctttttcccagttgatgaagttagtatcacgtacctggtgcaaacaggtcgtgatgaagaaaaattaaagtatattaaaaaatatcttcaggctgtaggaatgtttcgagatttcaatgacccttctcaagacccagacttcacccaggttgtggaattagatttgaaaacagtagtgccttgctgtagtggacccaaaaggcctcaggacaaagttgctgtgtccgacatgaaaaaggactttgagagctgccttggagccaagcaaggatttaaaggattccaagttgctcctgaacatcataatgaccataagacctttatctatgataacactgaattcacccttgctcatggttctgtggtcattgctgccattactagctgcacaaacaccagtaatccgtctgtgatgttaggggcaggattgttagcaaagaaagctgtggatgctggcctgaacgtgatgccttacatcaaaactagcctgtctcctgggagtggcgtggtcacctactacctacaagaaagcggagtcatgccttatctgtctcagcttgggtttgacgtggtgggctatggctgcatgacctgcattggcaacagtgggcctttacctgaacctgtggtagaagccatcacacagggagaccttgtagctgttggagtactatctggaaacaggaattttgaaggtcgagttcaccccaacacccgggccaactatttagcctctccccccttagtaatagcatatgcaattgctggaaccatcagaatcgactttgagaaagagccattgggagtaaatgcaaagggacagcaggtatttctgaaagatatctggccgactagagacgagatccaggcagtggagcgtcagtatgtcatcccggggatgtttaaggaagtctatcagaaaatagagactgtgaatgaaagctggaatgccttagcaaccccatcagataagctgtttttctggaattccaaatctacgtatatcaaatcaccaccattctttgaaaacctgactttggatcttcagccccctaaatctatagtggatgcctatgtgctgctaaatttgggagattcggtaacaactgaccacatctccccagctggaaatattgcaagaaacagtcctgctgctcgctacttaactaacagaggcctaactccacgagaattcaactcctatggctcccgccgaggtaatgacgccgtcatggcacggggaacatttgccaacattcgcttgttaaacagatttttgaacaagcaggcaccacagactatccatctgccttctggggaaatccttgatgtgtttgatgctgctgagcggtaccagcaggcaggccttcccctgatcgttctggctggcaaagagtacggtgcaggcagctcccgagactgggcagctaagggccctttcctgctgggaatcaaagccgtcctggccgagagctacgagcgcattcaccgcagtaacctggttgggatgggtgtgatcccacttgaatatctccctggtgagaatgcagatgccctggggctcacagggcaagaacgatacactatcattattccagaaaacctcaaaccacaaatgaaagtccaggtcaagctggatactggcaagaccttccaggctgtcatgaggtttgacactgatgtggagctcacttatttcctcaacgggggcatcctcaactacatgatccgcaagatggccaagtaggagacgtgcacttggtcgtgcgcccagggaggaagccgcaccaccagccagcgcaggccctggtggagaggcctccctggctgcctctgggaggggtgctgccttgtagatggagcaagtgagcactgagggtctggtgccaatcctgtaggcacaaaaccagaagtttctacattctctatttttgttaatcatcttctctttttccagaatttggaagctagaatggtgggaatgtcagtagtgccagaaagagagaaccaagcttgtctttaaagttactgatcacaggacgttgctttttcactgtttcctattaatcttcagctgaacacaagcaaaccttctcaggaggtgtctcctaccctcttattgttcctcttacgctctgctcaatgaaaccttcctcttgagggtcattttcctttctgtattaattataccagtgttaagtgacatagataagaactttgcacacttcaaatcagagcagtgattctctcttctctccccttttccttcagagtgaatcatccagactcctcatggataggtcgggtgttaaagttgttttgattatgtaccttttgatagatccacataaaaagaaatgtgaagttttcttttactatcttttcatttatcaagcagagacctttgttgggaggcggtttgggagaacacatttctaatttgaatgaaatgaaatctattttcagtg

SEQ ID NO: 801 - DNA, 2223 bp, Homo sapiens
tctccttgttttgctttcgatctggactgttctcaggcaagccggggagtaacttttagttttgctcctgcgattattcaactgacgggctttcatttccatttcacacaccctagcaacacttataccttgcggaattgtattggtagcgtgaaaaaagcacactgagagggcaccatgccggtggaaaggatgcgcatgcgcccgtggctggaggagcagataaactccaacacgatcccggggctcaagtggcttaacaaggaaaagaagatttttcagatcccctggatgcatgcggctagacatgggtgggatgtggaaaaagatgcaccactctttagaaaccgggcaatccatacaggaaagcatcaaccaggagtagataaacctgatcccaaaacatggaaggcgaatttcagatgcgccatgaattccttgcctgatattgaagaagtcaaggataaaagcataaagaaaggaaataatgccttcagggtctaccgaatgctgcccctatcagaacggccttctaagaaaggaaagaaaccaaagacagaaaaagaagacaaagttaagcacatcaagcaagaaccagttgagtcatctctggggcttagtaatggagtaagtgatctttctcctgagtatgcggtcctgacttcaactataaaaaatgaagtggatagtacggtgaacatcatagttgtaggacagtcccatctggacagcaacattgagaatcaagagattgtcaccaatccgccagacatttgccaagttgtagaggtgaccactgagagcgacgagcagccggtcagcatgagcgagctctaccctctgcagatctcccccgtgtcttcctatgcagaaagcgaaacgactgatagtgtgcccagcgatgaagagagtgccgaggggcggccacactggcggaagaggaatattgaaggcaaacagtacctcagcaacatggggactcgaggctcctacctgctgcccggcatggcgtccttcgtcacttccaacaaaccggacctccaggtcaccatcaaagaggagagcaatccggtgccttacaacagctcctggcccccttttcaagacctccccctttcttcctccatgaccccagcatccagcagcagtcggccagaccgggagacccgggccagcgtcatcaagaaaacatcggatatcacccaggcccgcgtcaagagctgttaagcctctgactctccgcggtggttgttggggcttcttggctttgttttgttgtttgtttgtattttatttttttctctctgacacctattttagacaaatctaagggaaaaagccttgacaatagaacattgattgctgtgtccaactccagtacctggagcttctctttaactcaggactccagcccattggtagacgtgtgtttctagagcctgctggatctcccagggctactcactcaagttcaaggaccaacaagggcagtggaggtgctgcattgcctgcggtcaaggccagcaaggtggagtggatgcctcagaacggacgagataatgtgaactagctggaattttttattcttgtgaatatgtacataggcagcactagcgacattgcagtctgcttctgcaccttatcttaaagcacttacagataggccttcttgtgatcttgctctatctcacagcacactcagcacccccttctctgcccattccccagcctctcttcctatcccatcccatcccatcccatcccatcccatcccatcccgctcttttcctacttttccttccctcaaagcttccattccacatccggaggagaagaaggaaatgaatttctctacagatgtcccattttcagactgctttaaaaaaaatccttctaatctgctatgcttgaatgccacgcggtacaaaggaaaaagtatcatggaaatattatgcaaattcccagatttgaagacaaaaatactctaattctaaccagagcaagcttttttattttttatacaggggaatattttattcaaggtaaaattctaaataaaatataattgttttttatcttttctacagcaaatttataattttaagattccttttcttgtttatcagcagttgttattacatccttgtggcacatttttttttaattttgtaaaggtgaaaaaagcttttatgagctcatctagcaatcagattttcctgtgga

SEQ ID NO: 802 - DNA, 983 bp, Homo sapiens
ggcacgaggcctgacatggagcctgccagctccgtcagccctgactcggcccggagctgagctccccacctgccggtagcccaggagatggagcagcccagcccacgtgcccggccttccgcccctgacttcacttgataacaaactagaaactgaaacagggtcgggatgccgatgccggcttggagttagagatgagtcaccgctgagagcagctgcagtagctgagcagtggcagcagagaggcagacgtgagctgagggcgcagaggcaggcagcatctctgagggtccccaaggagcatggctgggagccgtgaggtggtggccatggactgcgagatggtggggctggggccccaccgggagagtggcctggctcgttgcagcctcgtgaacgtccacggtgctgtgctgtacgacaagttcatccggcctgagggagagatcaccgattacagaacccgggtcagcggggtcacccctcagcacatggtgggggccacaccatttgccgtggccaggctagagatcctgcagctcctgaaaggcaagctggtggtgggtcatgacctgaagcacgacttccaggcactgaaagaggacatgagcggctacacaatctacgacacgtccactgacaggctgttgtggcgtgaggccaagctggaccactgcaggcgtgtctccctgcgggtgctgagtgagcgcctcctgcacaagagcatccagaacagcctgcttggacacagctcggtggaagatgcgagggcaacgatggagctctatcaaatctcccagagaatccgagcccgccgagggctgccccgcctggctgtgtcagactgaagccccatccagcccgttccgcagggactagaggctttcggctttttgggacagcaactaccttgcttttggaaaatacatttttaatagtaaagtggctctatattttctctacgcaaaaaaaaaaaaaaaaaa

SEQ ID NO: 803 - DNA, 4204 bp, Homo sapiens
caggacagggaagagcgggcgctatggggagccggacgccagagtcccctctccacgccgtgcagctgcgctggggcccccggcgccgacccccgctcgtgccgctgctgttgctgctcgtgccgccgccacccagggtcgggggcttcaacttagacgcggaggccccagcagtactctcggggcccccgggctccttcttcggattctcagtggagttttaccggccgggaacagacggggtcagtgtgctggtgggagcacccaaggctaataccagccagccaggagtgctgcagggtggtgctgtctacctctgtccttggggtgccagccccacacagtgcacccccattgaatttgacagcaaaggctctcggctcctggagtcctcactgtccagctcagagggagaggagcctgtggagtacaagtccttgcagtggttcggggcaacagttcgagcccatggctcctccatcttggcatgcgctccactgtacagctggcgcacagagaaggagccactgagcgaccccgtgggcacctgctacctctccacagataacttcacccgaattctggagtatgcaccctgccgctcagatttcagctgggcagcaggacagggttactgccaaggaggcttcagtgccgagttcaccaagactggccgtgtggttttaggtggaccaggaagctatttctggcaaggccagatcctgtctgccactcaggagcagattgcagaatcttattaccccgagtacctgatcaacctggttcaggggcagctgcagactcgccaggccagttccatctatgatgacagctacctaggatactctgtggctgttggtgaattcagtggtgatgacacagaagactttgttgctggtgtgcccaaagggaacctcacttacggctatgtcaccatccttaatggctcagacattcgatccctctacaacttctcaggggaacagatggcctcctactttggctatgcagtggccgccacagacgtcaatggggacgggctggatgacttgctggtgggggcacccctgctcatggatcggacccctgacgggcggcctcaggaggtgggcagggtctacgtctacctgcagcacccagccggcatagagcccacgcccacccttaccctcactggccatgatgagtttggccgatttggcagctccttgacccccctgggggacctggaccaggatggctacaatgatgtggccatcggggctccctttggtggggagacccagcagggagtagtgtttgtatttcctgggggcccaggagggctgggctctaagccttcccaggttctgcagcccctgtgggcagccagccacaccccagacttctttggctctgcccttcgaggaggccgagacctggatggcaatggatatcctgatctgattgtggggtcctttggtgtggacaaggctgtggtatacaggggccgccccatcgtgtccgctagtgcctccctcaccatcttccccgccatgttcaacccagaggagcggagctgcagcttagaggggaaccctgtggcctgcatcaaccttagcttctgcctcaatgcttctggaaaacacgttgctgactccattggtttcacagtggaacttcagctggactggcagaagcagaagggaggggtacggcgggcactgttcctggcctccaggcaggcaaccctgacccagaccctgctcatccagaatggggctcgagaggattgcagagagatgaagatctacctcaggaacgagtcagaatttcgagacaaactctcgccgattcacatcgctctcaacttctccttggacccccaagccccagtggacagccacggcctcaggccagccctacattatcagagcaagagccggatagaggacaaggctcagatcttgctggactgtggagaagacaacatctgtgtgcctgacctgcagctggaagtgtttggggagcagaaccatgtgtacctgggtgacaagaatgccctgaacctcactttccatgcccagaatgtgggtgagggtggcgcctatgaggctgagcttcgggtcaccgcccctccagaggctgagtactcaggactcgtcagacacccagggaacttctccagcctgagctgtgactactttgccgtgaaccagagccgcctgctggtgtgtgacctgggcaaccccatgaaggcaggagccagtctgtggggtggccttcggtttacagtccctcatctccgggacactaagaaaaccatccagtttgacttccagatcctcagcaagaatctcaacaactcgcaaagcgacgtggtttcctttcggctctccgtggaggctcaggcccaggtcaccctgaacggtgtctccaagcctgaggcagtgctattcccagtaagcgactggcatccccgagaccagcctcagaaggaggaggacctgggacctgctgtccaccatgtctatgagctcatcaaccaaggccccagctccattagccagggtgtgctggaactcagctgtccccaggctctggaaggtcagcagctcctatatgtgaccagagttacgggactcaactgcaccaccaatcaccccattaacccaaagggcctggagttggatcccgagggttccctgcaccaccagcaaaaacgggaagctccaagccgcagctctgcttcctcgggacctcagatcctgaaatgcccggaggctgagtgtttcaggctgcgctgtgagctcgggcccctgcaccaacaagagagccaaagtctgcagttgcatttccgagtctgggccaagactttcttgcagcgggagcaccagccatttagcctgcagtgtgaggctgtgtacaaagccctgaagatgccctaccgaatcctgcctcggcagctgccccaaaaagagcgtcaggtggccacagctgtgcaatggaccaaggcagaaggcagctatggcgtcccactgtggatcatcatcctagccatcctgtttggcctcctgctcctaggtctactcatctacatcctctacaagcttggattcttcaaacgctccctcccatatggcaccgccatggaaaaagctcagctcaagcctccagccacctctgatgcctgagtcctcccaatttcagactcccattcctgaagaaccagtccccccaccctcattctactgaaaaggaggggtctgggtacttcttgaaggtgctgacggccagggagaagctcctctccccagcccagagacatacttgaagggccagagccaggggggtgaggagctggggatccctcccccccatgcactgtgaaggacccttgtttacacataccctcttcatggatgggggaactcagatccagggacagaggcccagcctccctgaagcctttgcattttggagagtttcctgaaacaactggaaagataactaggaaatccattcacagttctttgggccagacatgccacaaggacttcctgtccagctccaacctgcaaagatctgtcctcagccttgccagagatccaaaagaagcccccagtaagaacctggaacttggggagttaagacctggcagctctggacagccccaccctggtgggccaacaaagaacactaactatgcatggtgccccaggaccagctcaggacagatgccacaaggatagatgctggcccagggccagagcccagctccaaggggaatcagaactcaaatggggccagatccagcctggggtctggagttgatctggaacccagactcagacattggcaccaatccaggcagatccaggactatatttgggcctgctccagacctgatcctggaggcccagttcaccctgatttaggagaagccaggaatttcccaggacctgaaggggccatgatggcaacagatctggaacctcagcctggccagacacaggccctccctgttccccagagaaaggggagcccactgtcctgggcctgcagaatttgggttctgcctgccagctgcactgatgctgcccctcatctctctgcccaacccttccctcaccttggcaccagacacccaggacttatttaaactctgttgcaagtgcaataaatctgacccagtgcccccactgaccagaactagaaaaaaaaa

SEQ ID NO: 804 - DNA, 3700 bp, Homo sapiens
agccgccgccacccgccgcgcccgacacccgggaggccccgccagcccgcgggagaggcccagcgggagtcgcggaacagcaggcccgagcccaccgcgccgggccccggacgccgcgcggaaaagatgaatttacaaccaattttctggattggactgatcagttcagtttgctgtgtgtttgctcaaacagatgaaaatagatgtttaaaagcaaatgccaaatcatgtggagaatgtatacaagcagggccaaattgtgggtggtgcacaaattcaacatttttacaggaaggaatgcctacttctgcacgatgtgatgatttagaagccttaaaaaagaagggttgccctccagatgacatagaaaatcccagaggctccaaagatataaagaaaaataaaaatgtaaccaaccgtagcaaaggaacagcagagaagctcaagccagaggatattactcagatccaaccacagcagttggttttgcgattaagatcaggggagccacagacatttacattaaaattcaagagagctgaagactatcccattgacctctactaccttatggacctgtcttactcaatgaaagacgatttggagaatgtaaaaagtcttggaacagatctgatgaatgaaatgaggaggattacttcggacttcagaattggatttggctcatttgtggaaaagactgtgatgccttacattagcacaacaccagctaagctcaggaacccttgcacaagtgaacagaactgcaccagcccatttagctacaaaaatgtgctcagtcttactaataaaggagaagtatttaatgaacttgttggaaaacagcgcatatctggaaatttggattctccagaaggtggtttcgatgccatcatgcaagttgcagtttgtggatcactgattggctggaggaatgttacacggctgctggtgttttccacagatgccgggtttcactttgctggagatgggaaacttggtggcattgttttaccaaatgatggacaatgtcacctggaaaataatatgtacacaatgagccattattatgattatccttctattgctcaccttgtccagaaactgagtgaaaataatattcagacaatttttgcagttactgaagaatttcagcctgtttacaaggagctgaaaaacttgatccctaagtcagcagtaggaacattatctgcaaattctagcaatgtaattcagttgatcattgatgcatacaattccctttcctcagaagtcattttggaaaacggcaaattgtcagaaggagtaacaataagttacaaatcttactgcaagaacggggtgaatggaacaggggaaaatggaagaaaatgttccaatatttccattggagatgaggttcaatttgaaattagcataacttcaaataagtgtccaaaaaaggattctgacagctttaaaattaggcctctgggctttacggaggaagtagaggttattcttcagtacatctgtgaatgtgaatgccaaagcgaaggcatccctgaaagtcccaagtgtcatgaaggaaatgggacatttgagtgtggcgcgtgcaggtgcaatgaagggcgtgttggtagacattgtgaatgcagcacagatgaagttaacagtgaagacatggatgcttactgcaggaaagaaaacagttcagaaatctgcagtaacaatggagagtgcgtctgcggacagtgtgtttgtaggaagagggataatacaaatgaaatttattctggcaaattctgcgagtgtgataatttcaactgtgatagatccaatggcttaatttgtggaggaaatggtgtttgcaagtgtcgtgtgtgtgagtgcaaccccaactacactggcagtgcatgtgactgttctttggatactagtacttgtgaagccagcaacggacagatctgcaatggccggggcatctgcgagtgtggtgtctgtaagtgtacagatccgaagtttcaagggcaaacgtgtgagatgtgtcagacctgccttggtgtctgtgctgagcataaagaatgtgttcagtgcagagccttcaataaaggagaaaagaaagacacatgcacacaggaatgttcctattttaacattaccaaggtagaaagtcgggacaaattaccccagccggtccaacctgatcctgtgtcccattgtaaggagaaggatgttgacgactgttggttctattttacgtattcagtgaatgggaacaacgaggtcatggttcatgttgtggagaatccagagtgtcccactggtccagacatcattccaattgtagctggtgtggttgctggaattgttcttattggccttgcattactgctgatatggaagcttttaatgataattcatgacagaagggagtttgctaaatttgaaaaggagaaaatgaatgccaaatgggacacgggtgaaaatcctatttataagagtgccgtaacaactgtggtcaatccgaagtatgagggaaaatgagtactgcccgtgcaaatcccacaacactgaatgcaaagtagcaatttccatagtcacagttaggtagctttagggcaatattgccatggttttactcatgtgcaggttttgaaaatgtacaatatgtataatttttaaaatgttttattattttgaaaataatgttgtaattcatgccagggactgacaaaagacttgagacaggatggttattcttgtcagctaaggtcacattgtgcctttttgaccttttcttcctggactattgaaatcaagcttattggattaagtgatatttctatagcgattgaaagggcaatagttaaagtaatgagcatgatgagagtttctgttaatcatgtattaaaactgatttttagctttacaaatatgtcagtttgcagttatgcagaatccaaagtaaatgtcctgctagctagttaaggattgttttaaatctgttattttgctatttgcctgttagacatgactgatgacatatctgaaagacaagtatgttgagagttgctggtgtaaaatacgtttgaaatagttgatctacaaaggccatgggaaaaattcagagagttaggaaggaaaaaccaatagctttaaaacctgtgtgccattttaagagttacttaatgtttggtaacttttatgccttcactttacaaattcaagccttagataaaagaaccgagcaattttctgctaaaaagtccttgatttagcactatttacatacaggccatactttacaaagtatttgctgaatggggaccttttgagttgaatttattttattatttttattttgtttaatgtctggtgctttctatcacctcttctaatcttttaatgtatttgtttgcaattttggggtaagacttttttatgagtactttttctttgaagttttagcggtcaatttgcctttttaatgaacatgtgaagttatactgtggctatgcaacagctctcacctacgcgagtcttactttgagttagtgccataacagaccactgtatgtttacttctcaccatttgagttgcccatcttgtttcacactagtcacattcttgttttaagtgcctttagttttaacagttcactttttacagtgctatttactgaagttatttattaaatatgcctaaaatacttaaatcgga

SEQ ID NO: 805 - DNA, 1112 bp, Homo sapiens
gacggaaacctttttagggagtccaaggtacagtcgccgcgtgcgagcttgttactggttacttggcctcatggcggtccgagcttcgttcgagaacaactgtgagatcggctgctttgccaagctcaccaacacctactgtctggtagcgatcggaggctcagagaacttctacagtgtgttcgagggcgagctctccgataccatccccgtggtgcacgcgtctatcgccggctgccgcatcatcgggcgcatgtgtgtggggaacaggcacggtctcctggtacccaacaataccaccgaccaggagctgcaacacattcgcaacagcctcccagacacagtgcagattaggcgggtggaggagcggctctcagccttgggcaatgtcaccacctgcaatgactacgtggccttggtccacccagacttggacagggagacagaagaaattctggcagatgtgctcaaggtggaagtcttcagacagacagtggccgaccaggtgctagtaggaagctactgtgtcttcagcaatcagggagggctggtgcatcccaagacttcaattgaagaccaggatgagctgtcctctcttcttcaagtcccccttgtggcggggactgtgaaccgaggcagtgaggtgattgctgctgggatggtggtgaatgactggtgtgccttctgtggcctggacacaaccagcacagagctgtcagtggtggagagtgtcttcaagctgaatgaagcccagcctagcaccattgccaccagcatgcgggattccctcattgacagcctcacctgagtcaccttccaagttgttccatgggctcctggctctggactgtggccaaccttctccacattccgcccaatctgtaccggatgctggcagggaggtggcagagagctcactgggactgaggggctgggcacccaacccttttccacctgtgcttatcgcctggatctatcattactgcaaaaacctgctctgttgtgctggctggcaggccctgtggctgctggctgagggttctgctgtcctgtgccaccccattaaagtgcagttcctccggaaaaaaaaaaaaaaaaaaaaaaaaaaaaaa

SEQ ID NO: 806 - DNA, 3401 bp, Homo sapiens
ggcacgagggcggagccagcccctcccctacccggagcagcccgctggggccgtcccgagcggcgacacactaggagtcccggccggccagccagggcagccgcggtcccgggactcggccgtgagtgctgcgggacggatggtggcggcggggcgcgggccagcgcgggcgccgtgagccggagctgcgcgcggggcatgcggctgcggcccccggccctcggcccccgcgctccggccccagccccggccgccggcccccgcggagtgcagcgaccgcgccgccgctgagggaggcgccccaccatgccgcgggccccggcgccgctgtacgcctgcctcctggggctctgcgcgctcctgccccggctcgcaggtctcaacatatgcactagtggaagtgccacctcatgtgaagaatgtctgctaatccacccaaaatgtgcctggtgctccaaagaggacttcggaagcccacggtccatcacctctcggtgtgatctgagggcaaaccttgtcaaaaatggctgtggaggtgagatagagagcccagccagcagcttccatgtcctgaggagcctgcccctcagcagcaagggttcgggctctgcaggctgggacgtcattcagatgacaccacaggagattgccgtgaacctccggcccggtgacaagaccaccttccagctacaggttcgccaggtggaggactatcctgtggacctgtactacctgatggacctctccctgtccatgaaggatgacttggacaatatccggagcctgggcaccaaactcgcggaggagatgaggaagctcaccagcaacttccggttgggatttgggtcttttgttgataaggacatctctcctttctcctacacggcaccgaggtaccagaccaatccgtgcattggttacaagttgtttccaaattgcgtcccctcctttgggttccgccatctgctgcctctcacagacagagtggacagcttcaatgaggaagttcggaaacagagggtgtcccggaaccgagatgcccctgaggggggctttgatgcagtactccaggcagccgtctgcaaggagaagattggctggcgaaaggatgcactgcatttgctggtgttcacaacagatgatgtgccccacatcgcattggatggaaaattgggaggcctggtgcagccacacgatggccagtgccacctgaacgaggccaacgagtacactgcatccaaccagatggactatccatcccttgccttgcttggagagaaattggcagagaacaacatcaacctcatctttgcagtgacaaaaaaccattatatgctgtacaagaattttacagccctgatacctggaacaacggtggagattttagatggagactccaaaaatattattcaactgattattaatgcatacaatagtatccggtctaaagtggagttgtcagtctgggatcagcctgaggatcttaatctcttctttactgctacctgccaagatggggtatcctatcctggtcagaggaagtgtgagggtctgaagattggggacacggcatcttttgaagtatcattggaggcccgaagctgtcccagcagacacacggagcatgtgtttgccctgcggccggtgggattccgggacagcctggaggtgggggtcacctacaactgcacgtgcggctgcagcgtggggctggaacccaacagtgccaggtgcaacgggagcgggacctatgtctgcggcctgtgtgagtgcagccccggctacctgggcaccaggtgcgagtgccaggatggggagaaccagagcgtgtaccagaacctgtgccgggaggcagagggcaagccactgtgcagcgggcgtggggactgcagctgcaaccagtgctcctgcttcgagagcgagttcggcaagatctatgggcctttctgtgagtgcgacaacttctcctgtgccaggaacaagggagtcctctgctcaggccatggcgagtgtcactgcggggaatgcaagtgccatgcaggttacatcggggacaactgtaactgctcgacagacatcagcacatgccggggcagagatggccagatctgcagcgagcgtgggcactgtctctgtgggcagtgccaatgcacggagccgggggcctttggggagatgtgtgagaagtgccccacctgcccggatgcatgcagcaccaagagagattgcgtcgagtgcctgctgctccactctgggaaacctgacaaccagacctgccacagcctatgcagggatgaggtgatcacatgggtggacaccatcgtgaaagatgaccaggaggctgtgctatgtttctacaaaaccgccaaggactgcgtcatgatgttcacctatgtggagctccccagtgggaagtccaacctgaccgtcctcagggagccagagtgtggaaacacccccaacgccatgaccatcctcctggctgtggtcggtagcatcctccttgttgggcttgcactcctggctatctggaagctgcttgtcaccatccacgaccggagggagtttgcaaagtttcagagcgagcgatccagggcccgctatgaaatggcttcaaatccattatacagaaagcctatctccacgcacactgtggacttcaccttcaacaagttcaacaaatcctacaatggcactgtggactgatgtttccttctccgaggggctggagcggggatctgatgaaaaggtcagactgaaacgccttgcacggctgctcggcttgatcacagctccctaggtaggcaccacagagaagaccttctagtgagcctgggccaggagcccacagtgcctgtacaggaaggtgcctggccatgtcacctggctgctaggccagagccatgccaggctgcgtccctccgagcttgggataaagcaaggggaccttggcactctcagctttccctgccacatccagcttgttgtcccaatgaaatactgagatgctgggctgtctctcccttccaggaatgctgggcccccagcctggccagacaagacgactgtcaggaagggtcggagtctgtaaaaccagcatacagtttggcttttttcacattgatcatttttatatgaaataaaaagatcctgcatttatggtgtagttctgagtcctgagacttttccgcgtgatggctatgccttgcacacaggtgttggtgatggggctgttgagatgcctgttgaaggtacatcgtttgcaaatgtcagtttcctctcctgtccgtgtttgtttagtacttttataatgaaaagaaacaagattgtttgggattggaagtaaagattaaaaccaaaagaatttgtgtttgtctgataaaaaaaaaaaaaaaaaaaaa

SEQ ID NO: 807 - DNA, 2920 bp, Homo sapiens
acagggcagcaggagccttagagcatggacggtgccatggggcctcgggggctgctgttgtgcatgtacctggtatctctcctcatcctgcaggccatgcctgccctgggctcggctacaggcaggtccaagagcagcgagaagcgacaggctgtggacaccgctgtcgatggcgtgttcatccggagtttgaaagtcaactgcaaagtcacctctcgcttcgcccactatgttgtcaccagccaagtggtcaacactgccaatgaagccagggaagtggccttcgacctggaaatccccaagacagcattcatcagtgactttgccgttacagcagatggaaacgcatttatcggagacataaaggacaaggtgactgcatggaagcagtaccggaaagcagctatctcaggagagaatgccggccttgtcagggcctcggggagaactatggagcaattcaccatccacctcaccgtcaatccccagagcaaggtcacgtttcagctgacttatgaggaagtgctgaagagaaaccatatgcagtatgaaattgtcatcaaagtcaagcccaagcagctggtgcatcattttgagattgatgtggacatcttcgagccccaggggatcagcaagctggatgcccaggcctctttcctgccgaaggaactggcagcccaaactatcaagaagtccttctcaggaaaaaagggtcatgtgctgttccgtcccaccgtgagccagcagcagtcctgccccacatgctctacatccttactgaacgggcacttcaaggtgacctacgatgtcactcgagacgagatctgcgacctcctggtggccaataaccactttgcccacttctttgccccccaaaacctgacaaacatgaacaagaacgtggtttttgtgattgacatcagtggctccatgagaggccagaaagtgaagcagaccaaggaggcactccttaaaattctgggggacatgcagccaggggactactttgacctggttctttttgggactcgagtacaatcgtggaagggctcgctggtgcaagcatctgaggccaacctacaagcagctcaagactttgtgcggggcttttccctggatgaggccacaaacctgaatggaggtttgctccggggaattgagatcttgaaccaagttcaggaaagcctcccagaactcagcaaccatgcctcaatactcatcatgttgacagatggcgatcccacagagggggtgacggaccgttcccaaatcctcaagaacgtccgcaacgccatccggggcaggttcccgctctacaacctgggtttcggccacaatgtggactttaactttctggaggtcatgtccatggagaacaacggacgggcccagagaatctacgaggaccatgatgccacccagcagctgcagggtttctacagccaggtagccaaacccctgctggtggatgtggatttgcagtacccccaggatgctgtcttggccctgacccagaaccaccataaacagtactacgaaggctcagagattgtggtggccgggcgcattgctgacaacaaacagagcagcttcaaggctgatgtgcaggcccatggggagggacaagaattcagtataacctgcctagtggatgaggaggagatgaagaaactgctccgagagcgtggccacatgctggagaaccacgtcgagcgcctctgggcctacctcaccatccaggagctgctggccaagcggatgaaggtggacagggaggtgagggccaacctgtcatcccaggccctgcggatgtcgctggactatgggtttgtgaccccactgacctccatgagcatcaggggcatggcggaccaggacggcctgaagcccaccatcgacaagccctcagaggattctccgcctttggagatgctgggacccagaaggacgttcgtgctgtcagccttgcagccttctcctactcattccagctccaatacccagcggctgccagaccgagtgaccggcgtggacacagaccctcacttcatcatccacgtgccccagaaagaggacaccctgtgcttcaacatcaatgaggagcctggtgttatcctgagcctggtacaggaccccaacacaggcttctcagtgaatggacagctcattggcaacaaggccaggagccctgggcagcatgacggcacgtacttcgggcggctgggaatcgcaaaccctgccacggactttcagttggaagtgactcctcagaacattacgctgaaccccggctttggtgggcctgtgttttcctggagggaccaagctgtgctgcggcaggacggggtggtggtgaccatcaacaagaagaggaacctggtggtgtctgtggacgacggtggcacctttgaggttgttttgcaccgagtgtggaaggggagctcggtccaccaggacttcctgggcttctatgtgctggacagtcatcggatgtcagcccggacgcacgggctgctggggcaatttttccaccccatcggttttgaagtgtctgacatccacccaggctccgaccccacaaagccagatgccacgatggtggtgaggaaccgccggctcacggtcaccaggggtttgcaaaaagactacagcaaggacccgtggcatggggccgaggtgtcctgctggttcattcacaacaatggggctggactcatcgatggtgcctacactgattatatcgtccccgacatcttctgagccctctggccagcacgcctgtcctcccccggggccaaggcagaggaggaggacgacatcctgacctgctgctgaggctgtacctccttgactaagctggttccttgtgtcaaagcacctcatgccttccattaaagagaggccgtgtccaaaaaaaaaa

SEQ ID NO: 808 - DNA, 3089 bp, Homo sapiens
gaaagaagtgatatcctccccagaccatctgctttggggagcttggcaaaactgtccagcaaaatgaaaagactcacgtgctttttcatctgcttctttctttctgaagtatcaggcttcgaaatccccataaatggactttctgaatttgtagactatgaagatcttgtggaactggccccaggcaaatttcaattggtggcagagaaccggagatatcagagaagccttccaggagaatcggaagaaatgatggaagaggttgatcaagtaactctttatagctataaagtccagtctactattacttctcggatggccaccaccatgatccagagcaaagtggtgaacaattccccgcagcctcagaatgtcgtgtttgatgttcagatccccaaaggagcattcatttccaacttctccatgactgtggacggcaagacatttaggagctctattaaggagaaaactgtgggccgagctctttatgcacaggccagagcaaaaggcaagacggctggcttggtgaggagcagcgctcttgatatggaaaacttcagaacggaagtaaatgtcctcccaggagcaaaggtgcagttcgaacttcactaccaggaggtgaagtggaggaagctgggctcctatgagcacaggatctatctgcaacctggacggctggccaaacacttagaggtagatgtgtgggttatcgaaccacagggactgagatttcttcatgttcccgacacatttgaaggccatttcgatggtgttccggtcatttctaaaggacaacagaaggcgcacgtctccttcaagcccacggtagcacagcagagaatatgccctagctgccgggagactgcggtagatggggaactggtggtgctgtatgacgtgaaaagagaagagaaggctggtgaactggaggtgtttaatggatattttgtccacttctttgctcctgacaacctggacccaattcccaaaaacatcctctttgtcatcgatgtgagtggctccatgtggggagttaaaatgaaacaaactgtggaagcaatgaagaccatattggatgacctcagagcagaagaccatttctctgtgattgatttcaaccagaacattcgaacttggagaaatgatttatttcagctacaaaaacacaggttgcagatagccaagaggtatattgagaaaatccagcccagtggaggcacaaacatcaacgaagcactcctacgggcaatcttcattttgaatgaagccaataacttgggactgttagaccccaactccgtctcgctgatcattttggtttctgatggagatccaacagtgggcgaactaaaactgtcaaaaattcagaaaaacgttaaggagaacatccaagacaatatctccttgttcagtttgggcatgggatttgatgtggactatgattttttgaagagactgtccaatgaaaaccatggaattgcacaaaggatttatggaaaccaggacacgtcttcccagcttaagaaattctacaaccaggtctccactccattgctccggaatgttcagttcaactatccccatacatcagtcacggacgtcactcaaaacaatttccataactactttggaggctcagagattgtggtggcaggaaaatttgaccctgctaaattggatcaaatagagagcgttatcacggcgacttcggctaacacgcagttagtcttggagaccctggcccagatggacgacttgcaggattttctatcgaaagacaagcatgcagatcccgatttcaccaggaaactgtgggcctatctaaccatcaaccaactgctagctgaacgaagcctggctcctacagctgccgccaagagaagaattacaagatcgatcctgcagatgtctctagaccaccacattgtgactccgctgacctcgctggtgatcgagaacgaggctggggatgagcgcatgctggcggatgccccaccgcaggatccctcctgctgctcaggggccctgtattacggcagcaaagtggttccagattccaccccgtcttgggccaatccttcaccaacgcccgtgatctccatgctggcacaaggatctcaggtgctagagtccacgccacccccacatgtgatgagagttgaaaatgacccacatttcatcatttatctaccaaaaagccaaaagaacatttgtttcaatattgactcagaacctggaaaaatcctcaacctggtttctgacccagaatcaggaattgtagtcaacggtcagcttgttggtgccaagaagcccaacaatggaaaactaagcacctattttggaaaactgggattttatttccaaagtgaagacataaaaatagaaatcagcactgagaccatcaccctgagccatggttctagcacattctccttgtcctggtccgacacggctcaagtcacgaatcagagggtgcagatctcagtgaagaaagaaaaagtggtaactatcaccctggataaagagatgtccttttctgttttacttcatcgtgtttggaagaagcatcccgtcaatgttgactttctgggaatctacataccccctacaaacaagttctcacctaaagcccacggactaataggccagttcatgcaggaaccaaagatacacatcttcaatgagagaccaggaaaggaccctgagaagccagaggccagcatggaagtgaaggggcagaagctgatcatcaccaggggcttacagaaagactacagaacggatctagtgtttggaacggacgttacctgctggtttgtgcacaacagtggaaaaggattcattgacgggcattacaaggattacttcgtgcctcagctctacagctttctcaaacggccttaaaggtttatagtttgggaaattatatatattaatatacatctttcccctgtcacttttgcagatattcttcggtttgaataattaaaatgaaccagatatcagggtggttaattaaaatgaaccagatatcagggtggtttataaagcctgtaaacacacctaagaaaataaacattttacaaatg

SEQ ID NO: 809 - DNA, 2807 bp, Homo sapiens
tattcagcgatggactttgcatggtggccctgtctcatcttggctctgctctccagcttggcagcctctgcttcccgagaagcccctttcggctgcttgggaaacggagcctcccggaaggggtggccaatggcatcgaggtctacagtaccaaaatcaactccaaggtgacctcccgttttgctcacaatgttgtcaccatgagagccgtcaaccgtgcagacacggccaaggaggtttcctttgatgtggagctgcccaagacggccttcatcaccaacttcaccttgaccatcgacggtgttacctaccctgggaatgtcaaggagaaggaagttgccaagaagcagtatgaaaaggctgtgtcccagggcaagacggccggcttggtcaaggcctctgggaggaagttggagaagttcacagtctcggtcaacgtggctgcaggcagcaaagtcaccttcgagctaacctacgaggagctgctgaagaggcacaagggcaagtacgagatgtacctcaaggtccagcctaagcaactggtcaaacactttgagatcgaggtagacatcttcgagcctcagggaatcagcatgctggatgctgaggcctctttcatcaccaacgacctcctgggaagcgccctcaccaagtccttctcagggaaaaagggccatgtgtccttcaagcccagcttagaccaacagcgttcatgcccaacctgtacagattccctcctcaatggagatttcactatcacctatgacgtgaacagagaatctcctggcaacgtgcagatagtcaatggctacttcgtgcacttctttgcacctcaaggccttccagtggtgcctaagaacgtggcctttgtgattgacatcagcggctccatggctggtcggaaattagagcagacaaaggaggcccttctcagaatcctggaagatatgaaagaggaagactatctgaatttcatcctgttcagtggagatgtgtccacatggaaagagcacttagtccaggccacgcccgagaacctccaggaggccaggacgtttgtgaagagcatggaggataaaggaatgaccaacatcaatgacgggctgctgaggggcatcagtatgctgaacaaggcccgagaggagcacagaatcccagagaggagcacctccattgtcatcatgctgactgatggggatgccaatgttggtgagagcagacccgaaaaaatccaagagaatgtgcggaatgccatcgggggcaagttccccttgtataacctgggctttggcaacaatctgaattataacttcctggagaacatggccctggagaaccatgggtttgcccggcgcatttatgaggactctgatgccgatttgcagttgcagggcttctatgaggaggtggccaacccactgctgacgggtgtggagatggagtaccccgagaacgctatcctggacctcacccagaacacttaccagcacttctacgatggctctgagatcgtggtggccgggcgcctggtggacgaggacatgaacagctttaaggcagatgtgaagggccatggggccaccaacgacctgaccttcacagaggaggtggacatgaaggagatggagaaggccctgcaggagcgggactacatcttcgggaattacattgagcggctctgggcctacctcaccattgagcagctgctggagaagcgcaagaacgcccatggcgaggagaaggagaacctcacggcccgggccctggacctgtccctcaagtatcactttgtgactccactgacctcaatggtggtgaccaagcctgaggacaacgaggatgagagggccattgccgacaagcctggggaagatgcagaagccacaccggtgagccccgccatgtcctacctgaccagctaccagcctcctcaaaacccctactactatgtggacggggatccccacttcatcatccaaattccggagaaagacgatgccctctgcttcaacatcgatgaagccccaggcacagtgctgcgccttattcaggatgcagtcacaggcctcacagttaatgggcagatcactggcgacaagagaggcagccctgactccaagaccagaaagacttactttggaaaactgggcattcgcaatgctcagatggacttccaggtggaggtgacaacggagaagatcacctgtggaacaggccgtgcgagcactttcagctggctggacacagtcacagtcacgcaggatgggctgtccatgatgatcaacaggaagaacatggtggtctcctttggagatggggttaccttcgtggtcgtcctacaccaggtgtggaagaaacatcctgtccaccgtgactttctaggcttctacgtggtggacagtcaccggatgtcagcacagacgcatgggctgctggggcaattcttccaaccctttgactttaaagtgtctgacatccggccaggctctgaccccacaaagccagatgccacattggtggtgaagaaccatcagctgattgtcaccaggggctcccagaaagactacagaaaggatgccagcatcggcacgaaggttgtctgctggttcgtccacaacaacggagaagggctgattgatggtgtccacactgactacattgtccccaacctgttttgagtagacacaccagctcctgttgggatggatggcccggattttatggcatctggaacatgggcacagagaggggcctgtgggaggggctgggaaaataaagtccaaggtcgagccagaaaaaaaaaaaaa

SEQ ID NO: 810 - DNA, 2963 bp, Homo sapiens
gtgagaagcctcctggcagacactggagccacgatgaagcccccaaggcctgtccgtacctgcagcaaagttctcgtcctgctttcactgctggccatccaccagaccactactgccgaaaagaatggcatcgacatctacagcctcaccgtggactccagggtctcatcccgatttgcccacacggtcgtcaccagccgagtggtcaatagggccaatacggtacaggaggccaccttccagatggagctgcccaagaaagccttcatcaccaacttctccatgaacatcgatggcatgacctacccagggatcatcaaggagaaggctgaagcccaggcacagtacagcgcagcagtggccaagggaaagaacgctggcctcgtcaaggccaccgggagaaacatggagcagttccaggtgtcggtcagtgtggctcccaatgccaagatcacctttgagctggtctatgaggagctgctcaagcggcgtttgggggtgtacgagctgctgctgaaagtgcggccccagcagctggtcaagcacctgcagatggacattcacatcttcgagccccagggcatcagctttctggagacagagagcaccttcatgaccaaccagctggtagacgccctcaccacctggcagaataagaccaaggctcacatccggttcaagccaacactttcccagcagcaaaagtccccagagcagcaagaaacagtcctggacggcaacctcattatccgctatgatgtggaccgggccatctccgggggctccattcagatcgagaacggctactttgtacactactttgcccccgagggcctaaccacaatgcccaagaatgtggtctttgtcattgacaagagcggctccatgagtggcaggaaaatccagcagacccgggaagccctaatcaagatcctggatgacctcagccccagagaccagttcaacctcatcgtcttcagtacagaagcaactcagtggaggccatcactggtgccagcctcagccgagaacgtgaacaaggccaggagctttgctgcgggcatccaggccctgggagggaccaacatcaatgatgcaatgctgatggctgtgcagttgctggacagcagcaaccaggaggagcggctgcccgaagggagtgtctcactcatcatcctgctcaccgatggcgaccccactgtgggggagactaaccccaggagcatccagaataacgtgcgggaagctgtaagtggccggtacagcctcttctgcctgggcttcggtttcgacgtcagctatgccttcctggagaagctggcactggacaatggcggcctggcccggcgcatccatgaggactcagactctgccctgcagctccaggacttctaccaggaagtggccaacccactgctgacagcagtgaccttcgagtacccaagcaatgccgtggaggaggtcactcagaacaacttccggctcctcttcaagggctcagagatggtggtggctgggaagctccaggaccgggggcctgatgtgctcacagccacagtcagtgggaagctgcctacacagaacatcactttccaaacggagtccagtgtggcagagcaggaggcggagttccagagccccaagtatatcttccacaacttcatggagaggctctgggcatacctgactatccagcagctgctggagcaaactgtctccgcatccgacgctgatcagcaggccctccggaaccaagcgctgaatttatcacttgcctacagctttgtcacgcctctcacatctatggtagtcaccaaacccgatgaccaagagcagtctcaagttgctgagaagcccatggaaggcgaaagtagaaacaggaatgtccactcaggttccactttcttcaaatattatctccagggagcaaaaataccaaaaccagaggcttccttttctccaagaagaggatggaatagacaagctggagctgctggctcccggatgaatttcagacctggggttctcagctccaggcaacttggactcccaggacctcctgatgttcctgaccatgctgcttaccaccccttccgccgtctggccatcttgcctgcttcagcaccaccagccacctcaaatcctgatccagctgtgtctcgtgtcatgaatatgaaaatcgaagaaacaaccatgacaacccaaaccccagcccccatacaggctccctctgccatcctgccactgcctgggcagagtgtggagcggctctgtgtggaccccagacaccgccaggggccagtgaacctgctctcagaccctgagcaaggggttgaggtgactggccagtatgagagggagaaggctgggttctcatggatcgaagtgaccttcaagaaccccctggtatgggttcacgcatcccctgaacacgtggtggtgactcggaaccgaagaagctctgcgtacaagtggaaggagacgctattctcagtgatgcccggcctgaagatgaccatggacaagacgggtctcctgctgctcagtgacccagacaaagtgaccatcggcctgttgttctgggatggccgtggggaggggctccggctccttctgcgtgacactgaccgcttctccagccacgttggagggacccttggccagttttaccaggaggtgctctggggatctccagcagcatcagatgacggcagacgcacgctgagggttcagggcaatgaccactctgccaccagagagcgcaggctggattaccaggaggggcccccgggagtggagatttcctgctggtctgtggagctgtagttctgatggaaggagctgtgcccaccctgtacacttggcttccccctgcaactgcagggccgcttctggggcctggaccaccatggggaggaagagtcccactcattacaaataaagaaaggtggtgtgagcctggg

SEQ ID NO: 811 - DNA, 2472 bp, Homo sapiens
ctgccagggttgggtgcgccgctgaacggatggctgagggagccccgcggatcgttaggaaagccggccagctgatcgtcgtgtgttgccacccattcatgtcaagatgactaagtttggatttttgcgattgtcctatgagaagcaggacacacttttgaagcttctcattctgtcaatggctgctgtattatccttctccactcgtctgtttgctgtcctgagatttgaaagtgttatccatgagtttgatccgtactttaattatcggactaccaggttcctggctgaggaggggttttataaattccataactggtttgatgaccgagcctggtaccctttgggacgaatcattggaggaacaatttacccaggtttaatgatcacctctgctgcaatctaccatgtactccattttttccacatcaccatcgacattcggaatgtctgtgtgttcctggcccctctcttctcctccttcacctccatcgtcacgtacctccttaccaaagagctcaaggatgcaggggctgggcttcttgctgctgccatgattgctgtagttcctggatatatctcccgatctgtggctggctcctatgataatgaagggattgccatcttttgcatgctactcacctactacatgtggatcaaggcagtaaagactggttccatctgttgggcagctaagtgtgcccttgcttatttctacatggtctcgtcatggggaggttatgtgttcctgatcaacttaattcctctccacgtcctcgtgctgatgctcacaggccgtttctctcaccggatctatgtggcctactgtactgtttactgcctgggtactatactttctaggcagatctcctttgtgggtttccagcctgtcctttcatcagagcacatggcagggtttggggtctttggtctctgccagatccatgcctttgtggattacctgcgcagcaagttgaatccacaacaatttgaagttcttttccggagcgtcatctctctggtaggctttgtccttctcaccgtgggagctctcctcatgctgacaggaaaaatatctccctggacggggcgtttctactcactgctggatccctcttatgctaagaacaacatccccatcattgcttctgtgtctgagcatcagcccacaacctggtcctcatactattttgacctgcagctcctcgtcttcatgtttccagttggcctctattactgctttagcaacctgtctgatgcccggatttttatcatcatgtatggtgtgaccagcatgtacttttcagctgtaatggtgcgtctaatgctagtgttggcacctgttatgagcattctctctggcattggagtctcccaggtgctgtccacatacatgaagaatctggacataagtcgcccagacaagaagagcaagaagcaacaggattccacctaccctattaagattgaagtggcaagtgggatgatactggtcatggctttctttctcatcacctacacctttcattcaacctgggtgaccagtgaggcctactcttctccgtccattgtactatctgcccgtggtggggatggcagtaggatcatatttgatgacttccgagaagcatattattggcttcgtcataatactccagaggatgcgaaggtcatgtcctggtgggattatggctatcagattacagctatggcaaaccgaacaattttagtggacaataacacatggaataatacccatatttctcgagtagggcaggcaatggcgtccacagaggaaaaagcctatgagatcatgagggagctcgatgtcagctatgtgctggtcatttttggaggcctcactgggtattcctctgatgatatcaacaagtttctttggatggtccggattggagggagcacagatacaggcaaacatatcaaggagaatgactattatactccaactggggagttccgtgtggaccgtgaaggttctccagtgctgctcaactgcctcatgtacaagatgtgttactatcgctttggacaggtttacacagaagccaagcgtcctccaggctttgaccgtgtccgaaatgctgagattgggaataaagactttgagcttgatgtcctggaggaaggctataccacagaacattggctggtcaggatatacaaggtaaaggacctggataatcgaggcttgtcaaggacataaatgtcacgtccagctctgatatcttcgcactgagcacatcacatttaggacgttgaagattttttttttttttttttttttaatatgcagtttgtaagaacaaaactggatggcatccgaattgtctggaagttttgtcttgggcatgatgggctgggccaaatgaaatgatttttataattctaaacaggttaccaaatgaaatgtcatggctttactttggtcaattaaaggggggaattttttta

SEQ ID NO: 812 - DNA, 8833 bp, Homo sapiens
cgccccccacgccctgggccccggagggccgcagccatgagtgaaatgtccagctttcttcacatcggggacatcgtctccctgtacgccgagggctccgtcaatggcttcatcagcactttggggctggtggatgaccgctgtgtggtggagcccgcggccggggacctggacaacccccctaagaagttccgtgactgcctcttcaaggtgtgccccatgaaccgctactcggcccagaagcagtactggaaggccaagcagactaagcaggacaaggagaagatcgctgatgtggtgttgctgcagaagctgcagcatgcggcgcagatggagcagaagcaaaatgacacggagaacaagaaggtgcatggggatgtcgtgaagtatggcagtgtgatccagctcctgcacatgaagagcaacaagtacctgacagtgaacaagcggcttccggccttgctggagaagaacgccatgcgggtgactctggatgccacaggcaacgagggttcctggctcttcatccagcccttctggaagctgcggagcaacggggacaacgtggtcgtgggggacaaggtgatcctgaatcctgtcaatgccgggcagcctctgcatgccagcaattacgagctcagcgacaacgccggctgcaaggaggtcaattctgtgaactgcaacaccagctggaagatcaacctgtttatgcagtttcgggaccacctggaggaggtgttgaaagggggagacgtggtgcggctgttccatgcggagcaggagaagttcctgacgtgtgacgagtacaagggcaagctgcaggtgttcctgcgaactacactgcgccagtctgccacctcggccaccagctccaatgctctctgggaggtggaggtggtccaccacgacccctgccgtggaggagctgggcactggaatggcttgtaccgcttcaagcacctggctacaggcaactacctggctgctgaggagaaccccagttacaaaggtgatgcctcagatcccaaggcagcaggaatgggggcacagggccgcacaggccgcaggaatgctggggagaagatcaagtactgcctggtggctgtgcctcatggcaatgacatcgcctctctctttgagctggaccccaccaccttgcagaaaaccgactctttcgtgccccggaactcgtacgtccggctgcggcacctctgcaccaacacgtggattcagagcaccaatgtgcccattgacatcgaggaggagcggcccatccggctcatgctgggcacctgccccaccaaggaggacaaggaggcctttgccatcgtgtcagtgcccgtgtctgagatccgagacctggactttgccaatgacgccagctccatgctggccagtgccgtggagaaactcaacgagggcttcatcagccagaatgaccgcaggtttgtcatccagctgctggaagacctggtgttctttgtcagcgatgtccccaacaatgggcagaatgtcctggacatcatggtcactaagcccaaccgggaacggcagaagctgatgagggagcagaacatcctcaaacaggtctttggcattctgaaggtcccgttccgtgagaaggggggtgaaggtcccctggtgcggctggaggagctgtcagaccagaagaacgccccctaccagcacatgttccgcctgtgctaccgtgtgttgcggtattcccaggaggactaccgcaagaaccaggagcacattgccaagcagtttgggatgatgcagtcccagattggctacgacatcctggccgaggacaccatcactgccctgctgcacaacaaccgcaagctcctggaaaagcacatcaccaagaccgaggtggagaccttcgtcagccttgtgcgcaagaaccgggagcccaggttcctggactacctctctgacctgtgtgtgtccaaccacatcgccatccccgtcacccaagagctcatctgcaagtgtgtgctggaccccaagaacagtgacattctcatccggaccgagcttcggcccgtgaaggagatggcccaatcccacgagtacctgagcatcgagtactcagaagaggaagtgtggctcacgtggactgacaagaataacgagcatcatgagaagagtgtgaggcagctggcccaggaggcgcgggccggcaacgcccacgacgagaatgtgctcagctactacaggtaccagctgaagctctttgcccgcatgtgcttggaccgccagtacttggccatcgacgagatctcccagcagctgggcgtggacctgattttcctgtgcatggcagacgagatgctgccctttgacctgcgcgcctccttctgccacctgatgctgcacgtgcacgtggaccgtgacccccaggagctggtcacgccggtcaagtttgcccgtctctggactgagatccccacagccatcaccatcaaggactatgattccaacctcaacgcgtcccgagatgacaagaagaacaagtttgccaacaccatggagttcgtggaggactacctcaacaatgtagtcagcgaggccgtgccctttgccaacgaggagaagaacaagctcacttttgaggtggtcagcctggcgcacaatctcatctacttcggcttctacagcttcagcgagctgctgcggctcactcgcacactgctgggcatcatcgactgtgtgcaggggcccccggccatgctgcaggcctatgaggaccccggtggcaagaatgtgcggcggtccatccagggcgtggggcacatgatgtccaccatggtgctgagccgcaagcagtccgtcttcagtgcccccagcctgtctgctggggccagtgctgctgagccgctggacagaagcaagtttgaggagaatgaggacattgtggtgatggagaccaagctgaagatcctggaaatccttcagttcatcctcaacgtccgcctggattaccgcatatcctacctgctgtctgtcttcaagaaggagtttgtggaggtgtttcccatgcaggacagtggggctgatggcacagcccctgccttcgactctaccactgccaacatgaacctggatcgcatcggggagcaggcggaggccatgtttggagtggggaagacaagcagcatgctggaggtggatgacgagggcggccgcatgttcctgcgcgtgctcatccacctcaccatgcacgactatgcgccactggtctcgggtgccctgcagctgctcttcaagcacttcagccagcgccaggaggccatgcacaccttcaagcaggttcagctgctgatctcagcgcaggacgtggagaactacaaggtgatcaagtcggagctggaccggctgcggaccatggtggagaagtcagagctgtgggtggacaagaagggcagtggcaagggtgaggaggtggaggcaggcaccgccaaggacaagaaagagcgtcccacggacgaggagggctttctgcacccaccaggggagaaaagcagtgagaactaccagatcgtcaagggcatcctggaaaggctgaacaagatgtgcggggttggggagcaaatgaggaagaagcagcaacggctgctgaagaacatggatgcccacaaggtcatgctggacctgctgcagatcccctatgacaagggtgatgccaagatgatggagatcctgcgctacacgcaccagttcctgcagaagttctgtgcagggaaccccggcaaccaggccctgctgcacaaacacctgcacctcttcctcacgccagggctcctggaggcagagaccatgcagcacatcttcctgaacaactatcagctctgctccgagatcagcgagcctgtgttgcagcacttcgtgcacctgctggccacgcacgggcgccatgtgcagtacctggacttcctgcacaccgtcattaaggccgagggcaagtacgtcaagaagtgccaggacatgatcatgactgagctgaccaatgcaggtgacgatgtggtcgtgttctacaatgataaggcatcgctggcccacctgctggacatgatgaaggccgcccgcgacggcgtggaggaccacagccccctcatgtaccacatttccctggtggacctgctggccgcctgtgccgagggcaaaaacgtctacactgagatcaagtgcacctccctcgtgccgctggaggacgtggtgtctgtggtgacgcatgaggactgcatcactgaggtgaaaatggcctatgtgaacttcgtgaaccactgctacgtggacacggaggtggagatgaaggagatctacaccagcaaccacatctggacgctctttgagaacttcaccctggacatggctcgggtctgcagcaagcgtgagaagcgcgtggctgaccccaccttggagaagtacgtgctgagcgttgtgctggacaccatcaacgccttcttcagctccccattctctgagaacagcacttccctgcagacacaccagccggttgtggtgcagctgctgcagtctaccacacgcctcctcgagtgtccgtggctacagcagcagcacaagggctccgtggaggcctgcatccggaccctcgccatggtggccaagggccgggccatcttgctgcccatggacctggatgcccacatcagctcgatgctcagcagtggagccagctgtgcagctgccgcccagcggaacgcctccagctacaaggcaaccacgcgggccttcccccgcgtcacccccaccgccaaccagtgggactacaagaacatcattgagaagctgcaggacatcatcacagccctggaggagcggctgaagcccctggtacaggctgagctgtccgtgctggtggatgtcctgcactggcctgagctgctcttcctggagggcagtgaggcctaccagcgctgcgagagtgggggcttcctgtccaagctgatccagcacaccaaggacctcatggagtcggaggagaagctgtgcatcaaggtgctgcggaccctgcagcagatgctcgtcaagaagaccaagtacggggaccggggcaaccagctgcgcaagatgctgctgcaaaactacctccagaaccggaagtccacctcgcggggggaccttcccgaccccataggcactggcctggacccagactggtcggcaatcgcagccacccagtgccggctggacaaggagggggccaccaagttggtatgcgacctcatcaccagcaccaagaacgagaagatcttccaggagagcatcggcctggccatccacctgctggatggtggcaacacagagatccagaaatccttccacaacctgatgatgagtgacaagaagtcagagcgcttcttcaaggtgctgcacgaccgcatgaagcgggcccagcaggagaccaagtccacggtggcagtcaacatgaatgacctgggcagccagccacatgaggaccgcgagccagtcgaccccaccaccaaaggccgcgtggcctccttctcgatacctggctcctcatcccgctactcgctgggccccagcctgcgccgggggcacgaggtgagcgaacgtgtgcagagcagtgagatgggcacatccgtgctcatcatgcagcccatcctgcgctttctgcagctgctgtgtgagaaccacaaccgggacctgcagaacttcctgcgctgtcagaacaacaaaaccaactacaacttggtatgcgagacgctgcagttcctggacatcatgtgcggcagcaccacgggcggcctggggctgctggggctctacatcaatgaggacaacgtgggcctcgtcatccagaccttggagaccctcactgagtactgccagggcccctgccatgagaaccagacttgcattgtgactcacgagtccaatggcatagacatcatcaccgcactgatcctcaatgacatcagccccctgtgcaagtaccgcatggatctggtgctgcagctcaaggacaatgcctccaagctgctcctggctctgatggagagccggcatgacagtgaaaatgctgagcgaatcctcatcagcctgcggccccaggagctggtggacgtcatcaagaaggcctacctgcaggaggaagagcgtgagaactcggaggtgagcccacgtgaagtgggccataacatctatatcctggcgctgcagctctccaggcacaataaacagctgcagcacctgctgaagccggtgaagcgcattcaagaggaggaggccgagggtatctcttccatgctcagcctcaacaacaagcagctgtcacagatgctcaagtcctcagcgccagcacaggaggaggaggaagaccccctggcctactatgagaaccacacgtcccagatcgagattgtgcggcaggaccgcagcatggagcagatcgtgttcccagtgcccggcatctgccagttcctgacggaggaaaccaagcaccggctcttcaccactactgagcaggacgagcagggcagcaaagtgagcgacttcttcgaccagtcctccttcctgcacaacgagatggagtggcagcgcaacgtccgcagcatgccgctgatctactggttctcccgccgcatgaccctgtggggcagcatctccttcaacctggccgtgtttatcaacatcatcattgccttcttctacccttacatggagggcgcgtccacaggcgtgctggactcccctctcatctcattgctcttctggatcctcatctgcttctccatcgcggccctgttcaccaagcgctacagcatccgccccctcatcgtggcgctcatcctgcgctccatctactatctgggcatcgggcccacactcaacatcctgggtgccctcaatctgaccaacaagatcgtgtttgtggtgagcttcgtgggcaaccgtggcaccttcatccggggctataaggccatggtcatggacatggaattcctctaccacgtgggctacatcctgaccagtgtcctgggcctctttgctcatgagctgttctacagcatcctgctctttgacctcatctaccgcgaggagacgctgttcaacgtcatcaagagtgtgacccgcaatggccgctccatcctgctgacagccctgctggccctcatcctggtctacctcttctccatcgtcggcttcctcttcctcaaggatgacttcattctcgaggtcgaccggctgcccaacaaccactccacagccagccccctggggatgccacatggagctgctgcatttgtggacacctgcagtggggacaagatggactgtgtctcagggctctcggtgcctgaggtcctggaagaggacagggagctggacagcacagagcgggcctgtgacactctgttgatgtgcatcgtcactgtcatgaaccatgggctacgcaacggtggtggcgtgggcgacattctccgcaagccctccaaagatgagtctctcttcccagcccgagtggtctatgacctcctgttcttcttcatcgtcatcatcattgtgctgaacctcatctttggggtaatcatcgacaccttcgctgacctgcgtagtgagaagcagaagaaggaggagattcttaagacgacatgcttcatctgtggtctggagagggacaagtttgataacaagacagtgtcatttgaggaacacatcaagctggagcacaacatgtggaactacttgtacttcattgtgctggtccgcgtgaagaacaagaccgactacacgggccctgagagctacgtggcccagatgatcaagaacaagaacctggactggttcccccggatgcgggccatgtcccttgtcagcaatgagggcgagggggagcagaatgagattcggattctccaggacaagctcaactccaccatgaagctggtgtcccacctcactgcccagctcaacgagctcaaggagcagatgacggagcagcggaaacgcaggcaacgcctaggctttgtggatgtccagaactgcattagccgctgaggagagccaccgaaggccccaacaggggatgctcatcactggagactgcgactgggaagaacactgccccctccctcgggttgggtggcccagccagctggccagcctccactcccactctgccagacaccctgacacccacccaggctttgaagagcatggagggggagcctcagagctgacagtcctgcttagagcccttaaaaagacttgaaagttcactgggactcagtttaccttaatgccttagcagaagataaatcctacctagagacctttgttccttaaagcaataactgacaactctttgtagtcctccttgtgggtagttaagagtggggtcacccctttaactccaagcactacattttggcggctgcggcctctgggggaggtggcagttatgctgttactagtgattttagggctttgttatttaacttatttcaagggtgctgtgctcagccctgcccatggctgtgcagctccctccgtgcctcagatctgctgtagccagtgcagacctcactgtcgtgtccatgccacccccggcatggctccaggtggcctggtgactccatgatggacgatcttgctcccaggacctgcctcttcccaggcttcctggggaagagttgtacgcccaggcaacaagggctgagctgcgcttgcgtggctgtttcatgaccgcttgtttttctccttttggtgtaatgttttacaaatcctttggcctgagaactaatatgttaattgccttaaataaattaatagaaatcta

SEQ ID NO: 813 - DNA, 3254 bp, Homo sapiens
agagttgcactgagtgtggctgaagcagcgaggcgggagtggaggtgcgcggagtcaggcagacagacagacacagccagccagccaggtcggcagtatagtccgaactgcaaatcttattttcttttcaccttctctctaactgcccagagctagcgcctgtggctcccgggctggtggttcgggagtgtccagagagccttgtctccagccggccccgggaggagagccctgctgcccaggcgctgttgacagcggcggaaagcagcggtaccccacgcgcccgccgggggacgtcggcgagcggctgcagcagcaaagaactttcccggcggggaggaccggagacaagtggcagagtcccggagcgaacttttgcaagcctttcctgcgtcttaggcttctccacggcggtaaagaccagaaggcggcggagagccacgcaagagaagaaggacgtgcgctcagcttcgctcgcaccggttgttgaacttgggcgagcgcgagccgcggctgccgggcgccccctccccctagcagcggaggaggggacaagtcgtcggagtccgggcggccaagacccgccgccggccggccactgcagggtccgcactgatccgctccgcggggagagccgctgctctgggaagtgagttcgcctgcggactccgaggaaccgctgcgcccgaagagcgctcagtgagtgaccgcgacttttcaaagccgggtagcgcgcgcgagtcgacaagtaagagtgcgggaggcatcttaattaaccctgcgctccctggagcgagctggtgaggagggcgcagcggggacgacagccagcgggtgcgtgcgctcttagagaaactttccctgtcaaaggctccggggggcgcgggtgtcccccgcttgccagagccctgttgcggccccgaaacttgtgcgcgcacgccaaactaacctcacgtgaagtgacggactgttctatgactgcaaagatggaaacgaccttctatgacgatgccctcaacgcctcgttcctcccgtccgagagcggaccttatggctacagtaaccccaagatcctgaaacagagcatgaccctgaacctggccgacccagtggggagcctgaagccgcacctccgcgccaagaactcggacctcctcacctcgcccgacgtggggctgctcaagctggcgtcgcccgagctggagcgcctgataatccagtccagcaacgggcacatcaccaccacgccgacccccacccagttcctgtgccccaagaacgtgacagatgagcaggaggggttcgccgagggcttcgtgcgcgccctggccgaactgcacagccagaacacgctgcccagcgtcacgtcggcggcgcagccggtcaacggggcaggcatggtggctcccgcggtagcctcggtggcagggggcagcggcagcggcggcttcagcgccagcctgcacagcgagccgccggtctacgcaaacctcagcaacttcaacccaggcgcgctgagcagcggcggcggggcgccctcctacggcgcggccggcctggcctttcccgcgcaaccccagcagcagcagcagccgccgcaccacctgccccagcagatgcccgtgcagcacccgcggctgcaggccctgaaggaggagcctcagacagtgcccgagatgcccggcgagacaccgcccctgtcccccatcgacatggagtcccaggagcggatcaaggcggagaggaagcgcatgaggaaccgcatcgctgcctccaagtgccgaaaaaggaagctggagagaatcgcccggctggaggaaaaagtgaaaaccttgaaagctcagaactcggagctggcgtccacggccaacatgctcagggaacaggtggcacagcttaaacagaaagtcatgaaccacgttaacagtgggtgccaactcatgctaacgcagcagttgcaaacattttgaagagagaccgtcgggggctgaggggcaacgaagaaaaaaaataacacagagagacagacttgagaacttgacaagttgcgacggagagaaaaaagaagtgtccgagaactaaagccaagggtatccaagttggactgggttcggtctgacggcgcccccagtgtgcacgagtgggaaggacttggtcgcgccctcccttggcgtggagccagggagcggccgcctgcgggctgccccgctttgcggacgggctgtccccgcgcgaacggaacgttggactttcgttaacattgaccaagaactgcatggacctaacattcgatctcattcagtattaaaggggggagggggagggggttacaaactgcaatagagactgtagattgcttctgtagtactccttaagaacacaaagcggggggagggttggggaggggcggcaggagggaggtttgtgagagcgaggctgagcctacagatgaactctttctggcctgctttcgttaactgtgtatgtacatatatatattttttaatttgattaaagctgattactgtcaataaacagcttcatgcctttgtaagttatttcttgtttgtttgtttgggtatcctgcccagtgttgtttgtaaataagagatttggagcactctgagtttaccatttgtaataaagtatataatttttttatgttttgtttctgaaaattccagaaaggatatttaagaaaatacaataaactattggaaagtactcccctaacctcttttctgcatcatctgtagatcctagtctatctaggtggagttgaaagagttaagaatgctcgataaaatcactctcagtgcttcttactattaagcagtaaaaactgttctctattagacttagaaataaatgtacctgatgtacctgatgctatgtcaggcttcatactccacgctcccccagcgtatctatatggaattgcttaccaaaggctagtgcgatgtttcaggaggctggaggaaggggggttgcagtggagagggacagcccactgagaagtcaaacatttcaaagtttggattgcatcaagtggcatgtgctgtgaccatttataatgttagaaattttacaataggtgcttattctcaaagcaggaattggtggcagattttacaaaagatgtatccttccaatttggaatcttctctttgacaattcctagataaaaagatggcctttgtcttatgaatatttataacagcattctgtcacaataaatgtattcaaataccaat

SEQ ID NO: 814 - DNA, 1797 bp, Homo sapiens
ccagcagggagctgggagctgggggaaacgacgccaggaaagctatcgcgccagagagggcgacgggggctcgggaagcctgacagggcttttgcgcacagctgccggctggctgctacccgcccgcgccagcccccgagaacgcgcgaccaggcacccagtccggtcaccgcagcggagagctcgccgctcgctgcagcgaggcccggagcggccccgcagggaccctccccagaccgcctgggccgcccggatgtgcactaaaatggaacagcccttctaccacgacgactcatacacagctacgggatacggccgggcccctggtggcctctctctacacgactacaaactcctgaaaccgagcctggcggtcaacctggccgacccctaccggagtctcaaagcgcctggggctcgcggacccggcccagagggcggcggtggcggcagctacttttctggtcagggctcggacaccggcgcgtctctcaagctcgcctcttcggagctggaacgcctgattgtccccaacagcaacggcgtgatcacgacgacgcctacacccccgggacagtacttttacccccgcgggggtggcagcggtggaggtgcagggggcgcagggggcggcgtcaccgaggagcaggagggcttcgccgacggctttgtcaaagccctggacgatctgcacaagatgaaccacgtgacaccccccaacgtgtccctgggcgctaccggggggcccccggctgggcccgggggcgtctacgccggcccggagccacctcccgtttacaccaacctcagcagctactccccagcctctgcgtcctcgggaggcgccggggctgccgtcgggaccgggagctcgtacccgacgaccaccatcagctacctcccacacgcgccgcccttcgccggtggccacccggcgcagctgggcttgggccgcggcgcctccaccttcaaggaggaaccgcagaccgtgccggaggcgcgcagccgggacgccacgccgccggtgtcccccatcaacatggaagaccaagagcgcatcaaagtggagcgcaagcggctgcggaaccggctggcggccaccaagtgccggaagcggaagctggagcgcatcgcgcgcctggaggacaaggtgaagacgctcaaggccgagaacgcggggctgtcgagtaccgccggcctcctccgggagcaggtggcccagctcaaacagaaggtcatgacccacgtcagcaacggctgtcagctgctgcttggggtcaagggacacgccttctgaacgtcccctgcccctttacggacaccccctcgcttggacggctgggcacacgcctcccactggggtccagggagcaggcggtgggcacccaccctgggacctaggggcgccgcaaaccacactggactccggcccccctaccctgcgcccagtccttccacctcgacgtttacaagcccccccttccacttttttttgtatgttttttttctgctggaaacagactcgattcatattgaatataatatatttgtgtatttaacagggaggggaagagggggcgatcgcggcggagctggccccgccgcctggtactcaagcccgcggggacattgggaaggggacccccgccccctgccctcccctctctgcaccgtactgtggaaaagaaacacgcacttagtctctaaagagtttattttaagacgtgtttgtgtttgtgtgtgtttgttctttttattgaatctatttaagtaaaaaaaaaattggttctttattaa

SEQ ID NO: 815 - DNA, 3769 bp, Homo sapiens
ggcggcggaggcagcagtcttagaatgagtagcaatatccacgcgaaccatctcagcctagacgcgtcctcctcctcctcctcctcctcttcctcttcttcttcttcctcctcctcttcctcctcgtcctcggtccacgagcccaagatggatgcgctcatcatcccggtgaccatggaggtgccgtgcgacagccggggccaacgcatgtggtgggctttcctggcctcctccatggtgactttcttcgggggcctcttcatcatcttgctctggcggacgctcaagtacctgtggaccgtgtgctgccactgcgggggcaagacgaaggaggcccagaagattaacaatggctcaagccaggcggatggcactctcaaaccagtggatgaaaaagaggaggcagtggccgccgaggtcggctggatgacctccgtgaaggactgggcgggggtgatgatatccgcccagacactgactggcagagtcctggttgtcttagtctttgctctcagcatcggtgcacttgtaatatacttcatagattcatcaaacccaatagaatcctgccagaatttctacaaagatttcacattacagatcgacatggctttcaacgtgttcttccttctctacttcggcttgcggtttattgcagccaacgataaattgtggttctggctggaagtgaactctgtagtggatttcttcacggtgccccccgtgtttgtgtctgtgtacttaaacagaagttggcttggtttgagatttttaagagctctgagactgatacagttttcagaaattttgcagtttctgaatattcttaaaacaagtaattccatcaagctggtgaatctgctctccatatttatcagcacgtggctgactgcagccgggttcatccatttggtggagaattcaggggacccatgggaaaatttccaaaacaaccaggctctcacctactgggaatgtgtctatttactcatggtcacaatgtccaccgttggttatggggatgtttatgcaaaaaccacacttgggcgcctcttcatggtcttcttcatcctcgggggactggccatgtttgccagctacgtccctgaaatcatagagttaataggaaaccgcaagaaatacgggggctcctatagtgcggttagtggaagaaagcacattgtggtctgcggacacatcactctggagagtgtttccaacttcctgaaggactttctgcacaaggaccgggatgacgtcaatgtggagatcgtttttcttcacaacatctcccccaacctggagcttgaagctctgttcaaacgacattttactcaggtggaattttatcagggttccgtcctcaatccacatgatcttgcaagagtcaagatagagtcagcagatgcatgcctgatccttgccaacaagtactgcgctgacccggatgcggaggatgcctcgaatatcatgagagtaatctccataaagaactaccatccgaagataagaatcatcactcaaatgctgcagtatcacaacaaggcccatctgctaaacatcccgagctggaattggaaagaaggtgatgacgcaatctgcctcgcagagttgaagttgggcttcatagcccagagctgcctggctcaaggcctctccaccatgcttgccaacctcttctccatgaggtcattcataaagattgaggaagacacatggcagaaatactacttggaaggagtctcaaatgaaatgtacacagaatatctctccagtgccttcgtgggtctgtccttccctactgtttgtgagctgtgttttgtgaagctcaagctcctaatgatagccattgagtacaagtctgccaaccgagagagccgtatattaattaatcctggaaaccatcttaagatccaagaaggtactttaggatttttcatcgcaagtgatgccaaagaagttaaaagggcatttttttactgcaaggcctgtcatgatgacatcacagatcccaaaagaataaaaaaatgtggctgcaaacggcttgaagatgagcagccgtcaacactatcaccaaaaaaaaagcaacggaatggaggcatgcggaactcacccaacacctcgcctaagctgatgaggcatgaccccttgttaattcctggcaatgatcagattgacaacatggactcccatgtgaagaagtacgactctactgggatgtttcactggtgtgcacccaaggagatagagaaagtcatcctgactcgaagtgaagctgccatgaccgtcctgagtggccatgtcgtggtctgcatctttggcgacgtcagctcagccctgatcggcctccggaacctggtgatgccgctccgtgccagcaactttcattaccatgagctcaagcacattgtgtttgtgggctctattgagtacctcaagcgggaatgggagacgcttcataacttccccaaagtgtccatattgcctggtacgccattaagtcgggctgatttaagggctgtcaacatcaacctctgtgacatgtgcgttatcctgtcagccaatcagaataatattgatgatacttcgctgcaggacaaggaatgcatcttggcgtcactcaacatcaaatctatgcagtttgatgacagcatcggagtcttgcaggctaattcccaagggttcacacctccaggaatggatagatcctctccagataacagcccagtgcacgggatgttacgtcaaccatccatcacaactggggtcaacatccccatcatcactgaactagtgaacgatactaatgttcagtttttggaccaagacgatgatgatgaccctgatacagaactgtacctcacgcagccctttgcctgtgggacagcatttgccgtcagtgtcctggactcactcatgagcgcgacgtacttcaatgacaatatcctcaccctgatacggaccctggtgaccggaggagccacgccggagctggaggctctgattgctgaggaaaacgcccttagaggtggctacagcaccccgcagacactggccaatagggaccgctgccgcgtggcccagttagctctgctcgatgggccatttgcggacttaggggatggtggttgttatggtgatctgttctgcaaagctctgaaaacatataatatgctttgttttggaatttaccggctgagagatgctcacctcagcacccccagtcagtgcacaaagaggtatgtcatcaccaacccgccctatgagtttgagctcgtgccgacggacctgatcttctgcttaatgcagtttgaccacaatgccggccagtcccgggccagcctgtcccattcctcccactcgtcgcagtcctccagcaagaagagctcctctgttcactccatcccatccacagcaaaccgacagaaccggcccaagtccagggagtcccgggacaaacagaagtacgtgcaggaagagcggctttgatatgtgtatccaccgccactgtgtgaaactgtatctgccactcatttccccagttggtgtttccaacaaagtaactttccctgttttcccctgtagtccccccctttttttttacacatatttgcatatgtatgatagtgtgcatgtggttgtcatttttatttcaccaccataaaacccttgagcacaacagcaaataagcaggacgggcccaaagttatttatgattctggggggaaaataacccaaaggcatgctccagacataaatagctcactgc

SEQ ID NO: 816 - DNA, 871 bp, Homo sapiens
tcctccacctgctggcccctggacacctctgtcaccatgtggttcctggttctgtgcctcgccctgtccctgggggggactggtgctgcgcccccgattcagtcccggattgtgggaggctgggagtgtgagcagcattcccagccctggcaggcggctctgtaccatttcagcactttccagtgtgggggcatcctggtgcaccgccagtgggtgctcacagctgctcattgcatcagcgacaattaccagctctggctgggtcgccacaacttgtttgacgacgaaaacacagcccagtttgttcatgtcagtgagagcttcccacaccctggcttcaacatgagcctcctggagaaccacacccgccaagcagacgaggactacagccacgacctcatgctgctccgcctgacagagcctgctgataccatcacagatgctgtgaaggtcgtggagttgcccaccgaggaacccgaagtggggagcacctgtttggcttccggctggggcagcatcgaaccagagaatttctcatttccagatgatctccagtgtgtggacctcaaaatcctgcctaatgatgagtgcaaaaaagcccacgtccagaaggtgacagacttcatgctgtgtgtcggacacctggaaggtggcaaagacacctgtgtgggtgattcagggggcccgctgatgtgtgatggtgtgctccaaggtgtcacatcatggggctacgtcccttgtggcacccccaataagccttctgtcgccgtcagagtgctgtcttatgtgaagtggatcgaggacaccatagcggagaactcctgaacgcccagccctgtcccctacccccagtaaaatcaaatgtgcatcc

SEQ ID NO: 817 - DNA, 1976 bp, Homo sapiens
gccacacggtctttgagctgagtcgaggtggaccctttgaacgcagtcgccctacagccgctgattccccccgcatcgcctcccgtggaagcccaggcccgcttcgcagctttctccctttgtctcataaccatgtccaccaacgagaatgctaatacaccagctgcccgtcttcacagattcaagaacaagggaaaagacagtacagaaatgaggcgtcgcagaatagaggtcaatgtggagctgaggaaagctaagaaggatgaccagatgctgaagaggagaaatgtaagctcatttcctgatgatgctacttctccgctgcaggaaaaccgcaacaaccagggcactgtaaattggtctgttgatgacattgtcaaaggcataaatagcagcaatgtggaaaatcagctccaagctactcaagctgccaggaaactactttccagagaaaaacagccccccatagacaacataatccgggctggtttgattccgaaatttgtgtccttcttgggcagaactgattgtagtcccattcagtttgaatctgcttgggcactcactaacattgcttctgggacatcagaacaaaccaaggctgtggtagatggaggtgccatcccagcattcatttctctgttggcatctccccatgctcacatcagtgaacaagctgtctgggctctaggaaacattgcaggtgatggctcagtgttccgagacttggttattaagtacggtgcagttgacccactgttggctctccttgcagttcctgatatgtcatctttagcatgtggctacttacgtaatcttacctggacactttctaatctttgccgcaacaagaatcctgcacccccgatagatgctgttgagcagattcttcctaccttagttcggctcctgcatcatgatgatccagaagtgttagcagatacctgctgggctatttcctaccttactgatggtccaaatgaacgaattggcatggtggtgaaaacaggagttgtgccccaacttgtgaagcttctaggagcttctgaattgccaattgtgactcctgccctaagagccatagggaatattgtcactggtacagatgaacagactcaggttgtgattgatgcaggagcactcgccgtctttcccagcctgctcaccaaccccaaaactaacattcagaaggaagctacgtggacaatgtcaaacatcacagccggccgccaggaccagatacagcaagttgtgaatcatggattagtcccattccttgtcagtgttctctctaaggcagattttaagacacaaaaggaagctgtgtgggccgtgaccaactataccagtggtggaacagttgaacagattgtgtaccttgttcactgtggcataatagaaccgttgatgaacctcttaactgcaaaagataccaagattattctggttatcctggatgccatttcaaatatctttcaggctgctgagaaactaggtgaaactgagaaacttagtataatgattgaagaatgtggaggcttagacaaaattgaagctctacaaaaccatgaaaatgagtctgtgtataaggcttcgttaagcttaattgagaagtatttctctgtagaggaagaggaagatcaaaacgttgtaccagaaactacctctgaaggctacactttccaagttcaggatggggctcctgggacctttaacttttagatcatgtagctgagacataaatttgttgtgtactacgtttggtattttgtcttattgtttctctactaagaactctttcttaaatgtggtttgttactgtagcactttttacactgaaactatacttgaacagttccaactgtacatacatactgtatgaagcttgtcctctgactaggtttctaatttctatgtggaatttcctatcttgcagcatcctgtaaataaacattcaagtccacccttaaaaaaaa

SEQ ID NO: 818 - DNA, 3294 bp, Homo sapiens
atggcggcggccgcggcggarcagcaacagttctacctgctcctgggaaacctgctcagccccgacaatgtggtccggaaacaggcagaggaaacctatgagaatatcccaggccagtcaaagatcacattcctcttacaagccatcagaaatacaacagctgctgaagaggctagacaaatggccgccgttctcctaagacgtctcttgtcctctgcatttgatgaagtctatccagcacttccctctgatgttcagactgccatcaagagtgagctactcatgattattcagatggaaacacaatytagcatgaggaaaaaagtttgtgatattgcggcagaactggccaggaatttaatagatgaggatggcaataaccagtggcccgaaggtttgaagttcctttttgattcagtcagctctcaaaatgtgggactgcgggaagctgcccttcacattttctggaactttcctggaatttttgggaaccagcaacaacactatttagatgtcatcaaacgaatgttagttcagtgtatgcaagatcaggaacacccgtcgatcaggacgttatctgctagagctacagctgcatttatacttgcaaatgagcataatgttgctctgttcaaacattttgcagacttgctaccgggattcctacaggcggtaaatgactcgtgctaccagaatgatgattctgtcctaaaatccctcgttgagattgcagatactgttccaaagtatttgcgtcctcacttggaagcaactctacagctaagtctaaagttgtgtggagacactagcytcaacaatatgcaacgccagcttgcccttgaagtgatcgtcaccytctctgagactgcagctgctatgttaagaaaacataccaatattgttgcacagactattcctcagatgttagcaatgatggttgatttggaagaagatgaggactgggcaaatgcagatgaactagaagatgatgattttgacagcaatgcagttgcaggcgagagtgctctagatcgaatggcttgcggacttggtggaaagctcgttctgccgatgatcaaggaacacattatgcaaatgcttcaaaatcctgactggaaataccggcatgcaggattgatggccttatctgccattggtgaagggtgccaccagcaaatggaaggaattctaaatgagatcgtaaattttgttttactttttctccaggatcctcatccaagagtaaggtatgcagcctgtaatgccgtgggacagatggctacagattttgcacctggtttccaaaagaaatttcatgagaaggtgattgcagctctgctgcagaccatggaagaccaaggcaatcaacgtgtgcaggcccatgcagctgctgccctcattaactttactgaagactgtcccaagtcactacttattccatacttggataatttggtgaaacatctgcattccattatggtactgaagcttcaagagctgattcagaaaggcaccaagttagttttggaacaagttgtgacatccattgcatcagttgccgatactgcagaagaaaaatttgtcccctactatgatttatttatgccatcactgaagcacatcgttgagaatgcggttcaaaaagaactgagacttctgagaggaaaaactattgaatgcattagcctcattggtctggctgttgggaaggaaaaattcatgcaggatgcatcagatgtgatgcagcttttgttaaagacccagacagacttcaatgatatggaagatgatgatcctcagatctcttacatgatctcagcatgggccagaatgtgcaaaatccttggaaaagaatttcagcaataccttccagtggttatggggcctttaatgaagacggcttcaattaagcccgaagtagcccttttagatacccaagacatggagaatatgagtgatgatgatggttgggaatttgtgaaccttggagatcagcaaagctttggtattaaaactgcaggactagaagaaaaatcaactgcttgccagatgttggtttgctatgctaaggagttaaaggaaggctttgtggagtacaccgaacaggttgtcaaactgatggtccctttactgaaattttatttccacgatggtgttcgagtggcagcagcggaatccatgcctcttctcctggagtgtgcaagagtccgtggtcctgagtatctcacacagatgtggcattttatgtgtgatgctctaattaaggccattggtacagaaccagattcagacgtcctctcagaaataatgcattcttttgcaaagtgcattgaagtaatgggagatggatgccttaataatgaacactttgaagaactgggaggtatattgaaagcaaagcttgaagaacattttaaaaatcaagaattacgacaagttaaaagacaagatgaagactatgatgaacaggtcgaaggtacactacaagatgaggatgataatgatgtttatattctgaccaaagtgtcagatattttacactcaatattcagtagctacaaagaaaaggtgttaccatggtttgaacagctgcttccattaattgtcaacctcatttgtccacatagaccatggccagacagacaatggggattatgcatctttgatgatgtcatagaacactgtagtccagcctcatttaaatacgcagaatatttcttaagaccaatgctccaatatgtatgtgacaacagcccagaagtcaggcaagcagctgcatatggcctgggagtcatggcacagtacggtggagataattatcgccctttttgtacagaagcacttcccctgctggtaagagttattcagtctgcggattctaagaccaaagaaaatgtcaatgctacagagaactgcatctcagcagtagggaaaatcatgaagttcaagcctgactgtgtaaacgttgaagaggtccttccacactggttgtcttggcttccactacatgaagataaagaagaagctgttcagactttcaattatctgtgtgacctgattgaaagtaatcatccaattgttcttggcccaaacaataccaatctgcccaaaatatttagtataattgcggaaggagaaatgcacgaggcaattaaacatgaagatccttgtgccaaacgtctggccaatgtcgttcgccaagtacagacttctggaggactgtggactgagtgcatagcacagctcagtcctgagcagcaggccgccattcaggagctcctgaactctgcgtga

SEQ ID NO: 819 - DNA, 1991 bp, Homo sapiens
acaggggtgaaggcccagagaccagcagaacggcatcccagccacgacggccactttgctctgtctgctgtccgccacggccctgctctgttccctgggacacccccgcccccacctcctcaggctgcctgatctgcccagctttccagctttcctctggattccggcctctggtcatccctccccaccctctctccaaggccctctcctggtctcccttcttctagaaccccttcctccacctccctctctgcagaacttctcctttaccccccaccccccaccactgccccctttccttttctgacctccttttggagggctcagcgctgcccagaccataggagagatgtgggaggctcagttcctgggcttgctgtttctgcagccgctttgggtggctccagtgaagcctctccagccaggggctgaggtcccggtggtgtgggcccaggagggggctcctgcccagctcccctgcagccccacaatccccctccaggatctcagccttctgcgaagagcaggggtcacttggcagcatcagccagacagtggcccgcccgctgccgcccccggccatcccctggcccccggccctcacccggcggcgccctcctcctgggggcccaggccccgccgctacacggtgctgagcgtgggtcccggaggcctgcgcagcgggaggctgcccctgcagccccgcgtccagctggatgagcgcggccggcagcgcggggacttctcgctatggctgcgcccagcccggcgcgcggacgccggcgagtaccgcgccgcggtgcacctcagggaccgcgccctctcctgccgcctccgtctgcgcctgggccaggcctcgatgactgccagccccccaggatctctcagagcctccgactgggtcattttgaactgctccttcagccgccctgaccgcccagcctctgtgcattggttccggaaccggggccagggccgagtccctgtccgggagtccccccatcaccacttagcggaaagcttcctcttcctgccccaagtcagccccatggactctgggccctggggctgcatcctcacctacagagatggcttcaacgtctccatcatgtataacctcactgttctgggtctggagcccccaactcccttgacagtgtacgctggagcaggttccagggtggggctgccctgccgcctgcctgctggtgtggggacccggtctttcctcactgccaagtggactcctcctgggggaggccctgacctcctggtgactggagacaatggcgactttacccttcgactagaggatgtgagccaggcccaggctgggacctacacctgccatatccatctgcaggaacagcagctcaatgccactgtcacattggcaatcatcacagtgactcccaaatcctttgggtcacctggatccctggggaagctgctttgtgaggtgactccagtatctggacaagaacgctttgtgtggagctctctggacaccccatcccagaggagtttctcaggaccttggctggaggcacaggaggcccagctcctttcccagccttggcaatgccagctgtaccagggggagaggcttcttggagcagcagtgtacttcacagagctgtctagcccaggtgcccaacgctctgggagagccccaggtgccctcccagcaggccacctcctgctgtttctcacccttggtgtcctttctctgctccttttggtgactggagcctttggctttcacctttggagaagacagtggcgaccaagacgattttctgccttagagcaagggattcaccctccgcaggctcagagcaagatagaggagctggagcaagaaccggagccggagccggagccggaaccggagcccgagcccgagcccgagccggagcagctctgacctggagctgaggcagccagcagatctcagcagcccagtccaaataaacgtcctgtctagcagc

SEQ ID NO: 820 - DNA, 6297 bp, Homo sapiens
agaaggtaaaaagggagtggtgagaatgaatgtgagaaggaagccaggacagcgcagtccccagtcccgaacggccagggagaggaggtggcctagcgctggcggggctcaccccaatccgtctgccttttgatgccgtactctgctggttgcgcagccacctcgggatactgcacacggagaggagggaaaataagcgaggcaccgccgcaccacgcgggagacctacggagacccacagcgcccgagccctggaagagcactactggatgtcagcggagaaatggctttgagctcagcctggcgctcggttctgcctctgtggctcctctggagcgctgcctgctcccgcgccgcgtccggggacgacaacgcttttccttttgacattgaagggagctcagcggttggcaggcaagacccgcctgagacgagcgaaccccgcgtggctctgggacgcctgccgcctgcggccgagaaatgcaatgctggattctttcacaccctgtcgggagaatgtgtgccctgcgactgtaatggcaattccaacgagtgtttggacggctcaggatactgtgtgcactgccagcggaacacaacaggagagcactgtgaaaagtgtctggatggttatatcggagattccatcaggggagcaccccaattctgccagccgtgcccctgtcccctgccccacttggccaattttgcagaatcctgctataggaaaaatggagctgttcggtgcatttgtaacgaaaattatgctggacctaactgtgaaagatgtgctcccggttactatggaaaccccttactcattggaagcacctgtaagaaatgtgactgcagtggaaattcagatcccaacctgatctttgaagattgtgatgaagtcactggccagtgtaggaattgcttacgcaacaccaccggattcaagtgtgaacgttgcgctcctggctactatggggacgccaggatagccaagaactgtgcagtgtgcaactgcgggggaggcccatgtgacagtgtaaccggagaatgcttggaagaaggttttgaaccccctacaggctgtgataagtgcgtctgggacctgactgatgacctgcggttagcagcgctctccatcgaggaaggcaaatccggggtgctgagcgtatcctctggggccgccgctcataggcacgtgaatgaaatcaacgccaccatctacctcctcaaaacaaaattgtcagaaagagaaaaccaatacgccctaagaaagatacaaatcaacaatgctgagaacacgatgaaaagccttctgtctgacgtagaggaattagttgaaaaggaaaatcaagcctccagaaaaggacaacttgttcagaaggaaagcatggacaccattaaccacgcaagtcagctggtagagcaagcccatgatatgagggataaaatccaagagatcaacaacaagatgctctattatggggaagagcatgaacttagccccaaggaaatctctgagaagctggtgttggcccagaagatgcttgaagagattagaagccgtcaaccatttttcacccaacgggagctcgtggatgaggaggcagatgaggcttacgaactactgagccaggctgagagctggcagcggctgcacaatgagacccgcactctgtttcctgtcgtcctggagcagctggatgactacaatgctaagttgtcagatctccaggaagcacttgaccaggcccttaaccatgtcagggatgccgaagacatgaacagggccacagcagccaggcagcgggaccatgagaaacaacaggaaagagtgagggaacaaatggaagtggtgaacatgtctctgagcacatctgcggactctctgacaacacctcgtctaactctttcagaacttgatgatataataaagaatgcgtcagggatttatgcagaaatagatggagccaaaagtgaactacaagtaaaactatctaacctaagtaacctcagccatgatttagtccaagaagctattgaccatgcacaggaccttcaacaagaagctaatgaattgagcaggaagttgcacagttcagatatgaacgggctggtacagaaggctttggatgcatcaaatgtctatgaaaatattgttaattatgttagtgaagccaatgaaacagcagaatttgctttgaacaccactgaccgaatttatgatgcggtgagtgggattgatactcaaatcatttaccataaagatgaaagtgagaacctcctcaatcaagccagagaactgcaagcaaaggcagagtctagcagtgatgaagcagtggctgacactagcaggcgtgtgggtggagccctagcaaggaaaagtgcccttaaaaccagactcagtgatgccgttaagcaactacaagcagcagagagaggggatgcccagcagcgcctggggcagtctagactgatcaccgaggaagccaacaggacgacgatggaggtgcagcaggccactgcccccatggccaacaatctaaccaactggtcacagaatcttcaacattttgactcttctgcttacaacactgcagtgaactctgctagggatgcagtaagaaatctgaccgaggttgtccctcagctcctggatcagcttcgtacggttgagcagaagcgacctgcaagcaacgtttctgccagcatccagaggatccgagagctcattgctcagaccagaagtgttgccagcaagatccaagtctccatgatgtttgatggccagtcagctgtggaagtgcactcgagaaccagtatggatgacttaaaggccttcacgtctctgagcctgtacatgaaaccccctgtgaagcggccggaactgaccgagactgcagatcagtttatcctgtacctcggaagcaaaaacgccaaaaaagagtatatgggtcttgcaatcaaaaatgataatctggtatacgtctataatttgggaactaaagatgtggagattcccctggactccaagcccgtcagttcctggcctgcttacttcagcattgtcaagattgaaagggtgggaaaacatggaaaggtgtttttaacagtcccgagtctaagtagcacagcagaggaaaagttcattaaaaagggggaattttcgggagatgactctctgctggacctggaccctgaggacacagtgttttatgttggtggagtgccttccaacttcaagctccctaccagcttaaacctgcctggctttgttggctgcctggaactggccactttgaataatgatgtgatcagcttgtacaactttaagcacatctataatatggacccctccacatcagtgccatgtgcccgagataagctggccttcactcagagtcgggctgccagttacttcttcgatggctccggttatgccgtggtgagagacatcacaaggagagggaaatttggtcaggtgactcgctttgacatagaagttcgaacaccagctgacaacggccttattctcctgatggtcaatggaagtatgtttttcagactggaaatgcgcaatggttacctacatgtgttctatgattttggattcagcagtggccgtgtgcatcttgaagatacgttaaagaaagctcaaattaatgatgcaaaataccatgagatctcaatcatttaccacaatgataagaaaatgatcttggtagttgacagaaggcatgtcaagagcatggataatgaaaagatgaaaataccttttacagatatatacattggaggagctcctccagaaatcttacaatccagggccctcagagcacaccttcccctagatatcaacttcagaggatgcatgaagggcttccagttccaaaagaaggacttcaatttactggagcagacagaaaccctgggagttggttatggatgcccagaagactcacttatatctcgcagagcatatttcaatggacagagcttcattgcttcaattcagaaaatatctttctttgatggctttgaaggaggttttaatttccgaacattacaaccaaatgggttactattctattatgcttcagggtcagacgtgttctccatctcactggataatggtactgtcatcatggatgtaaagggaatcaaagttcagtcagtagataagcagtacaatgatgggctgtcccacttcgtcattagctctgtctcacccacaagatatgaactgatagtagataaaagcagagttgggagtaagaatcctaccaaagggaaaatagaacagacacaagcaagtgaaaagaagttttacttcggtggctcaccaatcagtgctcagtatgctaatttcactggctgcataagtaatgcctactttaccagggtggatagagatgtggaggttgaagatttccaacggtatactgaaaaggtccacacttctctttatgagtgtcccattgagtcttcaccattgtttctcctccataaaaaaggaaaaaatttatccaagcctaaagcaagtcagaataaaaagggagggaaaagtaaagatgcaccttcatgggatcctgttgctctgaaactcccagagcggaatactccaagaaactctcattgccacctttccaacagccctagagcaatagagcacgcctatcaatatggaggaacagccaacagccgccaagagtttgaacacttaaaaggagattttggtgccaaatctcagttttccattcgtctgagaactcgttcctcccatggcatgatcttctatgtctcagatcaagaagagaatgacttcatgactctatttttggcccatggccgcttggtttacatgtttaatgttggtcacaaaaaactgaagattagaagccaggagaaatacaatgatggcctgtggcatgatgtgatatttattcgagaaaggagcagtggccgactggtaattgatggtctccgagtcctagaagaaagtcttcctcctactgaagctacctggaaaatcaagggtcccatttatttgggaggtgtggctcctggaaaggctgtgaaaaatgttcagattaactccatctacagttttagtggctgtctcagcaatctccagctcaatggggcctccatcacctctgcttctcagacattcagtgtgaccccttgctttgaaggccccatggaaacaggaacttacttttcaacagaaggaggatacgtggttctagatgaatctttcaatattggattgaagtttgaaattgcatttgaagtccgtcccagaagcagttccggaaccctggtccacggccacagtgtcaatggggagtacctaaatgttcacatgaaaaatggacaggtcatagtgaaagtcaataatggcatcagagatttttccacctcagtaacacccaagcagagtctctgtgatggcagatggcacagaattacagttattagagattctaatgtggttcagttggatgtggactctgaagtgaaccatgtggttggacccctgaatccaaaaccaattgatcacagggagcctgtgtttgttggaggtgttccagaatctctactgacaccacgcttggcccccagcaaacccttcacaggctgcatacgccactttgtgattgatggacacccagtgagcttcagtaaagcagccctggtcagcggcgccgtaagcatcaactcctgtccagcagcctgacatgacagagcacagctgcccaaatacaaagttctttagagcactgaaagaaacacaaagccagccaggaggaacagtaactcttccttcgggtggaagctttcatcgagttgaacaggacttaaacgaatcatcagggaccggatatttcttatttctcatttggattcttaaccttgaatccaaagtgtctgcaatggacaacaattgaaggagaggcaaacttacttgtattgagagcacacgcaattcctactggtgaaattactgtttctgtttctaataaaatagaagggattccaaataaacacttgcacacatttttgaagtgcggctagattctcagattcacctttcttccagggaagataactttcaatctatataaaaatctctgtcctaaaactacctttctttattttgaagagacttactaacttacatataatctaaattagatgatagatttctttttagcccttttgtttggtctatcagtataagaagaatattttaggtttatagctgaagttatcaaggtttaataaagtaaatttctaaca

SEQ ID NO: 821 - DNA, 5815 bp, Homo sapiens
gaaggcagtttccggagggaaggggtagggttggggtgggggcgctctccgcccggtgttgcgctccttcccagaatccgctccggcctttccttcctgccgcgattcccaactttgctcaaagtcgctggactctaagctgtcggagggaccgctggacagacctgggaactgacagagggcctggagggaaacaggccaaagacccacaggcagagttgacacggaaccccaaagcaaggaggagggctcgggccgagaccgttcacctccccttatccctgttcccctcttcaggatggagctgacctcaagggaaagagggaggggacagcctctgccctgggaacttcgactgggcctactgctaagcgtgctggctgccacactggcacaggcccctgccccggatgtgcctggctgttccaggggaagctgctaccccgccacgggcgacctgctggtgggccgagctgacagactgactgcctcatccacttgtggcctgaatggcccccagccctactgcatcgtcagtcacctgcaggacgaaaagaagtgcttcctttgtgactcccggcgccccttctctgctagagacaacccacacagccatcgcatccagaatgtagtcaccagctttgcaccacagcggcgggcagcctggtggcagtcagagaatggtatccctgcggtcaccatccagctggacctggaggctgagtttcatttcacacacctcattatgaccttcaagacatttcgccctgctgccatgctggtggaacgctcagcagactttggccgaacctggcatgtgtaccgatatttctcctatgactgtggggctgacttcccaggagtcccactagcacccccacggcactgggatgatgtagtctgtgagtcccgctactcagagattgagccatccactgaaggcgaggtcatctatcgtgtgctggaccctgccatccctatcccagacccctacagctcacggattcagaacctgttgaagatcaccaacctacgggtgaacctgactcgtctacacacgttgggagacaacctactcgacccacggagggagatccgagagaagtactactatgccctctatgagctggttgtacgtggcaactgcttctgctacggacacgcctcagagtgtgcacccgccccaggggcaccagcccatgctgagggcatggtgcacggagcttgcatctgcaaacacaacacacgtggcctcaactgcgagcagtgtcaggatttctatcgtgacctgccctggcgtccggctgaggacggccatagtcatgcctgtaggaagtgtgagtgccatgggcacacccacagctgccacttcgacatggccgtatacctggcatctggcaatgtgagtggaggtgtgtgtgatggatgtcagcataacacagctgggcgccactgtgagctctgtcggcccttcttctaccgtgacccaaccaaggacctgcgggatccggctgtgtgccgctcctgtgattgtgaccccatgggttctcaagacggtggtcgctgtgattcccatgatgaccctgcactgggactggtctccggccagtgtcgctgcaaagaacatgtggtgggcactcgctgccagcaatgccgtgatggcttctttgggctcagcatcagtgaccgtctgggctgccggcgatgtcaatgtaatgcacggggcacagtgcctgggagcactccttgtgaccccaacagtggatcctgttactgcaaacgtctagtgactggacgtggatgtgaccgctgcctgcctggccactggggcctgagccacgacctgctcggctgccgcccctgtgactgcgacgtgggtggtgctttggatccccagtgtgatgagggcacaggtcaatgccactgccgccagcacatggttgggcgacgctgtgagcaggtgcaacctggctacttccggcccttcctggaccacctaatttgggaggctgaggacacccgagggcaggtgctcgatgtggtggagcgcctggtgacccccggggaaactccatcctggactggctcaggcttcgtgcggctacaggaaggtcagaccctggagttcctggtggcctctgtgccgaaggctatggactatgacctgctgctgcgcttagagccccaggtccctgagcaatgggcagagttggaactgattgtgcagcgtccagggcctgtgcctgcccacagcctgtgtgggcatttggtgcccaaggatgatcgcatccaagggactctgcaaccacatgccaggtacttgatatttcctaatcctgtctgccttgagcctggtatctcctacaagctgcatctgaagctggtacggacagggggaagtgcccagcctgagactccctactctggacctggcctgctcattgactcgctggtgctgctgccccgtgtcctggtgctagagatgtttagtgggggtgatgctgctgccctggagcgccaggccacctttgaacgctaccaatgccatgaggagggtctggtgcccagcaagacttctccctctgaggcctgcgcacccctcctcatcagcctgtccaccctcatctacaatggtgccctgccatgtcagtgcaaccctcaaggttcactgagttctgagtgcaaccctcatggtggtcagtgcctgtgcaagcctggagtggttgggcgccgctgtgacctctgtgcccctggctactatggctttggccccacaggctgtcaagcctgccagtgcagccacgagggggcactcagcagtctctgtgaaaagaccagtgggcaatgtctctgtcgaactggtgcctttgggcttcgctgtgaccgctgccagcgtggccagtggggattccctagctgccggccatgtgtctgcaatgggcatgcagatgagtgcaacacccacacaggcgcttgcctgggctgccgtgatcacacagggggtgagcactgtgaaaggtgcattgctggtttccacggggacccacggctgccatatgggggccagtgccggccctgtccctgtcctgaaggccctgggagccaacggcactttgctacttcttgccaccaggatgaatattcccagcagattgtgtgccactgccgggcaggctatacggggctgcgatgtgaagcttgtgcccctgggcactttggggacccatcaaggccaggtggccggtgccaactgtgtgagtgcagtgggaacattgacccaatggatcctgatgcctgtgacccccacacgggccaatgcctgcgctgtttacaccacacagagggtccacactgtgcccactgcaagcctggcttccatgggcaggctgcccgacagagctgtcaccgctgcacatgcaacctgctgggcacaaatccgcagcagtgcccatctcctgaccagtgccactgtgatccaagcagtgggcagtgcccatgcctccccaatgtccagggccctagctgtgaccgctgtgcccccaacttctggaacctcaccagtggccatggttgccagccttgtgcctgccacccaagccgggccagaggccccacctgcaacgagttcacagggcagtgccactgccgtgccggctttggagggcggacttgttctgagtgccaagagctccactggggagaccctgggttgcagtgccatgcctgtgattgtgactctcgtggaatagatacacctcagtgtcaccgcttcacaggtcactgcagctgccgcccaggggtgtctggtgtgcgctgtgaccagtgtgcccgtgcgttctcaggaatctttcctgcctgccatccctgccatgcatgcttcggggattgggaccgagtggtgcaggacttggcagcccgtacacagcgcctagagcagcgggcgcaggagttgcaacagacgggtgtgctgggtgcctttgagagcagcttctggcacatgcaggagaagctgggcattgtgcagggcatcgtaggtgcccgcaacacctcagccgcctccactgcacagcttgtggaggccacagaggagctgcggcgtgaaattggggaggccactgagcacctgactcagctcgaggcagacctgacagatgtgcaagatgagaacttcaatgccaaccatgcactaagtggtctggagcgagataggcttgcacttaatctcacactgcggcagctcgaccagcatcttgacttgctcaaacattcaaacttcctgggtgcctatgacagcatccggcatgcccatagccagtctgcagaggcagaacgtcgtgccaatacctcagccctggcagtacctagccctgtgagcaactcggcaagtgctcggcatcggacagaggcactgatggatgctcagaaggaggacttcaacagcaaacacatggccaaccagcgggcacttggcaagctctctgcccatacccacaccctgagcctgacagacataaatgagctggtgtgtggggcaccaggggatgcaccctgtgctacaagcccttgtgggggtgccggctgtcgagatgaggatgggcagccgcgctgtgggggcctcagctgcaatggggcagcggctacagcagacctagcactgggccgggcccggcacacacaggcagagctgcagcgggcactggcagaaggtggtagcatcctcagcagagtggctgagactcgtcggcaggcaagcgaggcacagcagcgggcccaggcagccctggacaaggctaatgcttccaggggacaggtggaacaggccaaccaggaacttcaagaacttatccagagtgtgaaggacttcctcaaccaggagggggctgatcctgatagcattgaaatggtggccacacgggtgctagagctctccatcccagcttcagctgagcagatccagcacctggcgggcgcgattgcagagcgagtccggagcctggcagatgtggatgcgatcctggcacgtactgtaggagatgtgcgtcgtgccgagcagctactgcaggatgcacggcgggcaaggagctgggctgaggatgagaaacagaaggcagagacagtacaggcagcactggaggaggcccagcgggcacagggtattgcccagggtgccatccggggggcagtggctgacacacgggacacagagcagaccctgtaccaggtacaggagaggatggcaggtgcagagcgggcactgagctctgcaggtgaaagggctcggcagttggatgctctcctggaggctctgaaattgaaacgggcaggaaatagtctggcagcctctacagcagaagaaacggcaggcagtgcccagggtcgtgcccaggaggctgagcagctgctacgcggtcctctgggtgatcagtaccagacggtgaaggccctagctgagcgcaaggcccaaggtgtgctggctgcacaggcaagggcagaacaactgcgggatgaggctcgggacctgttgcaagccgctcaggacaagctgcagcggctacaggaattggaaggcacctatgaggaaaatgagcgggcactggagagtaaggcagcccagttggacgggttggaggccaggatgcgcagcgtgcttcaagccatcaacttgcaggtgcagatctacaacacctgccagtgacccctgcccaaggcctaccccagttcctagcactgccccacatgcatgtctgcctatgcactgaagagctcttggcccggcagggcccccaataaaccagtgtgaacccccaaaaaaaaa

SEQ ID NO: 822 - DNA, 1868 bp, Homo sapiens
ccgattcctggcttttgcaaggctgtggtcggtggtcatcagtgctcttgacccaggtccagcgagccttttccctggtgttgcagctgttgttgtaccgccgccgtcgccgccgtcgccgcctgctctgcggggtcatggtgtgcttccgcctcttcccggttccgggctcagggctcgttctggtctgcctagtcctgggagctgtgcggtcttatgcattggaacttaatttgacagattcagaaaatgccacttgcctttatgcaaaatggcagatgaatttcacagtacgctatgaaactacaaataaaacttataaaactgtaaccatttcagaccatggcactgtgacatataatggaagcatttgtggggatgatcagaatggtcccaaaatagcagtgcagttcggacctggcttttcctggattgcgaattttaccaaggcagcatctacttattcaattgacagcgtctcattttcctacaacactggtgataacacaacatttcctgatgctgaagataaaggaattcttactgttgatgaacttttggccatcagaattccattgaatgacctttttagatgcaatagtttatcaactttggaaaagaatgatgttgtccaacactactgggatgttcttgtacaagcttttgtccaaaatggcacagtgagcacaaatgagttcctgtgtgataaagacaaaacttcaacagtggcacccaccatacacaccactgtgccatctcctactacaacacctactccaaaggaaaaaccagaagctggaacctattcagttaataatggcaatgatacttgtctgctggctaccatggggctgcagctgaacatcactcaggataaggttgcttcagttattaacatcaaccccaatacaactcactccacaggcagctgccgttctcacactgctctacttagactcaatagcagcaccattaagtatctagactttgtctttgctgtgaaaaatgaaaaccgattttatctgaaggaagtgaacatcagcatgtatttggttaatggctccgttttcagcattgcaaataacaatctcagctactgggatgcccccctgggaagttcttatatgtgcaacaaagagcagactgtttcagtgtctggagcatttcagataaatacctttgatctaagggttcagcctttcaatgtgacacaaggaaagtattctacagctcaagactgcagtgcagatgacgacaacttccttgtgcccatagcggtgggagctgccttggcaggagtacttattctagtgttgctggcttattttattggtctcaagcaccatcatgctggatatgagcaattttagaatctgcaacctgattgattatataaaaatacatgcaaataacaagattttcttacctctcagttgttgaaacactttgcttcttaaaattgatatgttgaaactttaattcttttatcaatcccagcattttgagatcagtctttattaataaaacctgttctctttaatcagcttaaaatccaaagtgtcatatttactggtcctggagacaaacttgttcaaaagaacatcaacgtgcaatgttttaaggtctatcttaagaagccctggccaaattttgatcctaaccttgaagtatgccttgaacttattaacatggccattataagaataaaatatgtagttgtgtcttaatggaattaataaatgtcatttcactactggtgttctgttttcaatgtataaggactatagtgatttaaactcatcaatgtgcctttgcataaagttgattaaataaatattgatgtggtataaatgcccatcagatatgct

SEQ ID NO: 823 - DNA, 1039 bp, Homo sapiens
tgcctgtcttttccgtgctacctgcagaggggtccatacggcgttgttctggattcccgtcgtaacttaaagggaaactttcacaatgtccggagcccttgatgtcctgcaaatgaaggaggaggatgtccttaagttccttgcagcaggaacccacttaggtggcaccaatcttgacttccagatggaacagtacatctataaaaggaaaagtgatggcatctatatcataaatctcaagaggacctgggagaagcttctgctggcagctcgtgcaattgttgccattgaaaaccctgctgatgtcagtgttatatcctccaggaatactggccagagggctgtgctgaagtttgctgctgccactggagccactccaattgctggccgcttcactcctggaaccttcactaaccagatccaggcagccttccgggagccacggcttcttgtggttactgaccccagggctgaccaccagcctctcacggaggcatcttatgttaacctacctaccattgcgctgtgtaacacagattctcctctgcgctatgtggacattgccatcccatgcaacaacaagggagctcactcagtgggtttaatgtggtggatgctggctcgggaagttctgcgcatgcgtggcaccatttcccgtgaacacccatgggaggtcatgcctgatctgtacttctacagagatcctgaagagattgaaaaagaagagcaggctgctgctgagaaggcagtgaccaaggaggaatttcagggtgaatggactgctcccgctcctgagttcactgctactcagcctgaggttgcagactggtctgaaggtgtacaggtgccctctgtgcctattcagcaattccctactgaagactggagcgctcagcctgccacggaagactggtctgcagctcccactgctcaggccactgaatgggtaggagcaaccactgactggtcttaagctgttcttgcataggctcttaagcagcatggaaaaatggttgatggaaaataaacatcagtttct

SEQ ID NO: 824 - DNA, 770 bp, Homo sapiens
cagcaagcgacctgtcaggcggccgtggactcagactccggagatgaagcccctgctcctggccgtcagccttggcctcattgctgccctgcaggcccaccacctcctggcttcagacgaggagattcaggatgtgtcagggacgtggtatctgaaggccatgactgtggacagggagttccctgagatgaatctggaatcggtgacacccatgaccctcacgaccctggaagggggcaacctggaagccaaggtcaccatgctgataagtggccggtgccaggaggtgaaggccgtcctggagaaaactgacgagccgggaaaatacacggccgacgggggcaagcacgtggcatacatcatcaggtcgcacgtgaaggaccactacatcttttactgtgagggcgagctgcacgggaagccggtccgaggggtgaagctcgtgggcagagaccccaagaacaacctggaagccttggaggactttgagaaagccgcaggagcccgcggactcagcacggagagcatcctcatccccaggcagagcgaaacctgctctccagggagcgattaggggcaggggacaccttggctcctcagcagccaaggacggcaccatccagcacctccgtcattcacagggacatggaaaaagctccccacccctgcagaacgcggctggctgcaccccttcctaccaccccccgccttccccctgccctgcgccccctctcctggttctccataaagagcttcagcagttaaaaaaa

SEQ ID NO: 825 - DNA, 2976 bp, Homo sapiens
ggcacgagggtgcagaggcaaccaaaaaggaacccacacctccctccagggcccggggcgctgtcagacggggcagcaaccaggagattccctgggcctgcaggaagcccttccgcggaccgaaagattgttccccattttggagatgaagaaactgagactcaaagcagctgagtgaccttcccaaggacacacactgaactgggcggtgatcaggatctgaatgcacagggcgggtgttcagtgattgtttactacgttgaacgtgacctccaggaaagcagttctggccgagatcccctgacaacgcaaagcaagaagtaacgtggaaggaggctccccaagctggctggccattttgctgctgtgtgtggaggtgctgtcagtggcatgcccaaacccaaagctggaagaggaataaattacaagtggtcaaggttgctgctgtgtgtggaggtgctgtcagtggcatgcccaaacccaaagctggaagaggaataaattacaagtggtcaaggttgcatccttttgagcccaggacctgcttgtaagccgagagggttctctggccctaatctagccaagcaccatggagagaatcagtgccttcttcagctctatctgggacaccatcttgaccaaacaccaagaaggcatctacaacaccatctgcctgggagtcctcctgggcctgccactcttggtgatcatcacactcctcttcatctgttgccattgctgctggagcccaccaggcaagaggggccagcagccagagaagaacaagaagaaaaagaagaagaagaagaagaaggatgaagaagacctctggatctctgctcaacccaagcttctccagatggagaagagaccatcactgcctgtttagttaggcaggaagcagaggtgtttcctttctggggctaagcctccttctgaccacacacagacatttcaggaacccctgaaataatgcactatgtccatgtccacagagtaactactcaaccaaggaacaaacctcagactaagtgtcccagtggagggaagtcccagggaccacgtggacaattcttggatactgtcttggcagctatgtgtccaatagcaatgctccttactgcagacccaggcatgcctcccacctgtctctggcataccccacatgcaaagcacaaagaacatttatccatacatctcaatatggttcccaagtgtgtgcacatgcacgtaacacacacacacacaaattcaggtagcaggtacgtgggcaagtatattctgctcatcaaatggtcattggctatgtactttgtgcagggaagtacattatctacagtcacaaaaatgtctcatgggaaagccttgccagattcagacacatatatacaatttcctaaccagcaaggcccccatacaccatctattccataaaccactcaggttacagatgcatgctttcctatttctaactctacacataaacttttactggaagtactcataattggacattccagcaacctgctacagtccccacccttgtgtgtcttgatacagacacaccaagtttctgtgcctctgacccctcacctgtgccaagatgtttaaagtgtgatggttcaaaattcaaaaaaaaaaaaaaaaaactcgagaccggcgccggaggagacgcacgcagctgactttgtcttctccgcacgactgttacagaggtctccagagccttctctctcctgtgcaaaatggcaactcttaaggaaaaactcattgcaccagttgcggaagaagaggcaacagttccaaacaataagatcactgtagtgggtgttggacaagttggtatggcgtgtgctatcagcattctgggaaagtctctggctgatgaacttgctcttgtggatgttttggaagataagcttaaaggagaaatgatggatctgcagcatgggagcttatttcttcagacacctaaaattgtggcagataaagattattctgtgaccgccaattctaagattgtagtggtaactgcaggagtccgtcagcaagaaggggagagtcggctcaatctggtgcagagaaatgttaatgtcttcaaattcattattcctcagatcgtcaagtacagtcctgattgcatcataattgtggtttccaacccagtggacattcttacgtatgttacctggaaactaagtggattacccaaacaccgcgtgattggaagtggatgtaatctggattctgctagatttcgctaccttatggctgaaaaacttggcattcatcccagcagctgccatggatggattttgggggaacatggcgactcaagtgtggctgtgtggagtggtgtgaatgtggcaggtgtttctctccaggaattgaatccagaaatgggaactgacaatgatagtgaaaattggaaggaagtgcataagatggtggttgaaagtgcctatgaagtcatcaagctaaaaggatataccaactgggctattggattaagtgtggctgatcttattgaatccatgttgaaaaatctatccaggattcatcccgtgtcaacaatggtaaaggggatgtatggcattgagaatgaagtcttcctgagccttccatgtatcctcaatgcccggggattaaccagcgttatcaaccagaagctaaaggatgatgaggttgctcagctcaagaaaagtgcagataccctgtgggacatccagaaggacctaaaagacctgtgactagtgagctctaggctgtagaaatttaaaaactacaatgtgattaactcgagcctttagttttcatccatgtacatggatcacagtttgctttgatcttcttcaatatgtgaatttgggctcacagaatcaaagcctatgcttggtttaatgcttgcaatctgagctcttgaacaaataaaattaactattgtagtgtgaaaaaaaaaaaaaaaaaaaaaaaaaa

SEQ ID NO: 826 - DNA, 526 bp, Homo sapiens
atctctctcgggtggagtccttctgacagctggtgcgcctgcccgggaacatcctcctggactcaatcatggcttgtggtctggtcgccagcaacctgaatctcaaacctggagagtgccttcgagtgcgaggcgaggtggctcctgacgctaagagcttcgtgctgaacctgggcaaagacagcaacaacctgtgcctgcacttcaaccctcgcttcaacgcccacggcgacgccaacaccatcgtgtgcaacagcaaggacggcggggcctgggggaccgagcagcgggaggctgtctttcccttccagcctggaagtgttgcagaggtgtgcatcaccttcgaccaggccaacctgaccgtcaagctgccagatggatacgaattcaagttccccaaccgcctcaacctggaggccatcaactacatggcagctgacggtgacttcaagatcaaatgtgtggcctttgactgaaatcagccagcccatggcccccaataaaggcagctgcctctgctcccctg

SEQ ID NO: 827 - DNA, 914 bp, Homo sapiens
ccagccaacgagcggaaaatggcagacaatttttcgctccatgatgcgttatctgggtctggaaacccaaaccctcaaggatggcctggcgcatgggggaaccagcctgctggggcagggggctacccaggggcttcctatcctggggcctaccccgggcaggcacccccaggggcttatcctggacaggcacctccaggcgcctaccatggagcacctggagcttatcccggagcacctgcacctggagtctacccagggccacccagcggccctggggcctacccatcttctggacagccaagtgcccccggagcctaccctgccactggcccctatggcgcccctgctgggccactgattgtgccttataacctgcctttgcctgggggagtggtgcctcgcatgctgataacaattctgggcacggtgaagcccaatgcaaacagaattgctttagatttccaaagagggaatgatgttgccttccactttaacccacgcttcaatgagaacaacaggagagtcattgtttgcaatacaaagctggataataactggggaagggaagaaagacagtcggttttcccatttgaaagtgggaaaccattcaaaatacaagtactggttgaacctgaccacttcaaggttgcagtgaatgatgctcacttgttgcagtacaatcatcgggttaaaaaactcaatgaaatcagcaaactgggaatttctggtgacatagacctcaccagtgcttcatataccatgatataatctgaaaggggcagattaaaaaaaaaaaaaaagaatctaaaccttacatgtgtaaaggtttcatgttcactgtgagtgaaaatttttacattcatcaatatccctcttgtaagtcatctacttaataaatattacagtgaaag

SEQ ID NO: 828 - DNA, 14896 bp, Homo sapiens
cagcggtgcgagctccaggcccatgcactgaggaggcggaaacaaggggagcccccagagctccatcaagccccctccaaaggctcccctacccggtccacgccccccaccccccctccccgcctcctcccaattgtgcatttttgcagccggaggcggctccgagatggggctgtgagcttcgcccggggagggggaaagagcagcgaggagtgaagcgggggggtggggtgaagggtttggatttcggggcagggggcgcacccccgtcagcaggccctccccaaggggctcggaactctacctcttcacccacgcccctggtgcgctttgccgaaggaaagaataagaacagagaaggaggagggggaaaggaggaaaagggggaccccccaactggggggggtgaaggagagaagtagcaggaccagaggggaaggggctgctgcttgcatcagcccacaccatgctgaccccgccgttgctcctgctgctgcccctgctctcagctctggtcgcggcggctatcgacgcccctaagacttgcagccccaagcagtttgcctgcagagatcaaataacctgtatctcaaagggctggcggtgcgacggtgagagggactgcccagacggatctgacgaggcccctgagatttgtccacagagtaaggcccagcgatgccagccaaacgagcataactgcctgggtactgagctgtgtgttcccatgtcccgcctctgcaatggggtccaggactgcatggacggctcagatgaggggccccactgccgagagctccaaggcaactgctctcgcctgggctgccagcaccattgtgtccccacactcgatgggcccacctgctactgcaacagcagctttcagcttcaggcagatggcaagacctgcaaagattttgatgagtgctcagtgtacggcacctgcagccagctatgcaccaacacagacggctccttcatatgtggctgtgttgaaggatacctcctgcagccggataaccgctcctgcaaggccaagaacgagccagtagaccggccccctgtgctgttgatagccaactcccagaacatcttggccacgtacctgagtggggcccaggtgtctaccatcacacctacgagcacgcggcagaccacagccatggacttcagctatgccaacgagaccgtatgctgggtgcatgttggggacagtgctgctcagacgcagctcaagtgtgcccgcatgcctggcctaaagggcttcgtggatgagcacaccatcaacatctccctcagtctgcaccacgtggaacagatggccatcgactggctgacaggcaacttctactttgtggatgacatcgatgataggatctttgtctgcaacagaaatggggacacatgtgtcacattgctagacctggaactctacaaccccaagggcattgccctggaccctgccatggggaaggtgtttttcactgactatgggcagatcccaaaggtggaacgctgtgacatggatgggcagaaccgcaccaagctcgtcgacagcaagattgtgtttcctcatggcatcacgctggacctggtcagccgccttgtctactgggcagatgcctatctggactatattgaagtggtggactatgagggcaagggccgccagaccatcatccagggcatcctgattgagcacctgtacggcctgactgtgtttgagaattatctctatgccaccaactcggacaatgccaatgcccagcagaagacgagtgtgatccgtgtgaaccgctttaacagcaccgagtaccaggttgtcacccgggtggacaagggtggtgccctccacatctaccaccagaggcgtcagccccgagtgaggagccatgcctgtgaaaacgaccagtatgggaagccgggtggctgctctgacatctgcctgctggccaacagccacaaggcgcggacctgccgctgccgttccggcttcagcctgggcagtgacgggaagtcatgcaagaagccggagcatgagctgttcctcgtgtatggcaagggccggccaggcatcatccggggcatggatatgggggccaaggtcccggatgagcacatgatccccattgaaaacctcatgaacccccgagccctggacttccacgctgagaccggcttcatctactttgccgacaccaccagctacctcattggccgccagaagattgatggcactgagcgggagaccatcctgaaggacggcatccacaatgtggagggtgtggccgtggactggatgggagacaatctgtactggacggacgatgggcccaaaaagacaatcagcgtggccaggctggagaaagctgctcagacccgcaagactttaatcgagggcaaaatgacacaccccagggctattgtggtggatccactcaatgggtggatgtactggacagactgggaggaggaccccaaggacagtcggcgtgggcggctggagagggcgtggatggatggctcacaccgagacatctttgtcacctccaagacagtgctttggcccaatgggctaagcctggacatcccggctgggcgcctctactgggtggatgccttctacgaccgcatcgagacgatactgctcaatggcacagaccggaagattgtgtatgaaggtcctgagctgaaccacgcctttggcctgtgtcaccatggcaactacctcttctggactgagtatcggagtggcagtgtctaccgcttggaacggggtgtaggaggcgcaccccccactgtgacccttctgcgcagtgagcggccccccatctttgagatccgaatgtatgatgcccagcagcagcaagttggcaccaacaaatgccgggtgaacaatggcggctgcagcagcctgtgcttggccacccctgggagccgccagtgcgcctgtgctgaggaccaggtgttggacgcagacggcgtcacttgcttggcgaacccatcctacgtgcctccaccccagtgccagccaggcgagtttgcctgtgccaacagccgctgcatccaggagcgctggaagtgtgacggagacaacgattgcctggacaacagtgatgaggccccagccctctgccatcagcacacctgcccctcggaccgattcaagtgcgagaacaaccggtgcatccccaaccgctggctctgcgacggggacaatgactgtgggaacagtgaagatgagtccaatgccacttgttcagcccgcacctgcccccccaaccagttctcctgtgccagtggccgctgcatccccatctcctggacgtgtgatctggatgacgactgtggggaccgctctgatgagtctgcttcgtgtgcctatcccacctgcttccccctgactcagtttacctgcaacaatggcagatgtatcaacatcaactggagatgcgacaatgacaatgactgtggggacaacagtgacgaagccggctgcagccactcctgttctagcacccagttcaagtgcaacagcgggcgttgcatccccgagcactggacctgcgatggggacaatgactgcggagactacagtgatgagacacacgccaactgcaccaaccaggccacgaggccccctggtggctgccacactgatgagttccagtgccggctggatggactatgcatccccctgcggtggcgctgcgatggggacactgactgcatggactccagcgatgagaagagctgtgagggagtgacccacgtctgcgatcccagtgtcaagtttggctgcaaggactcagctcggtgcatcagcaaagcgtgggtgtgtgatggcgacaatgactgtgaggataactcggacgaggagaactgcgagtccctggcctgcaggccaccctcgcacccttgtgccaacaacacctcagtctgcctgccccctgacaagctgtgtgatggcaacgacgactgtggcgacggctcagatgagggcgagctctgcgaccagtgctctctgaataacggtggctgcagccacaactgctcagtggcacctggcgaaggcattgtgtgttcctgccctctgggcatggagctggggcccgacaaccacacctgccagatccagagctactgtgccaagcatctcaaatgcagccaaaagtgcgaccagaacaagttcagcgtgaagtgctcctgctacgagggctgggtcctggaacctgacggcgagagctgccgcagcctggaccccttcaagccgttcatcattttctccaaccgccatgaaatccggcgcatcgatcttcacaaaggagactacagcgtcctggtgcccggcctgcgcaacaccatcgccctggacttccacctcagccagagcgccctctactggaccgacgtggtggaggacaagatctaccgcgggaagctgctggacaacggagccctgactagtttcgaggtggtgattcagtatggcctggccacacccgagggcctggctgtagactggattgcaggcaacatctactgggtggagagtaacctggatcagatcgaggtggccaagctggatgggaccctccggaccaccctgctggccggtgacattgagcacccaagggcaatcgcactggatccccgggatgggatcctgttttggacagactgggatgccagcctgccccgcattgaggcagcctccatgagtggggctgggcgccgcaccgtgcaccgggagaccggctctgggggctggcccaacgggctcaccgtggactacctggagaagcgcatcctttggattgacgccaggtcagatgccatttactcagcccgttacgacggctctggccacatggaggtgcttcggggacacgagttcctgtcgcacccgtttgcagtgacgctgtacgggggggaggtctactggactgactggcgaacaaacacactggctaaggccaacaagtggaccggccacaatgtcaccgtggtacagaggaccaacacccagccctttgacctgcaggtgtaccacccctcccgccagcccatggctcccaatccctgtgaggccaatgggggccagggcccctgctcccacctgtgtctcatcaactacaaccggaccgtgtcctgcgcctgcccccacctcatgaagctccacaaggacaacaccacctgctatgagtttaagaagttcctgctgtacgcacgtcagatggagatccgaggtgtggacctggatgctccctactacaactacatcatctccttcacggtgcccgacatcgacaacgtcacagtgctagactacgatgcccgcgagcagcgtgtgtactggtctgacgtgcggacacaggccatcaagcgggccttcatcaacggcacaggcgtggagacagtcgtctctgcagacttgccaaatgcccacgggctggctgtggactgggtctcccgaaacctgttctggacaagctatgacaccaataagaagcagatcaatgtggcccggctggatggctccttcaagaacgcagtggtgcagggcctggagcagccccatggccttgtcgtccaccctctgcgtgggaagctctactggaccgatggtgacaacatcagcatggccaacatggatggcagcaatcgcaccctgctcttcagtggccagaagggccccgtgggcctggctattgacttccctgaaagcaaactctactggatcagctccgggaaccataccatcaaccgctgcaacctggatgggagtgggctggaggtcatcgatgccatgcggagccagctgggcaaggccaccgccctggccatcatgggggacaagctgtggtgggctgatcaggtgtcggaaaagatgggcacatgcagcaaggctgacggctcgggctccgtggtccttcggaacagcaccaccctggtgatgcacatgaaggtctatgacgagagcatccagctggaccataagggcaccaacccctgcagtgtcaacaacggtgactgctcccagctctgcctgcccacgtcagagacgacccgctcctgcatgtgcacagccggctatagcctccggagtggccagcaggcctgcgagggcgtaggttcctttctcctgtactctgtgcatgagggaatcaggggaattcccctggatcccaatgacaagtcagatgccctggtcccagtgtccgggacctcgctggctgtcggcatcgacttccacgctgaaaatgacaccatctactgggtggacatgggcctgagcacgatcagccgggccaagcgggaccagacgtggcgtgaagacgtggtgaccaatggcattggccgtgtggagggcattgcagtggactggatcgcaggcaacatctactggacagaccagggctttgatgtcatcgaggtcgcccggctcaatggctccttccgctacgtggtgatctcccagggtctagacaagccccgggccatcaccgtccacccggagaaagggtacttgttctggactgagtggggtcagtatccgcgtattgagcggtctcggctagatggcacggagcgtgtggtgctggtcaacgtcagcatcagctggcccaacggcatctcagtggactaccaggatgggaagctgtactggtgcgatgcacggacagacaagattgaacggatcgacctggagacaggtgagaaccgcgaggtggttctgtccagcaacaacatggacatgttttcagtgtctgtgtttgaggatttcatctactggagtgacaggactcatgccaacggctctatcaagcgcgggagcaaagacaatgccacagactccgtgcccctgcgaaccggcatcggcgtccagcttaaagacatcaaagtcttcaaccgggaccggcagaaaggcaccaacgtgtgcgcggtggccaatggcgggtgccagcagctgtgcctgtaccggggccgtgggcagcgggcctgcgcctgtgcccacgggatgctggctgaagacggagcatcgtgccgcgagtatgccggctacctgctctactcagagcgcaccattctcaagagtatccacctgtcggatgagcgcaacctcaatgcgcccgtgcagcccttcgaggaccctgagcacatgaagaacgtcatcgccctggcctttgactaccgggcaggcacctctccgggcacccccaatcgcatcttcttcagcgacatccactttgggaacatccaacagatcaacgacgatggctccaggaggatcaccattgtggaaaacgtgggctccgtggaaggcctggcctatcaccgtggctgggacactctctattggacaagctacacgacatccaccatcacgcgccacacagtggaccagacccgcccaggggccttcgagcgtgagaccgtcatcactatgtctggagatgaccacccacgggccttcgttttggacgagtgccagaacctcatgttctggaccaactggaatgagcagcatcccagcatcatgcgggcggcgctctcgggagccaatgtcctgacccttatcgagaaggacatccgtacccccaatggcctggccatcgaccaccgtgccgagaagctctacttctctgacgccaccctggacaagatcgagcggtgcgagtatgacggctcccaccgctatgtgatcctaaagtcagagcctgtccaccccttcgggctggccgtgtatggggagcacattttctggactgactgggtgcggcgggcagtgcagcgggccaacaagcacgtgggcagcaacatgaagctgctgcgcgtggacatcccccagcagcccatgggcatcatcgccgtggccaacgacaccaacagctgtgaactctctccatgccgaatcaacaacggtggctgccaggacctgtgtctgctcactcaccagggccatgtcaactgctcatgccgagggggccgaatcctccaggatgacctcacctgccgagcggtgaattcctcttgccgagcacaagatgagtttgagtgtgccaatggcgagtgcatcaacttcagcctgacctgcgacggcgtcccccactgcaaggacaagtccgatgagaagccatcctactgcaactcccgccgctgcaagaagactttccggcagtgcagcaatgggcgctgtgtgtccaacatgctgtggtgcaacggggccgacgactgtggggatggctctgacgagatcccttgcaacaagacagcctgtggtgtgggcgagttccgctgccgggacgggacctgcatcgggaactccagccgctgcaaccagtttgtggattgtgaggacgcctcagatgagatgaactgcagtgccaccgactgcagcagctacttccgcctgggcgtgaagggcgtgctcttccagccctgcgagcggacctcactctgctacgcacccagctgggtgtgtgatggcgccaatgactgtggggactacagtgatgagcgcgactgcccaggtgtgaaacgccccagatgccctctgaattacttcgcctgccctagtgggcgctgcatccccatgagctggacgtgtgacaaagaggatgactgtgaacatggcgaggacgagacccactgcaacaagttctgctcagaggcccagtttgagtgccagaaccatcgctgcatctccaagcagtggctgtgtgacggcagcgatgactgtggggatggctcagacgaggctgctcactgtgaaggcaagacgtgcggcccctcctccttctcctgccctggcacccacgtgtgcgtccccgagcgctggctctgtgacggtgacaaagactgtgctgatggtgcagacgagagcatcgcagctggttgcttgtacaacagcacttgtgacgaccgtgagttcatgtgccagaaccgccagtgcatccccaagcacttcgtgtgtgaccacgaccgtgactgtgcagatggctctgatgagtcccccgagtgtgagtacccgacctgcggccccagtgagttccgctgtgccaatgggcgctgtctgagctcccgccagtgggagtgtgatggcgagaatgactgccacgaccagagtgacgaggctcccaagaacccacactgcaccagcccagagcacaagtgcaatgcctcgtcacagttcctgtgcagcagtgggcgctgtgtggctgaggcactgctctgcaacggccaggatgactgtggcgacagctcggacgagcgtggctgccacatcaatgagtgtctcagccgcaagctcagtggctgcagccaggactgtgaggacctcaagatcggcttcaagtgccgctgtcgccctggcttccggctgaaggatgacggccggacgtgtgctgatgtggacgagtgcagcaccaccttcccctgcagccagcgctgcatcaacacccatggcagctataagtgtctgtgtgtggagggctatgcaccccgcggcggcgacccccacagctgcaaggctgtgactgacgaggaaccgtttctgatcttcgccaaccggtactacctgcgcaagctcaacctggacgggtccaactacacgttacttaagcagggcctgaacaacgccgttgccttggattttgactaccgagagcagatgatctactggacagatgtgaccacccagggcagcatgatccgaaggatgcaccttaacgggagcaatgtgcaggtcctacaccgtacaggcctcagcaaccccgatgggctggctgtggactgggtgggtggcaacctgtactggtgcgacaaaggccgggacaccatcgaggtgtccaagctcaatggggcctatcggacggtgctggtcagctctggcctccgtgagcccagggctctggtggtggatgtgcagaatgggtacctgtactggacagactggggtgaccattcactgatcggccgcatcggcatggatgggtccagccgcagcgtcatcgtggacaccaagatcacatggcccaatggcctgacgctggactatgtcactgagcgcatctactgggccgacgcccgcgaggactacattgaatttgccagcctggatggctccaatcgccacgttgtgctgagccaggacatcccgcacatctttgcactgaccctgtttgaggactacgtctactggaccgactgggaaacaaagtccattaaccgagcccacaagaccacgggcaccaacaaaacgctcctcatcagcacgctgcaccggcccatggacctgcatgtcttccatgccctgcgccagccagacgtgcccaatcacccctgcaaggtcaacaatggtggctgcagcaacctgtgcctgctgtcccccgggggagggcacaaatgtgcctgccccaccaacttctacctgggcagcgatgggcgcacctgtgtgtccaactgcacggctagccagtttgtatgcaagaacgacaagtgcatccccttctggtggaagtgtgacaccgaggacgactgcggggaccactcagacgagcccccggactgccctgagttcaagtgccggcccggacagttccagtgctccacaggtatctgcacaaaccctgccttcatctgcgatggcgacaatgactgccaggacaacagtgacgaggccaactgtgacatccacgtctgcttgcccagtcagttcaaatgcaccaacaccaaccgctgtattcccggcatcttccgctgcaatgggcaggacaactgcggagatggggaggatgagagggactgccccgaggtgacctgcgcccccaaccagttccagtgctccattaccaaacggtgcatcccccgggtctgggtctgcgaccgggacaatgactgtgtggatggcagtgatgagcccgccaactgcacccagatgacctgtggtgtggacgagttccgctgcaaggattcgggccgctgcatcccagcgcgttggaagtgtgacggagaggatgactgtggggatggctcggatgagcccaaggaagagtgtgatgaacgcacctgtgagccataccagttccgctgcaagaacaaccgctgcgtgcccggccgctggcagtgcgactacgacaacgattgcggtgacaactccgatgaagagagctgcacccctcggccctgctccgagagtgagttctcctgtgccaacggccgctgcatcgcggggcgctggaaatgcgatggagaccacgactgcgcggacggctcggacgagaaagactgcaccccccgctgtgacatggaccagttccagtgcaagagcggccactgcatccccctgcgctggcgctgtgacgcagacgccgactgcatggacggcagcgacgaggaggcctgcggcactggcgtgcggacctgccccctggacgagttccagtgcaacaacaccttgtgcaagccgctggcctggaagtgcgatggcgaggatgactgtggggacaactcagatgagaaccccgaggagtgtgcccggttcgtgtgccctcccaaccggcccttccgttgcaagaatgaccgcgtctgtctgtggatcgggcgccaatgcgatggcacggacaactgtggggatgggactgatgaagaggactgtgagccccccacagcccacaccacccactgcaaagacaagaaggagtttctgtgccggaaccagcgctgcctctcctcctccctgcgctgcaacatgttcgatgactgcggggacggctctgacgaggaggactgcagcatcgaccccaagctgaccagctgcgccaccaatgccagcatctgtggggacgaggcacgctgcgtgcgcaccgagaaagcggcctactgtgcctgccgctcgggcttccacaccgtgcccggccagcccggatgccaagacatcaacgagtgcctgcgcttcggcacctgctcccagctctgcaacaacaccaagggcggccacctctgcagctgcgctcggaacttcatgaagacgcacaacacctgcaaggccgaaggctctgagtaccaggtcctgtacatcgctgatgacaatgagatccgcagcctgttccccggccacccccattcggcttacgagcaggcattccagggtgacgagagtgtccgcattgatgctatggatgtccatgtcaaggctggccgtgtctattggaccaactggcacacgggcaccatctcctaccgcagcctgccacctgctgcgcctcctaccacttccaaccgccaccggcgacagattgaccggggtgtcacccacctcaacatttcagggctgaagatgcccagaggcatcgccatcgactgggtggccggaaacgtgtactggaccgactcgggccgagatgtgattgaggtggcgcagatgaagggcgagaaccgcaagacgctcatctcgggcatgattgacgagccccacgccattgtggtggacccactgagggggaccatgtactggtcagactggggcaaccaccccaagattgagacggcagcgatggatgggacgcttcgggagacactggtgcaggacaacattcagtggcccacaggcctggccgtggattatcacaatgagcggctgtactgggcagacgccaagctttcagtcatcggcagcatccggctcaatggcacggaccccattgtggctgctgacagcaaacgaggcctaagtcaccccttcagcatcgacgtctttgaggattacatctatggtgtcacctacatcaataatcgtgtcttcaagatccataagtttggccacagccccttggtcaacctgacagggggcctgagccacgcctctgacgtggtcctttaccatcagcacaagcagcccgaagtgaccaacccatgtgaccgcaagaaatgcgagtggctctgcctgctgagccccagtgggcctgtctgcacctgtcccaatgggaagcggctggacaacggcacatgcgtgcctgtgccctctccaacgccccccccagatgctccccggcctggaacctgtaacctgcagtgcttcaacggtggcagctgtttcctcaatgcacggaggcagcccaagtgccgctgccaaccccgctacacgggtgacaagtgtgaactggaccagtgctgggagcactgtcgcaatgggggcacctgtgctgcctccccctctggcatgcccacgtgccggtgccccacgggcttcacgggccccaaatgcacccagcaggtgtgtgcgggctactgtgccaacaacagcacctgcactgtcaaccagggcaaccagccccagtgccgatgcctacccggcttcctgggcgaccgctgccagtaccggcagtgctctggctactgtgagaactttggcacatgccagatggctgctgatggctcccgacaatgccgctgcactgcctactttgagggatcgaggtgtgaggtgaacaagtgcagccgctgtctcgaaggggcctgtgtggtcaacaagcagagtggggatgtcacctgcaactgcacggatggccgggtggcccccagctgtctgacctgcgtcggccactgcagcaatggcggctcctgtaccatgaacagcaaaatgatgcctgagtgccagtgcccaccccacatgacagggccccggtgtgaggagcacgtcttcagccagcagcagccaggacatatagcctccatcctaatccctctgctgttgctgctgctgctggttctggtggccggagtggtattctggtataagcggcgagtccaaggggctaagggcttccagcaccaacggatgaccaacggggccatgaacgtggagattggaaaccccacctacaagatgtacgaaggcggagagcctgatgatgtgggaggcctactggacgctgactttgccctggaccctgacaagcccaccaacttcaccaaccccgtgtatgccacactctacatggggggccatggcagtcgccactccctggccagcacggacgagaagcgagaactcctgggccggggccctgaggacgagataggggaccccttggcatagggccctgccccgtcggactgcccccagaaagcctcctgccccctgccggtgaagtccttcagtgagcccctccccagccagcccttccctggccccgccggatgtataaatgtaaaaatgaaggaattacattttatatgtgagcgagcaagccggcaagcgagcacagtattatttctccatcccctccctgcctgctccttggcacccccatgctgccttcagggagacaggcagggagggcttggggctgcacctcctaccctcccaccagaacgcaccccactgggagagctggtggtgcagccttcccctccctgtataagacactttgccaaggctctcccctctcgccccatccctgcttgcccgctcccacagcttcctgagggctaattctgggaagggagagttctttgctgcccctgtctggaagacgtggctctgggtgaggtaggcgggaaaggatggagtgttttagttcttgggggaggccaccccaaaccccagccccaactccaggggcacctatgagatggccatgctcaacccccctcccagacaggccctccctgtctccagggcccccaccgaggttcccagggctggagacttcctctggtaaacattcctccagcctcccctcccctggggacgccaaggaggtgggccacacccaggaagggaaagcgggcagccccgttttggggacgtgaacgttttaataatttttgctgaattctttacaactaaataacacagatattcttataaataaaattgtaaaaaaaaaaa

SEQ ID NO: 829 - DNA, 1493 bp, Homo sapiens
tgagcgggggatgatggcgccgcggagggtcaggtcgtttctgcgcgggctcccggcgctgctactgctgctgctcttcctcgggccctggcccgctgcgagccacggcggcaagtactcgcgggagaagaaccagcccaagccgtccccgaaacgcgagtccggagaggagttccgcatggagaagttgaaccagctgtgggagaaggcccagcgactgcatcttcctcccgtgaggctggccgagctccacgctgatctgaagatacaggagagggacgaactcgcctggaagaaactaaagcttgacggcttggacgaagatggggagaaggaagcgagactcatacgcaacctcaatgtcatcttggccaagtatggtctggacggaaagaaggacgctcggcaggtgaccagcaactccctcagtggcacccaggaagacgggctggatgaccccaggctggaaaagctgtggcacaaggcgaagacctctgggaaattctccggcgaagaactggacaagctctggcgggagttcctgcatcacaaagagaaagttcacgagtacaacgtcctgctggagaccctgagcaggaccgaagaaatccacgagaacgtcattagcccctcggacctgagcgacatcaagggcagcgtcctgcacagcaggcacacggagctgaaggagaagctgcgcagcatcaaccagggcctggaccgcctgcgcagggtcagccaccagggctacagcactgaggctgagttcgaggagcccagggtgattgacctgtgggacctggcgcagtccgccaacctcacggacaaggagctggaggcgttccgggaggagctcaagcacttcgaagccaaaatcgagaagcacaaccactaccagaagcagctggagattgcgcacgagaagctgaggcacgcagagagcgtgggcgacggcgagcgtgtgagccgcagccgcgagaagcacgccctgctggaggggcggaccaaggagctgggctacacggtgaagaagcatctgcaggacctgtccggcaggatctccagagctcggcacaacgaactctgaaggcactggggagcccagcccggcagggaagaggccagcgtgaaggacctgggctcttggccgtggcatttccgtggacagcccgccgtcagggtggctggggctggcacgggtgtcgaggcaggaaggattgtttctggtgactgcagccgctgccgtcgcgacacagggcttggtggtggtagcatttgggtctgagatcggcccagctctgactgaaggggcttggcttccactcagcatcagcgtggcagtcaccaccccagtgaggacctcgatgtccagctgctgtcaggtctgatagtcctctgctaaaacaacacgatttacataaaaaatcttacacatctgccaccggaaataccatgcacagagtccttaaaaaatagagtgcagtatttaaacc

SEQ ID NO: 830 - DNA, 1631 bp, Homo sapiens
tttaacacccatagtaggcctaaaagcagccaccaattaagaaagccacagcacgtacacccactccagggatctgccagcaccctgtggggcccagactacaggctgatggcggaggcttcgagtgacccgggtgctgaggagcgggaagagttgctggggcccactgctcagtggagcgtggaggacgaggaggaggccgtccacgagcaatgccagcatgagagagacaggcagcttcaggcccaggacgaggagggaggcggccatgtccccgagcggccgaagcaggagatgctcctcagcctgaagccctcggaggcccctgaactggatgaggacgagggctttggcgactggtcccagaggccagagcagcggcagcagcacgagggggcgcagggcgccttggacagcggagagcccccccagtgcaggagtcctgagggggagcaagaggacaggcccggcctgcatgcctacgaaaaggaggacagtgatgaagtccacctggaggagttgagtctgagcaaggaggggccaggcccagaggacactgtccaggacaacctgggggccgcaggggctgaggaggaacaggaggagcaccagaaatgtcagcagcccaggacacccagccccttggtcttggaggggaccatcgaacagagctcgcctcccctgagccctaccaccaaactcatcgacaggaccgagtccctaaaccgctccatagagaagagtaacagtgtgaagaaatcccagccagacttgcccatctccaagattgatcagtggctggaacaatacacccaggccatcgagaccgctggccggacccccaagctagcccgccaggcctccatagagctgcccagcatggctgtggccagtaccaagagtcggtgggagacgggtgaggtacaggctcagtctgcggccaagactccgtcctgcaaggatattgtggctggagacatgagcaagaaaagcctctgggagcagaagggaggctccaagacctcatcaacaattaagagcaccccatctgggaagaggtataagtttgtggccaccgggcatgggaagtatgagaaggtgcttgtggaagggggcccggctccctaggcgtcccatctcgcttcctgggtctgcaggtccagccggctggcaccctccatgtacccaggggagattccagccagacacccgccccccggccctggctaagaagttgcttcctgttgccagcatgacctaccctcgcctctttgatgccatccgctgccacctccttttgctcctggaccctttagcctctctgcccttccactctctgaccaccgcccccgccctccccacccagctccgcttcttgttacttgggggaggaaagaaactcctgatcattggccaaagggacttacccctggagaggccaagtgccttctaggaagttaggaggttgaggcacagcctgtgcagagagggtgggtcacccccccagatccaaggggaaactgcaggtcaagggctgataacggccatgcaggatgcttgatgctgcgtcccccgctgcttgccgccccccaccccgccattttgtataataaagctccctgtgtattctc

SEQ ID NO: 831 - DNA, 2619 bp, Homo sapiens
gactcctaggggcttgcagacctagtgggagagaaagaacatcgcagcagccaggcagaaccaggacaggtgaggtgcaggctggctttcctctcgcagcgcggtgtggagtcctgtcctgcctcagggcttttcggagcctggatcctcaaggaacaagtagacctggccgcggggagtggggagggaaggggtgtctattgggcaacagggcggcaaagccctgaataaaggggcgcagggcaggcgcaagtgcagagccttcgtttgccaagtcgcctccagaccgcagacatgaaacttgtcttcctcgtcctgctgttcctcggggccctcggactgtgtctggctggccgtaggagaaggagtgttcagtggtgcgccgtatcccaacccgaggccacaaaatgcttccaatggcaaaggaatatgagaaaagtgcgtggccctcctgtcagctgcataaagagagactcccccatccagtgtatccaggccattgcggaaaacagggccgatgctgtgacccttgatggtggtttcatatacgaggcaggcctggccccctacaaactgcgacctgtagcggcggaagtctacgggaccgaaagacagccacgaactcactattatgccgtggctgtggtgaagaagggcggcagctttcagctgaacgaactgcaaggtctgaagtcctgccacacaggccttcgcaggaccgctggatggaatgtccctacagggacacttcgtccattcttgaattggacgggtccacctgagcccattgaggcagctgtggccaggttcttctcagccagctgtgttcccggtgcagataaaggacagttccccaacctgtgtcgcctgtgtgcggggacaggggaaaacaaatgtgccttctcctcccaggaaccgtacttcagctactctggtgccttcaagtgtctgagagacggggctggagacgtggcttttatcagagagagcacagtgtttgaggacctgtcagacgaggctgaaagggacgagtatgagttactctgcccagacaacactcggaagccagtggacaagttcaaagactgccatctggcccgggtcccttctcatgccgttgtggcacgaagtgtgaatggcaaggaggatgccatctggaatcttctccgccaggcacaggaaaagtttggaaaggacaagtcaccgaaattccagctctttggctcccctagtgggcagaaagatctgctgttcaaggactctgccattgggttttcgagggtgcccccgaggatagattctgggctgtaccttggctccggctacttcactgccatccagaacttgaggaaaagtgaggaggaagtggctgcccggcgtgcgcgggtcgtgtggtgtgcggtgggcgagcaggagctgcgcaagtgtaaccagtggagtggcttgagcgaaggcagcgtgacctgctcctcggcctccaccacagaggactgcatcgccctggtgctgaaaggagaagctgatgccatgagtttggatggaggatatgtgtacactgcatgcaaatgtggtttggtgcctgtcctggcagagaactacaaatcccaacaaagcagtgaccctgatcctaactgtgtggatagacctgtggaaggatatcttgctgtggcggtggttaggagatcagacactagccttacctggaactctgtgaaaggcaagaagtcctgccacaccgccgtggacaggactgcaggctggaatatccccatgggcctgctcttcaaccagacgggctcctgcaaatttgatgaatatttcagtcaaagctgtgcccctgggtctgacccgagatctaatctctgtgctctgtgtattggcgacgagcagggtgagaataagtgcgtgcccaacagcaacgagagatactacggctacactggggctttccggtgcctggctgagaatgctggagacgttgcatttgtgaaagatgtcactgtcttgcagaacactgatggaaataacaatgaggcatgggctaaggatttgaagctggcagactttgcgctgctgtgcctcgatggcaaacggaagcctgtgactgaggctagaagctgccatcttgccatggccccgaatcatgccgtggtgtctcggatggataaggtggaacgcctgaaacaggtgctgctccaccaacaggctaaatttgggagaaatggatctgactgcccggacaagttttgcttattccagtctgaaaccaaaaaccttctgttcaatgacaacactgagtgtctggccagactccatggcaaaacaacatatgaaaaatatttgggaccacagtatgtcgcaggcattactaatctgaaaaagtgctcaacctcccccctcctggaagcctgtgaattcctcaggaagtaaaaccgaagaagatggcccagctccccaagaaagcctcagccattcactgcccccagctcttctccccaggtgtgttggggccttggctcccctgctgaaggtggggattgcccatccatctgcttacaattccctgctgtcgtcttagcaagaagtaaaatgagaaattttgttgatattcaaaaaaaa

SEQ ID NO: 832 - DNA, 1717 bp, Homo sapiens
gtggattcttgtccatagtgcatctgctttaagaattaacgaaagcagtgtcaagacagtaaggattcaaaccatttgccaaaaatgagtctaagtgcatttactctcttcctggcattgattggtggtaccagtggccagtactatgattatgattttcccctatcaatttatgggcaatcatcaccaaactgtgcaccagaatgtaactgccctgaaagctacccaagtgccatgtactgtgatgagctgaaattgaaaagtgtaccaatggtgcctcctggaatcaagtatctttaccttaggaataaccagattgaccatattgatgaaaaggcctttgagaatgtaactgatctgcagtggctcattctagatcacaaccttctagaaaactccaagataaaagggagagttttctctaaattgaaacaactgaagaagctgcatataaaccacaacaacctgacagagtctgtgggcccacttcccaaatctctggaggatctgcagcttactcataacaagatcacaaagctgggctcttttgaaggattggtaaacctgaccttcatccatctccagcacaatcggctgaaagaggatgctgtttcagctgcttttaaaggtcttaaatcactcgaataccttgacttgagcttcaatcagatagccagactgccttctggtctccctgtctctcttctaactctctacttagacaacaataagatcagcaacatccctgatgagtatttcaagcgttttaatgcattgcagtatctgcgtttatctcacaacgaactggctgatagtggaatacctggaaattctttcaatgtgtcatccctggttgagctggatctgtcctataacaagcttaaaaacataccaactgtcaatgaaaaccttgaaaactattacctggaggtcaatcaacttgagaagtttgacataaagagcttctgcaagatcctggggccattatcctactccaagatcaagcatttgcgtttggatggcaatcgcatctcagaaaccagtcttccaccggatatgtatgaatgtctacgtgttgctaacgaagtcactcttaattaatatctgtatcctggaacaatattttatggttatgtttttctgtgtgtcagttttcatagtatccatattttattactgtttattacttccatgaattttaaaatctgagggaaatgttttgtaaacatttattttttttaaagaaaagatgaaaggcaggcctatttcatcacaagaacacacacatatacacgaatagacatcaaactcaatgctttatttgtaaatttagtgtttttttatttctactgtcaaatgatgtgcaaaaccttttactggttgcatggaaatcagccaagttttataatccttaaatcttaatgttcctcaaagcttggattaaatacatatggatgttactctcttgcaccaaattatcttgatacattcaaatttgtctggtaaaaaaataggtggtagatattgaggccaagaatattgcaaaatacatgaagcttcatgcacttaaagaagtatttttagaataagaatttgcatacttacctagtgaaacttttctagaattatttttcactctaagtcatgtatgtttctctttgattatttgcatgttatgtttaataagctactagcaaaataaaacatagcaaatggc

SEQ ID NO: 833 - DNA, 2298 bp, Homo sapiens
tcggccgagcccagagacagccagttcctctcccgccgcgccgggccgcgtgccgctcgctccccggccgtggcgcctccgggccagacgcgctgcagcctccagcccgcggcaagcgggcggggcggccgcgccacccccggccccgcgccagcagcccctcgccgcgcgtccagcgttcccggccagcagcctccccatacgcagtcctgctggaccgccccgtcgcgccccccactctgaactcaagtcaccgtggagctccgccgccccgaaactttcacgcgagcgggaaatatgggatgtataaaatcaaaagggaaagacagcttgagtgacgatggagtagatttgaagactcaaccagtacgtaatactgaaagaactatttatgtgagagatccaacgtccaataaacagcaaaggccagttccagaatctcagcttttacctggacagaggtttcaaactaaagatccagaggaacaaggagacattgtggtagccttgtacccctatgatggcatccacccggacgacttgtctttcaagaaaggagagaagatgaaagtcctggaggagcatggagaatggtggaaagcaaagtcccttttaacaaaaaaagaaggcttcatccccagcaactatgtggccaaactcaacaccttagaaacagaagagtggtttttcaaggatataaccaggaaggacgcagaaaggcagcttttggcaccaggaaatagcgctggagctttccttattagagaaagtgaaacattaaaaggaagcttctctctgtctgtcagagactttgaccctgtgcatggtgatgttattaagcactacaaaattagaagtctggataatgggggctattacatctctccacgaatcacttttccctgtatcagcgacatgattaaacattaccaaaagcaggcagatggcttgtgcagaagattggagaaggcttgtattagtcccaagccacagaagccatgggataaagatgcctgggagatcccccgggagtccatcaagttggtgaaaaggcttggcgctgggcagtttggggaagtctggatgggttactataacaacagtaccaaggtggctgtgaaaaccctgaagccaggaactatgtctgtgcaagccttcctggaagaagccaacctcatgaagaccctgcagcatgacaagctcgtgaggctctacgctgtggtcaccagggaggagcccatttacatcatcaccgagtacatggccaagggcagtttgctggatttcctgaagagcgatgaaggtggcaaagtgctgcttccaaagctcattgacttttctgctcagattgcagagggaatggcatacatcgagcggaagaactacattcaccgggacctgcgagcagctaatgttctggtctccgagtcactaatgtgcaaaattgcagattttggccttgctagagtaattgaagataatgagtacacagcaagggaaggtgctaagttccctattaagtggacggctccagaagcaatcaactttggatgtttcactattaagtctgatgtgtggtcctttggaatcctcctatacgaaattgtcacctatgggaaaattccctacccagggagaactaatgccgacgtgatgaccgccctgtcccagggctacaggatgccccgtgtggagaactgcccagatgagctctatgacattatgaaaatgtgctggaaagaaaaggcagaagagagaccaacgtttgactacttacagagcgtcctggatgatttctacacagccacggaagggcaataccagcagcagccttagagcacagggagacccgtccatttggcaggggtggctgcctcatttagagaggaaaagtaaccatcactggttgcacttatgatttcatgtgcggggatcatctgccgtgcctggatcctgaaatagaggctaaattactcaggaagaacaccctctaaatgggaaagtattctgtactcttagatggattctccactcagttgcaacttggacttgtcctcagcagctggtaatcttgctctgcttgacaacatctgagtgcagccgtttgagaagaaaacatctattctctccaaaaatgcacccaactagctctatgtttacaaatggacataggactcaaagtttcagagaccattgcaatgaatccccaataattgcagaactaaactcatttataaagctaaaataaccggatatatacatagcatgacatttctttgtgctttggcttacttgttt

SEQ ID NO: 834 - DNA, 2589 bp, Homo sapiens
caaccagggagatttctccattttcctcttgtctacagtgcggctacaaatctgggatttttttattacttctttttttttcgaactacacttgggctcctttttttgtgctcgacttttccaccctttttccctccctcctgtgctgctgctttttgatctcttcgactaaaatttttttatccggagtgtatttaatcggttctgttctgtcctctccaccacccccacccccctccctccggtgtgtgtgccgctgccgctgttgccgccgccgctgctgctgctgctcgccccgtcgttacaccaacccgaggctctttgtttcccctcttggatctgttgagtttctttgttgaagaagccagcatgggtgcccagttctccaagaccgcagcgaagggagaagccgccgcggagaggcctggggaggcggctgtggcctcgtcgccttccaaagcgaacggacaggagaatggccacgtgaaggtaaacggcgacgcttcgcccgcggccgccgagtcgggcgccaaggaggagctgcaggccaacggcagcgccccggccgccgacaaggaggagcccgcggccgccgggagcggggcggcgtcgccctcctcggccgagaaaggtgagccggccgccgccgctgcccccgaggccggggccagcccggtagagaaggaggcccccgcggaaggcgaggctgccgagcccggctcggccacggccgcggagggagaggccgcgtcggccgcctcctcgacttcttcgcccaaggccgaggacggggccacgccctcgcccagcaacgagaccccgaaaaaaaaaaagaagcgcttttccttcaagaagtctttcaagctgagcggcttctccttcaagaagaacaagaaggaggctggagaaggcggtgaggctgaggcgcccgctgccgaaggcggcaaggacgaggccgccgggggcgcagctgcggccgccgccgaggcgggcgcggcctccggggagcaggcagcggcgccgggcgaggaggcggcagcgggcgaggagggggcggcgggtggcgacccgcaggaggccaagccccaggaggccgctgtcgcgccagagaagccgcccgccagcgacgagaccaaggccgccgaggagcccagcaaggtggaggagaaaaaggccgaggaggccggggccagcgccgccgcctgcgaggccccctccgccgccgggcccggcgcgcccccggagcaggaggcagcccccgcggaggagcccgcggccgccgcagcctcgtcagcctgcgcagccccctcacaggaggcccagcccgagtgcagtccagaagcccccccagcggaggcggcagagtaaaagagcaagcttttgtgagataatcgaagaacttttctcccccgtttgtttgttggagtggtgccaggtactgttttggagaacttgtctacaaccagggattgattttaaagatgtctttttttattttacttttttttaagcaccaaattttgttgtttttttttttctcccctccccacagatcccatctcaaatcattctgttaaccaccattccaacaggtcgaggagagcttaaacaccttcttcctctgccttgtttctcttttattttttattttttcgcatcagtattaatgtttttgcatactttgcatctttattcaaaagtgtaaactttctttgtcaatctatggacatgcccatatatgaaggagatgggtgggtcaaaaagggatatcaaatgaagtgataggggtcacaatggggaaattgaagtggtgcataacattgccaaaatagtgtgccactagaaatggtgtaaaggctgtctttttttttttttttaaagaaaagttattaccatgtattttgtgaggcaggtttacaacactacaagtcttgagttaagaaggaaagaggaaaaaagaaaaaacaccaatacccagatttaaaaaaaaaaaaacgatcatagtcttaggagttcatttaaaccataggaacttttcacttatctcatgttagctgtaccagtcagtgattaagtagaactacaagttgtataggctttattgtttattgctggtttatgaccttaataaagtgtaattatgtattaccagcagggtgtttttaactgtgactattgtataaaaacaaatcttgatatccagaagcacatgaagtttgcaactttccaccctgcccatttttgtaaaactgcagtcatcttggaccttttaaaacacaaattttaaactcaaccaagctgtgataagtggaatggttactgtttatactgtggtatgtttttgattacagcagataatgctttcttttccagtcgtctttgagaataaaggaaaaaaaatcttcagatgcaatggttttgtgtagcatcttgtctatcatgttttgtaaatactggagaagctttgaccaatttgacttagagatggaatgtaactttgcttacaaaaattgctattaaactcctgcttaaggtgttctaattttctgtgagcacactaaaagcgaaaaataaatgtgaataaaatgt

SEQ ID NO: 835 - DNA, 1677 bp, Homo sapiens
ccgcctggtccggcccggccttcccagtgcgctcggcccggcccgcgcaggcggcgagtcctccgagccccgggcccggacccctcgcgccggtccctgccccgcgcggcctcggagcgcgcgcggccccgccccgccccggcctcggcccgccgggcccgcagtgtgagagcgcctgctcgctgtgcccccgggttatgacgacccccaataaaggaaacaaggccttgaaggtgaagcgggagcccggtgagaatggcaccagcctgacggatgaggagctggtgaccatgtcggtgcgggagctgaaccagcacctgcggggcctgtccaaggaggagatcgtccagctgaagcagcgccggcgcacgctcaagaaccgcggctacgctgccagctgtcgcgtgaagcgggtgacgcagaaggaggagctggagaagcagaaggcggagctgcagcaggaggtggagaagctggcctcagagaacgccagcatgaagctggagctcgacgcgctgcgctccaagtacgaggcgctgcagaccttcgcccggacggtggcccgcagccccgtggcgccagcccggggcccccttgccgccggcctggggcccctcgtcccaggcaaggtggccgccaccagcgtcatcacaatagtaaagtccaagacggatgcccgatcgtagggacgcgcgtctgaccaggcgggtctttgcggggccactaggcacatggcgaatttggctgccctgtccctctgtttccttctcttctctttcctccctctcttccccacccttctctcttccctgcaaagcacaacctgtaccccaggggcgccgggctgagcccctttgatcttcgtcattgtcgtcgtgtgttttggtattgttgggattggtcagttcggcggtgacgtggggtcgccccaaccccttttgtaccagggccatgcaggcttggagtccagagttggtgctgtgggaacggactagagagagttgcgggagagagaaggagcaggcacgctgggcctcgccgtgtccccgagcagtgagggtcccagtgttccctccactcccgagtggccacaggctcgcgggctgggaaggattcactctctttagccccaggggagcagctcagcttagcccagcatgaagagatgggctctgctctgagagtagggcgggcttgaaggccctgatgggtggaccaccagcctgggcgcagtggtgctgggggcgtgcagctgggcccaggggctgtgcactcaggcctgacccgttgcactgaacaagaccaaatcgctggttgtgcgcttaacgtgagggtgggtccagtgtgccctgcgatgggtcccgtgtcactgtttacatgacctatttgtgtggttatatagccctttatttaaaagagagaagttccttttacaaagttattaaattaattatatgtttaaaagttaaagaaaaaagagctgcagagtatttataaaactgtcttttagaaaaaaaacaagcaagaagaccatttgaccatatgaatggaaaagggaagaaagtataatagaaactttgctagttaaaaaaaaaagaaaaaaaaagaaaaaaaatcccttcttgtaaacttacggacacctctttgtggctgttggagtttagtttttatatacgg

SEQ ID NO: 836 - DNA, 1677 bp, Homo sapiens; identical to SEQ ID NO: 835

SEQ ID NO: 837 - DNA, 4779 bp, Homo sapiens
tgcgaccgcctccctgcgccccgcccctccggctagctcgctggctcccggctcctcccgacgtctcctacctcctcacggctcttcccggcgctctcctggctcccttctgccccagctccgtctcggcggcggcgggcagttgcagtggtgcagaatggctgacctcagtcttgcagatgcattaacagaaccatctccagacattgagggagagataaagcgggacttcattgccacactagaggcagaggcctttgatgatgttgtgggagaaactgttggaaaaacagactatattcctctcctggatgttgatgagaaaaccgggaactcagagtcaaagaagaaaccgtgctcagaaactagccagattgaagatactccatcttctaaaccaacactcctagccaatggtggtcatggagtagaagggagcgatactacagggtctccaactgaattccttgaagagaaaatggcctaccaggaatacccaaatagccagaactggccagaagataccaacttttgtttccaacctgagcaagtggtcgatcctatccagactgatccctttaagatgtaccatgatgatgacctggcagatttggtctttccctccagtgcgacagctgatacttcaatatttgcaggacaaaatgatcccttgaaagacagttacggtatgtctccctgcaacacagctgttgtacctcaggggtggtctgtggaagccttaaactctccacactcagagtcctttgtttccccagaggctgttgcagaacctcctcagccaacggcagttcccttagagctagccaaggagatagaaatggcatcagaagagaggccaccagcacaagcattggaaataatgatgggactgaagactactgacatggcaccatctaaagaaacagagatggccctcgccaaggacatggcactagctacaaaaaccgaggtggcattggctaaagatatggaatcacccaccaaattagatgtgacactggccaaggacatgcagccatccatggaatcagatatggccctagtcaaggacatggaactacccacagaaaaagaagtggccctggttaaggatgtcagatggcccacagaaacagatgtatcttcagccaagaatgtggtactgcccacagaaacagaggtagccccagccaaggatgtgacactgttgaaagaaacagagagggcatctcctataaaaatggacttagccccttccaaggacatgggaccacccaaagaaaacaagaaagaaacagagagggcatctcctataaaaatggacttggctccttccaaggacatgggaccacccaaagaaaacaagatagtcccagccaaggatttggtattactctcagaaatagaggtggcacaggctaatgacattatatcatccacagaaatatcctctgctgagaaggtggctttgtcctcagaaacagaggtagccctggccagggacatgacactgcccccggaaaccaacgtgatcttgaccaaggataaagcactacctttagaagcagaggtggccccagtcaaggacatggctcaactcccagaaacagaaatagccccggccaaggatgtggctccgtccacagtaaaagaagtgggcttgttgaaggacatgtctccactatcagaaacagaaatggctctgggcaaggatgtgactccacctccagaaacagaagtagttctcatcaagaacgtatgtctgcctccagaaatggaggtggccctgactgaggatcaggtcccagccctcaaaacagaagcacccctggctaaggatggggttctgaccctggccaacaatgtgactccagccaaagatgttccaccactctcagaaacagaggcaacaccagttccaattaaagacatggaaattgcacaaacacaaaaaggaataagtgaggattcccatttagaatctctgcaggatgtggggcagtcagctgcacctactttcatgatttcaccagaaaccatcacaggaacggggaaaaagtgcagcttgccggccgaggaggattctgtgttagaaaaactaggggaaaggaaaccatgcaacagtcaaccttctgagctttcttcagagacctcaggaatagccaggccagaagaaggaaggcctgtggtgagtgggacaggaaatgacatcaccaccccaccgaacaaggagctcccaccaagcccagagaagaaaacaaagcctttggccaccactcaacctgcaaagacttcaacatcgaaagccaaaacacagcccacttctctccctaagcagccagctcccaccaccattggtgggttgaataaaaaacccatgagccttgcttcaggcttagtgccagctgccccacccaaacgccctgccgtcgcctctgccaggccttccatcttaccttcaaaagacgtgaagccaaagcccattgcagatgcaaaggctcctgagaagcgggcctcaccatccaagccagcttctgccccagcctccagatctgggtccaagagcactcagactgttgcaaaaaccacaacagctgctgctgttgcctcaactggcccaagcagtaggagcccctccacgctcctgcccaagaagcccactgccattaagactgagggaaaacctgcagaagtcaagaagatgactgcaaagtctgtaccagctgacttgagtcgcccaaagagcacctccaccagttccatgaagaaaaccaccactctcagtgggacagcccccgctgcaggggtggttcccagccgagtcaaggccacacccatgccctcccggccctccacaactcctttcatagacaagaagcccacctcggccaaacccagctccaccaccccccggctcagccgcctggccaccaatacttctgctcctgatctgaagaatgtccgctccaaggttggctccacggaaaacatcaagcatcagcctggaggaggccgggccaaagtagagaaaaaaacagaggcagctgctacaacccgaaagcctgaatctaatgcagtcactaaaacagccggcccaattgcaagtgcacagaaacaacctgcggggaaagtccagatagtctccaaaaaagtgagctacagccatattcagtccaagtgtggttccaaggacaatattaagcatgtccctggaggtggtaatgttcagattcagaacaagaaagtggacatctctaaggtctcctccaagtgtgggtctaaggctaacatcaagcacaagcctggtggaggagatgtcaagattgaaagtcagaagttgaacttcaaggagaaggcccaggccaaggtgggatccctcgataatgtgggccacctacctgcaggaggtgctgtgaagactgagggcggtggcagcgaggctcctctgtgtccgggtccccctgctggggaggagccggccatctctgaggcagcgcctgaagctggcgcccccacttcagccagtggcctcaatggccaccccaccctgtcagggggtggtgaccaaagggaggcccagaccttggacagccagatccaggagacaagcatctaatgatgacattctggtctcgtcttccgtctcccccgtgttcccctcttgtctcccctgttcccctctcccttccctcctcccatgtcactgcagattgagacctacaggctgacgttccgggcaaatgccagggcccgcaccgaccacggggccgacattgtctcccgccccccacacttccctggcggccccaactcgggctcccgggtccttggccccctttcccgggctgtccactagaccagtgagcgcttgggcgccgtgctgggcagcccgctaggctcgccttccctcctgctttgcgtgcccggggcagcagcagccctgccccacacctcctctcactccccagcctgggcccatctccctgctttggtcttgccccatcactgcgccactgctccgtggaggaggttgggagggggttggggtggttgaggctaagttgggatctaggagaggagaaccagattctatcctcatctttttttggttctttggtccaaacccaaaagaaactgacatgccctcccttctccctggatctacctggagggaagagtggaggtggattccgagtggtgacaggacgctgaccgtggagcttaagccactgcctctccctctggtcccacaaatgggcgcccccccctccccatgcaggtggtgtcgggcccttcttgctgccctgccccaagttgggggtcagtgctgcctgtccccatgcttaacatacccgcctagctgctgtcacatttttcttgttttgtccttttatttttttctaataacctaaaaactggcaaaatagttctgcaggttgaagccatgtctacatgaaagtcctcagtaagtgttagagggaacagggcggagatatccttatgccacccccgctggaggatgtgggcagcttagggccctggaggcggtgcggcagggaagaggggtgcagaggctgtggctggtgagccggtcaggcacacaaggggcccttggagcgtggactggttggttttgccattttgttgtgtgtatgctgcttttcttttctaaccaagaggctggttttggcatctctgtcccattccctgggatctggtggtcagccctaggataaaaagccagggctggagaacaagaaagggccaggagatgaattc

SEQ ID NO: 838 - DNA, 3496 bp, Homo sapiens
cgaactctgaaaaggcggggcagcgggcctgcagctcctggagttcagggagacccggaaatctcaccctgccctcttcttgtgttgtgtttgtcacagccttgcccctcttgctcgccttgaaaatggaaaagatgctcgcaggctgctttctgctgatcctcggacagatcgtcctcctccctgccgaggccagggagcggtcacgtgggaggtccatctctaggggcagacacgctcggacccacccgcagacggcccttctggagagttcctgtgagaacaagcgggcagacctggttttcatcattgacagctctcgcagtgtcaacacccatgactatgcaaaggtcaaggagttcatcgtggacatcttgcaattcttggacattggtcctgatgtcacccgagtgggcctgctccaatatggcagcactgtcaagaatgagttctccctcaagaccttcaagaggaagtccgaggtggagcgtgctgtcaagaggatgcggcatctgtccacgggcaccatgaccgggctggccatccagtatgccctgaacatcgcattctcagaagcagagggggcccggcccctgagggagaatgtgccacgggtcataatgatcgtgacagatgggagacctcaggactccgtggccgaggtggctgctaaggcacgggacacgggcatcctaatctttgccattggtgtgggccaggtagacttcaacaccttgaagtccattgggagtgagccccatgaggaccatgtcttccttgtggccaatttcagccagattgagacgctgacctccgtgttccagaagaagttgtgcacggcccacatgtgcagcaccctggagcataactgtgcccacttctgcatcaacatccctggctcatacgtctgcaggtgcaaacaaggctacattctcaactcggatcagacgacttgcagaatccaggatctgtgtgccatggaggaccacaactgtgagcagctctgtgtgaatgtgccgggctccttcgtctgccagtgctacagtggctacgccctggctgaggatgggaagaggtgtgtggctgtggactactgtgcctcagaaaaccacggatgtgaacatgagtgtgtaaatgctgatggctcctacctttgccagtgccatgaaggatttgctcttaacccagatgaaaaaacgtgcacaaagatagactactgtgcctcatctaatcacggatgtcagcacgagtgtgttaacacagatgattcctattcctgccactgcctgaaaggctttaccctgaatccagataagaaaacctgcagaaggatcaactactgtgcactgaacaaaccgggctgtgagcatgagtgcgtcaacatggaggagagctactactgccgctgccaccgtggctacactctggaccccaatggcaaaacctgcagccgagtggaccactgtgcacagcaggaccatggctgtgagcagctgtgtctgaacacggaggattccttcgtctgccagtgctcagaaggcttcctcatcaacgaggacctcaagacctgctcccgggtggattactgcctgctgagtgaccatggttgtgaatactcctgtgtcaacatggacagatcctttgcctgtcagtgtcctgagggacacgtgctccgcagcgatgggaagacgtgtgcaaaattggactcttgtgctctgggggaccacggttgtgaacattcgtgtgtaagcagtgaagattcgtttgtgtgccagtgctttgaaggttatatactccgtgaagatggaaaaacctgcagaaggaaagatgtctgccaagctatagaccatggctgtgaacacatttgtgtgaacagtgatgactcatacacgtgcgagtgcttggagggattccggctcgctgaggatgggaaacgctgccgaaggaaggatgtctgcaaatcaacccaccatggctgcgaacacatttgtgttaataatgggaattcctacatctgcaaatgctcagagggatttgttctagctgaggacggaagacggtgcaagaaatgcactgaaggcccaattgacctggtctttgtgatcgatggatccaagagtcttggagaagagaattttgaggtcgtgaagcagtttgtcactggaattatagattccttgacaatttcccccaaagccgctcgagtggggctgctccagtattccacacaggtccacacagagttcactctgagaaacttcaactcagccaaagacatgaaaaaagccgtggcccacatgaaatacatgggaaagggctctatgactgggctggccctgaaacacatgtttgagagaagttttacccaaggagaaggggccaggcctttttccacaagggtgcccagagcagccattgtgttcaccgacggacgggctcaggatgacgtctccgagtgggccagtaaagccaaggccaatggtatcactatgtatgctgttggggtaggaaaagccattgaggaggaactacaagagattgcctctgagcccacaaacaagcatctcttctatgccgaagacttcagcacaatggatgagataagtgaaaaactcaagaaaggcatctgtgaagctctagaagactccgatggaagacaggactctccagcaggggaactgccaaaaacggtccaacagccaacagaatctgagccagtcaccataaatatccaagacctactttcctgttctaattttgcagtgcaacacagatatctgtttgaagaagacaatcttttacggtctacacaaaagctttcccattcaacaaaaccttcaggaagccctttggaagaaaaacacgatcaatgcaaatgtgaaaaccttataatgttccagaaccttgcaaacgaagaagtaagaaaattaacacagcgcttagaagaaatgacacagagaatggaagccctggaaaatcgcctgagatacagatgaagattagaaatcgcgacacatttgtagtcattgtatcacggattacaatgaacgcagtgcagagccccaaagctcaggctattgttaaatcaataatgttgtgaagtaaaacaatcagtactgagaaacctggtttgccacagaacaaagacaagaagtatacactaacttgtataaatttatctaggaaaaaaatccttcagaattctaagatgaatttaccaggtgagaatgaataagctatgcaaggtattttgtaatatactgtggacacaacttgcttctgcctcatcctgccttagtgtgcaatctcatttgactatacgataaagtttgcacagtcttacttctgtagaacactggccataggaaatgctgtttttttgtactggactttaccttgatatatgtatatggatgtatgcataaaatcataggacatatgtacttgtggaacaagttggattttttatacaatattaaaattcaccacttcagag

SEQ ID NO: 839 - DNA, 2599 bp, Homo sapiens
aaatccgagcctcgcgtgggctcctggcccccgacggacaccaccaggcccacggagcccaccatgccgcgcccggcccccgcgcgccgcctcccgggactcctcctgctgctctggccgctgctgctgctgccctccgccgcccccgaccccgtggcccgcccgggcttccggaggctggagacccgaggtcccgggggcagccctggacgccgcccctctcctgcggctcccgacggcgcgcccgcttccgggaccagcgagcctggccgcgcccgcggtgcaggtgtttgcaagagcagacccttggacctggtgtttatcattgatagttctcgtagcgtacggcccctggaattcaccaaagtgaaaacttttgtctcccggataatcgacactctggacattgggccagccgacacgcgggtggcagtggtgaactatgctagcactgtgaagatcgagttccaactccaggcctacacagataagcagtccctgaagcaggctgtgggtcgaatcacacccttgtcaacaggcaccatgtcaggcctagccatccagacagcaatggacgaagccttcacagtggaggcaggggctcgagagccctcttctaacatccctaaggtggccatcattgttacagatgggaggccccaggaccaggtgaatgaagtggcggctcgggcccaagcatctggtattgagctctatgctgtgggcgtggaccgggcagacatggcgtccctcaagatgatggccagtgagcccctagaggagcatgttttctacgtggagacctatggggtcattgagaaactttcctctagattccaggaaaccttctgtgcgctggacccctgtgtgcttggaacacaccagtgccagcacgtctgcatcagtgatggggaaggcaagcaccactgtgagtgtagccaaggatacaccttgaatgccgacaagaaaacgtgttcagctcttgataggtgtgctcttaacacccacggatgtgagcacatctgtgtgaatgacagaagtggctcttatcattgtgagtgctatgaaggttataccttgaatgaagacaggaaaacttgttcagctcaagataaatgtgctttgggtacccatgggtgtcagcacatttgtgtgaatgacagaacagggtcccatcattgtgaatgctatgagggctacactctgaatgcagataaaaaaacatgttcagtccgtgacaagtgtgccctaggctctcatggttgccagcacatttgtgtgagtgatggggccgcatcctaccactgtgattgctatcctggctacaccttaaatgaggacaagaaaacatgttcagccactgaggaagcacgaagacttgtttccactgaagatgcttgtggatgtgaagctacactggcattccaggacaaggtcagctcgtatcttcaaagactgaacactaaacttgatgacattttggagaagttgaaaataaatgaatatggacaaatacatcgttaaattgctccaatttctcacctgaaaatgtggacagcttggtgtacttaatactcatgcattcttttgcacacctgttattgccaatgttcctgctaataatttgccattatctgtattaatgcttgaatattactggataaattgtatgaagatcttctgcagaatcagcatgatttttccaaggaaatacatatgcagatacttattaagagcaaactttagtgtctctaagttatgactgtgaaatgattggtaggaaatagaatgaaaagtttagtgtttctttatctactaattgagccatttaatttttaaatgtttatattagataaccatattcacaatggaaactttaggtctagtttcttttgatagtatttataatataaatcaatcttattactgagagtgcaaattgtacaaggtatttacacatacaacttcatataactgagatgaatgtaattttgaactgtttaacactttttgttttttgcttattttgttggagtattattgaagatgtgatcaatagattgtaatacacatatctaaaaatagttaacacagatcaagtgaacattacattgccatttttaattcattctggtctttgaaagaaatgtactactaaagagcactagttgtgaatttagggtgttaaactttttaccaagtacaaaaatcccaaattcactttattattttgcttcaggatccaagtgacaaagttatatatttataaaattgctataaatcgacaaaatctaatgttgtctttttaatgttagtgatccacctgcctcagcctcccaaagtgctgggattacaggcttgaaagtctaacttttttttacttatatatttgatacatataattcttttggctttgaaacttgcaactttgagaacaaaacagtcctttaaattttgcactgctcaattctgtttttcgtttgcattgtctttaatataataaaagttattacctttacatattatcatgtctatttttgatgactcatcaattttgtctattaaagatatttctttaaattaaaaaaaaaaaaaaaaa

SEQ ID NO: 840 - DNA, 1231 bp, Homo sapiens
cctggatgtgatggcgtcacagaagagaccctcccagaggcacggatccaagtacctggccacagcaagtaccatggaccatgccaggcatggcttcctcccaaggcacagagacacgggcatccttgactccatcgggcgcttctttggcggtgacaggggtgcgcccaagcggggctctggcaaggtaccctggctaaagccgggccggagccctctgccctctcatgcccgcagccagcctgggctgtgcaacatgtacaaggactcacaccacccggcaagaactgctcactacggctccctgccccagaagtcacacggccggacccaagatgaaaaccccgtagtccacttcttcaagaacattgtgacgcctcgcacaccacccccgtcgcagggaaagggggccgaaggccagagaccaggatttggctacggaggcagagcgtccgactataaatcggctcacaagggattcaagggagtcgatgcccagggcacgctttccaaaatttttaagctgggaggaagagatagtcgctctggatcacccatggctagacgctgaaaacccacctggttccggaatcctgtcctcagcttcttaatataactgccttaaaactttaatcccacttgcccctgttacctaattagagcagatgacccctcccctaatgcctgcggagttgtgcacgtagtagggtcaggccacggcagcctaccggcaatttccggccaacagttaaatgagaacatgaaaacagaaaacggttaaaactgtccctttctgtgtgaagatcacgttccttcccccgcaatgtgcccccagacgcacgtgggtcttcagggggccaggtgcacagacgtccctccacgttcacccctccacccttggactttcttttcgccgtggctgcggcacccttgcgcttttgctggtcactgccatggaggcacacagctgcagagacagagaggacgtgggcggcagagaggactgttgacatccaagcttcctttgtttttttttcctgtccttctctcacctcctaaagtagacttcatttttcctaacaggattagacagtcaaggagtggcttactacatgtgggagcttttggtatgtgacatgcgggctgggcagctgttagagtccaacgtggggcagcacagagagggggccacctccccaggccgtggctgcccacacaccccaattagctg

SEQ ID NO: 841 - DNA, 3061 bp, Homo sapiens
cggcacgaggcgactttggtggaggtagttctttggcagcgggcatggcgggtaccgtggtgctggacgatgtggagctgcgggaggctcagagagattacctggacttcctggacgacgaggaagaccagggaatttatcagagcaaagttcgggagctgatcagtgacaaccaataccggctgattgtcaatgtgaatgacctgcgcaggaaaaacgagaagagggctaaccggcttctgaacaatgcctttgaggagctggttgccttccagcgggccttaaaggattttgtggcctccattgatgctacctatgccaagcagtatgaggagttctacgtaggactggaaggcagctttggctccaagcacgtctccccgcggactcttacctcctgcttcctcagctgtgtggtctgtgtggagggcattgtcactaaatgttctctagttcgtcccaaagtcgtccgcagtgtccactactgtcctgctactaagaagaccatagagcgacgttattctgatctcaccaccctggtggcctttccctccagctctgtctatcctaccaaggatgaggagaacaatccccttgagacagaatatggcctttctgtctacaaggatcaccagaccatcaccatccaggagatgccggagaaggccccagccggccagctcccccgctctgtggacgtcattctggatgatgacttggtggataaagcgaagcctggtgaccgggttcaggtggtgggaacctaccgttgccttcctggaaagaagggaggctacacctctgggaccttcaggactgtcctgattgcctgtaatgttaagcagatgagcaaggatgctcagccctctttctctgctgaggatatagccaagatcaagaagttcagtaaaacccgatccaaggatatctttgaccagctggccaagtcattggccccaagtatccatgggcatgactatgtcaagaaagcaatcctctgcttgctcttgggaggggtggaacgagacctagaaaatggcagccacatccgtggggacatcaatattcttctaataggagacccatccgttgccaagtctcagcttctgcggtatgtgctttgcactgcaccccgagctatccccaccactggccggggctcctctggagtgggtctgacggctgctgtcaccacagaccaggaaacaggagagcgccgtctggaagcaggggccatggtcctggctgaccgaggcgtggtttgcattgatgaatttgacaaaatgtctgacatggatcgcacagccatccatgaagtgatggagcagggtcgagtgaccattgccaaggctggcatccatgctcggctgaatgcccgctgcagtgttttggcagctgccaaccctgtctacggcaggtatgaccagtataagactccaatggagaacattgggctacaggactcactgctgtcacgatttgacttgctcttcatcatgctggatcagatggatcctgagcaggatcgggagatctcagaccatgtccttcggatgcaccgttacagagcacctggggagcaggatggcgatgctatgcccttgggtagtgctgtggatatcctggccacagatgatcccaactttagccaggaagatcagcaggacacccagatttatgagaagcatgacaaccttctacatgggaccaagaagaaaaaggagaagatggtgagtgcagcattcatgaagaagtacatccatgtggccaaaatcatcaagcctgtcctgacacaggagtcggccacctacattgcagaagagtattcacgcctgcgcagccaggatagcatgagctcagacaccgccaggacatctccagttacagcccgaacactggaaactctgattcgactggccacagcccatgcgaaggcccgcatgagcaagactgtggacctgcaggatgcagaggaagctgtggagttggtccagtatgcttactttaagaaggttctggagaaggagaagaaacgtaagaagcgaagtgaggatgaatcagagacagaagatgaagaggagaaaagccaagaggaccaggagcagaagaggaagagaaggaagactcgccagccagatgccaaagatggggattcatacgacccctatgacttcagtgacacagaggaggaaatgcctcaagtacacactccaaagacggcagactcacaggagaccaaggaatcccagaaagtggagttgagtgaatccaggttgaaggcattcaaggtggccctcttggatgtgttccgggaagctcatgcgcagtcaatcggcatgaatcgcctcacagaatccatcaaccgggacagcgaagagcccttctcttcagttgagatccaggctgctctgagcaagatgcaggatgacaatcaggtcatggtgtctgagggcatcatcttcctcatctgaggaggcctcgtctctgaacttgggttgtgccgagagagtttgttctgtgtttcccaccctctccctgacccaagtctttgcctctactcccttaacagtgttgaattcaactgaaggcgaggaatgttggtgatgaagctgagttcaggactcggtggaccctttgggaatgggtcatgaaagctgccatggggtgaggaaagaggagacagtgggagaggacaatgactattgcatcttcattgcaaaagcactggctcatccgccctacttcccatcccacacaaacccaattgtaaataacatatgacttctgagtacttttgggggcacaactgttttctgtttgctgtttttttgttttgttttttttctccagagcactttggtctagactaggctttgggtggttccaattggtggagagaagctctgaggcacgtcatgcaggtcaagaaagctttctttgcagtagcaccagttaaggtgaatatgtattgtatcacaaaacaaacccaatatccagatgaatatccgagatgttgaataaacttagccatttcgtacaaaaaaaggggggcccggtaaac

SEQ ID NO: 842 - DNA, 3168 bp, Homo sapiens
atgaggctgctgcggcgctgggcgttcgcggctctgctgctgtcgctgctccccacgcccggtcttgggacccaaggtcctgctggagctctgcgatgggggggcttaccccagctgggaggcccaggagcccctgaggtcacggaacccagccgtctggttagggagagctccgggggagaggtccgaaagcagcagctggacacaagggtccgccaggagccaccagggggcccgcctgtccatctggcccaggtgagtttcgtcatcccagccttcaactcaaacttcaccctggacctggagctgaaccaccacctcctctcctcgcaatacgtggagcgccacttcagccgggaggggacaacccagcacagcaccggggctggagaccactgctactaccaggggaagctccgggggaacccgcactccttcgccgccctctccacctgccaggggctgcatggggtcttctctgatgggaacttgacttacatcgtggagccccaagaggtggctggaccttggggagcccctcagggaccccttccccacctcatttaccggacccctctcctcccagatcccctcggatgcagggaaccaggctgcctgtttgctgtgcctgcccagtcggctcctccaaaccggccgaggctgagaaggaaaaggcaggtccgccggggccaccctacagtgcacagtgaaaccaagtatgtggagctaattgtgatcaacgaccaccagctgttcgagcagatgcgacagtcggtggtcctcaccagcaactttgccaagtccgtggtgaacctggccgatgtgatatacaaggagcagctcaacactcgcatcgtcctggttgccatggaaacatgggcagatggggacaagatccaggtgcaggatgacctcctggagaccctggcccggctcatggtctaccgacgggagggtctgcctgagcccagtgatgccacccacctcttctcgggcaggaccttccagagcacgagcagcggggcagcctacgtggggggcatatgctccctgtcccatggcgggggtgtgaacgagtacggcaacatgggggcgatggccgtgacccttgcccagacgctgggacagaacctgggcatgatgtggaacaaacaccggagctcggcaggggactgcaagtgtccagacatctggctgggctgcatcatggaggacactgggttctacctgccccgcaagttctctcgctgcagcatcgacgagtacaaccagtttctgcaggagggtggtggcagctgcctcttcaacaagcccctcaagctcctggaccccccagagtgcgggaacggcttcgtggaggcaggggaggagtgcgactgcggctcggtgcaggagtgcagccgcgcaggtggcaactgctgcaagaaatgcaccctgactcacgacgccatgtgcagcgacgggctctgctgtcgccgctgcaagtacgaaccacggggtgtgtcctgccgagaggccgtgaacgagtgcgacatcgcggagacctgcaccggggactctagccagtgcccgcctaacctgcacaagctggacggttactactgtgaccatgagcagggccgctgctacggaggtcgctgcaaaacccgggaccggcagtgccaggttctttggggccatgcggctgctgatcgcttctgctacgagaagctgaatgtggaggggacggagcgtgggagctgtgggcgcaagggatccggctgggtccagtgcagtaagcaggacgtgctgtgtggcttcctcctctgtgtcaacatctctggagctcctcggctaggggacctggtgggagacatcagtagtgtcaccttctaccaccagggcaaggagctggactgcaggggaggccacgtgcagctggcggacggctctgacctgagctatgtggaggatggcacagcctgcgggcctaacatgttgtgcctggaccatcgctgcctgccagcttctgccttcaacttcagcacctgccccggcagtggggagcgccggatttgctcccaccacggggtctgcagcaatgaagggaagtgcatctgtcagccagactggacaggcaaagactgcagtatccataaccccctgcccacgtccccacccacgggggagacggagagatataaaggtcccagcggcaccaacatcatcattggctccatcgctggggctgtcctggttgcagccatcgtcctgggcggcacgggctggggatttaaaaacattcgccgaggaaggtccggaggggcctaagtgccaccctcctccctccaagcctggcacccaccgtctcggccctgaaccacgaggctgcccccatccagccacggagggaggcaccatgcaaatgtcttccaggtccaaacccttcaactcctggctccgcaggggtttgggtgggggctgtggccctgcccttggcaccaccagggtggaccaggcctggagggcacttcctccacagtcccccacccacctcctgcggctcagccttgcacacccactgccccgtgtgaatgtagcttccacctcatggattgccacagctcaactcgggggcacctggagggatgcccccaggcagccaccagtggacctagcctggatggcccctccttgcaaccaggcagctgagaccagggtcttatctctctgggacctagggggacggggctgacatctacattttttaaaactgaatcttaatcgatgaatgtaaactcgggggtgctggggccagggcagatgtggggatgttttgacatttacaggaggccccggagaaactgaggtatggccatgccctagaccctccccaaggatgaccacacccgaagtcctgtcactgagcacagtcaggggctgggcatcccagcttgcccccgcttagccccgctgagcttggaggaagtatgagtgctgattcaaaccaaagctgcctgtgccatgcccaaggcctaggttatgggtacggcaaccacatgtcccagatcgtctccaattcgaaaacaaccgtcctgctgtccctgtcaggacacatggattttggcagggcgggggggggttctagaaaatataggttcctataataaaatggcaccttcccccttt

SEQ ID NO: 843 - DNA, 1264 bp, Homo sapiens
ggcacgaggggaggccggggcggggcgggcgcagccggcgctgagcttgcagggccgctcccctcacccgcccccttcgagtccccgggcttcgccccacccggcccgtgggggagtatctgtcctgccgccttcgcccacgccctgcactccgggaccgtccctgcgcgctctgggcgcaccatggcccgcggggctgcgctggcgctgctgctcttcggcctgctgggtgttctggtcgccgccccggatggtggtttcgatttatccgatgcccttcctgacaatgaaaacaagaaacccactgcaatccccaagaaacccagtgctggggatgactttgacttaggagatgctgttgttgatggagaaaatgacgacccacgaccaccgaacccacccaaaccgatgccaaatccaaaccccaaccaccctagttcctccggtagcttttcagatgctgaccttgcggatggcgtttcaggtggagaaggaaaaggaggcagtgatggtggaggcagccacaggaaagaaggggaagaggccgacgccccaggcgtgatccccgggattgtgggggctgtcgtggtcgccgtggctggagccatctctagcttcattgcttaccagaaaaagaagctatgcttcaaagaaaatgcagaacaaggggaggtggacatggagagccaccggaatgccaacgcagagccagctgttcagcgtactcttttagagaaatagaagattgtcggcagaaacagcccaggcgttggcagcagggttagaacagctgcctgaggctcctccctgaaggacacctgcctgagagcagagatggaggccttctgttcacggcggattctttgttttaatcttgcgatgtgctttgcttgttgctgggcggatgatgtttactaacgatgaattttacatccaaagggggataggcacttggacccccattctccaaggcccgggggggcggtttcccatgggatgtgaaaggctggccattattaagtccctgtaactcaaatgtcaaccccaccgaggcacccccccgtcccccagaatcttggctgtttacaaatcacgtgtccatcgagcacgtctgaaacccctggtagccccgacttctttttaattaaaataaggtaagcccttcaatttgtttcttcaatatttctttcatttgtagggatatttgtttttcatatcagactaataaaaagaaattagaaaccaaaaaaaaaaaaaaaaaaaa

SEQ ID NO: 844 - DNA, 561 bp, Homo sapiens
accacagtggtgtccgagaagtcaggcacgtagctcagcggcggccgcggcgcgtgcgtctgtgcctctgcgcgggtctcctggtccttctgccatcatgccgatgttcatcgtaaacaccaacgtgccccgcgcctccgtgccggacgggttcctctccgagctcacccagcagctggcgcaggccaccggcaagcccccccagtacatcgcggtgcacgtggtcccggaccagctcatggccttcggcggctccagcgagccgtgcgcgctctgcagcctgcacagcatcggcaagatcggcggcgcgcagaaccgctcctacagcaagctgctgtgcggcctgctggccgagcgcctgcgcatcagcccggacagggtctacatcaactattacgacatgaacgcggccaatgtgggctggaacaactccaccttcgcctaagagccgcagggacccacgctgtctgcgctggctccacccgggaacccgccgcacgctgtgttctaggcccgcccaccccaaccttctggtggggagaaataaacggtttagagact

SEQ ID NO: 845 - DNA, 1973 bp, Homo sapiens
gggatattggagtagcaagaggctgggaagccatcacttaccttgcactgagaaagaagacaaaggccagtatgcacagctttcctccactgctgctgctgctgttctggggtgtggtgtctcacagcttcccagcgactctagaaacacaagagcaagatgtggacttagtccagaaatacctggaaaaatactacaacctgaagaatgatgggaggcaagttgaaaagcggagaaatagtggcccagtggttgaaaaattgaagcaaatgcaggaattctttgggctgaaagtgactgggaaaccagatgctgaaaccctgaaggtgatgaagcagcccagatgtggagtgcctgatgtggctcagtttgtcctcactgaggggaaccctcgctgggagcaaacacatctgacctacaggattgaaaattacacgccagatttgccaagagcagatgtggaccatgccattgagaaagccttccaactctggagtaatgtcacacctctgacattcaccaaggtctctgagggtcaagcagacatcatgatatcttttgtcaggggagatcatcgggacaactctccttttgatggacctggaggaaatcttgctcatgcttttcaaccaggcccaggtattggaggggatgctcattttgatgaagatgaaaggtggaccaacaatttcagagagtacaacttacatcgtgttgcggctcatgaactcggccattctcttggactctcccattctactgatatcggggctttgatgtaccctagctacaccttcagtggtgatgttcagctagctcaggatgacattgatggcatccaagccatatatggacgttcccaaaatcctgtccagcccatcggcccacaaaccccaaaagcgtgtgacagtaagctaacctttgatgctataactacgattcggggagaagtgatgttctttaaagacagattctacatgcgcacaaatcccttctacccggaagttgagctcaatttcatttctgttttctggccacaactgccaaatgggcttgaagctgcttacgaatttgccgacagagatgaagtccggtttttcaaagggaataagtactgggctgttcagggacagaatgtgctacacggataccccaaggacatctacagctcctttggcttccctagaactgtgaagcatatcgatgctgctctttctgaggaaaacactggaaaaacctacttctttgttgctaacaaatactggaggtatgatgaatataaacgatctatggatccaggttatcccaaaatgatagcacatgactttcctggaattggccacaaagttgatgcagttttcatgaaagatggatttttctatttctttcatggaacaagacaatacaaatttgatcctaaaacgaagagaattttgactctccagaaagctaatagctggttcaactgcaggaaaaattgaacattactaatttgaatggaaaacacatggtgtgagtccaaagaaggtgttttcctgaagaactgtctattttctcagtcatttttaacctctagagtcactgatacacagaatataatcttatttatacctcagtttgcatatttttttactatttagaatgtagccctttttgtactgatataatttagttccacaaatggtgggtacaaaaagtcaagtttgtggcttatggattcatataggccagagttgcaaagatcttttccagagtatgcaactctgacgttgatcccagagagcagcttcagtgacaaacatatcctttcaagacagaaagagacaggagacatgagtctttgccggaggaaaagcagctcaagaacacatgtgcagtcactggtgtcaccctggataggcaagggataactcttctaacacaaaataagtgttttatgtttggaataaagtcaaccttgtttctactgtttt

SEQ ID NO: 846 - DNA, 1821 bp, Homo sapiens
acaaggaggcaggcaagacagcaaggcatagagacaacatagagctaagtaaagccagtggaaatgaagagtcttccaatcctactgttgctgtgcgtggcagtttgctcagcctatccattggatggagctgcaaggggtgaggacaccagcatgaaccttgttcagaaatatctagaaaactactacgacctcaaaaaagatgtgaaacagtttgttaggagaaaggacagtggtcctgttgttaaaaaaatccgagaaatgcagaagttccttggattggaggtgacggggaagctggactccgacactctggaggtgatgcgcaagcccaggtgtggagttcctgatgttggtcacttcagaacctttcctggcatcccgaagtggaggaaaacccaccttacatacaggattgtgaattatacaccagatttgccaaaagatgctgttgattctgctgttgagaaagctctgaaagtctgggaagaggtgactccactcacattctccaggctgtatgaaggagaggctgatataatgatctcttttgcagttagagaacatggagacttttacccttttgatggacctggaaatgttttggcccatgcctatgcccctgggccagggattaatggagatgcccactttgatgatgatgaacaatggacaaaggatacaacagggaccaatttatttctcgttgctgctcatgaaattggccactccctgggtctctttcactcagccaacactgaagctttgatgtacccactctatcactcactcacagacctgactcggttccgcctgtctcaagatgatataaatggcattcagtccctctatggacctccccctgactcccctgagacccccctggtacccacggaacctgtccctccagaacctgggacgccagccaactgtgatcctgctttgtcctttgatgctgtcagcactctgaggggagaaatcctgatctttaaagacaggcacttttggcgcaaatccctcaggaagcttgaacctgaattgcatttgatctcttcattttggccatctcttccttcaggcgtggatgccgcatatgaagttactagcaaggacctcgttttcatttttaaaggaaatcaattctgggccatcagaggaaatgaggtacgagctggatacccaagaggcatccacaccctaggtttccctccaaccgtgaggaaaatcgatgcagccatttctgataaggaaaagaacaaaacatatttctttgtagaggacaaatactggagatttgatgagaagagaaattccatggagccaggctttcccaagcaaatagctgaagactttccagggattgactcaaagattgatgctgtttttgaagaatttgggttcttttatttctttactggatcttcacagttggagtttgacccaaatgcaaagaaagtgacacacactttgaagagtaacagctggcttaattgttgaaagagatatgtagaaggcacaatatgggcactttaaatgaagctaataattcttcacctaagtctctgtgaattgaaatgttcgttttctcctgcctgtgctgtgactcgagtcacactcaagggaacttgagcgtgaatctgtatcttgccggtcatttttatgttattacagggcattcaaatgggctgctgcttagcttgcaccttgtcacatagagtgatctttcccaagagaaggggaagcactcgtgtgcaacagacaagtgactgtatctgtgtagactatttgcttatttaataaagacgatttgtcagttgtttt

SEQ ID NO: 847 - DNA, 1127 bp, Homo sapiens
accaaatcaaccataggtccaagaacaattgtctctggacggcagctatgcgactcaccgtgctgtgtgctgtgtgcctgctgcctggcagcctggccctgccgctgcctcaggaggcgggaggcatgagtgagctacagtgggaacaggctcaggactatctcaagagattttatctctatgactcagaaacaaaaaatgccaacagtttagaagccaaactcaaggagatgcaaaaattctttggcctacctataactggaatgttaaactcccgcgtcatagaaataatgcagaagcccagatgtggagtgccagatgttgcagaatactcactatttccaaatagcccaaaatggacttccaaagtggtcacctacaggatcgtatcatatactcgagacttaccgcatattacagtggatcgattagtgtcaaaggctttaaacatgtggggcaaagagatccccctgcatttcaggaaagttgtatggggaactgctgacatcatgattggctttgcgcgaggagctcatggggactcctacccatttgatgggccaggaaacacgctggctcatgcctttgcgcctgggacaggtctcggaggagatgctcacttcgatgaggatgaacgctggacggatggtagcagtctagggattaacttcctgtatgctgcaactcatgaacttggccattctttgggtatgggacattcctctgatcctaatgcagtgatgtatccaacctatggaaatggagatccccaaaattttaaactttcccaggatgatattaaaggcattcagaaactatatggaaagagaagtaattcaagaaagaaatagaaacttcaggcagaacatccattcattcattcattggattgtatatcattgttgcacaatcagaattgataagcactgttcctccactccatttagcaattatgtcacccttttttattgcagttggtttttgaatgtctttcactccttttattggttaaactcctttatggtgtgactgtgtcttattccatctatgagctttgtcagtgcgcgtagatgtcaataaatgttacatacacaaataaataaaatgtttattccatggtaaattta

SEQ ID NO: 848 - DNA, 2223 bp, Homo sapiens
gctcgccagggaagggccctacccagaggacagaaagaaagccaggaggggtagagtttgaagagaagatcatgttctccctgaagacgcttccatttctgctcttactccatgtgcagatttccaaggcctttcctgtatcttctaaagagaaaaatacaaaaactgttcaggactacctggaaaagttctaccaattaccaagcaaccagtatcagtctacaaggaagaatggcactaatgtgatcgttgaaaagcttaaagaaatgcagcgattttttgggttgaatgtgacggggaagccaaatgaggaaactctggacatgatgaaaaagcctcgctgtggagtgcctgacagtggtggttttatgttaaccccaggaaaccccaagtgggaacgcactaacttgacctacaggattcgaaactataccccacagctgtcagaggctgaggtagaaagagctatcaaggatgcctttgaactctggagtgttgcatcacctctcatcttcaccaggatctcacagggagaggcagatatcaacattgctttttaccaaagagatcacggtgacaattctccatttgatggacccaatggaatccttgctcatgcctttcagccaggccaaggtattggaggagatgctcattttgatgccgaagaaacatggaccaacacctccgcaaattacaacttgtttcttgttgctgctcatgaatttggccattctttggggctcgctcactcctctgaccctggtgccttgatgtatcccaactatgctttcagggaaaccagcaactactcactccctcaagatgacatcgatggcattcaggccatctatggactttcaagcaaccctatccaacctactggaccaagcacacccaaaccctgtgaccccagtttgacatttgatgctatcaccacactccgtggagaaatacttttctttaaagacaggtacttctggagaaggcatcctcagctacaaagagtcgaaatgaattttatttctctattctggccatcccttccaactggtatacaggctgcttatgaagattttgacagagacctcattttcctatttaaaggcaaccaatactgggctctgagtggctatgatattctgcaaggttatcccaaggatatatcaaactatggcttccccagcagcgtccaagcaattgacgcagctgttttctacagaagtaaaacatacttctttgtaaatgaccaattctggagatatgataaccaaagacaattcatggagccaggttatcccaaaagcatatcaggtgcctttccaggaatagagagtaaagttgatgcagttttccagcaagaacatttcttccatgtcttcagtggaccaagatattacgcatttgatcttattgctcagagagttaccagagttgcaagaggcaataaatggcttaactgtagatatggctgaagcaaaatcaaatgtggctgtatccactttcagaatgttgaagggaagttcagcatgcattttcgttacattgtgtcctgcttatacttttctcaatattaagtcattgtttcccatcactgtatccattctacctgtcctccgtgaaaatatgtttggaatattccactatttgcagaggcttattcagttcttacacattccatcttacattagtgattccatcaaagagaaggaaagtaagcctttttgtcacctcaatatttactatttcaatacttacatatctgacttctaggatttattgttatattacttgcctatctgacttcatacatccctcagtttcttaaaatgtcctatgtatatcttctacatgcaatttagaactagattttggttagaagtaaggattataaacaacctagacagtacccttggcctttacagaaaatatggtgctgttttctacccttggaaagaaatgtagatgatatgtttcgtgggttgaattgtgtcccccataaaagatatgttgaagttctaaccccaggtacccatgaatgtgagcttaccagggtctttgcagatgtaattagttaagttaaggtgagatcacactgaattagggtgggctctaaatccattatgactgttgttcttataagaagaagagagcatagccacctaggggaggaggccgtgtgaagacagaggcagagattggagtgacgcatctccaagccaa

SEQ ID NO: 849 - DNA, 1743 bp, Homo sapiens
aaagaaggtaagggcagtgagaatgatgcatcttgcattccttgtgctgttgtgtctgccagtctgctctgcctatcctctgagtggggcagcaaaagaggaggactccaacaaggatcttgcccagcaatacctagaaaagtactacaacctcgaaaaggatgtgaaacagtttagaagaaaggacagtaatctcattgttaaaaaaatccaaggaatgcagaagttccttgggttggaggtgacagggaagctagacactgacactctggaggtgatgcgcaagcccaggtgtggagttcctgacgttggtcacttcagctcctttcctggcatgccgaagtggaggaaaacccaccttacatacaggattgtgaattatacaccagatttgccaagagatgctgttgattctgccattgagaaagctctgaaagtctgggaagaggtgactccactcacattctccaggctgtatgaaggagaggctgatataatgatctctttcgcagttaaagaacatggagacttttactcttttgatggcccaggacacagtttggctcatgcctacccacctggacctgggctttatggagatattcactttgatgatgatgaaaaatggacagaagatgcatcaggcaccaatttattcctcgttgctgctcatgaacttggccactccctggggctctttcactcagccaacactgaagctttgatgtacccactctacaactcattcacagagctcgcccagttccgcctttcgcaagatgatgtgaatggcattcagtctctctacggacctccccctgcctctactgaggaacccctggtgcccacaaaatctgttccttcgggatctgagatgccagccaagtgtgatcctgctttgtccttcgatgccatcagcactctgaggggagaatatctgttctttaaagacagatatttttggcgaagatcccactggaaccctgaacctgaatttcatttgatttctgcattttggccctctcttccatcatatttggatgctgcatatgaagttaacagcagggacaccgtttttatttttaaaggaaatgagttctgggccatcagaggaaatgaggtacaagcaggttatccaagaggcatccataccctgggttttcctccaaccataaggaaaattgatgcagctgtttctgacaaggaaaagaagaaaacatacttctttgcagcggacaaatactggagatttgatgaaaatagccagtccatggagcaaggcttccctagactaatagctgatgactttccaggagttgagcctaaggttgatgctgtattacaggcatttggatttttctacttcttcagtggatcatcacagtttgagtttgaccccaatgccaggatggtgacacacatattaaagagtaacagctggttacattgctaggcgagatagggggaagacagatatgggtgtttttaataaatctaataattattcatctaatgtattatgagccaaaatggttaatttttcctgcatgttctgtgactgaagaagatgagccttgcagatatctgcatgtgtcatgaagaatgtttctggaattcttcacttgcttttgaattgcactgaacagaattaagaaatactcatgtgcaataggtgagagaatgtattttcatagatgtgttattacttcctcaataaaaagttttattttgggcctgttcctt

SEQ ID NO: 850 - DNA, 1778 bp, Homo sapiens
tagaagtttacaatgaagtttcttctaatactgctcctgcaggccactgcttctggagctcttcccctgaacagctctacaagcctggaaaaaaataatgtgctatttggtgagagatacttagaaaaattttatggccttgagataaacaaacttccagtgacaaaaatgaaatatagtggaaacttaatgaaggaaaaaatccaagaaatgcagcacttcttgggtctgaaagtgaccgggcaactggacacatctaccctggagatgatgcacgcacctcgatgtggagtccccgatctccatcatttcagggaaatgccaggggggcccgtatggaggaaacattatatcacctacagaatcaataattacacacctgacatgaaccgtgaggatgttgactacgcaatccggaaagctttccaagtatggagtaatgttacccccttgaaattcagcaagattaacacaggcatggctgacattttggtggtttttgcccgtggagctcatggagacttccatgcttttgatggcaaaggtggaatcctagcccatgcttttggacctggatctggcattggaggggatgcacatttcgatgaggacgaattctggactacacattcaggaggcacaaacttgttcctcactgctgttcacgagattggccattccttaggtcttggccattctagtgatccaaaggctgtaatgttccccacctacaaatatgtcgacatcaacacatttcgcctctctgctgatgacatacgtggcattcagtccctgtatggagacccaaaagagaaccaacgcttgccaaatcctgacaattcagaaccagctctctgtgaccccaatttgagttttgatgctgtcactaccgtgggaaataagatctttttcttcaaagacaggttcttctggctgaaggtttctgagagaccaaagaccagtgttaatttaatttcttccttatggccaaccttgccatctggcattgaagctgcttatgaaattgaagccagaaatcaagtttttctttttaaagatgacaaatactggttaattagcaatttaagaccagagccaaattatcccaagagcatacattcttttggttttcctaactttgtgaaaaaaattgatgcagctgtttttaacccacgtttttataggacctacttctttgtagataaccagtattggaggtatgatgaaaggagacagatgatggaccctggttatcccaaactgattaccaagaacttccaaggaatcgggcctaaaattgatgcagtcttctattctaaaaacaaatactactatttcttccaaggatctaaccaatttgaatatgacttcctactccaacgtatcaccaaaacactgaaaagcaatagctggtttggttgttagaaatggtgtaattaatggtttttgttagttcacttcagcttaataagtatttattgcatatttgctatgtcctcagtgtaccactacttagagatatgtatcataaaaataaaatctgtaaaccataggtaatgattatataaaatacataatatttttcaattttgaaaactctaattgtccattcttgcttgactctactattaagtttgaaaatagttaccttcaaagcaagataattctatttgaagcatgctctgtaagttgcttcctaacatccttggactgagaaattatacttacttctggcataactaaaattaagtatatatattttggctcaaataaaattg

SEQ ID NO: 851 - DNA, 2722 bp, Homo sapiens
caacagtccccaggcatcaccattcaagatgcatccaggggtcctggctgccttcctcttcttgagctggactcattgtcgggccctgccccttcccagtggtggtgatgaagatgatttgtctgaggaagacctccagtttgcagagcgctacctgagatcatactaccatcctacaaatctcgcgggaatcctgaaggagaatgcagcaagctccatgactgagaggctccgagaaatgcagtctttcttcggcttagaggtgactggcaaacttgacgataacaccttagatgtcatgaaaaagccaagatgcggggttcctgatgtgggtgaatacaatgttttccctcgaactcttaaatggtccaaaatgaatttaacctacagaattgtgaattacacccctgatatgactcattctgaagtcgaaaaggcattcaaaaaagccttcaaagtttggtccgatgtaactcctctgaattttaccagacttcacgatggcattgctgacatcatgatctcttttggaattaaggagcatggcgacttctacccatttgatgggccctctggcctgctggctcatgcttttcctcctgggccaaattatggaggagatgcccattttgatgatgatgaaacctggacaagtagttccaaaggctacaacttgtttcttgttgctgcgcatgagttcggccactccttaggtcttgaccactccaaggaccctggagcactcatgtttcctatctacacctacaccggcaaaagccactttatgcttcctgatgacgatgtacaagggatccagtctctctatggtccaggagatgaagaccccaaccctaaacatccaaaaacgccagacaaatgtgacccttccttatcccttgatgccattaccagtctccgaggagaaacaatgatctttaaagacagattcttctggcgcctgcatcctcagcaggttgatgcggagctgtttttaacgaaatcattttggccagaacttcccaaccgtattgatgctgcatatgagcacccttctcatgacctcatcttcatcttcagaggtagaaaattttgggctcttaatggttatgacattctggaaggttatcccaaaaaaatatctgaactgggtcttccaaaagaagttaagaagataagtgcagctgttcactttgaggatacaggcaagactctcctgttctcaggaaaccaggtctggagatatgatgatactaaccatattatggataaagactatccgagactaatagaagaagacttcccaggaattggtgataaagtagatgctgtctatgagaaaaatggttatatctattttttcaacggacccatacagtttgaatacagcatctggagtaaccgtattgttcgcgtcatgccagcaaattccattttgtggtgttaagtgtctttttaaaaattgttatttaaatcctgaagagcatttggggtaatacttccagaagtgcggggtaggggaagaagagctatcaggagaaagcttggttctgtgaacaagcttcagtaagttatctttgaatatgtagtatctatatgactatgcgtggctggaaccacattgaagaatgttagagtaatgaaatggaggatctctaaagagcatctgattcttgttgctgtacaaaagcaatggttgatgatacttcccacaccacaaatgggacacatggtctgtcaatgagagcataatttaaaaatatatttataaggaaattttacaagggcataaagtaaatacatgcatataatgaataaatcattcttactaaaaagtataaaatagtatgaaaatggaaatttgggagagccatacataaaagaaataaaccaaaggaaaatgtctgtaataatagactgtaacttccaaataaataattttcattttgcactgaggatattcagatgtatgtgcccttcttcacacagacactaacgaaatatcaaagtcattaaagacaggagacaaaagagcagtggtaagaatagtagatgtggcctttgaattctgtttaattttcacttttggcaatgactcaaagtctgctctcatataagacaaatattcctttgcatattataaaggataaagaaggatgatgtctttttattaaaatatttcaggttcttcagaagtcacacattacaaagttaaaattgttatcaaaatagtctaaggccatggcatccctttttcataaattatttgattatttaagactaaaagttgcattttaaccctattttacctagctaattatttaattgtccggtttgtcttggatatataggctattttctaaagacttgtatagcatgaaataaaatatatcttataaagtggaagtatgtatattaaaaaagagacatccaaatttttttttaaagcagtctactagattgtgatcccttgagatatggaaggatgcctttttttctctgcatttaaaaaaatcccccagcacttcccacagtgcctattgatacttggggagggtgcttggcacttattgaatatatgatcggccatcaagggaagaactattgtgctcagagacactgttgataaaaactcaggcaaagaaaatgaaatgcatatttgcaaagtgtattaggaagtgtttatgttgtttataataaaaatatattttcaacagaaaaaaaa

SEQ ID NO: 852 - DNA, 3530 bp, Homo sapiens
gcgaggatccggcgtgcagtgttccgagctgggctgggcgccgagagcatgggcagcgacccgagcgcgcccggacggccgggctggacgggcagcctcctcggcgaccgggaggaggcggcgcggccgcgactgctgccgctgctcctggtgcttctgggctgcctgggccttggcgtagcggccgaagacgcggaggtccatgccgagaactggctgcggctttatggctacctgcctcagcccagccgccatatgtccaccatgcgttccgcccagatcttggcctcggcccttgcagagatgcagcgcttctacgggatcccagtcaccggtgtgctcgacgaagagaccaaggagtggatgaagcggccccgctgtggggtgccagaccagttcggggtacgagtgaaagccaacctgcggcggcgtcggaagcgctacgccctcaccgggaggaagtggaacaaccaccatctgacctttagcatccagaactacacggagaagttgggctggtaccactcgatggaggcggtgcgcagggccttccgcgtgtgggagcaggccacgcccctggtcttccaggaggtgccctatgaggacatccggctgcggcgacagaaggaggccgacatcatggtactctttgcctctggcttccacggcgacagctcgccgtttgatggcaccggtggctttctggcccacgcctatttccctggccccggcctaggcggggacacccattttgacgcagatgagccctggaccttctccagcactgacctgcatggaaacaacctcttcctggtggcagtgcatgagctgggccacgcgctggggctggagcactccagcaaccccaatgccatcatggcgccgttctaccagtggaaggacgttgacaacttcaagctgcccgaggacgatctccgtggcatccagcagctctacggtaccccagacggtcagccacagcctacccagcctctccccactgtgacgccacggcggccaggccggcctgaccaccggccgccccggcctccccagccaccacccccaggtgggaagccagagcggcccccaaagccgggccccccagtccagccccgagccacagagcggcccgaccagtatggccccaacatctgcgacggggactttgacacagtggccatgcttcgcggggagatgttcgtgttcaagggccgctggttctggcgagtccggcacaaccgcgtcctggacaactatcccatgcccatcgggcacttctggcgtggtctgcccggtgacatcagtgctgcctacgagcgccaagacggtcgttttgtctttttcaaaggtgaccgctactggctctttcgagaagcgaacctggagcccggctacccacagccgctgaccagctatggcctgggcatcccctatgaccgcattgacacggccatctggtgggagcccacaggccacaccttcttcttccaagaggacaggtactggcgcttcaacgaggagacacagcgtggagaccctgggtaccccaagcccatcagtgtctggcaggggatccctgcctcccctaaaggggccttcctgagcaatgacgcagcctacacctacttctacaagggcaccaaatactggaaattcgacaatgagcgcctgcggatggagcccggctaccccaagtccatcctgcgggacttcatgggctgccaggagcacgtggagccaggcccccgatggcccgacgtggcccggccgcccttcaacccccacgggggtgcagagcccggggcggacagcgcagagggcgacgtgggggatggggatggggactttggggccggggtcaacaaggacgggggcagccgcgtggtggtgcagatggaggaggtggcacggacggtgaacgtggtgatggtgctggtgccactgctgctgctgctctgcgtcctgggcctcacctacgcgctggtgcagatgcagcgcaagggtgcgccacgtgtcctgctttactgcaagcgctcgctgcaggagtgggtctgaccacccagcgctcctgctaacggtgctcagggggcgcctgtggttctgagatggctcccaggggctccctccgcccccaggtaggggcccctctcagccctcacacaccctgtctgccccgccctcattatttatgtccaggtgtttgttttgttttgtttttggcaccttacttgaccatttgtttctgtttccccgactggggcagggtgtttagaattttctaaatgtagttctgctccagacagggaattaggcccccatcatcctctggcttggccacagccaggggagcagaggggcagaggcccacattggaagagcagcacctcctcagcctgaaccccagggctgtaactgccaggctctctttgcccagttggagactgtctggcccccctggtcccctccttcccaagtgagtctctctgggccttaggaagagccttccacccaggggcagccccaggccaaaggggacctggaagggaggtgggccgtggcccttgagtccccattgaggcttggttccttcccaatccagtggacttcgcagtccacttctgacagcctcagtgaccctggctccttgtgccagagaacccagcccacccccggcagcagcccccagctcccacctccccttgggcccacaccttcttccctctctggagaaagggccctgggcctgcctcaccacggaccaaagggagtctgccagggcccctctccccagggaagcagcagcctcgcccctggcagagatgcctccctgagctagaaccctctgttccttccctgtgcctcctccctccctcccgactcacaccactagcctcaggggtctgagctccagctcctttgggcttcagctgccagtgtcctgagccccagggagagggggctggtgggtgcctaggcctgggcagtggatggccgtgaatgggtgcccacagtgtcaggcactgggcatgaggggttcctcccctccagctccctgtgcccccagggtcctgggaggagagacactggtggggataggccagccgcgcatcagactgtgaaccccacgaaggagcccattgtggcctaagaggctgccctcctgtgctcagccctgaggacagatgcctccttcctcttttccttcccaaagcaagcaagaggccgtggctgctgtgggaaatggtactgtacagctggctctacttccccatggccctgagcgagtggagtctgccacccaggatccccaaggcacttgagggggaaggattctgctggcctctgcgagtggtttcttgtgcactggcaccaagtgcgggtccggcagcttctgccccctgcagaaccggagagccagctaaggggtggggctgcgggggttccgtgtccacccccatacatttatttctgtaaataatgtgcactgaataaattgtacagccggcaaaaaaaaaaaaaaaaaaaaa

SEQ ID NO: 853 - DNA, 3249 bp, Homo sapiens
aaagaactgggggtaagagcccctctgcctagcactgctcccccaaggctcccagaaatctcaggtcagaggcacggacagcctctggagctctcgtctggtgggaccatgaactgccagcagctgtggctgggcttcctactccccatgacagtctcaggccgggtcctggggcttgcagaggtggcgcccgtggactacctgtcacaatatgggtacctacagaagcctctagaaggatctaataacttcaagccagaagatatcaccgaggctctgagagcttttcaggaagcatctgaacttccagtctcaggtcagctggatgatgccacaagggcccgcatgaggcagcctcgttgtggcctagaggatcccttcaaccagaagacccttaaatacctgttgctgggccgctggagaaagaagcacctgactttccgcatcttgaacctgccctccacccttccaccccacacagcccgggcagccctgcgtcaagccttccaggactggagcaatgtggctcccttgaccttccaagaggtgcaggctggtgcggctgacatccgcctctccttccatggccgccaaagctcgtactgttccaatacttttgatgggcctgggagagtcctggcccatgccgacatcccagagctgggcagtgtgcacttcgacgaagacgagttctggactgaggggacctaccgtggggtgaacctgcgcatcattgcagcccatgaagtgggccatgctctggggcttgggcactcccgatattcccaggccctcatggccccagtctacgagggctaccggccccactttaagctgcacccagatgatgtggcagggatccaggctctctatggcaagaagagtccagtgataagggatgaggaagaagaagagacagagctgcccactgtgcccccagtgcccacagaacccagtcccatgccagacccttgcagtagtgaactggatgccatgatgctggggccccgtgggaagacctatgctttcaagggggactatgtgtggactgtatcagattcaggaccgggccccttgttccgagtgtctgccctttgggaggggctccccggaaacctggatgctgctgtctactcgcctcgaacacaatggattcacttctttaagggagacaaggtgtggcgctacattaatttcaagatgtctcctggcttccccaagaagctgaatagggtagaacctaacctggatgcagctctctattggcctctcaaccaaaaggtgttcctctttaagggctccgggtactggcagtgggacgagctagcccgaactgacttcagcagctaccccaaaccaatcaagggtttgtttacgggagtgccaaaccagccctcggctgctatgagttggcaagatggccgagtctacttcttcaagggcaaagtctactggcgcctcaaccagcagcttcgagtagagaaaggctatcccagaaatatttcccacaactggatgcactgtcgtccccggactatagacactaccccatcaggtgggaataccactccctcaggtacgggcataaccttggataccactctctcagccacagaaaccacgtttgaatactgactgctcacccacagacacaatcttggacattaacccctgaggctccaccacccaccctttcatttcccccccagaagcctaaggcctaatagctgaatgaaatacctgtctgctcagtagaaccttgcaggtgctgtagcaggcgcaagaccgtagatctcaggcctctaacacttccaactccagccaccactttcctgtgcattttcactcctgagaagtgctcccctaactcagatcccctaacttagatttggcccccaactccatttcctgtctgtcttagacagcccttccaactgtgtcatctcttctctggaggtcaatggtggagggagatgcctgggtcctgttcttcctacataaaatgcaagaaaacagcatggccagtaaactgagcaagggccttggaatccttgagaatcacatttatgtgcttatgattacgggcaagctaattaaccttgttgaatctcagattccccatttgcaacattaggttaagaccagtactgcaggattgttgcactaaatgaaatactgtatgtgaagtgcctggcacagtgtctggtacatttgtgtttaataaaagctaactccatgttcataagagaggactgaacagctcttcctctagctgtctggctgtataactcttacagtagtctgtataataagggcatctctattagatctttaggggacagaggatttgtcaagatggttagctctttgttttggggtgcagagaaagaaaagagcagcaacagcagaggctggactccctggttcagtatttaatgccattttattcacatgctcccatgttctccctccctcccattgtagccttgctgcccaggggagggatatgtcttcctttatgcatctgggaaaccaggaacagaccctgcgcaggagagtcagagggggaagagttagaatgggtcagtggctggaacaaagttctggttaaggaggaaattagtgccacccacggtgagaagcagagaaggcacttgcatcctatgcagccctgaagaccaggctcctttgggcaaaaggcaagactctggcaggtgggtcaatgctctctccttggagcaagaagccagcttttggggaaggcaggtcctgaggcaggcactgccctgtggtcttccccaggttgaggagagaagtggaagccccatggaagacagtgctcccagctgaggtaggaggcggaggtgggggtgggggtagtttaagcctatggggcccagggggaaaggccaaacagaaacccaactaccccctaatgaagggcctggaggttggggtatcttggagctcctcagagcccttcttcccatcaaaaaggtatcaaatgccttggaagctccctgatcctacaaaacaaaaaaatgcttatttttaccactgtgaggcaagctgaggtgaacatttaaaaggctatttcaagacgaggtgcggtggctataatcctagcactttgggaggctgaagcaggaggatcacttgagcccaggagttcaagaccagcttgggcaacatagggagaccctgtctctgcaaaaaaataaaaacgaatacataaaaattaaaaaaaaa

SEQ ID NO: 854 - DNA, 1108 bp, Homo sapiens
cctgggcccccatgcccgtgcagctcgcacatatgtggggcagagcagccaccctgcccccagcagcagccgtccatcgtcagacgtgatcatttcctgaggcctcgagtgtgtcagggtgtttgtgcctcataacaacccacaggatggtcacccccgctttgcagatgaagaaaccaaagcagttttgccgacggatggggcaaaagaagcagcgaccagctagagcagggcagccacacagctcgtccgacgcagcccaggcacctgcagagcagccacacagctcgtccgatgcagcccaggcaccttgccccagggagcgctgcttgggaccgcccaccactccgggcccataccgcagcatctatttctcaagcccaaagggccaccttacccgactggggttggagttcttcgaccagccggcagtccccctggcccgggcatttctgggacaggtcctagtccggcgacttcctaatggcacagaactccgaggccgcatcgtggagaccgaggcatacctggggccagaggatgaaccggcccactcaaggggtggccggcagaccccccgcaaccgaggcatgttcatgaagccggggaccctgtacgtgtacatcatttacggcatgtacttctgcatgaacatctccagccagggggacggggcttgcgtcttgctgcgagcactggagcccctggaaggtctggagaccatgcgtcacgttcgcagcaccctccggaaaggcaccgccagccgtgtcctcaaggaccgcgagctctgcagtggcccctccaagctgtgccaggccctggccatcaacaagagctttgaccagagggacctggcacaggatgaagctgtatggctggagcgtggtcccctggagcccagtgagccggctgtagtggcagcagcccgggtgggcgtcggccatgcaggggagtgggcccggaaacccctccgcttctatgtccggggcagcccctgggtcagtgtggtcgacagagtggctgagcaggacacacaggcctgagcaaagggcctgcccagacaagattttttaattgtttaaaaaccgaataaatgttttatttctag

SEQ ID NO: 855 - DNA, 1771 bp, Homo sapiens
cgagcatggccgctccgcgagtattcccactttcctgtgcggtgcagcagtatgcctgggggaagatgggttccaacagcgaagtggcgcggctgttggccagcagtgatccactggcccagatcgcagaggacaagccttatgcagagttgtggatggggactcacccccgaggggatgccaagatccttgacaaccgcatctcacagaagaccctaagccagtggattgctgagaaccaggacagcttgggctcaaaggtcaaggacacctttaatggcaacctgcccttcctcttcaaagtgctctcagttgaaacacccctgtccatccaggcacaccctaacaaggagctggcagagaagctgcacctccaggctccgcagcactaccccgatgccaaccacaagccagagatggccattgccctcacccccttccagggcttgtgtggcttccggccagttgaggagattgtaacctttctaaagaaggtgcctgagtttcagttcctgattggagatgaggcagcaacacacctgaagcagaccatgagccatgactcccaggctgtggcctcctctctgcagagctgtttctcccacctgatgaagagtgagaagaaggtggtggtggaacagctcaacctgttggtgaagcggatctcccagcaagcggctgccggaaacaacatggaggacatctttggggagcttttgctacagctgcaccagcagtacccaggtgatatcggctgctttgccatctacttcctgaacctgcttaccctgaagcctggggaggccatgtttctggaggccaacgtaccccatgcctacctgaaaggagactgcgtggagtgcatggcgtgttcagacaacacagttcgtgctggcctgacacccaagttcattgatgtgccaaccctgtgtgaaatgctcagctatacccctagctccagcaaggacaggctctttctcccaacacggagtcaggaagacccctacctctcaatctatgacccccctgtaccagacttcaccattatgaagacggaggtccctggctctgtcactgaatacaaggtcttggcactggactctgccagcatcctcctgatggtacaggggacagtaatagccagcacacccacaacccagacaccaatccctctgcaacgtggtggcgtgctcttcattggggccaatgagagtgtctcactgaagcttactgagccgaaggacctgctgatattccgtgcctgctgtctgctgtaaaggctgcagcctccccagctctcctctgccagccaccctaaattccagccaacctcacctcctcgggcccagctcaagcccccttccttgctctggaccccttaggtataccctggaagagctggggtgggggaggagggagcgtgaaggtagtgactcctgaacacacccaggtggaaccatctttggggaggagaggcccgtgtgaggggtctgatactccctttgtcttccctctctactcctcgctacacctgagccaggctcttgccaactctgttccagcctatggctttaggctagctgttaaatatgtgacccagcattagctcagcatctgtcagagcaagagaccaggtaatttctaagaacagggttctagcgatgggactgcccatttcctcagctgcagaggaggaaagggaaagggtaggcctgtagactaacgctgtttacacccttgttctgtcaaagcaattaaagatcacttgtgt

SEQ ID NO: 856 - DNA, 4374 bp, Homo sapiens
gggcacgagccctgccatgtctcgccggaagcctgcgtcgggcggcctcgctgcctccagctcagcccctgcgaggcaagcggttttgagccgattcttccagtctacgggaagcctgaaatccacctcctcctccacaggtgcagccgaccaggtggaccctggcgctgcagcggccgcagcgcccccagcgcccgccttcccgccccagctgccgccgcacgtagctacagaaattgacagaagaaagaagagaccattggaaaatgatgggcctgttaaaaagaaagtaaagaaagtccaacaaaaggaaggaggaagtgatctgggaatgtctggcaactctgagccaaagaaatgtctgaggaccaggaatgtttcaaagtctctggaaaaattgaaagaattctgctgcgattctgcccttcctcaaagtagagtccagacagaatctctgcaggagagatttgcagttctgccaaaatgtactgattttgatgatatcagtcttctacacgcaaagaatgcagtttcttctgaagattcgaaacgtcaaattaatcaaaaggacacaacactttttgatctcagtcagtttggatcatcaaatacaagtcatgaaaatttacagaaaactgcttccaaatcagctaacaaacggtccaaaagcatctatacgccgctagaattacaatacatagaaatgaagcagcagcacaaagatgcagttttgtgtgtggaatgtggatataagtatagattctttggggaagatgcagagattgcagcccgagagctcaatatttattgccatttagatcacaactttatgacagcaagtatacctactcacagactgtttgttcatgtacgccgcctggtggcaaaaggatataaggtgggagttgtgaagcaaactgaaactgcagcattaaaggccattggagacaacagaagttcactcttttcccggaaattgactgccctttatacaaaatctacacttattggagaagatgtgaatcccctaatcaagctggatgatgctgtaaatgttgatgagataatgactgatacttctaccagctatcttctgtgcatctctgaaaataaggaaaatgttagggacaaaaaaaagggcaacatttttattggcattgtgggagtgcagcctgccacaggcgaggttgtgtttgatagtttccaggactctgcttctcgttcagagctagaaacccggatgtcaagcctgcagccagtagagctgctgcttccttcggccttgtccgagcaaacagaggcgctcatccacagagccacatctgttagtgtgcaggatgacagaattcgagtcgaaaggatggataacatttattttgaatacagccatgctttccaggcagttacagagttttatgcaaaagatacagttgacatcaaaggttctcaaattatttctggcattgttaacttagagaagcctgtgatttgctctttggctgccatcataaaatacctcaaagaattcaacttggaaaagatgctctccaaacctgagaattttaaacagctatcaagtaaaatggaatttatgacaattaatggaacaacattaaggaatctggaaatcctacagaatcagactgatatgaaaaccaaaggaagtttgctgtgggttttagaccacactaaaacttcatttgggagacggaagttaaagaagtgggtgacccagccactccttaaattaagggaaataaatgcccggcttgatgctgtatcggaagttctccattcagaatctagtgtgtttggtcagatagaaaatcatctacgtaaattgcccgacatagagaggggactctgtagcatttatcacaaaaaatgttctacccaagagttcttcttgattgtcaaaactttatatcacctaaagtcagaatttcaagcaataatacctgctgttaattcccacattcagtcagacttgctccggaccgttattttagaaattcctgaactcctcagtccagtggagcattacttaaagatactcaatgaacaagctgccaaagttggggataaaactgaattatttaaagacctttctgacttccctttaataaaaaagaggaaggatgaaattcaaggtgttattgacgagatccgaatgcatttgcaagaaatacgaaaaatactaaaaaatccttctgcacaatatgtgacagtatcaggacaggagtttatgatagaaataaagaactctgctgtatcttgtataccaactgattgggtaaaggttggaagcacaaaagctgtgagccgctttcactctccttttattgtagaaaattacagacatctgaatcagctccgggagcagctagtccttgactgcagtgctgaatggcttgattttctagagaaattcagtgaacattatcactccttgtgtaaagcagtgcatcacctagcaactgttgactgcattttctccctggccaaggtcgctaagcaaggagattactgcagaccaactgtacaagaagaaagaaaaattgtaataaaaaatggaaggcaccctgtgattgatgtgttgctgggagaacaggatcaatatgtcccaaataatacagatttatcagaggactcagagagagtaatgataattaccggaccaaacatgggtggaaagagctcctacataaaacaagttgcattgattaccatcatggctcagattggctcctatgttcctgcagaagaagcgacaattgggattgtggatggcattttcacaaggatgggtgctgcagacaatatatataaaggacggagtacatttatggaagaactgactgacacagcagaaataatcagaaaagcaacatcacagtccttggttatcttggatgaactaggaagagggacgagcactcatgatggaattgccattgcctatgctacacttgagtatttcatcagagatgtgaaatccttaaccctgtttgtcacccattatccgccagtttgtgaactagaaaaaaattactcacaccaggtggggaattaccacatgggattcttggtcagtgaggatgaaagcaaactggatccaggcgcagcagaacaagtccctgattttgtcaccttcctttaccaaataactagaggaattgcagcaaggagttatggattaaatgtggctaaactagcagatgttcctggagaaattttgaagaaagcagctcacaagtcaaaagagctggaaggattaataaatacgaaaagaaagagactcaagtattttgcaaagttatggacgatgcataatgcacaagacctgcagaagtggacagaggagttcaacatggaagaaacacagacttctcttcttcattaaaatgaagactacatttgtgaacaaaaaatggagaattaaaaataccaactgtacaaaataactctccagtaacagcctatctttgtgtgacatgtgagcataaaattatgaccatggtatattcctattggaaacagagaggtttttctgaagacagtctttttcaagtttctgtcttcctaacttttctacgtataaacactcttgaatagacttccactttgtaattagaaaattttatggacagtaagtccagtaaagccttaagtggcagaatataattcccaagcttttggagggtgatataaaaatttacttgatatttttatttgtttcagttcagataattggcaactgggtgaatctggcaggaatctatccattgaactaaaataattttattatgcaaccagtttatccaccaagaacataagaattttttataagtagaaagaattggccaggcatggtggctcatgcctgtaatcccagcactttgggaggccaaggtaggcagatcacctgaggtcaggagttcaagaccagcctggccaacatggcaaaaccccatctttactaaaaatataaagtacatctctactaaaaatacgaaaaaattagctgggcatggtggcgcacacctgtagtcccagctactccggaggctgaggcaggagaatctcttgaacctgggaggcggaggttgcaatgagccgagatcacgtcactgcactccagcttgggcaacagagcaagactccatctcaaaaaagaaaaaagaaaagaaatagaattatcaagcttttaaaaactagagcacagaaggaataaggtcatgaaatttaaaaggttaaatattgtcataggattaagcagtttaaagattgttggatgaaattatttgtcattcattcaagtaataaatatttaatgaatacttgctataaaaaaaaaaaaaaaaaaaaaaaaaa

SEQ ID NO: 857 - DNA, 3879 bp, Homo sapiens
ggcacgaggccagccgaatccaagccgtgtgtactgcgtgctcagcactgcccgacagtcctagctaaacttcgccaactccgctgcctttgccgccaccatgcccaaaacgatcagtgtgcgtgtgaccaccatggatgcagagctggagtttgccatccagcccaacaccaccgggaagcagctatttgaccaggtggtgaaaactattggcttgagggaagtttggttctttggtctgcagtaccaggacactaaaggtttctccacctggctgaaactcaataagaaggtgactgcccaggatgtgcggaaggaaagccccctgctctttaagttccgtgccaagttctaccctgaggatgtgtccgaggaattgattcaggacatcactcagcgcctgttctttctgcaagtgaaagagggcattctcaatgatgatatttactgcccgcctgagaccgctgtgctgctggcctcgtatgctgtccagtctaagtatggcgacttcaataaggaagtgcataagtctggctacctggccggagacaagttgctcccgcagagagtcctggaacagcacaaactcaacaaggaccagtgggaggagcggatccaggtgtggcatgaggaacaccgtggcatgctcagggaggatgctgtcctggaatatctgaagattgctcaagatctggagatgtatggtgtgaactacttcagcatcaagaacaagaaaggctcagagctgtggctgggggtggatgccctgggtctcaacatctatgagcagaatgacagactaactcccaagataggcttcccctggagtgaaatcaggaacatctctttcaatgataagaaatttgtcatcaagcccattgacaaaaaagccccggacttcgtcttctatgctccccggctgcggattaacaagcggatcttggccttgtgcatggggaaccatgaactatacatgcgccgtcgcaagcctgataccattgaggtgcagcagatgaaggcacaggcccgggaggagaagcaccagaagcagatggagcgtgctatgctggaaaatgagaagaagaagcgtgaaatggcagagaaggagaaagagaagattgaacgggagaaggaggagctgatggagaggctgaagcagatcgaggaacagactaagaaggctcagcaagaactggaagaacagacccgtagggctctggaacttgagcaggaacggaagcgtgcccagagcgaggctgaaaagctggccaaggagcgtcaagaagctgaagaggccaaggaggccttgctgcaggcctcccgggaccagaaaaagactcaggaacagctggccttggaaatggcagagctgacagctcgaatctcccagctggagatggcccgacagaagaaggagagtgaggctgtggagtggcagcagaaggcccagatggtacaggaagacttggagaagacccgtgctgagctgaagactgccatgagtacacctcatgtggcagagcctgctgagaatgagcaggatgagcaggatgagaatggggcagaggctagtgctgacctacgggctgatgctatggccaaggaccgcagtgaggaggaacgtaccactgaggcagagaagaatgagcgtgtgcagaagcacctgaaggccctcacttcggagctggccaatgccagagatgagtccaagaagactgccaatgacatgatccatgctgagaacatgcgactgggccgagacaaatacaagaccctgcgccagatccggcagggcaacaccaagcagcgcattgacgaatttgagtctatgtaatgggcacccagcctctagggacccctcctccctttttccttgtccccacactcctacacctaactcacctaactcatactgtgctggagccactaactagagcagccctggagtcatgccaagcatttaatgtagccatgggaccaaacctagccccttagcccccacccacttccctgggcaaatgaatggctcactatggtgccaatggaacctcctttctcttctctgttccattgaatctgtatggctagaatatcctacttctccagcctagaggtactttccacttgattttgcaaatgcccttacacttactgttgtcctatgggagtcaagtgtggagtaggttggaagctagctcccctcctctcccctccactgtcttcttcaggtcctgagattacacggtggagtgtatgcggtctaggaatgagacaggacctagatatcttctccagggatgtcaactgacctaaaatttgccctcccatcccgtttagagttatttaggctttgtaacgattgggggaataaaaagatgttcagtcatttttgtttctacctcccagatcggatctgttgcaaactcagcctcaataagccttgtcgttgactttagggactcaatttctccccagggtggatgggggaaatggtgccttcaagaccttcaccaaacatactagaagggcattggccattctattgtggcaaggctgagtagaagatcctaccccaattccttgtaggagtataggccggtctaaagtgagctctatgggcagatctaccccttacttattattccagatctgcagtcacttcgtgggatctgcccctccctgcttcaatacccaaatcctctccagctataacagtagggatgagtacccaaaagctcagccagccccatcaggactcttgtgaaaagagaggatatgttcacacctagcgtcagtattttccctgctaggggttttaggtctcttcccctctcagagctacttgggccatagctcctgctccacagccatcccagccttggcatctagagcttgatgccagtaggctcaactagggagtgagtgcaaaaagctgagtatggtgagagaagcctgtgccctgatccaagtttactcaaccctctcaggtgaccaaaatccccttctcatcactcccctcaaagaggtgactgggccctgcctctgtttgacaaacctctaacccaggtcttgacaccagctgttctgtcccttggagctgtaaaccagagagctgctgggggattctggcctagtcccttccacacccccaccccttgctctcaacccaggagcatccacctccttctctgtctcatgtgtgctcttcttctttctacagtattatgtactctactgatatctaaatattgatttctgccttccttgctaatgcaccattagaagatattagtcttggggcaggatgattttggcctcattactttaccacccccacacctggaaagcatatactatattacaaaatgacattttgccaaaattattaatataagaagctttcagtattagtgatgtcatctgtcactataggtcatacaatccattcttaaagtacttgttatttgtttttattattactgtttgtcttctccccagggttcagtccctcaaggggccatcctgtcccaccatgcagtgccccctagcttagagcctccctcaattccccctggccaccaccccccactctgtgcctgaccttgaggagtcttgtgtgcattgctgtgaattagctcacttggtgatatgtcctatattggctaaattgaaacctggaattgtggggcaatctattaatagctgccttaaagtcagtaacttacccttagggaggctgggggaaaaggttagattttgtattcaggggttttttgtgtactttttgggtttttaaaaaattgtttttggaggggtttatgctcaatccatgttctatttcagtgccaataaaatttaggtgacttcaaaaaaaaaaaa

SEQ ID NO: 858 - DNA, 643 bp, Homo sapiens
gagcggcggtgcagaacccagggaccatgggcgcctccaggctctataccctggtgctggtcctgcagcctcagcgagttctcctgggcatgaaaaagcgaggcttcggggccggccggtggaatggctttgggggcaaagtgcaagaaggagagaccatcgaggatggggctaggagggagctgcaggaggagagcggtctgacagtggacgccctgcacaaggtgggccagatcgtgtttgagttcgtgggcgagcctgagctcatggacgtgcatgtcttctgcacagacagcatccaggggacccccgtggagagcgacgaaatgcgcccatgctggttccagctggatcagatccccttcaaggacatgtggcccgacgacagctactggtttccactcctgcttcagaagaagaaattccacgggtacttcaagttccagggtcaggacaccatcctggactacacactccgcgaggtggacacggtctagcgggagcccagggcagcccctgggcaggagacgtggctgctgaacagctgcaaaccatcttcacctgggggcattgagtggcgcagagccgggtttcatctggaattaactggatggaagggaaaataaagctatctagcggtgaa

SEQ ID NO: 859 - DNA, 5883 bp, Homo sapiens
atggcacagcaagctgccgataagtatctctatgtggataaaaacttcatcaacaatccgctggcccaggccgactgggctgccaagaagctggtatgggtgccttccgacaagagtggctttgagccagccagcctcaaggaggaggtgggcgaagaggccatcgtggagctggtggagaatgggaagaaggtgaaggtgaacaaggatgacatccagaagatgaacccgcccaagttctccaaggtggaggacatggcagagctcacgtgcctcaacgaagcctcggtgctgcacaacctcaaggagcgttactactcagggctcatctacacctattcaggcctgttctgtgtggtcatcaatccttacaagaacctgcccatctactctgaagagattgtggaaatgtacaagggcaagaagaggcacgagatgccccctcacatctatgccatcacagacaccgcctacaggagtatgatgcaagaccgagaagatcaatccatcttgtgcactggtgaatctggagctggcaagacggagaacaccaagaaggtcatccagtatctggcgtacgtggcgtcctcgcacaagagcaagaaggaccagggcgagctggagcggcagctgctgcaggccaaccccatcctggaggccttcgggaacgccaagaccgtgaagaatgacaactcctcccgcttcggcaaattcattcgcatcaactttgatgtcaatggctacattgttggagccaacattgagacttatcttttggagaaatctcgtgctatccgccaagccaaggaagaacggaccttccacatcttctattatctcctgtctggggctggagagcacctgaagaccgatctcctgttggagccgtacaacaaataccgcttcctgtccaatggacacgtcaccatccccgggcagcaggacaaggacatgttccaggagaccatggaggccatgaggattatgggcatcccagaagaggagcaaatgggcctgctgcgggtcatctcaggggttcttcagctcggcaacatcgtcttcaagaaggagcggaacactgaccaggcgtccatgcccgacaacacagctgcccaaaaggtgtcccatctcttgggtatcaatgtgaccgatttcaccagaggaatcctcaccccgcgcatcaaggtgggacgggattacgtccagaaggcgcagactaaagagcaggctgactttgccatcgaggccttggccaaggcgacctatgagcggatgttccgctggctggtgctgcgcatcaacaaggctctggacaagaccaagaggcagggcgcctccttcatcgggatcctggacattgccggcttcgagatctttgatctgaactcgtttgagcagctgtgcatcaattacaccaatgagaagctgcagcagctcttcaaccacaccatgttcatcctggagcaggaggagtaccagcgcgagggcatcgagtggaacttcatcgactttggcctcgacctgcagccctgcatcgacctcattgagaagccagcaggccccccgggcattctggccctgctggacgaggagtgctggttccccaaagccaccgacaagagcttcgtggagaaggtgatgcaggagcagggcacccaccccaagttccagaagcccaagcagctgaaggacaaagctgatttctgcattatccactatgccggcaaggtggattacaaagctgacgagtggctgatgaagaacatggatcccctgaatgacaacatcgccacactgctccaccagtcctctgacaagtttgtctcggagctgtggaaggatgtggaccgcatcatcggcctggaccaggtggccggcatgtcggagaccgcactgcccggggccttcaagacgcggaagggcatgttccgcactgtggggcagctttacaaggagcagctggccaagctgatggctacgctgaggaacacgaaccccaactttgtccgctgcatcatccccaaccacgagaagaaggccggcaagctggacccgcatctcgtgctggaccagctgcgctgcaacggtgttctcgagggcatccgtatctgccgccagggcttccccaacagggtggtcttccaggagtttcggcagagatatgagatcctgactccaaactccattcccaagggtttcatggacgggaagcaggcgtgcgtgctcatgataaaagccctggagctcgacagcaatctgtaccgcattggccagagcaaagtcttcttccgtgccggtgtgctggcccacctggaggaggagcgagacctgaagatcaccgacgtcatcatagggttccaggcctgctgcaggggctacctggccaggaaagcatttgccaagcggcagcagcagcttaccgccatgaaggtcctccagcggaactgcgctgcctacctgaagctgcggaactggcagtggtggcggctcttcaccaaggtcaagccgctgctgcaggtgagccggcaggaggaggagatgatggccaaggaggaggagctggtgaaggtcagagagaagcagctggctgcggagaacaggctcacggagatggagacgctgcagtctcagctcatggcagagaaattgcagctgcaggagcagctccaggcagaaaccgagctgtgtgccgaggctgaggagctccgggcccgcctgaccgccaagaagcaggaattagaagagatctgccatgacctagaggccagggtggaggaggaggaggagcgctgccagcacctgcaggcggagaagaagaagatgcagcagaacatccaggagcttgaggagcagctggaggaggaggagagcgcccggcagaagctgcagctggagaaggtgaccaccgaggcgaagctgaaaaagctggaggaggagcagatcatcctggaggaccagaactgcaagctggccaaggaaaagaaactgctggaagacagaatagctgagttcaccaccaacctcacagaagaggaggagaaatctaagagcctcgccaagctcaagaacaagcatgaggcaatgatcactgacttggaagagcgcctccgcagggaggagaagcagcgacaggagctggagaagacccgccggaagctggagggagactccacagacctcagcgaccagatcgccgagctccaggcccagatcgcggagctcaagatgcagctggccaagaaagaggaggagctccaggccgccctggccagagtggaagaggaagctgcccagaagaacatggccctcaagaagatccgggagctggaatctcagatctctgaactccaggaagacctggagtctgagcgtgcttccaggaataaagctgagaagcagaaacgggaccttggggaagagctagaggctctgaaaacagagttggaggacacgctggattccacagctgcccagcaggagctcaggtcaaaacgtgagcaggaggtgaacatcctgaagaagaccctggaggaggaggccaagacccacgaggcccagatccaggagatgaggcagaagcactcacaggccgtggaggagctggcggagcagctggagcagacgaagcgggtgaaagcaaacctcgagaaggcaaagcagactctggagaacgagcggggggagctggccaacgaggtgaaggtgctgctgcagggcaaaggggactcggagcacaagcgcaagaaagtggaggcgcagctgcaggagctgcaggtcaagttcaacgagggagagcgcgtgcgcacagagctggccgacaaggtcaccaagctgcaggtggagctggacaacgtgaccgggcttctcagccagtccgacagcaagtccagcaagctcaccaaggacttctccgcgctggagtcccagctgcaggacactcaggagctgctgcaggaggagaaccggcagaagctgagcctgagcaccaagctcaagcaggtggaggacgagaagaattccttccgggagcagctggaggaggaggaggaggccaagcacaacctggagaagcagatcgccaccctccatgcccaggtggccgacatgaaaaagaagatggaggacagtgtggggtgcctggaaactgctgaggaggtgaagaggaagctccagaaggacctggagggcctgagccagcggcacgaggagaaggtggccgcctacgacaagctggagaagaccaagacgcggctgcagcaggagctggacgacctgctggtggacctggaccaccagcgccagagcgcgtgcaacctggagaagaagcagaagaagtttgaccagctcctggcggaggagaagaccatctctgccaagtatgcagaggagcgcgaccgggctgaggcggaggcccgagagaaggagaccaaggctctgtcgctggcccgggccctggaggaagccatggagcagaaggcggagctggagcggctcaacaagcagttccgcacggagatggaggaccttatgagctccaaggatgatgtgggcaagagtgtccacgagctggagaagtccaagcgggccctagagcagcaggtggaggagatgaagacgcagctggaagagctggaggacgagctgcaggccaccgaagatgccaagctgcggttggaggtcaacctgcaggccatgaaggcccagttcgagcgggacctgcagggccgggacgagcagagcgaggagaagaagaagcagctggtcagacaggtgcgggagatggaggcagagctggaggacgagaggaagcagcgctcgatggcagtggccgcccggaagaagctggagatggacctgaaggacctggaggcgcacatcgactcggccaacaagaaccgggacgaagccatcaaacagctgcggaagctgcaggcccagatgaaggactgcatgcgcgagctggatgacacccgcgcctctcgtgaggagatcctggcccaggccaaagagaacgagaagaagctgaagagcatggaggccgagatgatccagttgcaggaggaactggcagccgcggagcgtgccaagcgccaggcccagcaggagcgggatgagctggctgacgagatcgccaacagcagcggcaaaggagccctggcgttagaggagaagcggcgtctggaggcccgcatcgcccagctggaggaggagctggaggaggagcagggcaacacggagctgatcaacgaccggctgaagaaggccaacctgcagatcgaccagatcaacaccgacctgaacctggagcgcagccacgcccagaagaacgagaatgctcggcagcagctggaacgccagaacaaggagcttaaggtcaagctgcaggagatggagggcactgtcaagtccaagtacaaggcctccatcaccgccctcgaggccaagattgcacagctggaggagcagctggacaacgagaccaaggagcgccaggcagcctgcaaacaggtgcgtcggaccgagaagaagctgaaggatgtgctgctgcaggtggatgacgagcggaggaacgccgagcagtacaaggaccaggccgacaaggcatctacccgcctgaagcagctcaagcggcagctggaggaggccgaagaggaggcccagcgggccaacgcctcccgccggaaactgcagcgcgagctggaggacgccactgagacggccgatgccatgaaccgcgaagtcagctccctaaagaacaagctcaggcgcggggacctgccgtttgtcgtgccccgccgaatggcccggaaaggcgccggggatggctccgacgaagaggtagatggcaaagcggatggggctgaggccaaacctgccgaataa

SEQ ID NO: 860 - DNA, 518 bp, Homo sapiens
ccgtagtgtctcattgcagataatttttagcttagggcctggtggctaggtcggttctctcctttccagtcggagacctctgccgcaaacatgctccgccagatcatcggtcaggccaagaagcatccaagcttgatccccctctttgtatttattggaactggagctactggagcaacactgtatctcttgcgtctggcattgttcaatccagatgtttgttgggacagaaataacccagagccctggaacaaactgggtcccaatgatcaatacaagttctactcagtgaatgtggattacagcaagctgaagaaggaacgtccagatttctaaatgaaatgtttcactataacgctgctttagaatgaaggtcttccagaagccacatccgcacaattttccacttaaccaggaaatatttctcctctaaatgcatgaaatcatgttggagatctctattgtaatctctattggagattacaatgattaaatcaataaataactgaaaaaaaaaa

SEQ ID NO: 861 - DNA, 1049 bp, Homo sapiens
gtagccatggcggccatgagtttgttgcggcgggtttcggttactgcggtggcagctctgtctggccggccccttggcactcgcctcggatttgggggcttcctcactcgtggctttccgaaggctgctgctcctgttcgacacagtggagaccatgggaaaagactatttgtcatcagaccttctagattctatgacaggcgttttttgaagttattgagattctacattgcattgactgggattccagtagcaattttcataactctggtgaatgtattcattggtcaagctgaactagcagaaattccagaaggctatgtcccagaacactgggaatattataagcatcccatatcaagatggattgcccgtaatttctatgatagtcctgaaaagatatatgaaagaacaatggccgtccttcagattgaagctgaaaaggctgaattacgggtaaaggagctggaagtgcgaaaattgatgcatgtgagaggagatggaccctggtattactatgagacaattgacaaggaacttattgatcattctccgaaagcaactcctgacaattaagcctttttttctccaaatacaaagtatattctctttattggaaaataaattaataaatatattctgtatttttgctctccgtgaaaaacaaaagagcctctgacattactgtctctcagtgttggttcagattgaggcttttgtttgaggagtttggcttccagtccccaaagaaggtttaaaatgtactaataaaaactggagaaataggaatttgtgaacccctaaaattgtagcaactttgaaaggttagtgttttatttacctgacaaatggaagttatagaagtctaataatgttaagcaccagtaattatagtattttgtacaaatgcctgtactgtagatgtctgtattattgaggggcaactcaggattttaagttccataaagtattgaaccaactctaaaatgttaactccttaataaacagattctcagtaaacaaattttaaagttaaaaaaaaaaaaaaa

SEQ ID NO: 862 - DNA, 441 bp, Homo sapiens
ggccctcggggcccaaggaattcgcaagatggcgccgtccgccttgctgcgtcccctttcccggctgctggcccccgccaggctcccgagcggcccttcagtgcgatcaaagttctacgtgcgagagccgccgaatgccaaacctgactggctgaaagttgggttcaccttgggcaccactgtcttcttgtggatctatctcatcaaacaacacaatgaagatattttagagtacaaaagaagaaatgggctggaataaacttttgaaacactaatgtagtatgctccgtatagtgattgtagctgttcctctggattcaccatctgttgagttgtaaatgtgagagaaaaagttatatgtgaatatatatcaagccagcatttgtattttgcatcattaaataaaaagaaataaaaatacttctgtattcttcaaaaaaa

SEQ ID NO: 863 - DNA, 670 bp, Homo sapiens
cggccacgaggcggaatcccttctgctctcccagcgcagcgccgccgcccggcccctccagcttcccggaccatggccaacctggagcgcaccttcatcgccatcaagccggacggcgtgcagcgcggcctggtgggcgagatcatcaagcgcttcgagcagaagggattccgcctcgtggccatgaagttcctccgggcctctgaagaacacctgaagcagcactacattgacctgaaagaccgaccattcttccctgggctggtgaagtacatgaactcagggccggttgtggccatggtctgggaggggctgaacgtggtgaagacaggccgagtgatgcttggggagaccaatccagcagattcaaagccaggcaccattcgtggggacttctgcattcaggttggcaggaacatcattcatggcagtgattcagtaaaaagtgctgaaaaagaaatcagcctatggtttaagcctgaagaactggttgactacaagtcttgtgctcatgactgggtctatgaataagaggtggacacaacagcagtctccttcagcacggcgtggtgtgtccctggacacagctcttcattccattgacttagaggcaacaggattgatcattcttttatagagcatatttgccaataaagcttttggaagccgg

SEQ ID NO: 864 - DNA, 1347 bp, Homo sapiens
ggggcctggtgtgattccgtcctgcgcggttgttctctggagcagcgttcttttatctccgtccgccttctctcctacctaagtgcgtgccgccacccgatggaagattcgatggacatggacatgagccccctgaggccccagaactatcttttcggttgtgaactaaaggccgacaaagattatcactttaaggtggataatgatgaaaatgagcaccagttatctttaagaacggtcagtttaggggctggtgcaaaggatgagttgcacattgttgaagcagaggcaatgaattacgaaggcagtccaattaaagtaacactggcaactttgaaaatgtctgtacagccaacggtttcccttgggggctttgaaataacaccaccagtggtcttaaggttgaagtgtggttcagggccagtgcatattagtggacagcacttagtagctgtggaggaagatgcagagtcagaagatgaagaggaggaggatgtgaaactcttaagtatatctggaaagcggtctgcccctggaggtggtagcaaggttccacagaaaaaagtaaaacttgctgctgatgaagatgatgacgatgatgatgaagaggatgatgatgaagatgatgatgatgatgattttgatgatgaggaagctgaagaaaaagcgccagtgaagaaatctatacgagatactccagccaaaaatgcacaaaagtcaaatcagaatggaaaagactcaaaaccatcatcaacaccaagatcaaaaggacaagaatccttcaagaaacaggaaaaaactcctaaaacaccaaaaggacctagttctgtagaagacattaaagcaaaaatgcaagcaagtatagaaaaaggtggttctcttcccaaagtggaagccaaattcatcaattatgtgaagaattgcttccggatgactgaccaagaggctattcaagatctctggcagtggaggaagtctctttaagaaaatagtttaaacaatttgttaaaaaattttccgtcttatttcatttctgtaacagttgatatctggctgtcctttttataatgcagagtgagaactttccctaccgtgtttgataaatgttgtccaggttctattgccaagaatgtgttgtccaaaatgcctgtttagtttttaaagatggaactccaccctttgcttggttttaagtatgtatggaatgttatgataggacatagtagtagcggtggtcagacatggaaatggtggggagacaaaaatacacatgtgaaataaaactcagtattttaataaagtaaaaaaaaaaaaaaccaaaaaaaaaaaaaaaaaaaaaaaaaaaaa

SEQ ID NO: 865 - DNA, 3851 bp, Homo sapiens
agactggggtgggggaggggttcaggcctgttccccgcggctgcggcagcaccagggccggccgccaccgcctctagaacgcggaggaggtgggtcctgggaagcgggatgtccatcgctccagcttggtggtgaatgctgaggagagtcactgttgctgcagtctgtgccacccggaggaagttgtgtgaggccgggcgggacgtcgcggcgctctggggaatcgaaacgcggggtcggtgcgaagactctgctgctgccagaccctttcctattctggccatgcctggaaggaacaaggcgaagtctacctgcagctgccctgacctgcagcccaatggacaggatctgggcgagaacagccgggttgcccgtctaggagcggatgaatctgaggaagagggacggagggggtctctcagtaatgctggggaccctgagatcgtcaagtctcccagcgaccccaagcaataccgatacatcaaattacagaatggcctacaggcacttctgatttcagacctaagtaatatggaaggtaaaacaggaaatacaacagatgatgaagaagaagaggaggtggaggaagaagaagaagatgatgatgaagattctggagctgaaatagaagatgacgatgaagagggttttgatgatgaagatgagtttgatgatgaacatgatgatgatcttgatactgaggataatgaattggaagaattagaagagagagcagaagctagaaaaaaaactactgaaaaacagcaattgcagagcctgtttttgctgtggtcaaagctgactgatagactgtggtttaagtcaacttattcaaaaatgtcttcaaccctgctggtcgagacaagaaatctttatggggtagttggagctgaaagcaggtctgcacctgttcagcatttggcaggatggcaagcggaggagcagcagggtgaaactgacacagttctgtctgcagcggctctttgtgttggagttgggagtttcgctgatccagatgacctgccggggctggcacactttttggagcacatggtattcatgggtagtttgaaatatccagatgagaatggatttgatgccttcctgaagaagcatgggggtagtgataatgcctcaactgattgtgaacgcactgtctttcagtttgatgtccagaggaagtacttcaaggaagctcttgatagatgggcgcagttcttcatccacccactaatgatcagagatgcaattgaccgtgaagttgaagctgttgatagtgaatatcaacttgcaaggccttctgatgcaaacagaaaggaaatgttgtttggaagccttgctagacctggccatcctatgggaaaatttttttggggaaatgctgagacgctcaagcatgagccaagaaagaataatattgatacacatgctagattgagagaattctggatgcgttactactcttctcattacatgactttagtggttcaatccaaagaaacactggatactttggaaaagtgggtgactgaaatcttctctcagataccaaacaatgggttacccagaccaaactttggccatttaacggatccatttgacacaccagcatttaacaaactttatagagttgttccaatcagaaaaattcatgctctgaccatcacatgggcacttcctcctcaacagcaacattacagggtgaagccacttcattatatatcctggctggttggacatgaaggcaaaggcagcattctttctttccttaggaaaaaatgctgggctcttgcactgtttggtggaaatggtgagacaggatttgagcaaaattctacttattcagtgttcagcatttctattacattgactgatgagggttatgaacatttttatgaggttgcttacactgtctttctgtatttaaaaatgctgcagaagctaggcccagaaaaaagaatttttgaagagattcggaaaattgaggataatgaatttcattaccaagaacagacagatccagttgagtatgtggaaaacatgtgtgagaacatgcagctgtacccattgcaggacattctcactggagatcagcttctttttgaatacaagccagaagtcattggtgaagccttgaatcagctagttcctcaaaaagcaaatcttgttttactgtctggtgctaatgagggaaaatgtgacctcaaggagaaatggtttggaactcaatatagtatagaagatattgaaaactcttgggctgaactgtggaatagtaatttcgaattaaatccagatcttcatcttccagctgaaaacaagtacatagccacggactttacgttgaaggctttcgattgcccggaaacagaatacccagttaaaattgtgaatactccacaaggttgcctgtggtataagaaagacaacaaattcaaaatccccaaagcatatatacgtttccatctaatttcaccgttgatacagaaatctgcagcaaatgtggtcctctttgatatctttgtcaatatccttacgcataaccttgcggaaccagcttatgaagcagatgtggcacagctggagtataaactggcagctggagaacatggtttaattattcgagtgaaaggatttaaccacaaactacctctactgtttcagctcattattgactacttagctgagttcaattccacaccagctgtctttacaatgataactgagcagttgaagaagacctactttaacatcctcatcaagcctgagactttggccaaagatgtacggcttttaatcttggaatatgcccgttggtctatgattgacaagtaccaggctttgatggacggcctttcccttgagtctctgctgagcttcgtcaaagaattcaaatcccagctctttgtggagggcctggtacaagggaatgtcacaagcacagaatctatggatttcctgaaatatgttgttgacaaactaaacttcaagcctctggagcaggagatgcctgtgcagttccaggtggtagagctgcccagtggccaccatctatgcaaagtgaaagctctgaacaagggtgatgccaactctgaagtcactgtgtactaccagtcaggtaccaggagtctaagagaatatacgcttatggagctgcttgtgatgcacatggaagaaccttgttttgacttccttcgaaccaagcagacccttgggtaccatgtctaccctacctgtaggaacacatccgggattctaggattttctgtcactgtggggactcaggcaaccaaatacaattctgaagttgttgataagaagatagaagagtttctttctagctttgaggagaagattgagaacctcactgaagaggcattcaacacccaggtcacagctctcatcaagctgaaggagtgtgaggatacccaccttggggaggaggtggataggaactggaatgaagtggttacacagcagtacctctttgaccgccttgcccacgagattgaagcactgaagtcattctcaaaatcagacctggtcaactggttcaaggctcatagagggccaggaagtaaaatgctcagcgttcatgttgttgggtatgggaagtatgaactggaagaggatggatccccttctagtgaggattcaaattcttcttgtgaagtgatgcagctgacctacctgccaacctctcctctgctggcagattgtatcatccccattactgatatcagggctttcacaacaacactcaaccttctcccctaccataaaatagtcaaataaataaactgcagtcacgttggcctgaaaaaaaaaaaaaaaaaaaaaaaaaaaaaaaa

SEQ ID NO: 866 - DNA, 3547 bp, Homo sapiens
gcactcgcccggctcgcccgctttcgcacccagttcacgcgccacagctatgtgtccccgagccgcgcgggcgcccgcgacgctactcctcgccctgggcgcggtgctgtggcctgcggctggcgcctgggagcttacgattttgcacaccaacgacgtgcacagccggctggagcagaccagcgaggactccagcaagtgcgtcaacgccagccgctgcatgggtggcgtggctcggctcttcaccaaggttcagcagatccgccgcgccgaacccaacgtgctgctgctggacgccggcgaccagtaccagggcactatctggttcaccgtgtacaagggcgccgaggtggcgcacttcatgaacgccctgcgctacgatgccatggcactgggaaatcatgaatttgataatggtgtggaaggactgatcgagccactcctcaaagaggccaaatttccaattctgagtgcaaacattaaagcaaaggggccactagcatctcaaatatcaggactttatttgccatataaagttcttcctgttggtgatgaagttgtgggaatcgttggatacacttccaaagaaaccccttttctctcaaatccagggacaaatttagtgtttgaagatgaaatcactgcattacaacctgaagtagataagttaaaaactctaaatgtgaacaaaattattgcactgggacattcgggttttgaaatggataaactcatcgctcagaaagtgaggggtgtggacgtcgtggtgggaggacactccaacacatttctttacacaggcaatccaccttccaaagaggtgcctgctgggaagtacccattcatagtcacttctgatgatgggcggaaggttcctgtagtccaggcctatgcttttggcaaatacctaggctatctgaagatcgagtttgatgaaagaggaaacgtcatctcttcccatggaaatcccattcttctaaacagcagcattcctgaagatccaagcataaaagcagacattaacaaatggaggataaaattggataattattctacccaggaattagggaaaacaattgtctatctggatggctcctctcaatcatgccgctttagagaatgcaacatgggcaacctgatttgtgatgcaatgattaacaacaacctgagacacacggatgaaatgttctggaaccacgtatccatgtgcattttaaatggaggtggtatccggtcgcccattgatgaacgcaacaatggcacaattacctgggagaacctggctgctgtattgccctttggaggcacatttgacctagtccagttaaaaggttccaccctgaagaaggcctttgagcatagcgtgcaccgctacggccagtccactggagagttcctgcaggtgggcggaatccatgtggtgtatgatctttcccgaaaacctggagacagagtagtcaaattagatgttctttgcaccaagtgtcgagtgcccagttatgaccctctcaaaatggacgaggtatataaggtgatcctcccaaacttcctggccaatggtggagatgggttccagatgataaaagatgaattattaagacatgactctggtgaccaagatatcaacgtggtttctacatatatctccaaaatgaaagtaatttatccagcagttgaaggtcggatcaagttttccacaggaagtcactgccatggaagcttttctttaatatttctttcactttgggcagtgatctttgttttataccaatagccaaaaattctccttgcctttaatgtgtgaaactgcattttttcaagtgagattcaaatctgccttttaggacctggctttgtgacagcaaaaaccatctttacaggctcctagaagctgaaggttagagcattataaaatgaagagacagacatgattactcagggtcagcaacctagtgagttagaaaaaaaattaacatagggccctataaggagaaagccaactatgttaagtttacgtgtccaaattttaatgaaattttactaacaattttaaaccatatttttcttcttcatatccatttctaatccatcaaacagcttatgtttacataaaattttatcattcacaaggaagttttaagcacactgtctcatttgatatccacaacttatttttggtaggaaagagagatgtttttcccacctgtcagatgaaaaaactgaagctcaaaaagggttgacttgaccatacagctaatgctgacagatccaagacctagacctaggtcttttgaactcaagtccagcattctcaactatatcaagttactgttcagaatacttaatatctcctctcttcataattatcaatagccccaagctcatggatgacaaatctctgctttatttcttgtctctattttttcactttatagctcctgttataatagcaagtttaatggtataaacacaggataccatcctctcttgcaacacccatgtgcctttgatgagtcaggtagcaagctgtagtagataatgagaaaggccagaggctgcaaagacagtcaaaggacacgagagaaaggaaggggaagaacaggactccaggactgttttatattatagaaaagcaagagctaaagagcatttacacatgttaaacagatacttgttaagcatagtgcctgacacacggcattagctgttattttatgagattccatcagctctgcctctgtcctctttcttctaacatgaaggtatcatgagaagagaaccttctaacataagctgtaattctaaacctgcacttgtccctctccagcaagaggctagcactgaattcattctactcatactacacacccagttatggaatgtccagagttctcgaagaaaataaatgactttaggaagaggtatacattttttaagtcgctctgcctccaaatctgaacagtcactgtaaatcattcttaagcccagatatgagaacttctgctggaaagtgggaccctctgagtgggtggtcagaaaatacccatgctgatgaaatgacctatgcccaaagaacaaatacttaacgtgggagtggaaccacatgagcctgctcagctctgcataagtaattcaagaaatgggaggcttcaccttaaaaacagtgtgcaaatggcagctagaggttttgataggaagtatgtttgtttcttagtgtttacaaatattaagtactcttgatacaaaatatacttttaaacttcataacctttttataaaagttgttgcagcaaaataatagcctcggttctatgcatatatggattgctataaaaaatgtcaataagattgtacaaggaaaattagagaaagtcacatttagggtttattttttacacttggccagtaaaatagggtaaatcctattagaaattttttaaagaactttttttaagtttcctaaatctgtgtgtgtattgtgaagtggtataagaaatgactttgaaccactttgcaattgtagattcccaacaataaaattgaagat

SEQ ID NO: 867 - DNA, 1356 bp, Homo sapiens
gtatatataacgtgatgagcgtacgggtgcggagacgcaccggagcgctcgcccagccgccgyctccaagcccctgaggtttccggggaccacaatgaacaagttgctgtgctgcgcgctcgtgtttctggacatctccattaagtggaccacccaggaaacgtttcctccaaagtaccttcattatgacgaagaaacctctcatcagctgttgtgtgacaaatgtcctcctggtacctacctaaaacaacactgtacagcaaagtggaagaccgtgtgcgccccttgccctgaccactactacacagacagctggcacaccagtgacgagtgtctatactgcagccccgtgtgcaaggagctgcagtacgtcaagcaggagtgcaatcgcacccacaaccgcgtgtgcgaatgcaaggaagggcgctaccttgagatagagttctgcttgaaacataggagctgccctcctggatttggagtggtgcaagctggaaccccagagcgaaatacagtttgcaaaagatgtccagatgggttcttctcaaatgagacgtcatctaaagcaccctgtagaaaacacacaaattgcagtgtctttggtctcctgctaactcagaaaggaaatgcaacacacgacaacatatgttccggaaacagtgaatcaactcaaaaatgtggaatagatgttaccctgtgtgaggaggcattcttcaggtttgctgttcctacaaagtttacgcctaactggcttagtgtcttggtagacaatttgcctggcaccaaagtaaacgcagagagtgtagagaggataaaacggcaacacagctcacaagaacagactttccagctgctgaagttatggaaacatcaaaacaaagcccaagatatagtcaagaagatcatccaagatattgacctctgtgaaaacagcgtgcagcggcacattggacatgctaacctcaccttcgagcagcttcgtagcttgatggaaagcttaccgggaaagaaagtgggagcagaagacattgaaaaaacaataaaggcatgcaaacccagtgaccagatcctgaagctgctcagtttgtggcgaataaaaaatggcgaccaagacaccttgaagggcctaatgcacgcactaaagcactcaaagacgtaccactttcccaaaactgtcactcagagtctaaagaagaccatcaggttccttcacagcttcacaatgtacaaattgtatcagaagttatttttagaaatgataggtaaccaggtccaatcagtaaaaataagctgcttataactggaaatggccattgagctgtttcctcacaattggcgagatcccatggatgataa

SEQ ID NO: 868 - DNA, 7350 bp, Homo sapiens
tgtgcgtcgcgctctcgccctcctcttcccgctgcagtgtctatggagcgaggctacgtttcattgccgccctggcttaacccttccggcgcctaaaaggacggccggccggccggtcccttgcaccaggaagaagtcttagcagccagcgggccctggtcaggaaactctaaggtacaaggaaaacagttgaggaaggagccagagcgctccggtttggtcctcgggcttcgctggggcggggcgcaggcgttggctttaagaaaggggaggggacagtgcaatccgggttgcccgcggattcggccaaggaatcttccgctcgctccggagcgaggagcctgtaaagaggctgttcccagctccagctctaacctcgcctacaccttgggcgggcccaatgtcacgtttgcaattgctcaggaaggatccggcccgtctccggaggcaagtcgggctgcggtttttgctgcttatctgggaaggcgatgcctaagggacatgctgcttgctaggcagcaccctgccgggatccgactgcgatagttagctctccctggccctgaagccatcgccggggcgcctgttctctgtccggaccagccagcgctcctcaggagtctcactgaaacagaaccatgggtcatcccccgctggagttcagcgactgctacctggacagccccgatttccgcgagaggctcaagtgttatgagcaggaactggagaggaccaacaaattcatcaaagacgtaatcaaagacggcaacgcgcttatcagcgctatgagaaattattcttctgctgttcagaaattttcccagacgctgcagtcatttcagtttgatttcattggagacactctgactgatgatgaaattaacatcgctgaatccttcaaggaatttgctgaattgctcaacgaggtagaaaatgagaggatgatgatggtacacaatgctagtgatttgctgattaaacccttggaaaatttccggaaggaacaaataggcttcaccaaggagcggaaaaagaaatttgaaaaggatggtgagaggttttattctttactggatcggcacttacacctgtcttcaaaaaagaaagaatctcagttacaagaggcagacctacaggtggacaaggagaggcacaattttttcgagtcctctcttgattatgtttatcaaatccaggaagttcaggagtccaagaagttcaatattgtggagcctgtcttggcctttcttcatagtctgttcatttctaacagcctgactgtggagctcacacaggatttcctcccatacaaacaacagctccaactcagtttacagaatacaagaaatcatttctccagtacccgggaagagatggaagaacttaagaaaaggatgaaagaagctccccagacatgcaaacttccaggacagccaactattgaaggctatctctatacacaagagaaatgggctttaggaatatcctgggtgaaatactattgccagtatgagaaagagaccaaaacactgaccatgacgcctatggagcagaagccaggtgctaagcaggggcccttggacttaacactgaagtactgtgtgagaaggaagacggagtctatcgacaagaggttctgttttgacatagaaactaatgaaaggccaggaaccatcactctgcaggccctttcagaagctaacagaaggctatggatggaagccatggatgggaaagaacctatctaccacagccctataacaaaacagcaagaaatggagctaaatgaagtgggcttcaagtttgtcaggaagtgcatcaatattattgagaccaaagggatcaagacagaagggttgtaccgcactgtgggcagcaatattcaggttcagaagctgctgaatgccttttttgatcctaaatgcccaggagatgttgattttcataatagtgactgggacattaagacaatcaccagctccttgaaattctacctcaggaatctttctgaacctgtcatgacctatagacttcacaaagagctggtctctgctgccaagtctgacaacctggattaccgcctaggagctattcactccctggtatataagctaccagaaaagaaccgagagatgctggaacttctgataagacacttggtcaatgtgtgtgagcacagcaaagagaatcttatgaccccctccaacatgggagtaatctttgggcccaccctgatgagagctcaggaggacactgtggccgccatgatgaacatcaaattccagaacatagtggtggaaatactaatcgagcactttggcaagatctatttaggtccacctgaggaaagcgctgcaccgccagtgcctccgcctcgggtgacagcaagaaggcacaaaccaatcacgatttcaaagcgcttgctgcgagaaaggacggttttctatacttcttccctggatgaaagcgaagatgaaatccaacatcaaacaccgaatggtactatcaccagcagcatagaaccccccaagccaccacaacaccccaaactacctattcagaggagtggggaaactgatcctgggaggaagtccccaagcaggcctattttggatggcaagttggagccctgcccagaggtggacgtggggaagttggtgtctaggctgcaggatggagggaccaagatcaccccaaaggccaccaatggacccatgccaggctctgggcccaccaagaccccctctttccacataaagagaccagctccccggcccctggcccaccacaaggagggggatgctgacagtttcagcaaagtgcggcctccaggagaaaagccaaccatcatccgccccccagtgaggcccccagatcctccctgccgggcagctactccccaaaagccagaaccaaagccagatattgtggctggcaatgcgggggaaatcacatcatctgtggtggcttccaggaccaggttttttgaaacagcttcccggaaaacaggaagttctcaaggcagacttcctggagatgaaagttgaggctacaggttttaaaagccttggcctcagaggaccctttccaggttctgaaagagtctttcttcttcaaacctttgtgtgcggagtcattttgtgttgaagagcagctccttcctagccttgcactttcagactctctctgggaggccataaaataaggagcatatgtcctagacaggtgtttatatctcctttgtattctgtcttcatcccctcagaaggtctgttttgagttcctataacactgtgaagagctggactccctcaagccagactctgccaaaaccaagatatccacttacctgagttgaagaggggagctcagttttcaactcttccctgaacttcctgcttcctcagagggccattgaactctgagagatttggggctaaagactgatctcaggggtcttaccttgaactgaaggccacttgagttggggccattgcttaccttggttggaagggaatagaaatgtttgctgaacattggagaatctcaacatgtctcctactgaggatatggacactggtgccatgtcagcgctctggtgctgcagtatgttgccaagagcccgtctgctcctgcgaggctatgagtgggatgagtgatgcccccacagcacctccatgtggacttaggaaggtggccttcctgctgttacatgcagccacttaggacaaatctgcaaagcatgttttgcatgtaaaagcctaggtctatttggattattctttctccttttttttgacagcttcctgtcaagcaatcaagaaacaaacaaaagctgaacacatttccttttaaaaaaaggagactgtgtttggtcctgtaggagttctattttggggtcaaatgctagaaaaattgttaaggtggattgaggccaggcagctgtcactgctgcttcatgtttgccttctgcacataaactcttttatctcctgaaaaaagcagttcttaacccagtgtccatggactcagaaactccatgatgcccctgagatggtatgcacaattccatgacaatatgccctttctggggagatagtccataatgttctgctaaatttcaaatgggctcgtgacccaaaaaagtcaagaaccacagcacttgagttaaaatactctttttacaatccatataagcccttgattggaagggcttttcaaaatcatttagtctaacaactgcccagtttccagtcgggggaactgaggcagagcaaggtagtgatcacaccagtacaagatttcaggtcccaggctcctatgcaagttttttttccccattatatcacacttatttagcaagggaccttgtggtttgtggctttagtggccatcatttctgggggttggcttttaccctttttcttgaatatttgccaccaagtgaaaaatgttaggacataaacccttgccaggtccctttcatttgctatctctattattggaaaggacctaaaaattggtgtaatggggcagaaatctgaggaatggacatttctaattcctgtttgttgaagggaagttgctggaaagagcatcagtacttgtttctatgcagatgcctgggccgtagcttgtctgtagcgtctgtataattataatgttgcccagtgtgagggaaagagctttcctacttgcactcttctaccaaggccctgttagtgcactgattatagtactgacagataaagcctagatgagagagatagagagtgagtacatgcacactcatgtgcaaacccactcagagatgcatttggaacagtgctactgaaaggcagtagtcattttcaagactgaattccaaacatggtttattggtgagttaggaacatgtaaggccaagtacactgagagcctttttgaaagtaattgagtggaaacttgatgccattctaaatcaaggcatatccaggtggcccggtttgaactcactccactgtacccagtctcaaaggccaggttgctaagaaaccaggagtaaaagagtcaagtgaccatcatttcacctgctgcttgcccccaatagtagtctctgtgaggccttactgacctcacctaggaagtgatttttgagcccttgtttcagggctgtggcctccctgctctatcctgaataaagcagacaggtgtgcagattttggccatgaaagcatggctaatagggccacagtccctttaaagaaacatggtttgactctggttttcttgggggaaaataccacaatcaccgatgcaaacattggaagattattgagagccctagaaagctgctgtgatcccagtagaaaatatgtcccagaaatgtcatgagattgctgtgtgttgcctgggacacagatcaagggcctatcttggagagctggggaccagcagtctgcctggaggccagggagcagtggctgagtagctctgcctttgctctggtctataccttaagaatgccaaagaatgaatttcaacgcctgcctttggcactctgacttaaagtgcaaaaagcttctgtggcgaggcatgctatcatggaatgagactggcttgccctaggcttaatggatgggcagtcattttgcagaggctatgggaagagggtgataatagaagagtggcagctataggaaattatcaacataccttggccagcaagttagagaatctggcaatggatgaactgaaagtgatgaactggcagggataacaaagaacctaacatttattaagcacgtatttattaactgctcagtgtttcatattcatgcaagtattctcattttacagagaaagaaattatggcccagggggctaaagtaaacaactcaagggcacatagaaagtaaataaaaggactgtgatttgaatccaggccactcttagcccatgctgttttccctttgccacactgtggtaggtgtttgaacagaggccacattactagagttggcatgactcttgactcttgcctgcctaacaaaatattgaaaggcaaacatttgaaggagggagggggtgcaggttcagtttatatggaaatgcaaactgggctggaagatattcctgagttaggctttctcttcatattcagcttgcacatttggtaatgtttttaaaatgatcatctaattttattttgtgaagtgaaggatttgtgttttagttggcagttgttaagtccttggcttgccatttttcaaaaagtaaaaaggtcctcacaggtgtctccatacttcgccaaggttgtagcatgggcagtttcagtttcagcctaagagactggtgacatccacaaatgcagttttagaagcagaaaaggtcttggtgcctctgcagtacttgatgtattggggtcaaatctctacaaatttttctgtggtgatagcaaaatcaagagatggcttacaaaaagaaatattgaatttttatttttgaagtttttgttttttaaaaggttgggggtgttcagccactgagggacaaaacttagcatctaatttcaattatagtgtcatgcagagtatttctaaagtaattggttatcatgggaaagtattctcttttcaagaagttctttgattctgtaataactagaacaaataaagtagtaaaagaagaaatagttctgtgactaggaaaaaattgcttttgagagaacatagatcaattatactacttctaaggtagctgcagataagtggccttgacacattacaagcctggaaaaaaacatcagaaataataaaaaatttcagagagaatcaagatacctttttttttcttttttttttcttttttttattatactctaagttttagggtacatgtgcacattgtgcaggttagttacatatgtatacatgtgccatgctggtgcgctgcacccactaatgtgtcatctagcattaggtatatctcccagtgctatccctcccccctcccccgaccccaccacagtccccagagtgtgatattccccttcctgtgtccatgtgatctcattgttcaattcccacctatgagtgagaatatgcggtgtttggttttttgttcttgcgatagtttactgagaatgatggtttccaatttcatccatgtccctacaaaggatatgaactcatcattttttatggctgcatagtattccatggtgtatatgtgccacattttcttaatccagtctatcattgttggacatttgggttggttccaagtctttgctattgtgaatagtgccgcaataaacatacgtgtgcatgtgtctttatagcagcatgatttatactcatttgggtatat

SEQ ID NO: 869 - DNA, 1444 bp, Homo sapiens
ggggggtctgcgtcttcccgagccagtgtgctgagctctccgcgtcgcctctgtcgcccgcgcctggcctaccgcggcactcccggctgcacgctctgcttggcctcgccatgccggtggacctcagcaagtggtccgggcccttgagcctgcaagaagtggacgagcagccgcagcacccgctgcatgtcacctacgccggggcggcggtggacgagctgggcaaagtgctgacgcccacccaggttaagaatagacccaccagcatttcgtgggatggtcttgattcagggaagctctacaccttggtcctgacagacccggatgctcccagcaggaaggatcccaaatacagagaatggcatcatttcctggtggtcaacatgaagggcaatgacatcagcagtggcacagtcctctccgattatgtgggctcggggcctcccaagggcacaggcctccaccgctatgtctggctggtttacgagcaggacaggccgctaaagtgtgacgagcccatcctcagcaaccgatctggagaccaccgtggcaaattcaaggtggcgtccttccgtaaaaagtatgagctcagggccccggtggctggcacgtgttaccaggccgagtgggatgactatgtgcccaaactgtacgagcagctgtctgggaagtagggggttagcttggggacctgaactgtcctggaggccccaagccatgttccccagttcagtgttgcatgtataatagatttctcctcttcctgccccccttggcatgggtgagacctgaccagtcagatggtagttgagggtgacttttcctgctgcctggcctttataattttactcactcactctgatttatgttttgatcaaatttgaacttcattttggggggtattttggtactgtgatggggtcatcaaattattaatctgaaaatagcaacccagaatgtaaaaaagaaaaaactggggggaaaaagaccaggtctacagtgatagagcaaagcatcaaagaatctttaagggaggtttaaaaaaaaaaaaaaaaaaaaagattggttgcctctgcctttgtgatcctgagtccagaatggtacacaatgtgattttatggtgatgtcactcacctagacaaccagaggctggcattgaggctaacctccaacacagtgcatctcagatgcctcagtaggcatcagtatgtcactctggtccctttaaagagcaatcctggaagaagcaggagggagggtggctttgctgttgttgggacatggcaatctagaccggtagcagcgcctcgctgacagcttgggaggaaacctgagatctgtgttttttaaattgatcgttcttcatgggggtaagaaaagctggtctggagttgctgaatgttgcattaattgtgctgtttgcttgtagttgaataaaaacccg

SEQ ID NO: 870 - DNA, 2848 bp, Homo sapiens
ccttctccccggcggttagtgctgagagtgcggagtgtgtgctccgggctcggaacacacatttattattaaaaaatccaaaaaaaatctaaaaaaatcttttaaaaaaccccaaaaaaatttacaaaaaatccgcgtctcccccgccggagacttttattttttttcttcctcttttataaaataacccggtgaagcagccgagaccgacccgcccgcccgcggccccgcagcagctccaagaaggaaccaagagaccgaggccttcccgctgcccggacccgacaccgccaccctcgctccccgccggcagccggcagccagcggcagtggatcgaccccgttctgcggccgttgagtagttttcaattccggttgatttttgtccctctgcgcttgctccccgctcccctccccccggctccggcccccagccccggcactcgctctcctcctctcacggaaaggtcgcggcctgtgccctgcgggcagccgtgccgagatgaaccccagtgcccccagctaccccatggcctcgctctacgtgggggacctccaccccgacgtgaccgaggcgatgctctacgagaagttcagcccggccgggcccatcctctccatccgggtctgcagggacatgatcacccgccgctccttgggctacgcgtatgtgaacttccagcagccggcggacgcggagcgtgctttggacaccatgaattttgatgttataaagggcaagccagtacgcatcatgtggtctcagcgtgatccatcacttcgcaaaagtggagtaggcaacatattcattaaaaatctggacaaatccattgataataaagcactgtatgatacattttctgcttttggtaacatcctttcatgtaaggtggtttgtgatgaaaatggttccaagggctacggatttgtacactttgagacgcaggaagcagctgaaagagctattgaaaaaatgaatggaatgctcctaaatgatcgcaaagtatttgttggacgatttaagtctcgtaaagaacgagaagctgaacttggagctagggcaaaagaattcaccaatgtttacatcaagaattttggagaagacatggatgatgagcgccttaaggatctctttgggcctgccttaagtgtgaaagtaatgactgatgaaagtggaaaatccaaaggatttggatttgtaagctttgaaaggcatgaagatgcacagaaagctgtggatgagatgaacggaaaggagctcaatggaaaacaaatttatgttggtcgagctcagaaaaaggtggaacggcagacggaacttaagcgcaaatttgaacagatgaaacaagataggatcaccagataccagggtgttaatctttatgtgaaaaatcttgatgatggtattgatgatgaacgtctccggaaagagttttctccatttggtacaatcactagtgcaaaggttatgatggagggtggtcgcagcaaagggtttggttttgtatgtttctcctccccagaagaagccactaaagcagttacagaaatgaacggtagaattgtggccacaaagccattgtatgtagctttagctcagcgcaaagaagagcgccaggctcacctcactaaccagtatatgcagagaatggcaagtgtacgagctgttcccaaccctgtaatcaacccctaccagccagcacctccttcaggttacttcatggcagctatcccacagactcagaaccgtgctgcatactatcctcctagccaagttgctcaactaagaccaagtcctcgctggactgctcagggtgccagacctcatccattccaaaatatgcccggtgctatccgcccagctgctcctagaccaccatttagtactatgagaccagcttcttcacaggttccacgagtcatgtcaacacagcgtgttgctaacacatcaacacagacaatgggtccacgtcctgcagctgcagccgctgcagctactcctgctgtccgcaccgttccacagtataaatatgctgcaggagttcgcaatcctcagcaacatcttaatgcacagccacaagttacaatgcaacagcctgctgttcatgtacaaggtcaggaacctttgactgcttccatgttggcatctgcccctcctcaagagcaaaagcaaatgttgggtgaacggctgtttcctcttattcaagccatgcaccctactcttgctggtaaaatcactggcatgttgttggagattgataattcagaacttcttcatatgctcgagtctccagagtcactccgttctaaggttgatgaagctgtagctgtactacaagcccaccaagctaaagaggctgcccagaaagcagttaacagtgccaccggtgttccaactgtttaaaattgatcagggaccatgaaaagaaacttgtgcttcaccgaagaaaaatatctaaacatcgaaaaacttaaatattatggaaaaaaaacattgcaaaatataaaataaataaaaaaaggaaaggaaactttgaaccttatgtaccgagcaaatgccaggtctagcaaacataatgctagtcctagattacttattgatttaaaaacaaaaaaacacaaaaaatagtaaaatataaaaacaaattaatgttttatagaccctgggaaaaagaattttcagcaaagtacaaaaatttaaagcattcctttctttaattttgtaattctttactgtggaatagctcagaatgtcagttctgttttaagtaacagaattgataactgagcaaggaaacgtaatttggattataaaattcttgctttaataaaaattccttaaacagtg

SEQ ID NO: 871 - DNA, 4180 bp, Homo sapiens
gcggggaagcagcagcggccaggatgaatcccaggtgctctggagctggatggtgaaggtcggcactcttcaccctcccgagccctgcccgtctcggccccatgcccccaccagtcagccccgggccacaggcagtgagcaggcacctgggagccgaggccctgtgaccaggccaaggagacgggcgctccagggtcccagccacctgtcccccccatggagctgaggccctggttgctatgggtggtagcagcaacaggaaccttggtcctgctagcagctgatgctcagggccagaaggtcttcaccaacacgtgggctgtgcgcatccctggaggcccagcggtggccaacagtgtggcacggaagcatgggttcctcaacctgggccagatcttcggggactattaccacttctggcatcgaggagtgacgaagcggtccctgtcgcctcaccgcccgcggcacagccggctgcagagggagcctcaagtacagtggctggaacagcaggtggcaaagcgacggactaaacgggacgtgtaccaggagcccacagaccccaagtttcctcagcagtggtacctgtctggtgtcactcagcgggacctgaatgtgaaggcggcctgggcgcagggctacacagggcacggcattgtggtctccattctggacgatggcatcgagaagaaccacccggacttggcaggcaattatgatcctggggccagttttgatgtcaatgaccaggaccctgacccccagcctcggtacacacagatgaatgacaacaggcacggcacacggtgtgcgggggaagtggctgcggtggccaacaacggtgtctgtggtgtaggtgtggcctacaacgcccgcattggaggggtgcgcatgctggatggcgaggtgacagatgcagtggaggcacgctcgctgggcctgaaccccaaccacatccacatctacagtgccagctggggccccgaggatgacggcaagacagtggatgggccagcccgcctcgccgaggaggccttcttccgtggggttagccagggccgaggggggctgggctccatctttgtctgggcctcggggaacgggggccgggaacatgacagctgcaactgcgacggctacaccaacagtatctacacgctgtccatcagcagcgccacgcagtttggcaacgtgccgtggtacagcgaggcctgctcgtccacactggccacgacctacagcagtggcaaccagaatgagaagcagatcgtgacgactgacttgcggcagaagtgcacggagtctcacacgggcacctcagcctctgcccccttagcagccggcatcattgctctcaccctggaggccaataagaacctcacatggcgggacatgcaacacctggtggtacagacctcgaagccagcccacctcaatgccaacgactgggccaccaatggtgtgggccggaaagtgagccactcatatggctacgggcttttggacgcaggcgccatggtggccctggcccagaattggaccacagtggccccccagcggaagtgcatcatcgacatcctcaccgagcccaaagacatcgggaaacggctcgaggtgcggaagaccgtgaccgcgtgcctgggcgagcccaaccacatcactcggctggagcacgctcaggcgcggctcaccctgtcctataatcgccgtggcgacctggccatccacctggtcagccccatgggcacccgctccaccctgctggcagccaggccacatgactactccgcagatgggtttaatgactgggccttcatgacaactcattcctgggatgaggatccctctggcgagtgggtcctagagattgaaaacaccagcgaagccaacaactatgggacgctgaccaagttcaccctcgtactctatggcaccgcccctgaggggctgcccgtacctccagaaagcagtggctgcaagaccctcacgtccagtcaggcctgtgtggtgtgcgaggaaggcttctccctgcaccagaagagctgtgtccagcactgccctccagggttcgccccccaagtcctcgatacgcactatagcaccgagaatgacgtggagaccatccgggccagcgtctgcgccccctgccacgcctcatgtgccacatgccaggggccggccctgacagactgcctcagctgccccagccacgcctccttggaccctgtggagcagacttgctcccggcaaagccagagcagccgagagtccccgccacagcagcagccacctcggctgcccccggaggtggaggcggggcaacggctgcgggcagggctgctgccctcacacctgcctgaggtggtggccggcctcagctgcgccttcatcgtgctggtcttcgtcactgtcttcctggtcctgcagctgcgctctggctttagttttcggggggtgaaggtgtacaccatggaccgtggcctcatctcctacaaggggctgccccctgaagcctggcaggaggagtgcccgtctgactcagaagaggacgagggccggggcgagaggaccgcctttatcaaagaccagagcgccctctgatgagcccactgcccaccccctcaagccaatcccctccttgggcactttttaattcaccaaagtatttttttatcttgggactgggtttggaccccagctgggaggcaagaggggtggagactgcttcccatcctaccctcgggcccacctggccacctgaggtgggcccaggaccagctggggcgtggggagggccgtaccccaccctcagcaccccttccatgtggagaaaggagtgaaacctttagggcagcttgccccggccccggccccagccagagttcctgcggagtgaagaggggcagcccttgcttgttgggattcctgacccaggccgcagctcttgcccttccctgtccctctaaagcaataatggtcccatccaggcagtcgggggctggcctaggagatatctgagggaggaggccacctctccaagggcttctgcaccctccaccctgtcccccagctctggtgagtcttggcggcagcagccatcataggaagggaccaaggcaaggcaggtgcctccaggtgtgcacgtggcatgtggcctgtggcctgtgtcccatgacccacccctgtgctccgtgcctccaccaccactggccaccaggctggcgcagccaaggccgaagctctggctgaaccctgtgctggtgtcctgaccaccctcccctctcttgcacccgcctctcccgtcagggcccaagtccctgttttctgagcccgggctgcctgggctgttggcactcacagacctggagcccctgggtgggtggtggggaggggcgctggcccagccggcctctctggcctcccacccgatgctgctttcccctgtggggatctcaggggctgtttgaggatatattttcactttgtgattatttcactttagatgctgatgatttgtttttgtatttttaatgggggtagcagctggactacccacgttctcacacccaccgtccgccctgctcctccctggctgccctggccctgaggtgtgggggctgcagcatgttgctgaggagtgaggaatagttgagccccaagtcctgaagaggcgggccagccaggcgggctcaaggaaagggggtcccagtgggaggggcaggctgacatctgtgtttcaagtggggctcgccatgccgggggttcataggtcactggctctccaagtgccagaggtgggcaggtggtggcactgagcccccccaacactgtgccctggtggagaaagcactgacctgtcatgcccccctcaaacctcctcttctgacgtgccttttgcacccctcccattaggacaatcagtcccctcccatctgggagtccccttttcttttctaccctagccattcctggtacccagccatctgcccaggggtgccccctcctctcccatccccctgccctcgtggccagcccggctggttttgtaagatgctgggttggtgcacagtgatttttttcttgtaatttaaacaggcccagcattgctggttctatttaatggacatgagataatgttagaggttttaaagtgattaaacgtgcagactatgcaaaccag

SEQ ID NO: 872 - DNA, 4553 bp, Homo sapiens
tcgcgggccgaggacgcctctggggcggcaccgcgtcccgagagccccagaagtcggcggggaagtttccccggtggggggcgtttcgggcctcccggacggctctcggccccggagcccggtcgcaggagcgcgggcccgggggcgggaacgcgccgcggccgcctcctcctccccggctcccgcccgcggcggtgttggcggcggcggtggcggcggcggcggcgcttccccggcgcggagcggctttaaaaggcggcactccaccccccggcgcactcgcagctcgggcgccgcgcgagcctgtcgccgctatgcctccgcgcgcgccgcctgcgcccgggccccggccgccgccccgggccgccgccgccaccgacaccgccgcgggcgcggggggcgcggggggcgcggggggcgccggcgggcccgggttccggccgctcgcgccgcgtccctggcgctggctgctgctgctggcgctgcctgccgcctgctccgcgcccccgccgcgccccgtctacaccaaccactgggcggtgcaagtgctgggcggcccggccgaggcggaccgcgtggcggcggcgcacgggtacctcaacttgggccagattggaaacctggaagattactaccatttttatcacagcaaaacctttaaaagatcaaccttgagtagcagaggccctcacaccttcctcagaatggacccccaggtgaaatggctccagcaacaggaagtgaaacgaagggtgaagagacaggtgcgaagtgacccgcaggccctttacttcaacgaccccatttggtccaacatgtggtacctgcattgtggcgacaagaacagtcgctgccggtcggaaatgaatgtccaggcagcgtggaagaggggctacacaggaaaaaacgtggtggtcaccatccttgatgatggcatagagagaaatcaccctgacctggccccaaattatgattcctacgccagctacgacgtgaacggcaatgattatgacccatctccacgatatgatgccagcaatgaaaataaacacggcactcgttgtgcgggagaagttgctgcttcagcaaacaattcctactgcatcgtgggcatagcgtacaatgccaaaataggaggcatccgcatgctggacggcgatgtcacagatgtggtcgaggcaaagtcgctgggcatcagacccaactacatcgacatttacagtgccagctgggggccggacgacgacggcaagacggtggacgggcccggccgactggctaagcaggctttcgagtatggcattaaaaagggccggcagggcctgggctccattttcgtctgggcatctgggaatggcgggagagagggggactactgctcgtgcgatggctacaccaacagcatctacaccatctccgtcagcagcgccaccgagaatggctacaagccctggtacctggaagagtgtgcctccaccctggccaccacctacagcagtggggccttttatgagcgaaaaatcgtcaccacggatctgcgtcagcgctgtaccgatggccacactgggacctcagtctctgcccccatggtggcgggcatcatcgccttggctctagaagcaaacagccagttaacctggagggacgtccagcacctgctagtgaagacatcccggccggcccacctgaaagcgagcgactggaaagtgaacggcgcgggtcataaagttagccatttctatggatttggtttggtggacgcagaagctctcgttgtggaggcaaagaagtggacagcagtgccatcgcagcacatgtgtgtggccgcctcggacaagagacccaggagcatccccttagtgcaggtgctgcggactacggccctgaccagcgcctgcgcggagcactcggaccagcgggtggtctacttggagcacgtggtggttcgcacctccatctcacacccacgccgaggagacctccagatctacctggtttctccctcgggaaccaagtctcaacttctggcaaagaggttgctggatctttccaatgaagggtttacaaactgggaattcatgactgtccactgctggggagaaaaggctgaagggcagtggaccttggaaatccaagatctgccatcccaggtccgcaacccggagaagcaagggaagttgaaagaatggagcctcatactgtatggcacagcagagcacccgtaccacaccttcagtgcccatcagtcccgctcgcggatgctggagctctcagccccagagctggagccacccaaggctgccctgtcaccctcccaggtggaagttcctgaagatgaggaagattacacagctcaatccaccccaggctctgctaatattttacagaccagtgtgtgccatccggagtgtggtgacaaaggctgtgatggccccaatgcagaccagtgcttgaactgcgtccacttcagcctggggagtgtcaagaccagcaggaagtgcgtgagtgtgtgccccttgggctactttggggacacagcagcaagacgctgtcgccggtgccacaaggggtgtgagacctgctccagcagagctgcgacgcagtgcctgtcttgccgccgcgggttctatcaccaccaggagatgaacacctgtgtgaccctctgtcctgcaggattttatgctgatgaaagtcagaaaaattgccttaaatgccacccaagctgtaaaaagtgcgtggatgaacctgagaaatgtactgtctgtaaagaaggattcagccttgcacggggcagctgcattcctgactgtgagccaggcacctactttgactcagagctgatcagatgtggggaatgccatcacacctgcggaacctgcgtggggccaggcagagaagagtgcattcactgtgcgaaaaacttccacttccacgactggaagtgtgtgccagcctgtggtgagggcttctacccagaagagatgccgggcttgccccacaaagtgtgtcgaaggtgtgacgagaactgcttgagctgtgcaggctccagcaggaactgtagcaggtgtaagacgggcttcacacagctggggacctcctgcatcaccaaccacacgtgcagcaacgctgacgagacattctgcgagatggtgaagtccaaccggctgtgcgaacggaagctcttcattcagttctgctgccgcacgtgcctcctggccgggtaagggtgcctagctgcccacagagggcaggcactcccatccatccatccgtccaccttcctccagactgtcggccagagtctgtttcaggagcggcgccctgcacctgacagctttatctccccaggagcagcatctctgagcacccaagccaggtgggtggtggctcttaaggaggtgttcctaaaatggtgatatcctctcaaatgctgcttgttggctccagtcttccgacaaactaacaggaacaaaatgaattctgggaatccacagctctggctttggagcagcttctgggaccataagtttactgaatcttcaagaccaaagcagaaaagaaaggcgcttggcatcacacatcactcttctccccgtgcttttctgcggctgtgtagtaaatctccccggcccagctggcgaaccctgggccatcctcacatgtgacaaagggccagcagtctacctgctcgttgcctgccactgagcagtctggggacggtttggtcagactataaataagataggtttgagggcataaaatgtatgaccactggggccggagtatctatttctacatagtcagctacttctgaaactgcagcagtggcttagaaagtccaattccaaagccagaccagaagattctatcccccgcagcgctctcctttgagcaagccgagctctccttgttaccgtgttctgtctgtgtcttcaggagtctcatggcctgaacgaccacctcgacctgatgcagagccttctgaggagaggcaacaggaggcattctgtggccagccaaaaggtaccccgatggccaagcaattcctctgaacaaaatgtaaagccagccatgcattgttaatcatccatcacttcccattttatggaattgcttttaaaatacatttggcctctgcccttcagaagactcgtttttaaggtggaaactcctgtgtctgtgtatattacaagcctacatgacacagttggatttattctgccaaacctgtgtaggcattttataagctacatgttctaatttttaccgatgttaattattttgacaaatatttcatatattttcattgaaatgcacagatctgcttgatcaattcccttgaatagggaagtaacatttgccttaaattttttcgacctcgtctttctccatattgtcctgctcccctgtttgacgacagtgcatttgccttgtcacctgtgagctggagagaacccagatgttgtttattgaatctacaactctgaaagagaaatcaatgaagcaagtacaatgttaaccctaaattaataaaagagttaacatcccatggc

SEQ ID NO: 873 - DNA, 937 bp, Homo sapiens
gttcttgcctggtgtcggtggttagtttctgcgacttgtgttgggactgctgataggaagatgtcttcaggaaatgctaaaattgggcaccctgcccccaacttcaaagccacagctgttatgccagatggtcagtttaaagatatcagcctgtctgactacaaaggaaaatatgttgtgttcttcttttaccctcttgacttcacctttgtgtgccccacggagatcattgctttcagtgatagggcagaagaatttaagaaactcaactgccaagtgattggtgcttctgtggattctcacttctgtcatctagcatgggtcaatacacctaagaaacaaggaggactgggacccatgaacattcctttggtatcagacccgaagcgcaccattgctcaggattatggggtcttaaaggctgatgaaggcatctcgttcaggggcctttttatcattgatgataagggtattcttcggcagatcactgtaaatgacctccctgttggccgctctgtggatgagactttgagactagttcaggccttccagttcactgacaaacatggggaagtgtgcccagctggctggaaacctggcagtgataccatcaagcctgatgtccaaaagagcaaagaatatttctccaagcagaagtgagcgctgggctgttttagtgccaggctgcggtgggcagccatgagaacaaaacctcttctgtattttttttttccattagtaaaacacaagacttcagattcagccgaattgtggtgtcttacaaggcaggcctttcctacagggggtggagagaccagcctttcttcctttggtaggaatggcctgagttggcgttgtgggcaggctactggtttgtatgatgtattagtagagcaacccattaatcttttgtagtttgtattaaacttgaactgag

SEQ ID NO: 874 - DNA, 1900 bp, Homo sapiens
acaactctcagaggagcattgcccgtcagacagcaactcagagaataaccagagaacaaccagattgaaacaatggaggatctttgtgtggcaaacacactctttgccctcaatttattcaagcatctggcaaaagcaagccccacccagaacctcttcctctccccatggagcatctcgtccaccatggccatggtctacatgggctccaggggcagcaccgaagaccagatggccaaggtgcttcagtttaatgaagtgggagccaatgcagttacccccatgactccagagaactttaccagctgtgggttcatgcagcagatccagaagggtagttatcctgatgcgattttgcaggcacaagctgcagataaaatccattcatccttccgctctctcagctctgcaatcaatgcatccacagggaattatttactggaaagtgtcaataagctgtttggtgagaagtctgcgagcttccgggaagaatatattcgactctgtcagaaatattactcctcagaaccccaggcagtagacttcctagaatgtgcagaagaagctagaaaaaagattaattcctgggtcaagactcaaaccaaaggcaaaatcccaaacttgttacctgaaggttctgtagatggggataccaggatggtcctggtgaatgctgtctacttcaaaggaaagtggaaaactccatttgagaagaaactaaatgggctttatcctttccgtgtaaactcggctcagcgcacacctgtacagatgatgtacttgcgtgaaaagctaaacattggatacatagaagacctaaaggctcagattctagaactcccatatgctggagatgttagcatgttcttgttgcttccagatgaaattgccgatgtgtccactggcttggagctgctggaaagtgaaataacctatgacaaactcaacaagtggaccagcaaagacaaaatggctgaagatgaagttgaggtatacataccccagttcaaattagaagagcattatgaactcagatccattctgagaagcatgggcatggaggacgccttcaacaagggacgggccaatttctcagggatgtcggagaggaatgacctgtttctttctgaagtgttccaccaagccatggtggatgtgaatgaggagggcactgaagcagccgctggcacaggaggtgttatgacagggagaactggacatggaggcccacagtttgtggcagatcatccttttctttttcttattatgcataagataaccaactgcattttatttttcggcagattttcctcaccctaaaactaagcgtgctgcttctgcaaaagatttttgtagatgagctgtgtgcctcagaattgctatttcaaattgccaaaaatttagagatgttttctacatatttctgctcttctgaacaacttctgctacccactaaataaaaacacagaaataattagacaattgtctattataacatgacaaccctattaatcatttggtcttctaaaatgggatcatgcccatttagattttccttactatcagtttatttttataacattaacttttactttgttatttattattttatataatggtgagtttttaaattattgctcactgcctatttaatgtagctaataaagttatagaagcagatgatctgttaatttcctatctaataaatgcctttaattgttctcataatgaagaataagtaggtaccctccatgcccttctgtaataaatatctggaaaaaacattaaacaataggcaaatatatgttatgtgcatttctagaaatacataacacatatatatgtctgtatcttatattcaattgcaagtatataataaataaacctgcttccaaacaac

SEQ ID NO: 875 - DNA, 5553 bp, Homo sapiens
gggggagggaattcagcggatcagtcttaagaggagcttttttttggagcgagaaatcatataaaataaaatgaaataaaacaaggaggaaggcaaccagctgttagggggaaaataaggcagataaaggagcggggagagaaattaattgccaaccaggaggagttgggctgtatttttcaaaggtggggagagtggagcacacaccttgaggaggaaagcgagaaagaaaagaaaaaagcaagtgaaggggggctcgcccaagaagggtgaagaagcgaagaaagtcgaggcgccgaggctcccaaagctggcagctccgggtggcggtgcaggggcgaaggggggggcggggggaacgtcggacatgcggctctggagttgggtgctgcacctggggctgctgagcgccgcgctgggctgcgggctggccgagcgtccccgccgggcccggagagacccgcgggccggccgacccccgcgccccgccgccggcccggccacctgcgccacccgcggcccgcggccgccgcgcctcgccgccgccgccgccgccgccgggcgtgcctgggaagccgtgcgcgtcccccggcggcggcagcagcgggaggcgaggggcgccaccgaggagccgagcccgccgagccgggcgctctatttcagcgggcgaggcgagcagctgcgagtcctccgggccgacctcgagctgccccgggacgcgttcacgctgcaagtgtggctgcgagcggaggggggccagaggtctccggcagtgatcacagggctgtatgacaaatgttcttatatctcacgtgaccgaggatgggtcgtgggcattcacaccatcagtgaccaagacaacaaagacccacgctactttttctccttgaagacagaccgagcccggcaagtgaccaccatcaatgcccaccgcagctacctcccaggccagtgggtatacctagctgccacctatgatgggcagttcatgaagctctatgtgaatggtgcccaggtggccacctctggggaacaagtgggtggcatattcagcccactgacccagaagtgcaaagtgctcatgttagggggcagtgccctgaatcacaactaccggggctacatcgagcacttcagtctgtggaaggtggccaggactcagcgggagatactgtctgacatggaaacccatggcgcccacactgctctacctcagctcctcctccaggagaactgggacaatgtgaagcatgcctggtcccccatgaaggatggcagcagccccaaagtggaattcagcaatgcccacggctttctgctggacacgagtctggagcctcctctgtgcggacagacattgtgtgacaacacagaggtcattgccagctacaatcagctctcaagtttccgccagcccaaggtggtgcgctaccgcgtggtcaacctctatgaagatgatcataagaacccgacggtgacgcgcgagcaggtggacttccagcaccatcagctggctgaggccttcaagcaatacaacatctcctgggagctggacgtgctggaggtgagcaactcctcccttcgccgccgcctcatcctggccaactgtgacatcagcaagattggggatgagaactgtgaccccgagtgcaaccacacgctgacgggccacgacggcggggattgccgccacctgcgccaccctgccttcgtgaagaagcagcacaacggggtgtgtgacatggactgcaactatgaacggttcaactttgatggtggagagtgctgtgaccctgaaatcaccaatgtcactcagacttgctttgaccccgactctccacacagagcctacttggatgttaatgagctgaagaacattcttaaattggatggatcaacacatctcaatattttctttgcaaaatcctcagaggaggagttggcaggagtagcaacttggccatgggacaaggaggccctgatgcacttaggtggcattgtcttgaacccatctttctatggcatgcctgggcacacccacaccatgatccatgagattggtcacagcctgggcctctatcacgtcttccgaggcatctcagaaatccagtcctgcagtgacccctgcatggagacagagccctccttcgagactggagacctctgcaatgataccaacccagcccctaaacacaagtcctgtggtgacccagggccaggaaatgacacctgtggctttcatagcttcttcaacactccttacaacaacttcatgagctatgcagatgacgactgtacggactccttcacgcccaatcaagtcgccagaatgcactgttacctggacctggtctaccagggctggcagccctccaggaaaccagcgcctgttgccctcgccccccaagttctgggccacacaacggactctgtgacactggagtggttcccacctatagatggccatttctttgaaagagaattgggatcagcatgtcatctttgcctggaagggagaatcctggtgcagtatgcttccaacgcttcctccccaatgccctgcagcccatcaggacactggagccctcgtgaagcagaaggtcatcctgatgttgaacagccctgtaagtccagtgtccgcacctggagcccaaattcagctgtcaacccacacacggttcctccagcctgccctgagcctcaaggctgctacctcgagctggagttcctctaccccttggtccctgagtctctgaccatttgggtgacctttgtctccactgactgggactctagtggagctgtcaatgacatcaaactgttggctgtcagtgggaagaacatctccctgggtcctcagaatgtcttctgtgatgtcccactgaccatcagactctgggacgtgggcgaggaggtgtatggcatccaaatctacacgctggatgagcacctggagatcgatgctgccatgttgacctccactgcagacaccccactctgtctacagtgtaagcccctgaagtataaggtggtccgggaccctcctctccagatggatgtggcctccatcctacatctcaataggaaattcgtagacatggatctaaatcttggcagtgtgtaccagtattgggtcataactatttcaggaactgaagagagtgagccatcacctgctgtcacatacatccatggacgtgggtactgtggcgatggcattatacaaaaagaccaaggtgaacaatgcgacgacatgaataagatcaatggtgatggctgctcccttttctgccgacaagaagtctccttcaattgtattgatgaacccagccggtgctatttccatgatggtgatggggtatgtgaggagtttgaacaaaaaaccagcattaaggactgtggtgtctacacgccccagggattcctggatcagtgggcatccaatgcttcagtatctcatcaagaccagcaatgcccaggctgggtcatcatcggacagccagcagcatcccaggtgtgtcgaaccaaggtgatagatctcagtgaaggcatttcccagcatgcctggtacccttgcaccatcagctacccatattcccagctggctcagaccactttttggctccgggcgtatttttctcaaccaatggttgccgcagctgtcattgtccacctggtgacggatgggacatattatggggaccaaaagcaggagaccatcagcgtgcagctgcttgataccaaagatcagagccacgatctaggcctccatgtcctgagctgcaggaacaatcccctgattatccctgtggtccatgacctcagccagcccttctaccacagccaggcggtacgtgtgagcttcagttcgcccctggtcgccatctcgggggtggccctccgttccttcgacaactttgaccccgtcaccctgagcagctgccagagaggggagacctacagccctgccgagcagagctgcgtgcacttcgcatgtgagaaaactgactgtccagagctggctgtggagaatgcttctctcaattgctccagcagcgaccgctaccacggtgcccagtgtactgtgagctgccggacaggctacgtgctccagatacggcgggatgatgagctgatcaagagccagacgggacccagcgtcacagtgacctgtacagagggcaagtggaataagcaggtggcctgtgagccagtcgactgcagcatcccagatcaccatcaagtctatgctgcctccttctcctgccctgagggcaccacctttggcagtcaatgttccttccagtgccgtcaccctgcacaattgaaaggcaacaacagcctcctgacctgcatggaggatgggctgtggtccttcccagaggccctgtgtgagctcatgtgcctcgctccaccccctgtgcccaatgcagacctccagaccgcccggtgccgagagaataagcacaaggtgggctccttctgcaaatacaaatgcaagcctggataccatgtgcctggatcctctcggaagtcaaagaaacgggccttcaagactcagtgtacccaggatggcagctggcaggagggagcttgtgttcctgtgacctgtgacccacctccaccaaaattccatgggctctaccagtgtactaatggcttccagttcaacagtgagtgtaggatcaagtgtgaagacagtgatgcctcccagggacttgggagcaatgtcattcattgccggaaagatggcacctggaacggctccttccatgtctgccaggagatgcaaggccagtgctcggttccaaacgagctcaacagcaacctcaaactgcagtgccctgatggctatgccatagggtcggagtgtgccacctcgtgcctggaccacaacagcgagtccatcatcctgccaatgaacgtgaccgtgcgtgacatcccccactggctgaaccccacacgggtagagagagttgtctgcactgctggtctcaagtggtatcctcaccctgctctgattcactgtgtcaaaggctgtgagcccttcatgggagacaattattgtgatgccatcaacaaccgagccttttgcaactatgacggtggggattgctgcacctccacagtgaagaccaaaaaggtcaccccattccctatgtcctgtgacctacaaggtgactgtgcttgtcgggacccccaggcccaagaacacagccggaaagacctccggggatacagccatggctaaggaaggacaagaagttgtcaaagaattcccaacgccaggacccacatccctttggtattgatttcacagtcagctgctcaacggaatggcctctccacaccagggatccttagcacccaaccggtctgcctttaattttacccaggaaggactcacattggggcgaatgaaccaagtttcgccatgctggatgatgaaatggattcccatcccaaagtctgagatggattgcatatacagtgtgcagtcccagagcctcctaaaattctagccatttgtcacacaaccacagcaaaaaaaaa

SEQ ID NO: 876 - DNA, 1510 bp, Homo sapiens
atcctgctgctgccgccaccgctgctgctgctctgcaaaattcagctgctgcctctgtcttgaggaccccagcgcctttcccccggggccatgctgcctgcagccacagcctccctcctggggcccctcctcactgcctgcgccctgctgccttttgcccagggccagacccccaactacaccagacccgtgttcctgtgcggaggggatgtgaagggggaatcaggttacgtggcaagtgaggggttccccaactcctacccccctaataaggagtgcatctggaccataacggtccccgagggccagactgtgtccctctcattccgagtcttcgacctggagctgcaccccgcctgccgctacgatgctctggaggtcttcgctgggtctgggacttccggccagcggctcggacgcttttgtgggaccttccggcctgcgcccctagtcgcccccggcaaccaggtgaccctgaggatgacgacggatgagggcacaggaggacgaggcttcctgctctggtacagcgggcgggccacctcgggctctgagcaccaattttgcggggggcggctggagaaggcccagggaaccctgaccacgcccaactggcccgagtccgattaccccccgggcatcagctgttcctggcacatcatcgcgcccccggaccaggtcatcgcgctgaccttcgagaagtttgacctggagccggacacctactgccgctatgactcggtcagcgtcttcaacggagccgtgagcgacgactcccggaggctggggaagttctgcggcgacgcagtcccgggctccatctcctccgaagggaatgaactcctcgtccagttcgtctcagatctcagtgtcaccgctgatggcttctcagcctcctacaagaccctgccgcggggcactgccaaagaagggcaagggcccggccccaaacggggaactgagcctaaagtcaagctgccccccaagtcccaacctccggagaaaacagaggaatctccttcagcccctgatgcacccacctgcccaaagcagtgccgccggacaggcaccttgcagagcaacttctgtgccagcagccttgtggtgactgcgacagtgaagtccatggttcgggagccaggggagggccttgccgtgactgtcagtcttattggtgcttataaaactggaggactggacctgccaactccacccactggtgcctccctgaagttttacgtgccttgcaagcagtgcccccccatgaagaaaggagtcagttatctgctgatgggccaggtagaagagaacagaggccccgtccttcctccagagagctttgtggttctccaccggcccaaccaggaccagatcctcaccaacctaagcaagaggaagtgcccctctcaacctgtgcgggctgctgcgtcccaggactgagacgcaggccagccccggcccctagccctcaggcctctcttcttatccaaataaatgtttcttaatgaaa

SEQ ID NO: 877 - DNA, 4745 bp, Homo sapiens
gagctgaggaggagctgaaaatgcagatttagcatcaagcacagacctacactcgctctttctctccggtacacacagctccccacattcgcacccctgcccgcgcgccgggccgcctgactgcacggcttcccctccagccagatgctggagaacacacactgattcgctgctttccaagaccctgttcagtctctttctctatacaaagatttttttaaaaactatatataagaattctttatttgcaccctccctccgagtcccctgctccgccagcctgcgcgcctcctagcaccacttttcactcccaaagaaggatgaagggtggttgtgtctcccagtggaaggcggccgccgggttcctcttctgtgtcatggtttttgcatctgctgagcgaccggtcttcacgaatcattttcttgtggagttgcataaagggggagaggacaaagctcgccaagttgcagcagaacacggctttggagtccgaaagcttccctttgctgaaggtctgtaccacttttatcacaatggccttgcaaaggccaagagaagacgcagcctacaccacaagcagcagctggagagagaccccagggtaaagatggctttgcagcaggaaggatttgaccgaaaaaagcgaggttacagagacatcaatgagatcgacatcaacatgaacgatcctctttttacaaagcagtggtatctgatcaatactgggcaagctgatggcactcctggccttgatttgaatgtggctgaagcctgggagctgggatacacagggaaaggtgttaccattggaattatggatgatgggattgactatctccacccggacctggcctccaactataatgccgaagcaagttacgacttcagcagcaacgacccctatccttaccctcggtacacagatgactggtttaacagccacgggacccgatgtgcaggagaagtttctgctgccgccaacaacaatatctgtggagttggagtagcatacaactccaaggttgcaggcatccggatgctggaccagccattcatgacagacatcatcgaggcctcctccatcagtcatatgccacagctgattgacatctacagcgccagctggggccccacagacaacggcaagacagtggatgggccccgggagctcacgctgcaggccatggccgatggcgtgaacaagggccgcggcggcaaaggcagcatctacgtgtgggcctccggggacggcggcagctatgacgactgcaactgcgacggctacgcctccagcatgtggaccatctccatcaactcagccatcaacgacggcaggactgccctgtacgacgagagctgctcttccaccttggcttccaccttcagcaacgggaggaaaaggaaccccgaggccggtgtggcaaccacagatttgtacggcaactgcactctgaggcattctgggacatctgcagctgcccccgaggcagctggtgtgtttgcactggctctggaggctaacctgggtctgacctggcgggacatgcagcatctgactgtgctcacctccaaacggaaccagcttcacgacgaggtccatcagtggcggcgcaatggggtcggcctggaatttaatcacctctttggctacggggtccttgatgcaggtgccatggtgaaaatggctaaagactggaaaaccgtgcctgagagattccactgtgtgggaggctccgtgcaggaccctgagaaaataccatccactggcaagttggtgctgacactcacaaccgacgcctgtgaggggaaggaaaattttgtccgctacctggagcatgtccaggctgtcatcacggtcaacgcaaccagaagaggagacctgaacatcaacatgacttcccctatgggcaccaagtccattttgctgagccggcgtccaagggatgacgactccaaggtgggctttgacaagtggcctttcatgaccactcacacgtggggggaagacgcccgaggcacctggaccctggagctgggatttgtcggcagcgccccgcagaagggggtgctgaaggagtggaccctgatgctgcatggcactcagagtgccccgtacatcgaccaggtggtgcgggattaccagtccaagttggccatgtccaagaaagaggagctggaggaagagctggacgaagccgtggagagaagcctgaaaagcatccttaacaagaactagcgctgcacatccgcctttcccaccgccctccctccccagctccgcctctgtcctcgctccacgtttcaggcaggcacctagcaattccatcacccgtacaggcaattccgtcttcttaatctgaagcttcactcactgtcaatgattattttcattacaatggaaacaatcttttttactctatgccccaaatatagcgttcccaacaacatccatgtcctatgtgtgactctaaattctttatttctgtcattcaaatgggtgatatcctgaaaaaaaaaaaaaaaaaaaaactgggacagctttcccctcatttttttttttgtttctgagaaaagaacgtattttaaaagccacatagagtgactccaagaacaattgtccatggtctcaaacaaggggctgttacataacaagaaaatcaaagctgaggacagggtgtgagcgccacatctctgaaagcacaggagacactgtgctataaatcctttggggagcgatgttttgaatttagtgagatttaccagggatgtagattaaggtgatgtgattcaaaagatgccattcatagagagccctagttactgcatggggaaagagatccaggaagcatgagtgctggatattttactaccaatgccaagataattcactctactcagccggcgtggcaaatataaaacttacagagcgtggctgtgctctcaccagctgctgctctgagttatgttaaaatccgctagagcagcccaaatttttctcagtttgtatagagttcatcccagccccaattttctggggctcctcacatagctacccaaaagagaaaaaaaattaagacaagcctggcaacacacctggtgaagagtagtttactagcttttcaaacaagaatgtcccttttcctaagtcactttgaggtgtctcaatctgatctgagtgagaggcgacaggagtatttttttttttttacagctttacacacacagatgtgggctttgatttccaagtaatataatggaagagaaatctcatactcccccacagtttgatgtcattaatgtgttgggaaaaaggcctctgtcccggaagagtcatgggaggtgaaaggggcacgtttgaagatgcgagcgctatcttcacatagttctccagttgtatggagcctcttctgccaagagagggccatgcaattcatcccagaggaacctgaggcctgaaggaggtgagagaagacctctgtgaggaaagcacacagtcaccttctcggcaactaagcagtccctgagaccatttaacatgcaacccgaaggttatggtcaatcccaaaagtcaccactccattcccaactagacattaccaaagtgacctacccagagattgcttctcatccccagtcccaatgcacatccattcccaagaaatgctttgtcttcagcctctccaggcaccatctcccttcctgtgggagcagagagcttagcctggagcacctttccttcaagccagcaacacagagcactaggttcaattccctgaaggtggccactttaagagagaaatctgaaaaccccatttgctttcttttctcccatattggcatggatttctgtcttctctaacaccttgtgaccttctctatatcatgctttaaagtgtaataatatgattttttaaaagaaatttattacttgttgcaaaggtctttttaaaccagtttagatttcaagaaaaaataaatggaaatcatcgaaaattcatttcacattaatggtctaaaaataaaccaaaggacattatgtgtgcatgtgtgtataagtgcacacagaaatatatatacatatgtagactatatacatgtgtgtatatatgtgtatatatacatacacttgtataaatgtatatacacatatacctataatgtgtgtatgtgtatttattgaagaaacagataccatactcatttctaaaagaatattcagagaatatcaagatgattctggctgaaaaaggccagtggaaattcaggtgaaaatgttcatcaattcccattgcatcacctctgtaatttttcagctctctgtataaacattaaatgtcttatatagcagcaaaaatataaaatagttgtccatattttcacaggtgtggtgtaatttataaaattagaaagcaacttatcagctacttaagagaaatggcaagttttgatatgagtatacaatatataaaaatatatatagtgctatatatataaatatttggtctctatttcattttttgcatcagtattaatactaaaatatgtctcgctagtgatgtttttatgatatccctgatcctaactgaagagacagttatttatagtcatttattttaaaaaatgaaaataagtgaataataattaggttaacattgttgctccctgtgacaaaattttataagcaaatttcaaaagacatgttgtaaattaggaggctcaacaataaaacattatgctccagaaa

SEQ ID NO: 878 - DNA, 1131 bp, Homo sapiens
ggggagagagaggccggtcctggtctggccgctgcggctgctagcccgaggtctccaagccgggctgcggctccatcctcggctcctgggcaccgtctgcgaggctccgccgaccagagtgagaaagccgcgggcggcgaccgccgcatcatgtcagccaaggacgagcgggccagggagatcctgaggggcttcaaactaaattggatgaaccttcgggatgctgagacagggaagatactctggcaaggaacagaagacctgtctgtccctggtgtggagcatgaagcccgtgttcccaagaaaatcctcaagtgcaaggcagtgtctcgagaacttaatttttcttcgacagaacaaatggaaaaattccgcctggaacaaaaagtttacttcaaagggcaatgcctagaagaatggttcttcgagtttggctttgtgatccctaactccacaaatacctggcagtccttgatagaggcagcacccgagtcccagatgatgccagcaagcgtcttaactgggaacgttatcatagaaacaaagttttttgacgacgatcttcttgtaagcacatccagagtgagacttttctatgtttgaaagaagaatgtgtgtacatttcaagaatttgggttttttggagggaggaggaaactgtttacttttttcctccacacgtttgatttttgacacatacacccctaattccctcaacagcagaacctacctgcagccaccaggggaccagctctgtgtaggtaaccagatggctctttttcccaagccgccatcttccagctgaccagactaaactcccaaccccagaccagggcaggggacaggtctcaagtccttcccagcatacacacagggaaacaaacacataccacaaaccggtaactgtacctgtcaccctccttgtctcctccttgggccctacaggctacacatctacctttggcccctggttttggaaaaattccgtgttcctgacccatgtttagttttttcctaccatttctatttcatacattctcatacatttaacttgtaaaatagactgtgatattattacataatgtaattaaaaatatgaattaaaatattcctacagtcaaaaaaaaaaaa

SEQ ID NO: 879 - DNA, 1552 bp, Homo sapiens
ttattccccactttacctggctaattgaagtgtaacaaaagcttcatccaggaacattggcgcgggaaacctggcgtactggctgtggcttctctagcgggactcggcatgaggctggcgcggctgcttcgcggagccgccttggccggcccgggcccggggctgcgcgccgccggcttcagccgcagcttcagctcggactcgggctccagcccggcgtccgagcgcggcgttccgggccaggtggacttctacgcgcgcttctcgccgtccccgctctccatgaagcagttcctggacttcggatcagtgaatgcttgtgaaaagacctcatttatgtttctgcggcaagagttgcctgtcagactggcaaatataatgaaagaaataagtctccttccagataatcttctcaggacaccatccgttcaattggtacaaagctggtatatccagagtcttcaggagcttcttgattttaaggacaaaagtgctgaggatgctaaagctatttatgactttacagatactgtgatacggatcagaaaccgacacaatgatgtcattcccacaatggcccagggtgtgattgaatacaaggagagctttggggtggatcctgtcaccagccagaatgttcagtactttttggatcgattctacatgagtcgcatttcaattagaatgttactcaatcagcactctttattgtttggtggaaaaggcaaaggaagtccatctcatcgaaaacacattggaagcataaatccaaactgcaatgtacttgaagttattaaagatggctatgaaaatgctaggcgtctgtgtgatttgtattatattaactctcccgaactagaacttgaagaactaaatgcaaaatcaccaggacagccaatacaagtggtttatgtaccatcccatctctatcacatggtgtttgaacttttcaagaatgcaatgagagccactatggaacaccatgccaacagaggtgtttacccccctattcaagttcatgtcacgctgggtaatgaggatttgactgtgaagatgagtgaccgaggaggtggcgttcctttgaggaaaattgacagacttttcaactacatgtattcaactgcaccaagacctcgtgttgagacctcccgcgcagtgcctctggctggttttggttatggattgcccatatcacgtctttacgcacaatacttccaaggagacctgaagctgtattccctagagggttacgggacagatgcagttatctacattaaggctctgtcaacagactcaatagaaagactcccagtgtataacaaagctgcctggaagcattacaacaccaaccacgaggctgatgactggtgcgtccccagcagagaacccaaagacatgacgacgttccgcagtgcctagacacactggggacatcggaaaatccaaatgtggcttttgtattaaatttggaaggtatggtgttcagaactatattataccaagtactttatttatcgttttcacaaaactatttgagtagaataaatggaaa

SEQ ID NO: 880 - DNA, 1199 bp, Homo sapiens
ccaacttcggctatgacctgtaccgggtgcgatccagcatgagccccacgaccaacgtgctcctgtctcctctcagtgtggccacggccctctcggccctctcgctgggagcggagcagcgaacagaatccatcattcaccgggctctctactatgacttgatcagcagcccagacatccatggtacctataaggagctccttgacacggtcactgccccccagaagaacctcaagagtgcctcccggatcgtctttgagaagaagctgcgcataaaatccagctttgtggcacctctggaaaagtcatatgggaccaggcccagagtcctgacgggcaaccctcgcttggacctgcaagagatcaacaactgggtgcaggcgcagatgaaagggaagctcgccaggtccacaaaggaaattcccgatgagatcagcattctccttctcggtgtggcgcacttcaaggggcagtgggtaacaaagtttgactccagaaagacttccctcgaggatttctacttggatgaagagaggaccgtgagggtccccatgatgtcggaccctaaggctgttttacgctatggcttggattcagatctcagctgcaagattgcccaactgcccttgaccggaagcatgagtatcatcttcttcctgcccctgaaagtgacccagaatttgaccttgatagaggagagcctcacctccgagttcattcatgacatagaccgagaactgaagaccgtgcaggcggtcctcactgtccccaagctgaagctgagttacgaaggcgaagtcaccaagtccctgcaggagatgaagctgcaatccttgtttgattcaccagactttagcaagatcacaggcaaacccatcaagctgactcaggtggaacaccgggctggctttgagtggaacgaggatggggcgggaaccacccccagcccagggctgcagcctgcccacctcaccttcccgctggactatcaccttaaccagcctttcatcttcgtactgagggacacagacacaggggcccttctcttcattggcaagattctggaccccaggggcccctaatatcccagtttaatattccaataccctagaagaaaacccgagggacagcagattccacaggacacgaaggctgcccctgtaaggtttcaatgcatacaataaaagagctttatccct

SEQ ID NO: 881 - DNA, 4656 bp, Homo sapiens
ggctggagcggcggcgggcaggcgtgcggaggacactcctgcgaccaggtactggctgtgatcgaacttctcaaccctcagagacttagatcttccacctcactccctcagccaagcctccaggccccctcgtgcatccgtggtggcctctctgccttctctgttctgttctccccatggcccagacatgagtggccccctagaaggggctgatgggggaggggaccccaggcctggggaatcattttgtcctgggggcgtcccatcccctgggcccccacagcaccggccttgcccaggccccagcctggccgatgacaccgatgccaacagcaatggttcaagtggcaatgagtccaacgggcatgagtctagaggcgcatctcagcggagctcacacagctcctcctcaggcaacggcaaggactcagccctgctggagaccactgagagcagcaagagcacaaactctcagagcccatccccacccagcagttccattgcctacagcctcctgagtgccagctcagagcaggacaacccgtccaccagtggctgcagcagtgaacagtcagcccgggcaaggactcagaaggaactcatgacagcacttcgagagctcaagcttcgactgccgccagagcgccggggcaagggccgctctgggaccctggccacgctgcagtacgcactggcctgtgtcaagcaggtgcaggccaaccaggaatactaccagcagtggagcctggaggagggcgagccttgctccatggacatgtccacctataccctggaggagctggagcacatcacgtctgagtacacacttcagaaccaggataccttctcagtggctgtctccttcctgacgggccgaatcgtctacatttcggagcaggcagccgtcctgctgcgttgcaagcgggacgtgttccggggtacccgcttctctgagctcctggctccccaggatgtgggagtcttctatggttccactgctccatctcgcctgcccacctggggcacaggggcctcagcaggttcaggcctcagggactttacccaggagaagtccgtcttctgccgtatcagaggaggtcctgaccgggatccagggcctcggtaccagccattccgcctaaccccgtatgtgaccaagatccgggtctcagatggggcccctgcacagccgtgctgcctgctgattgcagagcgcatccattcgggttacgaagctccccggataccccctgacaagaggattttcactacgcggcacacacccagctgcctcttccaggatgtggatgaaagggctgcccccctgctgggctacctgccccaggacctcctgggggccccagtgctcctgttcctgcatcctgaggaccgacccctcatgctggctatccacaagaagattctgcagttggcgggccagccctttgaccactcccctatccgcttctgtgcccgcaacggggagtatgtcaccatggacaccagctgggctggctttgtgcacccctggagccgcaaggtagccttcgtgttgggccgccacaaagtacgcacggcccccctgaatgaggacgtgttcactcccccggcccccagcccagctccctccctggacactgatatccaggagctgtcagagcagatccaccggctgctgctgcagcccgtccacagccccagccccacgggactctgtggagtcggcgccgtgacatccccaggccctctccacagccctgggtcctccagtgatagcaacgggggtgatgcagaggggcctgggcctcctgcgccagtgactttccaacagatctgtaaggatgtgcatctggtgaagcaccagggccagcagctttttattgagtctcgggcccggcctcagtcccggccccgcctccctgctacaggcacgttcaaggccaaggcccttccctgccaatccccagacccagagctggaggcgggttctgctcccgtccaggccccactagccttggtccctgaggaggccgagaggaaagaagcctccagctgctcctaccagcagatcaactgcctggacagcatcctcaggtacctggagagctgcaacctccccagcaccactaagcgtaaatgtgcctcctcctcctcctataccacctcctcagcctctgacgacgacaggcagaggacaggtccagtctctgtggggaccaagaaagatccgccgtcagcagcgctgtctggggagggggccaccccacggaaggagccagtggtgggaggcaccctgagcccgctcgccctggccaataaggcggagagtgtggtgtccgtcaccagtcagtgtagcttcagctccaccatcgtccatgtgggagacaagaagcccccggagtcggacatcatcatgatggaggacctgcctggtctagccccaggcccagcccccagcccagcccccagccccacagtagcccctgacccagccccagacgcctaccgtccagtggggctgaccaaggccgtgctgtccctgcacacgcagaaggaagagcaagccttcctcagccgcttccgagacctgggcaggctgcgtggactcgacagctcttccacagctccctcagcccttggcgagcgaggctgccaccacggccccgcacccccaagccgccgacaccactgccgatccaaagccaagcgctcacgccaccaccagaaccctcgggctgaagcgccctgctatgtctcacacccctcacccgtgccaccctccaccccctggcccaccccaccagccactacccccttcccagcggttgtccagccctaccctctcccagtgttctctcctcgaggaggcccccagcctcttccccctgctcccacatctgtgcccccagctgctttccccgcccctttggtgaccccaatggtggccttggtgctccctaactatctgttcccaaccccatccagctatccttatggggcactccagacccctgctgaagggcctcccactcctgcctcgcactccccttctccatccttgcccgccctccccccgagtcctcctcaccgcccggactctccactgttcaactcgagatgcagctctccactccagctcaatctgctgcagctggaggagctcccccgtgctgagggggctgctgttgcaggaggccctgggagcagtgccgggcccccacctcccagtgcggaggctgctgagccagaggccagactggcggaggtcactgagtcctccaatcaggacgcactttccggctccagtgacctgctcgaacttctgctgcaagaggactcgcgctccggcacaggctccgcagcctcgggctccttgggctctggcttgggctctgggtctggttcaggctcccatgaagggggcagcacctcagccagcatcactcgcagcagccagagcagccacacaagcaaatactttggcagcatcgactcttccgaggctgaggctggggctgctcggggcggggctgagcctggggaccaggtgattaagtacgtgctccaggatcccatttggctgctcatggccaatgctgaccagcgcgtcatgatgacctaccaggtgccctccagggacatgacctctgtgctgaagcaggatcgggagcggctccgagccatgcagaagcagcagcctcggttttctgaggaccagcggcgggaactgggtgctgtgcactcctgggtccggaagggccaactgcctcgggctcttgatgtgatggcctgtgtggactgtgggagcagcacccaagatcctggtcaccctgatgacccactcttctcagagctggatggactggggctggagcccatggaagagggtggaggcgagcagggcagcagcggtggcggcagtggtgagggagagggctgcgaggaggcccaaggcggggccaaggcttcaagctctcaggacttggctatggaggaggaggaagaaggcaggagctcatccagtccagccttacctacagcaggaaactgcaccagctagactccattctgggaccatctccaggagtccatgagaggctttcttctcctatgtcccaattctcagaactcagatgtggctagaccaaccagtgggaaactgccccagcttctcccaccatagggggccggacccccatcaccagcctaggatccaggggctgcctctggcctcttagggagcagagagcagaactccgcagcccagcccagaggagtgtcacctcccacctttggagaggaatccttccctcccctggacaaagttgctgacaagctgctgaagtggcctctccatattccagctgagcctgaatctgactcttgagggttggggctgcacttatttattgcggggagacagctctctctcccacctcctccccagatgggaggagagcctgaggcccaagcaggacccgggggttccagcccctagctgctctggagtgggggaggttggtggaccatggagtccctggtgctgcccctcaggtgggacccaggggttctcagctgtaccctctgccgatggcatttgtgtttttgatatttgtgtctgttactacttttttaatacaaaaagataaaaacgcc

SEQ ID NO: 882 - DNA, 2914 bp, Homo sapiens
gcgacgcggcgcaggcggcgggagtgcgagctgggcccgtgtttcggccgccgccatggccgcggtggacctggagaagctgcgggcgtcgggcgcgggcaaggccatcggcgtcctgaccagcggcggcgaccggcaaggcatgaacgctgctgtccgggctgtgacgcgcatgggcatttatgtgggtgccaaagtcttcctcatctacgagggctatgagggcctcgtggagggaggtgagaacatcaagcaggccaactggctgagcgtctccaacatcatccagctgggcggcactatcattggcagcgctcgctcgaaggcctttaccaccagggaggggcgccgggcagcggcctacaacctggtccagcacggcatcaccaacctgtgcgtcatcggcggggatggcagcctcacaggtgccaacatcttccgcagcgagtggggcagcctgctggaggagctggtggcggaaggtaagatctcagagactacagcctggacctactcgcacctgaacatcgcgggcctagtgggctccatcgataacgacttctgcggcaccgacatgaccatcggcacggactcggccctccaccgcatcatggaggtcatcgatgccatcaccaccactgcccagagccaccagaggaccttcgtgctggaagtgatgggccggcactgcgggtacctggcgctggtatctgcactggcctcaggggccgactggctgttcatccccgaggctccacccgaggacggctgggagaacttcatgtgtgagaggctgggtgagactcggagccgtgggtcccgactgaacatcatcatcatcgctgagggtgccattgaccgcaacgggaagcccatctcgtccagctacgtgaaggacctggtggttcagaggctgggcttcgacacccgtgtaactgtgctgggccacgtgcagcggggagggacgccctctgccttcgaccggatcctgagcagcaagatgggcatggaggcggtgatggcgctgctggaagccacgcctgacacgccggcctgcgtggtcaccctctcggggaaccagtcagtgcggctgcccctcatggagtgcgtgcagatgaccaaggaagtgcagaaagccatggatgacaagaggtttgacgaggccacccagctccgtggtgggagcttcgagaacaactggaacatttacaagctcctcacccaccagaagccccccaaggagaagtctaacttctccctggccatcctgaatgtgggggccccggcggctggcatgaatgcggccgtgcgctcggcggtgcggaccggcatctcccatggacacacagtatacgtggtgcacgatggcttcgaaggcctagccaagggtcaggtgcaagaagtaggctggcacgacgtggccggctggttggggcgtggtggctccatgctggggaccaagaggaccctgcccaagggccagctggagtccattgtggagaacatccgcatctatggtattcacgccctgctggtggtcggtgggtttgaggcctatgaaggggtgctgcagctggtggaggctcgcgggcgctacgaggagctctgcatcgtcatgtgtgtcatcccagccaccatcagcaacaacgtccctggcaccgacttcagcctgggctccgacactgctgtaaatgccgccatggagagctgtgaccgcatcaaacagtctgcctcggggaccaagcgccgtgtgttcatcgtggagaccatggggggttactgtggctacctggccaccgtgactggcattgctgtgggggccgacgccgcctacgtcttcgaggaccctttcaacatccacgacttaaaggtcaacgtggagcacatgacggagaagatgaagacagacattcagaggggcctggtgctgcggaacgagaagtgccatgactactacaccacggagttcctgtacaacctgtactcatcagagggcaagggcgtcttcgactgcaggaccaatgtcctgggccacctgcagcagggtggcgctccaaccccctttgaccggaactatgggaccaagctgggggtgaaggccatgctgtggttgtcggagaagctgcgcgaggtttaccgcaagggacgggtgttcgccaatgccccagactcggcctgcgtgatcggcctgaagaagaaggcggtggccttcagccccgtcactgagctcaagaaagacactgatttcgagcaccgcatgccacgggagcagtggtggctgagcctgcggctcatgctgaagatgctggcacaataccgcatcagtatggccgcctacgtgtcaggggagctggagcacgtgacccgccgcaccctgagcatggacaagggcttctgaggccagccatgcccgagctgcccctccccagcccccacccatgccagcgcacgcgccagggctcagatggggcctgggctgttgtgtctggagcctgcaggcaggtgggggctgcgtccctgctcagcccatcccctgcctctactccctggccacctgccaggcctccctccggctggtgtcttgagaccagcctgccaggcctccagcaggaggacagagtgccctggggcatccaccttcctgcccaggggacgtggcgctgtcggtgtttggaggctgctgccccctggctttggcgccccatgggccctcagcgtctccccatgctgggctcactacatgggccagcccttgctctacctggccggtaggctgctggcgcctaggttgtgttgagagggggatgcccctggccctgcctcactgtgacctgctcctgcccacgtgcagcacctgtcaccttttctagaaataaaatcaccctgactgtggggtgccatcggtctccggaga

SEQ ID NO: 883 - DNA, 2591 bp, Homo sapiens
cccggacgtgcggctcccctcggcctcctcgccatggacgcggacgactcccgggcccccaagggctccttgcggaagttcctggagcacctctccggggccggcaaggccatcggcgtgctgaccagcggcggggatgctcaaggtatgaacgctgccgtccgtgccgtggtgcgcatgggtatctacgtgggggccaaggtgtacttcatctacgagggctaccagggcatggtggacggaggctcaaacatcgcagaggccgactgggagagtgtctccagcatcctgcaagtgggcgggacgatcattggcagtgcgcggtgccaggccttccgcacgcgggaaggccgcctgaaggctgcttgcaacctgctgcagcgcggcatcaccaacctgtgtgtgatcggcggggacgggagcctcaccggggccaacctcttccggaaggagtggagtgggctgctggaggagctggccaggaacggccagatcgataaggaggccgtgcagaagtacgcctacctcaacgtggtgggcatggtgggctccatcgacaatgatttctgcggcaccgacatgaccatcggcacggactccgccctgcacaggatcatcgaggtcgtcgacgccatcatgaccacggcccagagccaccagaggaccttcgttctggaggtgatgggacgacactgtgggtacctggccctggtgagtgccttggcctgcggtgcggactgggtgttccttccagaatctccaccagaggaaggctgggaggagcagatgtgtgtcaaactctcggagaaccgtgcccggaaaaaaaggctgaatattattattgtggctgaaggagcaattgatacccaaaataaacccatcacctctgagaaaatcaaagagcttgtcgtcacgcagctgggctatgacacacgtgtgaccatcctcgggcacgtgcagagaggagggaccccttcggcattcgacaggatcttggccagccgcatgggagtggaggcagtcatcgccttgctagaggccaccccggacaccccagcttgcgtcgtgtcactgaacgggaaccacgccgtgcgcctgccgctgatggagtgcgtgcagatgactcaggatgtgcagaaggcgatggacgagaggagatttcaagatgcggttcgactccgagggaggagctttgcgggcaacctgaacacctacaagcgacttgccatcaagctgccggatgatcagatcccaaagaccaattgcaacgtagctgtcatcaacgtgggggcacccgcggctgggatgaacgcggccgtacgctcagctgtgcgcgtgggcattgccgacggccacaggatgctcgccatctatgatggctttgacggcttcgccaagggccagatcaaagaaatcggctggacagatgtcgggggctggaccggccaaggaggctccattcttgggacaaaacgcgttctcccggggaagtacttggaagagatcgccacacagatgcgcacgcacagcatcaacgcgctgctgatcatcggtggattcgaggcctacctgggactcctggagctgtcagccgcccgggagaagcacgaggagttctgtgtccccatggtcatggttcccgctactgtgtccaacaatgtgccgggttccgatttcagcatcggggcagacaccgccctgaacactatcaccgacacctgcgaccgcatcaagcagtccgccagcggaaccaagcggcgcgtgttcatcatcgagaccatgggcggctactgtggctacctggccaacatgggggggctcgcggccggagctgatgccgcatacattttcgaagagcccttcgacatcagggatctgcagtccaacgtggagcacctgacggagaaaatgaagaccaccatccagagaggccttgtgctcagaaatgagagctgcagtgaaaactacaccaccgacttcatttaccagctgtattcagaagagggcaaaggcgtgtttgactgcaggaagaacgtgctgggtcacatgcagcagggtggggcaccctctccatttgatagaaactttggaaccaaaatctctgccagagctatggagtggatcactgcaaaactcaaggaggcccggggcagaggaaaaaaatttaccaccgatgattccatttgtgtgctgggaataagcaaaagaaacgttatttttcaacctgtggcagagctgaagaagcaaacggattttgagcacaggattcccaaagaacagtggtggctcaagctacggcccctcatgaaaatcctggccaagtacaaggccagctatgacgtgtcggactcaggccagctggaacatgtgcagccctggagtgtctgacccagtcccgcctgcatgtgcctgcagccaccgtggactgtctgtttttgtaacacttaagttattttatcagcactttatgcacgtattattgacattaatacctaatcggcgagtgcccatctgccccaccagctccagtgcgtgctgtctgtggagtgtgtctcatgctttcagatgtgcatatgagcagaattaattaa

SEQ ID NO: 884 - DNA, 1709 bp, Homo sapiens
gggcggggtgccgcatccccagcccgccgccatggccgcctacaaactggtgctgatccggcacggcgagagcgcatggaacctggagaaccgcttcagcggctggtacgacgccgacctgagcccggcgggccacgaggaggcgaagcgcggcgggcaggcgctacgagatgctggctatgagtttgacatctgcttcacctcagtgcagaagagagcgatccggaccctctggacagtgctagatgccattgatcagatgtggctgccagtggtgaggacttggcgcctcaatgagcggcactatgggggtctaaccggtctcaataaagcagaaactgctgcaaagcatggtgaggcccaggtgaagatctggaggcgctcctatgatgtcccaccacctccgatggagcccgaccatcctttctacagcaacatcagtaaggatcgcaggtatgcagacctcacagaagatcagctaccctcctgtgagagtctgaaggatactattgccagagctctgcccttctggaatgaagaaatagttccccagatcaaggaggggaaacgtgtactgattgcagcccatggcaacagcctccggggcattgtcaagcatctggagggtctctctgaagaggctatcatggagctgaacctgccgactggtattcccattgtctatgaattggacaagaacttgaagcctatcaagcccatgcagtttctgggggatgaagagacggtgcgcaaagccatggaagctgtggctgcccagggcaaggccaagaagtgaaggccggcggggaggatactgtccccaggagcaccctccctgcccgtcttgtccctctgcccctcccacctgcacatgtcacactgaccacatctgtagacatcttgagttgtagctgcagacggggaccagtggctcccattttcattttagccattttgtcgcctgcacccactcccttcatacaatctagtcagaatagcagttctagagcacaggttctcagtctaagctatggaaaagctccccttatccaacagagtttaaaagtagtgacttgggtttttgcgagtgctttgtttactaaggactttggggaggaaccatgctaagccatgaccagtgaggagaagcaacagagcctgtctgtccccatgagcggagtctgtcctctgctcttctgcagtcaggtcactgcctactgcctgggggctctagtcattccagtggaagacgaatgtaacctgcgtggtgatgtgacaactgtttcctccctgaccccagaggatctggctctaggttgggatcaatcctgaatttcgttatgtgttaatttacttttattaaaaaagtatagtatatataatacaaaacaataacccttctggggtttcttgtggcggttgaaatagtcccacatgtggtcatcagaaatagcattcctcataccaatataggatcagctccttgacctctgaggggtcaggagtgcttcctggtgtgtgtattagaatcccttcctgccttgtttcatggcagtgaaatgcctcttggtcctgtccagtgtatctttcactgatttctgaatcatgttctagttgcttgaccctgccacatgggtccagtgttcatctgagcataactgtactaaatcctttttccatatcagtataataaaggagtgatgtgcaat

SEQ ID NO: 885 - DNA, 1366 bp, Homo sapiens
cgcagaactcagagctgctcttcctctgtggccagttggggaccagcatcatgaagtggatggtggtggtcttggtctgcctccagctcttggaggcagcagtggtcaaagtgcccctgaagaaatttaagtctatccgtgagaccatgaaggagaagggcttgctgggggagttcctgaggacccacaagtatgatcctgcttggaagtaccgctttggtgacctcagcgtgacctacgagcccatggcctacatggatgctgcctactttggtgagatcagcatcgggactccaccccagaacttcctggtcctttttgacaccggctcctccaacttgtgggtgccctctgtctactgccagagccaggcctgcaccagtcactcccgcttcaaccccagcgagtcgtccacctactccaccaatgggcagaccttctccctgcagtatggcagtggcagcctcaccggcttctttggctatgacaccctgactgtccagagcatccaggtccccaaccaggagttcggcttgagtgagaatgagcctggtaccaacttcgtctatgcgcagtttgatggcatcatgggcctggcctaccctgctctgtccgtggatgaggccaccacagctatgcagggcatggtgcaggagggcgccctcaccagccccgtcttcagcgtctacctcagcaaccagcagggctccagcgggggagcggttgtctttgggggtgtggatagcagcctgtacacggggcagatctactgggcgcctgtcacccaggaactctactggcagattggcattgaagagttcctcatcggcggccaggcctccggctggtgttctgagggttgccaggccatcgtggacacaggcacctctctgctaactgtgccccagcagtacatgagtgctcttctgcaggccacaggggcccaggaggatgagtatggacagtttctcgtgaactgtaacagcattcagaatctgcccagcttgaccttcatcatcaatggtgtggagttccctctgccaccttcctcctatatcctcagtaacaacggctactgcaccgtgggagtcgagcccacctacctgtcctcccagaacggccagcccctgtggatcctcggggatgtcttcctcaggtcctactattccgtctacgacttgggcaacaacagagtaggctttgccactgccgcctagacttgctgcctcgacacgtgggctcccctcttcctcttgaccctgcaccctcctagggcattgtatctgtctttccactctggattcagccttctttttctggactctggactttctctaataataaatagttcttctaaaaaaaaaaa

SEQ ID NO: 886 - DNA, 2320 bp, Homo sapiens
gggccggccgcccctccgccagccaagtccgccgctctgacccccggcagcaagtcgccaccatggtgaagatcgtgacagttaagacccaggcgtaccaggaccagaagccgggcacgagcgggctgcggaagcgggtgaaggtgttccagagcagcgccaactacgcggagaacttcatccagagtatcatctccaccgtggagccggcgcagcggcaggaggccacgctggtggtgggcggggacggccggttctacatgaaggaggccatccagctcatcgctcgcatcgctgccgccaacgggatcggtcgcttggttatcggacagaatggaatcctctccacccctgctgtatcctgcatcattagaaaaatcaaagccattggtgggatcattctgacagccagtcacaacccagggggccccaatggagattttggaatcaaattcaatatttctaatggaggtcctgctccagaagcaataactgataaaattttccaaatcagcaagacaattgaagaatatgcagtttgccctgacctgaaagtagaccttggtgttctgggaaagcagcagtttgacttggaaaataagttcaaacccttcacagtggaaattgtggattcggtagaagcttatgctacaatgctgagaagcatctttgatttcagtgcactgaaagaactactttctgggccaaaccgactgaagatctgtattgatgctatgcatggagttgtgggaccgtatgtaaagaagatcctctgtgaagaactcggtgcccctgcgaactcggcagttaactgcgttcctctggaggactttggaggccaccaccctgaccccaacctcacctatgcagctgacctggtggagaccatgaagtcaggagagcatgattttggggctgcctttgatggagatggggatcgaaacatgattctgggcaagcatgggttctttgtgaacccttcagactctgtggctgtcattgctgccaacatcttcagcattccgtatttccagcagactggggtccgcggctttgcacggagcatgcccacgagtggtgctctggaccgggtggctagtgctacaaagattgctttgtatgagaccccaactggctggaagttttttgggaatttgatggacgcgagcaaactgtccctttgtggggaggagagcttcgggaccggttctgaccacatccgtgagaaagatggactgtgggctgtccttgcctggctctccatcctagccacccgcaagcagagtgtggaggacattctcaaagatcattggcaaaagcatggccggaatttcttcaccaggtatgattacgaggaggtggaagctgagggcgcaaacaaaatgatgaaggacttggaggccctgatgtttgatcgctcctttgtggggaagcagttctcagcaaatgacaaagtttacactgtggagaaggccgataactttgaatacagcgacccagtggatggaagcatttcaagaaatcagggcttgcgcctcattttcacagatggttctcgaatcgtcttccgactgagcggcactgggagtgccggggccaccattcggctgtacatcgatagctatgagaaggacgttgccaagattaaccaggacccccaggtcatgttggccccccttatttccattgctctgaaagtgtcccagctgcaggagaggacgggacgcactgcacccactgtcatcacctaagaagacaggcctgatgtggtacgtccctccacccccggacccatccaagtcatctgattgaagagcatgacagaaacaaaatgtattcaccaagcattttaggatttgactttttcactaaccagttgacgagcagtgcatttacaaggcactgccaaacaagatgcccttgggagctgtgagggaaagaggacctgcgggcttagatcaatctcaattccttttcatgccctcctgcattgctgctgcgtgggtatttgtctccttagccatcaggtacagtttacactacaatgtaagctataggtggagcatcagcagtgagtgaggccattcttcatccttaggatgtggcaatgaaatgatggtgcaagttcctttctcttttgtgaatctttccccccatttcctgtttacatgtaacccaacaaaatgcaatttctagtgccttctgtccaatcagttctttcctctgagtgagacgtacttggctacagatttctgccttgttttgcgacattgtcccattcacacagatattttgggataataaaggaaaataagctaca

SEQ ID NO: 887 - DNA, 1826 bp, Homo sapiens
agtatgtgtggttggggaattcatgtggaggtcagagtggaagcaggtgtgagagggtccagcagaaggaaacatggctgccaaagtgtttgagtccattggcaagtttggcctggccttagctgttgcaggaggcgtggtgaactctgccttatataatgtggatgctgggcacagagctgtcatctttgaccgattccgtggagtgcaggacattgtggtaggggaagggactcattttctcatcccgtgggtacagaaaccaattatctttgactgccgttctcgaccacgtaatgtgccagtcatcactggtagcaaagatttacagaatgtcaacatcacactgcgcatcctcttccggcctgtcgccagccagcttcctcgcatcttcaccagcatcggagaggactatgatgagcgtgtgctgccgtccatcacaactgagatcctcaagtcagtggtggctcgctttgatgctggagaactaatcacccagagagagctggtctccaggcaggtgagcgacgaccttacagagcgagccgccacctttgggctcatcctggatgacgtgtccttgacacatctgaccttcgggaaggagttcacagaagcggtggaagccaaacaggtggctcagcaggaagcagagagggccagatttgtggtggaaaaggctgagcaacagaaaaaggcggccatcatctctgctgagggcgactccaaggcagctgagctgattgccaactcactggccactgcaggggatggcctgatcgagctgcgcaagctggaagctgcagaggacatcgcgtaccagctctcacgctctcggaacatcacctacctgccagcggggcagtccgtgctcctccagctgccccagtgagggcccaccctgcctgcacctccgcgggctgactgggccacagccccgatgattcttaacacagccttccttctgctcccaccccagaaatcactgtgaaatttcatgattggcttaaagtgaaggaaataaaggtaaaatcacttcagatctctaattagtctatcaaatgaaactctttcattcttctcacatccatctacttttttatccacctccctaccaaaaattgccaagtgcctatgcaaaccagctttaggtcccaattcggggcctgctggagttccggcctgggcaccagcatttggcagcacgcaggcggggcagtatgtgatggactggggagcacaggtgtctgcctagatccacgtgtggcctccgtcctgtcactgatggaaggtttgcggatgagggcatgtgcggctgaactgagaaggcaggcctccgtcttcccagcggttcctgtgcagatgctgctgaagagaggtgccggggaggggcagagaggaagtggtctgtctgttaccataagtctgattctctttaactgtgtgaccagcggaaacaggtgtgtgtgaactgggcacagattgaagaatctgcccctgttgaggtgggtgggcctgactgttgccccccagggtcctaaaacttggatggacttgtatagtgagagaggaggcctggaccgagatgtgagtcctgttgaagacttcctctctaccccccaccttggtccctctcagatacccagtggaattccaacttgaaggattgcatcctgctggggctgaacatgcctgccaaagacgtgtccgacctacgttcctggccccctcgttcagagactgcccttctcacgggctctatgcctgcactgggaaggaaacaaatgtgtataaactgctgtcaataaatgacacccagaccttcc

SEQ ID NO: 888 - DNA, 2008 bp, Homo sapiens
gcccctgcccggctcccggcggccccagctgtcaccggcccccccaggatgcaatggcgcagcccccccggctgagccgctctggtgcctcctcactttgggacccagcttctcctgctcccacctctggccccaggcctcggctttgggagggtcaagatgtgctggccagatggactgatgggctgctatacttgggtaccatcaaaaaggtggacagtgctagggaggtgtgtctggtccagtttgaggatgattcgcagtttctggttctatggaaagacattagccctgctgccctccctggagaggaactcctctgttgtgtctgtcgctctgagactgtggtccctgggaaccggctggtcagctgtgagaagtgtcgccatgcttatcaccaggactgccatgttcccagggctccagcccctggagagggagagggcacatcctgggtatgccgccagtgtgtctttgcgatcgccaccaagaggggaggtgccctgaagaagggcccctatgcccgggccatgctgggtatgaagctttctctgccatatggactgaaggggctggactgggatgctggacatctgagcaaccgacagcagagttactgttactgtggtggccctggggagtggaacctgaaaatgctgcagtgccggagctgcctgcagtggttccatgaggcctgcacccagtgtctgagcaagcccctcctctatggggacaggttctatgaatttgaatgctgtgtgtgtcgcgggggccctgagaaagtccggagactacagcttcgctgggtggatgtggcccatcttgtcctgtatcacctcagtgtttgctgtaagaagaaatactttgattttgatcgtgagatcctccccttcacttctgagaattgggacagtttgctcctgggggagctttcagacacccccaaaggagaacgttcttccaagctcctctctgctcttaacagccacaaggaccgtttcatttcagggagagagattaagaagaggaaatgtttgtttggtctccatgctcggatgcctccccctgtggagccccctactggagatggagcactcaccagggcagggccctgggggaggggtctcacgtcccctggggaagcgccggaggccggagccagagcccctgaggaggaggcagaaggggaaagtggaggagctggggccaccctcagcagtgcgcaatcagcccgagccccaggagcagagggagcgggctcatctgcagagggcactgcagcagccccatccggatgtttgcttccttccacccttctgccagcaccgcagggacctctggggacagtggacccccagacaggtcacccctggaacttcacattggtttccccacagacatccctaaaagtgccccccactcgatgactgcctcatcttcctcagtttcatccccatccccaggtcttcctagacgctcagcacccccttctcccctgtgccgtagtttgtctcctgggactgggggaggagtccgaggtggggttggttacctgtcccgaggggaccctgtccgggtccttgctcggagagtacggcctgatggctctgtgcagtacctggttgagtggggaggagggggcatcttctgaacagcctgcctctgcccagctccccattcacacacaccggcactttcataccctgacctctgacctcacctacagctgggatgtacctggagagatagsgggtagttctccctactgcccaggctggaatccaagagtggggagtggggaagaggccctcttctctaccctccttcatgattcctgacccctcccatccttcccatttcctttgatgttattttgttacagctttttaaatattttttaaaattatttaacccctgggggcagagactgaggagggaggatgataagggatcccggactctgtatgattgaaataaagagaaataaacaaaaaaaaaaaaaaaaaaa

SEQ ID NO: 889 - DNA, 631 bp, Homo sapiens
caatacagctaaggaattatcccttgtaaataccacagacccgccctggagccaggccaagctggactgcataaagattggtatggccttagctcttagccaaacaccttcctgacaccatgagggccagcagcttcttgatcgtggtggtgttcctcatcgctgggacgctggttctagaggcagctgtcacgggagttcctgttaaaggtcaagacactgtcaaaggccgtgttccattcaatggacaagatcccgttaaaggacaagtttcagttaaaggtcaagataaagtcaaagcgcaagagccagtcaaaggtccagtctccactaagcctggctcctgccccattatcttgatccggtgcgccatgttgaatccccctaaccgctgcttgaaagatactgactgcccaggaatcaagaagtgctgtgaaggctcttgcgggatggcctgtttcgttccccagtgaagggagccggtccttgctgcacctgtgccgtccccagagctacaggccccatctggtcctaagtccctgctgcccttccccttcccacactgtccattcttcctcccattcaggatgcccacggctggagctgcctctctcatccactttccaataaa

SEQ ID NO: 890 - DNA, 2566 bp, Homo sapiens
ggcacgagttgtgctcctcgcttgcctgttccttttccacgcattttccaggataactgtgactccaggcccgcaatggatgccctgcaactagcaaattcggcttttgccgttgatctgttcaaacaactatgtgaaaaggagccactgggcaatgtcctcttctctccaatctgtctctccacctctctgtcacttgctcaagtgggtgctaaaggtgacactgcaaatgaaattggacaggttcttcattttgaaaatgtcaaagatataccctttggatttcaaacagtaacatcggatgtaaacaaacttagttccttttactcactgaaactaatcaagcggctctacgtagacaaatctctgaatctttctacagagttcatcagctctacgaagagaccctatgcaaaggaattggaaactgttgacttcaaagataaattggaagaaacgaaaggtcagatcaacaactcaattaaggatctcacagatggccactttgagaacattttagctgacaacagtgtgaacgaccagaccaaaatccttgtggttaatgctgcctactttgttggcaagtggatgaagaaatttcctgaatcagaaacaaaagaatgtcctttcagactcaacaagacagacaccaaaccagtgcagatgatgaacatggaggccacgttctgtatgggaaacattgacagtatcaattgtaagatcatagagcttccttttcaaaataagcatctcagcatgttcatcctactacccaaggatgtggaggatgagtccacaggcttggagaagattgaaaaacaactcaactcagagtcactgtcacagtggactaatcccagcaccatggccaatgccaaggtcaaactctccattccaaaatttaaggtggaaaagatgattgatcccaaggcttgtctggaaaatctagggctgaaacatatcttcagtgaagacacatctgatttctctggaatgtcagagaccaagggagtggccctatcaaatgttatccacaaagtgtgcttagaaataactgaagatggtggggattccatagaggtgccaggagcacggatcctgcagcacaaggatgaattgaatgctgaccatccctttatttacatcatcaggcacaacaaaactcgaaacatcattttctttggcaaattctgttctccttaagtggcatagcccatgttaagtcctccctgacttttctgtggatgccgatttctgtaaactctgcatccagagattcattttctagatacaataaattgctaatgttgctggatcaggaagccgccagtacttgtcatatgtagccttcacacagatagacctttttttttttccaattctatcttttgtttccttttttcccataagacaatgacatacgcttttaatgaaaaggaatcacgttagaggaaaaatatttattcattatttgtcaaattgtccggggtagttggcagaaatacagtcttccacaaagaaaattcctataaggaagatttggaagctcttcttcccagcactatgctttccttctttgggatagagaatgttccagacattctcgcttccctgaaagactgaagaaagtgtagtgcatgggacccacgaaactgccctggctccagtgaaacttgggcacatgctcaggctactataggtccagaagtccttatgttaagccctggcaggcaggtgtttattaaaattctgaattttggggattttcaaaagataatattttacatacactgtatgttatagaacttcatggatcagatctggggcagcaacctataaatcaacaccttaatatgctgcaacaaaatgtagaatattcagacaaaatggatacataaagactaagtagcccataaggggtcaaaatttgctgccaaatgcgtatgccaccaacttacaaaaacacttcgttcgcagagcttttcagattgtggaatgttggataaggaattatagacctctagtagctgaaatgcaagaccccaagaggaagttcagatcttaatataaattcactttcatttttgatagctgtcccatctggtcatgtggttggcactagactggtggcaggggcttctagctgactcgcacagggattctcacaatagccgatatcagaatttgtgttgaaggaacttgtctcttcatctaatatgatagcgggaaaaggagaggaaactactgcctttagaaaatataagtaaagtgattaaagtgctcacgttaccttgacacatagtttttcagtctatgggtttagttactttagatggcaagcatgtaacttatattaatagtaatttgtaaagttgggtggataagctatccctgttgccggttcatggattacttctctataaaaaatatatatttaccaaaaaattttgtgacattccttctcccatctcttccttgacatgcattgtaaataggttcttcttgttctgagattcaatattgaatttctcctatgctattgacaataaaatattattgaactacc

SEQ ID NO: 891 - DNA, 1325 bp, Homo sapiens
agcatctacaaaggaggaatagtcaaagcagcagcggcggcggcggcggcggcagcagcagcagcagcaggagaccttctctgatggatgacctctgtgaagcaaatggcacttttgccatcagcttatttaaaatattgggggaagaggacaactcaagaaacgtattcttctctcccatgagcatctcctctgccctggccatggtcttcatgggggcaaagggaagcactgcagcccagatgtcccaggcactttgtttatacaaagacggagatattcaccgaggtttccagtcacttctcagtgaagttaacagaactggcactcagtacttgcttagaactgccaacagactctttggagaaaagacgtgtgatttccttccagactttaaagaatactgtcagaagttctatcaggcagagctggaggagttgtcctttgctgaagacactgaagagtgcaggaagcatataaatgactgggtggcagagaagactgaaggtaagatttcagaggtactggatgctgggacagtcgatcccctgacaaagctagtccttgtgaatgccatttatttcaagggaaagtggaatgagcaatttgacagaaagtacacaaggggaatgctctttaaaaccaacgaggaaaaaaagacagtgcagatgatgtttaaggaagctaagtttaaaatggggtatgcggatgaggtacacacccaggtcctggagctgccctatgtggaagaggagctgagcatggtcattctgcttcccgatgacaacacggacctcgccgtggtggaaaaagcacttacatatgagaaattcaaagcctggacaaattcagaaaagttgacaaaaagtaaggttcaagttttccttcccagattaaagctggaggagagttatgacttggagcctttccttcgaagattaggaatgatcgatgcttttgacgaagccaaggcagacttttctggaatgtcaactgagaagaatgtgcctctgtccaaggttgcccacaagtgcttcgtggaggtcaatgaggaaggcacagaggctgccgcagccactgctgtggtcaggaattcccggtgcagcagaatggagccaagattctgtgcagaccacccttttcttttcttcatcaggcgccacaaaaccaactgcatcttgttctgtggcaggttctcttctccgtaaagaggagcaattgctgtacataccctcctttccttctacctatcttgccttaattaacattccctgtgacctagttggtgcagtggcttgaatgccaaaataaagcgtgtgcactgg

SEQ ID NO: 892 - DNA, 576 bp, Homo sapiens
cttctctgggacacattgccttctgttttctccagcatgcgcttgctccagctcctgttcagggccagccctgccaccctgctcctggttctctgcctgcagttgggggccaacaaagctcaggacaacactcggaagatcataataaagaattttgacattcccaagtcagtacgtccaaatgacgaagtcactgcagtgcttgcagttcaaacagaattgaaagaatgcatggtggttaaaacttacctcattagcagcatccctctacaaggtgcatttaactataagtatactgcctgcctatgtgacgacaatccaaaaaccttctactgggacttttacaccaacagaactgtgcaaattgcagccgtcgttgatgttattcgggaattaggcatctgccctgatgatgctgctgtaatccccatcaaaaacaaccggttttatactattgaaatcctaaaggtagaataatggaagccctgtctgtttgccacacccaggtgatttcctctaaagaaacttggctggaatttctgctgtggtctataaaataaacttcttaacatgctt

SEQ ID NO: 893 - DNA, 2287 bp, Homo sapiens
ggctgaggcagtggctccttgcacagcagctgcacgcgccgtggctccggatcttcttcgtctttgcagcgtagcccgagtcggtcagcgccagaggacctcagcagccatgtcgaagccccatagtgaagccgggactgccttcattcagacccagcagctgcacgcagccatggctgacacattcctggagcacatgtgccgcctggacattgattcaccacccatcacagcccggaacactggcatcatctgtaccattggcccagcttcccgatcagtggagacgttgaaggagatgattaagtctggaatgaatgtggctcgtctgaacttctctcatggaactcatgagtaccatgcggagaccatcaagaatgtgcgcacagccacggaaagctttgcttctgaccccatcctctaccggcccgttgctgtggctctagacactaaaggacctgagatccgaactgggctcatcaagggcagcggcactgcagaggtggagctgaagaagggagccactctcaaaatcacgctggataacgcctacatggaaaagtgtgacgagaacatcctgtggctggactacaagaacatctgcaaggtggtggaagtgggcagcaagatctacgtggatgatgggcttatttctctccaggtgaagcagaaaggtgccgacttcctggtgacggaggtggaaaatggtggctccttgggcagcaagaagggtgtgaaccttcctggggctgctgtggacttgcctgctgtgtcggagaaggacatccaggatctgaagtttggggtcgagcaggatgttgatatggtgtttgcgtcattcatccgcaaggcatctgatgtccatgaagttaggaaggtcctgggagagaagggaaagaacatcaagattatcagcaaaatcgagaatcatgagggggttcggaggtttgatgaaatcctggaggccagtgatgggatcatggtggctcgtggtgatctaggcattgagattcctgcagagaaggtcttccttgctcagaagatgatgattggacggtgcaaccgagctgggaagcctgtcatctgtgctactcagatgctggagagcatgatcaagaagccccgccccactcgggctgaaggcagtgatgtggccaatgcagtcctggatggagccgactgcatcatgctgtctggagaaacagccaaaggggactatcctctggaggctgtgcgcatgcagaacctgattgcccgtgaggcagaggctgccatctaccacttgcaattatttgaggaactccgccgcctggcgcccattaccagcgaccccacagaagccaccgccgtgggtgccgtggaggcctccttcaagtgctgcagtggggccataatcgtcctcaccaagtctggcaggtctgctcaccaggtggccagataccgcccacgtgcccccatcattgctgtgacccggaatccccagacagctcgtcaggcccacctgtaccgtggcatcttccctgtgctgtgcaaggacccagtccaggaggcctgggctgaggacgtggacctccgggtgaactttgccatgaatgttggcaaggcccgaggcttcttcaagaagggagatgtggtcattgtgctgaccggatggcgccctggctccggcttcaccaacaccatgcgtgttgttcctgtgccgtgatggaccccagagcccctcctccagcccctgtcccacccccttcccccagcccatccattaggccagcaacgcttgtagaactcactctgggctgtaacgtggcactggtaggttgggacaccagggaagaagatcaacgcctcactgaaacatggctgtgtttgcagcctgctctagtgggacagcccagagcctggctgccccatcatgtggccccacccaatcaagggaagaaggaggaatgctggactggaggcccctggagccagatggcaagagggtgacagcttcctttcctgtgtgtactctgtccagttcctttagaaaaaatggatgcccagaggactcccaaccctggcttggggtcaagaaacagccagcaagagttaggggccttagggcactgggctgttgttccattgaagccgactctggccctggcccttacttgcttctctagctctctaggcctctccagtttgcacctgtccccaccctccactcagctgtcctgcagcaaacactccaccctccaccttccattttcccccactactgcagcacctccaggcctgttgccgc

SEQ ID NO: 894 - DNA, 2304 bp, Homo sapiens
gtccccgcagcgccgtcgcgccctcctgccgcaggccaccgaggccgccgccgtctagcgccccgacctcgccaccatgagagccctgctggcgcgcctgcttctctgcgtcctggtcgtgagcgactccaaaggcagcaatgaacttcatcaagttccatcgaactgtgactgtctaaatggaggaacatgtgtgtccaacaagtacttctccaacattcactggtgcaactgcccaaagaaattcggagggcagcactgtgaaatagataagtcaaaaacctgctatgaggggaatggtcacttttaccgaggaaaggccagcactgacaccatgggccggccctgcctgccctggaactctgccactgtccttcagcaaacgtaccatgcccacagatctgatgctcttcagctgggcctggggaaacataattactgcaggaacccagacaaccggaggcgaccctggtgctatgtgcaggtgggcctaaagccgcttgtccaagagtgcatggtgcatgactgcgcagatggaaaaaagccctcctctcctccagaagaattaaaatttcagtgtggccaaaagactctgaggccccgctttaagattattgggggagaattcaccaccatcgagaaccagccctggtttgcggccatctacaggaggcaccgggggggctctgtcacctacgtgtgtggaggcagcctcatcagcccttgctgggtgatcagcgccacacactgcttcattgattacccaaagaaggaggactacatcgtctacctgggtcgctcaaggcttaactccaacacgcaaggggagatgaagtttgaggtggaaaacctcatcctacacaaggactacagcgctgacacgcttgctcaccacaacgacattgccttgctgaagatccgttccaaggagggcaggtgtgcgcagccatcccggactatacagaccatctgcctgccctcgatgtataacgatccccagtttggcacaagctgtgagatcactggctttggaaaagagaattctaccgactatctctatccggagcagctgaaaatgactgttgtgaagctgatttcccaccgggagtgtcagcagccccactactacggctctgaagtcaccaccaaaatgctatgtgctgctgacccccaatggaaaacagattcctgccagggagactcagggggacccctcgtctgttccctccaaggccgcatgactttgactggaattgtgagctggggccgtggatgtgccctgaaggacaagccaggcgtctacacgagagtctcacacttcttaccctggatccgcagtcacaccaaggaagagaatggcctggccctctgagggtccccagggaggaaacgggcaccacccgctttcttgctggttgtcatttttgcagtagagtcatctccatcagctgtaagaagagactgggaagataggctctgcacagatggatttgcctgtggcaccaccagggtgaacgacaatagctttaccctcacggataggcctgggtgctggctgcccagaccctctggccaggatggaggggtggtcctgactcaacatgttactgaccagcaacttgtctttttctggactgaagcctgcaggagttaaaaagggcagggcatctcctgtgcatgggctcgaagggagagccagctcccccgaccggtgggcatttgtgaggcccatggttgagaaatgaataatttcccaattaggaagtgtaagcagctgaggtctcttgagggagcttagccaatgtgggagcagcggtttggggagcagagacactaacgacttcagggcagggctctgatattccatgaatgtatcaggaaatatatatgtgtgtgtatgtttgcacacttgttgtgtgggctgtgagtgtaagtgtgagtaagagctggtgtctgattgttaagtctaaatatttccttaaactgtgtggactgtgatgccacacagagtggtctttctggagaggttataggtcactcctggggcctcttgggtcccccacgtgacagtgcctgggaatgtacttattctgcagcatgacctgtgaccagcactgtctcagtttcactttcacatagatgtccctttcttggccagttatcccttccttttagcctagttcatccaatcctcactgggtggggtgaggaccactccttacactgaatatttatatttcactatttttatttatatttttgtaattttaaataaaagtgatcaataaaatgtgatttttctga

SEQ ID NO: 895 - DNA, 1180 bp, Homo sapiens
atgtaagtcaacaacatcctgggattgggacacactttctgggcactgctggccagtcccaaaatggaacataaggaagtggttcttctacttcttttatttctgaaatcaggtcaaggagagcccctggatgactatgtgaatacccaggggccttcactgttcagtgtcactaagaagcagctgggggcaggaagcagagaagaatgtgcagcaaaatgtgaagaggacaaagaattcacctgcagggcattccaatatcacagtaaagagcaacaatgtgtgataatggctgaaaacaggaagtcctccataatcattaggatgagagatgcagttttatttgaaaagtaaatgtatctttcagagtgcaagactgggaatggaaagaactacagagggacgatgtccaaaacaaaaaatggcatcacctgtcaaaaatggagttccacttctccccgcagacctaggtcagacttttcctttcatctttgtgttcatctactgtaaagtgtccgtctgtgtctgtgagggattggttccaggacccctgtggctaccaaaatccatgcttctcaagtcccttatgtaaaatggtgcagtatttgcatataacctacataccttctcttgtgcaatccctaatataatgtaaatgctatgtaatcgttgttatactgtattgtttttatttgtattatgttttattgtcatattgttattttctctcatctttttcaagtcttttccatccacagttggttgaatttgtggatgtggaacccatggatacagagggccaactgtatttaggataatttcatcacttttaattcaaaccagaatatgtgaataagcagacagaaagaatctttttgatgtcgatgttcaactatttttggcaccatagtagaacatggttgctttctattttttcttgggtatggaggtttcttgaagacctagaacatagaagaatgcctagttaaaaaaaaaaatcaatgaaactacgagttttaggccaaatctgagaaaagaccaaagatgactatgtttgggactgaagtaaacatatcaagttagaactctcatcacatgtttgactcaaattgtggagcaaaatagtaaataaaatataaaaatgaaaatgtaaaaaaaaaaaaaaaaaaaaaaaaaaaaa

SEQ ID NO: 896 - DNA, 945 bp, Homo sapiens
ctgggtgtacagcgtcctcgaaaccacgagcaagtgagcagatcctccgaggcaccagggactccagcccatgccatggcggattctgagcgcctctcggctcctggctgctgggccgcctgcaccaacttctcgcgcactcgaaagggaatcctcctgtttgctgagattatattatgcctggtgatcctgatctgcttcagtgcctccacaccaggctactcctccctgtcggtgattgagatgatccttgctgctattttctttgttgtctacatgtgtgacctgcacaccaagataccattcatcaactggccctggagtgatttcttccgaaccctcatagcggcaatcctctacctgatcacctccattgttgtccttgttgagagaggaaaccactccaaaatcgtcgcaggggtactgggcctaatcgctacgtgcctctttggctatgacgcctatgtcaccttccccgttcggcagccaagacatacagcagcccccactgaccccgcagatggcccggtgtaggcgaacttccctcatttctctctgcaatctgcaaataactcctccattgaaataactcctccccaccccaacaacaacattcccagcagaccaactcccaccccctctttgaggtaaaagtgcctttattgggagacttttgtcttccagcctgccaatcaaccctcctgggtgtggccaccatatgtgtgtgcctaggtcctccttctgcacgatccaataggagacaccagttctgactgaaccatgcccccacctaagtcacaaaatgagggaagtggggagttagatttcagagtccaggccctaggttgggacccactccaaataatctcctcggtgtgggtggtggttctatagagggataaatgaataataaacattgttaaaatataaaaaaaaaaaaaaaaa

SEQ ID NO: 897 - DNA, 1210 bp, Homo sapiens
agccatggcagtcaccgcccaggcagcccgcagaagggagcgcgtcctctgcctgtttgacgtggacgggaccctcacgccggctcgccagaaaattgaccctgaggtggccgccttcctgcagaagctacgaagtagagtgcagatcggtgtggtgggcggctctgactactgtaagatcgctgagcagctgggtgacggggatgaagtcattgagaagtttgattatgtgtttgccgagaacgggacggtgcagtataagcacggacgactgctctccaagcagaccatccagaaccacctgggggaggagctgctgcaggacttgatcaacttctgcctcagctacatggccctgctcaggctgcccaagaagcgtggaaccttcatcgagttccggaatggcatgctgaacatctcgcccatcggccggagctgcaccctggaggagaggatcgagttctccgaactggacaagaaagagaagatccgggagaagttcgtggaagacctgaaaacagagtttgctggcaaagggctgaggttctctcgaggaggcatgatcagctttgacgtcttccccgagggctgggacaagcgctactgcctggatagcctggaccaggacagcttcgacaccatccacttctttgggaacgagactagccctggtgggaacgactttgagatctttgccgacccccggactgttggccacagcgtggtgtctcctcaggacacggtgcagcgatgccgggagattttcttcccagagacagctcatgaggcgtgaccggggcccacatctgtgtgtcgtgacttctgaagagtttggcctaggcctaaagagaggtcctggtgttggatagatgccagggcccctcctctggcccaggacgcctgctgcaagcccacccagatggggccagagtctgtgtggacaaccgtccccagccagtctgctcctagtggcactggcttcgtcctcccagggcccagagtgttccccatgctccacctggtgccccaggccacagctgctgcttgtatttcggtacagaagaggtttctttctgcaccaggaggaggcgtgctcaagtatcggtacgagatctagcctgccctgcctgcctgccctgggcgatgaggtacggtggggaaggtgcctattttagagaactttgtcacagtattaaagttccctcgtgcc

SEQ ID NO: 898 - DNA, 2739 bp, Homo sapiens
gacaagctctcgcgagacgagccgtgcaggctgaaaaaatggcgccacccagtacccgggagcccagggtcctgtcggcgaccagcgcaaccaaatccgacggagagatggtgctgccaggcttcccggacgccgacagctttgtgaagtttgctcttgggtccgtggtggcagtcaccaaggcatctgggggcctaccacagtttggcgatgagtatgatttttaccgaagttttcctggcttccaagcattttgcgaaacacagggagacaggttgcttcagtgcatgagcagagtaatgcagtaccatgggtgtcgcagcaacattaaggatcgaagtaaagtgactgagctggaagacaagtttgatttactagttgatgccaatgatgtaattctggagagagtgggtattttactggatgaagcctcaggtgtaaacaagaatcaacagcctgtcctccctgccggcttgcaggtccccaaaacggtagtgtccagctggaaccgtaaggcagcagaatatggcaaaaaagcaaaatctgaaactttccggctgcttcatgcaaaaaatatcatccgacctcagctcaagtttcgagagaagattgacaattccaacacaccatttcttcctaaaatcttcatcaaacccaatgctcagaaacctctccctcaagctctctctaaggaaaggcgggaacgcccacaggatcgtcctgaggacttggacgtcccccctgcactggctgatttcatccatcagcagagaacccagcaggttgagcaagacatgtttgcacatccttatcaatatgaactaaatcactttaccccagcagatgcagtgcttcaaaagccacaaccccagttatacagacctatagaagagacaccatgccatttcatatcctccctggatgaactcgtggaactcaacgaaaagctcttgaattgtcaggaatttgcagttgacttggagcaccactcttacaggagcttcctgggactgacctgcctgatgcaaatttctactcggacggaagacttcatcattgacaccctcgagcttcgaagtgacatgtacattctcaatgagagcctcacagacccagccatcgttaaggtctttcatggtgctgattcagacatagaatggctacagaaagactttgggttgtatgtagtaaacatgtttgatactcatcaggcagcacgccttcttaacctgggcaggcactcactcgatcatctcctgaaactctactgcaacgtggactcaaacaagcaatatcagctggctgattggagaatacgccctctgcccgaggagatgctcagctacgcccgggatgacacccattacctgctatatatctatgacaaaatgaggctggagatgtgggagcgcggcaacgggcagcccgtgcagctgcaggtggtgtggcaacggagcagggacatctgcctcaagaaattcatcaaacctatcttcacggatgagtcctaccttgaactctataggaagcagaagaagcaccttaacacacagcagttgacagcctttcagctgctgtttgcctggagggataaaacagctcgcagggaagatgaaagttacggatatgtactgccaaaccacatgatgctgaaaatagctgaagaactgcctaaggaacctcagggcatcatagcttgctgcaacccagtaccgccccttgtgcggcagcagatcaacgaaatgcaccttttaatccagcaggcccgagagatgcccctgctcaagtctgaagttgcagccggagtgaagaagagcggaccgctgcccagtgctgagagattggagaatgttctctttggacctcacgactgctcccatgcccctccggatggctatccaatcatcccaaccagtggatctgtgccagttcagaagcaggcgagcctcttccctgatgaaaaagaagataacttgctgggtaccacatgcctgattgccacagctgtcatcacgttatttaatgaacctagtgctgaagacagtaaaaagggtccattgacagttgcacagaaaaaagcccagaacatcatggagtcctttgaaaatccatttaggatgatcagcaaccgttggaagctggcccaggtacaagtacaaaaagactctaaagaagctgtcaagaagaaggcagctgagcaaacagctgcccgggaacaggcaaaggaggcgtgcaaagctgcagcagaacaggccatctccgtccgacagcaggtcgtgctagaaaatgctgcaaagaagagagagcgagcaacaagcgacccaaggaccacagaacagaaacaagagaagaaacgactcaaaatttccaagaagccaaaggacccagagccaccagaaaaagagtttacgccttacgactacagccagtcagacttcaaggcttttgctggaaacagcaaatccaaagtttcttctcagtttgatccaaataaacagaccccgtctggcaagaaatgcattgcagccaaaaaaattaaacagtcggtgggaaacaaaagcatgtcctttccaactggaaagtcagacagaggcttcaggtacaactggccacagagatagtcctggaagacacgtggcgcctgtggaccggaagcaccaaatgctggtgctgcttttgtacatacatatttttaaaccattaaaattcttcctgaagaaaaaaaaaaaaaaaaaaaaa

SEQ ID NO: 899 - DNA, 2032 bp, Homo sapiens
caccccgcagcccggcctcggcctccgccgcttgttgtcgcgccccgcccgcgagcccgccccgcacgtcccccgccggcggccaccatgagcacaggcctgcggtacaagagcaagctggcgaccccagaggacaagcaggacattgacaagcagtacgtgggcttcgccacactgcccaaccaggtgcaccgcaagtcggtgaagaaaggctttgacttcacactcatggtggctggtgagtcaggcctggggaagtccacactggtccacagcctcttcctgacagacttgtacaaggaccggaagctgctcagtgctgaggagcgcatcagccagacggtagagattctaaaacacacggtggacattgaggagaagggagtcaagctgaagctcaccatcgtggacacgccgggattcggggacgctgtcaacaacaccgagtgctggaagcccatcaccgactatgtggaccagcagtttgagcagtacttccgtgatgagagcggcctcaaccgaaagaacatccaagacaaccgagtgcactgctgcctatacttcatctcccccttcgggcatgggctgcggccagtggatgtgggtttcatgaaggcattgcatgagaaggtcaacatcgtgcctctcatcgccaaagctgactgtcttgtccccagtgagatccggaagctgaaggagcggatccgggaggagattgacaagtttgggatccatgtataccagttccctgagtgtgactcggacgaggatgaggacttcaagcagcaggaccgggaactgaaggagagcgcgcccttcgccgttataggcagcaacacggtggtggaggccaaggggcagcgggtccggggccgactgtacccctgggggatcgtggaggtggagaaccaggcgcattgcgacttcgtgaagctgcgcaacatgctcatccgcacgcatatgcacgacctcaaggacgtgacgtgcgacgtgcactacgagaactaccgcgcgcactgcatccagcagatgaccagcaaactgacccaggacagccgcatggagagccccatcccgatcctgccgctgcccaccccggacgccgagactgagaagcttatcaggatgaaggatgaggaactgaggcgcatgcaggagatgctgcagaggatgaagcagcagatgcaggaccagtgacgctcgccgcggacacaccgtccgtctccgggacgccctcgcacccctggacaccagaccggactgttcccgacccggagacgcggggccacagcccccagctgaccctaatttattctcagcaccaccccctcccaggtcattgtgtctgtttccgaggggcctggaccgtagcccccgcccagctggccctctctgaccttgggggatcaggagcgaagttgggcgggacttcagagatccgcctcccttgcccttcccccgcccccggacggtcacagcacccaaaccgcaggccctgctctggcaggcaggcaaagctaggcagaagaggattcccaggatcctgggtctgttccctgccccagtgctgcagaacggacttgggagccctcctttgcctgctcccgcgggtcacccagcgagtgctgagaccccattttctgtcgaggcgggccgagtcttcccttatccccagacgcctagcgggcagggttgggctgaatcaaatgggagccctccagacataaggaggccagaggctgcaaggagcggggtcgtgaccgcttacaccccttctccacagcccggcccgacctggagggcccccggggcactgggcggtgagccacctcctggcaactctcggtgccgtcccctgccctcgctcgaggcctcttctccccagcaccgctgtggtgtgccgggatcctgagcctaggcctcccgatgttcccacccgcatgatcccttcccgccacacgatgctccgttttcttccgttgtgaatgccgcgtcctgtcctggtgacaggagaacaatgttggtgaacgtc

SEQ ID NO: 900 - DNA, 1238 bp, Homo sapiens
ggcggcggcggcggaggctgccatggacgacgaggaggagacgtaccggctctggaaaatccgcaagaccatcatgcagctgtgccacgaccgtggctatctggtgacccaggacgagcttgaccagaccctggaggagttcaaagcccaatttggggacaagccgagtgaggggcggccgcggcgcacggacctcaccgtgctggtggcccacaacgatgaccccaccgaccagatgtttgtgttctttccagaggagcccaaggtgggcatcaagaccatcaaggtgtactgccagcgcatgcaggaggagaacatcacacgggctctcatcgtggtgcagcagggcatgacaccctccgccaagcagtccctggtcgacatggcccccaagtacatcctggagcagtttctgcagcaggagctgctcatcaacatcacggagcacgagctagtccctgagcacgtcgtcatgaccaaggaggaggtgacagagctgctggcccgatataagctccgagagaaccagctgcccaggatccaggcgggggaccctgtggcgcgctactttgggataaagcgtgggcaggtggtgaagatcatccggcccagtgagacggctggcaggtacatcacctaccggctggtgcagtagctaccgcctgacagcccctagaggcggacacacagcgacccccatccctgcaggacaaacgcccctgccctgccagaatccggcccccacagctctcacggctgctgctcctctggactccccaaggcaggtggcctccacccacgttctcccgtcctggggtgaggcttcctgtggcccagcccgccccattcacctgtggatttgtgcgagatgcagcctcagaaggaacaaggcccccagagggaggtcacctgggggcagctggtgccgggtcttcacccagaccacgctgggtcccctctgttgggggtttggggtccgggtctcccaccagccactgcttcctcctgggccctcggcttccacccctcgtcttccctccctcggggccctgatgcgtggcggcccccacccggcctcggctctttactccattcacagccatgcacgcgctcaagtacaccagggtgcgagatgccagctctggagttctcggttgttgtaggaggttgggtgttttcaaatggtaaagatgttttgacgaaataaatttgcttgatacagaaaaaaaaaaaaaaaa

SEQ ID NO: 901 - DNA, 3590 bp, Homo sapiens
cctgggtctgacgcggccctgttcgagggggcctctcttgtttatttatttattttccgtgggtgcctccgagtgtgcgcgcgctctcgctacccggcggggagggggtggggggagggcccgggaaaagggggagttggagccggggtcgaaacgccgcgtgacttgtaggtgagagaacgccgagccgtcgccgcagcctccgccgccgagaagcccttgttcccgctgctgggaaggagagtctgtgccgacaagatggcggacggggagctgaacgtggacagcctcatcacccggctgctggaggtacgaggatgtcgtccaggaaagattgtgcagatgactgaagcagaagttcgaggcttatgtatcaagtctcgggagatctttctcagccagcctattcttttggaattggaagcaccgctgaaaatttgtggagatattcatggacaatatacagatttactgagattatttgaatatggaggtttcccaccagaagccaactatcttttcttaggagattatgtggacagaggaaagcagtctttggaaaccatttgtttgctattggcttataaaatcaaatatccagagaacttctttctcttaagaggaaaccatgagtgtgctagcatcaatcgcatttatggattctatgatgaatgcaaacgaagatttaatattaaattgtggaagaccttcactgattgttttaactgtctgcctatagcagccattgtggatgagaagatcttctgttgtcatggaggattgtcaccagacctgcaatctatggagcagattcggagaattatgagacctactgatgtccctgatacaggtttgctctgtgatttgctatggtctgatccagataaggatgtgcaaggctggggagaaaatgatcgtggtgtttcctttacttttggagctgatgtagtcagtaaatttctgaatcgtcatgatttagatttgatttgtcgagctcatcaggtggtggaagatggatatgaattttttgctaaacgacagttggtaaccttattttcagccccaaattactgtggcgagtttgataatgctggtggaatgatgagtgtggatgaaactttgatgtgttcatttcagatattgaaaccatctgaaaagaaagctaaataccagtatggtggactgaattctggacgtcctgtcactccacctcgaacagctaatccgccgaagaaaaggtgaagaaaggaattctgtaaagaaaccatcagatttgttaaggacatacttcataatatataagtgtgcactgtaaaaccatccagccatttgacaccctttatgatgtcacacctttaacttaaggagacgggtaaaggatcttaaatttttttctaatagaaagatgtgctacactgtattgtaataagtatactctgttatagtcaacaaagttaaatccaaattcaaaattatccattaaagttacatcttcatgtatcacaatttttaaagttgaaaagcatcccagttaaactagatgtgatagttaaaccagatgaaagcatgatgatccatctgtgtaatgtggttttagtgttgcttggttgtttaattattttgagcttgttttgtttttgtttgttttcactagaataatggcaaatacttctaatttttttccctaaacatttttaaaagtgaaatatgggaagagctttacagacattcaccaactattattttcccttgtttatctacttagatatctgtttaatcttactaagaaaactttcgcctcattacattaaaaaggaattttagagattgattgttttaaaaaaaaatacgcacattgtccaatccagtgattttaatcatacagtttgactgggcaaactttacagctgatagtgaatattttgctttatacaggaattgacactgatttggatttgtgcactctaatttttaacttattgatgctctattgtgcagtagcatttcatttaagataaggctcatatagtattacccaactagttggtaatgtgattatgtggtaccttggctttaggttttcattcgcacggaacaccttttggcatgcttaacttcctggtaacaccttcacctgcattggttttctttttcttttttctttctttttttttttttttttttttttgagttgttgtttgtttttagatccacagtacatgagaatccttttttgacaagccttggaaagctgacactgtctctttttcctccctctatacgaaggatgtatttaaatgaatgctggtcagtgggacattttgtcaactatgggtattgggtgcttaactgtctaatattgccatgtgaatgttgtatacgattgtaaggcttatgtcactaaagatttttattctgattttttcataatcaaaggtcatatgatactgtatagacaagctttgtagtgaagtatagtagcaataatttctgtacctgatcaagtttattgcagcctttcttttcctatttcttttttttaagggttagtattaacaaatggcaatgagtagaaaagttaacatgaagattttagaaggagagaacttacaggacacagatttgtgattctttgactgtgacactattggatgtgattctaaaagcttttattgagcattgtcaaatttgtaagcttcatagggatggacatcatatctataatgcccttctatatgtgctaccatagatgtgacatttttgaccttaatatcgtctttgaaaatgttaaattgagaaacctgttaacttacattttatgaattggcacattgtattacttactgcaagagatatttcattttcagcacagtgcaaaagttctttaaaatgcatatgtctttttttctaattccgttttgttttaaagcacattttaaatgtagttttctcatttagtaaaagttgtctaattgatatgaagcctgactgattttttttttccttacagtgagacatttaagcacacattttattcacatagatactatgtccttgacatattgaaatgattcttttctgaaagtattcatgatctgcatatgatgtattaggttaggtcacaaaggttttatctgaggtgatttaaataacttcctgattggagtgtgtaagctgagcgatttctaataaaattttagttgtacacttttagtagtcatagtgaagcaggtctagaaaataagcctttggcagggaaaaagggcaatgttgattaatctcagtattaaaccacattaatctgtatcccattgtctggcttttgtaaattcatccaggtcaagactaagtatgttggttaataggaatccttttttttttttaaagactaaatgtgaaaaaataatcactacttaagctaattaatattggtcattaaatttaaaggatggaaatttatcatgtttaaaaattattcaagcactcttaaaaccacttaaacagcctccagtcataaaaatgtgttctttacaaatatttgcttggcaacacgacttgaaataaataaaactttgtttcttaggagaaaa

SEQ ID NO: 902 - DNA, 2131 bp, Homo sapiens
ccgccgccatccgccctctctacccccccatccccaggtgaggggggtgagttcaggaagcggagaccccgaggaacccagcagggtcaccatttgcagcgcaacatggcaggagctggaggagggaatgatattcagtggtgtttttctcaggtgaaaggagcagtagatgatgatgtagcagaagcagatataatttctacagtagaatttaatcattctggagaattactagcaacaggagataaaggtggtagagttgtcatctttcaacaggagcaggagaacaaaatccagtctcatagcagaggagaatataatgtttacagcaccttccagagccatgaaccagagtttgactacttgaaaagtttagaaatagaagaaaagatcaataaaattaggtggttaccccagaaaaatgctgctcagtttttattgtctaccaatgataaaacaataaaattatggaaaatcagtgaaagggacaaaagaccagaagggtataacttgaaagaggaggatggaaggtatagagatcctactacagttactacactacgagtgccagtctttaggcctatggatctaatggttgaggccagtccacgaagaatatttgccaatgctcatacatatcacatcaactcaatttctattaatagtgattatgaaacatatttatctgcagatgatttgcggattaatctttggcatctggaaattacagacaggagttttaacattgtggatatcaagcctgccaatatggaagagctaacagaggtgattacagcagcagaatttcatccaaacagctgtaacacatttgtatacagcagcagtaaaggaactattcggctatgtgacatgagggcatctgccctctgtgatagacattctaaattgtttgaagaacctgaagatcccagtaacaggtcatttttttccgaaatcatctcctctatttcggatgtaaaattcagccatagtggtcgatatatgatgactagagactatttgtcagtcaaaatttgggacttaaatatggaaaacaggcctgtggaaacataccaggtgcatgaatacctcagaagtaaactctgttcactgtatgaaaatgactgcatatttgacaaatttgaatgttgttggaatggatctgacagtgttgtcatgactggatcttacaataatttcttcagaatgtttgacagaaacacaaagcgagacataaccctagaagcatcgcgggaaaacaataagcctcgcacagttctgaagcctcgcaaagtctgtgcaagtggcaagcgaaagaaagatgaaataagtgttgacagcctagacttcaataagaaaatccttcacacagcctggcaccccaaggaaaatatcattgccgtagctactacaaacaatctgtatatatttcaagacaaagtgaattagggttggcattcctagcagaagaacccacttcctgcttagttgagatagttgaatctagcattcgttcctataaaagagagaggtccattgtggcgcccctttccagtgtttgacagtgtgccattcgacaacacattgttatagctacatggagaaagctctgtggattcatcactgtggtgttctccatgtctgctagccatttaggtaagggtagggcacttttaatttaaatgacttcttgcaccatcttgcctaatggactagattggactgtatcaacattgatttactccactttttatgccttccattgtgatgacgtcaaacacagtgaaagccttcagtcatgctatgggatttaattgtgtatcctcattactgtatcatttgtggggtacaccccttccccctttttttaaattaaatacagctcattcttactgtggcttgtagcattcctcctcttctggcctcctggactgctccccttcatctcttacccttgccccctccacccggtcttggtggtggtatattaaaaaaagaaagaatgaaagcacacaaaatgagtcagtttggggtcagtggtataaagggggtatatgttgcaaacaaatgttttagtaacagttggctgtaatcactcctcgccgtgtctggcactgaaaataaggaaaag

SEQ ID NO: 903 - DNA, 1560 bp, Homo sapiens
tctgggagatcagatcttctagctggctctctgctgccacagctccgccgaagggagggggtggaagaggaggactaaactcagagctgagaggagaggcaggtgtgtgcaggtgcatcacctggatcatgaggtcacccctctgctggctcctcccacttctcatcttggcctcagtggcccaaggccagccaacaagacgaccaagacccgggactgggcccgggcgcagacccaggcccaggcccaggcccacacccagctttcctcagcctgatgaaccagcagagccaacagacctgcctcctcccctccctccaggccctccatctatcttccctgactgtccccgcgaatgctactgcccccctgatttcccatctgccctctactgtgatagccgcaacctgcgaaaggtccctgtcatcccgccccgcatccattacctctatctccagaacaacttcatcactgagctcccggtggagtccttccagaatgccacaggcctgcgatggattaacctggacaacaaccgaatccgcaagatagaccagagggtgctggagaaactgcccggcctggtgttcctctacatggagaagaaccagttggaagaggtcccctcggccctgccccggaacctggagcagctgaggctgagccagaaccacatctccagaatcccgcctggtgtcttcagcaagctggagaacctgctgctcctggatctccagcacaacaggctgagcgacggcgtcttcaagcccgacaccttccatggcctcaagaacctcatgcagctcaacctggcccacaacatcctgagaaagatgccgcccagggtccccaccgccattcaccagctctacctggacagtaacaagattgagaccatccctaacggatacttcaagagctttcccaatcttgccttcattcggcttaactacaacaagctgacagacaggggactccccaagaactcctttaatatctccaacctgcttgtgctccacctgtcccacaacaggatcagcagtgtgcccgccatcaacaacaggctggaacacctgtacctcaacaacaatagcatcgagaaaatcaacggaacccagatttgccccaacgacctagtggcgttccatgacttctcctcggacctggagaacgtgccacacctgcgctacctgcggctggatggaaactacttgaagccgcccatcccgctggacctcatgatgtgcttccgcctcctgcagtccgtggtcatctaggccctactccgccaccggatctgctctgaccgcacttgaaggctggggcccaggcacctgtgccggccattcgttttctctctctccccttctttctcccagctttgcctcccttatcccaccctcgaggcagggaaaagccatctattcttctgcagcctcaggagcgagacttcaaggactcagtttggttccacccagttgaaagacaaccagtgcacacccaaactcctggccttctgtggtttccctttgctccagaaacacagatgtgtctaaaaaa

SEQ ID NO: 904 - DNA, 2756 bp, Homo sapiens
atgctgtccttccagtaccccgacgtgtaccgcgacgagaccgccgtacaggattatcatggtcataaaatttgtgacccttacgcctggcttgaagaccccgacagtgaacagactaaggcctttgtggaggcccagaataagattactgtgccatttcttgagcagtgtcccatcagaggtttatacaaagagagaatgactgaactatatgattatcccaagtatagttgccacttcaagaaaggaaaacggtatttttatttttacaatacaggtttgcagaaccagcgagtattatatgtacaggattccttagagggtgaggccagagtgttcctggaccccaacatactgtctgacgatggcacagtggcactccgaggttatgcgttcagcgaagatggtgaatattttgcctatggtctgagtgccagtggctcagactgggtgacaatcaagttcatgaaagttgatggtgccaaagagcttccagatgtgcttgaaagagtcaagttcagctgtatggcctggacccatgatgggaagggaatgttctacaactcataccctcaacaggatggaaaaagtgatggcacagagacatctaccaatctccaccaaaagctctactaccatgtcttgggaaccgatcagtcagaagatattttgtgtgctgagtttcctgatgaacctaaatggatgggtggagctgagttatctgatgatggccgctatgtcttgttatcaataagggaaggatgtgatccagtaaaccgactctggtactgtgacctacagcaggaatccagtggcatcgcgggaatcctgaagtgggtaaaactgattgacaactttgaaggggaatatgactacgtgaccaatgagggggcggtgttcacattcaagacgaatcgccagtctcccaactatcgcgtgatcaacattgacttcagggatcctgaagagtctaagtggaaagtacttgttcctgagcatgagaaagatgtcttagaatggatagcttgtgtcaggtccaacttcttggtcttatgctacctccatgacgtcaagaacattctgcagctccatgacctgactactggtgctctccttaagaccttcccgctcgatgtcggcagcattgtagggtacagcggtcagaagaaggacactgaaatcttctatcagtttacttcctttttatctccaggtatcatttatcactgtgatcttaccaaagaggagctggagccaagagttttccgagaggtgaccgtaaaaggaattgatgcttctgattaccagacagtccagattttctaccctagcaaggatggtacgaagattccaatgttcattgtgcataaaaaaagcataaaattggatggctctcatccagctttcttatatggctatggcggcttcaacatatccatcacacccaactacagtgtttccaggcttatttttgtgagacacatgggtggtatcctggcagtggccaacatcagaggaggtggcgaatatggagagacgtggcataaaggtggtatcttggccaacaaacaaaactgctttgatgactttcagtgtgctgctgagtatctgatcaaggaaggttacacatctcccaagaggctgactattaatggaggttcaaatggaggcctcttagtggctgcttgtgcaaatcagagacctgacctctttggttgtgttattgcccaagttggagtaatggacatgctgaagtttcataaatataccatcggccatgcttggaccactgattatgggtgctcggacagcaaacaacactttgaatggcttgtcaaatactctccattgcataatgtgaagttaccagaagcagatgacatccagtacccgtccatgctgctcctcactgctgaccatgatgaccgcgtggtcccgcttcactccctgaagttcattgccacccttcagtacatcgtgggccgcagcaggaagcaaagcaaccccctgcttatccacgtggacaccaaggcgggccacggggcggggaagcccacagccaaagtgatagaggaagtctcagacatgtttgcgttcatcgcgcggtgcctgaacgtcgactggattccataaacagttttcgtgcttcctcctgacagcgacagaaaacctcaagggctttcccacgttgacaccaagaaaccactgggcataatgcttccccacgggaacattattcctggactgacaggctacagttgaacagaactgccgtgggaattttatcttttttaggcttctcctttttagcaaggccttggtgtttctttttccaccctgtctaggcacatgtggttttttggtgttttttttaagggcatgttgggataaatagctaaatggcaacaaacacattgtgaatattagattgctgaattaaggatcatagtcgggcatacttatctatatccataacctctatatctttaaataaatgtgagaactgttctcatggagaagacttctttgcaacaataataaatgttatttaagaatgacagggatttacttccggtttcttcatattgaggggcaactccagaagtggagttttctgtgagaataaagcatttcacctttctgcaacaagttagttttcaagcagttaagtcatagaatgtttgttagctgtgaaaataagttgttcatccaaaaaaaaaaaaaaaaaaaaaaaaaaaaaaaaaaaaaaggaattc

SEQ ID NO: 905 - DNA, 1182 bp, Homo sapiens
gaattccgctagactaagttggtcatgatgcagaagctactcaaatgcagtcggcttgtcctggctcttgccctcatcctggttctggaatcctcagttcaaggttatcctacgcagagagccaggtaccaatgggtgcgctgcaatccagacagtaattctgcaaactgccttgaagaaaaaggaccaatgttcgaactacttccaggtgaatccaacaagatcccccgtctgaggactgacctttttccaaagacgagaatccaggacttgaatcgtatcttcccactttctgaggactactctggatcaggcttcggctccggctccggctctggatcaggatctgggagtggcttcctaacggaaatggaacaggattaccaactagtagacgaaagtgatgctttccatgacaaccttaggtctcttgacaggaatctgccctcagacagccaggacttgggtcaacatggattagaagaggattttatgttataaaagaggattttcccaccttgacaccaggcaatgtagttagcatattttatgtaccatggttatatgattaatcttgggacaaagaattttatagaaatttttaaacatctgaaaaagaagcttaagttttatcatccttttttttctcatgaattcttaaaggattatgctttaatgctgttatctatcttattgttcttgaaaatacctgcattttttggtatcatgttcaaccaacatcattatgaaattaattagattcccatggccataaaatggctttaaagaatatatatatatttttaaagtagcttgagaagcaaattggcaggtaatatttcatacctaaattaagactctgacttggattgtgaattataatgatatgccccttttcttataaaaacaaaaaaaaaataatgaaacacagtgaatttgtagagtgggggtatttgacatattttacagggtggagtgtactatatactattacctttgaatgtgtttgcagagctagtggatgtgtttgtctacaagtatgattgctgttacataacaccccaaattaactcccaaattaaaacacagttgtgctgtcaatacctcatactgctttacctttttttcctggatatctgtgtattttcaaatgttactatatattaaagcagaaatataacc

SEQ ID NO: 906 - DNA, 1637 bp, Homo sapiens
aatattctgcttttcctgttatgtgtttcagatttttctacaccaccgccacactcatcatagccttcacctctgcaggctcagccgtgctgctcttcctggccatgccaatgctcaccattgggggaatcctgtttctcatcaccaacctgcagattgggaacctatttggccaacaccgttcgaccatcatcactctgtacaatggagcatttgactcttcctcggcagtcttccttattattaagcttctttatgaaaaaggcatcagcctcagggcctccttcatcttcatctctgtctgcagtacctggcatgtagcacgcactttcctcctgatgccccgggggcacatcccatacccactgccccccaactacagcataggcctgtgccctgggaatggcaccacaaaggaagagaaggaaacagctgagcatgaaaacagggagctacagtcaaaggagttcctttcagcgaaggaagagacccaggggcagggcagaagcaggaactccgctccttctggagctacgctttctctcggcgctttgcctggcacctggtgtggctgtctgtgatacagttgtggcactacctcttcattggcactctcaactccttgctgccaacatggccggtgggacatggcacgagtcagcacctacacaaatgcctttgccttcactcagttcggagtgctgtgtgccccctggaatggcctgctcatggaccggcttaaacagaagtaccagaaggaagcaagaaagacagggtcttttaacatccgaggaccacattctttatactttccaaatcatcacctgccccatgcaacttacagggataaagccaagatgaaactccccttacttctggctcttctatttggggcagtttctgctcttcatctaaggtctgagacttccacctttgagacccctttgggtgctaagacgctgcctgaggatgaggagacaccagagcaggagatggaggagaccccttgcagggagctggaggaagaggaggagtggggctctggaagtgaagatgcctccaagaaagatggggctgttgagtctatctcagtgccagatatggtggacaaaaaccttacgtgtcctgaggaagaggacacggtaaaagtggtgggcatccctgggtgccagacctgccgctacctcctggtgagaagtcttcagacgtttagtcaagcttggtttacttgccggaggtgctacaggggcaacctggtttccatccacaacttcaatattaattatcgaatccagtgttctgtcagcgcgctcaaccagggtcaagtctggattggaggcaggatcacaggctcgggtcgctgcagacgctttcagtgggttgacggcagccgctggaactttgcgtactgggctgctcaccagccctggacccgcggtggtcactgcgtggccctgtgtacccgaggaggctactggcgtcgagcccactgcctcagaagacttcctttcatctgttcctactgagctggtcccagccagcagttcagagctgccctctcctgggcagctgcctcccctcctctgcttgccatccctccctccacctccctgcaataaaatgggttttactgaaaa

SEQ ID NO: 907 - DNA, 3036 bp, Homo sapiens
gctgggagcaaagcgctgagggagctcggtacgccgccgcctcgcacccgcagcctcgcgcccgccgccgcccgtccccagagaaccatggagtctggcagtaccgccgccagtgaggaggcacgcagccttcgagaatgtgagctctacgtccagaagcataacattcaagcgctgctcaaagattctattgtgcagttgtgcactgctcgacctgagagacccatggcattcctcagggaatactttgagaggttggagaaggaggaggcaaaacagattcagaatctgcagaaagcaggcactcgtacagactcaagggaggatgagatttctcctcctccacccaacccagtggttaaaggtaggaggcgacgaggtgctatcagcgctgaggtctacacggaggaagatgcggcatcctatgttagaaaggttataccaaaagattacaagacaatggccgctttagccaaagccattgaaaagaatgtgctgttttcacatcttgatgataatgagagaagtgatatttttgatgccatgttttcggtctcctttatcgcaggagagactgtgattcagcaaggtgatgaaggggataacttctatgtgattgatcaaggagagacggatgtctatgttaacaatgaatgggcaaccagtgttggggaaggagggagctttggagaacttgctttgatttatggaacaccgagagcagccactgtcaaagcaaagacaaatgtgaaattgtggggcatcgaccgagacagctatagaagaatcctcatgggaagcacactgagaaagcggaagatgtatgaggaattccttagtaaagtctctattttagagtctctggacaagtgggaacgtcttacggtagctgatgcattggaaccagtgcagtttgaagatgggcagaagattgtggtgcagggagaaccaggggatgagttcttcattattttagaggggtcagctgctgtgctacaacgtcggtcagaaaatgaagagtttgttgaagtgggaagattggggccttctgattattttggtgaaattgcactactgatgaatcgtcctcgtgctgccacagttgttgctcgtggccccttgaagtgcgttaagctggaccgacctagatttgaacgtgttcttggcccatgctcagacatcctcaaacgaaacatccagcagtacaacagttttgtgtcactgtctgtctgaaatctgcctcctgtgcctcccttttctcctctccccaatccatgcttcactcatgcaaactgctttattttccctacttgcagcgccaagtggccactggcatcgcagcttcctgtctgtttatatattgaaagttgcttttattgcaccattttcaatttggagcattaactaaatgctcatacacagttaaataaatagaaagagttctatggagactttgctgttactgcttctctttgtgcagtgttagtattcaccctgggcagtgagtgccatgctttttggtgagggcagatccagcacctattgaattaccatagagtaatgatgtaacagtgcaagatttttttttttaagtgacataattgtccagttataagcgtatttagactgtggccatatatgctgtatttctttgtagaataaatggtttctcattaaactctaaagattagggaaatggatatagaaaatcttagtatagtagaaagacatctgcctgtaattaaactagtttaagggtggaaaaatgaaaatttttgctaattatcaatgggatatgattggttcagttttttttttccagagttgttgtttgccaagctaatctgcctggtttatttatatcttgttattaatgtttcttctccaattctgaaatacttttgagtatggctatctatacctgccttttaagtttgaaactaactcatagatgcaaatattggttagtatttaactacatctgcctcggctcacaaattccgattagacctttatccagctagtgccaaataattgatcagatgctgaattgagaataagaatttgaggtctacattcttggttgttaatttagagcgtttggttaaagtatgtccttcagctgactccagtataatctcctctgctcattaaactgattccaggagattggatttgctgtgactagatacagatggagcaaatgtcctaacagagaaatagaggtgatgctgctaaagggagaaatgccaggcggacaaagttcagtgtcgggaattttccccgtgacattcactggggcatgagattttggaagaagttttttactttggtttagtctttttttcctcctttttattcagctagaatttctggtgggttgatggtagggtataatgtgtctgtgttgcttcaaattggtctgaaaggctatcctgctgaaagtcctgctttcctatctagcatttattcctctggcaaacttttctttcttttcttttttaaagtaaacttgtgtattgagtcttaactgtatttcagtattttccagccttatgtgttacattattccaatgatacccaacagtttatttttattatttttttaaacaaaatttcacagttctgtaatgtaggcacttttattttcattgtgatttatatataaggtaatgtagggttatatttgggagtgactgcaagcatttttccatctgtgtgcaactaactgactctgttattgatcccttctcctgccctttcccaggtaatttaaattggtcatggtagatttttttcatagatttgaaaaacttttaggttgttaccaagtatgaagtataaatctggggaagaggttttatttacattttagggtgggtaagaaagccaccttgttacaaattttttaatttccaaaataatctatattaaatgagggtttctgatctgtactttgtgtttagctacctttttatatttaaaaaattaaaaatgaaaattatgttcttacaagcttaaagcttgatttgatct

SEQ ID NO: 908 - DNA, 3001 bp, Homo sapiens
tgagtaaatcgatacatcatacgcgcgctcctctggccgcccctccctccgacgatcggggaccctggcgggcggcaggaggacatggccagcgacgccgtgcagagtgagcctcgcagctggtccctgctagagcagctgggcctggccggggcagacctggcggcccccggggtacagcagcagctggagctggagcgggagcggctgcggcgggaaatccgcaaggagctgaagctgaaggagggtgctgagaacctgcggcgggccaccactgacctgggccgcagcctgggccccgtagagctgctgctgcggggctcctcgcgccgcctcgacctgctgcaccagcagctgcaggagctgcacgcccacgtggtgcttcccgacccggcggccacccacgatggcccccagtcccctggtgcgggtggccccacctgctcggccaccaacctgagccgcgtggcgggcctggagaagcagttggccattgagctgaaggtgaagcagggggcggagaacatgatccagacctacagcaatggcagcaccaaggaccggaagctgctgctgacagcccagcagatgttgcaggacagtaagaccaagattgacatcatccgcatgcaactccgccgggcgctgcaggccgaccagctggagaaccaggcagccccggatgacacccaagggagtcctgacctgggggctgtggagctgcgcatcgaagagctgcggcaccacttccgagtggagcacgcggtggccgagggtgccaagaacgtactgcgcctgctcagcgctgccaaggccccggaccgcaaggcagtcagcgaggcccaggagaaattgacagaatccaaccagaagctggggctgctgcgggaggctctggagcggagacttggggagctgcccgccgaccaccccaaggggcggctgctgcgagaagagctcgctgcggcctcctccgctgccttcagcacccgcctggccgggccctttcccgccacgcactacagcaccctgtgcaagcccgcgccgctcacagggaccctggaggtacgagtggtgggctgcagagacctcccagagaccatcccgtggaaccctaccccctcaatggggggacctgggaccccagacagccgcccccccttcctgagccgcccagcccggggcctttacagccgaagcggaagcctcagtggccggagcagcctcaaagcagaagccgagaacaccagtgaagtcagcactgtgcttaagctggataacacagtggtggggcagacgtcttggaagccatgtggccccaatgcctgggaccagagcttcactctggagctggaaagggcacgggaactggagttggctgtgttctggcgggaccagcggggcctgtgtgccctcaaattcctgaagttggaggatttcttggacaatgagaggcatgaggtgcagctggacatggaaccccagggctgcctggtggctgaggtcaccttccgcaaccctgtcattgagaggattcctcggctccgacggcagaagaaaattttctccaagcagcaagggaaggcgttccagcgtgctaggcagatgaacatcgatgtcgccacgtgggtgcggctgctccggaggctcatccccaatgccacgggcacaggcacctttagccctggggcttctccaggatccgaggcccggaccacgggtgacatatcggtggagaagctgaacctcggcactgactcggacagctcacctcagaagagctcgcgggatcctccttccagcccatcgagcctgagctcccccatccaggaatccactgctcccgagctgccttcggagacccaggagaccccaggccccgccctgtgcagccctctgaggaagtcacctctgaccctcgaagatttcaagttcctggcggtgctgggccggggtcattttgggaaggtgctcctctccgaattccggcccagtggggagctgttcgccatcaaggctctgaagaaaggggacattgtggcccgagacgaggtggagagcctgatgtgtgagaagcggatattggcggcagtgaccagtgcgggacaccccttcctggtgaacctcttcggctgtttccagacaccggagcacgtgtgcttcgtgatggagtactcggccggtggggacctgatgctgcacatccacagcgacgtgttctctgagccccgtgccatcttttattccgcctgcgtggtgctgggcctacagtttcttcacgaacacaagatcgtctacagggacctgaagttggacaatttgctcctggacaccgagggctacgtcaagatcgcagactttggcctctgcaaggaggggatgggctatggggaccggaccagcacattctgtgggaccccggagttcctggcccctgaggtgctgacggacacgtcgtacacgcgagctgtggactggtggggactgggtgtgctgctctacgagatgctggttggcgagtccccattcccaggggatgatgaggaggaggtcttcgacagcatcgtcaacgacgaggttcgctacccccgcttcctgtcggccgaagccatcggcatcatgagaaggctgcttcggaggaacccagagcggaggctgggatctagcgagagagatgcagaagatgtgaagaaacagcccttcttcaggactctgggctgggaagccctgttggcccggcgcctgccaccgccctttgtgcccacgctgtccggccgcaccgacgtcagcaacttcgacgaggagttcaccggggaggcccccacactgagcccgccccgcgacgcgcggcccctcacagccgcggagcaggcagccttcctggacttcgacttcgtggccgggggctgctagccccctcccctgcccctgcccctgcccctgcccgagagctcttagtttttaaaaaggcctttgggatttgccggaaaaaaaaaaaaaa

SEQ ID NO: 909 - DNA, 2056 bp, Homo sapiens
ggaaccgcggctgctggacaagaggggtgcggtggatactgacctttgctccggcctcgtcgtgaagacacagcgcatctccccgctgtaggcttctcccacagaacccgtttcgggcctcagagcgtctggtgagatgctgttgccgctgctgctgctgctacccatgtgctgggccgtggaggtcaagaggccccggggcgtctccctcaccaatcatcacttctacgatgagtccaagcctttcacctgcctggacggttcggccaccatcccatttgatcaggtcaacgatgactattgcgactgcaaagatggctctgacgagccaggcacggctgcctgtcctaatggcagcttccactgcaccaacactggctataagcccctgtatatcccctccaaccgggtcaacgatggtgtttgtgactgctgcgatggaacagacgagtacaacagcggcgtcatctgtgagaacacctgcaaagagaagggccgtaaggagagagagtccctgcagcagatggccgaggtcacccgcgaagggttccgtctgaagaagatccttattgaggactggaagaaggcacgggaggagaagcagaaaaagctcattgagctacaggctgggaagaagtctctggaagaccaggtggagatgctgcggacagtgaaggaggaagctgagaagccagagagagaggccaaagagcagcaccagaagctgtgggaagagcagctggctgctgccaaggcccaacaggagcaggagctggcggctgatgccttcaaggagctggatgatgacatggacgggacggtctcggtgactgagctgcagactcacccggagctggacacagatggggatggggcgttgtcagaagcggaagctcaggccctcctcagtggggacacacagacagacgccacctctttctacgaccgcgtctgggccgccatcagggacaagtaccggtccgaggcactgcccaccgaccttccagcaccttctgcccctgacttgacggagcccaaggaggagcagccgccagtgccctcgtcgcccacagaggaggaggaggaggaggaggaggaggaagaagaggctgaagaagaggaggaggaggaggattccgaggaggccccaccgccactgtcacccccgcagccggccagccctgctgaggaagacaaaatgccgccctacgacgagcagacgcaggccttcatcgatgctgcccaggaggcccgcaacaagttcgaggaggccgagcggtcgctgaaggacatggaggagtccatcaggaacctggagcaagagatttcttttgactttggccccaacggggagtttgcttacctgtacagccagtgctacgagctcaccaccaacgaatacgtctaccgcctctgccccttcaagcttgtctcgcagaaacccaaactcgggggctctcccaccagccttggcacctggggctcatggattggccccgaccacgacaagttcagtgccatgaagtatgagcaaggcacgggctgctggcagggccccaaccgctccaccaccgtgcgcctcctgtgcgggaaagagaccatggtgaccagcaccacagagcccagtcgctgcgagtacctcatggagctgatgacgccagccgcctgcccggagccaccgcctgaagcacccaccgaagacgaccatgacgagctctagctggatgggcgcagagaacctcaagaaggcatgaagccagcccctgcagtgccgtccacccgcccctctgggcctgcctgtggctctgttgccctcctctgtggcggcaggacctttgtggggcttcgtgccctgctctggggcccaggcggggctggtccacattcccaggccccaacagcctccaaagatgggtaaaggagcttgccctccctgggccccccaccttggtgactcgccccaccacccccagccctgtccctgccacccctcctagtggggactagtgaatgacttgacctgtgacctcaatacaataaatgtgatcccccaccc

SEQ ID NO: 910 - DNA, 4193 bp, Homo sapiens
catggcggcgactgcggcaaagcgagagcctcggagacgccgctgccgccagcacagccggagatctgagccgacactgggggcagtccgcgagccccgcactctctcgatgagtcggagaagtcccgttgtatcagagtaagatggacggtagctttgattgtgattgtggtgagctggagccacctgatcactaacaaaagacatcttctgttaaccaacagccgccaggcttcctgttgaaataaatatatagcaacaaaggaaaaaaagaagcaaaacggaaatagtgcttaccagcaccttagaatgatgctgctcaggaccagtccaacactgaatgtatctgcactgtgaggagaatgttcatagaagcctgttgtgtgcatatttattcactttttgttaaatgttaaatcgtttagcacggtaatctgagtgcacagtatgtcatttcattccgtttgagtttcttgttttcgttaaatgtctgcagagttgctgcccctttcttgaactatgagtactgcaatctttttaattctcaatatgaatagagctttttgagctttaaatctaaggggaactcgacaggcctgtttggcatatgcaatgaacatcaagaaaccatcttgctgtggaagcataattatttttcttctccctttttgaaagatctttccttttgatgccagttttcttccttgtttacacaagttcaatttgaaaggaaaaggcaatagtaagggtttcaaaatggcagagaaatttgaaagtctcatgaacattcatggttttgatctgggttctaggtatatggacttaaaaccattgggttgtggaggcaatggcttggttttttctgctgtagacaatgactgtgacaaaagagtagccatcaagaaaattgtccttactgatccccagagtgtcaaacatgctctacgtgaaatcaaaattattagaagacttgaccatgataacattgtgaaagtgtttgagattcttggtcccagtggaagccaattaacagacgatgtgggctctcttacggaactgaacagtgtttacattgttcaggagtacatggagacagacttggctaatgtgctggagcagggccctttactggaagagcatgccaggcttttcatgtatcagctgctacgggggctcaagtatattcactctgcaaatgtactgcacagagatctcaaaccagctaatcttttcattaatacggaagacttggtgctgaagataggtgactttggtcttgcacggatcatggatcctcattattcccataagggtcatctttctgaaggattggttactaaatggtacagatctccacgtcttttactttctcctaataattatactaaagccattgacatgtgggctgcaggctgcatctttgctgaaatgctgactggtaaaaccctttttgcaggtgcacatgaacttgaacagatgcagctgattttagaatctattcctgttgtacatgaggaagatcgtcaggagcttctcagcgtaattccagtttacattagaaatgacatgactgagccacacaaacctttaactcagctgcttccaggaattagtcgagaagcactggatttcctggaacaaattttgacatttagccccatggatcggttaacagcagaagaagcactctcccatccttacatgagcatatattcttttccaatggatgagccaatttcaagccatccttttcatattgaagatgaagttgatgatattttgcttatggatgaaactcacagtcacatttataactgggaaaggtatcatgattgtcagttttcagagcatgattggcctgtacataacaactttgatattgatgaagttcagcttgatccaagagctctgtccgatgtcactgatgaagaagaagtacaagttgatccccgaaaatatttggatggagatcgggaaaagtatctggaggatcctgcttttgataccaattactctactgagccttgttggcaatactcagatcatcatgaaaacaaatattgtgatctggagtgtagccatacttgtaactacaaaacgaggtcatcatcatatttagataacttagtttggagagagagtgaagttaaccattactatgaacccaagcttattatagatctttccaattggaaagaacaaagcaaagaaaaatctgataagaaaggcaaatcaaaatgtgaaaggaatggattggttaaagcccagatagcgctagaggaagcatcacagcaactggctggaaaagaaagggaaaagaatcagggatttgattttgattcctttattgcaggaactattcagcttagttcccagcatgagcctactgatgttgttgataaattaaatgacttgaatagctcagtgtcccaactagaattgaaaagtttgatatcaaagtcagtaagccaagaaaaacaggaaaaaggaatggcaaatctggctcaattagaagccttgtaccagtcttcttgggacagccagtttgtgagtggtggggaggactgttttttcataaatcagttttgtgaggtaaggaaggatgaacaagttgagaaggaaaacacttacactagttacttggacaagttctttagcaggaaagaagatactgaaatgctagaaactgagccagtagaggatgggaagcttggggagagaggacatgaggaaggatttctgaacaacagtggggagttcctctttaacaagcagctcgagtccataggcatcccacagtttcacagtccagttgggtcaccacttaagtcaatacaggccacattaacaccttctgctatgaaatcttcccctcaaattcctcatcaaacatacagcagcattctgaaacatctgaactaaaacactcagcagacatttatctttgtattcttcatgaaatgtgttttgtctttttttattactagtgtttaagtcattttttacttgaatcagatggtgtcatttagtaaggattttatgagttcttgttttttaaaatccagactttctttttctacatgtgagatagttttcattttaactggcatgtcatttgcacacaaaaataaagactagagcaaaataatgcaacgcaggaggagaaaagaaatgcactaagacaagaacattctctcatagaacattgatctgttttacaggaaacaaaccttgccttgaaatttacacagtgagactgtacataattgcatgaaaatagctatttttttcctaagacatttttcattcatgaatattttcaagtttttcatactgtacacatttcttaaaacacatgataccagcagcaactgaaaatgaatgccgaatttggtacacatgtgttatctacctcaaggtaacaagagtatgtggcaaaacatataccacccatagtgcttcacaaaatgcacttctatttagccagcgtttattgtagtaaactattcttaataaaactcactcactgtttataaatgttctggtatgcattctttatagtgaagtgttaatacatcacatcttatttattttagcaaatcagtatattttctgtatttaattataaaaaattaacttagtttttaaaatttatttgcaaatatactttttccatttggcactatggtttgttgcctacctagctgcatctataatgtcagcttatcctaaggctgtccacgtacttaatttacttaagtgttcattttaagtaacgtgctcactgtgtataggaatttgtattttggaggtgcttgatctatctacaaagaaaaattaattaggaattactttattataaaatgctcctagaagtcttaattgtgtttattttttaaaaaaacaaatgttagacttgtgtgcatggaagtaattaaggtacatcattattgtagtttgaaagttgtacatgataagacattttgtttttactgtatgtttttactgaatgatctattccccatcccaaggcaagcatgaataaaattaggttaaacgtagcatgtggcatcgcagtctcttagaatttgtttcatctattttattttattgaatactgtctgtatctttggttatcctgtttgaagaaaaaggacaaataaaacatggccagcaaatacaaaaaaaaaaaa

SEQ ID NO: 911 - DNA, 2030 bp, Homo sapiens
tggctggcaatggccttgctgacctcgagccgggcccacgtggggacctttggagcacagcctacgatcctggtgcaaggccggtggatgcagaggccagtccatataccacccaggcctgcgaggagcgtggtccccacccatccagcccatatgtgcaagtgcccttgacagagaggctggtcatatccatggtgaccatttatgggccacaacaggtccccatctgcgcagtgaaccctgtgctgagcaccttgcagacgtgatcttgcttcgtcctgcagcactgtgcggggcaggaaaatccaagaggaagaaggatctacggatatcctgcatgtccaagccacccgcacccaaccccacacccccccggaacctggactcccggaccttcatcaccattggagacagaaactttgaggtggaggctgatgacttggtgaccatctcagaactgggccgtggagcctatggggtggtagagaaggtgcggcacgcccagagcggcaccatcatggccgtgaagcggatccgggccaccgtgaactcacaggagcagaagcggctgctcatggacctggacatcaacatgcgcacggtcgactgtttctacactgtcaccttctacggggcactattcagagagggagacgtgtggatctgcatggagctcatggacacatccttggacaagttctaccggaaggtgctggataaaaacatgacaattccagaggacatccttggggagattgctgtgtctatcgtgcgggccctggagcatctgcacagcaagctgtcggtgatccacagagatgtgaagccctccaatgtccttatcaacaaggagggccatgtgaagatgtgtgactttggcatcagtggctacttggtggactctgtggccaagacgatggatgccggctgcaagccctacatggcccctgagaggatcaacccagagctgaaccagaagggctacaatgtcaagtccgacgtctggagcctgggcatcaccatgattgagatggccatcctgcggttcccttacgagtcctgggggaccccgttccagcagctgaagcaggtggtggaggagccgtccccccagctcccagccgaccgtttctcccccgagtttgtggacttcactgctcagtgcctgaggaagaaccccgcagagcgtatgagctacctggagctgatggagcaccccttcttcaccttgcacaaaaccaagaagacggacattgctgccttcgtgaagaagatcctgggagaagactcataggggctgggcctcggaccccactccggccctccagagccccacagccccatctgcgggggcagtgctcacccacaccataagctactgccatcctggcccagggcatctgggaggaaccgagggggctgctcccacctggctctgtggcgagccatttgtcccaagtgccaaagaagcagaccattggggctcccagccaggcccttgtcggccccaccagtgcctctccctgctgctcctaggacccgtctccagctgctgagatcctggactgagggggcctggatgccccctgtggatgctgctgcccctgcacagcaggctgccagtgcctgggtggatgggccaccgccttgcccagcctggatgccatccaagttgtatatttttttaatctctcgactgaatggactttgcacactttggcccagggtggccacacctctatcccggctttggtgcggggtacacaagaggggatgagttgtgtgaataccccaagactcccatgagggagatgccatgagccgcccaaggccttcccctggcactggcaaacagggcctctgcggagcacactggctcacccagtcctgcccgccaccgttatcggtgtcattcacctttcgtgttttttttaatttatcctctgttgattttttcttttgctttatgggtttggcttgtttttcttgcatggtttggagctgatcgcttctcccccaccccctagggg

SEQ ID NO: 912 - DNA, 2474 bp, Homo sapiens
agcgactcacaaaaggtcctcggccacggcgtgcgtcaccatggcgaccgccgccggcagccgcgccccgcccctctggcgggaccggccaccatcctctcgcgaggagcatcccgtgcgaccggaagtggggcggcgaccccggaagtccccgccgggtgcagcttggtcggttcgatcgccgccgggacctgacaccgcccggagttggcgtcccttctccctctccgagtgctgctcctgtcattgtggccatggacgataccctgttccagttgaagttcacggcgaagcagctggagaagctggccaagaaggcggagaaggactccaaggcggagcaggccaaagtgaagaaggcccttctgcagaaaaatgtagagtgtgcccgtgtgtatgccgagaacgccatccgcaagaagaacgaaggtgtgaactggcttcggatggcgtcccgcgtagacgcagtggcctccaaggtggacacagctgtgactatgaagggggtgaccaagaatatggcccaggtgaccaaagccctggacaaggccctgagcaccatggacctgcagaaggtctcctcagtgatggacaggttcgagcagcaggtgcagaacctggacgtccatacatcggtgatggaggactccatgagctcggccaccaccctgaccacgccgcaggagcaggtggacagcctcatcatgcagatcgccgaggagaatggcctggaggtgctggaccagctcagccagctgcccgagggcgcctctgccgtgggcgagagctctgtgcgcagccaggaggaccagctgtcacggaggttggccgccttgaggaactagccgtgccccgccggtgtgcaccgcctctgccccgtgatgtgctggaaggctcctgtcctctccccaccgcgtcttgcctttgtgctgaccccgcggggctgcggccggcagccactctgcgtctctcacctgccaggcctgcgtggccttagggttgttcctgttcttttaggttgggcggtgggtctgtgtcctggtgttgagtttctgcaaatttctgggggtgatttctgtgactctgggcccacagcggggaggccaagaggggccctgtggactttcacccagcactgtgggggccttcagactctggggcagcagacatgctgcttcccatcagccagagggggtcagggctgccctgttgccaaacaactccctgaggcctctccgcaccacctcagcgggcaggaggtcccaccatgtggacagacatagcccaaggaggcaccacaggtctatgtgtgctgggggatgtcaggtgccacccaacgctgtcctggtggtatttacaatgacatcctcctcctccatcactccaggggtggtgtctcggccgcccctaccagctggctgagccccctggcctcctgcgctccctcacttccctcagttcccaaagctgcccagtccatggggacagaaccgtcactcagatccacattcaagtgtgcccaccctgcagtcttcatcctcactcagctgctgcctctggaggtgcctttggccacatgtgctgtgctgtttgtctcctcgacagggagcctgtccaccagcaggctgcggtcccagcgggtgcgtctgcagctcctccccttgggcaggctggttctcccggaggacctttccttggggccctgcttcatgacgatgctgcctgtgtcaccctctaccatctgtaaacaactgggtgccttccccgaccacaccccaatgccttcccagcttggaagccaaggcagctgatgaagggagctcaggagagccgtcttcagctgggctggggttggggctgctgtgaggaaaacctgccattgtggccctggagagtcaccagcagctcttgggaaggacttgctgggaggctgagagaggctttgggcacagcctgctgtcttttccatttcctaaagtttacttcattgtcttgaggcttccaggttttgtttttgtttttgccaaagtagaaaaggcaggtggtgggcggctggcagggagtgcgggtccccgcccctcttcagtcctgccctcccctcctcagtcctgcccaccccgtgcagcccatgctgaggctgcagtggtgtcgtgggtgttacgtgcaggaacgtggagaccctgacgtgggctcactgcatttggttttcttttcagaacttgggagcccccagggaggggctagtgttggtaggtcctagacgtggttccctccagcctccccaaaatcaaccctggtgttgagagaacgtccttctgtccatcgtgggtaacagccttggggagggtgcagagctctgcagagccatgggccaggtggggctgcctcagtcctgtccccttgggcactgaggagaggggcccattcacctttctcctagaatgctgttgtaaataaacaaatggatccctgga

SEQ ID NO: 913 - DNA, 800 bp, Homo sapiens
accaccatgaatccactcctgatccttacctttgtggcagctgctcttgctgccccctttgatgatgatgacaagatcgttgggggctacaactgtgaggagaattctgtcccctaccaggtgtccctgaattctggctaccacttctgtggtggctccctcatcaacgaacagtgggtggtatcagcaggccactgctacaagtcccgcatccaggtgagactgggagagcacaacatcgaagtcctggaggggaatgagcagttcatcaatgcagccaagatcatccgccacccccaatacgacaggaagactctgaacaatgacatcatgttaatcaagctctcctcacgtgcagtaatcaacgcccgcgtgtccaccatctctctgcccaccgcccctccagccactggcacgaagtgcctcatctctggctggggcaacactgcgagctctggcgccgactacccagacgagctgcagtgcctggatgctcctgtgctgagccaggctaagtgtgaagcctcctaccctggaaagattaccagcaacatgttctgtgtgggcttccttgagggaggcaaggattcatgtcagggtgattctggtggccctgtggtctgcaatggacagctccaaggagttgtctcctggggtgatggctgtgcccagaagaacaagcctggagtctacaccaaggtctacaactacgtgaaatggattaagaacaccatagctgccaatagctaaagcccccagtatctcttcagtctctataccaataaagtgaccctgttctc

SEQ ID NO: 914 - DNA, 802 bp, Homo sapiens
aacaccatgaatctactcctgatccttacctttgttgcagctgctgttgctgccccctttgatgatgatgacaagatcgttgggggctacatctgtgaggagaattctgtcccctaccaggtgtccttgaattctggctaccacttctgcggtggctccctcatcagcgaacagtgggtggtgtcagcaggtcactgctacaagtcccgcatccaggtgagactgggagagcacaacatcgaagtcctggaggggaatgaacagttcatcaatgcggccaagatcatccgccaccccaaatacaacagccggactctggacaatgacatcctgctgatcaagctctcctcacctgccgtcatcaattcccgcgtgtccgccatctctctgcccactgcccctccagctgctggcaccgagtccctcatctccggctggggcaacactctgagttctggtgccgactacccagacgagctgcagtgcctggatgctcctgtgctgagccaggctgagtgtgaagcctcctaccctggaaagattaccaacaacatgttctgtgtgggcttcctcgagggaggcaaggattcctgccagggtgattctggtggccctgtggtctccaatggagagctccaaggaattgtctcctggggctatggctgtgcccagaagaacaggcctggagtctacaccaaggtctacaactatgtggactggattaaggacaccatagctgccaacagctaaagcccccagtccctctgcagtctctataccaataaagtgaccctgctctcac

SEQ ID NO: 915 - DNA, 807 bp, Homo sapiens
acactctaccaccatgaatccattcctgatccttgcctttgtgggagctgctgttgctgtcccctttgacgatgatgacaagattgttgggggctacacctgtgaggagaattctctcccctaccaggtgtccctgaattctggctcccacttctgcggtggctccctcatcagcgaacagtgggtggtatcagcagctcactgctacaagacccgcatccaggtgagactgggagagcacaacatcaaagtcctggaggggaatgagcagttcatcaatgcggccaagatcatccgccaccctaaatacaacagggacactctggacaatgacatcatgctgatcaaactctcctcacctgccgtcatcaatgcccgcgtgtccaccatctctctgcccaccgcccctccagctgctggcactgagtgcctcatctccggctggggcaacactctgagctttggtgctgactacccagacgagctgaagtgcctggatgctccggtgctgagggaggctgagtgtaaagcctcctgccctggaaagattaccaacagcatgttctgtgtgggcttccttgagggaggcaaggattcctggaagcgtgactctggtggccctgtggtctgcaacggacagctccaaggagttgtctcctggggccatggctgtgcctggaagaacaggcctggagtctacaccaaggtctacaactatgtggactggattaaggacaccatcgctgccaacagctaaagcccccggtccctctgcagtctctataccaataaagtggccctgctctc

SEQ ID NO: 916 - DNA, 3696 bp, Homo sapiens
accagacagttcttaaattagcaagccttcaaaaccaaaaatggggtcgaaaagaggcatatcttctaggcatcattctctcagctcctatgaaatcatgtttgcagctctctttgccatattggtagtgctctgtgctggattaattgcagtatcctgcctgacaatcaaggaatcccaacgaggtgcagcacttggacagagtcatgaagccagagcgacatttaaaataacatccggagttacatataatcctaatttgcaagacaaactctcagtggatttcaaagttcttgcttttgaccttcagcaaatgatagatgagatctttctatcaagcaatctgaagaatgaatataagaactcaagagttttacaatttgaaaatggcagcattatagtcgtatttgaccttttctttgcccagtgggtgtcagatcaaaatgtaaaagaagaactgattcaaggccttgaagcaaataaatccagccaactggtcactttccatattgatttgaacagcgttgatatcctagacaagctaacaaccaccagtcatctggcaactccaggaaatgtctcaatagagtgcctgcctggttcaagtccttgtactgatgctctaacgtgtataaaagctgatttattttgtgatggagaagtaaactgtccagatggttctgacgaagacaataaaatgtgtgccacagtttgtgatggaagatttttgttaactggatcatctgggtctttccaggctactcattatccaaaaccttctgaaacaagtgttgtctgccagtggatcatacgtgtaaaccaaggactttccattaaactgagcttcgatgattttaatacatattatacagatatattagatatttatgaaggtgtaggatcaagcaagattttaagagcttctatttgggaaactaatcctggcacaataagaattttttccaaccaagttactgccacctttcttatagaatctgatgaaagtgattatgttggctttaatgcaacatatactgcatttaacagcagtgagcttaataattatgagaaaattaattgtaactttgaggatggcttttgtttctgggtccaggatctaaatgatgataatgaatgggaaaggattcagggaagcaccttttctccttttactggacccaattttgaccacacttttggcaatgcttcaggattttacatttctaccccaactggaccaggagggagacaagaacgagtggggcttttaagcctccctttggaccccactttggagccagcttgccttagtttctggtatcatatgtatggtgaaaatgtccataaattaagcattaatatcagcaatgaccaaaatatggagaagacagttttccaaaaggaaggaaattatggagacaattggaattatggacaagtaaccctaaatgaaacagttaaatttaaggttgcttttaatgcttttaaaaacaagatcctgagtgatattgcgttggatgacattagcctaacatatgggatttgcaatgggagtctttatccagaaccaactttggtgccaactcctccaccagaacttcctacggactgtggaggaccttttgagctgtgggagccaaatacaacattcagttctacgaactttccaaacagctaccctaatctggctttctgtgtttggattttaaatgcacaaaaaggaaagaatatacaacttcattttcaagaatttgacttagaaaatattaacgatgtagttgaaataagagatggtgaagaagctgattccttgctcttagctgtgtacacagggcctggcccagtaaaggatgtgttctctaccaccaacagaatgactgtgcttctcatcactaacgatgtgttggcaagaggagggtttaaagcaaactttactactggctatcacttggggattccagagccatgcaaggcagaccattttcaatgtaaaaatggagagtgtgttccactggtgaatctctgtgacggtcatctgcactgtgaggatggctcagatgaagcagattgtgtgcgttttttcaatggcacaacgaacaacaatggtttagtgcggttcagaatccagagcatatggcatacagcttgtgctgagaactggaccacccagatttcaaatgatgtttgtcaactgctgggactagggagtggaaactcatcaaagccaatcttctctaccgatggtggaccatttgtcaaattaaacacagcacctgatggccacttaatactaacacccagtcaacagtgtttacaggattccttgattcggttacagtgtaaccataaatcttgtggaaaaaaactggcagctcaagacatcaccccaaagattgttggaggaagtaatgccaaagaaggggcctggccctgggttgtgggtctgtattatggcggccgactgctctgcggcgcatctctcgtcagcagtgactggctggtgtccgccgcacactgcgtgtatgggagaaacttagagccatccaagtggacagcaatcctaggcctgcatatgaaatcaaatctgacctctcctcaaacagtccctcgattaatagatgaaattgtcataaaccctcattacaataggcgaagaaaggacaacgacattgccatgatgcatctggaatttaaagtgaattacacagattacatacaacctatttgtttaccggaagaaaatcaagtttttcctccaggaagaaattgttctattgctggttgggggacggttgtatatcaaggtactactgcaaacatattgcaagaagctgatgttcctcttctatcaaatgagagatgccaacagcagatgccagaatataacattactgaaaatatgatatgtgcaggctatgaagaaggaggaatagattcttgtcagggggattcaggaggaccattaatgtgccaagaaaacaacaggtggttccttgctggtgtgacctcatttggatacaagtgtgccctgcctaatcgccccggagtgtatgccagggtctcaaggtttaccgaatggatacaaagttttctacattagcgcatttcttaaactaaacaggaaagtcgcattattttcccattctactctagaaagcatggaaattaagtgtttcgtacaaaaattttaaaaagttaccaaaggtttttattcttacctatgtcaatgaaatgctagggggccagggaaacaaaattttaaaaataataaaattcaccatagcaatacagaataactttaaaataccattaaatacatttgtatttcattgtgaacaggtatttcttcacagatctcatttttaaaattcttaatgattatttttattacttactgttgtttaaagggatgttattttaaagcatataccatacacttaagaaatttgagcagaatttaaaaaagaaagaaaataaattgtttttcccaaagtatgtcactgttggaaataaactgccataaattttctagttccagtttagtttgctgctattagcagaaactcaattgtttctctgtcttttctatcaaaattttcaacatatgcataaccttagtattttcccaaccaatagaaactatttattgtaagcttatgtcacaggcctggactaaattgattttacgttcctctt

SEQ ID NO: 917 - DNA, 1834 bp, Homo sapiens
agacggtgctggtgactcgtccacactgctcgcttcggatactccaggcgtctcccgttgcggccgctccctgccttagaggccagccttggacacttgctgcccctttccagcccggattctgggatccttccctctgagccaacatctgggtcctgccttcgacaccaccccaaggcttcctaccttgcgtgcctggagtctgccccaggggcccttgtcctggccatggcccagaagggggtcctggggcctgggcagctgggggctgtggccattctgctctatcttggattactccggtcggggacaggagcggaaggggcagaagctccctgcggtgtggccccccaagcacgcatcacaggtggcagcagtgcagtcgccggtcagtggccctggcaggtcagcatcacctatgaaggcgtccatgtgtgtggtggctctctcgtgtctgagcagtgggtgctgtcagctgctcactgcttccccagcgagcaccacaaggaagcctatgaggtcaagctgggggcccaccagctagactcctactccgaggacgccaaggtcagcaccctgaaggacatcatcccccaccccagctacctccaggagggctcccagggcgacattgcactcctccaactcagcagacccatcaccttctcccgctacatccggcccatctgcctccctgcagccaacgcctccttccccaacggcctccactgcactgtcactggctggggtcatgtggccccctcagtgagcctcctgacgcccaagccactgcagcaactcgaggtgcctctgatcagtcgtgagacgtgtaactgcctgtacaacatcgacgccaagcctgaggagccgcactttgtccaagaggacatggtgtgtgctggctatgtggaggggggcaaggacgcctgccagggtgactctgggggcccactctcctgccctgtggagggtctctggtacctgacgggcattgtgagctggggagatgcctgtggggcccgcaacaggcctggtgtgtacactctggcctccagctatgcctcctggatccaaagcaaggtgacagaactccagcctcgtgtggtgccccaaacccaggagtcccagcccgacagcaacctctgtggcagccacctggccttcagctctgccccagcccagggcttgctgaggcccatccttttcctgcctctgggcctggctctgggcctcctctccccatggctcagcgagcactgagctggccctacttccaggatggatgcatcacactcaaggacaggagcctggtccttccctgatggcctttggacccagggcctgacttgagccactccttccttcaggactctgcgggaggctggggccccatcttgatctttgagcccattcttctgggtgtgctttttgggaccatcactgagagtcaggagttttactgcctgtagcaatggccagagcctctggcccctcacccaccatggaccagcccattggccgagctcctggggagctcctgggacccttggctatgaaaatgagccctggctcccacctgtttctggaagactgctcccggcccgcctgcccagactgatgagcacatctctctgccctctccctgtgttctgggctggggccacctttgtgcagcttcgaggacaggaaaggccccaatcttgcccactggccgctgagcgcccccgagccctgactcctggactccggaggactgagcccccaccggaactgggctggcgcttggatctggggtgggagtaacagggcagaaatgattaaaatgtttgagcac

SEQ ID NO: 918 - DNA, 1506 bp, Homo sapiens
aggcggacaaagcccgattgttcctgggccctttccccatcgcgcctgggcctgctccccagcccggggcaggggcgggggccagtgtggtgacacacgctgtagctgtctccccggctggctggctcgctctctcctggggacacagaggtcggcaggcagcacacagagggacctacgggcagctgttccttcccccgactcaagaatccccggaggcccggaggcctgcagcaggagcggccatgaagaagctgatggtggtgctgagtctgattgctgcagcctgggcagaggagcagaataagttggtgcatggcggaccctgcgacaagacatctcacccctaccaagctgccctctacacctcgggccacttgctctgtggtggggtccttatccatccactgtgggtcctcacagctgcccactgcaaaaaaccgaatcttcaggtcttcctggggaagcataaccttcggcaaagggagagttcccaggagcagagttctgttgtccgggctgtgatccaccctgactatgatgccgccagccatgaccaggacatcatgctgttgcgcctggcacgcccagccaaactctctgaactcatccagccccttcccctggagagggactgctcagccaacaccaccagctgccacatcctgggctggggcaagacagcagatggtgatttccctgacaccatccagtgtgcatacatccacctggtgtcccgtgaggagtgtgagcatgcctaccctggccagatcacccagaacatgttgtgtgctggggatgagaagtacgggaaggattcctgccagggtgattctgggggtccgctggtatgtggagaccacctccgaggccttgtgtcatggggtaacatcccctgtggatcaaaggagaagccaggagtctacaccaacgtctgcagatacacgaactggatccaaaaaaccattcaggccaagtgaccctgacatgtgacatctacctcccgacctaccaccccactggctggttccagaacgtctctcacctagaccttgcctcccctcctctcctgcccagctctgaccctgatgcttaataaacgcagcgacgtgagggtcctgattctccctggttttaccccagctccatccttgcatcactggggaggacgtgatgagtgaggacttgggtcctcggtcttacccccaccactaagagaatacaggaaaatcccttctaggcatctcctctccccaacccttccacacgtttgatttcttcctgcagaggcccagccacgtgtctggaatcccagctccgctgcttactgtcggtgtccccttgggatgtacctttcttcactgcagatttctcacctgtaagatgaagataaggatgatacagtctccatcaggcagtggctgttggaaagatttaagatttcacacctatgacatacatgggatagcacctgggccgccatgcactcaataaagaatgtatttt

SEQ ID NO: 919 - DNA, 2036 bp, Homo sapiens
ccggccctcgccctgtccgccgccaccgccgccgccgccagagtcgccatgcagatcccgcgcgccgctcttctcccgctgctgctgctgctgctggcggcgcccgcctcggcgcagctgtcccgggccggccgctcggcgcctttggccgccgggtgcccagaccgctgcgagccggcgcgctgcccgccgcagccggagcactgcgagggcggccgggcccgggacgcgtgcggctgctgcgaggtgtgcggcgcgcccgagggcgccgcgtgcggcctgcaggagggcccgtgcggcgaggggctgcagtgcgtggtgcccttcggggtgccagcctcggccacggtgcggcggcgcgcgcaggccggcctctgtgtgtgcgccagcagcgagccggtgtgcggcagcgacgccaacacctacgccaacctgtgccagctgcgcgccgccagccgccgctccgagaggctgcaccggccgccggtcatcgtcctgcagcgcggagcctgcggccaagggcaggaagatcccaacagtttgcgccataaatataactttatcgcggacgtggtggagaagatcgcccctgccgtggttcatatcgaattgtttcgcaagcttccgttttctaaacgagaggtgccggtggctagtgggtctgggtttattgtgtcggaagatggactgatcgtgacaaatgcccacgtggtgaccaacaagcaccgggtcaaagttgagctgaagaacggtgccacttacgaagccaaaatcaaggatgtggatgagaaagcagacatcgcactcatcaaaattgaccaccagggcaagctgcctgtcctgctgcttggccgctcctcagagctgcggccgggagagttcgtggtcgccatcggaagcccgttttcccttcaaaacacagtcaccaccgggatcgtgagcaccacccagcgaggcggcaaagagctggggctccgcaactcagacatggactacatccagaccgacgccatcatcaactatggaaactcgggaggcccgttagtaaacctggacggtgaagtgattggaattaacactttgaaagtgacagctggaatctcctttgcaatcccatctgataagattaaaaagttcctcacggagtcccatgaccgacaggccaaaggaaaagccatcaccaagaagaagtatattggtatccgaatgatgtcactcacgtccagcaaagccaaagagctgaaggaccggcaccgggacttcccagacgtgatctcaggagcgtatataattgaagtaattcctgataccccagcagaagctggtggtctcaaggaaaacgacgtcataatcagcatcaatggacagtccgtggtctccgccaatgatgtcagcgacgtcattaaaagggaaagcaccctgaacatggtggtccgcaggggtaatgaagatatcatgatcacagtgattcccgaagaaattgacccataggcagaggcatgagctggacttcatgtttccctcaaagactctcccgtggatgacggatgaggactctgggctgctggaataggacactcaagacttttgactgccattttgtttgttcagtggagactccctggccaacagaatccttcttgatagtttgcaggcaaaacaaatgtaatgttgcagatccgcaggcagaagctctgcccttctgtatcctatgtatgcagtgtgctttttcttgccagcttgggccattcttgcttagacagtcagcatttgtctcctcctttaactgagtcatcatcttagtccaactaatgcagtcgatacaatgcgtagatagaagaagccccacgggagccaggatgggactggtcgtgtttgtgcttttctccaagtcagcacccaaaggtcaatgcacagagaccccgggtgggtgagcgctggcttctcaaacggccgaagttgcctcttttaggaatctctttggaattgggagcacgatgactctgagtttgagctattaaagtacttcttacaaa

SEQ ID NO: 920 - DNA, 1454 bp, Homo sapiens
accagcggcagaccacaggcagggcagaggcacgtctgggtcccctccctccttcctatcggcgactcccagatcctggccatgagagctccgcacctccacctctccgccgcctctggcgcccgggctctggcgaagctgctgccgctgctgatggcgcaactctgggccgcagaggcggcgctgctcccccaaaacgacacgcgcttggaccccgaagcctatggcgccccgtgcgcgcgcggctcgcagccctggcaggtctcgctcttcaacggcctctcgttccactgcgcgggtgtcctggtggaccagagttgggtgctgacggccgcgcactgcggaaacaagccactgtgggctcgagtaggggatgatcacctgctgcttcttcagggcgagcagctccgccggacgactcgctctgttgtccatcccaagtaccaccagggctcaggccccatcctgccaaggcgaacggatgagcacgatctcatgttgctaaagctggccaggcccgtagtgccggggccccgcgtccgggccctgcagcttccctaccgctgtgctcagcccggagaccagtgccaggttgctggctggggcaccacggccgcccggagagtgaagtacaacaagggcctgacctgctccagcatcactatcctgagccctaaagagtgtgaggtcttctaccctggcgtggtcaccaacaacatgatatgtgctggactggaccggggccaggacccttgccagagtgactctggaggccccctggtctgtgacgagaccctccaaggcatcctctcgtggggtgtttacccctgtggctctgcccagcatccagctgtctacacccagatctgcaaatacatgtcctggatcaataaagtcatacgctccaactgatccagatgctacgctccagctgatccagatgttatgctcctgctgatccagatgcccagaggctccatcgtccatcctcttcctccccagtcggctgaactctccccttgtctgcactgttcaaacctctgccgccctccacacctctaaacatctcccctctcacctcattcccccacctatccccattctctgcctgtactgaagctgaaatgcaggaagtggtggcaaaggtttattccagagaagccaggaagccggtcatcacccagcctctgagagcagttactggggtcacccaacctgacttcctctgccactccccgctgtgtgactttgggcaagccaagtgccctctctgaacctcagtttcctcatctgcaaaatgggaacaatgacgtgcctacctcttagacatgttgtgaggagactatgatataacatgtgtatgtaaatcttcatgtgattgtcatgtaaggcttaacacagtgggtggtgagttctgactaaaggttacctgttgtcgtgaaaaaaaaaaaaaa

SEQ ID NO: 921 - DNA, 903 bp, Homo sapiens
gattggctataagaggagcttgatcgtgggtgcaccctggaccccaccatggctcaccggccccccagccctgccctggcgtccgtgctgctggccttgctgctgagcggtgctgcccgagctgcggagatcgtgggcgggcacgaggcgcagccacactcccggccctacatggcctccctgcagatgcgggggaacccgggcagccacttctgcggaggcaccttgatccaccccagcttcgtgctgacggccccgcactgcctgcgggacataccccagcgcctggtgaacgtggtgctcggagcccacaacgtgcggacgcaggagcccacccagcagcacttctcggtggctcaggtgtttctgaacaactacgacgcggagaacaaactgaacgacattctcctcatccagctgagcagcccagccaacctcagtgcgtccgtcacctcagtccagctgccacagcaggaccagccagtgccccacggcacccagtgcctggccatgggctggggccgcgtgggtgcccacgaccccccagcccaggtcctgcaggagctcaatgtcaccgtggtgaccttcttctgccggccacataacatttgcactttcgtccctcgccgcaaggccggcatctgcttcggagactcaggtggccccctgatctgtgatggcatcatccaaggaatagactccttcgtgatctggggatgtgccacccgccttttccctgacttcttcacgcgggtagccctctacgtggactggatccgttctacgctgcgccgtgtggaggccaagggccgcccctgaaccgcccctcccacagcgctggccgggaccccgagcctggctccaaaccctcgaggcggatctttggacagaagcagctcttgt

SEQ ID NO: 922 - DNA, 2767 bp, Homo sapiens
gggcgggcgcattgcagactgcggagtcagacggtgctatgtacgccctcttcctcctggccagcctcctgggcgcggctctagccggcccggtccttggactgaaagaatgcaccaggggctcggcagtgtggtgccagaatgtgaagacggcgtccgactgcggggcagtgaagcactgcctgcagaccgtttggaacaagccaacagtgaaatcccttccctgcgacatatgcaaagacgttgtcaccgcagctggtgatatgctgaaggacaatgccactgaggaggagatccttgtttacttggagaagacctgtgactggcttccgaaaccgaacatgtctgcttcatgcaaggagatagtggactcctacctccctgtcatcctggacatcattaaaggagaaatgagccgtcctggggaggtgtgctctgctctcaacctctgcgagtctctccagaagcacctagcagagctgaatcaccagaagcagctggagtccaataagatcccagagctggacatgactgaggtggtggcccccttcatggccaacatccctctcctcctctaccctcaggacggcccccgcagcaagccccagccaaaggataatggggacgtttgccaggactgcattcagatggtgactgacatccagactgctgtacggaccaactccacctttgtccaggccttggtggaacatgtcaaggaggagtgtgaccgcctgggccctggcatggccgacatatgcaagaactatatcagccagtattctgaaattgctatccagatgatgatgcacatgcaacccaaggagatctgtgcgctggttgggttctgtgatgaggtgaaagagatgcccatgcagactctggtccccgccaaagtggcctccaagaatgtcatccctgccctggaactggtggagcccattaagaagcacgaggtcccagcaaagtctgatgtttactgtgaggtgtgtgaattcctggtgaaggaggtgaccaagctgattgacaacaacaagactgagaaagaaatactcgacgcttttgacaaaatgtgctcgaagctgccgaagtccctgtcggaagagtgccaggaggtggtggacacgtacggcagctccatcctgtccatcctgctggaggaggtcagccctgagctggtgtgcagcatgctgcacctctgctctggcacgcggctgcctgcactgaccgttcacgtgactcagccaaaggacggtggcttctgcgaagtgtgcaagaagctggtgggttatttggatcgcaacctggagaaaaacagcaccaagcaggagatcctggctgctcttgagaaaggctgcagcttcctgccagacccttaccagaagcagtgtgatcagtttgtggcagagtacgagcccgtgctgatcgagatcctggtggaggtgatggatccttccttcgtgtgcttgaaaattggagcctgcccctcggcccataagcccttgttgggaactgagaagtgtatatggggcccaagctactggtgccagaacacagagacagcagcccagtgcaatgctgtcgagcattgcaaacgccatgtgtggaactaggaggaggaatattccatcttggcagaaaccacagcattggtttttttctacttgtgtgtctgggggaatgaacgcacagatctgtttgactttgttataaaaatagggctcccccacctcccccatttctgtgtcctttattgtagcattgctgtctgcaagggagcccctagcccctagcccctggcagacatagctgcttcagtgccccttttctctctgctagatggatgttgatgcactggaggtcttttagcctgcccttgcatggcgcctgctggaggaggagagagctctgctggcatgagccacagtttcttgactggaggccatcaaccctcttggttgaggccttgttctgagccctgacatgtgcttgggcactggtgggcctgggcttctgaggtggcctcctgccctgatcagggaccctccccgctttcctgggcctctcagttgaacaaagcagcaaaacaaaggcagttttatatgaaagattagaagcctggaataatcaggctttttaaatgatgtaattcccactgtaatagcatagggattttggaagcagctgctggtggcttgggacatcagtggggccaagggttctctgtccctggttcaactgtgatttggctttcccgtgtctttcctggtgatgccttgtttggggttctgtgggtttgggtgggaagagggccatctgcctgaatgtaacctgctagctctccgaagccctgcgggcctggcttgtgtgagcgtgtggacagtggtggccgcgctgtgcctgctcgtgttgcctacatgtccctggctgttgaggcgctgcttcagcctgcacccctcccttgtctcatagatgctccttttgaccttttcaaataaatatggatggcgagctcctaggcctctggcttcctggtagagggcggcatgccgaagggtctgtctgggtgtggattggatgctgggggtgtgggggttggaagctgtctgtggcccacttgggcacccacgcttctgtccacttctggttgccaggagacagcaagcaaagccagcaggacatgaagttgctattaaatggacttcgtgatttttgttttgcactaaagtttctgtgatttaacaataaaattctgttagcccccccg

SEQ ID NO: 923 - DNA, 1244 bp, Homo sapiens
ggaaactcccgcagacttctctgtagatcgctgagcgatactttcggcagcacctccttgattctcagttttgctggaggccgcaaccaggcccgcgccgccaccatgtttcgaaatcagtatgacaatgatgtcactgtttggagcccccagggcaggattcatcaaattgaatatgcaatggaagctgttaaacaaggttcagccacagttggtctgaaatcaaaaactcatgcagttttggttgcattgaaaagggcgcaatcagagcttgcagctcatcagaaaaaaattctccatgttgacaaccacattggtatctcaattgcggggcttactgctgatgctagactgttatgtaattttatgcgtcaggagtgtttggattccagatttgtattcgatagaccactgcctgtgtctcgtcttgtatctctaattggaagcaagacccagataccaacacaacgatatggccggagaccatatggtgttggtctccttattgctggttatgatgatatgggccctcacattttccaaacctgtccatctgctaactattttgactgcagagccatgtccattggagcccgttcccaatcagctcgtacttacttggagagacatatgtctgaatttatggagtgtaatttaaatgaactagttaaacatggtctgcgtgccttaagagagacgcttcctgcagaacaggacctgactacaaagaatgtttccattggaattgttggtaaagacttggagtttacaatctatgatgatgatgatgtgtctccattcctggaaggtcttgaagaaagaccacagagaaaggcacagcctgctcaacctgctgatgaacctgcagaaaaggctgatgaaccaatggaacattaagtgataagccagtctatatatgtattatcaaatatgtaagaatacaggcaccacatactgatgacaataatctatactttgaaccaaaagttgcagagtggtggaatgctatgctatgttttaggaatcagtccagatgtgagttttttccaagcaacctcactgaaacctatataatggaatacatttttctttgaaagggtctgtataatcattttctagaagtatgggtatctatactaatgttttttatataagaacataggtgtctttgtggttttaaagacaactgtgaaataaaattgtttcaccgcctggtaaaaaaaaaaaaaaaaaaaaaaaaaaaa

SEQ ID NO: 924 - DNA, 838 bp, Homo sapiens
gcacgatgagctcaatcggcactgggtatgacctgtcagcctctacattctctcctgacggaagagtttttcaagttgaatatgctatgaaggctgtggaaaatagtagtacagctattggaatcagatgcaaagatggtgttgtctttggggtagaaaaattagtcctttctaaactttatgaagaaggttccaacaaaagactttttaatgttgatcggcatgttggaatggcagtagcaggtttgttggcagatgctcgttctttagcagacatagcaagagaagaagcttccaacttcagatctaactttggctacaacattccactaaaacatcttgcagacagagtggccatgtatgtgcatgcatatacactctacagtgctgttagaccttttggctgcagtttcatgttagggtcttacagtgtgaatgacggtgcgcaactctacatgattgacccatcaggtgtttcatacggttattggggctgtgccatcggcaaagccaggcaagctgcaaagacggaaatagagaagcttcagatgaaagaaatgacctgccgtgatatcgttaaagaagttgcaaaaataatttacatagtacatgacgaagttaaggataaagcttttgaactagaactcagctgggttggtgaattaactaatggaagacatgaaattgttccaaaagatataagagaagaagcagagaaatatgctaaggaatctctgaaggaagaagatgaatcagatgatgataatatgtaacatttactccagcatctattgtattttaaatttctactccagtccaatgtaactatttagccctg

SEQ ID NO: 925 - DNA, 1189 bp, Homo sapiens
gcgcatgcgcgggggccatattagcagcggttattcggtgagcggtggtggtttattcttccgcggagttaagggctccgtggacatctcaggtcttcagggtcttccatctggaactatataaagttcagaaaacatgtctcgaagatatgactccaggaccactatattttctccagaaggtcgcttataccaagttgaatatgccatggaagctattggacatgcaggcacctgtttgggaattttagcaaatgatggtgttttgcttgcagcagagagacgcaacatccacaagcttcttgatgaagtctttttttctgaaaaaatttataaactcaatgaggacatggcttgcagtgtggcaggcataacttctgatgctaatgttctgactaatgaactaaggctcattgctcaaaggtatttattacagtatcaggagccaataccttgtgagcagttggttacagcgctgtgtgatatcaaacaagcttatacacaatttggaggaaaacgtccctttggtgtttcattgctgtacattggctgggataagcactatggctttcagctctatcagagtgaccctagtggaaattacgggggatggaaggccacatgcattggaaataatagcgctgcagctgtgtcaatgttgaaacaagactataaagaaggagaaatgaccttgaagtcagcacttgctttagctatcaaagtactaaataagaccatggatgttagtaaactctctgctgaaaaagtggaaattgcaacactaacaagagagaatggaaagacagtaatcagagttctcaaacaaaaagaagtggagcagttgatcaaaaaacacgaggaagaagaagccaaagctgagcgtgagaagaaagaaaaagaacagaaagaaaaggataaatagaatcagagattttattactcatttggggcaccatttcagtgtaaaagcagtcctactcttccacactaggaaggctttactttttttaactggtgcagtgggaaaataggacattacatactgaattgggtccttgtcatttctgtccaattgaatactttattgtaacgatgatggttacccttcatggacgtcttaatcttccacacacatcccctttttttggaataaaatttgaaaaaaaaaaaaaaaaaaaaaaaaaaaaaa

SEQ ID NO: 926 - DNA, 959 bp, Homo sapiens
ctgcctcctcctaccctcgccatgtttcttacccggtctgagtacgacaggggcgtgaatactttttctcccgaaggaagattatttcaagtggaatatgacattgaggctatcaagcttggttctacagccattgggatccagacatcagagggtgtgtgcctagctgtggagaagagaattacttccccactgatggagcccagcagcattgagaaaattgtagagattgatgctcacataggttgtgccatgagtgggctaattgctgatgctaagactttaattgataaagccagagtggagacacagaaccactggttcacctacaatgagacaatgacagtggagagtgtgacccaagctgtgtccaatctggctttgcagtttggagaagaagatgcagatccaggtgccatgtctcgtccctttggagtagcattattatttggaggagttgatgagaaaggaccccagctgtttcatatggacccatctgggacctttgtacagtgtgatgctcgagcaattggctctgcttcagagggtgcccagagctccttgcaagaactttaccacaagtctatgactttgaaagaagccatcaagtcttcactcatcatcctcaaacaagtaatggaggagaagctgaatgcaacaaacattgagctagccacagtgcagcctggccagaatttccacatgttcacaaaggaagaacttgaagaggttatcaaggacatttaaggaatcctgatcctcagaacttctctgggacaatttcagttctaataatgtccttaaattttatttccagctcctgttccttggaaaatctccattgtatgtgcattttttaaatgatgtctgtacataaaggcagttctgaaataaagaaaattttaaaataaaaaaaaaaaaaaaaaaaaaaaaaaaaaaaaaaaaaaaaaaaaaaaaaa

SEQ ID NO: 927 - DNA, 823 bp, Homo sapiens
cgcagccgtgcgatgttgtcctctacagccatgtattcggctcctggcagagacttggggatggaaccgcacagagccgcgggccctttgcagctgcgattttcgccctacgttttcaacggaggtactatactggcaattgctggagaagattttgcaattgttgcttctgatactcgattgagtgaagggttttcaattcatacgcgggatagccccaaatgttacaaattaacagacaaaacagtcattggatgcagcggttttcatggagactgtcttacgctgacaaagattattgaagcaagactaaagatgtataagcattccaataataaggccatgactacgggggcaattgctgcaatgctgtctacaatcctgtattcaaggcgcttctttccatactatgtttacaacatcatcggtggacttgatgaagaaggaaagggggctgtatacagctttgatccagtagggtcttaccagagagactccttcaaggctggaggctcagcaagtgccatgctacagcccctgcttgacaaccaggttggttttaagaacatgcagaatgtggagcatgttccgctgtccttggacagagccatgcggctggtgaaagatgtcttcatttctgcggctgagagagatgtgtacactggggacgcactccggatctgcatagtgaccaaagagggcatcagggaggaaactgtttccttaaggaaggactgatctgtgtgctcttatcaccaatcagttcagacctggttgattttgtactttggaactgtaccttggatggttttgtttattaaaa

SEQ ID NO: 928 - DNA, 925 bp, Homo sapiens
ttttttctgctaccgtgactaagatggaagcgtttttggggtcgcggtccggactttgggcggggggtccggccccaggacagttttaccgcattccgtccactcccgattccttcatggatccggcgtctgcactttacagaggtccaatcacgcggacccagaaccccatggtgaccgggacctcagtcctcggcgttaagttcgagggcggagtggtgattgccgcagacatgctgggatcctacggctccttggctcgtttccgcaacatctctcgcattatgcgagtcaacaacagtaccatgctgggtgcctctggcgactacgctgatttccagtatttgaagcaagttctcggccagatggtgattgatgaggagcttctgggagatggacacagctatagtcctagagctattcattcatggctgaccagggccatgtacagccggcgctcgaagatgaaccctttgtggaacaccatggtcatcggaggctatgctgatggagagagcttcctcggttatgtggacatgcttggtgtagcctatgaagccccttcgctggccactggttatggtgcatacttggctcagcctctgctgcgagaagttctggagaagcagccagtgctaagccagaccgaggcccgcgacttagtagaacgctgcatgcgagtgctgtactaccgagatgcccgttcttacaaccggtttcaaaccgccactgtcaccgaaaaaggtgttgaaatagagggaccattgtctacagagaccaactgggatattgcccacatgatcagtggctttgaatgaaatacagatgcattatccagaactgaagttgccctacttttaactttgaacttggctagttcaaagatagactcttcttttgtaaagtaaataaattcttcaaaatg

SEQ ID NO: 929 - DNA, 980 bp, Homo sapiens
gctttcttgggaagatggcggctgtgtcggtgtatgctccaccagttggaggcttctcttttgataactgccgcaggaatgccgtcttggaagccgattttgcaaagaggggatacaagcttccaaaggtccggaaaactggcacgaccatcgctggggtggtctataaggatggcatagttcttggagcagatacaagagcaactgaagggatggttgttgctgacaagaactgttcaaaaatacacttcatatctcctaatatttattgttgtggtgctgggacagctgcagacacagacatgacaacccagctcatttcttccaacctggagctccactccctctccactggccgtcttcccagagttgtgacagccaatcggatgctgaagcagatgcttttcaggtatcaaggttacattggtgcagccctagttttagggggagtagatgttactggacctcacctctacagcatctatcctcatggatcaactgataagttgccttatgtcaccatgggttctggctccttggcagcaatggctgtatttgaagataagtttaggccagacatggaggaggaggaagccaagaatctggtgagcgaagccatcgcagctggcatcttcaacgacctgggctccggaagcaacattgacctctgcgtcatcagcaagaacaagctggattttctccgcccatacacagtgcccaacaagaaggggaccaggcttggccggtacaggtgtgagaaagggactactgcagtcctcactgagaaaatcactcctctggagattgaggtgctggaagaaacagtccaaacaatggacacttcctgaatggcatcagtgggtggctggccgcggttctggaaggtggtgagcattgaggcccagtaagacactcatgtggctagtgtttgccgaatgaaactcaactcaataaaaaacaaaaaccaaattgggcagctg

SEQ ID NO: 930 - DNA, 2699 bp, Homo sapiens
ggcacgaggcaggcggcgaggagagcggtgccttgcagggatgctgcgggcgggagcaccaaccggggacttaccccgggcgggagaagtccacaccgggaccaccatcatggcagtggagtttgacgggggcgttgtgatgggttctgattcccgagtgtctgcaggcgaggcggtggtgaaccgagtgtttgacaagctgtccccgctgcacgagcgcatctactgtgcactctctggttcagctgctgatgcccaagccgtggccgacatggccgcctaccagctggagctccatgggatagaactggaggaacctccacttgttttggctgctgcaaatgtggtgagaaatatcagctataaatatcgagaggacttgtctgcacatctcatggtagctggctgggaccaacgtgaaggaggtcaggtatatggaaccctgggaggaatgctgactcgacagccttttgccattggtggctccggcagcacctttatctatggttatgtggatgcagcatataagccaggcatgtctcccgaggagtgcaggcgcttcaccacagacgctattgctctggccatgagccgggatggctcaagcgggggtgtcatctacctggtcactattacagctgccggtgtggaccatcgagtcatcttgggcaatgaactgccaaaattctatgatgagtgaaccttccccagacttctctttcttattttgtaataaactctctagggccaaaacctggtatggtcattgggaaatgagtgctcagggagatggagcttaggggaggtgggtgcttccctcctagatgtcagcatacactctttcttcttttgtcccaggtctaaaacatctttcctagagaaaacaaaagggactaaactagaaatataaagagccctatacatgacaggtgatcacgtactgaatgattttgtagtacaaacaataaaaattctcattccgcatcatcatgcggtccatgatgatgaggccgcaaaaaaaaaaaaaaaaaaaaaaaactcgagactagttctctctctctccctcgtgccgaattcggcacgaggtgtaatcccagctactcgggaggctgagacagaagaatcacttgagcccaggaggcggaggttgcggtgagcagagattgcgccattgcactccagcctgggcgacaaagcgagactccatctcaaaaaaaacaaaaaaattagcatttacggaattctgaaattttgggctattaaatttctacatcatctaagtgccctcttggcaatctttcacatcctctcatggcatctgatccagaaggctcaaacctgatctgagtactagtgtgttcctcctactcacttctgtttctattaactaataagtgtagtaatgaaagccagtattagggacaaattttacatgactttcttctcaaacctggacctttattgaacctctgcctccctttttcattagtatgaaagtatgtatcttaaagggttgctctacgaattaaatggatcagtaaatataaagaaagcgcctagcaaagtgcctagtacaaaataaacgcccaactgttattgttactattgttttaaattctagtttccttaccccttaacatacattttcagttatacaaaagttgaacgtttccctggagattgccaaaattctctgaacggtttcaagagatctgtcctattcttcacctacacacaaaaaagtactaatcatcacacacaggctacctaagccacctgaccttacctcccattagctgtccctgtaccatctaactaaaatgtacagatacatacttgtggccaggcacggtggctcacgcctgtaatcacagcactttgggaggccaaggcaggcggatcacctgaggtcaggagtttcagactagtctggccaacatggagaaaccccgtttctactaaaaatgcaaaaattagctgggcttggtggtgcacacctgtagtgccagctactcgcgagactgaggcaggagaattgcttgaacccgggaggcgggggttgcagtgagccgagatccggccactacactccagcctgggaaacagagcgatactctgtctcaaaaaaacagaaagacaaaaaaacggatacatactggaaccctgaaaactttttcagtagcatttagaccttctctcatatacagcattgtaaaatccattgctttgcttttagctgcactatgtgccccaatatcatcaaatggcatttggccttctctttacagactgaaaaggcacattacagatcttaaatatgctagtagtagatcaatgggcagtgtgttattcagaatacagtattctgtgatggttttctaatctcagtgacagtaggtggttaaattaaatgtttatggccaggtgcggtggctcacacctataatcccagcactttgggaggccaagccaaggtgggcagatcttttaaggtcaggagttcaagatcagcctgaccaatatggtgaaagcctgtctccactgaaaatacaaaaaattagctgggtgtggtggcgcacccctgtaatctcagctacccgggaggtagagtttgcagtgagcagagattgtgccactgcactccagtctggacgacagagtgagactccatctcaaaaataaaaaaaaaaaaaaaaaaa

SEQ ID NO: 931 - DNA, 1599 bp, Homo sapiens
aattccggcggaagtggtggaggaacttccggcagcggcagctcaagtggccaaggcaagatgggtcaaagtcagagtggtggtcatggtcctggaggtggcaagaaggatgacgaggacaagaaaaagaaatatgaacctcctgtaccaactagagtggggaaaaagaagaagaaaacaaagggaccagatgctgccagcaaactgccactggtgacacctcacactcagtgccggttaaaattactgaagttagagagaattaaagactatcttctcatggaggaagaattcattagaaatcaggaacaaatgaaaccattagaagaaaagcaagaggaggaaagatcaaaagtggatgatctgagggggaccccgatgtcagtaggaaccttggaagagattattgatgacaatcatgccatcgtgtctacatctgtgggctcagaacactacgtcagcattctttcatttgtagacaaggatctgctggaacctggctgctcggtcctgctcaaccacaaggtgcatgccgtgataggggtgctgatggatgacacggatcccctggtcacagtgatgaaggtagaaaaggccccccaggagacctatgcagatattggggggttggacaaccaaattcaggaaattaaggaatctgtggagcttcctctcacccatcctgaatattatgaagagatgggtataaagcctcctaagggggtcattctctatggtccacctggcacaggtaaaaccttgttagccaaagcagtagcaaaccaaacctcagccactttcttgagagtggttggctctgaacttattcagaagtacctaggtgatgggcccaaactcgtacgggaattgttccgagttgctgaagaacatgcaccgtccatcgtgtttattgatgaaattgacgccattgggacaaaaagatatgactccaattctggtggtgagagagaaattcagcgaacaatgttggaactgctgaaccagttggatggatttgattctaggggagatgtgaaagttatcatggccacaaaccgaatagaaactttggatccagcacttatcagaccaggccgcattgacaggaagattgagttccccctgcctgatgaaaagacgaagaagcgcatctttcagattcacacaagcaggatgacgctggctgatgatgtaaccctggacgacctgatcatggctaaagatgacctctctggtgctgacatcaaggcaatctgtacagaagctggtctgatggccttaagagaacgtagaatgaaagtaacaaatgaagacttcaaaaaatctaaagaaaatgttctttataagaaacaggaaggcacccctgaggggctgtatctctaatgaaccatggctgtcatcaggaaaatggttgggagatttctcaatccctgaaagggatgaggttgggggagttgcccagaggaatccctgttcccactgatttttattagcaaaacatcctgtgtcttttggagtacgatgtgtaagtgcccattgggtggcctgttggtcactgtgcagcagtctgcttcccaataaagcgtgctctttcacaag

SEQ ID NO: 932 - DNA, 1478 bp, Homo sapiens
ccattgtgctctaaagggaaggtgctgtgtaatcattaaggagcggaggcttttggagctgctaaaatgccggattacctcggtgccgatcagcggaagaccaaagaggatgagaaggacgacaagcccatccgagctctggatgagggggatattgccttgttgaaaacttatggtcagagcacttactctaggcagatcaagcaagttgaagatgacattcagcaacttctcaagaaaattaatgagctcactggtattaaagaatctgacactggcctggccccaccagcactctgggatttggctgcagataagcagacactccagagtgaacagcctttacaggttgccaggtgtacaaagataatcaatgctgattcggaggacccaaaatacattatcaacgtaaagcagtttgccaagtttgtggtggaccttagtgatcaggtggcacctactgacattgaagaagggatgagagtgggcgtggatagaaataaatatcaaattcacattccattgcctcctaagattgacccaacagttaccatgatgcaggtggaagagaaacctgatgtcacatacagtgatgttggtggctgtaaggaacagattgagaaactgcgagaagtagttgaaaccccattacttcatccagagaggtttgtgaaccttggcattgagcctcccaagggcgtgctgctctttggtccacccggtacaggcaagacactctgtgcgcgggcagttgctaatcggactgatgcgtgcttcattcgagttattggatctgagcttgtacagaaatacgtcggtgagggggctcgaatggttcgtgaactctttgaaatggccagaacaaaaaaagcctgccttatcttctttgatgaaattgatgctattggaggggctcgttttgatgatggtgctggaggtgacaatgaagtgcagagaacaatgttggaactgatcaatcagcttgatggttttgatcctcgaggcaatattaaagtgctgatggccactaacagacctgatactttggatccagcactgatgaggccagggagattggatagaaaaattgaatttagcttgcccgatctagagggtcggacccacatatttaagattcacgctcgttcaatgagtgttgaaagagatatcagatttgaactgttagcacgactgtgtccaaatagcactggtgctgagattagaagcgtctgcacagaggctggtatgtttgccatcagagcacggcgaaaaattgctaccgagaaggatttcttggaagctgtaaataaggtcattaagtcttatgccaaattcagtgctactcctcgttacatgacatacaactgaaccctgaaggctttcaagtgaaaactttaaattggaatcctaaccttatatagacttgttaataaccaattcataaacaaataaatggcttcaactttagagcacaatgg

SEQ ID NO: 933 - DNA, 1341 bp, Homo sapiens
gaattccggcgaccgtgtgggatgaggccgagcaagatggaattggggaggaggtgctcaagatgtccacggaggagatcatccagcgcacacggctgctggacagtgagatcaagatcatgaagagtgaagtgttgagagtcacccatgagctccaagccatgaaggacaagataaaagagaacagtgagaaaatcaaagtgaacaagaccctgccgtaccttgtctccaacgtcatcgagctcctggatgttgatcctaatgaccaagaggaggatggtgccaatattgacctggactcccagaggaagggcaagtgtgctgtgatcaaaacctctacacgacagacgtacttccttcctgtgattgggttggtggatgctgaaaagctaaagccaggagacctggtgggtgtgaacaaagactcctatctgatcctggagacgctgcccacagagtatgactcgcgggtgaaggccatggaggtagacgagaggcccacggagcaatacagtgacattgggggtttggacaagcagatccaggagctggtggaggccattgtcttgccaatgaaccacaaggagaagtttgagaacttggggatccaacctccaaaaggggtgctgatgtatgggcccccagggacggggaagaccctcctggcccgggcctgtgccgcacagactaaggccaccttcctaaagctggctggcccccagctggtgcagatgttcattggagatggtgccaagctagtccgggatgcctttgccctggccaaggagaaagcgccctctatcatcttcattgatgagttggatgccatcggcaccaagcgctttgacagtgagaaggctggggaccgggaggtgcagaggacaatgctggagcttctgaaccagctggatggcttccagcccaacacccaagttaaggtaattgcagccacaaacagggtggacatcctggaccccgccctcctccgctcgggccgccttgaccgcaagatagagttcccgatgcccaatgaggaggcccgggccagaatcatgcagatccactcccgaaagatgaatgtcagtcctgacgtgaactacgaggagctggcccgctgcacagatgacttcaatggggcccagtgcaaggctgtgtgtgtggaggcgggcatgatcgcactggccaggggtgccacggagctcacccacgaggactacatggaaggcatcctggaggtgcaggccaagaagaaagccaacctacaatactacgcctaggcacacaggccagccccagtctcacggctgaagtgcgcaataaaagatggtttagggggaattc

SEQ ID NO: 934 - DNA, 1271 bp, Homo sapiens
atggcgcttgacggaccagagcagatggagctggaggaggggaaggcaggcagcggactccgccaatattatctgtccaagattgaagaactccagctgattgtgaatgataagagccaaaacctccggaggctgcaggcacagaggaacgaactaaatgctaaagttcgcctattgcgggaggagctacagctgctgcaggagcagggctcctatgtgggggaagtagtccgggccatggataagaagaaagtgttggtcaaggtacatcctgaaggtaaatttgttgtagacgtggacaaaaacattgacatcaatgatgtgacacccaattgccgggtggctctaaggaatgacagctacactctgcacaagatcctgcccaacaaggtagacccattagtgtcactgatgatggtggagaaagtaccagattcaacttatgagatgattggtggactggacaaacagatcaaggagatcaaagaagtgatcgagctgcctgttaagcatcctgagctcttcgaagcactgggcattgctcagcccaagggagtgctgctgtatggacctccaggcactgggaagacactgttggcccgggctgtggctcatcatacggactgtacctttattcgtgtctctggctctgaattggtacagaaattcataggggaaggggcaagaatggtgagggagctgtttgtcatggcacgggaacatgctccatctatcatcttcatggacgaaatcgactccatcggctcctcgcggctggaggggggttctggagggagcagtgaagtgcagcgccagatgctggagttgctcaaccagctcgacggctttgaggccaccaagaacatcaaggttatcatggctactaataggattgatatgctggactcggcactgcttcgcccagggcgcattgacagaaaaattgaattcccaccccccaatgaggaggcccggctggacattttgaagattcattctcggaagatgaacctgacccgggggatcaacctgagaaaaattgctgagctcatgccaggagcatcaggggctgaagtgaagggcgtgtgcacggaagctggcatgtatgccctgcgagaacggcgagtccatgtcactcaggaggactttgagatggcagtagccaaggtcatgcagaaggacagtgagaaaaacatgtccatcaagaaattatggaagtgagtggacagcctttgtgtgtatctctccaataaagctctgtgggccaagtc

SEQ ID NO: 935 - DNA, 3176 bp, Homo sapiens
tgaactgagcggcccctgagctgacagatacactgcgcagtggaacggcgagcgagccgacgggcgagtgaggggcgcacatgatcacctcggccgctggaattatttctcttctggatgaagatgaaccacagcttaaggaatttgcactacacaaattgaatgcagttgttaatgacttctgggcagaaatttccgagtccgtagacaaaatagaggttttatacgaagatgaaggtttccggagtcggcagtttgcagccttagtggcatctaaagtattttatcacctgggggcttttgaggagtctctgaattatgctcttggagcaagggacctcttcaatgtcaatgataactctgaatatgtggaaactattatagcaaaatgcattgatcactacaccaaacaatgtgtggaaaatgcagatttgcctgaaggagaaaaaaaaccaattgaccagagattggaaggcatcgtaaataaaatgttccagcgatgtctagatgatcacaagtataaacaggctattggcattgctctggagacacgaagactggacgtctttgaaaagaccatactggagtcgaatgatgtcccaggaatgttagcttatagccttaagctctgcatgtctttaatgcagaataaacagtttcggaataaagtactaagagttctagttaaaatctacatgaacttggagaaacctgatttcatcaatgtttgtcagtgcttaattttcttagatgatcctcaggctgtgagtgatatcttagagaaactggtaaaggaagacaacctcctgatggcatatcagatttgttttgatttgtatgaaagtgctagccagcagtttttgtcatctgtaatccagaatcttcgaactgttggcacccctattgcttctgtgcctggatccactaatacgggtactgttccgggatcagagaaagacagtgactcgatggaaacagaagaaaagacaagcagtgcatttgtaggaaagacaccagaagccagtccagagcctaaggaccagactttgaaaatgattaaaattttaagtggtgaaatggctattgagttacatctgcagttcttaatacgaaacaataatacagacctcatgattctaaaaaacacaaaggatgcagtacggaattctgtatgtcatactgcaaccgttatagcaaactcttttatgcactgtgggacaaccagtgaccagtttcttagagataatttggaatggttagccagagccactaactgggcaaaatttactgctacagccagtttgggtgtaattcataagggtcatgaaaaagaagcattacagttaatggcaacataccttcccaaggatacttctccaggatcagcctatcaggaaggtggaggtctctatgcactaggtcttattcatgccaatcatggtggtgatataattgactatctgcttaatcagcttaagaacgccagcaatgatatcgttagacacggtggcagtctgggccttggtttggcagccatgggaactgcacgtcaagatgtttatgatttgctaaaaacaaacctttatcaggatgatgcagtaacaggggaagcagctggcctggccctaggtttggttatgttgggctctaaaaatgctcaggctattgaggacatggttggttatgcacaagaaactcaacatgagaagattctgcgtggtcttgcagttggcatagctttagtaatgtatgggaggatggaagaggctgatgctctcattgaatctctctgtcgtgacaaggacccaattcttcgaaggtctggaatgtatactgtagccatggcttattgtggctctggtaacaacaaagcaattcgacgcctgctacatgtggctgtaagtgatgtgaatgatgatgtcaggagtgcagcagtagaatcacttgggttcattctattcagaacccctgaacagtgcccaagtgttgtctctttgttgtcagagagttacaaccctcatgtgcgctacggagctgcaatggccttggggatatgctgtgctggtacaggaaacaaggaagccattaatttgctagaaccaatgacaaacgaccccgtgaactacgtgaggcaaggggcactcatagcttcagctctcatcatgatccagcagactgaaatcacttgtccaaaggtgaatcagttcagacagctgtattccaaagtcatcaatgataagcatgatgatgtcatggccaagtttggcgctattctggcccagggcatactggatgcaggtggtcataatgtcacaatctccttgcagtccaggactgggcatactcatatgccttctgtggttggcgtccttgtatttacccagttttggttctggtttcctctttcacacttcctgtcattggcttatacccctacctgtgtcattggccttaacaaggacttaaagatgccgaaagttcagtataaatcgaactgtaaaccatccacatttgcatatcctgcccctctggaagtaccaaaagaaaaagaaaaggaaaaggtttctactgctgtattatctataactgccaaggctaaaaagaaggaaaaagaaaaggaaaaaaaggaggaggagaaaatggaagtggatgaggcagagaaaaaggaggaaaaagagaagaaaaaagaacctgagccaaacttccagttattggataacccagcccgagttatgcctgcccagcttaaggtcctaaccatgccggagacctgtagataccagcctttcaaaccactctctattggaggcatcatcattctgaaggataccagtgaagacattgaggagctggtggaacctgtggcagcacatggcccaaaaatcgaggaggaggaacaagagccagaacccccagaaccatttgagtatattgatgattaaggaccagaggatctcacttgcttatctgaagaagattgtccaggctcatattgggaatgcttatgaggaaattcatgccgagacctgctattcaatgcatgtatcgttgcctctgcactgacctgaagaaccctgtctccaagtctttggttgaagagaagatatatgactgttgagtgtgctctttcacagaacttggttttcaaataaatataagatctccagatggacaag

SEQ ID NO: 936 - DNA, 2966 bp, Homo sapiens
ggcacgaggatggaggagggaggccgggacaaggcgccggtgcagccccagcagtctccagcggcggcccccggcggcacggacgagaagccgagcggcaaggagcggcgggatgccggggacaaggacaaagaacaggagctgtctgaagaggataaacagcttcaagatgaactggagatgctcgtggaacgactaggggagaaggatacatccctgtatcgaccagcgctggaggaattgcgaaggcagattcgttcttctacaacttccatgacttcagtgcccaagcctctcaaatttctgcgtccacactatggcaaactgaaggaaatctatgagaacatggcccctggggagaataagcgttttgctgctgacatcatctccgttttggccatgaccatgagtggggagcgtgagtgcctcaagtatcggctagtgggctcccaggaggaattggcatcatggggtcatgagtatgtcaggcatctggcaggagaagtggctaaggagtggcaggagctggatgacgcagagaaggtccagcgggagcctctgctcactctggtgaaggaaatcgtcccctataacatggcccacaatgcagagcatgaggcttgcgacctgcttatggaaattgagcaggtggacatgctggagaaggacattgatgaaaatgcatatgcaaaggtctgcctttatctcaccagttgtgtgaattacgtgcctgagcctgagaactcagccctactgcgttgtgccctgggtgtgttccgaaagtttagccgcttccctgaagctctgagattggcattgatgctcaatgacatggagttggtagaagacatcttcacctcctgcaaggatgtggtagtacagaaacagatggcattcatgctaggccggcatggggtgttcctggagctgagtgaagatgtcgaggagtatgaggacctgacagagatcatgtccaatgtacagctcaacagcaacttcttggccttagctcgggagctggacatcatggagcccaaggtgcctgatgacatctacaaaacccacctagagaacaacaggtttgggggcagtggctctcaggtggactctgcccgcatgaacctggcctcctcttttgtgaatggctttgtgaatgcagcttttggccaagacaagctgctaacagatgatggcaacaaatggctttacaagaacaaggaccacggaatgttgagtgcagctgcatctcttgggatgattctgctgtgggatgtggatggtggcctcacccagattgacaagtacctgtactcctctgaggactacattaagtcaggagctcttcttgcctgtggcatagtgaactctggggtccggaatgagtgtgaccctgctctggcactgctctcagactatgttctccacaacagcaacaccatgagacttggttccatctttgggctaggcttggcttatgctggctcaaatcgtgaagatgtcctaacactgctgctgcctgtgatgggagattcaaagtccagcatggaggtggcaggtgtcacagctttagcctgtggaatgatagcagtagggtcctgcaatggagatgtaacttccactatccttcagaccatcatggagaagtcagagactgagctcaaggatacttatgctcgttggcttcctcttggactgggtctcaaccacctggggaagggtgaggccatcgaggcaatcctggctgcactggaggttgtgtcagagccattccgcagttttgccaacacactggtggatgtgtgtgcatatgcaggctctgggaatgtgctgaaggtgcagcagctgctccacatttgtagcgaacactttgactccaaagagaaggaggaagacaaagacaagaaggaaaagaaagacaaggacaagaaggaagcccctgctgacatgggagcacatcagggagtggctgttctggggattgcccttattgctatgggggaggagattggtgcagagatggcattacgaacctttggccacttgctgagatatggggagcctacactccggagggctgtacctttagcactggccctcatctctgtttcaaatccacgactcaacatcctggataccctaagcaaattctctcatgatgctgatccagaagtttcctattactccatttttgccatgggcatggtgggcagtggtaccaataatgcccgtctggctgcaatgctgcgccagttagctcaatatcatgccaaggacccaaacaacctcttcatggtgcgcttggcacagggcctgacacatttagggaagggcacccttaccctctgcccctaccacagcgaccggcagcttatgagccaggtggccgtggctggactgctcactgtgcttgtctctttcctggatgttcgaaacattattctaggcaaatcacactatgtattgtatgggctggtggctgccatgcagccccgaatgctggttacgtttgatgaggagctgcggccattgccagtgtctgtccgtgtgggccaggcagtggatgtggtgggccaggctggcaagccgaagactatcacagggttccagacgcatacaaccccagtgttgttggcccacggggaacgggcagaattggccactgaggagtttcttcctgttacccccattctggaaggttttgttatccttcggaagaaccccaattatgatctctaagtgaccaccaggggctctgaactgcagctgatgttatcagcaggccatgcatcctgctgccaagggtggacacggctgcagacttctgggggaattgtcgcctcctgctcttttgttactgagtgagataaggttgttcaataaagacttttatccccaaggtcaaaaaaaaaaaaaaaaaaaaaaaaaaaaaaaaaaaaaaaaaaaaaaaaaaaaaaaaaaaaaaaaaa

SEQ ID NO: 937 - DNA, 1313 bp, Homo sapiens
aattggaggagttgttgttaggccgtcccggagacccggtcgggagggaggaaggtggcaagatggtgttggaaagcactatggtgtgtgtggacaacagtgagtatatgcggaatggagacttcttacccaccaggctgcaggcccagcaggatgctgtcaacatagtttgtcattcaaagacccgcagcaaccctgagaacaacgtgggccttatcacactggctaatgactgtgaagtgctgaccacactcaccccagacactggccgtatcctgtccaagctacatactgtccaacccaagggcaagatcaccttctgcacgggcatccgcgtggcccatctggctctgaagcaccgacaaggcaagaatcacaagatgcgcatcattgcctttgtgggaagcccagtggaggacaatgagaaggatctggtgaaactggctaaacgcctcaagaaggagaaagtaaatgttgacattatcaattttggggaagaggaggtgaacacagaaaagctgacagcctttgtaaacacgttgaatggcaaagatggaaccggttctcatctggtgacagtgcctcctgggcccagtttggctgatgctctcatcagttctccgattttggctggtgaaggtggtgccatgctgggtcttggtgccagtgactttgaatttggagtagatcccagtgctgatcctgagctggccttggcccttcgtgtatctatggaagagcagcggcagcggcaggaggaggaggcccggcgggcagctgcagcttctgctgctgaggccgggattgctacgactgggactgaagactcagacgatgccctgctgaagatgaccatcagccagcaagagtttggccgcactgggcttcctgacctaagcagtatgactgaggaagagcagattgcttatgccatgcagatgtccctgcagggagcagagtttggccaggcggaatcagcagacattgatgccagctcagctatggacacatctgagccagccaaggaggaggatgattacgacgtgatgcaggaccccgagttccttcagagtgtcctagagaacctcccaggtgtggatcccaacaatgaagccattcgaaatgctatgggctccctggcctcccaggccaccaaggacggcaagaaggacaagaaggaggaagacaagaagtgagactggagggaaagggtagctgagtctgcttaggggactgcatgggaagcacggaatatagggttagatgtgtgttatctgtaaccattacagcctaaataaagcttggcaactttt

SEQ ID NO: 938 - DNA, 1602 bp, Homo sapiens
ggaaaaagggtaccggtgaccgctactgctgccggtgtttgcgtgtggcagggagccagtcctggcgagcggggtgtgtcgcgatgccggagctggcagtgcagaaggtggtggtccaccccctggtgctgctcagtgtggtggatcatttcaaccgaatcgtcaaggttggaaaccagaagcgtgtagttggtgtgcttttggggtcatggcaaaagaaagtacttgatgtatcgaacagttttgcagttccttttgatgaagatgacaaagacgattctgtatggtttttagaccatgattatttggaaaacatgtatggaatgtttaagaaagtcaatgccagggaaagaatagttggctggtaccacacaggccctaaactacacaagaatgacattgccatcaacgaactcatgaaaagatactgtcctaattccgtattggtcatcattgatgtgaagccgaaggacctagggctgcctacagaagcgtacatttcagtggaagaagaccaagatgatggaactccaacctcgaaaacatttgaacacgtgaccagtgaaattggagcagaggaagctgaggaagttggagttgaacacttgttacgagatatcaaagacacgacggtgggcactctgtcccagcggatcacaaaccaggtccatggtttgaagggactgaactccaagcttctggatatcaggagctacctggaaaaagtcggcacaggcaagctgcccatcaaccaccagatcatctaccagctgcaggacgtcttcaacctgctgccagatgtcagcctgcaggagttcgtcaaggccttttacctgaagaccaatgaccagatggtggtagtgtacttggcctcgctgatccgttccgtggtcgccctgcacaacctcatcaacaacaagattgccaaccgggatgcagagaagaaagaagggcaggagaaagaagagagcaaaaaggataggaaagaggacaaggagaaagataaagataaggaaaagagtgatgtaaagaaagaggagaaaaaggagaaaaagtaaaacatgtattaaatagcttttttactttgtaaattaaaatcttacaaactaaatcagtgtgctgctagagggttctttttcacttgacatgcttattagaaagctgacccaacaagagctctctgcctccggtcactcttgctgtggtgctacgtggaagtgaatggagactgatctcaaatctgaactgcagctttccctcctgtgagttggggaaatgatagtcaactcagccttcagattgtatgagaaaaatgaagagaagccaccaaatattttggtactcttcattcatttatctctaaaaccaggagttgaattttcctcatcttgaaagactcttggggtctgtttctggtattttacaaaattgctaagtggaatgcatgaattgcattatgttctctggtaacacgtagagttcagacccttctgaactctgttgataataccacaccatgttctggacccatagctctggcatcctcaggggttgtgatccagctccatatattgtttaccttcaaagatacaattaaataac

SEQ ID NO: 939 - DNA, 928 bp, Homo sapiens
cggggcggcaggcttctcgagctccgggcccgcggcaacctcgggcgctgttctgcaggccgcgaccggcatgtacgagcaactcaagggcgagtggaaccgtaaaagccccaatcttagcaagtgcggggaagagctgggtcgactcaagctagttcttctggagctcaacttcttgccaaccacagggaccaagctgaccaaacagcagctaattctggcccgtgacatactggagatcggggcccaatggagcatcctacgcaaggacatcccctccttcgagcgctacatggcccagctcaaatgctactactttgattacaaggagcagctccccgagtcagcctatatgcaccagctcttgggcctcaacctcctcttcctgctgtcccagaaccgggtggctgagttccacacggagttggagcggctgcctgccaaggacatacagaccaatgtctacatcaagcacccagtgtccctggagcaatacctgatggagggcagctacaacaaagtgttcctggccaagggtaacatccccgccgagagctacaccttcttcattgacatcctgctcgacactatcagggatgagatcgctgggtgcatcgagaaggcctacgagaaaatccttttcactgaggccacccggatcctcttcttcaacacacccaaaaagatgacagactacgccaagaagcgagggtgggtcctgggccccaacaactactacagttttgccagccagcagcagaagccggaagacaccaccattccctccacagaactggccaaacaggtcatcgagtatgcccggcagctggagatgatcgtctgagccccccgggcactgggtggggcagggcacgagttatttaaaacagttacactgcagggtttcgcccaataaaggtggactgac

SEQ ID NO: 940 - DNA, 2338 bp, Homo sapiens
ggcacgaggcatgggcggagccgtagttacggtcgactggggcgtcgtccctagcccgggagccgggtctctggagtcgcggcccggggttcacgatgtccgacgaggaagcgaggcagagcggaggctcctcgcaggccggcgtcgtgactgtcagcgacgtccaggagctgatgcggcgcaaggaggagatagaagcgcagatcaaggccaactatgacgtgctggaaagccaaaaaggcattgggatgaacgagccgctggtggactgtgagggctacccccggtcagacgtggacctgtaccaagtccgcaccgccaggcacaacatcatatgcctgcagaatgatcacaaggcagtgatgaagcaggtggaggaggccctgcaccagctgcacgctcgcgacaaggagaagcaggcccgggacatggctgaggcccacaaagaggccatgagccgcaaactgggtcagagtgagagccagggccctccacgggccttcgccaaagtgaacagcatcagccccggctccccagccagcatcgcgggtctgcaagtggatgatgagattgtggagttcggctctgtgaacacccagaacttccagtcactgcataacattggcagtgtggtgcagcacagtgaggggaagcccctgaatgtgacagtgatccgcaggggggaaaaacaccagcttagacttgttccaacacgctgggcaggaaaaggactgctgggctgcaacattattcctctgcaaagatgattgtccctggggaacagtaacaggaaagcatcttcccttgccctggacttgggtctagggatttccaacttgtcttctctccctgaagcataaggatctggaagaggcttgtaacctgaacttctgtgtggtggcagtactgtggcccaccagtgtaatctccctggattaaggcattcttaaaaacttaggcttggcctctttcacaaattaggccacggccctaaataggaattccctggattgtgggcaagtgggcggaagttattctggcaggtactggtgtgattattattattatttttaataaagagttttacagtgctgatatgaccctgttgtcaccccagctgaatttcttatgaccctcccaaaccaaagctcagatggggtcagaagagcttcatagaaagttgggcaaaacaggctagcaattgcaaagtcaggctttgaccaacatatttctttgcactgaggccttgctgctgtggatacggaaatggttaagtactgtgcttcctcagcagctgggctgtcagggccatagtagctccctttggagaacagggaaagcctggaggcttcccaggtggcccagcgtggtgtcctgtcagcttcctctttaggaacccaccagagggcagcaagctcctttcacttcgctagtaagaacccctccgtttttgtgtgtttttgtttttgttttctggagacaaggtcttgctttgtcacccaggctggagtgcagtgtcgtgatcaaggttcactgaagccttgacgctgtgggcactgcctcagccgcccaagtatctgggaccacaggcgtgcaccaccatgcatagctaatttattttttgtagagacagggtctccctgtgttgaccaggttggtctcgaactcctgggctcaagcagtcctcctgccttggcctcctaaagtgctgggatcacaggcgtgagccactgcgcccagcccactgctagtttgactttttataattgaacctcctggctatgccctgagatcagcgctattttgtaaaccgctgaggtatggataggaacgagtagatcagacctcttgaaaatgcttattcttcctcccttttattttttgtctcttttaagatggtaaaatggttctcagggattcctgccaatactttgaattattttttcctctccatggtatcagtgttcatttccccagttcttgcacaccgctttctgttttggcagttctgccaggcaagccctgtgttccttgggactggttttgctgtggttggatacagataccagcttgccttgatgggattggtattgctgtgtgcttccagccacaggttctcacactcaattccaaagccttcctattgggcgaattccctcaaactctatttgacctgacagccatacgtattcccctctggtagccacagacatgctgtgtttaccaatgtttgctgtttaaattgcatgttctaattccacgtattttccagtctcttttataaagtctcagactataataaacacagcttgcccagttaaaaaaaaaaaaaaaaaaa

SEQ ID NO: 941 - DNA, 1544 bp, Homo sapiens
attggtgaagctctaacggctgttttgactggcgtagccggagccggcgacgtgaggcgggcgttgctcgcgcgacaagtagttgctgggacagcgaaatggaggggtgtgtgtctaacctaatggtctgcaacctggcctacagcgggaagctggaagagttgaaggagagtattctggccgataaatccctggctactagaactgaccaggacagcagaactgcattgcactgggcatgctcagctggacatacagaaattgttgaatttttgttgcaacttggagtgccagtgaatgataaagacgatgcaggttggtctcctcttcatattgcggcttctgctggccgggatgagattgtaaaagcccttctgggaaaaggtgctcaagtgaatgctgtcaatcaaaatggctgtactcccttacattatgcagcttcgaaaaacaggcatgagatcgctgtcatgttactggaaggcggggctaatccagatgctaaggaccattatgaggctacagcaatgcaccgggcagcagccaagggtaacttgaagatgattcatatccttctgtactacaaagcatccacaaacatccaagacactgagggtaacactcctctacacttagcctgtgatgaggagagagtggaagaagcaaaactgctggtgtcccaaggagcaagtatttacattgagaataaagaagaaaagacacccctgcaagtggccaaaggtggcctgggtttaatactcaagagaatggtggaaggttaaacagcttggatttattcttactttgtatgttgtgttgttgtccccagtgtcctacaaactaatgtatttgtgcacaagacatcatctatgaatgatgaagttttctcaccttcaaagtcttataaacatgttgactcttgttcctgctgagttacttgttcgaagcttacagcttgttttccaggcatcgaataactgttgagattgttctactgttgtcgtatattcttctatattgaattctggttaatttggagtaactaattctgtggctgttgtgagtcttcagcaccctcccatgtaccttatatccctctctgaaacagaacagctccaatagcaacaagctagttgttctgccagatgtttctatgtggattctgtaatgttcctccatacagttaaaacatcctaacttgtttttcaagctcactcaggcctacgccaaacgtttctgttttttttaaccatgaggtttaatttatttttgtgataggagggatatttacatattttagtggaccacattttaagttggatggtgtgctctaaaatactgaaaaacaatagcccatatacctatgtatttgtttttgatgggttgtttactctgaaataaaatgtatggttttcttaaaaggaagttttaaagtacctattttgtgtcatcctgtattgaaaagaatgtcaagcttgttaaaatgacatgtaacaaaaatgtattttgatttgtatttcagaaactaaaaaataaaatgttgaaag

SEQ ID NO: 942 - DNA, 3548 bp, Homo sapiens
tggccgaagcagggggacagcaagggacgctcaggcggggaccatggcggacggcggctcggagcgggctgacgggcgcatcgtcaagatggaggtggactacagcgccacggtggatcagcgcctacccgagtgtgcgaagctagccaaggaaggaagacttcaagaagtcattgaaacccttctctctctggaaaagcagactcgtactgcttccgatatggtatcgacatcccgtatcttagttgcagtagtgaagatgtgctatgaggctaaagaatgggatttacttaatgaaaatattatgcttttgtccaaaaggcggagtcagttaaaacaagctgttgccaaaatggttcaacagtgctgtacttatgttgaggaaatcacagaccttcctatcaaacttcgattaattgatactctacgaatggttaccgaaggcaagatttatgttgaaattgagcgtgcgcgactgactaaaacattagcaactataaaagaacaaaatggtgatgtgaaagaggcagcctccattttacaggagttacaggtggaaacctacgggtcaatggaaaagaaagagcgagtggaatttattttggagcaaatgaggctctgcctagctgtgaaggattacattcgaacacaaatcatcagcaagaaaattaacaccaaatttttccaggaagaaaatacagagaaattaaagttgaagtactataatttaatgattcagctggatcaacatgagggatcctatttgtctatttgtaagcactacagagcaatatatgatactccctgtatacaggcagaaagtgaaaaatggcagcaggctctgaagagtgttgtactctatgttatcctggctccttttgacaatgaacagtcagatttggttcaccgaataagtggtgacaagaagttagaagaaattcccaaatacaaggatcttttaaagctttttaccacaatggagttgatgcgttggtccacacttgttgaggactatggaatggaattaagaaaaggttcccttgagagtcctgcaacggatgtttttggttctacagaggaaggtgaaaaaaggtggaaagacttgaagaacagagttgttgaacataatattagaataatggccaagtattatactcggataacaatgaaaaggatggcacagcttctggatctatctgttgatgagtccgaagcctttctctcaaatctagtagttaacaagaccatctttgctaaagtagacagattagcaggaattatcaacttccagagacccaaggatccaaataatttattaaatgactggtctcagaaactgaactcattaatgtctctggttaacaaaactacgcatctcatagccaaagaggagatgatacataatctacaataagggtcttagtgctttagaaaaaagttaaaattggaagtcattaaaaaaagactgttataatggtgtatatgttggggttttttttctaagcttctttgtcttaaattttaaaatagtgaatatgtttgagactccctttgacctttcagttccccaagttcattgttaactttgcatttgcaattggtgcaaaaatacagatttctgtcgtctgaatacacaaaaagttgtgtcataacttacccagatatgtttttctatcatttgaaacctttttagctactgtttgttttcattcaactaacaaacatattccaataataaaagcagtatatacatatttcctttctacagttacctctgattctcaacattttgtggggtagtgatttggcaagtgttttttaaataaaacaaatctcattgtaaagttatcagtcatttagtagaatagaaaagcaacatagagcatacaagaacatttgggatagagttgtgatttgtgaagaatttgtactttgatattgtggcggaaagtctagactgagtgtgtatgctggtaaactgtagacttttttttttttttttgagtccggctggttccaatcacagtagcttgattgctttcagccctcatcctctcacttgatcagttgttcaacagaatcagctgacataattgacacagtttattgggtgttaagtccgctctatagggatagtgactacttttttttttttttttttttttgctcttcttcctctcccctttctttatatgggtttaaatttaacataaagttgtttttataaggcttatttgtggctttaacttgtaagtctgattacatcattattgttccaaattcattatctctgtaggaacttttagttccattatatgaacactggataacctaattttttttaatgctttaaaaaaatggcaaaaagacgtcaggccaccctcatagtaagtggtgtagtattaaaatattttcacggaattaaaagtagcttgctgtcaaagaaacacctgagatgaattggtgtgaacgaattttgcaagtttaatttgatttatttcagagaaaatagaaaaaacaatgttagaaggttatttaaaatgatacttaaataaagaaagtgtgaggtctactttaaaaaaattcaaatgaagagaaaaagaaaaacagcattctagaaatggcatttctcctaattaattttccacttaatggaagattatcaattgtcctattttatgatcccaggactgaagacagttgtgggatatctgtcatatttatcctgtgagtcattgtgaataatgacatacagtactgaagtaatctgattttattctttggaaattcaatgcattggtcacactaataacatcaacatctgctatcacttatctttttaaaactaaccaaaaaaggctgggattacaggcatgagccactgcacccaactcctctttcgtctttctttaacacacactaggctctttgtgtattatgattcagtgctatttgtaactgtgtcccagtgaccaaattgcactcgactcgatcagctgttcatccatttcgtgttttttcctgtcaaacattaatccagcaaatatatgaggtatttaccaatttattttcttagtattacaaaataattcattagcataaagtacaatagtgaaatatttgagttgttcggaacctcaattaatcctgttttacatttcagacctaaagctggcaatcaggagaagaagcactttgttttaaatgtggagaagataacacttgattccatttcattgtcattagtgtattaaccagcaggagaggtgatgagccatttttcaaatgaaataccttttatttccatataatttttttattttagagttcaatagctgtttctatgattatcctcaatttccatatgttactgaatctgaaaaacatctttaaaattcaaacagttccattttctctcttgtaagtgttaaatgtgataaaagtacatattttaaattgttttcagctcttggatatagcagcaataaaaacactaatttgtgggtatttaagaaaacctggagaataaactcatactttaaaagatc

SEQ ID NO: 943 - DNA, 1584 bp, Homo sapiens
tttccggcagccatccccgcggtgctgacatcccggttgttcttctgtgccgggggtcttcctgctgtcatgaaggacgtaccgggcttcctacagcagagccagaactccgggcccgggcagcccgctgtgtggcaccgtctggaggagctctacacgaagaagttgtggcatcagctgacacttcaggtgcttgattttgtgcaggatccgtgctttgcccaaggagatggtctcattaagctttatgaaaactttatcagtgaatttgaacacagggtgaaccctttgtccctcgtggaaatcattcttcatgtagttagacagatgactgatcctaatgtggctcttacttttctggaaaagactcgtgagaaggtgaaaagtagtgatgaggcagtgatcctgtgtaaaacagcaattggagctctaaaattaaacatcggggacctacaggttacaaaggaaacaattgaagatgttgaagaaatgctcaacaaccttcctggtgtgacatcggttcacagtcgtttctatgatctctccagtaaatactatcaaacaatcggaaaccacgcgtcctactacaaagatgctctgcggtttttgggctgtgttgacatcaaggatctaccagtgtctgagcagcaggagagagccttcacgctggggctagcaggacttctcggcgagggagtttttaactttggagaactcctcatgcaccctgtgctggagtccctgaggaatactgaccggcagtggctgattgacaccctctatgccttcaacagtggcaacgtagagcggttccagactctgaagactgcctggggccagcagcctgatttagcagctaatgaagcccagcttctgaggaaaattcagttgttgtgcctcatggagatgactttcacacgacctgccaatcacagacaactcacttttgaagaaattgccaaaagtgctaaaatcacagtgaatgaggtggagcttctggtgatgaaggccctttcggtggggctggtgaaaggcagtatagacgaggtggacaaacgagtccacatgacctgggtgcagccccgagtgttggatttgcaacagatcaagggaatgaaggaccgcctggagttctggtgcacggatgtgaagagcatggagatgctggtggagcaccaggcccatgacatcctcacctagggccccctggttccccgtcgtgtctcctttgactcacctgagagaggcgtttgcagccaatgaagctggctgctcagacggtcgacattgaatttgggtgggggttgggatcctgtctgaagtacagactgttcttgctctaaaaacaggactgtccctgatgggagccaggccacagggaggaggcttctttgtgggtctctcctgcagagggtgggggtctcagggtcttaggtgatacgggagagaaagaacgtgccaggcaggaggccccctgaagtctgtgtactccgaggtggatctccatccccatccacctgtacggacatcttttccgttgcggtttgagaatgttcctataataaacccctctgctttgttaac

SEQ ID NO: 944 - DNA, 3322 bp, Homo sapiens
cttgtgagtctataactcggagccgttgggtcggttcctgctattccggcgcctccactccgtcccccgcgggtctgctctgtgtgccatggacggcattgtcccagatatagccgttggtacaaagcggggatctgacgagcttttctctacttgtgtcactaacggaccgtttatcatgagcagcaactcggcttctgcagcaaacggaaatgacagcaagaagttcaaaggtgacagccgaagtgcaggcgtcccctctagagtgatccacatccggaagctccccatcgacgtcacggagggggaagtcatctccctggggctgccctttgggaaggtcaccaacctcctgatgctgaaggggaaaaaccaggccttcatcgagatgaacacggaggaggctgccaacaccatggtgaactactacacctcggtgacccctgtgctgcgcggccagcccatctacatccagttctccaaccacaaggagctgaagaccgacagctctcccaaccaggcgcgggcccaggcggccctgcaggcggtgaactcggtccagtcggggaacctggccttggctgcctcggcggcggccgtggacgcagggatggcgatggccgggcagagccccgtgctcaggatcatcgtggagaacctcttctaccctgtgaccctggatgtgctgcaccagattttctccaagttcggcacagtgttgaagatcatcaccttcaccaagaacaaccagttccaggccctgctgcagtatgcggaccccgtgagcgcccagcacgccaagctgtcgctggacgggcagaacatctacaacgcctgctgcacgctgcgcatcgacttttccaagctcaccagcctcaacgtcaagtacaacaatgacaagagccgtgactacacacgcccagacctgccttccggggacagccagccctcgctggaccagaccatggccgcggccttcggtgcacctggtataatctcagcctctccgtatgcaggagctggtttccctcccacctttgccattcctcaagctgcaggcctttccgttccgaacgtccacggcgccctggcccccctggccatcccctcggcggcggcggcagctgcggcggcaggtcggatcgccatcccgggcctggcgggggcaggaaattctgtattgctggtcagcaacctcaacccagagagagtcacaccccaaagcctctttattcttttcggcgtctacggtgacgtgcagcgcgtgaagatcctgttcaataagaaggagaacgccctagtgcagatggcggacggcaaccaggcccagctggccatgagccacctgaacgggcacaagctgcacgggaagcccatccgcatcacgctctcgaagcaccagaacgtgcagctgccccgcgagggccaggaggaccagggcctgaccaaggactacggcaactcacccctgcaccgcttcaagaagccgggctccaagaacttccagaacatattcccgccctcggccacgctgcacctctccaacatcccgccctcagtctccgaggaggatctcaaggtcctgttttccagcaatgggggcgtcgtcaaaggattcaagttcttccagaaggaccgcaagatggcactgatccagatgggctccgtggaggaggcggtccaggccctcattgacctgcacaaccacgacctcggggagaaccaccacctgcgggtctccttctccaagtccaccatctaggggcacaggcccccacggccgggccccctggcgacaacttccatcattccagagaaaagccactttaaaaacagctgaagtgaccttagcagaccagagattttatttttttaaagagaaatcagtttacctgtttttaaaaaaattaaatctagttcaccttgctcaccctgcggtgacagggacagctcaggctcttggtgactgtggcagcgggagttcccggccctccacacccggggccagaccctcggggccatgccttggtggggcctgtgtcgggcgtggggcctgcaggtgggcgccccgaccacgacttggcttccttgtgccttaaaaaacctgccttcctgcagccacacacccacccggggtgtcctggggacccaaggggtgggggggtcacaccagagagaggcagggggcctggccggctcctgcaggatcatgcagctggggcgcggcggccgcggctgcgacaccccaaccccagccctctaatcaagtcacgtgattctcccttcaccccgcccccagggccttcccttctgcccccaggcgggctccccgctgctccagctgcggagctggtcgacataatctctgtattatatactttgcagttgcagacgtctgtgcctagcaatatttccagttgaccaaatattctaatcttttttcatttatatgcaaaagaaatagttttaagtaactttttatagcaagatgatacaatggtatgagtgtaatctaaacttccttgtggtattaccttgtatgctgttacttttattttattccttgtaattaagtcacaggcaggacccagtttccagagagcaggcggggccgcccagtgggtcaggcacagggagccccggtcctatcttagagcccctgagcttcagggaaggggcgggcgtgtcgccgcctctggcatcgcctccggttgccttacaccacgccttcacctgcagtcgcctagaaaacttgctctcaaacttcagggttttttcttccttcaaattttggaccaaagtctcatttctgtgttttgcctgcctctgatgctgggacccggaaggcgggcgctcctcctgtcttctctgtgctctttctaccgcccccgcgtcctgtcccgggggctctcctaggatcccctttccgtaaaagcgtgtaacaagggtgtaaatatttataattttttatacctgttgtgagacccgaggggcggcggcgcggttttttatggtgacacaaatgtatattttgctaacagcaattccaggctcagtattgtgaccgcggagccacaggggaccccacgcacattccgttgccttacccgatggcttgtgacgcggagagaaccgattaaaaccgtttgagaaactcctcccttgtctagccctgtgttcgctgtggacgctgtagaggcaggttggccagtctgtacctggacttcgaataaatcttctgtatcctcgctccgttccgccttaaaaaaaaaaaaaaaaaaaaaaaaaaaaaaaaaaaaaaaaaaaaaaaaaaaaaaaaaaa

SEQ ID NO: 945 - DNA, 1147 bp, Homo sapiens
ctttgcattgttcctcatccgcctccttgctcgccgcagccgcctccgccgcgcgcctcctccgccgccgcggactccggcagctttatcgccagagtccctgaactctcgctttctttttaatccccttcatcggatcaccggcgtgccccaccatgtcagacgcagccgtagacaccagctccgaaatcaccaccaaggacttaaaggagaagaaggaagttgtggaagaggcagaaaatggaagagacgcccctgctaacgggaatgctaatgaggaaaatggggagcaggaggctgacaatgaggtagacgaagaagaggaagaaggtggggaggaagaggaggaggaagaagaaggtgatggtgaggaagaggatggagatgaagatgaggaagctgagtcagctacgggcaagcgggcagctgaagatgatgaggatgacgatgtcgataccaagaagcagaagaccgacgaggatgactagacagcaaaaaaggaaaagttaaactaaaaaaaaaaaggccgccgtgacctattcaccctccacttcccgtctcagaatctaaacgttggtcaccttcgagtagagaggcccgcccgcccaccgtgggcagtgccacccgcagatgacacgcgctctccaccacccaacccaaaccatgagaatttgcaacaggggaggaaaaaagaaccaaaacttccaaggccctcctttttttcttaaaagtactttaaaaaggaaatttgtttgtattttttatttacattttatatttttgtacatattgttagggtcagccatttttaatgatctcggatgaccaaaccagccttcggagcgttctctgtcctacttctgactttacttgtggtgtgacatgttcattataatctcaaaggagaaaaaaaacctgtaaaaaaagcaaaaatgacaacagaaaaacaatcttattccgagcattccagtaactgttttgtgtatgtacttagctgtactataagtagttggtttgtatgagatggttaaaaaggccaaagataaaaggtttctttttttttccttttttgctatgaagttgctgtttattttttttggcctgttttgatgtatgtgtgaaacaatgttgtccaacaataaacagg

SEQ ID NO: 946 - DNA, 3314 bp, Homo sapiens
ggaggcaggcggtgccgcggcgccgggacccgactcatccggtgcttgcgtgtggtggtgagcgcagcgccgaggatgaggaggtgcaacagcggctccgggccgccgccgtcgctgctgctgctgctgctgtggctgctcgcggttcccggcgctaacgcggccccgcggtcggcgctctattcgccttccgacccgctgacgctgctgcaggcggacacggtgcgcggcgcggtgctgggctcccgcagcgcctgggccgtggagttcttcgcctcctggtgcggccactgcatcgccttcgccccgacgtggaaggcgctggccgaagacgtcaaagcctggaggccggccctgtatctcgccgccctggactgtgctgaggagaccaacagtgcagtctgcagagacttcaacatccctggcttcccgactgtgaggttcttcaaggcctttaccaagaacggctcgggagcagtatttccagtggctggtgctgacgtgcagacgctgcgggagaggctcattgacgccctggagtcccatcatgacacgtggcccccagcctgtcccccactggagcctgccaagctggaggagattgatggattctttgcgagaaataacgaagagtacctggctctgatctttgaaaagggaggctcctacctgggtagagaggtggctctggacctgtcccagcacaaaggcgtggcggtgcgcagggtgctgaacacagaggccaatgtggtgagaaagtttggtgtcaccgacttcccctcttgctacctgctgttccggaatggctctgtctcccgagtccccgtgctcatggaatccaggtccttctataccgcttacctgcagagactctctgggctcaccagggaggctgcccagaccacagttgcaccaaccactgctaacaagatagctcccactgtttggaaattggcagatcgctccaagatctacatggctgacctggaatctgcactgcactacatcctgcggatagaagtgggcaggttcccggtcctggaagggcagcgcctggtggccctgaaaaagtttgtggcagtgctggccaagtatttccctggccggcccttagtccagaacttcctgcactccgtgaatgaatggctcaagaggcagaagagaaataaaattccctacagtttctttaaaactgccctggacgacaggaaagagggtgccgttcttgccaagaaggtgaactggattggctgccaggggagtgagccgcatttccggggctttccctgctccctgtgggtcctcttccacttcttgactgtgcaggcagctcggcaaaatgtagaccactcacaggaagcagccaaggccaaggaggtcctcccagccatccgaggctacgtgcactacttcttcggctgccgagactgcgctagccacttcgagcagatggctgctgcctccatgcaccgggtggggagtcccaacgccgctgtcctctggctctggtctagccacaacagggtcaatgctcgccttgcaggtgcccccagcgaggacccccagttccccaaggtgcagtggccaccccgtgaactttgttctgcctgccacaatgaacgcctggatgtgcccgtgtgggacgtggaagccaccctcaacttcctcaaggcccacttctccccaagcaacatcatcctggacttccctgcagctgggtcagctgcccggagggatgtgcagaatgtggcagccgccccagagctggcgatgggagccctggagctggaaagccggaattcaactctggaccctgggaagcctgagatgatgaagtcccccacaaacaccaccccacatgtgccggctgagggacctgaggcaagtcgacccccgaagctgcaccctggcctcagagctgcaccaggccaggagcctcctgagcacatggcagagcttcagaggaatgagcaggagcagccgcttgggcagtggcacttgagcaagcgagacacaggggctgcattgctggctgagtccagggctgagaagaaccgcctctggggccctttggaggtcaggcgcgtgggccgcagctccaagcagctggtcgacatccctgagggccagctggaggcccgagctggacggggccgaggccagtggctgcaggtgctgggagggggcttctcttacctggacatcagcctctgtgtggggctctattccctgtccttcatgggcctgctggccatgtacacctacttccaggccaagataagggccctgaagggccatgctggccaccctgcagcctgaaccacctggggaggaggcgggagagggagctgccatctctaggcacctcaagccccctgaccccattccctcccctcccaccccttgctccttgtctggcctagaagtgtgggaaattcaggaaaacgagttgctccagtgaagcttcttggggttgctaggacagagagctcctttgacacaaaagacaggagcagggtccaggttcccctgctgtgcagggagggcagccccgggcagtgggcatagggcagctcagtccctggcctcttagcaccacattcctgtttttcagcttatttgaagtcctgcctcattctcactggagcctcagtctctcctgcttggtcttggccctcaactggggcaagtgaagccagaggagggtcccccagctgggtgggctggaatggaactcctcactagctgctggggctccgcccaccctgctcccttccggacaatgaagaagcctttgcaccctgggaggaaggaccaccccgggccctctatgcctggccagcctccagctcctcagacctcctgggtggggtttggcttcagggtggggtttggaagcttctggaagtcgtgctggtctcccaggtgaggcaagccatggttgctgggctgtagggtgagtggcttgcttggtgggacctgacgagttggtggcatgggaaggatgtgggtctctagtgccttgccctggcttagctgcaggagaagatggctgctttcacttccccccattgagctctgctccctctgagcctggtcttttgtccttttttattttggtctccaagatgaatgctcatctttggagggtgccaggtagaagctagggaggggagtgtcttctctctccaggtttcaccttccagtgtgcagaagttagaagggtctggcgggggcagtgccttacacatgcttgattcccacgctaccccctgccttgggaggtgtgtggaataaattatttttgttaaggc

SEQ ID NO: 947 - DNA, 3643 bp, Homo sapiens
ggagtatgagtcacgctcaggggagcaggtaccccttctcctaaagatgaagaggagcaaactggcactaagcaaggccatcgagagcggggacactgacctggtgttcacggtgttgctgcacctgaagaacgagctgaaccgaggagattttttcatgacccttcggaatcagcccatggccctcagtttgtaccgacagttctgtaagcatcaggagctagagacgctgaaggacctttacaatcaggatgacaatcaccaggaattgggcagcttccacatccgagccagctatgctgcagaagagcgtattgaggggcgagtagcagctctgcagacagccgccgatgccttctacaaggccaagaatgagtttgcagccaaggctacagaggatcaaatgcggctcctacggctgcagcggcgcctagaagacgagctggggggccagttcctagacctgtctctacatgacacagttaccaccctcattcttggcggtcacaacaagcgtgcagagcagctggcacgtgacttccgcatccctgacaagaggtgacacaactaaaaaaaaacaaaggtatttatggaattccactgagtggtaatggatgatgcagttcaaataactaaggacacatgttcaaagagcataattaactttttaaaagaagctaataagcatggattcctggttcattcttgttctgctcggcagtggtctgatatgtgtcagtgccaacaatgctaccacagttgcaccttctgtaggaattacaagattaattaactcatcaacggcagaaccagttaaagaagaggccaaaacttcaaatccaacttcttcactaacttctctttctgtggcaccaacattcagcccaaatataactctgggacccacctatttaaccactgtcaattcttcagactctgacaatgggaccacaagaacagcaagcaccaattctataggcattacaatttcaccaaatggaacgtggcttccagataaccagttcacggatgccagaacagaaccctgggaggggaattccagcaccgcagcaaccactccagaaactttccctccttcaggtaattctgactcgaaggacagaagagatgagacaccaattattgcggtgatggtggccctgtcctctctgctagtgatcgtgtttattatcatagttttgtacatgttaaggtttaagaaatacaagcaagctgggagccattccaattctttccgcttatccaacggccgcactgaggatgtggagccccagagtgtgccacttctggccagatccccaagcaccaacaggaaatacccacccctgcccgtggacaagctggaagaggaaattaaccggagaatggcagacgacaataagctcttcagggaggaattcaacgctctccctgcatgtcctatccaggccacctgtgaggctgcttccaaggaggaaaacaaggaaaaaaatcgatatgtaaacatcttgccttatgaccactctagagtccacctgacaccggttgaaggggttccagattctgattacatcaatgcttcattcatcaacggttaccaagaaaagaacaaattcattgctgcacaaggaccaaaagaagaaacggtgaatgatttctggcggatgatctgggaacaaaacacagccaccatcgtcatggttaccaacctgaaggagagaaaggagtgcaagtgcgcccagtactggccagaccaaggctgctggacctatgggaatattcgggtgtctgtagaggatgtgactgtcctggtggactacacagtacggaagttctgcatccagcaggtgggcgacatgaccaacagaaagccacagcgcctcatcactcagttccactttaccagctggccagactttggggtgccttttaccccgatcggcatgctcaagttcctcaagaaggtgaaggcctgtaaccctcagtatgcaggggccatcgtggtccactgcagtgcaggtgtagggcgtacaggtacctttgtcgtcattgatgccatgctggacatgatgcatacagaacggaaggtggacgtgtatggctttgtgagccggatccgggcacagcgctgccagatggtgcaaaccgatatgcagtatgtcttcatataccaagcccttctggagcattatctctatggagatacagaactggaagtgacctctctagaaacccacctgcagaaaatttacaacaaaatcccagggaccagcaacaatggattagaggaggagtttaagaagttaacatcaatcaaaatccagaatgacaagatgcggactggaaaccttccagccaacatgaagaagaaccgtgttttacagatcattccatatgaattcaacagagtgatcattccagttaagcggggcgaagagaatacagactatgtgaacgcatcctttattgatggctaccggcagaaggactcctatatcgccagccagggccctcttctccacacaattgaggacttctggcgaatgatctgggagtggaaatcctgctctatcgtgatgctaacagaactggaggagagaggccaggagaagtgtgcccagtactggccatctgatggactggtgtcctatggagatattacagtggaactgaagaaggaggaggaatgtgagagctacaccgtccgagacctcctggtcaccaacaccagggagaataagagccggcagatccggcagttccacttccatggctggcctgaagtgggcatccccagtgacggaaagggcatgatcagcatcatcgccgccgtgcagaagcagcagcagcagtcagggaaccaccccatcaccgtgcactgcagcgccggggcaggaaggacggggaccttctgtgccctgagcaccgtcctggagcgtgtgaaagcagaggggattttggatgtcttccagactgtcaagagcctgcggctacagaggccacacatggtccagacactggaacagtatgagttctgctacaaggtggtgcaggagtatattgatgcattctcagattatgccaacttcaagtaagcggcaacaagggtccgtggaccaggaggattgcctttaatattttgtaatattctgttttgttaatataccccaaattgtgtatatatcttataactgttttagaaattggtacataggcttctattacctattaggtggaaattttatatgtaaatgtgttagcactgatagtcctttttccaatgttttattggggaattaaatagtgtgatgtttggattgatatcgtgaaatcctcagccgagaaattgggctggattgtgctttggttaatacatctttccctaaagaagataaacacaaaatccattccaggtagctcggcaccaactaagaaaaaaagcacaaagttctcagagctctcgaggaaagtggttgtccccgtaccaccatgcactgtaaatatccctcccctctctccctggtcccctcccccatccccaccactgatatcatggggagtaataggaccagagcggtatctctggcaccacactagggactatcaggtaataaaagctttgactccctgaaaaaaaaaaaaa

SEQ ID NO: 948 - DNA, 3643 bp, Homo sapiens; identical to SEQ ID NO: 947

SEQ ID NO: 949 - DNA, 2907 bp, Homo sapiens
gcgggacgtggacggaagaaaaaagagagtgagcgagcgccggaatcagcccggcgtggagtgcggacccgcggtagtgccagggggcgaaggcggcggtggtgaggaagatactttggttagtgaccacatcgcagcatgttgagtcaagtttaccgctgtgggttccagcccttcaaccaacatcttctgccctgggtcaagtgtacaaccgtcttcagatctcattgtatccagccttcagtcatcagacatgttcgttcttggagcaacatcccgtttatcactgtacccctcagtcgtacacatggcaagtccttcgcccaccgcagtgagctgaagcatgccaagagaatcgtggtgaagctcggcagtgccgtggtgacccgaggggatgaatgtggcctggccctggggcgcttggcatctattgttgagcaggtatcagtgctgcagaatcagggcagagagatgatgctggtgaccagtggagccgtagcctttggcaaacaaacgttgcgccatgagatccttctgtctcagagcgtgcggcaggccctccactcggggcagaaccagctgaaagaaatggcaattccagtcttagaggcacgagcctgtgcagctgccggacagagtgggctgatggccttgtatgaggctatgtttacccagtacagcatctgtgctgcccagattttggtgaccaatttggatttccatgatgagcagaagcgccggaacctcaatggaacacttcatgaactccttagaatgaacattgtccccattgtcaacacaaatgatgctgttgtccccccagctgagcccaacagtgacctgcagggggtaaatgttattagtgttaaagataatgatagcctggctgcccgactggctgtggaaatgaaaactgatctcttgattgtccttccagatgtagaaggcctttttgacagccccccaggttcagatgatgcaaagcttattgatatattttatcccggagatcagcagtctgtgacatttggacccaagtctagagtgggaaatgggtgcatggaagccaaggtgaaaagcaccctctgggctttgcaaggtggcacttctgttgttattgccaatggaacccacccaaaggtgtctgggcacgtcatcacagacattgtggaggggaagaaagttggtaccttcttttcagaagtaaagcctgcaggccctactgttgagcagcagggagaaatggcgcgatctggaggaaggatgttggccaccttggaacctgagcagagagcagaaattatccatcatctggctgatctgttgacggaccagcgtgatgagatcctgttagccaacaaaaaagacttggaggaggcagaggggagacttgcagctcctctgctgaaacgtttaagcctctccacatccaaattgaacagcctggccatcggtctgcgacagatcgcagcctcctcccaggacagcgtgggacgtgttttgcgccgcacccgaatcgccaaaaacttggaactggaacaagtgactgtcccaattggagttctgctggtgatctttgaatctcgtcctgactgtcctaccccaggtggcagctttgctatcgcaagtggcaatggcttgttactcaaaggagggaaggaggctgcacacagcaaccggattctccacctcctgacccaggaggctctctcaatccatggagtcaaggaggccgtgcaactggtgaataccagagaagaagttgaagatctttgccgcctagacaaaatgatagatctgatcattccacgtggctcttcccagctggtcagagacatccagaaagctgctaaggggattccagtgatggggcacagcgaagggatctgtcacatgtatgtggattccgaggccagtgttgataaggtcaccaggctagtcagagactctaaatgtgaatatccagctgcctgtaatgctttggagactttgttaatccaccgggatctgctcaggacaccattatttgaccagatcattgatatgctgagagtggaacaggtaaaaattcatgcaggccccaaatttgcctcctatctgaccttcagcccctccgaagtgaagtcactccgaactgagtatggggacctggaattatgcattgaagtagtggacaacgttcaggatgccattgaccacatccacaagtatggcagctcccacacggatgtcatcgtcacagaggacgaaaacacagcggagttcttcctgcagcacgtagacagtgcctgtgtgttctggaatgccagcactcgcttttctgatggttaccgctttggactgggagctgaagtgggaatcagtacatcgagaatccacgcccggggaccagtaggacttgagggactgcttactactaagtggctgctgcgagggaaggaccacgtggtctcagatttctcagagcatggaagtttaaaatatcttcatgagaacctccctattcctcagagaaacaccaactgaaaagagccaggaaaacccgggaattttccaaaaggtcttcacgttaaacttgtcttatctcaggagagagcccgctcttgtctcccagttcctggtagggtctgcctgttggaaagtgtacctggatgcttctgggctccgtttggcaatagcaatcttggctgatgtgcacagtctggctcccagctcaccctttttttttaaagtaagaaaatagttgctaccgatagggactttgccaagtccaattatcttctaggattgaaaggtgcattttccccataaaaaaggcgaggaaaacccatggctgctttgtgtcacctcagtgacttacagtcccccttggcatttagttggtactagagccagtatccttaacaa

SEQ ID NO: 950 - DNA, 4066 bp, Homo sapiens
cctccatctcttttcctccgcctccgccggcgcgatgggcgaaccgctgacggacagcgagaagcggaagcagatcagcgtgcgcggcctggcggggctaggcgacgtggccgaggtgcggaagagcttcaaccggcacttgcacttcacgctggtcaaggaccgcaatgtggccacgccccgcgactacttcttcgcgctggcgcacacggtgcgcgaccacctcgtgggccgctggatccgcacgcagcagcactactacgagcgcgaccccaagcgcatttattatctttccctggaattctacatgggtcgcacgctgcagaacacgatggtgaacctgggccttcagaatgcctgcgatgaagccatctatcagttggggttagacttggaggaactcgaggagatagaagaagatgctggccttgggaatggaggcctggggaggctggcagcgtgtttccttgactcaatggctaccttgggcctggcagcatacggctatggaatccgctatgaatttgggatttttaaccagaagattgtcaatggctggcaggtagaggaggccgatgactggctgcgctacggcaacccctgggagaaagcgcggcctgagtatatgcttcccgtgcacttctacggacgcgtggagcacacccccgacggcgtgaagtggctggacacacaggtggtgctggccatgccctacgacaccccagtgcccggctacaagaacaacaccgtcaacaccatgcggctgtggtccgccaaggctcccaacgacttcaagctgcaggacttcaacgtgggagactacatcgaggcggtcctggaccggaacttggctgagaacatctccagggtcctgtatccaaatgataacttctttgaggggaaggagctgcggctgaagcaggagtacttcgtggtggccgccacgctccaggacatcatccgccgcttcaagtcgtccaagttcggctgccgggaccctgtgagaacctgtttcgagacgttcccagacaaggtggccatccagctgaacgacacccaccccgccctctccatccctgagctcatgcggatcctggtggacgtggagaaggtggactgggacaaggcctgggaaatcacgaagaagacctgtgcatacaccaaccacactgtgctgcctgaggccttggagcgctggcccgtgtccatgtttgagaagctgctgccgcggcacctggagataatctatgccatcaaccagcggcacctggaccacgtggccgcgctgtttcccggcgatgtggaccgcctgcgcaggatgtctgtgatcgaggagggggactgcaagcggatcaacatggcccacctgtgtgtgattgggtcccatgctgtcaatggtgtggcgaggatccactcggagatcgtgaaacagtcggtctttaaggatttttatgaactggagccagagaagttccagaataagaccaatggcatcaccccccgccggtggctgctgctgtgcaacccggggctggccgataccatcgtggagaaaattggggaggagttcctgactgacctgagccagctgaagaagctgctgccgctggtcagtgacgaggtgttcatcagggacgtggccaaggtcaaacaggagaacaagctcaagttctcggccttcctggagaaggagtacaaggtgaagatcaacccctcctccatgttcgatgtgcatgtgaagaggatccacgagtacaagcggcagctgctcaactgcctgcacgtcgtcaccctgtacaatcgaatcaagagagacccggccaaggcttttgtgcccaggactgttatgattgggggcaaggcagcgcccggttaccacatggccaagctgatcatcaagttggtcacctccatcggcgacgtcgtcaatcatgacccagttgtgggtgacaggttgaaagtgatcttcctggagaactaccgtgtgtccttggctgagaaagtgatcccggccgctgatctgtcgcagcagatctccactgcaggcaccgaggcctcaggcacaggcaacatgaagttcatgctcaacggggccctcaccatcggcaccatggacggcgccaacgtggagatggccgaggaggccggggccgagaacctcttcatcttcggcctgcgggtggaggatgtcgaggccttggaccggaaagggtacaatgccagggagtactacgaccacctgcccgagctgaagcaggccgtggaccagatcagcagtggctttttttctcccaaggagccagactgcttcaaggacatcgtgaacatgctgatgcaccatgacaggttcaaggtgtttgcagactatgaagcctacatgcagtgccaggcacaggtggaccagctgtaccggaaccccaaggagtggaccaagaaggtcatcaggaacatcgcctgctcgggcaagttctccagtgaccggaccatcacggagtatgcacgggagatctggggtgtggagccctccgacctgcagatcccgccccccaacatcccccgggactaggcacaccctgccttggcgggaccagcgggcatttgttttcttgctgactttgcacctccttttttccccaaacactttgccagccactggtggtccctgcttttctgagtaccatgtttccaggaggggccatgggggtcagggtggttttgagagagcagggtaaggaaggaatgtgctagaagtgctcctagtttcttgtaaaggaagccagagttgacagtacaaagggtcgtggccagccctgcagcttcagcacctgccccacccagagtgggagtcaggtggagccacctgctgggctcccccagaactttgcacacatcttgctatgtattagccgatgtctttagtgttgagcctctggattctggggtctgggccagtggccatagtgaagcctgggaatgagtgttactgcagcatctgggctgccagccacagggaagggccaagccccatgtagccccagtcatcctgcccagccctgcctcctggccatgccgggaggggtcggatcctctaggcatcgccttcacagccccctgccccctgccctctgtcctggctctgcacctggtatatgggtcatggaccagatggggctttccctttgtagccatccaatgggcattgtgtgggtgcttggaacccgggatgactgagggggacactggagtgggtgcttgtgtctgctgtctcagaggccttggtcaggatgaagttggctgacacagcttagcttggttttgcttattcaaaagagaaaataactacacatggaaatgaaactagctgaagccttttcttgttttagcaactgaaaattgtacttggtcacttttgtgcttgaggaggcccattttctgcctggcaggggcaggtctgtgccctcccgcttgactcctgctgtgtcctgaggtgcatttcctgtttgttacacacaagggccaggctccattctccctccctttccaccagtgccacagcctcgtctggaaaaaggaccaggggtcccggaggaacccatttgtgctctgcttggacagcaggcctggcactgggaggtgggggtgagcccctcacagccttgcccctccccaaggctcgaacctgcctcccattgcccaagagagagggcagggaacaggctactgtccttccctgtggaattgccgagaaatctagcaccttgcatgctggatctgggctgcggggaggctctttttctccctggcctccagtgcccaccaggaggatctgcgcacggtgcacagcccaccagagcactacagccttttattgagtggggcaagtgctgggctgtggtcgtgccctgacagcatcttccccaggcagcggctctgtggaggaggccatactcccctagttggccactggggccaccaccctgaccaccactgtgcccctcattgttactgccttgtgagataaaaactgattaaacctttgtggctgtggttggctgaaaaaaaaaaa

SEQ ID NO: 951 - DNA, 4615 bp, Homo sapiens
ggacacaaccctgagatttatccctcacaatgcggaaagacagacttcttcatttatgtcttgtgctacttcttatcctgctttctgccagtgactcaaactctacagaaccgcagtatatggtgctggtcccctccctgctccacactgaggcccctaagaagggctgtgtccttctgagccacctgaatgagacagtgactgtaagtgcttccttggagtctggcagggaaaacaggagcctcttcactgacctggtggcggagaaggacttattccactgtgtctccttcactctcccaaggatctcagcctcttcagaggtggcattccttagcatccagataaaggggcctacgcaagatttcaggaagaggaacacagttctggtactgaacacccaaagtctggtctttgtccagacagacaaacccatgtataaaccaggacagacagtaagattccgtgttgtctccgtggatgaaaattttcgccctcgaaatgaactgattccactgatataccttgagaacccaagaagaaatcgaattgcacaatggcagagtctcaagctagaagctggcatcaatcagttgtcctttcccctctcatcagagcccattcagggctcctacagggtggtggtacagacagaatcaggtggaaggatacagcaccccttcaccgtggaggaatttgtgcttcccaagtttgaggtcaaagttcaggtgccaaagataatcagtatcatggatgaaaaagtgaacataacagtctgtggagaatacacttatgggaagcctgtcccaggacttgcaactgtgagcctgtgtagaaaattatctcgtgttcttaattgtgacaagcaggaggtctgtgaggaattcagtcaacagcttaacagcaatggctgcatcacccaacaagtacacaccaaaatgctccagattacaaatacgggctttgaaatgaagcttagagtggaagccaggatcagagaagaggggacagacctggaagtcactgcaaacaggatcagtgaaatcacaaacattgtatccaaactcaaattcgtgaaagtggattcacactttagacaaggaatccccttttttgcacaggtgcttctggtggatggaaaaggtgtgcccatccccaataaactcttcttcatctctgtgaatgacgccaattattactccaatgcaaccaccaatgagcagggtcttgcacagttttcaatcaatactaccagtatctcggttaataaactttttgtccgggttttcactgtgcatcccaacttgtgttttcactattcatgggtagcagaagaccaccagggcgctcagcacactgcaaatcgtgttttctccttaagtggaagttacattcacctggagcctgtggctggtaccctgccctgtggccacacggagactatcacggcacactatacactgaatagacaggccatgggagagttatcggagctcagtttccattacctgatcatggctaagggagtcatcgtcagatctggaacccacactctgcctgtggagtcaggagacatgaaaggcagttttgccttatccttccctgtggagtcagacgttgcccccattgcacgaatgttcatctttgccattttaccagatggagaagttgttggagactctgaaaaatttgagattgaaaactgtctagccaacaaggtggatttgagcttcagcccagcacaaagtcccccagcctcacatgcccacctgcaagtagcagctgctccgcagtccctctgtgcccttcgtgctgtggaccaaagtgtgctgctcatgaagcctgaggctgagctctctgtgtcctcagtatataatctgctaactgtgaaggatctcaccaattttcctgacaatgtggaccagcaggaggaagaacaaggacactgtccccgtcctttcttcattcataatggagccatctatgttcccttatcaagtaatgaagcagatatttatagcttcctcaaggggatgggattgaaggtgttcactaactcaaaaatccgaaaaccaaagtcgtgttcagtcatcccttccgtgtctgcaggagcagtaggtcaaggatactatggagcaggtctaggagtagtagagagaccatatgttcctcaattaggcacatataatgtgatacccttaaataatgaacaaagttcagggccagtccctgaaacggtgcgaagctattttcctgagacttggatctgggagttggtggcagtgaactcatcaggtgtggctgaggtaggagtaacagtccctgacaccatcaccgagtggaaggcaggggccttctgcctgtctgaagatgctggacttggtatctcttccactgcctctctccgagccttccagcccttctttgtggagctcacaatgccttactctgtgattcgtggagaggtcttcacactcaaggccacggtcctaaactaccttcccaaatgcatccgggtcagtgtgcagctgaaagcctctccagccttcctagcttcccaaaatacaaagggagaagaatcctattgtatctgtggaagtgagagacaaaccttgtcttggacagtgactcctaaaactctggggaatgtgaacttctcagtgagtgcagaggcaatgcagtccttagaactctgtggaaatgaggttgttgaggtccctgagattaaaagaaaagacacagtcatcaaaaccctgttggtggaggctgaaggtattgagcaagaaaagactttcagttccatgacctgtgcctcaggtgctaatgtgtctgagcagttgtccttgaagctcccatcaaatgtggtcaaagaatctgccagagcttctttctcagttctgggtgacatattaggttctgctatgcaaaatatacaaaatctcctccagatgccatatggctgtggagaacagaacatggtcctatttgctcctaacatctatgtcttgaactatctgaatgaaacccagcagctgacgcaggagatcaaggccaaggccgttggctatctcatcactggttaccagagacagctgaactacaaacaccaagatggctcctacagcacctttggggaacgatatggcaggaaccagggcaacacttggctcacagcttttgtactgaagactttcgcccaggctcgatcctacatcttcattgatgaagcacacattacccaatctctcacgtggctctcccagatgcagaaggacaatggctgtttcaggagctctgggtcactgctcaacaatgccataaagggaggtgtagaagatgaagcgaccctctccgcctatgttactattgcccttctggaaattcctctcccagtcactaaccctattgttcgcaatgccctgttctgcctggagtcagcctggaatgtagcaaaggaggggacccatgggagccatgtctacaccaaggcattgctggcctatgctttttccctactgggaaagcaaaatcagaatagagaaatactgaactcacttgataaggaagctgtgaaagaagacaacctcgtccattgggagcgccctcagagacccaaggcaccagtggggcatctttaccaaacccaggctccctctgctgaggtggagatgacatcctatgtgctcctcgcttatctcacggcccagccagcccccacctcaggggacctgacctctgcaactaacattgtgaagtggatcatgaagcagcagaacgcccaaggtggtttctcctccacccaggacacagtggtggctctccatgccctgtccaggtatggagcagccactttcaccagaactgagaaaactgcacaggtcaccgttcaggattcacagaccttttctacaaatttccaagtagacaacaacaacctcctattactgcagcagatctcattgccagagctccctggagaatatgtcataacagtaactggggaaagatgtgtgtatcttcagacatccatgaaatacaatattcttccagagaaagaggactccccatttgctttaaaagtgcagactgtgccccagacttgcgatggacacaaagcccacaccagctttcagatctcactgaccatcagttacacaggaaaccgtcctgcttccaatatggtgattgttgatgtaaagatggtatctggttttattcccctgaaaccaacagtaaaaatgcttgaaagatctagctctgtgagccggacagaagtgagcaacaaccatgtcctcatttatgtggaacaggtgacaaatcagacgctaagtttttccttcatggttctgcaagacatcccagtaggagacttgaagccagcaattgttaaagtctatgattactatgagacagatgagtctgtggttgctgagtatatcgccccctgcagcacagatacagagcatggaaatgtttgaggaccatacaggctgtatattttggtggattctctgtcctatacatttacttagaaggaatggagttatttgtctctataaaatagacactaaaaatatttgctgaataaatatgtacttctggtcaaactaaaaaa

SEQ ID NO: 952 - DNA, 1148 bp, Homo sapiens
gctcggtcgggcgctgtctccctcggctctgcgggtgtcagttcgtccggcttcctcacagcccctcactcccggcggctgacagcagcagcggcggcggcgggcggcgcctggcgtttcgaggctgagcggcaccggggttggggcgcggaggaggagcagcagcgggaggaggagccgtgtgccctggcactgagcggccgcggccatggcgtacgcctatctcttcaagtacatcataatcggcgacacaggtgttggtaaatcatgcttattgctacagtttacagacaagaggtttcagccagtgcatgaccttactattggtgtagagttcggtgctcgaatgataactattgatgggaaacagataaaacttcagatatgggatacggcagggcaagaatcctttcgttccatcacaaggtcgtattacagaggtgcagcaggagctttactagtttacgatattacacggagagatacattcaaccacttgacaacctggttagaagatgcccgccagcattccaattccaacatggtcattatgcttattggaaataaaagtgatttagaatctagaagagaagtaaaaaaagaagaaggtgaagcttttgcacgagaacatggactcatcttcatggaaacgtctgctaagactgcttccaatgtagaagaggcatttattaatacagcaaaagaaatttatgaaaaaattcaagaaggagtctttgacattaataatgaggcaaatggcattaaaattggccctcagcatgctgctaccaatgcaacacatgcaggcaatcagggaggacagcaggctgggggcggctgctgttgagtctgtttttactgtctagctgcccaacggggcctactcacttattctttcaccccctctcctcctgctcagctgagacatgaaactatttgaaatggctttatgtcacagaagactttaatccgtcaaattcttgtataactttgaataaatggttaatgttcacttaaaagacagattttggagattgtattcatatctatttgcatttgatttctaggtcaattgatgtgattatttttgttaaatgttgtcttgtgcccttaactacgaactgaattgtattaaacactacaaagtc

SEQ ID NO: 953 - DNA, 1238 bp, Homo sapiens
gaattcgaggatccgggtaccatgggaggaaaacttcttcctggcctgggctccgtgccgctctgtttgccaaccgtccagtcccgcctaccagtgccgggcgctccccacccctcccccggctcccccggtgtccgccatggccaaagcctacgaccacctcttcaagttgctgctgatcggggactcgggggtgggcaagacttgtctgatcattcgctttgcagaggacaacttcaacaacacttacatctccaccatcggaattgatttcaagatccgcactgtggatatagaggggaagaagatcaaactacaagtctgggacacggctggccaagagcggttcaagacaataactactgcctactaccgtggagccatgggcattatcctagtatacgacatcacggatgagaaatctttcgagaatattcagaactggatgaaaagcatcaaggagaatgcctcggctggggtggagcgcctcttgctggggaacaaatgtgacatggaggccaagaggaaggtgcagaaggagcaggccgataagttggctcgagagcatggaatccgatttttcgaaactagtgctaaatccagtatgaatgtggatgaggcttttagttccctggcccgggacatcttgctcaagtcaggaggccggagatcaggaaacggcaacaagcctcccagtactgacctgaaaacttgtgacaagaagaacaccaacaagtgctccctgggctgaggaccctttcttgcctccccaccccggaagctgaacctgagggagacaacggcagagggagtgagcaggggagaaatagcagaggggcttggagggtcacataggtagatggtaaagagaatgaggagaaaaaggagaaaagggaaaagcagaaaggaaaaaaaggaagagagaggaagggagaagggagaggaatgaattgaggaagtgaaagaaggcaaggaggtaggaagagagggaggaggaaaggaaggagagagatgcctcaggcttcagaccttacctgggttttcagggcaaacataaatgtaaatacactgatttattctgttactagatcaggttttagggtcctgcaaaaggctagctcggcactacactagggaatttgctcctgttctgtcacttgtcatggtctttcttggtattaaaggccaccatttgcacaaaaaaaaaaaaaaaccatggtacccggatcctcgaattc

SEQ ID NO: 954 - DNA, 2943 bp, Homo sapiens
gagtcacgatgatggcggccaccatcctgtggtgagctagcggattccctgcttgtctcgccgaccccctcgcgccttctgcagactccgtggctggcgctcggcgcgtgaggaagcacggcggcccgagttcgcggggaaggccgcagtcgcggaggcagcggcgcggtccggggcacgggctgggggagaggccgctccgctgggcgaatgtgacaagcccccacccccaccgccttcctccccagagcgcgaggagcgcgggcgaccccggggccccgccaggccacagaccccgcccagcggccagcacccggcgcaggcccggcagccgagctgcgcggcggcaccatgcaggtcaccctgaagaccctccagcagcagaccttcaagatagacattgaccccgaggagacggtgaaagcactgaaagagaagattgaatctgaaaaggggaaagatgcctttccagtagcaggtcaaaaattaatttatgcaggcaaaatcctcaatgatgatactgctctcaaagaatataaaattgatgagaaaaactttgtggtggttatggtgaccaaacccaaagcagtgtccacaccagcaccagctacaactcagcagtcagctcctgccagcactacagcagttacttcctccaccaccacaactgtggctcaggctccaacccctgtccctgccttggcccccacttccacacctgcatccatcactccagcatcagcgacagcatcttctgaacctgcacctgctagtgcagctaaacaagagaagcctgcagaaaagccagcagagacaccagtggctactagcccaacagcaactgacagtacatcgggtgattcttctcggtcaaacctttttgaagatgcaacgagtgcacttgtgacgggtcagtcttacgagaatatggtaactgagatcatgtcaatgggctatgaacgagagcaagtaattgcagccctgagagccagtttcaacaaccctgacagagcagtggagtatcttttaatgggaatccctggagatagagaaagtcaggctgtggttgacccccctcaagcagctagtactggggctcctcagtcttcagcagtggctgcagctgcagcaactacgacagcaacaactacaacaacaagttctggaggacatccccttgaatttttacggaatcagcctcagtttcaacagatgagacaaattattcagcagaatccttccttgcttccagcgttactacagcagataggtcgagagaatcctcaattacttcagcaaattagccaacaccaggagcattttattcagatgttaaatgaaccagttcaagaagctggtggtcaaggaggaggaggtggaggtggcagtggaggaattgcagaagctggaagtggtcatatgaactacattcaagtaacacctcaggaaaaagaagctatagaaaggttaaaggcattaggatttcctgaaggacttgtgatacaagcgtattttgcttgtgagaagaatgagaatttggctgccaattttcttctacagcagaactttgatgaagattgaaagggacttttttatatctcacacttcacaccagtgcattacactaacttgttcactggattgtctgggatgacttgggctcatatccacaatacttggtataaggtagtagattgttgggggtggggagggagggatctaggatacagggcagggataaatacagtgcatgtctgcttcaattagcagatgccgcaactccacacagtgtgtaaaatatatacaaccaaaaatcagcttttgcaggtctttatttcttctgtaaaacagtaggtaacttttcctaggtttcactctttttagtgtactagatccagaaacttagtgtaatgccctgctttatatttctttgacttaacattggtttcagaaagaatcttagctacctagaatttacagtctctgtttcatggcaacactggataatggctttgtgaaatttaaaaaatttttgtagcgactgtaaacagaaatgccaaattgatggttaattgttgctgcttcaaaaataagtataaaattaatatgtaaggaagcccattctttcatgttaaatacttggggtgggaggggagaaagggaaccttttcttaaaatgaaaataattactgctattttaaaatttcttgatcattgaatgtgagacccttctaacatgatttgagaagctgtacaagtataggcagagttattttcctgtttacattttttttttgttttggggaaaaaattggtaggtgtctaattactgtttacttcattgttatattgcagtaaaagttttaaaacaaccattgcatgtttgcttttgatgtatccctttgtgaaattagcacttttggggccaatggagaaatgcagcattcactctccctgtcttttccccttccctcagcagaaacgtgtttatcagcaagtcgtgagtcaaactgctgccttttaaaaaacccacaaaatgctgattcagttcaaaattaatgcaaatgtttcaaaactgggtttctgatatttgtaaatgtgtttctttattagataagagtgtattaccattaaagtcattagtataatattgctttcaaaaagaaatggtagacaaaactataatccagcatcttttattgcattggaaagactggcaaagtcttttggatgggttgggagatgtggctggaaagtactttggaaaatatacaatcaagatatctcatggcatattaaaagaaaaatcttaatagcagtgttggcttttatttggattttttcatctcagttttttctgtggaatctccttcattggcattgttatttaatcataaacggggcagatgtctacttgttcagtttttcaaatctgttttcctg

SEQ ID NO: 955 - DNA, 884 bp, Homo sapiens
cgaggttcgggtcgtggggcggagggaagagcgggcgggcgggaggcgccggcgccagacgcggagggaaggagctacgagtagccgccgagaggccgcggagccagcgacgaccgacccagccgagccgccgccgccgccgcgcccccatggcggccgccaaggacactcatgaggaccatgatacttccactgagaatacagacgagtccaaccatgaccctcagtttgagccaatagtttctcttcctgagcaagaaattaaaacactggaagaagatgaagaggaactttttaaaatgcgggcaaaactgttccgatttgcctctgagaacgatctcccagaatggaaggagcgaggcactggtgacgtcaagctcctgaagcacaaggagaaaggggccatccgcctcctcatgcggagggacaagaccctgaagatctgtgccaaccactacatcacgccgatgatggagctgaagcccaacgcaggtagcgaccgtgcctgggtctggaacacccacgctgacttcgccgacgagtgccccaagccagagctgctggccatccgcttcctgaatgctgagaatgcacagaaattcaaaacaaagtttgaagaatgcaggaaagagatcgaagagagagaaaagaaagcaggatcaggcaaaaatgatcatgccgaaaaagtggcggaaaagctagaagctctctcggtgaaggaggagaccaaggaggatgctgaggagaagcaataaatcgtcttattttattttcttttcctctctttcctttcctttttttaaaaaattttaccctgcccctctttttcggtttgtttttattctttcatttttacaagggacgttatataaagaactgaactc

SEQ ID NO: 956 - DNA, 1579 bp, Homo sapiens
atccttcgcgtactgacggaaacactggcggcacatattgaggccgtatttcaggatcagctgccggttcgaacacacgcgagaagagcaaagaagttaaaagagaagtgtctgtgtggctccttccacgtgggtgaaggactgtgccagctgagaggtggtagagcaggaagctgcctgagacctccatttatttggtgaaaaaccgccgcccttaagagagcaagtcgagggccgtgtaggagttggaggagagaaatgaaattttggaagagtcagcagaagatcgtcagtatttaaacacatcacatcatgcgtgagtacaagctagtggtccttggttcaggaggcgttgggaagtctgctctgacagttcagtttgttcagggaatttttgttgaaaaatatgacccaacgatagaagattcctacagaaagcaagttgaagtcgattgccaacagtgtatgctcgaaatcctggatactgcagggacagagcaatttacagcaatgagggatttgtatatgaagaacggccaaggttttgcactagtatattctattacagctcagtccacgtttaacgacttacaggacctgagggaacagattttacgggttaaggacacggaagatgttccaatgattttggttggcaataaatgtgacctggaagatgagcgagtagttggcaaagagcagggccagaatttagcaagacagtggtgtaactgtgcctttttagaatcttctgcaaagtcaaagatcaatgttaatgagatattttatgacctggtcagacagataaataggaaaacaccagtggaaaagaagaagcctaaaaagaaatcatgtctgctgctctaggcccatagtcagcagcagctctgagccagattacaggaatgaagaactgttgcctaattggaaagtgccagcattccagacttcaaaaataaaaaatctgaagaggcttctcctgttttatatattatgtgaagaatttagatcttatattggtttgcacaagttccctggagaaaaaaattgctctgtgtatatctcttggaaaataagacaatagtatttctcctttgcaatagcagttataacagatgtgaaaatatacttgactctaatatgattatacaaaagagcatggatgcatttcaaatgttagatattgctactataatcaaatgatttcatattgatctttttatcatgatcctacctatcaagcactaaaaagttgaaccattatactttatatctgtaatgatactgattatgaaatgtcccctgaaactcattgcagcagataacttttttgagtcattgacttcattttatatttaaaaaattatggaatatcatctgtcattatattctaattaaaattgtgcataatgctttggaaaaatgggtcttttataggaaaaaaactgggataactgatttctatggctttcaaagctaaaatatataatatactaaaccaactctaatattgcttcttgtgttttactgtcagattaaattacagcttttatggatgattaaattttagtacattttc

SEQ ID NO: 957 - DNA, 1946 bp, Homo sapiens
gcctcgtcagctgcctgggcgggctgggaggcgcgggttgaaaagtctcgttccaagtttggagagagagagaagagcgcctcagacctcggtacccgcgagcggggaggaggcaggaaagaaggacgcggcgtctggggagcacccaggcagcaagacggggcccgggctttcgacagtggggagtgtgacgcgcttgggaaaggcaggagcgccagcggtcgggctgctcttggctaacgagaggagtccgaggcggcggcgaggggcgaacgacccgacgcaagatggcgagtaaagagatgtttgaagatactgtggaggagcgtgtcatcaatgaagaatataaaatctggaagaagaatacaccgtttctatatgacctggttatgacccatgctcttcagtggcccagtcttaccgttcagtggcttcctgaagtgactaaacctgaaggaaaagattatgcccttcattggctagtgctggggactcatacgtctgatgagcagaatcatctggtggttgctcgagtacatattcccaatgatgatgcacagtttgatgcttcccattgtgacagtgacaagggtgaatttggtggctttggttctgtaacaggaaaaattgaatgtgaaattaaaatcaatcacgaaggagaagtaaaccgtgctcgttacatgccgcagaatcctcacatcattgctacaaaaacaccatcttctgatgtgttggtttttgactatacaaaacaccctgctaaaccagacccaagtggagaatgtaatcctgatctcagattaagaggtcaccagaaggaaggctatggtctctcctggaattcaaatttgagtggacatctcctaagtgcatctgatgaccatactgtttgtctgtgggatataaacgcaggaccaaaagaaggcaaaattgtggatgctaaagccatctttactggccactcagctgttgtagaggatgtggcctggcacctgctgcacgagtcattgtttggatctgttgctgatgatcagaaacttatgatatgggacaccaggtccaataccacctccaagccgagtcacttggtggatgcgcacactgccgaagtcaactgcctctcattcaatccctacagcgaatttattctagccaccggctctgcggataagaccgtagctttatgggatctgcgtaacttaaaattaaaactccataccttcgaatctcataaagatgaaattttccaggtccactggtctccacataatgaaactattctggcttcaagtggtactgaccgccgcctgaatgtgtgggatttaagtaaaattggggaagaacaatcagcagaagatgcagaagatgggcctccagaactcctgtttattcatggaggacacactgctaagatttcagattttagctggaaccccaatgagccttgggtcatttgctcagtgtctgaggataacatcatgcagatatggcaaatggctgaaaatatttacaatgatgaagagtcagatgtcacgacatccgaactggagggacaaggatcttaaacccaaagtacgagaaatgtttctgttgaatgtaatgctacatgaatgcttgatttatcaagcgccaaaaaggcattgtatagtaggaaatgtaagtggggtggcttatggcttctttatcctctgattctagcactttcaagtgagctgttgcgtactgtatcatattgtagctattagggaagagaagaatgttgcttaagaaagaacatcaccattgattttaaatacaagtagcagggtattgcctttgattcaactgttttaagtcctcattttctcaaactaagtgcttgctgttcccaaatatgcaagaataacttttacactttttccttccaacacttcttgattggctttgcagaaataaagttttaaaat

SEQ ID NO: 958 - DNA, 1620 bp, Homo sapiens
gaggcaagaattcggcacgagggccctgctggtttctgtgcgggctcttgtcaggatggtgaagctgttcatcggaaacctgccccgggaggctacagagcaggagattcgctcactcttcgagcagtatgggaaggtgctggaatgtgacatcattaagaattacggctttgtgcacatagaagacaagacggcagctgaggatgccatacgcaacctgcaccattacaagcttcatggggtgaacatcaacgtggaagccagcaagaataagagcaaaacctcaacaaagttgcatgtgggcaacatcagtcccacctgcaccaataaggagcttcgagccaagtttgaggagtatggtccggtcatcgaatgtgacatcgtgaaagattatgccttcgtacacatggagcgggcagaggatgcagtggaggccatcaggggccttgataacacagagtttcaaggcaaacgaatgcacgtgcagttgtccaccagccggcttaggactgcgcccgggatgggagaccagagcggctgctatcggtgcgggaaagaggggcactggtccaaagagtgtccgatagatcgttcaggccgcgtggcagacttgaccgagcaatataatgagcaatacggagcagtgcgtacgccttacaccatgagctatggggattcattgtattacaacaacgcgtacggagcgctcgatgcctactacaagcgctgccgtgctgcccggtcctatgaggcagtgcagctgcagctgcctccgtgtataattacgcagagcagaccctgtcccagctgccacaagtccagaatacagccatggccagtcacctcacctccacctctctcgatccctacgatagacacctgttgccgacctcaggagctgctgccacagctgctgctgcagcagcagccgctgctgctgttactgcagcttccacttcatattacgggcgggatcggagccccctgcgtcgcgctacagccccagtccccactgttggagagggctacggttacgggcatgagagtgagttgtcccaagcttcagcagccgcgcggaattctctgtacgacatggcccggtatgagcgggagcagtatgccgatcgggcgcggtactcagccttttaaagcttgaggtgggatgtgtgtgggctgaaattccgagctgcggttgtgcatgagaatacacccttcgtggtaccccatctccgggacgttctcggctctgtgcgttcagtccctcaggaaccgtggaccttaatttaccttgctaagttcagaccttctcttcctttcctttcctttcctctcctgcccattttcctgttcttctgtccttcaatacttctgtagcttcccattcatgttctcttctcccagcaggcctcattgtgtgcagaaactgtggtgggggctgtgctgtctcctccctgcctcctgcctcctgcggctgttggatttgggaatgaccttggtgagagtctcactgctccagggtctctttttggtccaaaggctagacctatagagttggatcactttttttctttccggtgaaataaatggtttttcaacttaaaaaaaaaaaaaaaaaaaaaa

SEQ ID NO: 959 - DNA, 4290 bp, Homo sapiens
agaccttctgtccaccagctgagaaggacaagggcggaaggcagctgcacagagcagggccacggccttgcacacagtccagggagcttttgtgcaggagccaggcctccccctgggtccccatgatgagagaatgggttctgctcatgtccgtgctgctctgtggcctggctggccccacacacctgttccagccaagcctggtgctggacatggccaaggtcctcttggataactactgcttcccggagaacctgctgggcatgcaggaagccatccagcaggccatcaagagccatgagattctgagcatctcagacccgcagacgctggccagtgtgctgacagccggggtgcagagctccctgaacgatcctcgcctggtcatctcctatgagcccagcacccccgagcctcccccacaagtcccagcactcaccagcctctcagaagaggaactgcttgcctggctgcaaaggggcctccgccatgaggttctggagggtaatgtgggctacctgcgggtggacagcgtcccgggccaggaggtgctgagcatgatgggggagttcctggtggcccacgtgtgggggaatctcatgggcacctccgccttagtgctggatctccggcactgcacaggaggccaggtctctggcattccctacatcatctcctacctgcacccagggaacaccatcctgcacgtggacactatctacaaccgcccctccaacaccaccacggagatctggaccttgccccaggtcctgggagaaaggtacggtgccgacaaggatgtggtggtcctcaccagcagccagaccaggggcgtggccgaggacatcgcgcacatccttaagcagatgcgcagggccatcgtggtgggcgagcggactgggggaggggccctggacctccggaagctgaggataggcgagtctgacttcttcttcacggtgcccgtgtccaggtccctggggccccttggtggaggcagccagacgtgggagggcagcggggtgctgccctgtgtggggactccggccgagcaggccctggagaaagccctggccatcctcactctgcgcagcgcccttccaggggtagtccactgcctccaggaggtcctgaaggactactacacgctggtggaccgtgtgcccaccctgctgcagcacttggccagcatggacttctccacggtggtctccgaggaagatctggtcaccaagctcaatgccggcctgcaggctgcgtctgaggatcccaggctcctggtgcgagccatcgggcccacagaaactccttcttggcccgcgcccgacgctgcagccgaagactcaccaggggtggccccagagttgcctgaggacgaggctatccggcaagcactggtggactctgtgttccaggtgtcggtgctgccaggcaatgtgggctacctgcgcttcgatagttttgctgacgcctccgtcctgggtgtgttggccccatatgtcctgcgccaggtgtgggagccgctacaggacacggagcacctcatcatggacctgcgccacaaccctggagggccatcctctgctgtgcccctgctcctgtcctacttccagggccctgaggccggccccgtgcacctcttcaccacctatgatcgccgcaccaacatcacgcaggagcacttcagccacatggagctcccgggcccacgctacagcacccaacgtggggtgtatctgctcaccagccaccgcaccgccacggccgcggaggagttcgccttccttatgcagtcgctgggctgggccacactggtaggtgagatcaccgcgggcaacctgctgcacacccgcacggtgccgctgctggacacacccgaaggcagcctcgcgctcaccgtgccggtcctcaccttcatcgacaatcacggcgaggcctggctgggtggtggagtggtgcccgatgccatcgtgctggccgaggaggccctggacaaagcccaggaagtgctggagttccaccaaagcctgggggccttggtggagggcacagggcacctgctggaggcccactatgctcggccagaggtcgtggggcagaccagtgccctcctgcgggccaagctggcccagggcgcctaccgcacagctgtggacttggagtctctggcctctcagctcacagcagacctccaggaggtgtctggggaccaccgcttgctagtgttccacagccctggcgagctggtggtagaggaagcacccccaccaccccctgctgtcccctctccagaggagctcacctaccttattgaggccctgttcaagacagaggtgctgcccggccagctgggctacctgcgttttgacgccatggctgaactggagacagtgaaggccgtggggccacagctggtgcggctggtatggcaacagctggtggacacggctgcgctggtgatcgacctgcgctacaaccctggcagctactccacggccatcccgctgctctgctcctacttctttgaggcagagccccgccagcacctgtattctgtctttgacagggccacctcaaaagtcacggaggtgtggaccttgccccaggtcgccggccagcgctacggctcacacaaggacctctacatcctgatgagccacaccagtggctctgcggccgaggcctttgcacacaccatgcaggacctgcagcgggccacggtcattggggagcccacggccggaggcgcactctctgtgggcatctaccaggtgggcagcagccccttatatgcatccatgcccacccagatggccatgagtgccaccacaggcaaggcctgggacctggctggtgtggagcccgacatcactgtgcccatgagcgaagccctttccatagcccaggacatagtggctctgcgtgccaaggtgcccacggtgctgcagacggccgggaagctggtggctgataactatgcctctgccgagctgggggccaagatggccaccaaactgagcggtctgcagagccgctactccagggtgacctcagaagtggccctagccgagatcctgggggctgacctgcagatgctctccggagacccacacctgaaggcagcccatatccctgagaatgccaaggaccgcattcctggaattgtgcccatgcagatcccttcccctgaagtatttgaagagctgatcaagttttccttccacactaacgtgcttgaggacaacattggctacttgaggtttgacatgtttggggacggtgagctgctcacccaggtctccaggctgctggtggagcacatctggaagaagatcatgcacacggatgccatgatcatcgacatgaggttcaacatcggtggccccacatcctccattcccatcttgtgctcctacttctttgatgaaggccctccagttctgctggacaagatctacagccggcctgatgactctgtcagtgaactctggacacacgcccaggttgtaggtgaacgctatggctccaagaagagcatggtcattctgaccagcagtgtgacggccggcaccgcggaggagttcacctatatcatgaagaggctgggccgggccctggtcattggggaggtgaccagtgggggctgccagccaccacagacctaccacgtggatgacaccaacctctacctcactatccccacggcccgttctgtgggggcctcggatggcagctcctgggaaggggtgggggtgacaccccatgtggttgtccctgcagaagaggctctcgccagggccaaggagatgctccagcacaaccagctgagggtgaagcggagcccaggcctgcaggaccacctgtagggaagggccccataggcagagccccagggcagacagaacctctgggacacacaccaagggcactcctgcaggtggcccggcctgaggttcccaggagcagcaaaggggcctgctgagctctggttaggttacagctggaggtgtgtatatatacacacacacacgtgtatatacacatatatatgtgtatgtatatatatgtatatatatatggctttccaataaccacctaaattttaacaaaggttccttctaagtggtagaacttggggtggtatttttaccttccttcttcatactttgctctttttcttaaatactcattaatgtgcatatatcattattttcagatgcagctatcattattccaaaatacaaaataaagaagataaaataaattatatacccgagccattaaccacaa

SEQ ID NO: 960 - DNA, 2104 bp, Homo sapiens
gctgttgtcgctcgctcagcgtctccctctcggccgccctctcctcgggacgatggcgcgcggtggccgcggccgccgcctggggttagccctggggctgctgctggcgctggtgctggcgccgcgggttctgcgggccaagcccacggtgcgcaaagagcgcgtggtgcggcccgactcggagctgggcgagcggccccctgaggacaaccagagcttccagtacgaccacgaggccttcctgggcaaggaggactccaagaccttcgaccagctcaccccggacgagagcaaggagaggctagggaagattgttgatcgaatcgacaatgatggggatggctttgtcactactgaggagctgaaaacctggatcaaacgggtgcagaaaagatacatctttgataatgtcgccaaagtctggaaggattatgatagggacaaggatgataaaatttcctgggaagaatacaaacaagccacctatggttactacctaggaaaccccgcagagtttcatgattcttcagatcatcacacctttaaaaagatgctgccacgtgatgagagaagattcaaagctgcagacctcaatggtgacctgacagctactcgggaggagttcactgcctttctgcatcctgaagagtttgaacatatgaaggaaattgtggttttggaaaccctggaggacatcgacaagaacggggatgggtttgtggatcaggatgagtatattgcggatatgttttcccatgaggagaatggccctgagccagactgggttttatcagaacgggagcagtttaacgaattccgggatctgaacaaggacgggaagttagacaaagatgagattcgccactggatcctccctcaagattatgatcacgcacaggctgaggccaggcatctggtatatgaatcagacaaaaacaaggatgagaagctaactaaagaggaaatattggagaactggaacatgtttgttggaagccaagctaccaattacggggaagatctcacaaaaaatcatgatgagctttgatagacactcaccagaatatggcagactgtcataggcattctgttattgtcttggattgttgctacaattgtctaattacagcagttgtgatcccacaaaaagcaagtttatacctcagattggggtataaaaattgtttttcgctcagtatttactggaaaatggacatcactagtctttcagtaagatttctctcaaaacacgtgaaaaccttggtaaattgcaattctttctggggatatattggtacaacatgacttaaaacttttttttttctattaaaacttaaaggggaacaaaacttgaaaaagccctgttcttcagaaggtgagtgggttgagggaggcagtaatatgaagtgactgctgtgtattttaactaccagatttttatatttgccactgttagatagttggaaaggggaaattctgtttaagcgaaagtggtatcatcctaggtaagcttatttcagaacaagtctaatatatcagattctttcttttcgactttatactctgagttattacttactgtaagtggtgtatatgaaacctccatgcattttccagtatggatctgctaatatgcacagtaaatccatgtctttgtttgtttttctattaagaagcaatcaagaaagataatgtgaaaaagaaaggaatttagaggtagggaaaagatgaatgtcagacatgtgaagaactatagtaaaaatgataaaccacctaaatatccttgaacctaccttaaaatgccaatgaggtaggcctgatctttgaatagtggctaggatacaatgcatttcctcagtgatcactgattagaatgagttggtgggatccttgggaagccaaacggagcggggttctggatcatgtcccatccagtccagtgaatccccgacccgcagacctgccccccccgcaacagcttataccatggaatgaggacaaggtgatactctgagctgtggactgaactggcagacacaacctgtacagattgaaatttcaccttgtaaggaggaagtgaatgaaataaaggatccccctaagg

SEQ ID NO: 961 - DNA, 1700 bp, Homo sapiens
gcagccgcccgggcccccgccagcctccctcctcgcgtccctcggtgtcctccgcgggccggcgcgatgcggctgggcccgaggaccgcggcgttggggctgctgctgctgtgcgccgccgcggccggcgccggcaaggccgaggagctgcactacccgctgggcgagcgccgcagcgactacgaccgcgaggcgctgctgggcgtccaggaagatgtggatgaatatgttaaactcggccacgaagagcagcaaaaaagactgcaggcgatcataaagaaaatcgacttggactcagatggctttctcactgaaagtgaactcagttcatggattcagatgtcttttaagcattatgctatgcaagaagcaaaacaacagtttgttgaatatgataaaaacagtgatgatactgtgacttgggatgaatataacattcagatgtatgatcgtgtgattgactttgatgagaacactgctctggatgatgcagaagaggagtcctttaggaagcttcacttaaaggacaagaagcgatttgaaaaagctaaccaggattcaggtcccggtttgagtcttgaagaatttattgcttttgagcatcctgaagaagttgattatatgacggaatttgtcattcaagaagctttagaagaacatgacaaaaatggtgatggatttgttagtttggaagaatttcttggtgattacaggtgggatccaactgcaaatgaagatccagaatggatacttgttgagaaagacagattcgtgaatgattatgacaaagataacgatggcaggcttgatccccaagagctgttaccttgggtagtacctaataatcagggcattgcacaagaggaggcgcttcatctaattgatgaaatggatttgaatggtgacaaaaagctctctgaagaagagattctggaaaacccggacttgtttctcaccagtgaagccacagattatggcagacagctccatgatgactatttctatcatgatgagctttaatctccgagcctgtctcagtagagtactggctccttttataatttgttaccagctttacttttgtgataaaatattgatgttgtattttacactcttaagtcttaaccacagtcagaattatcttaatgtagaattataattttggctcttttaggaaaaaacaaaatctgatatttttccaaacgtattgagcaacaaaatattaatattgtgccatatgacaacaaagtctttcctaaatactccatctgtttagtactgtattgtggaatatttgagttctatttccagacttgaaaacatggaggattttagagatgcctgaacaatattatttaagtagtatgtgaccgagctataaattttttgtttttgttctaagtagatttaatttgggaactgacaggacaatgtttttaggtttagcattttgtttaaaaacctttaaagaaacctttagaaggacttagacctcacatattaatgttgagaagttctgcttaattttaaaatggtttctataaagggttttattgtatgaaatagaactttatatttttgcatatgtatagaggataattatatttaatgtataactatagcattatggtgagtggaatttgacattgtccaaacctttttcatttttgagtgattaaaaatgaaatgtcctttgtaaa

SEQ ID NO: 962 - DNA, 1464 bp, Homo sapiens
cgttttccgctcctcgctacgtcatcgttgtgagcccgctatcagcggccagcgcgggcgcggccggagaccgtggggcccccggttgccgccccctcgggagccaccatgttggtgataccccccggactgagcgaggaagaggaggctctgcagaagaaattcaacaagctcaagaaaaagaaaaaggcattgctggctctgaagaagcaaagtagcagcagcacaaccagccaaggtggtgtcaaacgctcactatcagagcagcctgtcatggacacagccacagcaacagagcaggcaaagcagctggtgaagtcaggagccatcagtgccatcaaggctgagaccaagaactcaggcttcaagcgttctcgaacccttgaggggaagttaaaggaccccgagaagggaccagtccccactttccagccgttccagaggagcatatctgctgatgatgacctgcaagagtcatccagacgtccccagaggaaatctctgtatgagagctttgtgtcttctagtgatcgacttcgagaactaggaccagatggagaagaggcagagggcccaggggctggtgatggtccccctcgaagctttgactggggctatgaagaacgcagtggtgcccactcctcagcctcccctccccgaagccgcagccgggaccgcagccatgagaggaaccgggacagagaccgagatcgggagcgggatcgagaccgggatcgagacagagacagagagcgggacagggatcgggatcgggatcgagatcgagaccgggaacgggacagggatcgggagcgggatcgagaccgagaccgagagggtcctttccgcaggtcggattcattccctgaacggcgagcccctaggaaagggaatactctctatgtatatggagaagacatgacacccacccttctccgtggggccttctctccttttggaaacatcattgacctctccatggacccacccagaaactgtgccttcgtcacctatgaaaagatggagtcagcagatcaggccgttgctgagctcaacgggacccaggtggagtctgtacagctcaaagtcaacatagcccgaaaacagcccatgctggatgccgctactggcaagtctgtctggggctccctcgctgtccagaacagccctaagggttgccaccgggacaagaggacccagattgtctacagtgatgacgtctacaaggaaaaccttgtggatggcttctagggaacagagctggattccttgtgcctcatatgccccaatgctggtctcagtaaaacactgaggtggaagcttacacatctccctcagcctctggtttttcagcacttgggattggggttaagcctttaaaaacggctgtcaggtttgatctcagtgtaacgacatggccagtgcctgttccccactcccttgccccaaaaggatctggaacac

SEQ ID NO: 963 - DNA, 4221 bp, Homo sapiens
aattcggcacgagacaaaaagagaaagaaaatgccgaaaccaatcaacgtaagagtaactacaatggatgctgagctggaatttgccattcagcccaatacaactggcaaacaactttttgaccaggtggtgaaaacagttggtttgcgtgaggtctggttttttgggctgcagtatgtagacagcaaaggttattctacatggcttaaactaaataaaaaggtaacacagcaggatgttaaaaaagagaatcctttacagttcaagtttagagctaaattctttcctgaagatgtttctgaggaattaattcaagaaataacccagagactcttcttcttgcaagttaaagaagccatcttaaatgatgagatatattgcccgccagaaactgcagttcttttggcttcctatgctgtccaagccaagtatggagattacaataaagagattcataagccaggctacctggctaatgatagactcctaccccagcgtgtattggaacaacacaaactaacaaaagaacagtgggaagaaagaatacagaactggcatgaagaacatagaggaatgttaagggaggattctatgatggaatacctgaagattgcacaagatctagaaatgtatggagtcaactattttgaaataaaaaataaaaaaggaactgaattgtggctaggtgttgatgctttgggtctgaatatttatgagcatgacgacaagttaacacctaaaattggttttccctggagtgaaatcagaaatatttcatttaatgacaaaaaatttgttataaagccaatcgacaaaaaggcacctgattttgtgttttatgcacctcgtctgagaatcaataagcggattttggccttatgtatgggaaaccatgaactatacatgcgaagaaggaagcctgatactattgaagtacaacagatgaaggctcaggctagggaggagaaacatcagaagcagttggaaagggcacaattagagaatgaaaagaagaaaagagaaatagcagaaaaggaaaaggaaagaatagaacgtgaaaaggaagagctaatggaacgtctaaaacaaattgaagagcagacaattaaagctcagaaagaactagaagaacagactcgaaaagctctagaactggatcaagaacgaaaacgagcaaaagaagaagcagaacgacttgaaaaggagcgtcgagctgctgaagaggcaaagtctgccatagcaaaacaagctgccgaccagatgaagaatcaggagcagctagcagcagaacttgctgaattcactgccaagattgcacttctagaggaagccaagaagaaaaaggaagaggaagcaactgagtggcaacacaaagcttttgcagcccaggaagacttggaaaagaccaaagaagagttaaaaactgtgatgtctgccccccctccacctccaccaccaccagtcattcctccaacagaaaacgaacatgatgaacacgatgagaataatgctgaagctagtgctgaattatcaaatgaaggggtaatgaaccatagaagcgaggaagaacgtgtaaccgaaacacagaaaaatgagcgtgttaagaagcaacttcaggcattaagttcagaattagcccaagccagagatgaaaccaagaaaacacaaaatgatgttcttcatgctgagaatgttaaagcaggccgtgataagtacaagactctgcgacagattcgacaaggcaatacaaagcagcgtatcgatgagtttgaagcaatgtgagagctgttattttgcatatatgttcttcataagctgaaccaccaacagagaaaagcaggcctttgcagatatgatggaatgcatcccaccttgccaaagcacttacaccagtttgactgtgctagctaaaagacaaatttaaggggagctcttcaacattaaggcagtatgatatcatgcttggttttcttttttcttttggtccagggaatggagaatggtgttccattgcctcttttcacattttttttctttttcttttttttttctgttgaagattaacactaattatcacgtctgacaaatgtgtatgtgtggtttcagttctgtgtacattttaaaggataatggtgaacattttaatgggtttcccttgccctttccatatttaacctatttccacattctctctcactcacattttctcagtgtgcccttctcttatctgccatgtccatagccataattccaccatcatacagatcaggcagtgtttaaaatgatggtaggtagcacagtggacagtctttgatcatcatgtagaatatggctatgaatcaggaaagagattagaacatttaataatgtatgtacagctggtgcttagtttttttttaatctaaatttaattaccttattggatatttgatatttggttatttaatcacagtcatctttaacagcttacactgattggtgttttatctcctgtgatcctttgatggctttttttgcctaccatttcacagaggtttagacagcagtagtagctccctaggagagtttactgatgaaacagcctctgcaagattttaaaagttttgttcttttatagactgatttagaaaaacaaatgattagttaaaaaaagaaaatatacatttgttggtaactaatgttattttttaaaacctggacctttctggaagggcagcatataaaaacatcagtcccgaggaggggacaacaatactacctcactactacatctgtgatgactggttgttcaaacacaatggagtgtgtaaggtatatgttttataattcataaccatagcctcgatcatcaagaaatactttcgaaatttcattttccttcagaatatcttaagagtgctaaatttttaactgcctttttgtcgagtcaaactgtgggattctgatttgtattaaaattgtaagctcctcactggtatactatcatcctggaggggtgttgtatggctgagcaagagagagagagaatgagagagagactgtgtgtgtgtgtgtgtgtgtgtgtactctgtgtgtgtatgagagagagagagaaatgctaaccttgtagcatgtgaagaatgtctgtaccttgatacgatagttacataatcagtatatttggtttctagatcactgtgcttattttgtttcaatctctgactaaaaatacttaaatttggtttgttaattcttattttagaaattataattttagtttatattaatttcggttatagcttactgaagaaatctttccagttagaaggaggttctaatattcacatgttctaatactttgtttattgtaaaacagctaaatttggagatacgtaaagccttgttttctctgtgtggttcagctactttccatttggtattacacagtcaaatttacatttatctattaaaattgccattttattaaacattttcatgcacagtagattcaagttgtgtctgaaaatatctcttgtgcttttttgattttgctgactttaaaaggattaatctgggcagacattatgtaaaagaaaggttgcgtttaatatattttttgaactttgtaggacaaaacatagctggttaaccttgaagtgactgttgtaccatggttgtgcacatgcttcagaatcctatggaagagaatattcctacttgcagtacatcaaaggaatggatggtggaccctactattcatgttttgagacataaatgttcactttaaagcaattgcataatagataaaaacctgaactttcattggatttttgttaattttcctcattttgaattatgtgcactaccatagctacatcagtttgatacagtattgaaaaattatcagttatattttgctgtttatgatctatttgtagattaggattaaaatggatttaatccatttttaaggctgtgtgaatttttctaaacaagaaccatttgcaatatggatttcttagagattaaaccaattataacttattagcagtcgcgagcacatgttcatatagtcaatgtaaaaatacactaatgagtatttggtaaatcccagtaggcttttaccattagcataattttgtgttgtacaattaagttacaattacatctctaattttggataatattcattggttaacaataaagtgacaaaagctcatgcaaaaaaaaaaaaaaaaaaaa

SEQ ID NO: 964 - DNA, 1472 bp, Homo sapiens
gtggagggtcgcggcaggaacaagtgcgggggcggggcctcaaagccccgcccccaggcccagcggaaccctgaagaggagggggagggtgagccgggcgcggctgtgtcagctgagtgacagtcacgggaccgcgaccaactctgtctggcttcctagaggagcaggagggcggggcaagggtctcccagcgcgacaggacatggagaaagagcgagagactctgcaggcctggaaggagcgcgtggggcaggagctggaccgcgtggtggctttctggatggagcactcccacgaccaggagcacgggggcttcttcacgtgccttggccgcgaggggcgggtgtatgatgacctcaagtatgtgtggctgcaggggaggcaggtatggatgtattgtcgcctgtaccgcactttcgagcgcttccgccatgctcagcttctggacgcagcaaaagcaggtggtgagttcttgctgcggtatgcccgggtggcacctcctggcaagaagtgtgcctttgtgctgactcgggacggccgcccggtcaaggtgcagcgaaccatcttcagtgagtgtttctacaccatggccatgaacgagctgtggagagccacaggggaagtgcggtaccagacggaagcggtggagatgatggatcagatcgtccactgggtgcaggaggacgcgtcgggactgggccggccccagctccagggggccccggctgcggagcccatggcggtgcccatgatgctactgaacctggtggagcagctcggggaggcagatgaggagctggcgggcaaatacgcagagctgggggactggtgcgcccggaggattctgcagcacgtgcagagggatggacaagctgtgctggagaatgtgtcagagggtggcaaggaacttcctggctgcctggggagacagcagaacccaggccacacgctggaagccggctggtttctgctccgtcattgcattcggaaaggcgaccccgaacttcgagcccacgtgattgacaagttcctattgttgcccttccactccggatgggaccctgaccacggaggcctcttttacttccaggatgctgataacttctgccccacccagctggagtgggccatgaagctctggtggccacacagtgaagccatgattgccttcctcatgggttacagtgacagtggggaccctgtgctgctgcgcctcttctaccaagtggctgagtacaccttccgccagtttcgcgatcccgagtacggggaatggtttggctacctgagccgagagggcaaggtggccctctccatcaagggaggtcctttcaaaggctgcttccacgtgccgcggtgcctagccatgtgcgaggagatgctgggcgccctgctgagccgccccgcccccgccccctcccccgcccccacccccgcctgccgaggcgcggaataaaggctgagtccgctcc

SEQ ID NO: 965 - DNA, 10919 bp, Homo sapiens
gcacgagactgcgctcgcctccctcctcacgcgggcgggattttcttgccttgtgaaaaaccgtctcggcggctgcccccgcctcctctgctggcatgtgaaatggcggtcggcgagtggtttgcgtccgtgacatcatcatcatggcaacaagagctgcagcctgggaccgaggagcccgtgtgattcccggcggtggcgcagtggcggcagcaccagcaccgacgaaagcttcgagggcttctctccttgcggccccttgccgggtgctcctgaggaggcggcggcagcagcgcctacaccgccccgcccgccgttcctcgaggtgcctctgtgtgaggggagggggccgtgccgagaaggggagggggcgccgccgccgctgcggagggagccgccgccgctgctgctgccgctgccgggtcgccagtgaagggaggcagtggcggcggcggcgaacatgttttcagtaaggatagtgactgcagactaatacatggccagcccgctgcaggggctggatacctgccaatcccccctcacccaggcccctgtcaagaaggtgccggtggtgcgagtcttcggagcgaccccggcagaataaaacccaagacaagccacataaaagcaacctaaaaattaaactgtcatcatattatttgttttaaaactatggaataatatatctgaggaagatttctctcaaaattgtttttctcaatttcaagtcagaagacatgtcttcatctacatggcatctttccttacctctatgtgccatacgatggttatggacagcagccagaaagctatctttctcagatggcattcagtatcgacagagcacttaatgtggctttaggcaatccatcttccactgctcagcatgtgttcaaagtgtcattagtatcaggaatgcctttttatggttatcatgagaaggaaagacactttatgaagatctatctttacaatcctacaatggtgaaaaggatatgtgaacttttgcaaagcggagccataatgaataaattttaccagcctcatgaagcgcatattccctacctcctacagctcttcattgactacaatctttatggcatgaatttaataaatctggctgctgtcaagttccgaaaagcaagaaggaaaagtaatacattgcatgcaactggatcctgcaagaatcatttatcaggaaattctcttgctgatactttatttcggtgggaacaagatgaaataccaagctctttaatattggaaggtgttgaaccacacagtacatgtgaattacaagtggatgctgtagctgctgatatcttaaatcgtctggacattgaagctcaaattggtggaaaccctggtctacaggccatatgggaagatgaaaagcaacggcgaagaaacagaaatgaaacttctcaaatgagccaacctgagtcacaagatcacaggtttgtgccagcaacagaaagtgaaaaaaaatttcagaagagacttcaggaaattctcaaacagaatgatttctctgtaacattatcaggatctgtggactacagcgatggatcccaggagttctctgctgagttaacattgcactctgaggttctgtctcctgaaatgcttcagtgtacaccagccaatatggtagaagttcacaaagacaaagagtcaagcaaaggtcacactagacacaaagtggaagaagctcttattaatgaagaagcaattttgaaccttatggaaaatagtcagacttttcagcctttgacccaaagactgagtgagtcacctgttttcatggacagtagtcctgatgaggctctggtacatcttcttgctggtttggaaagtgatggatatcggggggaaagaaataggatgccatcaccatgtcgctcctttggaaataataaatatccacaaaatagtgatgatgaagaaaatgaaccacagattgaaaaagaggaaatggagcttagtttggtgatgtcccagagatgggacagcaatattgaagaacattgtgccaaaaagagatcactgtgcagaaatacccacagaagttcaactgaagatgatgactcatcttcaggagaagaaatggaatggagtgataacagtttgcttctagccagtctttctatacctcagttagatggaactgcagatgaaaatagtgacaatccattgaacaatgaaaattctagaacccactcttctgtaattgcaacaagcaagctttcagttaaaccctccatctttcacaaagatgctgctacattagaaccctcatcttctgctaagattacctttcagtgtaaacacacaagtgccctttcttcccatgttttgaacaaggaagatttaattgaagacctttcacagacaaacaaaaatacagaaaaaggtctagataactcagtcacttcttttacaaacgaaagcacttattctatgaaataccctggatctttaagcagtactgttcattcagaaaattctcataaagagaatagtaagaaagagatcctcccagtatcttcctgtgaaagtagtatttttgattatgaagaagatattccatctgttacaagacaagtaccaagtagaaaatatacaaacattagaaaaatcgaaaaggattccccttttatacatatgcaccgtcaccctaacgagaatacattgggcaaaaattctttcaacttttctgacttaaatcattcaaaaaataaagtatcctctgaaggaaatgaaaaaggaaacagcacagctctgagtagtttattcccttcatcatttactgaaaattgtgaattactgtcatgctcaggggagaatagaactatggtgcattctcttaatagcactgctgatgaaagtggactaaataaacttaaaattaggtatgaagaatttcaagaacataaaacagaaaagccaagcctcagccagcaagcagcacactatatgttttttcccagtgttgttctttctaactgtcttactagaccacagaaactatctcctgtcacatataaattacaacctggcaataaaccatcccggttaaaattgaataaaaggaaacttgcaggtcatcaggagacttctaccaaaagtagtgagactggatccacaaaagataattttatacaaaataatccttgtaatagtaatcctgagaaggataatgcattggctagtgatttaactaaaaccactcgtggagcttttgaaaataaaacacccacagatggttttatagactgtcactttggagatggaacgttagaaactgagcagtcctttggactatatggaaataaatacacacttagagccaaacgcaaggtaaattatgagactgaagacagtgagtcaagttttgtaactcacaactcaaaaattagtctacctcatcccatggaaattggtgaaagtttagatggaactctcaaatcccgaaaacgaagaaaaatgtctaaaaagctgccccctgtcatcataaagtatattattattaatagatttagagggagaaaaaatatgcttgtgaagctaggaaaaatagactctaaagaaaaacaagtaatattaacagaagaaaaaatggaactatataaaaagcttgcacctttgaaggacttttggccaaaagttcccgactcccctgcaaccaaatatcccatttatccactaacaccaaagaaaagtcacagaagaaagtcaaaacataaatctgctaagaaaaaaactggtaaacaacaaaggacaaataatgaaaatattaaaagaactttgtctttcaggaaaaaacggtcacatgctattctttctcctccctcaccatcttacaatgctgaaaccgaagattgtgacttgaattatagtgatgttatgtctaaactaggttttctttctgagagaagcacaagtcccataaattcttctccacctcgctgctggtctcccacagatccaagagctgaagaaatcatggctgctgcagaaaaagaggcaatgctttttaagggtcctaatgtatgtaagaagactgttaattctcgtataggaaaaactagtcgcgcaagagcacagattaagaaatcaaaagcaaagcttgctaatccctctatagttactaagaaaaggaacaaacgaaatcagacaaataaactagtagatgatggaaaaaagaaaccaagagcaaaacaaaaaacaaatgagaaaggtacatcgagaaagcatataacacttaaggatgaaaaaataaaatctcagtctggtgctgaggttaagtttgtactgaaacaccagaatgtgtctgaatttgcaagtagttctggaggctctcaactactttttaaacagaaagatatgccactaatgggctctgctgtagatcatcccctttctgcttccctacccactggaattaatgcacaacagaagttatctggctgcttttcttctttcttagaaagcaagaagtctgtagatttgcagacattccccagttcacgagatgatttgcatccatcagttgtttgtaattctataggacctggagtctcaaaaattaatgttcaaaggcctcataatcaaagtgctatgtttactctaaaggaatcaacgttaattcaaaaaaatatatttgacctttccaatcatttatctcaggtagcacagaatacacagatatcttctggtatgtcctcaaagatagaagataatgcaaataatatacaaagaaactatttgtcatcaatcggaaagttaagtgaatatcgcaattccctagaatcaaagctggaccaagcatatacccctaattttttgcattgcaaagacagtcagcagcagattgtgtgcatagcggaacagtcaaagcacagtgaaacttgttctccgggaaatacagcttcagaggaaagccaaatgcctaataattgctttgtaacttccttgagaagtccaatcaaacaaatagcatgggagcaaaagcaaaggggctttattttagatatgtcaaattttaaacctgaaagagtaaaaccgaggtcattatcagaagcaatttcacaaaccaaagcactttctcagtgtaaaaatcgaaatgtgtcaacaccttcagcatttggtgaaggacagtctggactggcagttctaaaagaattgttacaaaaaagacagcaggaagcacaaaatgcaaatactacacaagacccattatccaataaacatcaaccaaataaaaatatttctggttcccttgagcataacaaagcaaataaacggacacgatcggtaacgtccccaagaaaacctcgaactcccagaagtacaaaacaaaaagaaaaaatccccaaacttctcaaagtagactctttaaatttacaaaactctagccagttggataactctgtatcagatgatagtcccatctttttttcagatccaggctttgaaagttgttactcacttgaagatagtttatctcctgaacataattataattttgatattaacacaataggtcagactggattttgtagcttttattctggaagtcagtttgtcccagctgatcagaatttgcctcagaagttcctaagtgatgctgttcaggatctttttccaggacaagctatagaaaaaaatgagtttttaagtcatgacaaccagaaatgtgatgaagacaagcatcataccacagactcagcctcatggattagatctggtactttaagtcctgaaatttttgagaagtcaaccatagatagcaatgagaatcgtcgccacaaccagtggaaaaatagctttcatcctctaacaactcggtctaactcaataatggattctttctgtgttcagcaggcagaagactgtctaagtgaaaaatctagattgaataggagttcagtaagcaaagaagtgtttcttagcctcccacagccaaacaattcagactggattcaaggtcacaccagaaaagaaatgggacagtctcttgactcagccaatacctcttttactgcaatactctcctcccctgatggtgaacttgtagacgtggcctgtgaagatttagaactgtatgtttcaagaaacaatgatatgttgacaccaactcctgatagttcaccaagatctactagctctccttcacaatctaaaaatggcagcttcacccctcgaactgctaacattctgaaaccacttatgtcccccccaagtagggaagaaattatggcaactttgttggatcatgacctgtctgagactatttaccaggaaccattttgcagtaatccttctgatgtaccagaaaagcccagggagattggtggacggctcctcatggtagaaactcgacttgcaaatgatctggctgagtttgagggagacttttccttggaaggacttcgtctttggaaaacagcattctcagcaatgactcagaatccaaggccagggtcaccccttcgcagtggccaaggagttgtcaataaagggtcaagtaatagccctaagatggttgaagataaaaaaattgtgattatgccttgcaaatgtgccccaagtcgacaactggttcaagtgtggcttcaagccaaagaagaatacgaacgttccaagaaactgcctaaaaccaagccaactggagttgtaaaatctgctgagaactttagctcttcagttaacccagatgacaaacctgtagtgcctccaaaaatggatgtaagtccatgtatactccccactacagcacataccaaggaggatgttgataattctcagattgctttacaagcaccaaccacgggatgtagtcaaactgcaagtgaaagtcagatgctgccaccagttgcctctgcaagtgatcccgaaaaagatgaagatgatgatgataactattacattagttatagctcccctgattctccagtaattcccccttggcaacaaccaatatccccagattccaaagcattaaatggagatgatagaccctcatcaccagtagaggagctgccttcattggcttttgagaacttcttaaagccaataaaagatggtatacaaaaaagcccctgcagtgagcctcaagagcctctagtgatatctccaattaatactagggcaagaactgggaaatgtgaatcactttgctttcatagtacaccaatcatacagagaaaacttctggaaaggcttcctgaagcacctggccttagcccattatcaacagaaccaaaaacacagaagttgagtaataagaaaggaagtaatactgacactcttagaagagtactgttaacacaagcaaagaatcaatttgcagcagtaaataccccacagaaagaaacttctcagattgatggaccatctttaaacaatacttacggtttcaaagtcagcatacaaaacttacaggaggcaaaagctttacatgagatacaaaatcttaccctaatcagtgtggagttgcatgctcgaactagacgagacttagaaccggatcctgaatttgacccaatctgtgctctgttctactgcatctcatctgacactccactgccagatacagaaaaaacagaactcacaggtgtaatagtgattgataaagacaagacagttttcagtcaagatatcagatatcagactccattacttattagatctggaattacaggactcgaagtcacctatgctgctgatgagaaggcactttttcatgaaattgcaaatataataaagaggtatgatcctgatattctgctaggatatgagattcagatgcattcctggggttacctcttacaaagggctgccgctttaagtattgacttatgtcggatgatctctcgggtgccagatgacaaaattgagaacagatttgcagctgaaagagatgagtatggatcatatacaatgagtgagataaatattgttggccgaattacactaaatctttggagaatcatgagaaatgaggtggctctaactaactacacctttgaaaatgtgagctttcatgttcttcatcagcgttttcccctctttacctttcgagtcttgtcagactggtttgataacaagacagatctatacagatggaaaatggttgatcattatgttagccgtgtccgtggaaatctccaaatgttagaacagctggacctgattgggaaaaccagtgagatggctagactttttggcattcagtttttacatgtactgacaaggggttcacagtaccgtgtggaatcaatgatgttgcgtattgctaaaccaatgaactatattcctgtgacacctagtgttcagcaaagatcccagatgagagccccacagtgtgttcctctaattatggagcctgaatcccgcttctatagcaactctgttctcgttttggatttccaatcactttatccttctattgtgattgcatataactactgcttttccacctgccttggccatgtggagaacttgggaaagtatgatgagttcaaatttggctgtacctctctgagagtacctccagatttactttaccaagttaggcatgatatcacagtgtcccccaatggagtagcttttgtcaagccttcagtaagaaaaggtgtactaccaagaatgcttgaagaaattttgaagactagatttatggtgaagcagtcaatgaaggcttacaagcaagacagagccctgtcacgaatgcttgatgcgcgtcagttgggacttaagctgatagcaaatgtcacatttggctatacatctgctaatttttctgggagaatgccatgcattgaggttggcgatagtattgttcacaaagccagagagaccttggaacgagctattaaactggtgaatgataccaagaaatggggggctagggttgtatatggcgatactgacagtatgtttgtgctactgaaaggagccactaaggagcagtcttttaagattggtcaggaaattgccgaagctgtaactgctaccaatcctaaaccagtgaaattgaagtttgaaaaggtatatttgccctgtgttttacaaacaaaaaagaggtatgtgggttacatgtatgaaacactggatcagaaggacccagtatttgatgcaaaaggaatagaaacagtcagaagagattcctgccctgctgtttctaagatacttgagcgttctctaaagctgctatttgaaacgagagatataagtctaattaaacagtatgttcagcgacaatgtatgaagcttctggaaggaaaggccagcatacaagactttatctttgccaaggaatacagaggaagtttttcttataaaccaggagcttgtgtgccagcccttgaacttacaaggaaaatgctgacttatgaccggcgctctgagcctcaggttggggagcgagtgccatacgtcatcatttatgggacccccggagtaccacttatccagcttgtaaggcgcccagtggaagtcctgcaggacccaactctgagactgaatgctacttactatattaccaagcaaatccttccacccttggcaagaatcttctcacttattggtattgatgtcttcagctggtatcatgaattaccaaggatccataaagctaccagctcctcgcgaagtgaacctgaagggcggaaaggcactatttcacaatattttactaccttacactgtcctgtgtgtgatgacctaactcagcatggcatctgtagtaaatgtcggagccaacctcagcatgttgcagtcatcctcaaccaagaaatccgggagttggaacgtcaacaggagcaacttgtaaagatatgcaagaactgtacaggttgctttgatcgacacatcccatgtgtttctctgaactgcccagtacttttcaaactctcccgagtaaatagagaattgtccaaggcaccatatctccggcagttattagaccagttttaaattgtcaatatcacagtattacaggtgctatttttttcagtgcttaccactaaactgttgtgcatggtgctttttaactttcatcgagtcaaggatgttcactgtctgttatctgaagactatgaagacttctatgctaaccgaattaaaatgtacttgttgatctctgaatagctcacttcttacaatgtacaaattcctcattctgtcaccttttaaacattgttttataatgcaggtgttggatttgctccagtatgtgtaccatcttgtaaattcatttgagtagatcatgtttacttcccagtggaaggagcactgaaaacctcttaaagaaaaagcatttgtgtgttttccttgaactgtctgtatcaagacgtgttacttcgagatatccattcactttataattttgactgcaaaatattttgtaaatacacttttttacttttcaaacgagtaaaataatgtgcaatgatttttatacaaatgattttcaagttgtttggtatatttcctctaggttttgcttgactcaaagtagatcgttattttgatcaaactgtgcaaacagtagtaccacgtgtagcattttgaaacattattttttaaaaaatgctgtcttgctttagctattaatggggcattgtgaggaactgtgcaaagacatttttgttacaaacctgtgggcctgttgcaatactttaaaaataaaaaattttattccatttgcttgttttgtatagacatttctattgcttctaaatatacttaaaatattttctttccttatgtactgtacagttaatcttatttgccatcatcttgaacacaaaatgtgtatttagaatatttgtataactgtgtaaaataaaaaaggaattatgtggtcagtgcattgttttttaaactggaaatcattttgttttaaaagttaa

SEQ ID NO: 966 - DNA, 5185 bp, Homo sapiens
gtccttgcttcttttttcattgatgtaaatttttttaacttaatatgaaaactctccaagtcttgatcatcagccaggattttgccacagcaatttcattctcttatcggagcttgtatgtgtcaaagtatacttcagagtgcaaacattaagcaagtaatatattttacctacagatacttatgaagacattctttcgctatcgtgagtaaaagtatataaagctgtttctaactgaaaatgcttgaaataagcctgtaatagaaatattttttcattttttaaaaaagggcggaattcccagactgtcttcgccttcttgcacttcgcgggagaagttgttggcgcgaatggatcctgagcctcgataacagattcctcaaccggcccacccgccagccagccagcgccttcatcctggggctgcgatggacattcggaaattctttggagtaataccaagtggaaagaaacttgtaagtgaaacagtaaagaagaatgagaaaacaaagtctgatgaagaaactttaaaagcaaagaaaggaataaaggaaatcaaggtaaatagctcccgtaaagaggatgacttcaaacaaaagcaaccaagcaagaaaaagaggatcatctatgattcagattcagagtcagaggagacgttgcaggtaaaaaatgccaaaaagccaccagaaaaactgccagtatcttctaaacctggtaaaatttcacggcaggatcctgttacatacatttcagaaacagatgaagaagatgactttatgtgtaagaaggcggcctctaaatcaaaagagaatggaagatctacaaatagtcatcttggaacatcaaacatgaaaaagaatgaagaaaacactaagaccaagaataagcctttatcaccaataaaacttacacccacatcagtacttgattattttggaactggaagtgtccaaagatctaataagaagatggtggcaagcaaaagaaaagagctttcacaaaatacagatgagtctggattaaatgatgaagccatcgccaagcaattacagcttgatgaagatgcggagctggagaggcagttgcatgaagatgaagagtttgccagaacattagccatgttggatgaagaacccaagaccaaaaaggctcgaaaggacacagaagcgggagaaacgttttcatctgtccaagccaatttaagtaaagcagaaaaacataaatatcctcataaagtaaaaacagcacaagtttcagatgaaagaaagagctacagtcctaggaagcaaagtaaatatgaaagttcaaaagaatctcagcaacattccaagtcatcagctgacaaaataggagaagtctcttctcccaaggccagttctaagctggcaattatgaaaagaaaagaagagagctcttataaagaaatagagcctgtggcctcaaaaagaaaagaaaatgccattaaattgaaaggagagacaaaaactcctaagaaaaccaaaagttctccagctaaaaaagagtctgtaagtcctgaagattctgaaaagaaacgcactaattatcaagcttatcgaagctacttaaatcgagaaggtcccaaggctctgggctccaaagaaataccaaagggagctgaaaattgcttggaaggccttatatttgtaatcacaggcgtgctggagtctattgaacgagatgaggccaagtctctaattgaacgttatgggggaaaagtaacaggaaatgtcagcaagaaaacaaattatcttgtcatgggtcgtgatagtggacagtccaagagtgataaggccgcagccttggggacaaaaattattgatgaagatggcctgttgaatctgattcggactatgccaggcaagaaatccaagtatgaaatagcagttgaaactgagatgaagaaagagtccaaactggagagaacaccccaaaaaaatgtccaaggaaaaagaaaaattagtccatctaaaaaggaatcagaatctaaaaagagcaggccgacttccaaaagggacagtttggcaaagacaataaaaaaggaaacagatgtgttttggaaaagcctggatttcaaggagcaggtggctgaggagacaagtggtgacagcaaggctaggaatttggctgatgacagcagtgaaaacaaagtggaaaatttgctctgggtggataaatataagccaacctcgctcaagaccataattggacagcaaggtgaccagagctgtgccaacaaactcctacgctggctccgaaactggcaaaagagttcttccgaagataaaaaacacgcagcaaagtttggtaaattttccggcaaagatgatggctctagttttaaagcagcgttgctgtcaggccctcctggtgttggcaaaaccaccacagcttccctggtgtgtcaggagttgggatacagctacgtggaactgaatgcaagtgacacccggagtaagagcagtttgaaggcgattgttgctgagtcactgaacaataccagcatcaaaggcttttattcaaatggagcagcctcttcagtaagcacgaaacatgctctcatcatggatgaagtagatggcatggcaggcaatgaggataggggaggaattcaggaattaattggcctgataaaacatactaaaattcccattatttgtatgtgcaatgatagaaatcatcccaagattcgctctctggttcattattgttttgatcttcgttttcaaagacctcgggttgaacagattaagggtgctatgatgtctattgcatttaaagaaggtttaaagattccccctccagctatgaatgaaataattttgggagccaatcaagatatcagacaggttttacataatctgagtatgtggtgtgcacgaagtaaagcattaacctatgaccaggccaaagctgattctcacagagccaaaaaggatatcaaaatgggcccatttgatgttgcccggaaagtgtttgcagctggagaggagactgctcacatgtcacttgtggacaagtcagatctcttttttcatgattattcaatagcacccctcttcgtccaggaaaattacatacacgtgaagcctgtagcagcagggggtgacatgaaaaagcacctgatgcttttaagcagagcagcagacagcatatgcgatggtgacctagtggacagccagatccggagtaagcaaaactggagtcttctgcctgcgcaggccatttatgccagtgttcttcctggagagttgatgagggggtacatgacccagtttcccaccttcccaagctggctggggaagcactcgtctacaggcaaacatgatcgtattgttcaggacctggccttgcatatgagtctcagaacttactccagcaaaaggactgtaaacatggattatctgtcgcttctaagggatgcacttgtacagcccttgacctcacaaggagtagacggagtacaggatgttgttgcacttatggacacatattatttgatgaaagaagactttgagaatatcatggaaatcagcagctggggtggcaaacctagtcccttttcaaagctggatcccaaggtgaaagcagccttcacaagagcttacaataaggaagcccaccttactccatactcacttcaagctataaaggcatctagacacagcacaagcccatccctggattcggaatacaatgaagaattaaatgaagatgactctcaatctgatgagaaagaccaagatgctatagaaactgatgccatgatcaagaaaaagacaaaatcttcaaagccttcaaaaccagaaaaagataaggagcccagaaaaggaaaaggaaaaagttcgaagaaatgaaaccatttttcactagcgacagccactttttactctccctcctgaccagtccagctggtctagagaaagccttgttttttcccagagcaaccatgttttagcataatgggatgacctggtgtcccattataaataaagggtggtatggctagaagggtatgagcagtaggcttatgtacacctcttatagaggttgataggactgcttgggtcctccactgtcctctgtcaatctagttagacgtgcttctgaatgactgtagaattggaactagaaactacacctgggctttggagtcagattttagttaacaataatgagcctggagcagtagtactaaggcgtcttttgtaggcttaagaatttatcctaatggcctttataggaccaatgctgattttttttaaaggcagttcctattatgtggtgaaattttgtaaataaatgattatacaaaacagtcaccacctagaactgggtattctttgtacattgtcagatatctttcaaagtataaattaggaataaaaatgttccacatgatatgtgtacaaattctttttaagattgtcatcttgtacagcaaaatattatgttggtatattacttccttattaatttgcaaatgattggattaaaaaagctcactgtattccttactaacctgttgtgtgaaacataacattggcagtcgaggagtcagaactcggattcccagcctcactccctctgtgtgtgttgaccacgtctctgctgtgaataggatttcatgcagtggtctgttatggggctttgcagcgtggggggctgcagaagattctcagacattcttatccttctggagtctcaacccatcaggttcagaccagtaggaaccaggctgggtcaggctcttaatttcactacggtgggggacaaaatgaacactggcttttgttcactttgcccctgagagatctagtcctgtcctgtgatggcttccacaaaccctgttggaagtttgggttattcctataactgtatgtgttgagtggccgtgacgtatggacctagcctggaatttagatgtctagctattttttaatcttgttggtaaatgctcagaggtctgtgctacctctgtgaggtatatactaaaatgaatgtaaaataaggatcgtattccctgctttaaggaactggtagtcttgtttgggtgatgagacaaagttcttgagacatttaaactgtatttaccagtgtgaaaaatgtcatttatggagattaattcattatggaaataaaacattgcctaagcccttgcctgctg

SEQ ID NO: 967 - DNA, 1345 bp, Homo sapiens
aaaacagccggggctccagcgggagaacgataatgcaaagtgctatgttcttggctgttcaacacgactgcagacccatggacaagagcgcaggcagtggccacaagagcgaggagaagcgagaaaagatgaaacggacccttttaaaagattggaagacccgtttgagctacttcttacaaaattcctctactcctgggaagcccaaaaccggcaaaaaaagcaaacagcaagctttcatcaagccttctcctgaggaagcacagctgtggtcagaagcatttgacgagctgctagccagcaaatatggtcttgctgcattcagggcttttttaaagtcggaattctgtgaagaaaatattgaattctggctggcctgtgaagacttcaaaaaaaccaaatcaccccaaaagctgtcctcaaaagcaaggaaaatatatactgacttcatagaaaaggaagctccaaaagagataaacatagattttcaaaccaaaactctgattgcccagaatatacaagaagctacaagtggctgctttacaactgcccagaaaagggtatacagcttgatggagaacaactcttatcctcgtttcttggagtcagaattctaccaggacttgtgtaaaaagccacaaatcaccacagagcctcatgctacatgaaatgtaaaagggagcccagaaatggaggacatttcattctttttcctgaggggaaggactgtgacctgccataaagactgaccttgaattcagcctgggtgttcaggaaacatcactcagaactattgattcaaagttgggtagtgaatcaggaagccagtaactgactaggagaagctggtatcagaacagcttccctcactgtgtacagaacgcaagaagggaataggtggtctgaacgtggtgtctcactctgaaaagcaggaatgtaagatgatgaaagagacaatgtaatactgttggtccaaaagcatttaaaatcaatagatctgggattatgtggccttaggtagctggttgtacatctttccctaaatcgatccatgttaccacatagtagttttagtttaggattcagtaacagtgaagtgtttactatgtgcaagggtattgaagttcttatgaccacagatcatcagtactgttgtctcatgtaatgctaaaactgaaatggtccgtgtttgcattgttaaaaatgatgtgtgaaatagaatgagtgctatggtgttgaaaactgcagtgtccgttatgagtgccaaaaatctgtcttgaaggcagctacactttgaagtggtctttgaatacttttaataaatttattttgataaataatattg

SEQ ID NO: 968 - DNA, 1620 bp, Homo sapiens
gaattccgggtttgaaaaggagttctagggaagaagagagttagttagcacatcaatgggagcagggctcttaccccacgtggtgttacatatatattattttcatacatggtttctggctcataagttccttagcccttgctatagtcttttgtgttcggtcttaagggcaggactgtactcttccctcacctttctaattgtgcatcttaagaccttccccagagagggtggtgccctgtagttgtgggaaggaatgctggcatcatgaagcttccataaaaacccgagaaacgagcttctggatagctggacacatggaggtcctggagggtggagcccagggaggcatggaagctccacagcccttcccccataccttaccctatttcctctgtatcctttgtaatatcctttatgataaaccagcaaatgtgtgtaaatgtttccctaaggtctgtggccactccagcaaattaattgaacctaaagagggggtcgtgggaaccccaacttgaagccagtcagtcagaagttctggatgtccagacttcagactggtgtctgaaagggtggaggcagtcttggggaccgagcccccaatctatgggatctgacactatctccagtagtgttggaattgagtcaccagcgtgtccactggttagtgtgtgagaaactccctaccattggtcacagaagtcttcttctgtgttgatagttgtagtgtgacagcagaggaaaaacaaagtcagaaagagttttcccgaacacacccaatttctccattttactatccatttccacaaacactgactacaatagaagtataaaaattactccactgcatcattcagctttccatctctctcagacaccaagctgcagatccaggtcactttgtaggtcaccacctagaggggaggaagacctcgctttggagagtgggaataaaacgctcgtggaaaagggtacacgcttttctgggaaagtgaggccaccatggctctggagaagtctcttgtccggctccttctgcttgtcctgatactgctggtgctgggctgggtccagccttccctgggcaaggaatcccgggccaagaaattccagcggcagcatatggactcagacagttcccccagcagcagctccacctactgtaaccaaatgatgaggcgccggaatatgacacaggggcggtgcaaaccagtgaacacctttgtgcacgagcccctggtagatgtccagaatgtctgtttccaggaaaaggtcacctgcaagaacgggcagggcaactgctacaagagcaactccagcatgcacatcacagactgccgcctgacaaacggctccaggtaccccaactgtgcataccggaccagcccgaaggagagacacatcattgtggcctgtgaagggagcccatatgtgccagtccactttgatgcttctgtggaggactctacctaaggtcagagcagcgagataccccacctccctcaacctcatcctctccacagctgcctcttccctcttccttccctgctgtgaaagaagtaactacagttagggctcctattcaacacacacatgcttccctttcctgagccggaattc

SEQ ID NO: 969 - DNA, 1414 bp, Homo sapiens
cgccaaccccacctagatgcaaagcaggattcaaaagaacatctttgcgttttctaccggctccccatcatcgtactagggaggaagaagcgggtgagaaacaaaacttctttccattgtcctgcccgtttctgcggacttgttctgaggccgaggcacctctaagatactgatggctctgcagaggacccattcattgcttctgcttttgctgctgaccctgctggggctggggctggtccagccctcctatggccaggatggcatgtaccagcgattcctgcggcaacacgtgcaccctgaggagacaggtggcagtgatcgctactgcaacttgatgatgcaaagacggaagatgactttgtatcactgcaagcgcttcaacaccttcatccatgaagatatctggaacattcgtagtatctgcagcaccaccaatatccaatgcaagaacggcaagatgaactgccatgagggtgtagtgaaggtcacagattgcagggacacaggaagttccagggcacccaactgcagatatcgggccatagcgagcactagacgtgttgtcattgcctgtgagggtaacccacaggtgcctgtgcactttgacggttagatgccaccatgtagggattatcgcgagtggttgaccttacacttactccttaaatagcagtgagtaatgcatttgagctgccccaggctctgtctcctcagctcatttcttactctttttctctatataactcattctattaaatacattgcaccaaagagatatggagacataaacctgtaatgaatgaggctgggcttttctgtaataagcttccttttataatactggtcagcttagctctctcagatcctatcctgtggaatttagttattatgtgtatttatgtagtatttcaaacatttcaaaatgctttcatctatgtttatcacattttaataccacagcacttataatgatgtcactacatatagaagctcaaagttaagggatttgctgaagactgtaaagttaatggaagaattgagacaaaaatccagtgtagctggccacttatccagggctttttctacttcatcacaaggaatgttttgaaagtgtctgctttttttatccttaaaattcacctgtcagggaggcattaaaaatttggaaatgtatgccagcaaaatgtgagctctgtattttttggcattcttatgtttgggtttaataagattaagaaaatgatactgggaattttctttttcctgaaactttgaatcaccctagtaagtcaaagtactaaaaaatgtactagatcattaagacttatgtgctcttactgattgaaagattttttatgttttccttgtaataaaggacctaaaccgaaggtacctgaaaaaaaaaaaaaaa

SEQ ID NO: 970 - DNA, 2824 bp, Homo sapiens
ggagctgttgcggggtccgcggggaagtcttggcggtggagccatggtcggccaactgagcgagggggccattgcggccatcatgcagaagggggatacaaacataaagcccatcctccaagtcatcaacatccgtcccattactacggggaatagtccgccgcgttatcgactgctcatgagtgatggattgaacactctatcctctttcatgttggcgacacagttgaaccctctcgtggaggaagaacaattgtccagcaactgtgtatgccagattcacagatttattgtgaacactctgaaagacggaaggagagtagttatcttgatggaattagaagttttgaagtcagctgaagcagttggagtgaagattggcaatccagtgccctataatgaaggactcgggcagccgcaagtagctcctccagcgccagcagccagcccagcagcaagcagcaggccccagccgcagaatggaagctcgggaatgggttctactgtttctaaggcttatggtgcttcaaagacatttggaaaagctgcaggtcccagcctgtcacacacttctgggggaacacagtccaaagtggtgcccattgccagcctcactccttaccagtccaagtggaccatttgtgctcgtgttaccaacaaaagtcagatccgtacctggagcaactcccgaggggaagggaagcttttctccctagaactggttgacgaaagtggtgaaatccgagctacagctttcaatgagcaagtggacaagttctttcctcttattgaagtgaacaaggtgtattatttctcgaaaggcaccctgaagattgctaacaagcagttcacagctgttaaaaatgactacgagatgaccttcaataacgagacttccgtcatgccctgtgaggacgaccatcatttacctacggttcagtttgatttcacggggattgatgacctcgagaacaagtcgaaagactcacttgtagacatcatcgggatctgcaagagctatgaagacgccactaaaatcacagtgaggtctaacaacagagaagttgccaagaggaatatctacttgatggacacatctgggaaggtggtgactgctacactgtggggggaagatgctgataaatttgatggttctagacagcccgtgttggctatcaaaggagcccgagtctctgatttcggtggacggagcctctccgtgctgtcttcaagcactatcattgcgaatcctgacatcccagaggcctataagcttcgtggatggtttgacgcagaaggacaagccttagatggtgtttccatctctgatctaaagagcggcggagtcggagggagtaacaccaactggaaaaccttgtatgaggtcaaatccgagaacctgggccaaggcgacaagccggactactttagttctgtggccacagtggtgtatcttcgcaaagagaactgcatgtaccaagcctgcccgactcaggactgcaataagaaagtgattgatcaacagaatggattgtaccgctgtgagaagtgcgacaccgaatttcccaatttcaagtaccgcatgatcctgtcagtaaatattgcagattttcaagagaatcagtgggtgacttgtttccaggagtctgctgaagctatccttggacaaaatgctgcttatcttggggaattaaaagacaagaatgaacaggcatttgaagaagttttccagaatgccaacttccgatctttcatattcagagtcagggtcaaagtggagacctacaacgacgagtctcgaattaaggccactgtgatggacgtgaagcccgtggactacagagagtatggccgaaggctggtcatgagcatcaggagaagtgcattgatgtgagaggagcagtgccaatcgggcagaagtttgcaaataggcagaatggaatcgatttcctcccacctccgtgtgacgatcccatgttagctacacagtgcagaggctcttgatggtggactaagcaatttcctcccttgtgcgcatctcagaacccatcggtaggcaaaggaaaatacgctcaggtggttgtggtgtagactgtgtcaggcctacggagtcagccagtggctagcgcaagaccagtcactccctctgccttcaggcttctgtcaatttcattatcatcaagcaggaattatgtcgtaagtcactgaccctaactgcagaccatgaagtaaattatgtaactaggtttttgcttctccagtggtgaccaccccccccccatccccgctcacaacttgggttcttctcagcggggcgagctgagaagcggtcatgagcacctggggattttagtaagtgtgtcttcctagaattcgaaggctctctctttctagaggtgctacatagttggtaatgcttggaatggcaatagggtagaatgattaatcaaaggcatatcttctatatctgaagagtatccttccttcagggtttaatagactgagtcagatgggtctgatattaatcaaaattgtctcttctgaggaccgctgataagcattgacttgctgtcccctaaggaaatccgagcggctacaaagcgtttctttacttttcacttcaattaatgctgcgcttcgcttggtgagtgcgtactttttctacctgtacacattcctgcattcatgtattttgttttttttgactaaagctatgttacatggaaaggattttgaagccttttgtttcccttgctttgttttaataaacagtatattctttggttgtgaatcctaaaaaaaaaaaaaaaaaaaaaaaaaaaaa

SEQ ID NO: 971 - DNA, 2018 bp, Homo sapiens
cctttccgtctggcggcagccatcaggtaagccaagatgggtgcatacaagtacatccaggagctatggagaaagaagcagtctgatgtcatgcgctttcttctgagggtccgctgctggcagtaccgccagctctctgctctccacagggctccccgccccacccggcctgataaagcgcgccgactgggctacaaggccaagcaaggttacgttatatataggattcgtgttcgccgtggtggccgaaaacgcccagttcctaagggtgcaacttacggcaagcctgtccatcatggtgttaaccagctaaagtttgctcgaagccttcagtccgttgcagaggagcgagctggacgccactgtggggctctgagagtcctgaattcttactgggttggtgaagattccacatacaaattttttgaggttatcctcattgatccattccataaagctatcagaagaaatcctgacacccagtggatcaccaaaccagtccacaagcacagggagatgcgtgggctgacatctgcaggccgaaagagccgtggccttggaaagggccacaagttccaccacactattggtggctctcgccgggcagcttggagaaggcgcaatactctccagctccaccgttaccgctaatataagtaaagtttgtaaaattcatacttaataaacaatttaggacagtcatgtctgcttacaggtgttatttgtctgttaaaactagtctgcagatgtttcttgaatgctttgtcaaattaagaaagttaaagtgcaataatgtttgaagacaataagtggtggtgtatcttgtttctaataagataaacttttttgtctttgctttatcttattagggagttgtatgtcagtgtataaaacatactgtgtggtataacaggcttaataaattctttaaaaggagagaactgaaactagccctgtagatttgtctggtgcatgtgatgaaacctgcagctttatcggagtgatggcaatgctctgctggtttattttcaagtggctgcgttttttttagtttggcaggtgtagactttttaagttgggctttagaaaatctgggttagcctgaagaaaattgcctcagcctccacagtaccattttaaattcacataaaaggtgaaagctcctggttcagtgccatggcttcatggcattcagtgattagtggtaatggtaaacactggtgtgttttgaagttgaatgtgcgataaaattattagccttaagattggtaagctagcaatgaatgctagggtgggaagctggtgagccagtggccattagataaatacctttcaagtgtgagcttagacgtcaaccctaaaatacttaaccgtaatgctaattgtgatcattatgaatcccttcagtcacattagggggaaagtagttggctataagtacgtcattcttagtccagtcagtcttaaaaacatcttgggttacccactctgtccactcccataggctacagaaaaagtcacaagcgcatggtttccaaccatatgtgttttctgcagttatttctcttgttctggccaaacaaccctaaaaatccttaccattccacaaagttggaccatcacttgtgcacccactttgactatgagtataccaccacattgcatttctgtttgcaccatgtcttccaggagactagactactgttgtccagggtcaatttgagtgtaaagaaaatgtagacaaggaattgcccaattttaaattctgactttgctgacttaatttaaatgctcgttctgaaccaattttctcctatcttctctaggggtttcaaaagactcagttaattgatttccaggaagtactcatagcaagttcataaaagttcttgagacctaaatttcttcacaaaaaaagaaaagatcttaagtcatacattttaattgtgtagaggttgttcaactgaaggaataaatgtctattaaactaaaaaaaaaaaaaaaaaaaaaaaaaaaaa

SEQ ID NO: 972 - DNA, 2397 bp, Homo sapiens
ttagctaggcatggtggcacatgcctgtaatcccagctactcgggaggctgaggcaggagaattgcttgaacccgggaggcagaggttgcagccggctgagatggcgccatcacactccagcctgctcttcccggtcatggaggcgccagccgccggcttgtttctgctcctgttgcttgggacttgggccccggcgccgggcagcgcctcctccgaggcaccgccgctgatcaatgaggacgtgaagcgcacagtggacctaagcagccacctggctaaggtgacggccgaggtggtcctggcgcacctgggcggcggctccacgtcccgagctacctctttcctgctggctttggagcctgagctcgaggcccggctggcgcacctgggcgtgcaggtaaagggagaagatgaggaagagaacaatttggaagtacgtgaaaccaaaattaagggtaaaagtgggagattcttcacagtcaagctcccagttgctcttgatcctggggccaagatttcagtcattgtggaaacagtctacacccatgtgcttcatccatatccaacccagatcacccagtcagagaaacagtttgtggtgtttgaggggaaccattatttctactctccctatccaacgaagacacaaaccatgcgtgtgaagcttgcctctcgaaatgtggagagctacaccaagctggggaaccccacgcgctctgaggacctactggattatgggcctttcagagatgtgcctgcctatagtcaggatacttttaaagtacattatgagaacaacagccctttcctgaccatcaccagcatgacccgagtcattgaagtctctcactggggtaatattgctgtggaagaaaatgtggacttaaagcacacaggagctgtgcttaaggggcctttctcacgctatgattaccagagacagccagatagtggaatatcctccatccgttcttttaagaccatccttcctgctgctgcccaggatgtttattaccgggatgagattggcaatgtttctaccagccacctccttattttggatgactctgtagagatggaaatccggcctcgcttccctctctttggcgggtggaagacccattacatcgttggctacaacctcccaagctatgagtacctctataatttgggtgaccagtatgcactgaagatgaggtttgtggaccatgtgtttgatgaacaagtgatagattctctgactgtgaagatcatcctgcctgaaggagccaagaacattgaaattgatagtccctatgaaatcagccgtgccccagatgagctgcactacacctatctggatacatttggccgccctgtgattgttgcctacaagaaaaatctggtagaacagcacattcaggacattgtggtccactacacgttcaacaaggtgctcatgctgcaggagcccctgctggtggtggcggccttctacatcctgttcttcaccgttatcatctatgttcggctggacttctccatcaccaaggatccagccgcagaagccaggatgaaggtagcctgcatcacagagcaggtcttgaccctggtcaacaagagaataggcctttaccgtcactttgacgagaccgtcaataggtacaagcaatcccgggacatctccaccctcaacagtggcaagaagagcctggagactgaacacaaggccttgaccagtgagattgcactgctgcagtccaggctgaagacagagggctctgatctgtgcgacagagtgagcgaaatgcagaagctggatgcacaggtcaaggagctggtgctgaagtcggcggtggaggctgagcgcctggtggctggcaagctcaagaaagacacgtacattgagaatgagaagctcatctcaggaaagcgccaggagctggtcaccaagatcgaccacatcctggatgccctgtagcccctgcccgcatcctccagggggcccagggtgcctgcactttgctgtggcaggcagattgggtggtagtgggaggttgtgcatggaggccagtgaaagctgacatctgtaaaaggccttcaaggaagagaaaccaggccctgcgtcaggcagtgtgagtttgccgtttgtccttaactttctttttttttttttttaaaaaagaaaactttaaaaaaactcccattaaaaacaaaacatctttgtgttgtgaacaaaggaattttcaatatttgattggtattctgttctgaagtctaggatatttttcagcctataaagccccctgttttatgcccttctaattctgatgtttgggtattgtgtgagtgcatgtgtttttttttttttttttttaaagcgtgtgtgaacaaatggaaataaagcagggactgtg

SEQ ID NO: 973 - DNA, 978 bp, Homo sapiens
caaaacaccaaatggcggatgacgccggtgcagcgggggggcccgggggccctggtggccctgggatggggaaccgcggtggcttccgcggaggtttcggcagtggcatccggggccggggtcgcggccgtggacggggccggggccgaggccgcggagctcgcggaggcaaggccgaggataaggagtggatgcccgtcaccaagttgggccgcttggtcaaggacatgaagatcaagtccctggaggagatctatctcttctccctgcccattaaggaatcagagatcattgatttcttcctgggggcctctctcaaggatgaggttttgaagattatgccagtgcagaagcagacccgtgccggccagcgcaccaggttcaaggcatttgttgctatcggggactacaatggccacgtcggtctgggtgttaagtgctccaaggaggtggccaccgccatccgtggggccatcatcctggccaagctctccatcgtccccgtgcgcagaggctactgggggaacaagatcggcaagccccacactgtcccttgcaaggtgacaggccgctgcggctctgtgctggtacgcctcatccctgcacccaggggcactggcatcgtctccgcacctgtgcctaagaagctgctcatgatggctggtatcgatgactgctacacctcagcccggggctgcactgccaccctgggcaacttcgccaaggccacctttgatgccatttctaagacctacagctacctgacccccgacctctggaaggagactgtattcaccaagtctccctatcaggagttcactgaccacctcgtcaagacccacaccagagtctccgtgcagcggactcaggctccagctgtggctacaacatagggtttttatacaagaaaaataaagtgaattaagcgtgaaaaaaaaaaaaaaaaaaaaaaaaaaaaaaaaaaaaaaaaaaaaaaaa

SEQ ID NO: 974 - DNA, 551 bp, Homo sapiens
ttcttccttttcgatccgccatctgcggtggagccgccaccaaaatgcagattttcgtgaaaacccttacggggaagaccatcaccctcgaggttgaaccctcggatacgatagaaaatgtaaaggccaagatccaggataaggaaggaattcctcctgatcagcagagactgatctttgctggcaagcagctggaagatggacgtactttgtctgactacaatattcaaaaggagtctactcttcatcttgtgttgagacttcgtggtggtgctaagaaaaggaagaagaagtcttacaccactcccaagaagaataagcacaagagaaagaaggttaagctggctgtcctgaaatattataaggtggatgagaatggcaaaattagtcgccttcgtcgagagtgcccttctgatgaatgtggtgctggggtgtttatggcaagtcactttgacagacattattgtggcaaatgttgtctgacttactgtttcaacaaaccagaagacaagtaactgtatgagttaataaaagacatgaactaacaaaaa

SEQ ID NO: 975 - DNA, 5857 bp, Homo sapiens
cggcgcaggcggcggcgtccgaggagatttaatccagagactgacttcactatagaacccacagttgtatcaatggttggggaaagatagtggcaacaggcaaaggagaaacagctctgacatacaaagaaaatgagtatgctaaagccaagtgggcttaaggcccccaccaagatcctgaagcctggaagcacagctctgaagacacctacggctgttgtagctccagtagaaaaaaccatatccagtgaaaaagcatcaagcactccatcatctgagactcaggaggaatttgtggatgactttcgagttggggagcgagtttgggtgaatggaaataagcctggatttatccagtttcttggagaaacccagtttgcaccaggccagtgggctggaattgttttagatgaacccataggcaagaacgatggttcggtggcaggagttcggtatttccagtgtgaacctttaaagggcatatttacccgaccttcaaagttaacaaggaaggtgcaagcagaagatgaagctaatggcctgcagacaacgcccgcctcccgagctacttcaccgctgtgcacttctacggccagcatggtgtcttcctccccctccaccccttcaaacatccctcagaaaccatcacagccagcagcaaaggaaccttcagctacgcctccgatcagcaaccttacaaaaactgccagtgaatctatctccaacctttcagaggctggctcaatcaagaaaggagaaagagagctcaaaatcggagacagagtattggttggtggcactaaggctggtgtagtccggtttcttggggagaccgactttgccaagggggagtggtgtggcgtggagttagatgagccacttgggaagaatgatggcgctgttgctggaacaaggtattttcagtgtcaacccaaatatggcttgttcgctcctgtccacaaagttaccaagattggcttcccttccactacaccagccaaagccaaggccaacgcagtgaggcgagtgatggcgaccacgtccgccagcctgaagcgcagcccttctgcctcttccctcagctccatgagctcagtggcctcctctgtgagcagcaggcccagtcggacaggactattgactgaaacctcctcccgttacgccaggaagatctccggtaccactgccctccaggaggccctgaaggagaagcagcagcacattgagcagctgctggcggaacgggatctggagagggcggaggtggccaaggccacgagccacgtgggggagatagagcaggagctagctctggcccgggacggacatgaccagcatgtcctggaattggaagccaaaatggaccagctgcgaacaatggtggaagctgctgacagggagaaggtggagcttctcaaccagcttgaagaggagaaaaggaaggttgaggaccttcagttccgggttgaagaagaatcaattaccaaaggtgatcttgagacgcagaccaaactggagcatgcccgcattaaggagcttgaacagagcctgctctttgaaaagaccaaagctgacaaactccagagggagttagaagacactagggtggctacagtttcagaaaagtcacgtataatggaactggagaaagacctagcattgagagtacaggaagtagctgagctccgaagaaggctagagtccaataagcctgctggggatgtggacatgtcactttcccttttgcaagagataagctctttgcaagaaaagttagaagtcacccgtactgaccaccagagagaaataacttctctgaaggagcattttggagcccgggaagaaactcatcagaaggagataaaggctctgtataccgccacggaaaagctttccaaagagaacgagtcattgaaaagcaagctggagcatgccaacaaagagaactcagatgtgatagctctatggaagtccaaactggagactgccatcgcatcccaccagcaggcgatggaagaactgaaggtatctttcagcaaagggcttggaacagagacggcagaatttgctgaactaaaaacacaaatagagaaaatgagactagattaccaacacgaaatagaaaatttgcagaatcaacaagactctgaacgggctgcccatgctaaagagatggaagccttgagggctaaactgatgaaagttattaaagaaaaggaaaacagtctggaagccatcaggtcgaaactggacaaagcagaagaccagcatctcgtagaaatggaagacacgttaaacaaattacaggaagctgaaataaaggtaaaggagctagaggtactgcaagccaaatgcaatgaacaaaccaaggttattgataattttacatcacagctcaaggctactgaagaaaagctcttggatcttgatgcacttcggaaagccagttccgaaggtaaatcggaaatgaagaaacttagacagcagcttgaggcagctgagaaacagattaaacatttagagattgaaaagaatgctgaaagtagcaaggctagtagcattaccagagagctccaggggagagagctaaagcttactaaccttcaggaaaatttgagtgaagtcagtcaagtgaaagagactttggaaaaagaacttcagattttgaaagaaaagtttgctgaagcttcagaggaggcagtctctgttcagagaagtatgcaagaaactgtaaataagttacaccaaaaggaggaacagtttaacatgctgtcttctgacttggagaagctgagagaaaacttagcagatatggaggcaaaatttagagagaaagatgagagagaagagcagctgataaaggcaaaggaaaaactggaaaatgacattgcagaaataatgaagatgtcaggagataactcttctcagctgacaaaaatgaacgatgaattacgtctgaaagaaagagatgtagaagaattacagctaaaacttacaaaggctaatgaaaatgcaagttttctgcaaaaaagtattgaggacatgactgtcaaagctgaacagagccagcaagaagcagctaaaaagcatgaggaagaaaagaaagaattggagaggaaattgtcggacctggaaaagaaaatggaaacaagccacaaccagtgtcaggagctgaaagccaggtatgagagagccacttctgagacaaaaaccaagcatgaagaaatcctacagaacctccagaagacgctgctggacacagaggacaagctgaagggcgcacgggaggagaacagtggcttgctgcaggagctggaggagctgagaaagcaagccgacaaagccaaagctgctcaaacagcggaagatgccatgcagataatggaacagatgaccaaagagaagactgagactctggcctccttggaggacaccaagcaaacaaatgcaaaactacagaatgaattggacacacttaaagaaaacaacttgaaaaatgtggaagagctgaacaaatcaaaagaactcctgactgtagagaatcaaaaaatggaagaatttaggaaagaaatagaaaccctaaagcaggcagcagctcagaagtcccagcagctttcagcgttgcaagaagagaacgttaaacttgctgaggagctggggagaagcagggacgaagtcacaagtcatcaaaagctggaagaagaaagatctgtgctcaataatcagttgttagaaatgaaaaaaagagaatccaagttcataaaagacgcagatgaagagaaagcttccttgcagaaatccatcagtataactagtgccttactcacagaaaaggatgccgagctggagaaactgagaaatgaggtcacagtgctcaggggagaaaacgcctctgccaagtccttgcattcagttgttcagactctagagtctgataaggtgaagctcgagctcaaggtaaagaacttggagcttcaactcaaagaaaacaagaggcagctcagcagctcctcaggtaatacagacactcaggcagacgaggatgaaagagcccaggagagtcagattgatttcctaaattcagtaatagtggaccttcaaaggaagaatcaagacctcaagatgaaggtggagatgatgtcagaagcagccctgaatgggaacggggatgacctaaacaattatgacagtgatgatcaggagaaacagtccaagaagaaacctcgcctcttctgtgacatttgtgactgctttgatctccacgacacagaggattgtcctacccaggcacagatgtcagaggaccctccccattccacacaccatggcagtcggggtgaggaacgcccatactgtgaaatctgtgagatgtttggacactgggccaccaactgcaatgacgacgaaaccttctgatgaagcctccagtggagaactgggcttgctcagacgcactcgcattgacacaacgtaacaccagcattgtgtgtgcagacttcaggagaactcatgttattttttaaccccgtcaacaaatctaggaaaatattttgatcttcaacaaattgccctttagtctccccgtatgagttagaataataaatatttagtaggtgagttttcacctcgaattttgttttcttgatttttacgtttgaagacattgcaccagatgccattacatttattggccccccgaccttgtagaaaaacccctaccctcacaataccttatttaagtaactttaaattatgccgttacttttcatatttgcacctaagatatttccaggctgcatttgtatatttagattttttggttaagctttgacactggaatgagttgaaaaaatgtgccattttgcattttcatctactcatttaaagtattttattcttattcaaagaaatatctgagctctttgcactacctgttatcagtagtgcctttacttcaggcttgataatacttaggtgtgattataaaatcatgaagcaggtaaagggaggggcaagccccaaactgctgtggggacattttataatctatatgctgcacccacttaatctactgtggtgttttgtttattagttttgcataatttcagcttctatatattgtatgtatatattttttaaaaatctatattttgggaaaaaaacatacacaatgtgtctttctttttggacatttacctttttgaaaaagaaaacacttaaaatgatcattaggacataacagactaggccagacatagcatcttgtggctttgcaaccattttcatttgtttgttttccttttatttcttcaccagatttaaataaaaggaggaattttctccaatttttttttccttctctggcaggtatccccagcagtcaattaacaataagccagtataaaacacctaaataaccaatctacaatctcccttcacaagtttttttactgtttttagatgaatgtacgatgagaaattcaacgttaataattctggattttcttatcacaaaaaagaaaatgaaggacctcaaagcacctgaacagtttatcgaccagtttgaatctatttatcttcatttgaatgtcttctagatatgtaaaaagtcataaaatgtatcttccatgctacatgtacaataagaacttctataattgtatatatgcctttgatgtattttcccctcaagattatcaactgtgtgttcgacagtgaatattcaatctggtaccagttgaaatttttggttataaatgtaatacgaattgtttcacaaacagaaaacatgtaaagcagtattaaaatttggccaaacaagtgttctgtatctacttttaataaatggttattcttt

SEQ ID NO: 976 - DNA, 5857 bp, Homo sapiens; identical to SEQ ID NO: 975

SEQ ID NO: 977 - DNA, 512 bp, Homo sapiens
attcttcccctctctacaaccctctctcctcagcgcttcttctttcttggtttgatcctgactgctgtcatggcgtgccctctggagaaggccctggatgtgatggtgtccaccttccacaagtactcgggcaaagagggtgacaagttcaagctcaacaagtcagaactaaaggagctgctgacccgggagctgcccagcttcttggggaaaaggacagatgaagctgctttccagaagctgatgagcaacttggacagcaacagggacaacgaggtggacttccaagagtactgtgtcttcctgtcctgcatcgccatgatgtgtaacgaattctttgaaggcttcccagataagcagcccaggaagaaatgaaaactcctctgatgtggttggggggtctgccagctggggccctccctgtcgccagtgggcacttttttttttccaccctggctccttcagacacgtgcttgatgctgagcaagttcaataaagattcttggaagttt

SEQ ID NO: 978 - DNA, 424 bp, Homo sapiens
  misc_feature (40)..(40): n is a, c, g, or t
atgtctcttgtcagctgtctttcagaagacctggtggggnaagtccgtgggcatcatgttgaccgagctggagaaagccttgaactctatcatcgacgtctaccacaagtactccctgataaaggggaatttccatgccgtctacagggatgacctgaagaaattgctagagaccgagtgtcctcagtatatcaggaaaaagggtgcagacgtctggttcaaagagttggatatcaacactgatggtgcagttaacttccaggagttcctcattctggtgataaagatgggctggcagcccacaaaaaaagccatgaagaaagccacaaagagtagctgagttactgcccagaggctgggcccctgacatgtacctgcagaataataaagtcatcaatacctcaaaaaaaaaaaaaaaaaaaaa

SEQ ID NO: 979 - DNA, 649 bp, Homo sapiens
agaatacactcacaagccactccgctgctcgcctctccgccccgcgtccagctcgcccagctcgcccagcgtccgccgcgcctcgccaaggcttcaacggaccacaccaaaatgccatctcaaatggaacacgccatggaaaccatgatgtttacatttcacaaattcgctggggataaaggctacttaacaaaggaggacctgagagtactcatggaaaaggagttccctggatttttggaaaatcaaaaagaccctctggctgtggacaaaataatgaaggacctggaccagtgtagagatggcaaagtgggcttccagagcttcttttccctaattgcgggcctcaccattgcatgcaatgactattttgtagtacacatgaagcagaagggaaagaagtaggcagaaatgagcagttcgctcctccctgataagagttgtccaaagggtcgcttaaggaatctgccccacagcttcccccatagaaggatttcatgagcagatcaggacacttagcaaatgtaaaaataaaatctaactctcatttgacaagcagagaaagaaaagttaaataccagataagcttttgatttttgtattgtttgcatccccttgccctcaataaataaagttcttttttagttcc

SEQ ID NO: 980 - DNA, 1060 bp, Homo sapiens
cgcgggccgactggtgtttatccgtcactcgccgaggttccttgggtcatggtgccagcctgactgagaagaggacgctcccgggagacgaatgaggaaccacctcctcctactgttcaagtacaggggcctggtccgcaaagggaagaaaagcaaaagacgaaaatggctaaattcgtgatccgcccagccactgccgccgactgcagtgacatactgcggctgatcaaggagctggctaaatatgaatacatggaagaacaagtaatcttaactgaaaaagatctgctagaagatggttttggagagcaccccttttaccactgcctggttgcagaagtgccgaaagagcactggactccggaaggacacagcattgttggttttgccatgtactattttacctatgacccgtggattggcaagttattgtatcttgaggacttcttcgtgatgagtgattatagaggctttggcataggatcagaaattctgaagaatctaagccaggttgcaatgaggtgtcgctgcagcagcatgcacttcttggtagcagaatggaatgaaccatccatcaacttctataaaagaagaggtgcttctgatctgtccagtgaagagggttggagactgttcaagatcgacaaggagtacttgctaaaaatggcaacagaggagtgaggagtgctgctgtagatgacaacctccattctattttagaataaattcccaacttctcttgctttctatgctgtttgtagtgaaataatagaatgagcacccattccaaagctttattaccagtggcgttgttgcatgtttgaaatgaggtctgtttaaagtggcaatctcagatgcagtttggagagtcagatctttctccttgaatatctttcgataaacaacaaggtggtgtgatcttaatatatttgaaaaaaacttcattctcgtgagtcatttaaatgtgtacaatgtacacactggtacttagagtttctgtttgattcttttttaataaactactctttgatttaaaaaaaaaaaaaaaaaaaaaaaaaaa

SEQ ID NO: 981 - DNA, 2572 bp, Homo sapiens
cggtcccgcactggtgcagccatgtcctcttccccgtgggagcctgcgaccctgcgccgggtgttcgtggtgggggttggcatgaccaagtttgtgaagcctggagctgagaattcaagagactaccctgacttggcagaagaagcaggcaagaaggctttagctgatgcacagatcccttattcagcagtggaccaggcatgtgttggctatgtttttggtgactctacctgtgggcagagggctatctatcacagtttgggaatgactggaattcctataatcaatgtcaacaataactgtgctactggttctactgctttgtttatggcccgccagctgattcagggtggtgtggcagaatgtgtcttggctcttgggtttgagaagatgagtaagggaagccttggaataaaattttcagatagaaccattcccactgataagcatgttgacctcctgatcaataagtatggattgtctgctcacccagttgctcctcagatgtttgggtatgctggaaaagaacatatggaaaaatatggaacaaaaattgaacactttgcaaaaattggatggaaaaatcataaacattcagttaataacccgtattcccagttccaagatgaatacagtttagatgaagtgatggcatctaaagaagtttttgattttttgactatcttacaatgttgtcccacttcagatggtgctgcagcagcaattttggccagtgaagcatttgtacagaagtatggcctgcaatccaaagctgtggaaattttggcacaagaaatgatgactgatttgccaagctcgtttgaagaaaaaagcattattaaaatggttggctttgatatgagtaaagaagctgcaagaaaatgctatgagaaatctggcctgacaccaaatgatattgacgtaatagaacttcacgattgcttttctaccaacgaactcctgacttatgaagcactcggactctgtccagaaggacaaggtgcaacgctggttgatagaggagataatacatatggaggaaagtgggtcataaatcctagtggtggactgatttcaaagggacacccactaggcgctacaggtcttgctcagtgtgcagaactctgctggcagctgagaggggaagccggaaagaggcaagttcctggtgcaaaggtggctctgcagcataatttaggcattggaggagctgtggttgtaacactctacaagatgggttttccggaagccgccagttcttttagaactcatcaaattgaagctgttccaaccagctctgcaagtgatggatttaaggcaaatcttgtttttaaggagattgagaagaaacttgaagaggaaggggaacagtttgtgaagaaaatcggtggtatttttgccttcaaggtgaaagatggccctgggggtaaagaggccacctgggtggtggatgtgaagaatggcaaaggatcagtgcttcctaactcagataagaaggctgactgcacaatcacaatggctgactcagacttcctggctttaatgactggtaaaatgaatcctcagtcggccttctttcaaggcaaattgaaaatcactggcaacatgggtctcgctatgaagttacaaaatcttcagcttcagccaggcaacgctaagctctgaagaactccctttggctacttttgaaaatcaagatgagatatatagatatatatccatacattttattgtcagaatttagactgaaactacacattggcaaatagcgtggataggatttgtttcttaatgggtgtgaccaatcctgtttttcctatgctctgggtgaatagagcctgatggtatactactgctttgcggaattgcatacaactgtgcattacaaagttaatatggtaattatggtctggggtaaaattgagtttcagaataaaattaggaacagtaaaatccaaagaactatgtaaacaaaaaagcttttgttttgcttacaaagtatatttaaggattattctgctgaagattcagtttaagagttttccttgggagaactaagtaagaaacacaatgccaacagctggccagtaattagtgttgtgcacttcatgtcattaatcaatttctcaatagttcttaaaattagtgagattaaaaatctaaaaattttgcatttcatgctatcagaaacagtattttcttcccaaatcaaaataaaagaaatatgatcagagcttgaacacaggcttatttttaaaataaaaatatttttaacatgggtttccttattgaaaaatcagtgtattagtcataaaacaccatcattaagaataattgaacaataaagtttgctttcagatgcagttttcaaattataatctcatttcaatttataacgttctcagtcctttgttataattttcctttttcatgtaagtttaattatctgcatttatcttttttcctagtttttctaatactaatgttatttcttaaaattcagtgagatataggataaaataatgctttgagaagaatgtttaatagaaaattaaaataactttttctggca

SEQ ID NO: 982 - DNA, 1160 bp, Homo sapiens
cctccgacagcctctccacaggtaccatgaaggtctccgcggcacgcctcgctgtcatcctcattgctactgccctctgcgctcctgcatctgcctccccatattcctcggacaccacaccctgctgctttgcctacattgcccgcccactgccccgtgcccacatcaaggagtatttctacaccagtggcaagtgctccaacccagcagtcgtctttgtcacccgaaagaaccgccaagtgtgtgccaacccagagaagaaatgggttcgggagtacatcaactctttggagatgagctaggatggagagtccttgaacctgaacttacacaaatttgcctgtttctgcttgctcttgtcctagcttgggaggcttcccctcactatcctaccccacccgctccttgaagggcccagattctgaccacgacgagcagcagttacaaaaaccttccccaggctggacgtggtggctcagccttgtaatcccagcactttgggaggccaaggtgggtggatcacttgaggtcaggagttcgagacagcctggccaacatgatgaaaccccatgtgtactaaaaatacaaaaaattagccgggcgtggtagcgggcgcctgtagtcccagctactcgggaggctgaggcaggagaatggcgtgaacccgggagcggagcttgcagtgagccgagatcgcgccactgcactccagcctgggcgacagagcgagactccgtctcaaaaaaaaaaaaaaaaaaaaaaaaaatacaaaaattagccgcgtggtggcccacgcctgtaatcccagctactcgggaggctaaggcaggaaaattgtttgaacccaggaggtggaggctgcagtgagctgagattgtgccacttcactccagcctgggtgacaaagtgagactccgtcacaacaacaacaacaaaaagcttccccaactaaagcctagaagagcttctgaggcgctgctttgtcaaaaggaagtctctaggttctgagctctggctttgccttggctttgcaagggctctgtgacaaggaaggaagtcagcatgcctctagaggcaaggaagggaggaacactgcactcttaagcttccgccgtctcaacccctcacaggagcttactggcaaacatgaaaaatcgggg

SEQ ID NO: 983 - DNA, 2402 bp, Homo sapiens
  misc_feature (2138)..(2138): n is a, c, g, or t
ggagaggtgcgggccgaatccgagccgagcgagaggaatccggcagtagagagcggactccagccggcggaccctgcagccctcgcctgggacagcggcgcgctgggcaggcgcccaagagagcatcgagcagcggaacccgcgaagccggcccgcagccgcgacccgcgcagcctgccgctctcccgccgccggtccgggcagcatgaggcgcgcggcgctctggctctggctgtgcgcgctggcgctgagcctgcagctggccctgccgcaaattgtggctactaatttgccccctgaagatcaagatggctctggggatgactctgacaacttctccggctcaggtgcaggtgctttgcaagatatcaccttgtcacagcagaccccctccacttggaaggacacgcagctcctgacggctattcccacgtctccagaacccaccggcctggaggctacagctgcctccacctccaccctgccggctggagaggggcccaaggagggagaggctgtagtcctgccagaagtggagcctggcctcaccgcccgggagcaggaggccaccccccgacccagggagaccacacagctcccgaccactcatcaggcctcaacgaccacagccaccacggcccaggagcccgccacctcccacccccacagggacatgcagcctggccaccatgagacctcaacccctgcaggacccagccaagctgaccttcacactccccacacagaggatggaggtccttctgccaccgagagggctgctgaggatggagcctccagtcagctcccagcagcagagggctctggggagcaggacttcacctttgaaacctcgggggagaatacggctgtagtggccgtggagcctgaccgccggaaccagtccccagtggatcagggggccacgggggcctcacagggcctcctggacaggaaagaggtgctgggaggggtcattgccggaggcctcgtggggctcatctttgctgtgtgcctggtgggtttcatgctgtaccgcatgaagaagaaggacgaaggcagctactccttggaggagccgaaacaagccaacggcggggcctaccagaagcccaccaaacaggaggaattctatgcctgacgcgggagccatgcgccccctccgccctgccactcactaggcccccacttgcctcttccttgaagaactgcaggccctggcctcccctgccaccaggccacctccccagcattccagcccctctggtcgctcctgcccacggagtcgtgggtgtgctgggagctccactctgcttctctgacttctgcctggagacttagggcaccaggggtttctcgcataggacctttccaccacagccagcacctggcatcgcaccattctgactcggtttctccaaactgaagcagcctctccccaggtccagctctggaggggagggggatccgactgctttggacctaaatggcctcatgtggctggaagatctgcgggtggggcttggggctcacacacctgtagcacttactggtaggaccaagcatcttgggggggtggccgctgagtggcagggacaggagtcactttgtttcgtggggaggtctaatctagatatcgacttgtttttgcacatgtttcctctagttctttgttcatagcccagtagaccttgttacttctgaggtaagttaagtaagttgattcggtatccccccatcttgcttccctaatctatggtcgggagacagcatcagggttaagaagactttttttttttttttttaaactaggagaaccaaatctggaagccaaaatgtaggcttagtttgtgtgttgtctcttgagtttgtcgctcatgtgtgcaacagggtatggactatctgtctggtggccccgtttctggtggtctgttggcaggctggccagtccaggctgccgtggggccgccgcctctttcaagcagtcgtgcctgtgtccatgcgctcagggccatgctgaggcctgggccgctgccacgttggagaagcccgtgtgagaagtgaatgctgggactcagccttcagacagagaggactgtagggagggcggcaggggcctggagatcctcctgcagaccacncccgtcctgcctgtgcgccgtctccaggggctgcttcctcctggaaattgacgaggggtgtcttgggcagagctggctctgagcgcctccatccaaggccaggttctccgttagctcctgtggccccaccctgggccctgggctggaatcaggaatattttccaaagagtgatagtcttttgcttttggcaaaactctacttaatccaatgggtttttccctgtacagtagattttccaaatgtaataaactttaatataaagt

SEQ ID NO: 984 - DNA, 1100 bp, Homo sapiens
ggcctcccacttggttgctcgtacgcggctagtgggtcctcagtggatgtaggctgggcgccgcgatgttcgacgggacaccggcggagagcgacctcggggttaaggggtggggctggacgtcaggagccaagatggcggcggtggtcgcactctccttgaggcgccggttgccggccacaacccttggcggagcctgcctgcaggcctcccgaggagcccagacagctgcagccacagctccccgtatcaagaaatttgccatctatcgatgggacccagacaaggctggagacaaacctcatatgcagacttataaggttgaccttaataaatgtggccccatggtattggatgctttaatcaagattaagaatgaagttgactctactttgaccttccgaagatcatgcagagaaggcatctgtggctcttgtgcaatgaacatcaatggaggcaacactctagcttgcacccgaaggattgacaccaacctcaataaggtctcaaaaatctaccctcttccacacatgtatgtgataaaggatcttgttcccgatttgagcaacttctatgcacagtacaaatccattgagccttatttgaagaagaaggatgaatctcaggaaggcaagcagcagtatctgcagtccatagaagagcgtgagaaactggacgggctctacgagtgcattctctgtgcctgctgtagcaccagctgccccagctactggtggaacggagacaaatatctggggcctgcagttcttatgcaggcctatcgctggatgattgactccagagatgacttcacagaggagcgcctggccaagctgcaggacccattctctctataccgctgccacaccatcatgaactgcacaaggacctgtcctaagggtctgaatccagggaaagctattgcagagatcaagaaaatgatggcaacctataaggagaagaaagcttcagtttaactgtttccatgctaaacatgatttataaccagctcagagctgaacataatttatatctaatttgagttcctttaaagatcttggttttccatgaatacagcatgtataataaaaattttaaga

SEQ ID NO: 985 - DNA, 758 bp, Homo sapiens
caggtgggaggttagtgtggcccgggcgtccgctcctcagcggatgtggcagccccgagccatggctctcgccgtccgagtcgtttattgtggcgcttgaggctacaagtccaagtatcttcagctcaagaagaagttagaagatgagttccccggccgcctggacatctgcggcgagggaactccccaggccaccgggttctttgaagtgatggtagccgggaagttgattcactctaagaagaaaggcgatggctacgtggacacagaaagcaagtttctgaagttggtggccgccatcaaagccgccttggctcagggctaatgcgccctgaaggcagagtccagggaccttgacccagcccctctcagcagacgcttcatgataggaaggactgaaaagtcttgtggacacctggtctttccctgatgttctcgtggctgctgttgggggcagagattgacgcccccggtctttgcctctgagcgggagagtctgtgtgtatgtgtcttccccggaatccacaccaccccaccctcctcctgtcccgtggtttcatcatatctctttgcataccccatgtcttccccagttgtcccctggagtttggggggacatcccgcctcaggcatccttctcaaggggaagccaagagaggcatcaggatgggtgggtttctgattgtggcaacgtttgcaaccgttcacgattcaataaatattggatgaaattaaccggaaaaaaaaaaaaaaaaaaa

SEQ ID NO: 986 - DNA, 2577 bp, Homo sapiens
cacatgtcggcgcaggcggccaaagtcagtaaaaaggagctcaactccaaccacgacggggccgacgagacctcagaaaaagaacagcaagaagcgattgaacacattgatgaagtacaaaatgaaatagacagacttaatgaacaagccagtgaggagattttgaaagtagaacagaaatataacaaactccgccaaccattttttcagaagaggtcagaattgatcgccaaaatcccaaatttttgggtaacaacatttgtcaaccatccacaagtgtctgcactgcttggggaggaagatgaagaggcactgcattatttgaccagagttgaagtgacagaatttgaagatattaaatcaggttacagaatagatttttattttgatgaaaatccttactttgaaaataaagttctctccaaagaatttcatctgaatgagagtggtgatccatcttcgaagtccaccgaaatcaaatggaaatctggaaaggatttgacgaaacgttcgagtcaaacgcagaataaagccagcaggaagaggcagcatgaggaaccagagagcttctttacctggtttactgaccattctgatgcaggtgctgatgagttaggagaggtcatcaaagatgatatttggccaaacccattacagtactacttggttcccgatatggatgatgaagaaggagaaggagaagaagatgatgatgatgatgaagaggaggaaggattagaagatattgacgaagaaggggatgaggatgaaggtgaagaagatgaagatgatgatgaaggggaggaaggagaggaggatgaaggagaagatgactaaatagaacactgatggattccaaccttcctttttttaaattttctccagtccctgggagcaagttgcagtctttttttttttttttttttttttccctcttgtgctcagtcgccctgttcttgaggtctcttttctctactccatggttctcaatttatttggggggaaataccttgagcagaatacaatgggaaaagagtctctacccctttctgttcgaagttcatttttatcccttcctgtctgaacaaaaactgtatggaatcaacaccaccgagctctgtgggaaaaaagaaaaacctgctccctttgctctgctggaagctggagggtgctaggcccctgtgtagtagtgtatagaattctagcttttttcctcctttctctgtatattgggctcagagagtacactgtgtctctatgtgaatatggacagttagcatttaccaacatgtatctgtctactttctcttgtttaaaaaaagaaaaaaaaacttaaaaaaatggggttatagaaggtcagcaaaggggtggggtttgagatgtttgggtgggttagtgggcattttgacaacatggcttctcctttggcatgtttaattgtgatatttgacagacatccttgcagtttaagatgacacttttaaaataaattctctcctaatgatgacttgagccctgccactcaatgggagaatcagcagaacctgtaggatcttatttggaattgacattctctattgtaattttgttcctgtttatttttgggtttctttttgtttcactggaaaggaaagatgatgctcagttttaaacgttaaaagtgtacaagttgctttgttacaataaaactaaatgtgtacacaaaggatttgatgcttttctctcagcataggtatgcttactatgaccttccaagtttgacttgtataacatcactgtcaaactttgtcaccctaacttcgtattttttgatacgcacttttgcaggatgacctcagggctatgtggattgagtaatgggatttgaatcaatgtattaatatctccatagctgggaaacgtgggttcaatttgccattggtttctgaaaagtattcacatcatttgggataccagatagctcaatactctctgagtacattgtgcccttgatttttatctccaagtggcagtttttaaaattggccttttacctggatataaattaattgtgcctgccaccaccatccaacagacctggtgctctaatgccaagttatacacgggacagttgctggcatgtcttcattggctctctaaaatgtggccaagaagataggctctcagtaagaagtctgatggtgagcagtaactgtccctgctttctggtataaagctctcaaatgtgaccatgtgaatctgggtgggataatggactcagctctgtctgctcaatgccattgtgcagagaagcaccctaatgcataagctttttaatgctgtaaaatatagtcgctgaaattaaatgccactttttcagaggtgaattaatggacagtctggtgaacttcaaaagctttttgatgtataaaacttgataaatggaactattccatcaataggcaaaagtgtaacaacctatctagatggatagtatgtaatttctgcacaggtctctgtttagtaaatacatcactgtataccgatcaggaatcttgctccaataaaggaacataaagatttaaaaaaaaaaaaaaa

SEQ ID NO: 987 - DNA, 1879 bp, Homo sapiens
cgctagcctgcggagcccgtccgtgctgttctgcggcaaggcctttcccagtgtccccacgcggaaggcaactgcctgaaaggcgcggcgtcgcaccgcccagagctgaggaagccggcgccagttcgcggggctccgggccgccactcagagctatgagctacggccgcccccctcccgatgtggagggtatgacctccctcaaggtggacaacctgacctaccgcacctcgcccgacacgctgaggcgcgtcttcgagaagtacaggcgcgtcggcgacgtgtacatcccgcgggatcgctacaccaaggagtcccgcggcttcgccttcgttcgctttcacgacaagcgcgacgctgaggacgctatggatgccatggacggggccgtgctggacggccgcgagctgcgggtgcaaatggcgcgctacggccgccccccggactcacaccacagccgccggggaccgccaccccgcaggtacgggggcggtggctacggacgccggagccgcagccctaggcggcgtcgccgcagccgatcccggagtcggagccgttccaggtctcgcagccgatctcgctacagccgctcgaagtctcggtcccgcactcgttctcgatctcggtcgacctccaagtccagatccgcacgaaggtccaagtccaagtcctcgtcggtctccagatctcgttcgcggtccaggtcccggtctcggtccaggagtcctcccccagtgtccaagagggaatccaaatccaggtcgcgatcgaagagtccccccaagtctcctgaagaggaaggagcggtgtcctcttaagaaaatgatgtatcggcaagcagtgtaaacggaggacttggggaaaaaggaccacatagtccatcgaagaagagtccttggaacaagcaactggctattgaaaaggttattttgtaacatttgtctaactttttacttgtttaagctttgcctcagttggcaaacttcattttatgtgccattttgttgctgttattcaaatttcttgtaatttagtgaggtgaacgacttcagatttcattattggatttggatatttgaggtaaaatttcattttgttatatagtgctgactttttttttttgaaattaaacagattggtaacctaatttgtggcctcctgacttttaaggaaaacgtgtgcagccattacacacagcctaaagctgtcaagagattgactcggcattcgttcattccttaaaattaaaaacctacaaaagttggtgtaaatttgtatatgttatttaccttcagatctaaatggtaatctgaacccaaatttgtataaagacttttcaggtgaaaagacttgattttttgaaaggattgtttatcaaacacaattctaatctcttctcttatgtatttttgtgcactaggcgcagttgtgtagcagttgagtaatgctggttagctgttaaggtggcgtgttgcagtgcagagtgcttggctgtttcctgttttctcccgattgctcctgtgtaaagatgccttgtcgtgcagaaacaaatggctgtccagtttattaaaatgcctgacaactgcacttccagacacccgggccttgcatataaataacggagcatacagtgagcacatctagctgatgataaatacacctttttttccctcttccccctaaaaatggtaaatctgatcatatctacatgtatgaacttaacatggaaaatgttaaggaagcaaatggttgtaactttgtaagtacttataacatggtgtatctttttgcttatgaatatctgtattataaccattgtttctgtagtttaattaaaacattttcttggtgttagctttaaaaaaaaaaaaaaaaa

SEQ ID NO: 988 - DNA, 528 bp, Homo sapiens
atgcatcgtgattcctgtccattggactgtaaggtttatgtaggcaatcttggaaacaatggcaacaagacggaattggaacgggcttttggctactatggaccactccgaagtgtgtgggttgctagaaacccacccggctttgcttttgttgaatttgaagatccccgagatgcagctgatgcagtccgagagctagatggaagaacactatgtggctgccgtgtaagagtggaactgtcgaatggtgaaaaaagaagtagaaatcgtggcccacctccctcttggggtcgtcgccctcgagatgattatcgtaggaggagtcctccacctcgtcgcagatctccaagaaggagaagcttctctcgcagccggagcaggtccctttctagagataggagaagagagagatcgctgtctcgggagagaaatcacaagccgtcccgatccttctctaggtctcgtagtcgatctaggtcaaatgaaaggaaatagaagaccagtttgcaaaagtggtgtagaggatcc

SEQ ID NO: 989 - DNA, 2102 bp, Homo sapiens
cccgcactctgcgcctctcctcgcctttctcgcacctgctcctgcgccaggcccggagacccccggggcggcttcccagaacctgcggagcacaactggccgaccgacccattcattgggaacccgtcttttgccagagcccacgtcccctgccacctctagctcggagcggcgtgtagcgccatggagaagagcaacgagaccaacggctaccttgacagcgctcaggcggggcctgcggccgggcccggagctccggggaccgcggcgggacgcgcacggcgttgcgcgcgcttcctgcggcgccaagcgctggtgctgctcaccgtgtccggggtgctggcgggcgcgggcctgggcgcggcgttgcgcgggctcagcctgagccgcacgcaggtcacctacctggccttccccggcgagatgctgctccgcatgctgcgcatgatcatcctgccgctggtggtctgcagcctggtgtcgggcgccgcctcgctcgatgccagctgcctcgggcgtctgggcggcatccgtgtcgcctactttggcctcaccacactgagtgcctcggcgctcgccgtggccttggcgttcatcatcaagccaggatccggtgcgcagacccttcagtccagcgacctggggctggaggactcggggcctcctcctgtccccaaagagacggtggactctttcctcgacctggccagaaacctgtttccctccaatcttgtggttgcagctttccgtacgtatgcaaccgattataaagtcgtgacccagaacagcagctctggaaatgtaacccatgaaaagatccccataggcactgagatagaagggatgaacattttaggattggtcctgtttgctctggtgttaggagtggccttaaagaaactaggctccgaaggagaagacctcatccgtttcttcaattccctcaacgaggcgacgatggtgctggtgtcctggattatgtggtacgtacctgtgggcatcatgttccttgttggaagcaagatcgtggaaatgaaagacatcatcgtgctggtgaccagcctggggaaatacatcttcgcatctatattgggccatgttattcatggaggaattgttctgccacttatttattttgttttcacacgaaaaaacccattcagattcctcctgggcctcctcgccccatttgcgacagcatttgctacctgctccagctcagcgacccttccctctatgatgaagtgcattgaagagaacaatggtgtggacaagaggatcagcaggtttattctccccatcggggccaccgtgaacatggacggagcagccatcttccagtgtgtggccgcggtgttcattgcgcaactcaacaacatagagctcaacgcaggacagattttcaccattctagtgactgccacagcgtccagtgttggagcagcaggcgtgccagctggaggggtcctcaccattgccattatcctggaggccattgggctgcctactcatgacctgcctctgatcctggctgtggactggattgtggaccggaccaccacggtggtgaatgtggaaggggatgccctgggtgcaggcattctccaccacctgaatcagaaggcaacaaagaaaggcgagcaggaacttgctgaggtgaaagtggaagccatccccaactgcaagtctgaggaggagacatcgcccctggtgacacaccagaaccccgctggccccgtggccagtgccccagaactggaatccaaggagtcggttctgtgatggggctgggctttgggcttgcctgccagcagtgatgtcccaccctgttcacccagccgccagtcatggacacagggcactgccttgccaacttttaccctcccaagcaatgctttggcccagtcgctggcctgaggcttacctctcggcactggcattgggctccccagccggaactggttaccaaggacaaggacactctgacattcggcttgatccatgtccaggtgcaactgtgtgtacaccagggatctgtttggaaacaaccccttgagctgccaggctcaagaaatcatggactcacagggtcctgtgtggtt

SEQ ID NO: 990 - DNA, 2273 bp, Homo sapiens
gggggcagatcctggggagaatggaggagcacacagaggcaggctcggcaccagagatgggggcccagaaggccctgattgacaatcctgctgacatcctagtcattgctgcatatttcctgctggtcattggcgttggcttgtggtccatgtgcagaaccaacagaggcactgtgggcggctacttcctggcaggacgcagcatggtgtggtggccggttggggcctctctcttcgccagcaacatcggcagtggccactttgtgggcctggcagggactggcgctgcaagtggcttggctgttgctggattcgagtggaatgcgctcttcgtggtgctgctactgggctggctgtttgcacccgtgtacctgacagcgggggtcatcacgatgccacagtacctgcgcaagcgcttcggcggccgccgcatccgcctctacctgtctgtgctctcccttttcctgtacatcttcaccaagatctcagtggacatgttctccggagctgtattcatccagcaggctctgggctggaacatctatgcctccgtcatcgcgcttctgggcatcaccatgatttacacggtgacaggagggctggccgcgctgatgtacacggacacggtacagaccttcgtcattctggggggcgcctgcatcctcatgggttacgccttccacgaggtgggcgggtattcgggtctcttcgacaaatacctgggagcagcgacttcgctgacggtgtccgaggatccagccgtgggaaacatctccagcttctgctatcgaccccggcccgactcctaccacctgctccggcaccccgtgaccggggatctgccgtggcccgcgctgctcctcggactcacaatcgtctcgggctggtactggtgcagcgaccaggtcatcgtgcagcgctgcctggccgggaagagcctgacccacatcaaggcgggctgcatcctgtgtgggtacctgaagctgacgcccatgtttctcatggtcatgccaggcatgatcagccgcattctgtacccagacgaggtggcgtgcgtggtgcctgaggtgtgcaggcgcgtgtgcggcacggaggtgggctgctccaacatcgcctacccgcggctcgtcgtgaagctcatgcccaacggtctgcgcggactcatgctggcggtcatgctggccgcgctcatgtcctcgctggcctccatcttcaacagcagcagcacgctcttcaccatggacatctacacgcgcctgcggccacgcgccggcgaccgcgagctgctgctggtgggacggctctgggtggtgttcatcgtggtagtgtcggtggcctggcttcccgtggtgcaggcggcacagggcgggcagctcttcgattacatccaggcagtctctagctacctggcaccgcccgtgtccgccgtcttcgtgctggcgctcttcgtgccgcgcgttaatgagcagggcgccttctggggactcatcgggggcctgctgatgggcctggcacgcctgattcccgagttctccttcggctcgggcagctgtgtgcagccctcggcgtgcccagctttcctctgcggcgtgcactacctctacttcgccattgtgctgttcttctgctctggcctcctcaccctcacggtctccctgtgcaccgcgcccatccccagaaagcacctccaccgcctggtcttcagtctccggcatagcaaggaggaacgggaggacctggatgctgatgagcagcaaggctcctcactccctgtacagaatgggtgcccagagagtgccatggagatgaatgagccccaggccccggcaccaagcctcttccgccagtgcctgctctggttttgtggaatgagcagaggtggggtgggcagtcctccgccccttacccaggaggaggcagcggcagcagccaggcggctggaggacatcagcgaggacccgagctgggcccgtgtggtcaacctcaatgccctgctcatgatggcagtggccgtgttcctctggggcttctatgcctaagaccaactgcgttggacaccataagccacagcctcacaggaagtgggggtgaggagcctgcggtgctccccagaaaaggggaaggggcagtggggtgagaaggtcctggctccccttctcccggccttcctctgcctggggcccactgcatctgattggcagtcacttcccatgagggcctggcccacccgctgcagttgccctaaggaaaaataaagctgcctttcccctgta

SEQ ID NO: 991 - DNA, 3410 bp, Homo sapiens
tgcgacgtgactggctagctgcgtgggtactggaacaagcaaacgaggcagcgagcgaaggacgggagccggaccctgggccccgtggaactccagcctgcgccaccacgtcacgcacacgctcggcgctgcgatccgcgcatataacgatatttggatttgacctgcattttggaatttatctacacttaaaatgccaccagcagttggaggtccagttggatacacccccccagatggaggctggggctgggcagtggtaattggagctttcatttccatcggcttctcttatgcatttcccaaatcaattactgtcttcttcaaagagattgaaggtatattccatgccaccaccagcgaagtgtcatggatatcctccataatgttggctgtcatgtatggtggaggtcctatcagcagtatcctggtgaataaatatggaagtcgtatagtcatgattgttggtggctgcttgtcaggctgtggcttgattgcagcttctttctgtaacaccgtacagcaactatacgtctgtattggagtcattggaggtcttgggcttgccttcaacttgaatccagctctgaccatgattggcaagtatttctacaagaggcgaccattggccaacggactggccatggcaggcagccctgtgttcctctgtactctggcccccctcaatcaggttttcttcggtatctttggatggagaggaagctttctaattcttgggggcttgctactaaactgctgtgttgctggagccctcatgcgaccaatcgggcccaagccaaccaaggcagggaaagataagtctaaagcatcccttgagaaagctggaaaatctggtgtgaaaaaagatctgcatgatgcaaatacagatcttattggaagacaccctaaacaagagaaacgatcagtcttccaaacaattaatcagttcctggacttaaccctattcacccacagaggctttttgctatacctctctggaaatgtgatcatgttttttggactctttgcacctttggtgtttcttagtagttatgggaagagtcagcattattctagtgagaagtctgccttccttctttccattctggcttttgttgacatggtagcccgaccatctatgggacttgtagccaacacaaagccaataagacctcgaattcagtatttctttgcggcttccgttgttgcaaatggagtgtgtcatatgctagcacctttatccactacctatgttggattctgtgtctatgcgggattctttggatttgccttcgggtggctcagctccgtattgtttgaaacattgatggaccttgttggaccccagaggttctccagcgctgtgggattggtgaccattgtggaatgctgtcctgtcctcctggggccaccacttttaggtcggctcaatgacatgtatggagactacaaatacacatactgggcatgtggcgtcgtcctaattatttcaggtatctatctcttcattggcatgggcatcaattatcgacttttggcaaaagaacagaaagcaaacgagcagaaaaaggaaagtaaagaggaagagaccagtatagatgttgctgggaagccaaatgaagttaccaaagcagcagaatctccggaccagaaagacacagaaggagggcccaaggaggaggaaagtccagtctgaatccatggggctgaagggtaaattgagcagttcatgacccaggatatctgaaaatattctactggcctgtaatctaccagtggtgctcaatgcaaatagtagacatttgtgtggaaatcataccagttgttcattgatgggatttttgtttgactccttaccaatagcctgaatttgaggagggaatgattggtagcaaaggatgggggaaagaagtaggttctgttttgttttgttttaatcttagcttttaatagtgtcataaagattataatatgtgccttaagttttagtctttagaactctagagagccttaacttcttaaaccatttttgctgaattcatctatttcgagtgttgtgttaaaaggaaaaataacaactaacttgtttgaggcaaatctaaaatttaaaattaatcttgcttcattgttacatgtaatatatttcagacattttcactggaagatttatgaacagaaatattggttgaaagttagagattttacaaaatgctgacaaaaatattttcctagcatcagtagatttctggcatatgtttctgctagctatatatttaggaaattcaaagcataaaactttggcaacatcttggctgttctagacacagtgtacttgtcaacccctctcaggtaccttttcttgggatgcttattagaagccaagtaaagtgcttaaggtttgttttcattaaattagctatttctgctcccctgttcaaagatgcattttgagtgtttatagatcactgccctttttgaaatcacctggtattatttttcttactggaaaagttagtattaaaatctacagaactacatatttgtgcctccttggtaaatacaacacatctaattaaatgtagacagatatttcaaacatcagctgaattcacttaagtttttccaaaacctcagttaaactgtgaagctattggaatttttttttcctggaatttttcccctttgattcacagtggtcccatttatatctgcttctagcttagtgctatgtgtgagatatgtgtgtgtttggtgtttttgtttttttgtttttttttttttaaggtttgcaaattaaaaagggccagaaaaatttggcaccaggcaaacgaataaagataggattgggaaagaagttgctaagtgtgcttagttttaataagtaattccttctcttttttcagagaaggccttacagaaaattgttgtgcttagaattgctggatgcatttttaccctccacacaaacctaaaaattttgtgacccctttcacttacctgaaaagtagagaaatggattcagtataaggataaggagggaaggtggaccagaatgaaaactgtaaatatttttttaacctaatatcacttaaatcgaggcagaaagatatagacattcaatgaattatattcaatgcatttaaaataccactgtaattgacagagtaaaagtatagatacaaaaccttgtgtaagaggctgacttttccaaataaacattttttaagaaaacatttcttctcccaaatgtctattttcttgaggaaaatattgctgtgtcttcattttcattaccaggtttcattttgggccttgctaaattgattgaattaaatcctccagcttttgaaccttgaaaaaaaaaaaaaaaaaaaaaaaaaaaaaaaaaaaagaaaaaaaaaaaaaaaaag

SEQ ID NO: 992 - DNA, 598 bp, Homo sapiens
cagagtcactcctgccttcaccatgaagtccagcggcctcttccccttcctggtgctgcttgccctgggaactctggcaccttgggctgtggaaggctctggaaagtccttcaaagctggagtctgtcctcctaagaaatctgcccagtgccttagatacaagaaacctgagtgccagagtgactggcagtgtccagggaagaagagatgttgtcctgacacttgtggcatcaaatgcctggatcctgttgacaccccaaacccaacaaggaggaagcctgggaagtgcccagtgacttatggccaatgtttgatgcttaacccccccaatttctgtgagatggatggccagtgcaagcgtgacttgaagtgttgcatgggcatgtgtgggaaatcctgcgtttcccctgtgaaagcttgattcctgccatatggaggaggctctggagtcctgctctgtgtggtccaggtcctttccaccctgagacttggctccaccactgatatcctcctttggggaaaggcttggcacacagcaggctttcaagaagtgccagttgatcaatgaataaataaacgagcctatttctctttgcac

SEQ ID NO: 993 - DNA, 2010 bp, Homo sapiens
agccgggtgacttcagaggcgccggcccgtccgtctgccgcacctgagcacggcccctgcccgagcctggcccgccgcgatgctgtagggaccgccgtgtcctcccgccggaccgttatccgcgccgggcgcccgccagacccgctggcaagatgccgcgctccttcctggtcaagaagcatttcaacgcctccaaaaagccaaactacagcgaactggacacacatacagtgattatttccccgtatctctatgagagttactccatgcctgtcataccacaaccagagatcctcagctcaggagcatacagccccatcactgtgtggactaccgctgctccattccacgcccagctacccaatggcctctctcctctttccggatactcctcatctttggggcgagtgagtccccctcctccatctgacacctcctccaaggaccacagtggctcagaaagccccattagtgatgaagaggaaagactacagtccaagctttcagacccccatgccattgaagctgaaaagtttcagtgcaatttatgcaataagacctattcaactttttctgggctggccaaacataagcagctgcactgcgatgcccagtctagaaaatctttcagctgtaaatactgtgacaaggaatatgtgagcctgggcgccctgaagatgcatattcggacccacacattaccttgtgtttgcaagatctgcggcaaggcgttttccagaccctggttgcttcaaggacacattagaactcacacgggggagaagcctttttcttgccctcactgcaacagagcatttgcagacaggtcaaatctgagggctcatctgcagacccattctgatgtaaagaaataccagtgcaaaaactgctccaaaaccttctccagaatgtctctcctgcacaaacatgaggaatctggctgctgtgtagcacactgagtgacgcaatcaatgtttactcgaacagaatgcatttcttcactccgaagccaaatgacaaataaagtccaaaggcattttctcctgtgctgaccaaccaaataatatgtatagacacacacacatatgcacacacacacacacacacccacagagagagagctgcaagagcatggaattcatgtgtttaaagataatcctttccatgtgaagtttaaaattactatatatttgctgatggctagattgagagaataaaagacagtaacctttctcttcaaagataaaatgaaaagcacattgcatcttttcttcctaaaaaaatgcaaagatttacattgctgccaaatcatttcaactgaaaagaacagtattgctttgtaatagagtctgtaataggatttcccataggaagagatctgccagacgcgaactcaggtgccttaaaaagtattccaagtttactccattacatgtcggttgtctggttgccattgttgaactaaagcctttttttgattacctgtagtgctttaaagtatatttttaaaagggaggaaaaaaataacaagaacaaaacacaggagaatgtattaaaagtatttttgttttgttttgtttttgccaattaacagtatgtgccttgggggaggagggaaagattagctttgaacattcctggcgcatgctccattgtcttactattttaaaacattttaataatttttgaaaattaattaaagatgggaataagtgcaaaagaggattcttacaaattcattaatgtacttaaactatttcaaatgcataccacaaatgcaataatacaataccccttccaagtgcctttttaaattgtatagttgatgagtcaatgtaaatttgtgtttatttttatatgattgaatgagttctgtatgaaactgagatgttgtctatagctatgtctataaacaacctgaagacttgtgaaatcaatgtttcttttttaaaaaacaattttcaagttttttttacaataaacagttttgatttaaaaaaaaaaaaaaaa

SEQ ID NO: 994 - DNA, 3634 bp, Homo sapiens
caagactggaagcagagagagagagcaagagtgagagagagcgagcgagcgtagtcaggagatggtgttgtattccaggagaaaaacgtttcttcatttcaactcaaacttgctgctaaagcgcctaaatctgaaaaggaaatggacccagaatatgaagagaaaatgaaagccgaccgagcaaagagatttgaatttttactgaagcagacagaactttttgcacatttcattcagccttcagcacagaaatctccaacatctccactgaacatgaaattgggacgtccccgaataaagaaagatgaaaagcagagcttaatttctgctggagactaccgccataggcgcacagagcaagaagaagatgaagagctactgtctgagagtcggaaaacatctaatgtgtgtattagatttgaggtgtcaccttcatatgtgaaaggggggccactgagagattatcagattcgaggactgaattggttgatctctttatatgaaaatggagtcaatggcattttggctgatgaaatgggccttgggaaaactttacaaacaattgctttgcttggttacctgaaacactaccgaaatattcctggacctcacatggttttagttccaaagtctactttacacaactggatgaatgaatttaaacgatgggtcccatctctccgtgtcatttgttttgtcggagacaaggatgccagagctgcttttattcgtgatgaaatgatgccaggagagtgggatgtttgcgttacttcttatgagatggtaattaaagaaaaatctgtattcaaaaagtttcactggcgatacctggtcattgatgaagctcacagaataaagaatgaaaaatctaagctttcagagattgttcgtgagttcaagtcgactaaccgcttgctcctaactggaacacctttgcagaataacctgcatgaactgtgggccttactcaactttttattgcctgatgtctttaattctgcagatgactttgattcttggtttgacactaaaaattgtcttggtgatcaaaaactcgtggaaagacttcatgcagttttaaaaccatttttgttacgccgtataaaaactgatgtagagaagagtctgccacctaaaaaggaaataaagatttacttggggctgagtaagatgcaacgagaatggtatacaaaaatcctgatgaaagatattgatgttttaaactcttctggcaagatggacaagatgcgactcttaaacattctgatgcagcttcgaaagtgttgtaatcatccatatctgtttgatggtgctgaacctggtccaccttataccactgatgagcatattgtcagcaacagtggtaaaatggtagttctggataaactattggccaaactcaaagaacagggttcaagggttctcattttcagccagatgactcgcttgctggatattttggaagattattgcatgtggcgtggttatgagtattgtcgactggatggacaaaccccgcatgaagaaagagaggataaattcctagaagtggaatttctgggtcaaagggaagcaatagaggcttttaatgctcctaatagtagcaaattcatctttatgctaagtaccagggctggaggtctcggaattaacctggcaagtgctgatgtggttatactatatgattcagactggaacccacaggttgatctacaagctatggatcgagcacatcgtattggtcagaagaaaccagtacgtgtattccgtctcatcactgacaacactgttgaagagaggattgtagaaagagctgagataaaactgagactcgattcaattgttatacaacaaggaagactcattgaccaacggtctaacaagctggcaaaagaggaaatgttacaaatgatacggcatggagccacccatgtttttgcttctaaagagagtgagttgacagatgaagacattacaactattctggaaagaggggaaaagaagactgcagagatgaatgaacgcctgcaaaaaatgggagagtcttctctaagaaattttagaatggacattgaacaaagtttatacaaatttgagggagaagattatagagaaaaacagaagcttggcatggtggaatggattgaacctcctaaacgagaacgcaaagcaaactacgcagtggatgcctactttagagaggctttgcgtgtcagcgagccaaagattccaaaggctccacggcctccaaaacagccaaatgttcaggattttcaatttttcccaccacgcttatttgagctcctggaaaaggaaattctttattatcggaagacaataggctataaggttccaaggaatcctgatatcccaaatccagctctggctcaaagagaagagcaaaaaaagattgatggagctgaacctcttacaccagaagagactgaagaaaaggaaaaacttctcacacaaggtttcacaaactggactaaacgagattttaaccagtttattaaagctaatgagaaatatggaagagatgacattgataacatagctcgagaggtagagggcaaatcccctgaggaggtcatggagtattcagctgtattttgggaacgttgcaatgaattacaggacattgagaaaattatggctcaaattgaacgtggagaagcaagaattcaacgaaggatcagtatcaagaaagccctggatgccaaaattgcaagatacaaggctccatttcatcagttgcgcattcagtatggaaccagcaaaggaaagaactatactgaggaagaagatagattcttgatttgtatgttacacaaaatgggctttgatagagaaaatgtatatgaagaattaagacagtgtgtacgaaatgctccccagtttagatttgactggtttatcaagtctaggactgccatggaattccagagacgctgtaacactctgatttcattgattgagaaagaaaatatggaaattgaggaaagagagagagcagaaaagaagaaacgggcaactaaaactccaatggtaaaattttcagcattttcctaacttttagatttaacattgttgggccatttaaaatgtgcatattggagcagaacattaaatctgtttccattttagtcacagaaaagaaaagcagagtcagctactgagagctctggaaagaaggatgtcaagaaggtgaaatcctaaagcctagaaataaagttttaaatgggaaactgctattttcttgttcccatcttcaaatgctaattgccagttccagtgtattcatggtactctaagaaaaatctctttggttttgatttcttgcatattttatatattttacaatgctttctacctgaaatgtgtagctttatattttatggcattctagtatttttgtgtactgtattttgtgcatttcatgtcttcatcaaaatcctctcagtccttgttcttttgaagcttgtgctgaggttttagcttttctatgttttatatgccgctgctttgaaagagaacctagattctatagttgtattattgttgtttcatactttaaatttatatggctgtggaaaaacgaattaaaatgttttgaggagaaagaaaaaaaaaa

SEQ ID NO: 995 - DNA, 5257 bp, Homo sapiens
aaaaattttctgttaccaaattttacaacttctaataagactactataactttatgtaaactgatgaagatgtgctgattaacatattctgtgatatggtttacaacttttaatcataattgtccatgattttggaatgctgttatttatcagtaaatgtaaaatatttgaggcatttagccatacacacactagaactttttaaaactttgtcctatagtgtaattataaactgatgactattatcttcatacattgagtcttcatgcatcaatgaaatgaaaaatataggagtagatgtccacgcccacagaccctggtgcgatgccccacccagggccttcgccggggcctgggccttcccctgggccaattcttgggcctagtccaggaccaggaccatccccaggttccgtccacagcatgatggggccaagtcctggacctccaagtgtctcccatcctatgccgacgatggggtccacagacttcccacaggaaggcatgcatcaaatgcataagcccatcgatggtatacatgacaaggggattgtagaagacatccattgtggatccatgaagggcactggtatgcgaccacctcacccaggcatgggccctccccagagtccaatggatcaacacagccaaggttatatgtcaccacacccatctccattaggagccccagagcacgtctccagccctatgtctggaggaggcccaactccacctcagatgccaccaagccagccgggggccctcatcccaggtgatccgcaggccatgagccagcccaacagaggtccctcacctttcagtcctgtccagctgcatcagcttcgagctcagattttagcttataaaatgctggcccgaggccagcccctccccgaaacgctgcagcttgcagtccaggggaaaaggacgttgcctggcttgcagcaacaacagcagcagcaacagcagcagcagcagcagcagcagcagcagcagcagcagcaacagcagccgcagcagcagccgccgcaaccacagacgcagcaacaacagcagccggcccttgttaactacaacagaccatctggcccggggccggagctgagcggcccgagcaccccgcagaagctgccggtgcccgcgcccggcggccggccctcgcccgcgccccccgcagccgcgcagccgcccgcggccgcagtgcccgggccctcagtgccgcagccggccccggggcagccctcgcccgtcctccagctgcagcagaagcagagccgcatcagccccatccagaaaccgcaaggcctggaccccgtggaaattctgcaagagcgggaatacagacttcaggcccgcatagctcataggatacaagaactggaaaatctgcctggctctttgccaccagatttaagaaccaaagcaaccgtggaactaaaagcacttcggttactcaatttccagcgtcagctgagagaggaggtggtggcctgcatgcgcagggacacgaccctggagacggctctcaactccaaagcatacaaacggagcaagcgccagactctgagagaagctcgcatgaccgagaagctggagaagcagcagaagattgagcaggagaggaaacgccgtcagaaacaccaggaatacctgaacagtattttgcaacatgcaaaagattttaaggaatatcatcggtctgtggccggaaagatccagaagctctccaaagcagtggcaacttggcatgccaacactgaaagagagcagaagaaggagacagagcggattgaaaaggagagaatgcggcgactgatggctgaagatgaggagagttatagaaaactgattgatcaaaagaaagacaggcgtttagcttaccttttgcagcagaccgatgagtatgtagccaatctgaccaatctggtttgggagcacaagcaagcccaggcagccaaagagaagaagaagaggaggaggaggaagaagaaggctgaggagaatgcagagggtggggagtctgccctgggaccggatggagagcccatagatgagagcagccagatgagtgacctccctgtcaaagtgactcacacagaaaccggcaaggttctgttcggaccagaagcacccaaagcaagtcagctggacgcctggctggaaatgaatcctggttatgaagttgcccctagatctgacagtgaagagagtgattctgattatgaggaagaggatgaggaagaagagtccagtaggcaggaaaccgaagagaaaatactcctggatccaaatagcgaagaagtttctgagaaggatgctaagcagatcattgagacagctaagcaagacgtggatgatgaatacagcatgcagtacagtgccaggggctcccagtcctactacaccgtggctcatgccatctcggagagggtggagaaacagtctgccctcctaattaatgggaccctaaagcattaccagctccagggcctggaatggatggtttccctgtataataacaacttgaacggaatcttagccgatgaaatggggcttggaaagaccatacagaccattgcactcatcacttatctgatggagcacaaaagactcaatggcccctatctcatcattgttcccctttcgactctatctaactggacatatgaatttgacaaatgggctccttctgtggtgaagatttcttacaagggtactcctgccatgcgtcgctcccttgtcccccagctacggagtggcaaattcaatgtcctcttgactacttatgagtatattataaaagacaagcacattcttgcaaagattcggtggaaatacatgatagtggacgaaggccaccgaatgaagaatcaccactgcaagctgactcaggtcttgaacactcactatgtggcccccagaaggatcctcttgactgggaccccgctgcagaataagctccctgaactctgggccctcctcaacttcctcctcccaacaatttttaagagctgcagcacatttgaacaatggttcaatgctccatttgccatgactggtgaaagggtggacttaaatgaagaagaaactatattgatcatcaggcgtctacataaggtgttaagaccatttttactaaggagactgaagaaagaagttgaatcccagcttcccgaaaaagtggaatatgtgatcaagtgtgacatgtcagctctgcagaagattctgtatcgccatatgcaagccaaggggatccttctcacagatggttctgagaaagataagaaggggaaaggaggtgctaagacacttatgaacactattatgcagttgagaaaaatctgcaaccacccatatatgtttcagcacattgaggaatcctttgctgaacacctaggctattcaaatggggtcatcaatggggctgaactgtatcgggcctcagggaagtttgagctgcttgatcgtattctgccaaaattgagagcgactaatcaccgagtgctgcttttctgccagatgacatctctcatgaccatcatggaggattattttgcttttcggaacttcctttacctacgccttgatggcaccaccaagtctgaagatcgtgctgctttgctgaagaaattcaatgaacctggatcccagtatttcattttcttgctgagcacaagagctggtggcctgggcttaaatcttcaggcagctcatacagtggtcatctttgacagcgactggaatcctcatcaggatctgcaggcccaagaccgagctcaccgcatcgggcagcagaacgaggtccgggtactgaggctctgtaccgtgaacagcgtggaggaaaagatcctcgcggccgcaaaatacaagctgaacgtggatcagaaagtgatccaggcgggcatgtttgaccaaaagtcttcaagccacgagcggagggcattcctgcaggccatcttggagcatgaagaggaaaatgaggaagaagatgaagtaccggacgatgagactctgaaccaaatgattgctcgacgagaagaagaatttgacctttttatgcggatggacatggaccggcggagggaagatgcccggaacccgaaacggaagccccgtttaatggaggaggatgagctgccctcctggatcattaaggatgacgctgaagtagaaaggctcacctgtgaagaagaggaggagaaaatatttgggagggggtcccgccagcgccgtgacgtggactacagtgacgccctcacggagaagcagtggctaagggccatcgaagacggcaatttggaggaaatggaagaggaagtacggcttaagaagcgaaaaagacgaagaaatgtggataaagatcctgcaaaagaagatgtggaaaaagctaagaagagaagaggccgccctcccgctgagaaactgtcaccaaatccccccaaactgacaaagcagatgaacgctatcatcgatactgtgataaactacaaagatagttcagggcgacagctcagtgaagtcttcattcagttaccttcaaggaaagaattaccagaatactatgaattaattaggaagccagtggatttcaaaaaaataaaggaaaggattcgtaatcataagtaccggagcctaggcgacctggagaaggatgtcatgcttctctgtcacaacgctcagacgttcaacctggagggatcccagatctatgaagactccatcgtcttacagtcagtgtttaagagtgcccggcagaaaattgccaaagaggaagagagtgaggatgaaagcaatgaagaggaggaagaggaagatgaagaagagtcagagtccgaggcaaaatcagtcaaggtgaaaattaagctcaataaaaaagatgacaaaggccgggacaaagggaaaggcaagaaaaggccaaatcgaggaaaagccaaacctgtagtgagcgattttgacagcgatgaggagcaggatgaacgtgaacagtcagaaggaagtgggacggatgatgagtgatcagtatggacctttttccttggtagaactgaattccttcctcccctgtctcatttctacccagtgagttcatttgtcatataggcactgggttgtttctatatcatcatcgtctataaactagctttaggatagtgccagacaaacatatgatatcatggtgtaaaaaacacacacatacacaaatatttgtgaccaaatgggcctcaaagattcagattgaaacaaacaaaaagctttt

SEQ ID NO: 996 - DNA, 5247 bp, Homo sapiens
ttccggcgggggaggcgccgggaagtcgatggcgccggcggctcctgcaggaggccactgtctgcagctcccgtgaagatgtccactccagacccacccctgggcggaactcctcggccaggtccttccccgggccctggcccttcccctggagccatgctgggccctagcccgggtccctcgccgggctccgcccacagcatgatggggcccagcccagggccgccctcagcaggacaccccatccccacccaggggcctggagggtaccctcaggacaacatgcaccagatgcacaagcccatggagtccatgcatgagaagggcatgtcggacgacccgcgctacaaccagatgaaaggaatggggatgcggtcagggggccatgctgggatggggcccccgcccagccccatggaccagcactcccaaggttacccctcgcccctgggtggctctgagcatgcctctagtccagttccagccagtggcccgtcttcggggccccagatgtcttccgggccaggaggtgccccgctggatggtgctgacccccaggccttggggcagcagaaccggggcccaaccccatttaaccagaaccagctgcaccagctcagagctcagatcatggcctacaagatgctggccagggggcagcccctccccgaccacctgcagatggcggtgcagggcaagcggccgatgcccgggatgcagcagcagatgccaacgctacctccaccctcggtgtccgcaacaggacccggccctggccctggccctggccccggcccgggtcccggcccggcacctccaaattacagcaggcctcatggtatgggagggcccaacatgcctcccccaggaccctcgggcgtgccccccgggatgccaggccagcctcctggagggcctcccaagccctggcctgaaggacccatggcgaatgctgctgcccccacgagcacccctcagaagctgattcccccgcagccaacgggccgcccttcccccgcgccccctgccgtcccacccgccgcctcgcccgtgatgccaccgcagacccagtcccccgggcagccggcccagcccgcgcccatggtgccactgcaccagaagcagagccgcatcacccccatccagaagccgcggggcctcgaccctgtggagatcctgcaggagcgcgagtacaggctgcaggctcgcatcgcacaccgaattcaggaacttgaaaaccttcccgggtccctggccggggatttgcgaaccaaagcgaccattgagctcaaggccctcaggctgctgaacttccagaggcagctgcgccaggaggtggtggtgtgcatgcggagggacacagcgctggagacagccctcaatgctaaggcctacaagcgcagcaagcgccagtccctgcgcgaggcccgcatcactgagaagctggagaagcagcagaagatcgagcaggagcgcaagcgccggcagaagcaccaggaatacctcaatagcattctccagcatgccaaggatttcaaggaatatcacagatccgtcacaggcaaaatccagaagctgaccaaggcagtggccacgtaccatgccaacacggagcgggagcagaagaaagagaacgagcggatcgagaaggagcgcatgcggaggctcatggctgaagatgaggaggggtaccgcaagctcatcgaccagaagaaggacaagcgcctggcctacctcttgcagcagacagacgagtacgtggctaacctcacggagctggtgccgcagcacaaggctgcccaggtcgccaaggagaaaaagaagaaaaagaaaaagaagaaggcagaaaatgcagaaggacagacgcctgccattgggccggatggcgagcctctagacgagaccagccagatgagcgacctcccggtgaaggtgatccacgtggagagtgggaagatcctcacaggcacagatgcccccaaagccgggcagctggaggcctggctcgagatgaacccggggtatgaagtagctccgaggtctgatagtgaagaaagtggctcagaagaagaggaagaggaggaggaggaagagcagccgcaggcagcacagcctcccaccctgcccgtggaggagaagaagaagattccagatccagacagcgatgacgtctctgaggtggacgcgcggcacatcattgagaatgccaagcaagatgtcgatgatgaatatggcgtgtcccaggcccttgcacgtggcctgcagtcctactatgccgtggcccatgctgtcactgagagagtggacaagcagtcagcgcttatggtcaatggtgtcctcaaacagtaccagatcaaaggtttggagtggctggtgtccctgtacaacaacaacctgaacggcatcctggccgacgagatgggcctggggaagaccatccagaccatcgcgctcatcacgtacctcatggagcacaaacgcatcaatgggcccttcctcatcatcgtgcctctctcaacgctgtccaactgggcgtacgagtttgacaagtgggccccctccgtggtgaaggtgtcttacaagggatccccagcagcaagacgggcctttgtcccccagctccggagtgggaagttcaacgtcttgctgacgacgtacgagtacatcatcaaagacaagcacatcctcgccaagatccgttggaagtacatgattgtggacgaaggtcaccgcatgaagaaccaccactgcaagctgacgcaggtgctcaacacgcactatgtggcaccccgccgcctgctgctgacgggcacaccgctgcagaacaagcttcccgagctctgggcgctgctcaacttcctgctgcccaccatcttcaagagctgcagcaccttcgagcagtggtttaacgcaccctttgccatgaccggggaaaaggtggacctgaatgaggaggaaaccattctcatcatccggcgtctccacaaagtgctgcggcccttcttgctccgacgactcaagaaggaagtcgaggcccagttgcccgaaaaggtggagtacgtcatcaagtgcgacatgtctgcgctgcagcgagtgctctaccgccacatgcaggccaagggcgtgctgctgactgatggctccgagaaggacaagaagggcaaaggcggcaccaagaccctgatgaacaccatcatgcagctgcggaagatctgcaaccacccctacatgttccagcacatcgaggagtccttttccgagcacttggggttcactggcggcattgtccaagggctggacctgtaccgagcctcgggtaaatttgagcttcttgatagaattcttcccaaactccgagcaaccaaccacaaagtgctgctgttctgccaaatgacctccctcatgaccatcatggaagattactttgcgtatcgcggctttaaatacctcaggcttgatggaaccacgaaggcggaggaccggggcatgctgctgaaaaccttcaacgagcccggctctgagtacttcatcttcctgctcagcacccgggctggggggctcggcctgaacctccagtcggcagacactgtgatcatttttgacagcgactggaatcctcaccaggacctgcaagcgcaggaccgagcccaccgcatcgggcagcagaacgaggtgcgtgtgctccgcctctgcaccgtcaacagcgtggaggagaagatcctagctgcagccaagtacaagctcaacgtggaccagaaggtgatccaggccggcatgttcgaccagaagtcctccagccatgagcggcgcgccttcctgcaggccatcctggagcacgaggagcaggatgagagcagacactgcagcacgggcagcggcagtgccagcttcgcccacactgcccctccgccagcgggcgtcaaccccgacttggaggagccacctctaaaggaggaagacgaggtgcccgacgacgagaccgtcaaccagatgatcgcccggcacgaggaggagtttgatctgttcatgcgcatggacctggaccgcaggcgcgaggaggcccgcaaccccaagcggaagccgcgcctcatggaggaggacgagctcccctcgtggatcatcaaggacgacgcggaggtggagcggctgacctgtgaggaggaggaggagaagatgttcggccgtggctcccgccaccgcaaggaggtggactacagcgactcactgacggagaagcagtggctcaaggccatcgaggagggcacgctggaggagatcgaagaggaggtccggcagaagaaatcatcacggaagcgcaagcgagacagcgacgccggctcctccaccccgaccaccagcacccgcagccgcgacaaggacgacgagagcaagaagcagaagaagcgcgggcggccgcctgccgagaaactctcccctaacccacccaacctcaccaagaagatgaagaagattgtggatgccgtgatcaagtacaaggacagcagcagtggacgtcagctcagcgaggtcttcatccagctgccctcgcgaaaggagctgcccgagtactacgagctcatccgcaagcccgtggacttcaagaagataaaggagcgcattcgcaaccacaagtaccgcagcctcaacgacctagagaaggacgtcatgctcctgtgccagaacgcacagaccttcaacctggagggctccctgatctatgaagactccatcgtcttgcagtcggtcttcaccagcgtgcggcagaaaatcgagaaggaggatgacagtgaaggcgaggagagtgaggaggaggaagagggcgaggaggaaggctccgaatccgaatctcggtccgtcaaagtgaagatcaagcttggccggaaggagaaggcacaggaccggctgaagggcggccggcggcggccgagccgagggtcccgagccaagccggtcgtgagtgacgatgacagtgaggaggaacaagaggaggaccgctcaggaagtggcagcgaagaagactgagccccgacattccagtctcgaccccgagcccctcgttccagagctgagatggcataggccttagcagtaacgggtagcagcagatgtagtttcagacttggagtaaaactgtataaacaaaagaatcttccatatttatacagcagagaagctgtaggactgtttgtgactggccctgtcctggcatcagtagcatctgtaacagcattaactgtcttaaagaga

SEQ ID NO: 997 - DNA, 5190 bp, Homo sapiens
ggaattcccgcgaggccggggtgggccaggctgtggggacgacgggctgcgacgatggccgcagcggcgggcggcggcgggccggggacagcggtaggcgccacgggcttcggggattcggcggcagccgcaggcctagctgtttatcgacggaaggatgggggcccggccaccaagttttgggagagcccggagacggtgtcccagctggattcggtgcgggtctggctgggcaagcactacaagaagtatgttcatgcggatgctcctaccaataaaacactggctgggctggtggtgcagcttcttcagttccaggaagatgcctttgggaagcatgtcaccaacccggccttcaccaaactccctgcaaagtgtttcatggatttcaaagctggaggcgccttatgtcacattcttggggctgcttacaagtataaaaatgaacagggatggcggaggtttgacctacagaacccatctcgaatggatcgtaatgtggaaatgtttatgaacattgaaaaaacattggtgcagaacaattgtttgaccagacccaacatctacctcattccagacattgatctgaagttggctaacaaattgaaagatatcatcaaacgacatcagggaacatttacggatgagaagtcaaaagcttcccaccacatttacccatattcttcctcacaagacgatgaagaatggttgagaccggtgatgagaaaagagaagcaagtgttagtgcattggggcttttacccagacagctatgatacttgggtccatagtaatgatgttgatgctgaaattgaagatccaccaattccagaaaaaccatggaaggttcatgtgaaatggattttggacactgatattttcaatgaatggatgaatgaggaggattatgaggtggatgaaaataggaagcctgtgagttttcgtcagcggatttcaaccaagaatgaagagccagtcagaagtccagaaagaagagatagaaaagcatcagctaatgctcgaaagaggaaacattcgccttcgcctccccctccgacaccaacagaatcacggaagaagagtgggaagaaaggccaagctagcctttatgggaagcgcagaagtcagaaagaggaagatgagcaagaagatctaaccaaggatatggaagacccaacacctgtacccaatatagaagaagtagtacttcccaaaaatgtgaacctaaagaaagatagtgaaaatacacctgttaaaggaggaactgtagcggatctagatgagcaggatgaagaaacagtcacagcaggaggaaaggaagatgaagatcctgccaaaggtgatcagagtcgatcagttgaccttggggaagataatgtgacagagcagaccaatcacattattattcctagttatgcatcatggtttgattataactgtattcatgtgattgaacggcgtgctcttcctgagttcttcaatggaaaaaacaaatccaagactccagaaatatacttggcatatcgaaattttatgattgacagctatcgtctaaacccccaagagtatttaactagcactgcttgtcggaggaacttgactggagatgtgtgtgctgtgatgagggtccatgccgggggagagcagtggggactcgttaattaccaagttgacccggaaagtagacccatggcaatgggacctcctcctactcctcattttaatgtattagctgatacccctctggcttgtgcctctgatcttcgatcacctcaggttcctgctgctcaacagatgctaaattttcctgagaaaaacaaggaaaaaccagttgatttgcagaactttggtctccgtactgacatttactccaagaaaacattagcaaagagtaaaggtgctagtgctggaagaggatggactgaacaggagacccttctactcctggaggccctggagatgtacaaggatgattggaacaaagtgtcggaacatgttggaagtcgtactcaggatgaatgcatcctccactttttgagacttcccattgaggacccataccttgagaattcagatgcttcccttgggcctttggcctaccagcctgtccccttcagtcagtcaggaaatccagttatgagtactgttgcttttttggcatctgtggtggaccctcgcgtggcatctgctgcagcaaaagcggctttggaggagttttctcgggtccgggaggaggtaccactggaattggttgaagctcatgtcaagaaagtacaagaagcagcacgagcctctgggaaagtggatcccacctacggtctggagagcagctgcattgcaggcacagggcccgatgagccagagaagcttgaaggagctgaagaggaaaaaatggaagccgaccctgatggtcagcagcctgaaaaggcagaaaataaagtggaaaatgaaacggatgaaggtgataaagcacaagatggagaaaatgaaaaaaatagtgaaaaggaacaggatagtgaagtgagtgaggataccaaatcagaagaaaaggagactgaagagaacaaagaactcagtagtacatgtaaagaaagagaaagtgatactgggaagaagaaagtagaacatgaaatttccgaaggaaatgttgccacagccgcagcagctgctcttgcctcagcggctaccaaagccaagcacctggctgcagtggaagaaagaaagatcaagtccctggtagctctcttggttgagacacaaatgaagaaactagagatcaaacttcgacattttgaagggctggaaactatcatggacagagagaaagaagctctagaacaacagaggcagcagttgcttactgaacgccaaaacttccacatggaacagctgaagtatgctgaattacgagcacgacagcaaatggaacagcagcagcatggccagaaccctcaacaggcacaccagcactcaggaggacctggcctggccccacttggagcagcagggcaccctggcatgatgcctcatcaacagccccctccctaccctctgatgcaccaccagatgccaccacctcatccaccccagccaggtcagataccaggcccaggttccatgatgcccgggcagcacatgccaggccgcatgattcccactgttgcagccaacatccacccctctgggagtggccctacccctcctggcatgccaccaatgccaggaaacatcttaggaccccgggtacccctgacagcacctaacggcatgtatccccctccaccacagcagcagccaccgccaccaccacctgcagatggggtccctccgcctcctgctcctggcccgccagcctcagctgctccttagcctggaagatgcagggaacctccacgcccaccaccatgagctggagtggggatgacaagacttgtgttcctcaactttcttgggtttctttcaggatttttcttctcacagctccaagcacgtgtcccgtgcctccccactcctcttaccacccctctctctgacactttttgtgttgggtcctcagccaacactcaaggggaaacctgtagtgacagtgtgccctggtcatccttaaaataacctgcatctcccctgtcctggtgtgggagtaagctgacagtttctctgcaggtcctgtcaactttagcatgctatgtctttaccattttctctcttccagttttttgctttgtcttatgcttctatggataatgctatataatcattatctttttatctttctgttattattgttttaaaggagagcatcctaagttaataggaaccaaaaaataatgatgggcagaagggggggaatagccacaggggacaaaccttaaggcattataagtgaccttatttctgcttttctgagctaagaatggtgctgatggtaaagtttgagacttttgccacacacaaatttgtgaaaattaaacgagatgtggaaggagaacctcagtgattttattccctagtgaggcctctgagggcctccacactgcctggcagaacataccactgaactagtatgtgctagaggagggcacaaacatccgctccttccctaggcctgctggctctggttttctatgcagatgattcattggattgggggtgagtgttttgtttttctgggggcagtgtgagctttgagggttggaatattgggaggcattccttagtttcctcaactagcctggaaagttaggagtctagggtaattaccccccaatgagtctagcctactattcactgctttgtgtgcatttttttctccctctttaaaaaaccctttaaaagaaaaaaaaaagtagatagtgctaaatatttagctcatgaaacttggttaggatggctgggggtacaagtccccaaactacctcttgttacagtagccagggagtggaatttcgtcaaccggtacttttaaggttaggatgggacgggaaaagtgaagcaggatattagctccttataccttctcccttccatttctgagatctcacattccatctatcacagggttttcaaagagatgctgagggtaacaaggaactcacttggcagtcagagcatcatgctttgaggtttggggtgctcaggctgggagggtagaatgccattccagaggacaagccacaaaaatgccttaatttgagctcgtatttacccctgctgataagtgacttgagagttcccggttttttcctcttgtccttccctcccttctgtccttccatgtgtggggaaagggtgtttttggtagagcttggtttccaaagcgcctggctttctcacttcacattctcaagtggcagtttcattatttagaatgcaaggtggacatcttttggatatctttttctatatatttctaaagctttacatatgagagggtatagggaggtgtttataaaacacttgagaacttttttccttaatatcagaaagcaaaaaaataaaaccacaattgagatttgcctttcaaaccctcaggtttgcctctaaccaggtgtccctggtcaccatcagagtactggaatacgggaaccgaggaggaccttggtccttttgtttttgttctggactcttgggagtggaaatgggatgagtttatccactggagcttaagtcccatgcatttgctccagaaag

SEQ ID NO: 998 - DNA, 2041 bp, Homo sapiens
gaattcccgttgggcggggcagggagttcgtagccgcctctgggtaactcgactcgggcggccaaacctccggagccggggacggaaggcgggcccgcagcagatcctggatccggaatctcccgggcaggagcggaatctgtcccgaaccgggtctgtgagggactcgcgaacttggattaggaaatcccggagcccggatcgacaaatcccggaacccggaataagatcgccaagtcccggatcgcggagcacagagcacggagtggactcgacgcggagcccggagtccggatcgcggcaccgcgggacgggacggagcgatgtcgggccgaggcgcgggcgggttccccgtgcccccgctaagccctggcggcggcgccgtggctgcggccctgggagcgccgcctccccccgcgggacccggcatgctgcccggaccggcgctccggggaccgggtccggcgcagtaccagcgacctggcatgtcaccagggaaccggatgcccatggctcggcttgcaggtgggaccccctgctggctccccatttggtgcagcagctccgcttcgacctggcatcccacccaccatgatggatccattccgaaaacgcctgcttgtgccccagcgcagcctcccatgcctgcccagcgccgggggttaaagaggaggaagatggcagataaggttctacctcagcgaatccgggagcttgttccagagtctcaggcgtacatggatctcttggcttttgagcggaagctggaccagaccattgctcgcaagcggatggagatccaggaggccatcaaaaagcctctgacacaaaagcgaaagcttcggatctacatttccaatacgttcagtcccagcaaggcggaaggcgatagtgcaggaactgcagggacccctgggggaaccccagcaggggacaaggtggcttcctgggaactccgagtggaaggaaaactgctggatgatcctagcaaacagaagaggaagttttcttcattctttaagagcctcgtcattgagctggacaaggagctgtacgggcctgacggtcacctggtggagtggtattggatgcccaccacccaggagacagatggcttccaagtaaaacggcctggagacctcaacgtcaagtgcaccctcctgctcatgctggatcatcagcctccccagtacaaattggacccccgattggcaaggctgctgggagtgcacacgcagacgagggccgccatcatgcaggccctgtggctttacatcaagcacaaccagctgcaggatgggcacgagcgggagtacatcaactgcaaccgttacttccgccagatcttcagttgtggccgactccgtttctccgagattcccatgaagctggcagggttgctgcagcatccagaccccattgtcatcaaccatgtcattagtgtcgaccctaacgaccagaagaagacagcctgttacgacatcgatgtggaggtggacgacccactgaaggcccaaatgagcaattttctggcctctaccaccaatcagcaggagatcgcctcccttgatgtcaagatccatgagaccattgagtccatcaaccagctgaagacccagagagatttcatgctcagttttagcaccgacccccaggacttcatccaggaatggctccgttcccagcgccgagaccttaagatcatcactgatgtgactggaaatcctgaggaggagagacgagctgctttctaccaccagccctgggcccaggaagcagtaggcaggcacatctttgccaaggtgcagcagcgaaggcaggaactggaacaggtgctgggaattcgcctgacctaactgctcagggatctttcttcccagccctggagcctggagggagaccaccctctgggtccttgctggggccgcagacacgtaggctggggtgaggagtgtctgctgtcaccctctactctccagctttagttttataaatgtagtgataggattccttgttgcttggtccccaaagccttatactt

SEQ ID NO: 999 - DNA, 2767 bp, Homo sapiens
gcggagggtgcgtgcgggccgcggcagccgaacaaaggagcaggggcgccgccgcagggacccgccacccacctcccggggccgcgcagcggcctctcgtctactgccaccatgaccgccaacggcacagccgaggcggtgcagatccagttcggcctcatcaactgcggcaacaagtacctgacggccgaggcgttcgggttcaaggtgaacgcgtccgccagcagcctgaagaagaagcagatctggacgctggagcagccccctgacgaggcgggcagcgcggccgtgtgcctgcgcagccacctgggccgctacctggcggcggacaaggacggcaacgtgacctgcgagcgcgaggtgcccggtcccgactgccgtttcctcatcgtggcgcacgacgacggtcgctggtcgctgcagtccgaggcgcaccggcgctacttcggcggcaccgaggaccgcctgtcctgcttcgcgcagacggtgtcccccgccgagaagtggagcgtgcacatcgccatgcaccctcaggtcaacatctacagtgtcacccgtaagcgctacgcgcacctgagcgcgcggccggccgacgagatcgccgtggaccgcgacgtgccctggggcgtcgactcgctcatcaccctcgccttccaggaccagcgctacagcgtgcagaccgccgaccaccgcttcctgcgccacgacgggcgcctggtggcgcgccccgagccggccactggctacacgctggagttccgctccggcaaggtggccttccgcgactgcgagggccgttacctggcgccgtcggggcccagcggcacgctcaaggcgggcaaggccaccaaggtgggcaaggacgagctctttgctctggagcagagctgcgcccaggtcgtgctgcaggcggccaacgagaggaacgtgtccacgcgccagggtatggacctgtctgccaatcaggacgaggagaccgaccaggagaccttccagctggagatcgaccgcgacaccaaaaagtgtgccttccgtacccacacgggcaagtactggacgctgacggccaccgggggcgtgcagtccaccgcctccagcaagaatgccagctgctactttgacatcgagtggcgtgaccggcgcatcacactgagggcgtccaatggcaagtttgtgacctccaagaagaatgggcagctggccgcctcggtggagacagcaggggactcagagctcttcctcatgaagctcatcaaccgccccatcatcgtgttccgcggggagcatggcttcatcggctgccgcaaggtcacgggcaccctggacgccaaccgctccagctatgacgtcttccagctggagttcaacgatggcgcctacaacatcaaagactccacaggcaaatactggacggtgggcagtgactccgcggtcaccagcagcggcgacactcctgtggacttcttcttcgagttctgcgactataacaaggtggccatcaaggtgggcgggcgctacctgaagggcgaccacgcaggcgtcctgaaggcctcggcggaaaccgtggaccccgcctcgctctgggagtactagggccggcccgtccttccccgcccctgcccacatggcggctcctgccaaccctccctgctaaccccttctccgccaggtgggctccagggcgggaggcaagcccccttgcctttcaaactggaaaccccagagaaaacggtgcccccacctgtcgcccctatggactccccactctcccctccgcccgggttccctactcccctcgggtcagcggctgcggcctggccctgggagggatttcagatgcccctgccctcttgtctgccacggggcgagtctggcacctctttcttctgacctcagacggctctgagccttatttctctggaagcggctaagggacggttgggggctgggagccctgggcgtgtagtgtaactggaatcttttgcctctcccagccacctcctcccagccccccaggagagctgggcacatgtcccaagcctgtcagtggccctccctggtgcactgtccccgaaacccctgcttgggaagggaagctgtcgggagggctaggactgacccttgtggtgtttttttgggtggtggctggaaacagcccctctcccacgtgggagaggctcagcctggctcccttccctggagcggcagggcgtgacggccacagggtctgcccgctgcacgttctgccaaggtggtggtggcgggcgggtaggggtgtgggggccgtcttcctcctgtctctttcctttcaccctagcctgactggaagcagaaaatgaccaaatcagtattttttttaatgaaatattattgctggaggcgtcccaggcaagcctggctgtagtagcgagtgatctggcggggggcgtctcagcaccctccccagggggtgcatctcagccccctctttccgtccttcccgtccagccccagccctgggcctgggctgccgacacctgggccagagcccctgctgtgattggtgctccctgggcctcccgggtggatgaagccaggcgtcgccccctccgggagccctggggtgagccgccggggcccccctgctgccagcctcccccgtccccaacatgcatctcactctgggtgtcttggtcttttattttttgtaagtgtcatttgtataactctaaacgcccatgatagtagcttcaaactggaaatagcgaaataaaataactcagtctgc

SEQ ID NO: 1000 - DNA, 1984 bp, Homo sapiens
ggatccagagatttagattttttataagctttcctgccaccgaaacgggtgtttgggacctcacgaggccctgttcattcttcgtcgctgcgctccccactctgtactggatgcatttactgacgttgttgtctccgtccccagagtatgaacccccaaggtgactcatgcagctgtgggtgcccggcatacagcatggtgactggaatggatgagcacccaataaacatttgttgcaggaatgcaggaggacgggcaggccagcaagcaggctgcctggtttttcccacatgggcttttctgggaaagaagagcttctatttttggaaagggctgctatgattgagaaaagttcatggcagcaaaaaaaggacagacgtcgggagggaaacactcctagttctcccagacaacacattttttaaaaagactccttcatctctttaataataacggtaacgacaatgacaatgatgattacttatgagtgcggctagtgccagccactgtgttgtcactgggcgagtaatgatctcattggatcttcacggtgggcgtgcggggctccagggacagcctgcgttcctgggctggctgggtgcagctctcttttcaggagagaaagctctcttggaggagctggaaaggtgcccgactccagccatgctggcgctactgtgttcctgcctgctcctggcagccggtgcctcggacgcctggacgggcgaggactcggcggagcccaactctgactcggcggagtggatccgagacatgtacgccaaggtcacggagatctggcaggaggtcatgcagcggcgggacgacgacggcacgctccacgccgcctgccaggtgcagccgtcggccacgctggacgccgcgcagccccgggtgaccggcgtcgtcctcttccggcagcttgcgccccgcgccaagctcgacgccttcttcgccctggagggcttcccgaccgagccgaacagctccagccgcgccatccacgtgcaccagttcggggacctgagccagggctgcgagtccaccgggccccactacaacccgctggccgtgccgcacccgcagcacccgggcgacttcggcaacttcgcggtccgcgacggcagcctctggaggtaccgcgccggcctggccgcctcgctcgcgggcccgcactccatcgtgggccgggccgtggtcgtccacgctggcgaggacgacctgggccgcggcggcaaccaggccagcgtggagaacgggaacgcgggccggcggctggcctgctgcgtggtgggcgtgtgcgggcccgggctctgggagcgccaggcgcgggagcactcagagcgcaagaagcggcggcgcgagagcgagtgcaaggccgcctgagcgcggcccccacccggcggcggccagggacccccgaggcccccctctgcctttgagcttctcctctgctccaacagacaccttccactctgaggtctcaccttcgcctctgctgaagtctccccgcagccctctccacccagaggtctccctataccgagacccaccatccttccatcctgaggaccgccccaaccctcggagccccccactcagtaggtctgaaggcctccatttgtaccgaaacaccccgctcacgctgacagcctcctaggctccctgaggtacctttccacccagaccctccttccccaccccataagccctgagactcccgcctttgacctgacgatcttcccccttcccgccttcaggttcctcctaggcgctcagaggccgctctggggggttgcctcgagtccccccacccctccccacccaccaccgctcccgcggcaagccagcccgtgcaacggaagccaggccaactgccccgcgtcttcagctgtttcgcatccaccgccaccccactgagagctgctcctttgggggaatgtttggcaacctttgtgttacagattaaaaattcagcaattca

SEQ ID NO: 1001 - DNA, 3579 bp, Homo sapiens
ctgaggcccacgcagggcctagggtgggaagatggcaggtgggggcggcgacctgagcaccaggaggctgaatgaatgtatttcaccagtagcaaatgagatgaaccatcttcctgcacacagccacgatttgcaaaggatgttcacggaagaccagggtgtagatgacaggctgctctatgacattgtattcaagcacttcaaaagaaataaggtggagatttcaaatgcaataaaaaagacatttccattcctcgagggcctccgtgatcgtgatctcatcacaaataaaatgtttgaagattctcaagattcttgtagaaacctggtccctgtacagagagtggtgtacaatgttcttagtgaactggagaagacatttaacctgccagttctggaagcactgttcagcgatgtcaacatgcaggaataccccgatttaattcacatttataaaggctttgaaaatgtaatccatgacaaattgcctctccaagaaagtgaagaagaagagagggaggagaggtctggcctccaactaagtcttgaacaaggaactggtgaaaactcttttcgaagcctgacttggccaccttcgggttccccatctcatgctggtacaaccccacctgaaaatggactctcagagcacccctgtgaaacagaacagataaatgcaaagagaaaagatacaaccagtgacaaagatgattcgctaggaagccaacaaacaaatgaacaatgtgctcaaaaggctgagccaacagagtcctgcgaacaaattgctgtccaagtgaataatggggatgctggaagggagatgccctgcccgttgccctgtgatgaagaaagcccagaggcagagctacacaaccatggaatccaaattaattcctgttctgtgcgactggtggatataaaaaaggaaaagccattttctaattcaaaagttgagtgccaagcccaagcaagaactcatcataaccaggcatctgacataatagtcatcagcagtgaggactctgaaggatccactgacgttgatgagcccttagaagtcttcatctcagcaccgagaagtgagcctgtgatcaataatgacaaccctttagaatcaaatgatgaaaaggagggccaagaagccacttgctcacgaccccagattgtaccagagcccatggatttcagaaaattatctacattcagagaaagttttaagaaaagagtgataggacaagaccacgacttttcagaatccagtgaggaggaggcgcccgcagaagcctcaagcggggcactgagaagcaagcatggtgagaaggctcctatgacttctagaagtacatctacttggagaatacccagcaggaagagacgtttcagcagtagtgacttttcagacctgagtaatggagaagagcttcaggaaacctgcagctcatccctaagaagagggtcaggatcacagccacaagaacctgaaaataagaagtgctcctgtgtcatgtgttttccaaaaggtgtgccaagaagccaagaagcaaggactgaaagtagtcaagcatctgacatgatggataccatggatgttgaaaacaattctactttggaaaaacacagtgggaaaagaagaaaaaagagaaggcatagatctaaagtaaatggtctccaaagagggagaaagaaagacagacctagaaaacatttaactctgaataacaaagtccaaaagaaaagatggcaacaaagaggaagaaaagccaacactagacctttgaaaagaagaagaaaaagaggtccaagaattcccaaagatgaaaatattaattttaaacaatctgaacttcctgtgacctgtggtgaggtgaagggcactctatataaggagcgattcaaacaaggaacctcaaagaagtgtatacagagtgaggataaaaagtggttcactcccagggaatttgaaattgaaggagaccgcggagcatccaagaactggaagctaagtatacgctgcggtggatataccctgaaagtcctgatggagaacaaatttctgccagaaccaccaagcacaagaaaaaagagaatactggaatctcacaacaataccttagttgacccttgtgaggagcataagaagaagaacccagatgcttcagtcaagttctcagagtttttaaagaagtgctcagagacatggaagaccatttttgctaaagagaaaggaaaatttgaagatatggcaaaggcggacaaggcccattatgaaagagaaatgaaaacctatatccctcctaaaggggagaaaaaaaagaagttcaaggatcccaatgcacccaagaggcctcctttggcctttttcctgttctgctctgagtatcgcccaaaaatcaaaggagaacatcctggcctgtccattgatgatgttgtgaagaaactggcagggatgtggaataacaccgctgcagctgacaagcagttttatgaaaagaaggctgcaaagctgaaggaaaaatacaaaaaggatattgctgcatatcgagctaaaggaaagcctaattcagcaaaaaagagagttgtcaaggctgaaaaaagcaagaaaaagaaggaagaggaagaagatgaagaggatgaacaagaggaggaaaatgaagaagatgatgataaataagttgcttctagtgcagtttttttcttgtctataaagcatttaagctgcctgtacacaactcactccttttaaagaaaaaaacttcaacgtaagactgtgtaagatttgtttttaaaccgtacactgtgtttttttgtatagttaaccactaccgaatgtgtcttcagatagccctgtcctggtggtatttagccactaacctttgcctggtacagtatgggggttgtaaattggcatggaaatttaaagcaggttcttgttagtgcacagcacaaattagttgtataggaggatggtagttttttcaccttcagttgtctctgatgtagcttatacaaaacatttgttgttctgttaactgaatgccactctgtaattgcaaaaaaaaaaaacagttgcagctgttttgttgacattctgaatgcttctaagtaaatacaatttttaaaaaaccgtatgagggaactgtgtagacaaggtaccaggtcagtcttcttccatgttctattagctccacaaagccaatctcaatccctcaaaacaatcttgtcatacttgaaaatatgacactctagtcaaagccttggtaaaataatcagtgtttccaatctgtcctgttacaaaagaaacagattattattgaacttatgcaaataaccattgtcataagaatgtttatgaatagtttccaaattatggcaaattcatgtagagagagaaaagtaactgttttggttttgctcacaaaagtctactttacctaagggctgtcagatataagtaacttaaaagaaagagaagttttcttgacttttgaaaacaaaatatgaaaagaatcggcaatgtttcaaacaaaaagtcataaaagtcactttattcctccatcaaaaaaaaaaaaaaaaaaaaaa

SEQ ID NO: 1002 - DNA, 2133 bp, Homo sapiens
cgggagagcgcgctctgcctgccgcctgcctgcctgccactgagggttcccagcaccatgagggcctggatcttctttctcctttgcctggccgggagggccttggcagcccctcagcaagaagccctgcctgatgagacagaggtggtggaagaaactgtggcagaggtgactgaggtatctgtgggagctaatcctgtccaggtggaagtaggagaatttgatgatggtgcagaggaaaccgaagaggaggtggtggcggaaaatccctgccagaaccaccactgcaaacacggcaaggtgtgcgagctggatgagaacaacacccccatgtgcgtgtgccaggaccccaccagctgcccagcccccattggcgagtttgagaaggtgtgcagcaatgacaacaagaccttcgactcttcctgccacttctttgccacaaagtgcaccctggagggcaccaagaagggccacaagctccacctggactacatcgggccttgcaaatacatccccccttgcctggactctgagctgaccgaattccccctgcgcatgcgggactggctcaagaacgtcctggtcaccctgtatgagagggatgaggacaacaaccttctgactgagaagcagaagctgcgggtgaagaagatccatgagaatgagaagcgcctggaggcaggagaccaccccgtggagctgctggcccgggacttcgagaagaactataacatgtacatcttccctgtacactggcagttcggccagctggaccagcaccccattgacgggtacctctcccacaccgagctggctccactgcgtgctcccctcatccccatggagcattgcaccacccgctttttcgagacctgtgacctggacaatgacaagtacatcgccctggatgagtgggccggctgcttcggcatcaagcagaaggatatcgacaaggatcttgtgatctaaatccactccttccacagtaccggattctctctttaaccctccccttcgtgtttcccccaatgtttaaaatgtttggatggtttgttgttctgcctggagacaaggtgctaacatagatttaagtgaatacattaacggtgctaaaaatgaaaattctaacccaagacatgacattcttagctgtaacttaactattaaggccttttccacacgcattaatagtcccatttttctcttgccatttgtagctttgcccattgtcttattggcacatgggtggacacggatctgctgggctctgccttaaacacacattgcagcttcaacttttctctttagtgttctgtttgaaactaatacttaccgagtcagactttgtgttcatttcatttcagggtcttggctgcctgtgggcttccccaggtggcctggaggtgggcaaagggaagtaacagacacacgatgttgtcaaggatggttttgggactagaggctcagtggtgggagagatccctgcagaatccaccaaccagaacgtggtttgcctgaggctgtaactgagagaaagattctggggctgtcttatgaaaatatagacattctcacataagcccagttcatcaccatttcctcctttacctttcagtgcagtttcttttcacattaggctgttggttcaaacttttgggagcacggactgtcagttctctgggaagtggtcagcgcatcctgcagggcttctcctcctctgtcttttggagaaccagggctcttctcaggggctctagggactgccaggctgtttcagccaggaaggccaaaatcaagagtgagatgtagaaagttgtaaaatagaaaaagtggagttggtgaatcggttgttctttcctcacatttggatgattgtcataaggtttttagcatgttcctccttttcttcaccctcccctttgttcttctattaatcaagagaaacttcaaagttaatgggatggtcggatctcacaggctgagaactcgttcacctccaagcatttcatgaaaaagctgcttcttattaatcatacaaactctcaccatgatgtgaagagtttcacaaatctttcaaaataaaaagtaatgacttagaaactgaaaaaaaaaaaaaaaaaaaaaaaaaaaaaa

SEQ ID NO: 1003 - DNA, 3087 bp, Homo sapiens
tttcaggccaacatggccgtgctgctgctgctgctccgtgccctccgccggggtccaggcccgggtcctcggccgctgtggggcccaggcccggcctggagtccagggttccccgccaggcccgggagggggcggccgtacatggccagcaggcctccgggggacctcgccgaggctggaggccgagctctgcagagcttacaattgagactgctaacccctacctttgaagggatcaacggattgttgttgaaacaacatttagttcagaatccagtcagactctggcaacttttaggtggtactttctattttaacacctcaaggttgaagcagaagaataaggagaaggataagtcgaaggggaaggcgcctgaagaggacgaagaggagaggagacgccgtgagcgggacgaccagatgtaccgagagcggctgcgcaccttgctggtcatcgcggttgtcatgagcctcctgaatgctctcagcaccagcggaggcagcatttcctggaacgactttgtccacgagatgctggccaagggcgaggtgcagcgcgtccaggtggtgcctgagagcgacgtggtggaagtctacctgcaccctggagccgtggtgtttgggcggcctcggctagccttgatgtaccgaatgcaggttgcaaatattgacaagtttgaagagaagcttcgagcagctgaagatgagctgaatatcgaggccaaggacaggatcccagtttcctacaagcgaacaggattctttggaaatgccctgtactctgtggggatgacggcagtgggcctggccatcctgtggtatgttttccgtctggccgggatgactggaagggaaggtggattcagtgcttttaatcagcttaaaatggctcgtttcaccattgtggatgggaagatggggaaaggagtcagcttcaaagacgtggcaggaatgcacgaagccaaactggaagtccgcgagtttgtggattatctgaagagcccagaacgcttcctccagcttggcgccaaggtcccaaagggcgcactgctgctcggcccccccggctgtgggaagacgctgctggccaaggcggtggccacggaggctcaggtgcccttcctggcgatggccggcccagagttcgtggaggtcattggaggcctcggcgctgcccgtgtgcggagcctctttaaggaagcccgagcccgggccccctgcatcgtctacatcgatgagatcgacgcggtgggcaagaagcgctccaccaccatgtccggcttctccaacacggaggaggagcagacgctcaaccagcttctggtagaaatggatggaatgggtaccacagaccatgtcatcgtcctggcgtccacgaaccgagctgacattttggacggtgctctgatgaggccaggccgactggaccggcacgtcttcattgatctccccacgctgcaggagaggcgggagatttttgagcagcacctgaagagcctgaagctgacccagtccagcaccttttactcccagcgtctggcagagctgacaccaggattcagtggggctgacatcgccaacatctgcaatgaggctgcgctgcacgcggcgcgggagggacacacttccgtgcacactctcaacttcgagtacgccgtggagcgcgtcctcgcagggactgccaaaaagagcaagatcctgtccaaggaagaacagaaagtggttgcgtttcatgagtcgggccacgccttggtgggctggatgctggagcacacggaggccgtgatgaaggtctccataacccctcggacaaacgccgccctgggctttgctcagatgctccccagagaccagcacctcttcaccaaggagcagctgtttgagcggatgtgcatggccttgggaggacgggcctcggaagcactgtccttcaacgaggtcacttctggggcacaggacgacctgaggaaggtcacccgcatcgcctactccatggtgaagcagtttgggatggcacctggcatcgggcccatctccttccctgaggcgcaggagggcctcatgggcatcgggcggcgccccttcagccaaggcctgcagcagatgatggaccatgaagcaagactgctggtggccaaggcctacagacacaccgagaaggtgctgcaggacaacctggacaagttgcaggcgctggcaaacgcccttctggaaaaggaagtgataaactatgaggacattgaggctctcattggcccgccgccccatgggccgaagaaaatgatcgcaccgcagaggtggatcgacgcccagagggagaaacaggacttgggcgaggaggagaccgaagagacccagcagcctccacttggaggcgaagagccgacttggcccaagtagttgggaggtgttggctgcacgtgcgggtggtccgggaagtgagggctcactcagccaccctgagttgcttttcagctgaggtttgcacttcctctcgcggccctcagtagtccctgcacagtgacttctgagatctgttgattgatgacccttttcatgattttaagtttctctgcagaaactactgacggagtcctgtgtttgtgagtcgtttcccctatggggaaggttatcagtgcttcccgagtgagcatggaacacttcgagttcccagggttatagacagtcgttcccagtgtggctgaggccacccagaggcagcagagcattcagactccaaacagacccctgttcatgccgacgcttgcacgaccgccccagttcctgtggctccctcggaatgctaaggggatcggacatgaaaggaccctgtgagccgattgtcctatctccagcggccctgtcatccagctcactcatcaatggggccagtcaggcccaggcactgggctccggaggactcaccactgccccctgctgccatgtggactggtgcaagttgaggacttcttgctggtctagtcacgcatgcagtgttggggatgccttggtttttactgctctgagaattgttgagatactttactaataaactgtgtagttggaaaaaaaaaaaaaaaaaaaaaa

SEQ ID NO: 1004 - DNA, 368 bp, Homo sapiens
gaagagacgtggtaagtgcggtgcagttttcaactgacctctggacgcagaacttcagccatgaaggtaacaggcatctttcttctcagtgccttggccctgttgagtctatctggtaacactggagctgactccctgggaagagaggccaaatgttacaatgaacttaatggatgcaccaagatatatgaccctgtctgtgggactgatggaaatacttatcccaatgaatgcgtgttatgttttgaaggtcggaaacgccagacttctatcctcattcaaaaatctgggccttgctgagaaccaaggttttgaaatcccatcaggtcaccgcgaggcctattgttgaataaatgtatctgaatatc

SEQ ID NO: 1005 - DNA, 1447 bp, Homo sapiens
ggcacgaggcggagaacaggagcatggagggcgggctggggcgtgctgtgtgcttgctgaccggggcctcccgcggcttcggccggacgctggccccgctcctggcctcgctgctgtcgcccggctccgtgcttgtccttagcgcccgcaacgacgaggcactgcgccagctggaggccgagctgggcgccgagcggtctggcctgcgcgtggtgcgggtgcccgccgacctgggcgccgaggccggcttgcagcagctgctcggcgccctgcgcgagctcccccggcccaaggggctgcagcgactgctgcttatcaacaacgcgggctctcttggggatgtgtccaaaggcttcgtggacctgagtgactccactcaagtgaacaactactgggcactgaacttgacctccatgctctgcctgacttccagcgtcctgaaggccttcccggacagtcctggcctcaacagaaccgtggttaacatctcgtccctctgtgccctgcaacctttcaaaggctgggcgctgtactgtgcaggaaaggctgctcgtgatatgctgttccaggtcctggcgctggaggaacctaatgtgagggtgctgaactatgccccaggtcctctggacacagacatgcagcagttggcccgggagacctccgtggacccagacatgcgaaaagggctgcaggagctgaaggcaaaggggaagctggtggattgcaaggtgtcagcccagaaactgctgagcttactggaaaaggacgagttcaagtctggagcccacgtggacttctatgacaaataagcccatgtttttggcttcctgaacctttttgcccccacttttagacataccccagagccctgtggctccccacaccctgccataggggcagtcctgccttacacatagaagcattcatgcctgctgccctgccctcaggcacagccagctgtgagctcccaggtcattggccttaccagttgtcaggagtctgtgctgtgcaccctgggttataaggaggcttaggagagaggttatgggtattggtgtctctatccccaggaatagaacttaaggggtgggaagaacaggaaaagaagctggaacacagaagagaggaggttgtgtctcttgctcatagcaagcctgtgggtagaggaaagagtgatctggtgtcgaataggaggacccatgtagattcgcagatggcctggatgggaggaagggcagacggtacatgtcccagcccacatagatgccccttgctgagggtagcaggaccttctgttgaactttgtgtcctcactctgatgtctccttccttcagaatctaccacccctcccccaggctgggagaaggggctcctgggtgtctgtatacacgccaaaggcagatacaaataaaatacagattgtcctttaaaaaaaaaaaaaaaaaa

SEQ ID NO: 1006 - DNA, 2277 bp, Homo sapiens
acgccctatacaacttggcttcacatacttttacactaactttatatgatttttaaaaactggtctgatcggacttctcgtcctgggacactgtttactggagtctggccggctctccgtgctcctcttggtacctcattttggggagaaccttaaacccactcgagcagataatctccgccttgaccggtgccaccaaagaagggttggaaccatgtggacttttctgggcattgccactttcacctatttttataagaagttcggggacttcatcactttggccaacagggaggtcctgttgtgcgtgctggtgttcctctcgctgggcctggtgctctcctaccgctgtcgccaccgaaacgggggtctcctcgggcgccagcggagcggctcccagttcgccctcttctcggatattctctcaggcctgcctttcattggcttcttctgggccaaatccccccctgaatcagaaaataaggagcagctcggggccaggaggcgcagaaaaggaaccaatatttcagaaacaagcttaataggaacagctgcctgtacatcaacatcttctcagaatgacccagaagttatcatcgtgggagctggcgtgcttggctctgctttggtagctgtgctttccagagatggaagaaaggtgacagtcattgagagagacttaaaagagcctgacagaatagttggagaattcctgcagccgggtggttatcatgttctcaaagaccttggtcttggagatacagtggaaggtcttgatgcccaggttgtaaatggttacatgattcatgatcaggaaagcaaatcagaggttcagattccttaccctctgtcagaaaacaatcaagtgcagagtggaagagctttccatcacggaagattcatcatgagtctccggaaagcagctatggcagagcccaatgcaaagtttattgaaggtgttgtgttacagttattagaggaagatgatgttgtgatgggagttcagtacaaggataaagagactggagatatcaaggaactccatgctccactgactgttgttgcagatgggcttttctccaagttcaggaaaagcctggtctccaataaagtttctgtatcatctcattttgttggctttcttatgaagaatgcaccacagtttaaagcaaatcatgctgaacttattttagctaacccgagtccagttctcatctaccggatttcatccagtgaaactcgagtacttgttgacattagaggagaaatgccaaggaatttaagagaatacatggttgaaaaaatttacccacaaatacctgatcacctgaaagaaccattcttagaagccactgacaattctcatctgaggtccatgctagcaagcttccttcctccttcatcagtgaagaaacgaggtgttcttcttttgggagacgcatataatatgaggcatccacttactggtggaggaatgactgttgcttttaaagatataaaactatggagaaaactgctaaagggtatccctgacctttatgatgatgcagctattttcgaggccaacaaatcattttactgggcaagaaaaacatctcattcctttgtcgtgaatatccttgctcaggctctttatgaattattttctgccacagatgattccctgcatcaactaagaaaagcctgttttctttatttcaaacttggtggcgaatgtgttgcgggtcctgttgggctgctttctgtattgtctcctaaccctctagctttaattggacacttctttgctgttgcaatctatgccgtgtatttttgctttaagtcagaaccttggattacaaaacctcgagcccttctcagtagtagtgctgtattgtacaaagcgtgttctgtaatatttcctctaatttactcagaaatgaagtatatggttcattaagcttaaaggggaaccatttgtgaatgaatatttggaacttaccaagtcctaagagacttttggaagaggatatatatagcatagtaccataccacttataaagtggaaactcttggaccaagatttggattaatttgtttttgaagttttttgtatataaatatgtaaatacatgctttaatttgcaatttaaaatgaaggggttaaataagttagacatttgaaagaaatgattgttaccataaattagtgctaatgctgaggagaactacagtttttcttttgaatttagtatttgagatgagttgttgggacatgcaaataaaatgaagaatgac

SEQ ID NO: 1007 - DNA, 1238 bp, Homo sapiens
cggcggagctggtcccgttgtgctgcggcgccgcgcggcctgcagtcccgggcccgcgccccgcgccgcccgcccgcccgccatggagcccggccccgacggccccgccgcctccggccccgccgccatccgcgagggctggttccgcgagacctgcagcctgtggcccggccaggccctgtcgctgcaggtggagcagctgctccaccaccggcgctcgcgctaccaggacatcctcgtcttccgcagtaagacctatggcaacgtgctggtgttggacggtgtcatccagtgcacggagagagacgagttctcctaccaggagatgatcgccaacctgcctctctgcagccaccccaacccgcgaaaggtgctgatcatcgggggcggagatggaggtgtcctgcgggaggtggtgaagcacccctccgtggagtccgtggtccagtgtgagatcgacgaggatgtcatccaagtctccaagaagttcctgccaggcatggccattggctactctagctcgaaggtgaccctacatgtgggtgacggttttgagttcatgaaacagaatcaggatgccttcgacgtgatcatcactgactcctcagaccccatgggccccgccgaaagtctcttcaaggagtcctattaccagctcatgaagacagccctcaaggaagatggtgtcctctgctgccagggcgagtgcgagtggctgcacctggacctcatcaaggagatgcggcagttctgccagtccctgttccccgtggtggcctatgcctactgcaccatccccacctaccccagcggccagatcggcttcatgctgtgcagcaagaacccgagcacgaacttccaggagccggtgcagccgctgacacagcagcaggtggcgcagatgcagctgaagtactacaactccgacgtgcaccgcgccgcctttgtgctgcccgagtttgcccgcaaggccctgaatgatgtgagctgagcccaggcgccaccactgatgccacccaggacctcggaccttggagcctgcggggtgcctcggcccctccagccccgggccggacctcctgctggctctcgcccaccaaccaagtgttacaagccccagaatgctgcccggcctgccctgctgggcggactgtctgtgtgtctgtctctctggcgttccacctccaagcctataccagctgtgtacagcgccatctctctgccttctgttgcccccg

SEQ ID NO: 1008 - DNA, 1466 bp, Homo sapiens
ggggctgctgggactcgtcgtcggttggcgactcccggacgttaggtagtttgttgggccgggttctgaggccttgcttctctttacttttccactctaggccacgatgccgcagtaccagacctgggaggagttcagccgcgctgccgagaagctttacctcgctgaccctatgaaggcacgtgtggttctcaaatataggcattctgatgggaacttgtgtgttaaagtaacagatgatttagtttgtttggtgtataaaacagaccaagctcaagatgtaaagaagattgagaaattccacagtcaactaatgcgacttatggtagccaaggaagcccgcaatgttaccatggaaactgagtgaatggtttgaaatgaagactttgtcgtgtacttaggaagtaaatatcttttgaattagagaaaggttgggacagaaagtactttatgtaactaagtgggctgttcagaagcttagaggtcattttttgtaattttctttttaattactttagagagctagggatgcaaatgttttcagttagaaagcctttatttacttttggaaattgaacaagaaatgcatctgtcttagaaactggagattatttgatgttaggtaaaacatgtaattgtttctctggcaaatttgtatcagtaatttgaaaatgagatattaggaaaaaccaattcttcttaaatttagttcatctttctttaaaagaacattaaatgtaaccattttgtcagatccatgtattttggagcataaaatgtatgctgttgtgaccaataaatataaaatatggtaattggaattaactccacaccatagtatgcattgttatacatactgtgtacctaattatgtatagcagtgtagtctcaattatatctgaaagtaattgtgactaacaagtatgctttgccttatttccacatttaaactacctgttaatataagggatttgtagtatcagcttgttgagcaatgactttgaatctagttttcagtgatcagaagcagcagttatttgagtgtatgaatggaatgatgatcactgtgctataatgtactgaaaccaccatattacagaaatatttactacatattttccatctgtagtttctcagaagggctatggattagtttgaactgtcaaatccttgcatacttctgtgacacccctgcccattttctgtctttaattaaccaaggtgttaggtgtgactgtcacaactgttatgttttccagtaaactagaagcacgatatttgataattatatttgtatttcaccacctaaatgtaatgttgattcctcaagaatgaaatgaaggcactacattgaaatatgttttgtataaatttgtcatgttgaacagcattttagcatggtaagttcccttagctatatgaattttggcatgtttcagagagatcagtaaataaaatattagata

SEQ ID NO: 1009 - DNA, 3285 bp, Homo sapiens
ctagaattcagcggccgctgaattctagacccggatgaagagtaacgccattaccgcccgagccgccgagagccttagccgacggaaactggacactggaccggcagcgccatgagactcctcccccgcttgctgctgcttctcttactcgtgttccctgccactgtcttgttccgaggcggccccagaggctcgttagcagtggcacaagatcttacagaggatgaagaaacagtagaagattccataattgaggatgaagatgatgaagccgaggtagaagaagatgaacccacagatttggtagaagataaagaggaagaagatgtgtctggtgaacctgaagcttcaccgagtgcagatacaactatactgtttgtaaaaggagaagattttccagcaaataacattgtgaagttcctggtaggctttaccaacaagggtacagaagattttattgttgaatccttagatgcctcattccgttatcctcaggaccaccagttttatatccagaatttcacagctcttcctctgaacactgtagtgccaccccagagacaggcaacttttgagtactctttcattcctgcagagcccatgggcggacgaccatttggtttggtcatcaatctgaactacaaagatttgaacggcaatgtattccaagatgcagtcttcaatcaaacagttacagttattgaaagagaggatgggttagatggagaaacaatctttatgtatatgttccttgctggtcttgggcttctggttattgttggccttcatcaactcctagaatctagaaagcgtaagagacccatacagaaagtagaaatgggtacatcaagtcagaatgatgttgacatgagttggattcctcaggaaacattgaatcaaatcaataaagcttcaccaagaaggttgcccaggaaacgggcacagaagagatcagtgggatctgatgagtaaatgttcctttgtgcaacaattcggtctttacttaacctgccctaatatttttcggcctgatgggaattagtgcagagaagccagtcaccatagaaggcaactcctacttgtgtgtggactgagcaatcagagtctgtggcgataatattgctgaaaatgcactgcattcatttttctaaagtaacaaatttggtttttttttaaaccattaaaatctatgtgtgtgcgtgtgtatgtatgtgagcagttggtcttaccagaatcattgttgaactacctgaaacaagtctttagaatactaaatataatgctgttgtctcttcctttttgacattttctgattttttcccccaaaactcagttaatatttacccactatgattattgatgtcctgccttgaacagttttaaagaaaacaatttttggaatagctcaaatttcaattgatggcacaaatcagcattttgttgttgttactgtattacaattagtattctaaaggcagaagcagaagtagctgctttttagcaatagaattgtttcagtattttgctgctgtttaatgcgcatcttcagaaaacttcccagtggcttcaaggaatttggggatctctctggcaacaaattgtgaaacatgaaatttctgctgactttaatatatgaaacctaatcctacccccttttttaacaaaaagaaactagtacatttgtgaaaattgtgttgtgttgtccattgttgctctagttctgacccagaggtagctctggagtgattttagacctactcactcagttgtgtgtaggtttttttgttttgttttgagagagaatttttctctccttaatagaagcatcctttttaaagagaagttgccttggtccacacactaagcagaaaaccaagttatcaggacagagatatttcccagttactcctaatcaatgaagaaagtgagttggatatttttaaagcagttaactaattttttcttacctaatcttttgggagttttgcttgttgatataacctttttagttaacctgaaagattccaaaaattgttcttaagtgcttgagactggaaccaaaattaaattgtacttcataaaatcctcttatagagttactcttgccctagattgtaaattaagtttggcattattgtcagactggatggagggtgaagtaaaatagtatgaacaattaagaggctctccccctcttgtctttaagccatattctcctacatgtattttataagaaaatgttaagtcaaattttagtggctctttaattcctgacctcttcattctccttttcagtataacctcccctatgctcatgcccacacagacaaaaaaacaaaacgaaatacacacagaaaaaagtctttccaaactgtttaagtatttaaacatctgagccaaagcagatagaagttattgtataattgttaatcactttgcaaataggggctatcaaattacctatattggcattgctggattataaactctatatctgtaatataaagtgtttgagtttttaattgggctgttatgatcagtaattgattttgagaaagctctatgagctctaagtaactgcatggttttttgtttaatgtaatataggagacccttcacattcccaaggaatatattccaaaacatttttgtgaatatctaagtttgtgaaactactagggcatgatacagtaaggtgtaattacagaatttacgaaatgtaaatggcctctacagagttttatggaatacctggtactaacgtaggcagctgcaaaaccacactgagttacagctgtcagccctcctcattcctaaataacttgccttacatatcagccctcccacttctgaagttcaaattagtgcctcggaaatgtagaatttattatttgtcattttttttttttagcatagattgagaacagttgaactcttaaatcctcagatgccaggggtctgctctagcatcagtaagtatttagcagaaactaactccgtaatgaatggaattcaattccacacatggtttgttcaagcacacttaataagtagcctattttttaaatgtctttttaaaatgtaaatatttggatgaagtttttctttgttttgatatattcatttgctacaccaactatgttttcagaattcatcttttgaacaacttggtttcagaatatgtaaaatgactttaaggatcttgtgtatcaaacctatccccggatgtgtgagaataatgtgttcataaagcatggatctcgtaaaaaaaaaaaaaaaaaaaaa

SEQ ID NO: 1010 - DNA, 1093 bp, Homo sapiens
ggctctcttcctgtctttgtggctccggaaaggcgtttgggatgccaacgatgaggctgctgtcatttgtggtgttggctctatttgctgtcactcaagcagaggaaggagccaggcttttggcttccaaatcactgctgaacagatacgccgtggagggacgagacctgaccttgcagtacaacatctacaatgttggctcaagtgctgcattagacgtggaactatctgatgattccttccctccagaagactttggcattgtgtctggaatgctcaatgtcaaatgggaccggattgcccctgctagcaatgtctcccacactgtggtcctgcgccctctcaaggctggttatttcaacttcacctcggcaacaattacttacctggcccaggaggatgggcccgttgtgattggctctaccagtgcacctggacagggaggaatcctggctcagcgggagtttgacaggcgattctcccctcattttctggactgggcagcctttggggtcatgacccttccctccatcggcatccccctgctattgtggtactccagcaagaggaaatatgacactcccaaaacgaagaagaactgattggggcttccacagccctcctctcccaagaaatccaggctcctctcccaagaaatccaggtgctttccagactccaaagggtatcttaaatgcaatctcttctctcttagcccttggccactttctcctggatcctgccctgctctcagccatagtgaaggaccagccctaggagtctgcgagagcctccttggttccatcgtgaagccataaacaggaatgcctttggcaatagccttgagcctagagggccctctgatgccccactgaggtgctgttggtttattgctggcaacgtgaattctctcaggggtctaggaggggcattttggagactgcctgacaccacccctatcccctgcctccccctctcagaagagggtggaagatgaaatgaaagctatgggactcttggaggatacccagtgtctattctgggttagagaagtgcttactaaggggttttctaataaaaacaaatgccaattgc

SEQ ID NO: 1011 - DNA, 2787 bp, Homo sapiens
cagctggaattcggggcggcggcgcagactgggagggggagccgggggttccgacgtcgcagccgagggaacaagccccaaccggatcctggacaggcaccccggcttggcgctgtctctccccctcggctcggagaggcccttcggcctgagggagcctcgccgcccgtccccggcacacgcgcagccccggcctctcggcctctgccggagaaacaggatggcccaatggaatcagctacagcagcttgacacacggtacctggagcagctccatcagctctacagtgacagcttcccaatggagctgcggcagtttctggccccttggattgagagtcaagattgggcatatgcggccagcaaagaatcacatgccactttggtgtttcataatctcctgggagagattgaccagcagtatagccgcttcctgcaagagtcgaatgttctctatcagcacaatctacgaagaatcaagcagtttcttcagagcaggtatcttgagaagccaatggagattgcccggattgtggcccggtgcctgtgggaagaatcacgccttctacagactgcagccactgcggcccagcaagggggccaggccaaccaccccacagcagccgtggtgacggagaagcagcagatgctggagcagcaccttcaggatgtccggaagagagtgcaggatctagaacagaaaatgaaagtggtagagaatctccaggatgactttgatttcaactataaaaccctcaagagtcaaggagacatgcaagatctgaatggaaacaaccagtcagtgaccaggcagaagatgcagcagctggaacagatgctcactgcgctggaccagatgcggagaagcatcgtgagtgagctggcggggcttttgtcagcgatggagtacgtgcagaaaactctcacggacgaggagctggctgactggaagaggcggcaacagattgcctgcattggaggcccgcccaacatctgcctagatcggctagaaaactggataacgtcattagcagaatctcaacttcagacccgtcaacaaattaagaaactggaggagttgcaccaaaaagtttcctacaaaggggaccccattgtacagcaccggccgatgctggaggagaggatcgtggagctgttcagaaacttaatgaaaagtgcctttgtggtggagcggcagccctgcatgcccatgcatcctgaccggcccctcgtcatcaagaccggcgtccagttcactactaaagtcaggttgctggtcaagttccctgagttgaattatcagcttaaaattaaagtgtgcattgacaaagactctggggacgttgcagctctcagaggatcccggaaatttaacattctgggcacaaacacaaaagtgatgaacatggaagaatccaacaacggcagcctctctgcagaattcaaacacttgaccctgagggagcagagatgtgggaatgggggccgagccaattgtgatgcttccctgattgtgactgaggagctgcacctgatcacctttgagaccgaggtgtatcaccaaggtctcaagattgacctagagacccactccttgtcagttgtggtgatctccaacatctgtcagatgccaaatgcctgggcgtccatcctgtggtacaacatgctgaccaacaatcccaagaatgtgaacttcttcactaagccgccaattggaacctgggaccaagtggccgaggtgctcagctggcagttctcgtccaccaccaagcgggggctgagcatcgagcagctgacaacgctggctgagaagctcctagggcctggtgtgaactactcagggtgtcagatcacatgggctaacttctgcaaagaaaacatggctggcaagggcttctcctactgggtctggctagacaatatcatcgaccttgtgaaaaagtatatcttggccctttggaatgaagggtacatcatgggtttcatcagcaaggagcgggagcgggccatcttgagcactaagcccccaggcaccttcctgctgcgcttcagtgaaagcagcaaagaaggaggcgtcactttcacttgggtggagaaggacatcagcggtaagacccagatccagtccgtggaaccatacacaaagcagcagctgaacaacatgtcatttgctgaaatcatcatgggctataagatcatggatgctaccaatatcctgttgtctccacttgtctatctctatcctgacattcccaaggaggaggcattcgggaagtattgtcggccagagagccaggagcatcctgaagctgacccaggtagcgctgccccatacctgaagaccaagtttatctgtgtgacaccaacgacctgcagcaataccattgacctgccgatgtccccccgcgctttagattcattgatgcagtttggaaataatggtgaaggtgctgaaccctcagcaggagggcagtttgagtccctcacctttgacatggagttgacctcggagtgcgctacctcccccatgtgaggagctgagaacggaagctgcagaaagatacgactgaggcgcctacctgcattctgccacccctcacacagccaaaccccagatcatctgaaactactaactttgtggttccagattttttttaatctcctacttctgctatctttgagcaatctgggcacttttaaaaatagagaaatgagtgaatgtgggtgatctgcttttatctaaatgcaaataaggatgtgttctctgagacccatgatcaggggatg

SEQ ID NO: 1012 - DNA, 4279 bp, Homo sapiens
cagacaggatattcactgctgtggcaaggcctgtagagagtttcgaagttaggaggactcaagacggtccctccctggacttttctgaaggggctcaaaagatgacacgcgccagagctggaaggcgtcgccaattggtccaacttttccctcctccctttttgcggatgagaaaaactgaggcccaggtttgggatttccagagcccgggatttcccggcaacgccgacaaccacattcccccggctattctgacccgccccggttccgggacgctccctgggagccgccgccgagggcctgctgggactcccggggaccccgccgtcggggcagcccccacgcccggcgccgcccgccggaacggcgccgctgttgcgcacttgcaggggagccggcgactgagggcgaggcagggagggagcaagcggggctgggagggctgctggcgcgggctcgccggctgtgtatggtctatcgcaggcagctgacctttgaggaggaaatcgctgctctccgctccttcctgtagtaacagccgccgctgccgccgccgccaggaacccggccgggagcgagagccgcggggcgcagagccggcccggctgccggacggtgcggccccaccaggtgaacggccatggcgggctggatccaggcccagcagctgcagggagacgcgctgcgccagatgcaggtgctgtacggccagcacttccccatcgaggtccggcactacttggcccagtggattgagagccagccatgggatgccattgacttggacaatccccaggacagagcccaagccacccagctcctggagggcctggtgcaggagctgcagaagaaggcggagcaccaggtgggggaagatgggtttttactgaagatcaagctgaggcactacgccacgcagctccagaaaacatatgaccgctgccccctggagctggtccgctgcatccggcacattctgtacaatgaacagaggctggtccgagaagccaacaattgcagctctccggctgggatcctggttgacgccatgtcccagaagcaccttcagatcaaccagacatttgaggagctgcgactggtcacgcaggacacagagaatgagctgaagaaactgcagcagactcaggagtacttcatcatccagtaccaggagagcctgaggatccaagctcagtttgcccagctggcccagctgagcccccaggagcgtctgagccgggagacggccctccagcagaagcaggtgtctctggaggcctggttgcagcgtgaggcacagacactgcagcagtaccgcgtggagctggccgagaagcaccagaagaccctgcagctgctgcggaagcagcagaccatcatcctggatgacgagctgatccagtggaagcggcggcagcagctggccgggaacggcgggccccccgagggcagcctggacgtgctacagtcctggtgtgagaagttggccgagatcatctggcagaaccggcagcagatccgcagggctgagcacctctgccagcagctgcccatccccggcccagtggaggagatgctggccgaggtcaacgccaccatcacggacattatctcagccctggtgaccagcacattcatcattgagaagcagcctcctcaggtcctgaagacccagaccaagtttgcagccaccgtacgcctgctggtgggcgggaagctgaacgtgcacatgaatcccccccaggtgaaggccaccatcatcagtgagcagcaggccaagtctctgcttaaaaatgagaacacccgcaacgagtgcagtggtgagatcctgaacaactgctgcgtgatggagtaccaccaagccacgggcaccctcagtgcccacttcaggaacatgtcactgaagaggatcaagcgtgctgaccggcggggtgcagagtccgtgacagaggagaagttcacagtcctgtttgagtctcagttcagtgttggcagcaatgagcttgtgttccaggtgaagactctgtccctacctgtggttgtcatcgtccacggcagccaggaccacaatgccacggctactgtgctgtgggacaatgcctttgctgagccgggcagggtgccatttgccgtgcctgacaaagtgctgtggccgcagctgtgtgaggcgctcaacatgaaattcaaggccgaagtgcagagcaaccggggcctgaccaaggagaacctcgtgttcctggcgcagaaactgttcaacaacagcagcagccacctggaggactacagtggcctgtccgtgtcctggtcccagttcaacagggagaacttgccgggctggaactacaccttctggcagtggtttgacggggtgatggaggtgttgaagaagcaccacaagccccactggaatgatggggccatcctaggttttgtgaataagcaacaggcccacgacctgctcatcaacaagcccgacgggaccttcttgttgcgctttagtgactcagaaatcgggggcatcaccatcgcctggaagtttgattccccggaacgcaacctgtggaacctgaaaccattcaccacgcgggatttctccatcaggtccctggctgaccggctgggggacctgagctatctcatctatgtgtttcctgaccgccccaaggatgaggtcttctccaagtactacactcctgtgctggctaaagctgttgatggatatgtgaaaccacagatcaagcaagtggtccctgagtttgtgaatgcatctgcagatgctgggggcagcagcgccacgtacatggaccaggccccctccccagctgtgtgcccccaggctccctataacatgtacccacagaaccctgaccatgtactcgatcaggatggagaattcgacctggatgagaccatggatgtggccaggcacgtggaggaactcttacgccgaccaatggacagtcttgactcccgcctctcgccccctgccggtcttttcacctctgccagaggctccctctcatgaatgtttgaatcccacgcttctctttggaaacaatatgcaatgtgaagcggtcgtgttgtgagtttagtaaggctgtgtacactgacacctttgcaggcatgcatgtgcttgtgtgtgtgtgtgtgtgtccttgcgcatgagctacgcctgcctcccctgtgccagtcctgggatgtggctgcagcagcggtggccggcctcttttcagatcatggcatccaagagtgcgccgagtctgtctctgtcatggtagagaccgagcctctgtcactgcaggcactcaatgcagccagacctattcctcctgtgcccctcatctgctcagcagctatttgaatgagatgattcagaaggggaggggagacaggtaacgtctgtaagctgaagtttcactccggagtgagaagctttgccctcctaagagagagagacagagagacagagagagagaaagagagagtgtgtgggtctatgtaaatgcatctgtcctcatgtgttgatgtaaccgattcatctctcagaagggaggctggggttcattttcgagtagtattttatactttagtgaacgtggactccagactctctgtgaaccctatgagagcgcgtctgggcccggccatgtccttagcacaggggggccgccggtttgagtgagggtttctgagctgctctgaattagtccttgcttggctgcttggccttgggttcattcaagctcacgatgctgttcccacgtttcccgggatatatattctctcccctccgttgggccccagccttctttgcttgcctctctgtttgtaaccttgtcgacaaagaggtagaaaagattgggtctaggatatggtgggtggacaggggccccgggacttggagggttggtcctcttgcctcctggaaaaaacaaaaacaaaaaactgcagtgaaagacaagctgcaaatcagccatgtgctgcgtgcctgtggaatctggagtgaggggtaaaagctgatctggtttgactccgctggaggtggggcctggagcaggccttgcgctgttgcgtaactggctgtgttctggtgaggccttgctcccaaccccacacgctcctccctctgaggcgtgaggactcgcagtcaggggcagctgaccatggaagattgagagcccaaggtttaaacttcttctctgaagggaggtggggatgagaagaggggtttttttgtactttgtacaaagaccacacatttgtgtaaacagtgttttgg

SEQ ID NO: 1013 - DNA, 4040 bp, Homo sapiens
tcgacctggacctgggcaccgccagccgcctgggcacgggactgggcgggggcgctgacctcggcctaggaggcccaggatcccggagacgcccgcgccctcaggaccctgcgggtcgcacgccctccccagcttctgctgctcgccgctcttcggcagggcgaggtcaggtgcccccttctcgcctctcttctcttctcttcctcctccacttctgtgcccgcggagactccggccgccccttccgcaggggtgtagtaatctgcggagctgacagcagccccgcagccaccctgcccgaagtctccggaagcggcacgagctcaggccgccgcagccccggcgacccactgttggacctgaggagccagccctcctcccgcacccaaacttggagcacttgacctttggctgttggagggggcaggctcgcgggtggctggacagctgcggacgcgcgagggcatcttgcctggagaccgtcggctgcactcccgggctcctggctttgctctgggatcccgaggtgtccacatcagacgcatgttgactgagacctagagtcatggatgtatgcgtccgtcttgccctgtggctcctctgggggctcctcctgcaccagggccagagcctcagccatagtcacagtgagaaggcgacaggaaccagctcgggggccaactctgaggagtccactgcagcagagttttgccgaattgacaagcccctgtgtcacagtgaggatgagaaactcagcttcgaggcagtccgtaacatccacaaactgatggacgatgatgccaatggtgatgtggatgtggaagaaagtgatgagttcctgagggaagacctcaattaccatgacccaacagtgaaacacagcaccttccatggtgaggataagctcatcagcgtggaggacctgtggaaggcatggaagtcatcagaagtatacaattggaccgtggatgaggtggtacagtggctgatcacatatgtggagctgcctcagtatgaggagaccttccggaagctgcagctcagtggccatgccatgccaaggctggctgtcaccaacaccaccatgacagggactgtgctgaagatgacagaccggagtcatcggcagaagctgcagctgaaggctctggatacagtgctctttgggcctcctctcttgactcgccataatcacctcaaggacttcatgctggtggtgtctatcgttattggtgtgggcggctgctggtttgcctatatccagaaccgttactccaaggagcacatgaagaagatgatgaaggacttggaggggttacaccgagctgagcagagtctgcatgaccttcaggaaaggctgcacaaggcccaggaggagcaccgcacagtggaggtggagaaggtccatctggaaaagaagctgcgcgatgagatcaaccttgctaagcaggaagcccagcggctgaaggagctgcgggagggtactgagaatgagcggagccgccaaaaatatgctgaggaggagttggagcaggttcgggaggccttgaggaaagcagagaaggagctagaatctcacagctcatggtatgctccagaggcccttcagaagtggctgcagctgacacatgaggtggaggtgcaatattacaacatcaagaagcaaaatgctgagaagcagctgctggtggccaaggagggggctgagaagataaaaaagaagagaaacacactctttggcaccttccacgtggcccacagctcttccctggatgatgtagatcataaaattctaacagctaagcaagcactgagcgaggtgacagcagcattgcgggagcgcctgcaccgctggcaacagatcgagatcctctgtggcttccagattgtcaacaaccctggcatccactcactggtggctgccctcaacatagaccccagctggatgggcagtacacgccccaaccctgctcacttcatcatgactgacgacgtggatgacatggatgaggagattgtgtctcccttgtccatgcagtcccctagcctgcagagcagtgttcggcagcgcctgacggagccacagcatggcctgggatctcagagggatttgacccattccgattcggagtcctccctccacatgagtgaccgccagcgtgtggcccccaaacctcctcagatgagccgtgctgcagacgaggctctcaatgccatgacttccaatggacgccaccggctgatcgagggggtccacccagggtctctggtggagaaactgcctgacagccctgccctggccaagaaggcattactggcgctgaaccatgggctggacaaggcccacagcctgatggagctgagcccctcagccccacctggtggctctccacatttggattcttcccgttctcacagccccagctccccagacccagacacaccatctccagttggggacagccgagccctgcaagccagccgaaacacacgcattccccacctggctggcaagaaggctgtggctgaggaggataatggctctattggcgaggaaacagactccagcccaggccggaagaagtttcctctcaaaatctttaagaagcctcttaagaagtaggcaggatggggtggcagtaaagggacagcttgtccttccctgggtgttctgtctctccttccctcccttccttcaagataactggccccaagagtggggcatgggaagggctggtccaggggtctgggcactgtacatacctgccccctcatccttgggtccttcattattatttattaactgaccaccatggcctgcctgccctgcctccgtcccaaccatgggctgctgctgtcactccctctccacttcagtgcatgtcttagttgctgttccctcagctcccagctccacctctggggttcagcttctgtctctgctgtcccagttttgaggtttggtttcttgtttctgtctcttgctttcaggctcctccctcccaccactccccaacttcccctagcagttgcagggaagataggacgagtagcttctgacatgtgtgcctcagatctgttccacccactcacagtggttctgtttgctccagactggggctagggctaatctttgaagtttgttctttggtattgatgtgggtcagaaggaggcctcatcctaatctcactcaggcctccagggatccatgggggagtgaaaccaattctcagagaacaacccaccagagacttttaaagagaggccaggcttgggaatgggttgggagaggcatctgttcattggagcatgagtggatgccagaactgtaggttataaggcagtcactttttctctctactcccacccacacctgcctccctcttacccctgctccccacactgcaggaggatttgtctctaagaggtgctgccccaaagctccccaagcatcaatactcctagggctcaggacaagtggctcccctggccaggagagccacagccatgatacaggcctcttatggagccctggagttgttgggcaaggatgctgtcattttttgaaccaaaagacaaacaggttaaaaggaaaaaaagtaatctgaatttcccaagtgcctacgctgcatattccccttgttagatcccattttcatgttactttgtagccttggcccagaggctcaaaaaggacacaaccagtttggggaaggggtggctaaggaagatggtataggtgaaggcggctgtgtgaccactttcccccacccttcccaccctctagacaactctctcccttacctgtttttgctatggctgtaaaggtatttttcctctgccccactccctgccatacctttatcctgggatcctattttgggcctggggtgggtatacctggggctggtcttaggagggtgctaggctgcagactgccttgtactccctggacaccctcaaatgggggtttctgtgttatttcataaaattctttgaagtccaataaagcatgtaggagattttaaccacaaaaaaa

SEQ ID NO: 1014 - DNA, 1507 bp, Homo sapiens
ctcgaggccacgaaggccccgacaccatgtcctgccgggatcggacccaggagtttctgtctgcctgcaagtcgctgcagacccgtcagaatggaatccagacaaataagccagctttgcgtgctgtccgacaacgcagtgaattcaccctcatggccaagcgcattgggaaagaccttagcaacacatttgccaagctggagaagctgacaatcttggcaaagcgcaagtccctctttgatgataaagcagtggaaattgaagagctaacatatatcatcaaacaggacatcaatagcctcaacaaacaaattgctcagctccaggatttcgtgagagccaagggcagccagagtggccggcacctgcagacccactccaacaccattgtggtctccttgcagtcgaaactggcttctatgtccaatgacttcaaatcggttttagaagtgaggacagagaacctgaagcagcagaggagccggagagagcagttctcccgggcacctgtgtcagccctgccccttgcccctaaccacctgggcggtggtgctgtggttctgggggcagagtcccatgcctccaaggatgtcgccatcgacatgatggactctcggaccagccagcagctgcagctcattgacgagcaggattcctacatccagagtcgggcagacaccatgcagaacattgagtcgacaattgttgagttgggctccatctttcagcagttggcacacatggttaaggaacaggaggaaaccattcagaggatcgacgagaacgtgctaggagcccagctggacgttgaggccgcccattcagagatcctcaagtacttccagtctgtcacctccaaccggtggctcatggtcaaaatcttcctcatcctcattgtcttcttcatcatctttgtggtcttccttgcttgaaccctctctactctgaggcactctgttggggtttgggaccctcctgggaaggcaagtggccagtgctgccactgagcctgtgcagggtacttgggagaaaggccctgtttccctggaactgctaagaatgaccactgcccctgatcccccaccccttgcctctggccaccctgtcctccccccaccaccctcaggcctatgaaacacacagggttctagatttgaactctgctgtgaagtgactggaagggagcagaggccagctgggggccagtgggggaggttgtttccactaggagatttttataaaccctctccagcctctcccggaaaggaagcgttggcagcaaagggagatgatgcccttacccaccttcctgtgagtgaagagaggaagcagccccagggaccaattttcccaattgacctctttcttcctctttcaccatgtgaggcagggagccctgagcccttcagctgcctgcacaacccctgacattggctgctggtgactcaatctgccaaatgtgctgcagctcgttttctcccaattacagcaagactgtcagcctcca

SEQ ID NO: 1015 - DNA, 6719 bp, Homo sapiens
tcggcgggaagcggcgatcctgccaccgggaggtgtggaagagccgggtagattctggctacattggagattggttgctttctaaaactgaaggagaagcccatgaagagatggtggattctcactgagttttgactagcggaagaaaagagagagttcaagtggatggccttgaggacttgaaaagctgagatatgatgattttgaagtcatttcacatcgaagccatgatttaaatatcggcgttaagatttcaacaagaaaaacttaagcttccttggattcccacgtcaaaggaaagtttcaagctttcagaaggagttctcactcgaagataaagaacagctcgctaaccacgaaagaggaatcgatgctcagcttttagttgcacttcctaaagttgcagaattaagacaaatctttgaaccaaagaagaaagaattcttagaaatgaaaagaaaagaaagaattgccaggcgcctggaagggattgaaaatgacactcagcccatcctcttgcagagctgcacaggattggtgactcaccgcctgctggaggaagacacccctcgatacatgagagccagcgaccctgccagcccccacatcggccgatcaaatgaagaggaggaaacttctgattcttctctagaaaagcaaactcgatccaaatactgcacagaaacctccggtgtccacggtgactcaccctatggttcgggtaccatggacacccacagtctggagtccaaagccgaaagaattgcaaggtacaaagcagaaagaaggcgacagctggcagagaagtatgggctgactctggatcccgaggccgactccgagtatttatcccgctataccaagtccaggaaggagcctgatgctgtcgagaagcggggaggaaaaagtgacaaacaggaagagtcaagcagagatgcgagttctctgtaccccgggaccgagacgatggggctcaggacctgtgccggtgaatccaaggactatgccctccatgtgggtgacggctcttccgacccggaggtgctgctgaacatagaaaaccaaagacgaggtcaagagctgagtgccacccggcaggcccatgacctgtccccagcagccgagagttcctcgaccttctctttctctgggcgagactcctccttcactgaagtgccacggtcccccaagcacgcccacagctcctccctgcagcaggcagcctcccggagcccctcctttggtgacccacagctatcccctgaggcccgacccaggtgcacttcacattcagaaacgccaactgtcgatgatgaagaaaaggtggatgaacgagccaagctgagcgtcgccgccaagaggttgcttttcagggagatggaaaaatcttttgatgaacaaaatgttccaaagcgacgctcaagaaacacagctgtggagcagaggctacgccgtctgcaggacaggtccctcacccagcccatcaccactgaagaggtggtcatcgcagccacattgcaggcctctgctcaccaaaaggccttagccaaggaccagacaaatgagggcaaagagcttgctgagcaaggagaacctgattcctccactctaagcttggccgaaaagttggccttgtttaacaaattgtcccagccagtctcaaaagcgatttctacccggaacagaatagacacgagacagaggagaatgaacgctcgctatcaaactcagccagtcacactgggagaggtggagcaggtgcagagtggaaagctcattcctttctcacctgccgtgaacacatcagtgtctaccgtagcatccacggttgctccaatgtatgccggagatcttcgcacaaagccacctcttgaccacaatgcaagtgccactgactataagttttcttcttcaatagaaaattcggactctccagttagaagcattctgaaatcgcaagcttggcagcctttggtagagggtagcgagaacaagggaatgttgagagaatatggagagacagaaagcaagagagctttgacaggtcgagacagtgggatggagaagtatgggtcctttgaggaagcagaagcatcctaccccatcctgaaccgagccagggaaggagacagccataaggaatctaaatatgctgttcccagaagaggaagcctggaacgggcgaaccctcccatcacccacctcggggatgaaccgaaggaattttccatggctaaaatgaatgcacaaggaaacttggacttgagggacaggctgccctttgaagagaaggtggaggtggagaatgttatgaaaaggaagttttcactaagagcggcagagttcggggagcccacttccgagcagacggggacagctgctgggaaaactattgctcaaaccacagcccccgtgtcctggaagccccaggattcttcggaacagccacaggagaagctctgcaagaatccatgtgcgatgtttgctgctggagagatcaaaacgccgacaggggagggccttcttgactcacccagcaaaaccatgtctattaaagaaagattggcactgttgaagaaaagcggggaggaagattggagaaacagactcagcaggaggcaggagggcggcaaggcgccggccagcagcctgcacacccaggaagcagggcggtccctcatcaagaagcgggtcacagaaagtcgagagagccaaatgacgattgaggagaggaagcagctcatcactgtgagagaggaggcctggaagacgagaggcagaggagcggccaacgactcgacccagttcactgtggctggcaggatggtgaagaaaggtttggcgtcacctactgccataaccccagtagcctcagccatttgcggtaaaacaagaggcaccacacccgtttccaaacccctggaagatatcgaagccagaccagatatgcagttagaatcggacctgaagttggacaggctggaaacctttctaagaaggctgaataacaaagttggcgggatgcacgaaacggtgctcactgtcaccggcaaatctgtgaaggaggtgatgaagccagatgatgatgaaacctttgccaaattttaccgcagcgtggattataatatgccaagaagtcctgtggagatggatgaggacttcgatgtcattttcgatccttatgcacccaaattgacgtcttccgtggccgagcacaagcgggcagttaggcccaagcgccgggttcaggcctccaaaaaccccctgaaaatgctggcggcaagagaagatctccttcaggaatacactgagcagagattaaacgttgccttcatggagtcaaagcggatgaaagtagaaaagatgtcttccaactccaacttctcagaagtcaccctggcgggtttagccagtaaagaaaacttcagcaacgtcagcctgcggagcgtcaacctgacggaacagaactctaacaacagcgccgtgccctacaagaggctgatgctgttgcagattaaaggaagaagacatgtgcagaccaggctggtggaacctcgagcttcggcgctcaacagtggggactgcttcctcctgctctctccccactgctgcttcctgtgggtaggagagtttgcaaacgtcatagaaaaggcgaaggcctcagaacttgcaactttaattcagacaaagagggaacttggttgtagagctacttatatccaaaccattgaagaaggaattaatacacacactcatgcagccaaagacttctggaagcttctgggtggccaaaccagttaccaatctgctggagacccaaaagaagatgaactctatgaagcagccataatagaaactaactgcatttaccgtctcatggatgacaaacttgttcctgatgacgactactgggggaaaattccgaagtgctcccttctgcaacccaaagaggtactggtgtttgattttggtagtgaagtttacgtatggcatgggaaagaagtcacattagcacaacgaaaaatagcatttcagctggcaaagcacttatggaatggaacctttgactatgagaactgtgacatcaatcccctggatcctggagaatgcaatccgcttatccccagaaaaggacaggggcggcccgactgggcgatatttgggagacttactgaacacaatgagacgattttgttcaaagagaagtttctggattggacggaactgaagagatcgaatgagaagaaccccggggaacttgcccagcacaaggaagaccccaggactgatgtcaaggcatacgatgtgacacggatggtgtccatgccccagacgacagcaggcaccatcctggacggagtgaacgtcggccgtggctatggcctggtggaaggacacgacaggaggcagtttgagatcaccagcgtttccgtggatgtctggcacatcctggaattcgactatagcaggctccccaaacaaagcatcgggcagttccatgagggggatgcctatgtggtcaagtggaagttcatggtgagcacggcagtgggaagtcgccagaagggagagcactcggtgagggcagccggcaaagagaagtgcgtctacttcttctggcaaggccggcactccaccgtgagtgagaagggcacgtcggcgctgatgacggtggagctggacgaggaaaggggggcccaggtccaggttctccagggaaaggagcccccctgtttcctgcagtgtttccagggggggatggtggtgcactcggggaggcgggaagaggaagaagaaaatgtgcaaagtgagtggcggctgtactgcgtgcgtggagaggtgcccgtggaagggaatttgctggaagtggcctgtcactgtagcagcctgaggtccagaacttccatggtggtgcttaacgtcaacaaggccctcatctacctgtggcacggatgcaaagcccaggcccacacgaaggaggtcggaaggaccgctgcgaacaagatcaaggaacaatgtcccctggaagcaggactgcatagtagcagcaaagtcacaatacacgagtgtgatgaaggctccgagccactcggattctgggatgccttaggaaggagagacaggaaagcctacgattgcatgcttcaagatcctggaagttttaacttcgcgccccgcctgttcatcctcagcagctcctctggggattttgcagccacagagtttgtgtaccctgcccgagccccctctgtggtcagttccatgcccttcctgcaggaagatctgtacagcgcgccccagccagcacttttccttgttgacaatcaccacgaggtgtacctctggcaaggctggtggcccatcgagaacaagatcactggttccgcccgcatccgctgggcctccgaccggaagagtgcgatggagactgtgctccagtactgcaaaggaaaaaatctcaagaaaccagcccccaagtcttaccttatccacgctggtctggagcccctgacattcaccaatatgtttcccagctgggagcacagagaggacatcgctgagatcacagagatggacacggaagtttccaatcagatcaccctcgtggaagacgtcttagccaagctctgtaaaaccatttacccgctggccgacctcctggccaggccactcccggagggggtcgatcctctgaagcttgagatctatctcaccgacgaagacttcgagtttgcactagacatgacgagggatgaatacaacgccctgcccgcctggaagcaggtgaacctgaagaaagcaaaaggcctgttctgagtggggagacgccagaggagcctcacggtcacgtccaacaacaccactgcaccagggaaatggatatatatttttggactggtgtttttcacaaagtatttttcaatcagagttttcagaacctgacattgttaaagatactgcttgtcccggagttgtgtattttgtaaatgttcaagggaactgtttggaaacttctttccaccattcaggaggttatcagaattaataaaagtatctgttatgtgcacttaagccgcagctgctatagatagcactgccttcttgttccagctaggcaatgcctttttttttttttttgaagcagttctctttataaagtgttattttgatagtttgtggattctaaaatatatatatatttatataaacaccatataagtcaaatatgtatttaacaaagcaatatgtattcattcactttcaagatttgttttggtgtcaaaataacatgaaaaggtagatggagttgcttctgttgaattagctctgccaccaatatgtatcttcatacacgtttggaaatgtttcctgcagcattaggtatgacttgttctgagtactgcttccggtgctaaaatgaacaaagaatttgtacttaatggcatggactctggagaatctatgcgaatcaacctttctaccttaatatctccccaaaaatgtatagtgccttgtttttatgtacagtttatatacagaaaagtttgctctgcatttttgatgatggtttggaacattatctacaattttactctcaaatagtcaaaataaaaacatctcaatttctaataccggttgtaaacaaacagtacacatgtcattttgtgatataggactcccaaataaaagtatcagaataaacacaacaattaactggt

SEQ ID NO: 1016 - DNA, 1102 bp, Homo sapiens
gcgccgcaaggcactgagcaggcgaaagagcgcgctcggacctccttcccggcggcagctaccgagagtgcggagcgaccagcgtgcgctcggaggaaccagagaaactcagcaccccgcgggactgtccgtcgcaaaatccaacatgaaaatcctcgtggccttggcagtcttttttcttgtctccactcagctgtttgcagaagaaataggagccaatgatgatctgaattactggtccgactggtacgacagcgaccagatcaaggaggaactgccggagccctttgagcatcttctgcagagaatcgcccggagacccaagcctcagcagttctttggattaatgggcaaacgggatgctgattcctcaattgaaaaacaagtggccctgttaaaggctctttatggacatggccagatctctcacaaaagacataaaacagattcctttgttggactaatgggcaaaagagctttaaattctgtggcttatgaaaggagtgcaatgcagaattatgaaagaagacgttaataaactacctaacattatttattcagcttcatttgtgtcaatgggcaatgacaggtaaattaagacatgcactatgaggaataattatttatttaataacaattgtttggggttgaaaattcaaaaagtgtttatttttcatattgtgccaatatgtattgtaaacatgtgttttaattccaatatgatgactcccttaaaatagaaataagtggttatttctcaacaaagcacagtgttaaatgaaattgtaaaacctgtcaatgatacagtccctaaagaaaaaaaatcattgctttgaagcagttgtgtcagctactgcggaaaaggaaggaaactcctgacagtcttgtgcttttcctatttgttttcatggtgaaaatgtactgagattttggtattacactgtatttgtatctctgaagcatgtttcatgttttgtgactatatagagatgtttttaaaagtttcaatgtgattctaatgtcttcatttcattgtatgatgtgttgtgatagctaacattttaaataaaagaaaaaatatcttgaaaaaaaaaaaaaaaaa

SEQ ID NO: 1017 - DNA, 3523 bp, Homo sapiens
tcgagcctggcggtagaatcttcccagtaggcggcgcgggagggaaaagaggattgaggggctaggccgggcggatcccgtcctcccccgatgtgagcagttttccgaaaccccgtcaggcgaaggctgcccagagaggtggagtcggtagcggggccgggaacatgaggcagtctctcctattcctgaccagcgtggttcctttcgtgctggcgccgcgacctccggatgacccgggcttcggcccccaccagagactcgagaagcttgattctttgctctcagactacgatattctctctttatctaatatccagcagcattcggtaagaaaaagagatctacagacttcaacacatgtagaaacactactaactttttcagctttgaaaaggcattttaaattatacctgacatcaagtactgaacgtttttcacaaaatttcaaggtcgtggtggtggatggtaaaaacgaaagcgagtacactgcaaaatggcaggacttcttcactggacacgtggttggtgagcctgactctagggttctagcccacataagagatgatgatgttataatcagaatcaacacagatggggccgaatataacatagagccactttggagatttgttaatgataccaaagacaaaagaatgttagtttataaatctgaagatatcaagaatgtttcacgtttgcagtctccaaaagtgtgtggttatttaaaagtggataatgaagagttgctcccaaaagggttagtagacagagaaccacctgaagagcttgttcatcgagtgaaaagaagagctgacccagatcccatgaagaacacgtgtaaattattggtggtagcagatcatcgcttctacagatacatgggcagaggggaagagagtacaactacaaattacttaatagagctaattgacagagttgatgacatctatcggaacacttcatgggataatgcaggttttaaaggctatggaatacagatagagcagattcgcattctcaagtctccacaagaggtaaaacctggtgaaaagcactacaacatggcaaaaagttacccaaatgaagaaaaggatgcttgggatgtgaagatgttgctagagcaatttagctttgatatagctgaggaagcatctaaagtttgcttggcacaccttttcacataccaagattttgatatgggaactcttggattagcttatgttggctctcccagagcaaacagccatggaggtgtttgtccaaaggcttattatagcccagttgggaagaaaaatatctatttgaatagtggtttgacgagcacaaagaattatggtaaaaccatccttacaaaggaagctgacctggttacaactcatgaattgggacataattttggagcagaacatgatccggatggtctagcagaatgtgccccgaatgaggaccagggagggaaatatgtcatgtatcccatagctgtgagtggcgatcacgagaacaataagatgttttcaaactgcagtaaacaatcaatctataagaccattgaaagtaaggcccaggagtgttttcaagaacgcagcaataaagtttgtgggaactcgagggtggatgaaggagaagagtgtgatcctggcatcatgtatctgaacaacgacacctgctgcaacagcgactgcacgttgaaggaaggtgtccagtgcagtgacaggaacagtccttgctgtaaaaactgtcagtttgagactgcccagaagaagtgccaggaggcgattaatgctacttgcaaaggcgtgtcctactgcacaggtaatagcagtgagtgcccgcctccaggaaatgctgaaaatgacactgtttgcttggatcttggcaagtgtaaggatgggaaatgcatccctttctgcgagagggaacagcagctggagtcctgtgcatgtaatgaaactgacaactcctgcaaggtgtgctgcagggacctttctggccgctgtgtgccctatgtcgatgctgaacaaaagaacttatttttgaggaaaggaaagccctgtacagtaggattttgtgacatgaatggcaaatgtgagaaacgagtacaggatgtaattgaacgattttgggatttcattgaccagctgagcatcaatacttttggaaagtttttagcagacaacatcgttgggtctgtcctggttttctccttgatattttggattcctttcagcattcttgtccattgtgtggataagaaattggataaacagtatgaatctctgtctctgtttcaccccagtaacgtcgaaatgctgagcagcatggattctgcatcggttcgcattatcaaaccctttcctgcgccccagactccaggccgcctgcagcctgcccctgtgatcccttcggcgccagcagctccaaaactggaccaccagagaatggacaccatccaggaagaccccagcacagactcccatatggacgaggatgggtttgagaaggaccccttcccaaatagcagcacagctgccaagtcatttgaggatctcacggaccatccggtcgccagaagtgaaaaggctgcctcctttaaactgcagcgtcagaatcgtgttaacagcaaagaaacagagtgctaatttagttctcagctcttctgacttaagtgtgcaaaatatttttatagatttgacctacaaatcaatcacagcttgtattttgtgaagactgggaagtgacttagcagatgctggtcatgtgtttgaacttcctgcaggtaaacagttcttgtgtggtttggcccttctccttttgaaaaggtaaggtgaaagtgaatctacttattttgaggctttcaggttttagtttttaaaatatcttttgacctgtggtgcaaaagcagaaaatacagctggattgggttatgaatatttacgtttttgtaaattaatcttttatattgataacagcactgactagggaaatgatcagtttttttttatacactgtaatgaaccgctgaatatgaagcatttggcatttatttgtgagaaaagtggaatagttttttttttttttttttttttttgccttcaactaaaaacaaaggagataaatttagtatacattgtatctaaattgtgggtctatttctagttattacccagagtttttatgtagcagggaaaatatatatctaaatttagaaatcatttgggttaatatggctcttcataattctaagactaatgctcagaacctaaccactaccttacagtgagggctatacatggtagccagttgaatttatggaatctaccaactgtttagggccctgatttgctgggcagtttttctgtattttataagtatcttcatgtatccctgttactgatagggatacatgtcttagaaaattcactattggctgggagtggtggctcatgcctgtaatcccagcacttggagaggctgaggttgcgccactacactccagcctgggtgacagagtgagatctgcctc

SEQ ID NO: 1018 - DNA, 3500 bp, Homo sapiens
ggaagaggaggcttcatggctgaggaggtcgcagcgccatgaagtccctgtctctgctcctcgctgtggctttgggcctggcgaccgccgtctcagcaggacccgcggtgatcgagtgttggttcgtggaggatgcgagcggaaagggcctggccaagagacccggtgcactgctgttgcgccagggaccgggggaaccgccgccccggccggacctcgaccctgagctctatctcagtgtacacgaccccgcgggcgccctccaggctgccttcaggcggtatccccggggcgcccccgcaccacactgcgagatgagccgcttcgtgcctctccccgcctctgcgaaatgggccagcggcctgacccccgcgcagaactgcccgcgggccctggatggggcttggctgatggtcagcatatccagcccagtcctcagcctctccagcctcttgcgaccacagccagagcctcagcaggagcctgttctcatcaccatggcaacagtggtactgactgtcctcacccacacccctgcccctcgagtgagactgggacaagatgctctgctggacttgagctttgcctacatgccccccacctccgaggccgcctcatctctggctccgggtccccctccctttgggctagagtggcgacgccagcacctgggtaagggacatctgctcctggctgcaactcctgggctgaatggccagatgccagcagcccaagaaggggccgtggcatttgctgcttgggatgatgatgagccatggggcccatggaccggaaatgggaccttctggctgcctagagttcaaccctttcaggagggcacctatctggccaccatacacctgccatacctgcaaggacaggtcaccctggagcttgctgtgtacaaaccccccaaagtgtccctgatgccagcaacccttgcacgggccgccccaggggaggcacccccggaattgctctgccttgtgtcccacttctacccttctgggggcctggaggtggagtgggaactccggggtggcccagggggccgctctcagaaggccgaggggcagaggtggctctcggccctgcgccaccattccgatggctctgtcagcctctctgggcacttgcagccgcccccagtcaccactgagcagcatggggcacgctatgcctgtcgaattcaccatcccagcctgcctgcctcggggcgcagcgctgaggtcaccctggaggtagcaggtctttcagggccctcccttgaggacagcgtaggccttttcctgtctgcctttcttctgcttgggctcttcaaggcactgggctgggctgctgtctacctgtccacctgcaaggattcaaagaagaaagcagagtgagggcactcactgccatcctgtggaagccaccatcatctctggcccaagcttctgtagtagctccctaaaataataccctatcatctgctcctaatccctccaatctctctccactgagtgctggaatgccttttttttttttctttcacttatataagggataattttttcctttttttttttttttgagacggagctcacctcttccgcccaggctgcagtgcagtggcatgatcttggcttactgcaacctccgcctcctgggttcaagcaattctgtggcttcagcctccggagtagctgggattacaggcacatgccaccacacccagtgaatttttgtatttttagtagagacggggtttcaccatgttggccaggctggtcttgaattcctgacctcaggtgatctgcccacctcagcctcccaaagtgctgggattacaggcgtgacgaccacaccaggcccgagaaatgcttttttaaaaaacacacatcttatggcattcaccttcttggagctctaggaacgtggttctcaatttttctctcaggactcttaaaaatcatcaaggtaccccaaaaagcttttgggtatgtgggttatagctatcaatatttatggtactagaacttaaaagtgagaaaaatttaaaacacgagaatacataggcacacattctattcatcgtgggaaccatggtgtcaatacatatcatgtagcttctgaaaaactccactgtacacttatagaatgaagaaggcaaaaaactttttttttttttttttgagactgagtctcgctctgtcgcccaggctggagtgcagtggcgcgatctcggctcactgcaagctccgcctctcgggttcacgccattctcctgcctcagcctcccaagtagctcggactacagggcgtcctccaccatgcctggctaatattttgtattttttagtagagacggggtttcaccgtgttagccaggatggtctcgatctcctaacctggtgatccgcccgcctcggcctcccaaaagtattgggattacccgcgtgagccaccgcgcccggctgcaaataatctttctttttttctttttttctgagacagagtctcgctctgttgcccaggctggagtgcagtggcacgatctcggctcacggcaccgtccgcctcccgggttcacgccattctcctgcctcagcttcccgagtagctgggactacaggggcccgccaccacgcccggctaactttttgtgtttttagtagagacggggtttcaccgtgttagccaggatggtctcgatctcctgaccttgtgatctgcccgcctcggcctcccaaagtgctgggattacaggcgtgacgaccgcgcccggcgcgaaacacgatattgtactaacatcttaattttgttataaaatctcacaaaccccctgacatagtctcagagatctgtagggccgaggttacatttggagaacccgtactctagggccaaatccattcttcttgccctggctcacttgtcccccccaccgccccgcgctggagccactgcctagttcttcagccctagatggtgctcgccagacctcctctcaatgctcatcacacacagggctattcctttcctccaatgaaccaaaccgcctcccgcccacctccaggtcccagtcctctgttccctttgcctggtccacccttgccctccctgggtcgcagacgaggtcggcctcgtcattccccgcagaccgccgcgcgtccctcttgtgcggttcaccacagttgtatttaagtgatcgtgtgagtcgtcgttaaatgcctgtctccccgcggatcatgggctcctcgaggacagggactggcctgtctgtccactgctgtaaccccgcgccggcatagggacctaaggcccactggagggcgctcatcaagtagctgctggatgttgacgaaggaagcggcggcgcagctcagggatctccgagtcaggacggtcggccagacccacggggtaacgggtctaatcgtgtaggaataaagctgtattccagtgcttccaaaaaaaaaaaaaaaaaaaaaaaaaaaaaaaaaaaaaaaaaaaaaaaa

SEQ ID NO: 1019 - DNA, 1448 bp, Homo sapiens
tcgacgctgtagtggcttcgtcttcggtttttctcttccttcgctaacgcctcccggctctcgtcagcctcccgccggccgtctccttaacaccgaacaccatgccttcaattaagttgcagagttctgatggagagatatttgaagttgatgtggaaattgccaaacaatctgtgactattaagaccatgttggaagatttgggaatggatgatgaaggagatgatgacccagttcctctaccaaatgtgaatgcagcaatattaaaaaaggtcattcagtggtgcacccaccacaaggatgaccctcctcctcctgaagatgatgagaacaaagaaaagcgaacagatgatatccctgtttgggaccaagaattcctgaaagttgaccaaggaacactttttgaactcattctggctgcaaactacttagacatcaaaggtttgcttgatgttacatgcaagactgttgccaatatgatcaaggggaaaactcctgaggagattcgcaagaccttcaatatcaaaaatgactttactgaagaggaggaagcccaggtacgcaaagagaaccagtggtgtgaagagaagtgaaatgttgtgcctgacactgtaacactgtaaggattgttccaaatactagttgcactgctctgtttataattgttaatattagacaaacagtagacaaatgcagcagcaagtcaattgtattagcagaatattgtcctcattgcatgtgtagttgtagctcgagtcccaaaccttacggccaagtttcttctagtatgatggaaagtttcttttttctttgctctgaataaaactgaactgtgggttctctataagtggcattttgggctttcctcccttttttgtaaagcaatgtctgcctagtttattgtccaagttaactttaggtgaccttttaaaagttggcattgaaaataaaacaacttgcaaaaaagttttctggaatagaattaacaaaatattatctttatcatgagttggaaactggaaaaaggcttcttgaagtaaatgttctgagtggagctactaggatgtcttccagcctcctgcagtcaaggagtaccactgtattgattagcctgtatgtagcagggctcccttcattgcatctgaggacttgttttctttttctttatttttaatcctcttagttttaaatatattgcctagagactcagttactacccagtttgtggttttttgggagaaatgtaactggacagttagcttttcaattaaaaagacacttaacccatgtgggatgtcatctttttataattagtgttcccatgtggagaaaattattcacactacttgcatgtaaagaataatttaacttttaacattaaaatatgtggtaaaacccagaaagcatccatcatgaatgcaagatactttcaataaagtaagttatat

SEQ ID NO: 1020 - DNA, 4760 bp, Homo sapiens
ggccggcggtggcggcggcgagggctggactcgggcttagggcctgctgtggaggcagcggcggacgccgagctaagcagtttctctggaaacccccctggtaagtgtggaggaggcgggacactctgacccaagacgaaaggcctgtagctccagccaaagaaaataaaccttaggagggagaaggaaaaaaaaaaatccatcagctgttcctgagaacagcctgcattggaatctacagagaggacaactaatgtgagtgaggaagtgactgtatgtggactgtggagaaagtaagtcacgtgggcccttgaggacctggactgggttaggaacagttgtactttcagaggtgaggtgtcgagaagggaaagtgaatgtggtctggagtgtgtccttggccttggctccacagggtgtgctttcctctggggccgtcagggagctcatcccttgtgttctgccagggtggggtacggggtttgacactgaggagggtaacctgctggctggagcggcagagcagtggccttgatttgtcttttggaagattttaaaaaccaaaaagcataaacattctggtccttcagcaatgctttctctgaagaaatacttaacggaaggacttctccagttcaccattctgctgagtttgattggggtacgggtggacgtggatacttacctgacctcacagcttcccccactccgggagatcatcctggggcccagttctgcctatactcagacccagttccacaacctgaggaataccttggatggctatggtatccaccccaagagcatagacctggacaattacttcactgcccggcggctcctcagtcaggtgagggccctggacaggttccaggtgccaaccactgaggtaaatgcctggctggttcaccgagacccagaggggtctgtctctggcagtcagcccaactcaggcctcgccctcgagagttccagtggcctccaagatgtgacaggcccagacaacggggtgcgagaaagcgaaacggagcagggattcggtgaagatttggaggatttgggggctgtagcccccccagtcagtggagacttaaccaaagaggacatagatctgattgacatcctttggcgacaggatattgatctgggggctgggcgtgaggtttttgactatagtcaccgccagaaggagcaggatgtggagaaggagctgcgagatggaggcgagcaggacacctgggcaggcgagggcgcggaagctctggcacggaacctgctagtggatggagagactggggagagcttccctgcacaggtgcctagtggggaggaccagacggccctgtccctggaagagtgccttaggctgctggaagccacctgcccctttggggagaatgctgagtttccagcagacatttccagcataacagaagcagtgcctagtgagagtgagccccctgctcttcaaaacaacctcttgtctcctcttctgaccgggacagagtcaccatttgatttggaacagcagtggcaagatctcatgtccatcatggaaatgcaggccatggaagtgaacacatcagcaagtgaaatcctgtacagtgcccctcctggagacccactgagcaccaactacagccttgcccccaacactcccatcaatcagaatgtcagcctgcatcaggcgtccctggggggctgcagccaggacttcttactcttcagccccgaggtggaaagcctgcctgtggccagtagctccacgctgctcccgttggcccccagcaattctaccagcctcaactccaccttcggctccaccaacctgacagggctcttctttccaccccagctcaatggcacagccaatgacacagcaggcccagagctgcctgaccctttggggggtctgttagatgaagctatgttggatgagatcagccttatggacctggccattgaagaaggctttaaccctgtgcaggcctcccagctggaggaggaatttgactctgactcaggcctttccttagactcgagccatagcccttcttccctaagcagctctgaaggcagttcttcctcttcttcctcctcctcttcctcttcttcctctgcttcttcctctgcctcttcctccttttctgaggaaggtgcggttggctacagctctgactctgagaccctggatctggaagaggccgagggtgctgtgggctaccagcctgagtattccaagttctgccgcatgagctaccaggatccagctcagctctcatgcctgccctacctggagcacgtgggccacaaccacacatacaacatggcacccagtgccctggactcagccgacctgccaccacccagtgccctcaagaaaggcagcaaggagaagcaggctgacttcctggacaagcagatgagccgggatgagcaccgagcccgagccatgaagatccctttcaccaatgacaaaatcatcaacctgcctgtggaggagttcaatgaactgctgtccaaataccagttgagtgaagcccagctgagcctcatccgagacatccggcgccggggcaagaacaagatggcggcgcagaactgccgcaagcgcaagctggacaccatcctgaatctggagcgtgatgtggaggacctgcagcgtgacaaagcccggctgctgcgggagaaagtggagttcctgcgctccctgcgacagatgaagcagaaggtccagagcctgtaccaggaggtgtttgggcggctgcgagatgagaacggacgaccctactcgcccagtcagtatgcgctccagtacgccggggacggcagtgtcctcctcatcccccgcacgatggccgaccagcaggcccggcggcaggagaggaagccaaaggaccggagaaagtgagcctggggaagaagggggtttgaagcccaccaagaccgaaactggagaagggctggacctggacctggacctggacctacagcggggacttaaatgccttcttatccaatatatcttctcagatgggatgactgcgggtcagtgtacaggaagaggcaggcactggctggctcagctccactcgggtggagtggaagtggccagaccatttagacggacagggtcctcaccctacccctttcctgtgaggcaggggtggtggtggagttgctggaggtagaggagctatgtggagcaaaggccgacagaggggaaggaatggacctgtgagaggaagggaaggtggcagaaagtctcatttcaggaaggagggatagaaggaaggaaggaaggaacccccccccccccccgaaaaaaaaatcaaagcgggaagaaaatcagagggaaggttaaggttggctctggccaggattccaggcagcaggttggagtgactggtgggcctagatcactggtgtgataaaccccatttcaccccggggggggtggggtacacagacacagggtgggggtggggaggggcggtgttaactctttctgctccttgcattttgacatccctgaaggggagctcttggatatcattggccatgtttcaatcgaatggagccactgggccccaacactggctttgagatttagagtcaaagggtagagtgaacaggaaagggtcacgtggtcccatgttgcaacagccccaacatcacgcatgtcattcactgccttgccactccatctccctccgtgctccagccacccctgagctgaggctcccattgtctccatcagagcctgcatgtgtatgccgtcctcccctggtccggtgtttgtgttccccacccctcacagactgcctgagctcttctgtaagctggggtagggtgatggcagtgctccgggaactgggcctgcagccttcctcttctgggactgctgtgaggcagaggaatgatggagaatctagtgtagcagcctccaggcaggattcagcacaacactggggagtcacccttccctcgggcctctgcctaccaacaactgggcttatcactgggaaaacacaaaaaattacacaacccagcaacaacaaaagaactagtcctcttagaatttcttgcgctttgatttttttagggcttgtgccctgtttcacttatagggtctagaatgcttgtgttgagtaaaaaggagattcccaatattcaaagctgctaaatgttctctttgccataaagactccgtgtaactgtgtgaacacttgggatttttctcctctgtcccgaggtcgtcgtctgctttcttttttgggtttctttctagaagattgagaagtgcatatgacaggctgagagcacctccccaaacacacaagctctcagccacaggcagcttctccacagccccagcttcgcacaggctcctggagggctgcctgggggaggcagacatgggagtgccaaggtggccagatggttccaggactacaatgtctttatttttaactgtttgccactgctgccctcacccctgcccggctctggagtaccgtctgccccagacaagtgggagtgaaatgggggtggggggaagcactgattcccagttagggggtgcctaactgagcagtagggatagaaggtgtgaacctgggagtgcttttataaattattttccttgtagattttatttttaatttatctctgtgacctgccagggagaggggagagagagagagatgctgttgagcacatgacaaaataaaataaaatggatgattcaaaaaaaaaaa

SEQ ID NO: 1021 - DNA, 2600 bp, Homo sapiens
ggttaggaagagtggagactgctgcacggactctggaaccatgaacatatttgatcgaaagatcaactttgatgcgcttttaaaattttctcatataaccccgtcaacgcagcagcacctgaagaaggtctatgcaagttttgccctttgtatgtttgtggcggctgcaggggcctatgtccatatggtcactcatttcattcaggctggcctgctgtctgccttgggctccctgatattgatgatttggctgatggcaacacctcatagccatgaaactgaacagaaaagactgggacttcttgctggatttgcattccttacaggagttggcctgggccctgccctggagttttgtattgctgtcaaccccagcatccttcccactgctttcatgggcacagcaatgatctttacctgcttcaccctcagtgcactctatgccaggcgccgtagctacctctttctgggaggtatcttgatgtcagccctgagcttgttgcttttgtcttccctggggaatgttttctttggatccatttggcctttccaggcaaacctgtatgtgggactggtggtcatgtgtggcttcgtccttgttgatactcaactcattattgaaaaggccgaacatggagatcaagattatatctggcactgcattgatctcttcttagatttcattactgtcttcagaaaactcatgatgatcctggccatgaatgaaaaggataagaagaaagagaagaaatgaagtgaccatccagcctttcccaattagacttcctctccttccacccctcatttcctttttgcacacattacaggtggtgtgttctgtgataatgaaaagcatcagaaaagcttttgtactttgtggtttcctctattttgaattttttgatcaaaaaactgattagcagaatatagtttggagtttggcttcatcttcctggggttcccctcactcccttttttgtcaaccccatctgtagcctcttcctctactcaggcagtcgacccgccacgatgagaagtgggaccagccagagggcgccaacttcaggagtccgctttcccaccaggcttcattcacccagtggacctgaactgtttggtagagccacccggcccttccttcctcattgttgtttggtatgcgcacagttcctgtgggactgggccgtgagttttccattggaaagaagttcagtggtcccattgttaactcagcctcaaatctcaactgtcaggccctacaaagaaaatggagagcctcttctggtggatgctttgctccctctgagctgcccatgctggtctggcaaacacacctttctgctttgccttcacaaaagtaatgtgttccctttcccgccccttgcctgaccctcagggagtcagcctgcttccatccatgggtgggaagacttcagcacaaaggaaagactaattcttgtcaggcatttttgaaaaggctgattatgtgtatcaaggtacagctacgtaggttcccctaaacttgccctgtttttgtttttttagtttgttatccccttactgagcggcctctactaggtggctgtgattaaatgtcccaagcaaggatagggaaggggaatggttgagcctctggagatcattgtaaccaatcctgccagacctgtttggggcagtggggagcaaacctagataaggacctgtttggggcagcagggagcaaaatctcctttaacaaccaagcagttcctcattcacatcaacagagcgaggctgtgataacttaggaggcagcaatcctaatagtccttcagtgcattttagtctgtctccaactggacaccagtaggtagtgtcaagccagagattcggggcagtagataaatgttcattttactgatgcactttagtttttggtctgttacctgttttccagaaatttgtggccttttaggcgggagttaggcgaccaaaccagtgagagccccaatccctgcagttttgtggcttcaagtgtgggtggacagtcctaatggggatctccagctccttcctgtgggctgccacagacagctacccccagaagggtcaatgttgggagtggttgtggctctgagctgctctacagagcttcagtgtgagaggatcgagccattgaaagctcattaccagtaggacataatttttggctctccctattcacaaccagtgcacagtttgacagtggcctcaggttcacagtgcaccatgtcactgtgctatcctacgaaatcatttgtttctaagttgtgtttattcctggagtgacatgccaccccgaatggctcactttcactgaggatgctgtcctctgatttagctgctgcctccagcctctggcttgagaacttactaaaggcacttccttcctgttaaacccctgttaactctccataaatttggtgattctctgctaggcctaagattttgagttaacatctcttgaagccaaactccaccttctgtgctttttgcttgggataatggagtttttctttagaaacagtgccaagaatgacaagatattaaaaaaaaaaaaaaaaaaaaaaaaaaaaaaaaaa

SEQ ID NO: 1022 - DNA, 2983 bp, Homo sapiens
agagatagagtcttccctggcattgcaggagagaatctgaagggatgatggatgcatcaaaagagctgcaagttctccacattgacttcttgaatcaggacaacgccgtttctcaccacacatgggagttccaaacgagcagtcctgtgttccggcgaggacaggtgtttcacctgcggctggtgctgaaccagcccctacaatcctaccaccaactgaaactggaattcagcacagggccgaatcctagcatcgccaaacacaccctggtggtgctcgacccgaggacgccctcagaccactacaactggcaggcaacccttcaaaatgagtctggcaaagaggtcacagtggctgtcaccagttcccccaatgccatcctgggcaagtaccaactaaacgtgaaaactggaaaccacatccttaagtctgaagaaaacatcctataccttctcttcaacccatggtgtaaagaggacatggttttcatgcctgatgaggacgagcgcaaagagtacatcctcaatgacacgggctgccattacgtgggggctgccagaagtatcaaatgcaaaccctggaactttggtcagtttgagaaaaatgtcctggactgctgcatttccctgctgactgagagctccctcaagcccacagataggagggaccccgtgctggtgtgcagggccatgtgtgctatgatgagctttgagaaaggccagggcgtgctcattgggaattggactggggactatgaaggtggcacagccccatacaagtggacaggcagtgccccgatcctgcagcagtactacaacacgaagcaggctgtgtgctttggccagtgctgggtgtttgctgggatcctgactacagtgctgagagcgttgggcatcccagcacgcagtgtgacaggcttcgattcagctcacgacacagaaaggaacctcacggtggacacctatgtgaatgagaatggcaagaaaatcaccagtatgacccacgactctgtctggaatttccatgtgtggacggatgcctggatgaagcgaccggatctgcccaagggctacgacggctggcaggctgtggacgcaacgccgcaggagcgaagccagggtgtcttctgctgtgggccatcaccactgaccgccatccgcaaaggtgacatctttattgtctatgacaccagattcgtcttctcagaagtgaatggtgacaggctcatctggttggtgaagatggtgaatgggcaggaggagttacacgtaatttcaatggagaccacaagcatcgggaaaaacatcagcaccaaggcagtgggccaagacaggcggagagatatcacctatgagtacaagtatccagaaggctcctctgaggagaggcaggtcatggatcatgccttcctccttctcagttctgagagggagcacagacgacctgtaaaagagaactttcttcacatgtcggtacaatcagatgatgtgctgctgggaaactctgttaatttcaccgtgattcttaaaaggaagaccgctgccctacagaatgtcaacatcttgggctcctttgaactacagttgtacactggcaagaagatggcaaaactgtgtgacctcaataagacctcgcagatccaaggtcaagtatcagaagtgactctgaccttggactccaagacctacatcaacagcctggctatattagatgatgagccagttatcagaggtttcatcattgcggaaattgtggagtctaaggaaatcatggcctctgaagtattcacgtctttccagtaccctgagttctctatagagttgcctaacacaggcagaattggccagctacttgtctgcaattgtatcttcaagaataccctggccatccctttgactgacgtcaagttctctttggaaagcctgggcatctcctcactacagacctctgaccatgggacggtgcagcctggtgagaccatccaatcccaaataaaatgcaccccaataaaaactggacccaagaaatttatcgtcaagttaagttccaaacaagtgaaagagattaatgctcagaagattgttctcatcaccaagtagccttgtctgatgctgtggagccttagttgagatttcagcatttcctaccttgtgcttagctttcagattatggatgattaaatttgatgacttatatgagggcagattcaagagccagcaggtcaaaaaggccaacacaaccataagcagccagacccacaaggccaggtcctgtgctatcacagggtcacctcttttacagttagaaacaccagccgaggccacagaatcccatccctttcctgagtcatggcctcaaaaatcagggccaccattgtctcaattcaaatccatagatttcgaagccacagagtctctccctggagcagcagactatgggcagcccagtgctgccacctgctgacgacccttgagaagctgccatatcttcaggccatgggttcaccagccctgaaggcacctgtcaactggagtgctctctcagcactgggatgggcctgatagaagtgcattctcctcctattgcctccattctcctctctctatccctgaaatccaggaagtccctctcctggtgctccaagcagtttgaagcccaatctgcaaggacatttctcaagggccatgtggttttgcagacaaccctgtcctcaggcctgaactcaccatagagacccatgtcagcaaacggtgaccagcaaatcctcttcccttattctaaagctgccccttgggagactccagggagaaggcattgcttcctccctggtgtgaactctttctttggtattccatccactatcctggcaactcaaggctgcttctgttaactgaagcctgctccttcttgttctgccctccagagatttgctcaaatgatcaataagctttaaattaaactctacttcaagaaaaaaaaaccg

SEQ ID NO: 1023 - DNA, 5759 bp, Homo sapiens
ataccctgtggtgctagtgtaaaatcaaatataatctacctctttagcttttctgttatgtaattggaatgaaaaaatagtgcttttttttttttttcatttttgagattgagttaccatggagggaaagaacatgtgttttaccagtggaacgcattctttgtgttatctcttcgatttttaacattttatgtttccagtttataaactttgcctccagtttgatgaagaaaatttagctattagaaagtatttaaaatctcaaaagtatgacattttaaaatgttagcaggtttaaagataacttagtttttcaactcttaacccaaaattatacttgtatactataatttgtgttgaattacttggtattatttatcatcctagtaagatctattttatataatttgattcactttttatattgaattatgttaattgtttttgtaatacacctttcatatttcttcaaagaaaactagtgttgggttattgctaattttgcttcgtggtttggttatttacatataaaaattatattgttttaaaaattgcaaagtgatcatttattgacacatcagcaagaattaatgttgaaatgcaagttttttcccctatccttaactaagtgtgtagatatctttgttttgtttctttaatagatagcaaacaataaagatgcattgaggaagacatggaaccctaagtttacattgagaagtcactttgatggcatccgagcccttgctttccatcccattgagcctgttttgataacagcatcagaggatcacacattaaaaatgtggaatttacagaaaacagccccagccaaaaagtgagaatattctactttaacattatttgaatattttaagtaacattttcagcagaaaactacatattttatgatttctgttaaatttcccaaacatttcttctagttctttcttccatgtcatgtaatttattgtgtttttccatttatacaacctaatgctaggttagaaaactgatgcttaggaagatatggtattatcttttggtttcaccagggtttgtgaatactgattacagtctttatacataacagtatttttaaatggctgctatatttggggagccccttgtctatactgaaggtttggactgttcttgtaaacaggtatatgcatctttaaaataatcaaatgtccacctccaccttgccccattgtttactagatttagacttatgagatggagcagagaaaagcctcactgggatgggtggagggtcttggtcttgtcttttggccttgagactttaggtactttccatacccaccaatatgtctagactcagaggctaacatgactgctagtgctcaccttggccctttagttcctgtctaagcatggatagacatgagttagtataaaccctttaaaagtcacaaagctaaatctggttctacttgcttgggtccttatcggagctccactcctttgggtcacatgtcaaaaaaaaaaaaaaaaaggcgccgtccgctgcgctgggggctcggtctatgacgagcagcggggtctgccatgggtcgggggctgctcaggggcctgtggccgctgcacatcgtcctgtggacgcgtatcgccagcacgatcccaccgcacgttcagaagtcggttaataacgacatgatagtcactgacaacaacggtgcagtcaagtttccacaactgtgtaaattttgtgatgtgagattttccacctgtgacaaccagaaatcctgcatgagcaactgcagcatcacctccatctgtgagaagccacaggaagtctgtgtggctgtatggagaaagaatgacgagaacataacactagagacagtttgccatgaccccaagctcccctaccatgactttattctggaagatgctgcttctccaaagtgcattatgaaggaaaaaaaaaagcctggtgagactttcttcatgtgttcctgtagctctgatgagtgcaatgacaacatcatcttctcagaagaatataacaccagcaatcctgacttgttgctagtcatatttcaagtgacaggcatcagcctcctgccaccactgggagttgccatatctgtcatcatcatcttctactgctaccgcgttaaccggcagcagaagctgagttcaacctgggaaaccggcaagacgcggaagctcatggagttcagcgagcactgtgccatcatcctggaagatgaccgctctgacatcagctccacgtgtgccaacaacatcaaccacaacacagagctgctgcccattgagctggacaccctggtggggaaaggtcgctttgctgaggtctataaggccaagctgaagcagaacacttcagagcagtttgagacagtggcagtcaagatctttccctatgaggagtatgcctcttggaagacagagaaggacatcttctcagacatcaatctgaagcatgagaacatactccagttcctgacggctgaggagcggaagacggagttggggaaacaatactggctgatcaccgccttccacgccaagggcaacctacaggagtacctgacgcggcatgtcatcagctgggaggacctgcgcaagctgggcagctccctcgcccgggggattgctcacctccacagtgatcacactccatgtgggaggcccaagatgcccatcgtgcacagggacctcaacagctccaatatcctcgtgaagaacgacctaacctgctgcctgtgtgactttgggctttccctgcgtctggaccctactctgtctgtggatgacctggctaacagtgggcaggtgggaactgcaagatacatggctccagaagtcctagaatccaggatgaatttggagaatgctgagtccttcaagcagaccgatgtctactccatggctctggtgctctgggaaatgacatctcgctgtaatgcagtgggagaagtaaaagattatgagcctccatttggttccaaggtgcgggagcacccctgtgtcgaaagcatgaaggacaacgtgttgagagatcgagggcgaccagaaattcccagcttctggctcaaccaccagggcatccagatggtgtgtgagacgttgactgagtgctgggaccacgacccagaggcccgtctcacagcccagtgtgtggcagaacgcttcagtgagctggagcatctggacaggctctcggggaggagctgctcggaggagaagattcctgaagacggctccctaaacactaccaaatagctcttctggggcaggctgggccatgtccaaagaggctgcccctctcaccaaagaacagaggcagcaggaagctgcccctgaactgatgcttcctggaaaaccaagggggtcactcccctccctgtaagctgtggggataagcagaaacaacagcagcagggagtgggtgacatagagcattctatgccttttacattgtcataggataagctgtgttagcacttcctcaggaaatgagattgattttacaatagccaataacatttgcactttattaatgcctgtatataaatatgaatagctatgttttatatatatatatatatatctatatatgtctatagctctatatatatagccataccttgaaaagagacaaggaaaaacatcaaatattcccaggaaattggttttattggagaactccagaaccaagcagagaaggaagggacccatgacagcattagcatttgacaatcacacatgcagtggttctctgactgtaaaacagtgaactttgcatgaggaaagaggctccatgtctcacagccagctatgaccacattgcacttgcttttgcaaaataatcattccctgcctagcacttctcttctggccatggaactaagtacagtggcactgtttgaggaccagtgttcccggggttcctgtgtgcccttatttctcctggacttttcatttaagctccaagccccaaatctggggggctagtttagaaactctccctcaacctagtttagaaactctaccccatctttaataccttgaatgttttgaaccccactttttaccttcatgggttgcagaaaaatcagaacagatgtccccatccatgcgattgccccaccatctactaatgaaaaattgttctttttttcatctttcccctgcacttatgttactattctctgctcccagccttcatccttttctaaaaaggagcaaattctcactctaggctttatcgtgtttactttttcattacacttgacttgattttctagttttctatacaaacaccaatgggttccatctttctgggctcctgattgctcaagcacagtttggcctgatgaagaggatttcaactacacaatactatcattgtcaggactatgacctcaggcactctaaacatatgttttgtttggtcagcacagcgtttcaaaaagtgaagccactttataaatatttggagattttgcaggaaaatctggatccccaggtaaggatagcagatggttttcagttatctccagtccacgttcacaaaatgtgaaggtgtggagacacttacaaagctgcctcacttctcactgtaaacattagctctttccactgcctacctggaccccagtctaggaattaaatctgcacctaaccaaggtcccttgtaagaaatgtccattcaagcagtcattctctgggtatataatatgattttgactaccttatctggtgttaagatttgaagttggccttttattggactaaaggggaactcctttaagggtctcagttagcccaagtttcttttgcttatatgttaatagttttaccctctgcattggagagaggagtgctttactccaagaagctttcctcatggttaccgttctctccatcatgccagccttctcaacctttgcagaaattactagagaggatttgaatgtgggacacaaaggtcccatttgcagttagaaaatttgtgtccacaaggacaagaacaaagtatgagctttaaaactccataggaaacttgttaatcaacaaagaagtgttaatgctgcaagtaatctcttttttaaaactttttgaagctacttattttcagccaaataggaatattagagagggactggtagtgagaatatcagctctgtttggatggtggaaggtctcattttattgagatttttaagatacatgcaaaggtttggaaatagaacctctaggcaccctcctcagtgtgggtgggctgagagttaaagacagtgtggctgcagtagcatagaggcgcctagaaattccacttgcaccgtagggcatgctgataccatcccaatagctgttgcccattgacctctagtggtgagtttctagaatactggtccattcatgagatattcaagattcaagagtattctcacttctgggttatcagcataaactggaatgtagtgtcagaggatactgtggcttgttttgtttatgtttttttttcttattcaagaaaaaagaccaaggaataacattctgtagttcctaaaaatactgacttttttcactactatacataaagggaaagttttattcttttatggaacacttcagctgtactcatgtattaaaataggaatgtgaatgctatatactctttttatatcaaaagtctcaagcacttatttttattctatgcattgtttgtcttttacataaataaaatgtttattagattg

SEQ ID NO: 1024 - DNA, 1562 bp, Homo sapiens
ctggaattcggggcgccgagcaggagcagggaacaaaggagcggagaggggaggggagagagttgggcgagggagagcccccggccggctgccagaagatcctggcgggaggaagcccaagtgtcacttgaattccacccaaggagcgggcgcctgggatcagagcgtcctgtttagcaataacggctggagcacgtcctacaagttacgggagagtcggctgtgaaggagacgttcgcttatcccctgtgtccccgctcctggcccctccagacccccgccttgcctcgcgctgggaggggagatccagaatgaaaggcaagaaaggtattgttgcagcatctggcagtgagactgaggatgaggacagcatggacattcccttggacctttcttcatccgctggctcaggcaagagaaggagaaggggcaacctacccaaggagtctgtgcagattcttcgggattggctgtatgagcaccgttacaatgcctatccttcagagcaagaaaaagcgttgctgtcccagcaaacacacctgtctacgctacaggtctgtaactggttcatcaacgcccgccgcaggctcctccctgacatgctgagaaaggatggcaaagatccaaatcagttcacaatttcccgccgtggggccaagatttctgaaacgagctctgtggagtccgtgatgggcatcaaaaacttcatgccagctctagaggagaccccatttcattcctgtacagctgggccaaacccaaccctagggaggccactgtctcctaagccgtcatccccgggatcagttttggctcgtccatcagtgatctgccataccactgtgactgcattgaaagatgtccctttctctctctgccagtcggtcggtgtgggacaaaacacagatatacagcagatagcggccaaaaacttcacagacacctctctcatgtacccagaggacacttgtaaatctggaccaagtacgaatacacagagtggtcttttcaacactcctccccctactccaccggacctcaaccaggacttcagtggatttcagcttctagtggatgttgcactcaaacgggctgcagagatggagcttcaggcaaaacttacagcttaacccattttcaagcaaaacagttctcagaaatgtcatgattgccggggtgaaggcaagagatgaattgcattattttatatattttttattaatatttgcacatgggattgctaaaacagcttcctgttactgagatgtcttcaatggaatacagtcattccaagaactataaacttaaagctactgtagaaacaaagggttttcttttttaaatgtttcttggtagattattcataatgtgagatggttcccaatatcatgtgatttttttttttcctccccttccctttttttgttattttttcagactgtgcaatacttagagaacctatagcatcttctcattcccatgtggaacaggatgcccacatactgtctaattaataaattttccattttttttcaaacaagtaaaaaaaaaaaaaaaaaaaa

SEQ ID NO: 1025 - DNA, 5722 bp, Homo sapiens
ggacgcacaggcattccccgcgcccctccagccctcgccgccctcgccaccgctcccggccgccgcgctccggtacacacaggatccctgctgggcaccaacagctccaccatggggctggcctggggactaggcgtcctgttcctgatgcatgtgtgtggcaccaaccgcattccagagtctggcggagacaacagcgtgtttgacatctttgaactcaccggggccgcccgcaaggggtctgggcgccgactggtgaagggccccgacccttccagcccagctttccgcatcgaggatgccaacctgatcccccctgtgcctgatgacaagttccaagacctggtggatgctgtgcgggcagaaaagggtttcctccttctggcatccctgaggcagatgaagaagacccggggcacgctgctggccctggagcggaaagaccactctggccaggtcttcagcgtggtgtccaatggcaaggcgggcaccctggacctcagcctgaccgtccaaggaaagcagcacgtggtgtctgtggaagaagctctcctggcaaccggccagtggaagagcatcaccctgtttgtgcaggaagacagggcccagctgtacatcgactgtgaaaagatggagaatgctgagttggacgtccccatccaaagcgtcttcaccagagacctggccagcatcgccagactccgcatcgcaaaggggggcgtcaatgacaatttccagggggtgctgcagaatgtgaggtttgtctttggaaccacaccagaagacatcctcaggaacaaaggctgctccagctctaccagtgtcctcctcacccttgacaacaacgtggtgaatggttccagccctgccatccgcactaactacattggccacaagacaaaggacttgcaagccatctgcggcatctcctgtgatgagctgtccagcatggtcctggaactcaggggcctgcgcaccattgtgaccacgctgcaggacagcatccgcaaagtgactgaagagaacaaagagttggccaatgagctgaggcggcctcccctatgctatcacaacggagttcagtacagaaataacgaggaatggactgttgatagctgcactgagtgtcactgtcagaactcagttaccatctgcaaaaaggtgtcctgccccatcatgccctgctccaatgccacagttcctgatggagaatgctgtcctcgctgttggcccagcgactctgcggacgatggctggtctccatggtccgagtggacctcctgttctacgagctgtggcaatggaattcagcagcgcggccgctcctgcgatagcctcaacaaccgatgtgagggctcctcggtccagacacggacctgccacattcaggagtgtgacaaaagatttaaacaggatggtggctggagccactggtccccgtggtcatcttgttctgtgacatgtggtgatggtgtgatcacaaggatccggctctgcaactctcccagcccccagatgaatgggaaaccctgtgaaggcgaagcgcgggagaccaaagcctgcaagaaagacgcctgccccatcaatggaggctggggtccttggtcaccatgggacatctgttctgtcacctgtggaggaggggtacagaaacgtagtcgtctctgcaacaaccccgcaccccagtttggaggcaaggactgcgttggtgatgtaacagaaaaccagatctgcaacaagcaggactgtccaattgatggatgcctgtccaatccctgctttgccggcgtgaagtgtactagctaccctgatggcagctggaaatgtggtgcttgtccccctggttacagtggaaatggcatccagtgcacagatgttgatgagtgcaaagaagtgcctgatgcctgcttcaaccacaatggagagcaccggtgtgagaacacggaccccggctacaactgcctgccctgccccccacgcttcaccggctcacagcccttcggccagggtgtcgaacatgccacggccaacaaacaggtgtgcaagccccgtaacccctgcacggatgggacccacgactgcaacaagaacgccaagtgcaactacctgggccactatagcgaccccatgtaccgctgcgagtgcaagcctggctacgctggcaatggcatcatctgcggggaggacacagacctggatggctggcccaatgagaacctggtgtgcgtggccaatgcgacttaccactgcaaaaaggataattgccccaaccttcccaactcagggcaggaagactatgacaaggatggaattggtgatgcctgtgatgatgacgatgacaatgataaaattccagatgacagggacaactgtccattccattacaacccagctcagtatgactatgacagagatgatgtgggagaccgctgtgacaactgtccctacaaccacaacccagatcaggcagacacagacaacaatggggaaggagacgcctgtgctgcagacattgatggagacggtatcctcaatgaacgggacaactgccagtacgtctacaatgtggaccagagagacactgatatggatggggttggagatcagtgtgacaattgccccttggaacacaatccggatcagctggactctgactcagaccgcattggagatacctgtgacaacaatcaggatattgatgaagatggccaccagaacaatctggacaactgtccctatgtgcccaatgccaaccaggctgaccatgacaaagatggcaagggagatgcctgtgaccacgatgatgacaacgatggcattcctgatgacaaggacaactgcagactcgtgcccaatcccgaccagaaggactctgacggcgatggtcgaggtgatgcctgcaaagatgattttgaccatgacagtgtgccagacatcgatgacatctgtcctgagaatgttgacatcagtgagaccgatttccgccgattccagatgattcctctggaccccaaagggacatcccaaaatgaccctaactgggttgtacgccatcagggtaaagaactcgtccagactgtcaactgtgatcctggactcgctgtaggttatgatgagtttaatgctgtggacttcagtggcaccttcttcatcaacaccgaaagggacgatgactatgctggatttgtctttggctaccagtccagcagccgcttttatgttgtgatgtggaagcaagtcacccagtcctactgggacaccaaccccacgagggctcagggatactcgggcctttctgtgaaagttgtaaactccaccacagggcctggcgagcacctgcggaacgccctgtggcacacaggaaacacccctggccaggtgcgcaccctgtggcatgaccctcgtcacataggctggaaagatttcaccgcctacagatggcgtctcagccacaggccaaagacgggtttcattagagtggtgatgtatgaagggaagaaaatcatggctgactcaggacccatctatgataaaacctatgctggtggtagactagggttgtttgtcttctctcaagaaatggtgttcttctctgacctgaaatacgaatgtagagatccctaatcatcaaattgttgattgaaagactgatcataaaccaatgctggtattgcaccttctggaactatgggcttgagaaaacccccaggatcacttctccttggcttccttcttttctgtgcttgcatcagtgtggactcctagaacgtgcgacctgcctcaagaaaatgcagttttcaaaaacagactcatcagcattcagcctccaatgaataagacatcttccaagcatataaacaattgctttggtttccttttgaaaaagcatctacttgcttcagttgggaaggtgcccattccactctgcctttgtcacagagcagggtgctattgtgaggccatctctgagcagtggactcaaaagcattttcaggcatgtcagagaagggaggactcactagaattagcaaacaaaaccaccctgacatcctccttcaggaacacggggagcagaggccaaagcactaaggggagggcgcatacccgagacgattgtatgaagaaaatatggaggaactgttacatgttcggtactaagtcattttcaggggattgaaagactattgctggatttcatgatgctgactggcgttagctgattaacccatgtaaataggcacttaaatagaagcaggaaagggagacaaagactggcttctggacttcctccctgatccccacccttactcatcaccttgcagtggccagaattagggaatcagaatcaaaccagtgtaaggcagtgctggctgccattgcctggtcacattgaaattggtggcttcattctagatgtagcttgtgcagatgtagcaggaaaataggaaaacctaccatctcagtgagcaccagctgcctcccaaaggaggggcagccgtgcttatatttttatggttacaatggcacaaaattattatcaacctaactaaaacattccttttctcttttttccgtaattactaggtagttttctaattctctcttttggaagtatgatttttttaaagtctttacgatgtaaaatatttattttttacttattctggaagatctggctgaaggattattcatggaacaggaagaagcgtaaagactatccatgtcatctttgttgagagtcttcgtgactgtaagattgtaaatacagattatttattaactctgttctgcctggaaatttaggcttcatacggaaagtgtttgagagcaagtagttgacatttatcagcaaatctcttgcaagaacagcacaaggaaaatcagtctaataagctgctctgccccttgtgctcagagtggatgttatgggattccttttttctctgttttatcttttcaagtggaattagttggttatccatttgcaaatgttttaaattgcaaagaaagccatgaggtcttcaatactgttttaccccatcccttgtgcatatttccagggagaaggaaagcatatacacttttttctttcatttttccaaaagagaaaaaaatgacaaaaggtgaaacttacatacaaatattacctcatttgttgtgtgactgagtaaagaatttttggatcaagcggaaagagtttaagtgtctaacaaacttaaagctactgtagtacctaaaaagtcagtgttgtacatagcataaaaactctgcagagaagtattcccaataaggaaatagcattgaaatgttaaatacaatttctgaaagttatgttttttttctatcatctggtataccattgctttatttttataaattattttctcattgccattggaatagaatattcagattgtgtagatatgctatttaaataatttatcaggaaatactgcctgtagagttagtatttctatttttatataatgtttgcacactgaattgaagaattgttggttttttcttttttttgttttttttttttttttttttttttttgcttttgacctcccatttttactatttgccaatacctttttctaggaatgtgcttttttttgtacacatttttatccattttacattctaaagcagtgtaagttgtatattactgtttcttatgtacaaggaacaacaataaatcatatggaaatttatattt

SEQ ID NO: 1026 - DNA, 2515 bp, Homo sapiens
gaattccggggcatgctgtggcggcggttgggccgaggcaggcggcctcagtggccgaggtggcttggacgcgtacgaggtggaaggagggagggagccgcaggcgcagacccacagaccacccgccatgaagccccccgcagcctgtgcaggagacatggcggacgcagcatctccgtgctctgtggtaaacgacctgcggtgggacctgagtgcccagcagatagaggagcgcaccagggagctcatcgagcagaccaagcgcgtgtatgaccaggttggcacccaggagtttgaggacgtgtcctacgagagcacgctcaaggcgctggccgatgtggaggtcacctacacagttcagaggaatatccttgacttcccccagcatgtttccccctccaaggacatccggacagccagcacagaggccgacaagaagctctctgagttcgacgtggagatgagcatgagggaggacgtgtaccagaggatcgtgtggctccaggagaaagttcagaaggactcactgaggcccgaggctgcgcggtacctggagcggctaatcaagctgggccggagaaatgggcttcacctccccagagagactcaggaaaacatcaaacgcatcaagaagaagctgagccttctgtgcatcgacttcaacaagaacctgaacgaggacacgaccttcctgcccttcacgctccaggagctaggagggctccccgaggactttctgaactccctggagaagatggaggacggcaagttgaaggtcaccctcaagtacccccattacttccccctcctgaagaaatgccacgtgcctgagaccaggaggaaagtggaggaggccttcaactgccggtgcaaggaggagaactgcgctatcctcaaggagctggtgacgctgcgggcccagaagtcccgcctgctggggttccacacgcacgccgactatgtcctggagatgaacatggccaagaccagccagaccgtggccaccttcctagatgagctggcgcagaagctgaagcccctgggggagcaggagcgtgcggtgattctggagctgaagcgtgcggagtgcgagcgccggggcctgcccttcgacggccgcatccgtgcctgggacatgcgctactacatgaaccaggtggaggagacgcgctactgcgtggaccagaacctgctcaaggagtacttccccgtgcaggtggtcacgcacgggctgctgggcatctaccaggagctcctggggctggccttccaccacgaggagggcgccagtgcctggcatgaggacgtgcggctctacaccgcgagggacgcggcctcgggggaggtggtcggcaagttctacctggacctgtacccgcgggaaggaaagtacgggcacgcggcctgctttggcctgcagcccggctgcctgcggcaggatgggagccgccagatcgccatcgcggccatggtggccaacttcaccaagcccacagccgacgcgccctcgctgctgcagcatgacgaggtggagacctacttccatgagtttggccacgtgatgcaccagctctgctcccaggcggagttcgccatgttcagcgggacccacgtggagcgggactttgtggaggcgccgtcgcagatgctggagaactgggtgtgggagcaggagccgctgctgcggatgtcgcggcactaccgcacaggcagcgccgtgccccgggagctcctggagaagctcattgagtcccggcaggccaacacaggcctcttcaacctgcgccagatcgtcctcgccaaggtggaccaggccctgcacacgcagacggacgcagaccccgccgaggagtatgcgcggctctgccaggagatcctcggggtcccggccacgccaggaaccaacatgcctgcaaccttcggccatctggcaggtggctacgacgcccagtactacgggtacctgtggagcgaggtgtattccatggacatgttccacacgcgcttcaagcaggagggtgtcctgaacagcaaggttggcatggattacagaagctgcatcctgagacccggcggttccgaggatgccagcgccatgctgaggcgcttcctgggccgtgaccccaagcaggacgccttcctcctgagcaaggggctgcaggtcgggggctgcgagcccgagccgcaggtctgctgaggcctggcactgcgactgcccagtctggcctgcgctcccgccgccctggtgccttagcccccggcacaggatggggcaagctctggcacagtgccttgggactggactggcagggtggctgagcggctgtcttgcctcttgtcattgtctgtccccacccggtcgtggcccacccggctagacggcgtcctcaaggcatctggagggctttcgtggctgccagggcctggtctttgttgcactaacacgtctcctctctgggaaacgtcccttgtcaggagacggctcttctttgaaatgaggtcattaaaaggaaac

SEQ ID NO: 1027 - DNA, 2422 bp, Homo sapiens
ggcacgaggctcgcactcacacccgggcgcaggaggcgggcggcccgggccccaccggccccccatggacgcccccagcacggggcgctgagacccccgcgtcgctgcccagcccggtccggcgcgccacgccgagggatctctggacaggacaagactccgaagctactcccccagcacacagcccgggacccacaaacccagcttgcccccagccctcccacctgccactccctggcccctcccaccgcccgccccccttggggcgcagggcatggtgtgaaaggccaagtgctgaggcgggtatcatgggtgctgtgccctagggcctgggtggcagggggtgggtggcctgtgggtgtgccgggggggccagtgtgcccaccccagtctcttggcgtgctggagggcatcctggatggaattgaagtgaatggaacagaagccaagcaaggtggagtgtgggtcagacccagaggagaacagtgccaggtcaccagatggaaagcgaaaaagaaagaacggccaatgttccctgaaaaccagcatgtcagggtatatccctagttacctggacaaagacgagcagtgtgtcgtgtgtggggacaaggcaactggttatcactaccgctgtatcacttgtgagggctgcaagggcttctttcgccgcacaatccagaagaacctccatcccacctattcctgcaaatatgacagctgctgtgtcattgacaagatcacccgcaatcagtgccagctgtgccgcttcaagaagtgcatcgccgtgggcatggccatggacttggttctagatgactcgaagcgggtggccaagcgtaagctgattgagcagaaccgggagcggcggcggaaggaggagatgatccgatcactgcagcagcgaccagagcccactcctgaagagtgggatctgatccacattgccacagaggcccatcgcagcaccaatgcccagggcagccattggaaacagaggcggaaattcctgcccgatgacattggccagtcacccattgtctccatgccggacggagacaaggtggacctggaagccttcagcgagtttaccaagatcatcaccccggccatcacccgtgtggtggactttgccaaaaaactgcccatgttctccgagctgccttgcgaagaccagatcatcctcctgaaggggtgctgcatggagatcatgtccctgcgggcggctgtccgctacgaccctgagagcgacaccctgacgctgagtggggagatggctgtcaagcgggagcagctcaagaatggcggcctgggcgtagtctccgacgccatctttgaactgggcaagtcactctctgcctttaacctggatgacacggaagtggctctgctgcaggctgtgctgctaatgtcaacagaccgctcgggcctgctgtgtgtggacaagatcgagaagagtcaggaggcgtacctgctggcgttcgagcactacgtcaaccaccgcaaacacaacattccgcacttctggcccaagctgctgatgaaggagagagaagtgcagagttcgattctgtacaagggggcagcggcagaaggccggccgggcgggtcactgggcgtccacccggaaggacagcagcttctcggaatgcatgttgttcagggtccgcaggtccggcagcttgagcagcagcttggtgaagcgggaagtctccaagggccggttcttcagcaccagagcccgaagagcccgcagcagcgtctcctggagctgctccaccgaagcggaattctccatgcccgagcggtctgtggggaagacgacagcagtgaggcggactccccgagctcctctgaggaggaaccggaggtctgcgaggacctggcaggcaatgcagcctctccctgaagccccccagaaggccgatggggaaggagaaggagtgccataccttctcccaggcctctgccccaagagcaggaggtgcctgaaagctgggagcgtgggctcagcagggctggtcacctcccatcccgtaagaccaccttcccttcctcagcaggccaaacatggccagactcccttgctttttgctgtgtagttccctctgcctgggatgcccttccccctttctctgcctggcaacatcttacttgtcctttgaggccccaactcaagtgtcacctccttccccagctcccccaggcagaaatagttgtctgtgcttccttggttcatgcttctactgtgacacttatctcactgttttataattagtcgggcatgagtctgtttcccaagctagactgtgtctgaatcatgtctgtatccccagtgcccggtgcagggcctggcatagagtaggtactccataaaaggtgtgttgaattgaaaaaaaaaaaaaaaaaaaaaaaaaaaaaaaaa

SEQ ID NO: 1028 - DNA, 782 bp, Homo sapiens
aggggccttagcgtgccgcatcgccgagatccagcgcccagagagacaccagagaacccaccatggccccctttgagcccctggcttctggcatcctgttgttgctgtggctgatagcccccagcagggcctgcacctgtgtcccaccccacccacagacggccttctgcaattccgacctcgtcatcagggccaagttcgtggggacaccagaagtcaaccagaccaccttataccagcgttatgagatcaagatgaccaagatgtataaagggttccaagccttaggggatgccgctgacatccggttcgtctacacccccgccatggagagtgtctgcggatacttccacaggtcccacaaccgcagcgaggagtttctcattgctggaaaactgcaggatggactcttgcacatcactacctgcagtttcgtggctccctggaacagcctgagcttagctcagcgccggggcttcaccaagacctacactgttggctgtgaggaatgcacagtgtttccctgtttatccatcccctgcaaactgcagagtggcactcattgcttgtggacggaccagctcctccaaggctctgaaaagggcttccagtcccgtcaccttgcctgcctgcctcgggagccagggctgtgcacctggcagtccctgcggtcccagatagcctgaatcctgcccggagtggaactgaagcctgcacagtgtccaccctgttcccactcccatctttcttccggacaatgaaataaagagttaccacccagc

SEQ ID NO: 1029 - DNA, 1075 bp, Homo sapiens
cgcagcaaacacatccgtagaaggcagcgcggccgccgagagccgcagcgccgctcgcccgccgccccccaccccgccgccccgcccggcgaattgcgccccgcgcccctcccctcgcgcccccgagacaaagaggagagaaagtttgcgcggccgagcggggcaggtgaggagggtgagccgcgcgggaggggcccgcctcggccccggctcagcccccgcccgcgcccccagcccgccgccgcgagcagcgcccggaccccccagcggcggcccccgcccgcccagccccccggcccgccatgggcgccgcggcccgcaccctgcggctggcgctcggcctcctgctgctggcgacgctgcttcgcccggccgacgcctgcagctgctccccggtgcacccgcaacaggcgttttgcaatgcagatgtagtgatcagggccaaagcggtcagtgagaaggaagtggactctggaaacgacatttatggcaaccctatcaagaggatccagtatgagatcaagcagataaagatgttcaaagggcctgagaaggatatagagtttatctacacggccccctcctcggcagtgtgtggggtctcgctggacgttggaggaaagaaggaatatctcattgcaggaaaggccgagggggacggcaagatgcacatcaccctctgtgacttcatcgtgccctgggacaccctgagcaccacccagaagaagagcctgaaccacaggtaccagatgggctgcgagtgcaagatcacgcgctgccccatgatcccgtgctacatctcctccccggacgagtgcctctggatggactgggtcacagagaagaacatcaacgggcaccaggccaagttcttcgcctgcatcaagagaagtgacggctcctgtgcgtggtaccgcggcgcggcgccccccaagcaggagtttctcgacatcgaggacccataagcaggcctccaacgcccctgtggccaactgcaaaaaaagcctccaagggtttcgactggtccagctctgacatcccttcctggaaacagcatgaataaaacactcatccc

SEQ ID NO: 1030 - DNA, 1189 bp, Homo sapiens
cctgctggggccgtccagtcccccagacctcacaggctcagtcgcggatctgcagtgtcatgcctgggagccctcggcccgcgccaagctgggtgctgttgctgcggctgctggcgttgctgcggcccccggggctgggtgaggcatgcagctgcgccccggcgcaccctcagcagcacatctgccactcggcacttgtgattcgggccaaaatctccagtgagaaggtagttccggccagtgcagaccctgctgacactgaaaaaatgctccggtatgaaatcaaacagataaagatgttcaaagggtttgagaaagtcaaggatgttcagtatatctatacgccttttgactcttccctctgtggtgtgaaactagaagccaacagccagaagcagtatctcttgactggtcaggtcctcagtgatggaaaagtcttcatccatctgtgcaactacatcgagccctgggaggacctgtccttggtgcagagggaaagtctgaatcatcactaccatctgaactgtggctgccaaatcaccacctgctacacagtaccctgtaccatctcggcccctaacgagtgcctctggacagactggctgttggaacgaaagctctatggttaccaggctcagcattatgtctgtatgaagcatgttgacggcacctgcagctggtaccggggccacctgcctctcaggaaggagtttgttgacatcgttcagccctagtagggaccagtgaccatcacatcccttcaagagtcctgaagatcaagccagttctccttccctgcagagctttggccattaccacctgacctcttgctgccagctaataagaagtgccaagtggacagtctggccactgtcaaggcagggaaggggccatgacttttctgccctgccctcagcctgttgccctgcctcccaaaccccattagtctagccttgtagctgttactgcaagtgtttcttctggcttagtctgttttctaaagccaggactattccctttcctccccaggaatatgtgttttcctttgtcttaatcgatctggtaggggagaaatggcgaatgtcatacacatgagatggtatatccttgcgatgtacagaatcagaaggtggtttgacagcatcataaacaggctgactggcaggaatgaaaaaaaaaaaaaaaaaaa

SEQ ID NO: 1031 - DNA, 7888 bp, Homo sapiens
tccgggtatggatgtcaatcttttgtctacaatgtgaatacatttatccttcggggaccatcaagactttcaggaaaggccccgcctgtctctgcgcggccactttgctgggacaaaggtcaactgaagaagtgggcaggcccgaggcaggagagatgctgaggagtccatgtgcaggggagggaaagggagaggcagtcagggagaggaggaggaggtaccgccagaaggggatcctcccgctccgaaaaccagacaccgggtcttgccctgtggtccaggcaggagtgcagtggtgcaacctcagctcactgcagccttgacctccccgggctcaagcgatcctccggccacagcacttggctgttcagcggctggaggagcagggccccaggtcctccccaccctcacctgctgctcccaggtcgtggccgtcttgctcttccaggtccttctctagggatgcaatattcacattgctaagatgcaggtctaacgcagaacctgtcaacagagccccccatcatccacagcccacccagcgctgcagagctcaggaagcctagctgaggaggacgaccgtcccacctgggcttagagtgagaccaagggcagaaggcgtgggagttgctggggcagccagggaaggacacccccagcccgtcctcgcagccccccacaggcagtgggaggcttggctgttcctccggcaaaacgggcatgctcagtgggccgggccggcaggtttgcgtggccgctgagttgccggcgccggctgagccagcggacgccgcgttccttggcggccgccggttcccgggaagttacgtggcgaagccggcttccgaggagacgccgggaggccacgggtgctgctgacgggcgggcgaccgggcgaggccgacgtggccgggctgcgaaagctgcgggaggccgagtgggtgaccgcgctcggagggaggtgccggtcgggcgcgccccgtggagaagacccgggcggggcgggcgcttcccggacttttgtccgagttgaattccctccccctgggccgggcccttccgtccgcccccgcccgtgccccgctcgctctcgggagatgtttatttgggctgtggcgtgaggagcgggcgggccagcgccgcggagtttcgggtccgaggagcctcgcgcggcgctggagagagacaagatgtccgccagagctgcggccgccaagagcacagcaatggaggaaacagctatatgggaacaacatacagtgacgcttcacagggctcctggatttggatttggaattgcaatatctggtggacgagataatcctcattttcagagtggggaaacgtcaatagtgatttcagatgtgctgaaaggaggaccagctgaaggacagctacaggaaaatgaccgagttgcaatggttaacggagtttcaatggataatgttgaacatgcttttgctgttcagcaactaaggaaaagtgggaaaaatgcaaaaattacaattagaaggaagaagaaagttcaaataccagtaagtcgtcctgatcctgaaccagtatctgataatgaagaagatagttatgatgaggaaatacatgatccaagaagtggccggagtggtgtggttaacagaaggagtgagaagatttggccgagggatagaagtgcaagtagagagaggagcttgtccccgcggtcagacaggcggtcagtggcttccagccagcctgctaaacctactaaagtcacactggtgaaatcccggaaaaatgaagaatatggtcttcgattggcaagccatatatttgttaaggaaatttcacaagatagtttggcagcaagagatggcaatattcaagaaggtgatgttgtattgaagataaatggtactgtgacagaaaatatgtcattgacagatgcaaagacattgatagaaaggtctaaaggcaaattaaaaatggtagttcaaagagatgaacgggctacgctattgaatgtccctgatctttctgacagcatccactctgctaatgcctctgagagagacgacatttcagaaattcagtcactggcatcagatcattctggtcgatcacacgataggcctccccgccgcagccggtcacgatctcctgaccagcggtcagagccttctgatcattccaggcactcgccgcagcagccaagcaatggcagtctccggagtagagatgaagagagaatttctaaacctggggctgtctcaactcctgtaaagcatgctgatgatcacacacctaaaacagtggaagaagttacagttgaaagaaatgagaaacaaacaccttctcttccagaaccaaagcctgtgtatgcccaagttggcaaccagatgtggatttacctgtcagtccatctgatggtgtcctacctaattcaactcatgaagatgggatttcttcggcccagcatgaaattggtaaaattcagaaaaggagatagtgtgggtttgcggctggctggtggaaatgatgttggaatatttgtagctggcgttctagaagatagccctgcagccaaggaaggcttagaggaaggtgatcaaattctcagggtaaacaacgtagattttacaaatatcataagagaagaagccgtccttttcctgcttgacctccctaaaggagaagaagtgaccatattggctcagaagaagaaggatgtttatcgtcgcattgtagaatcagatgtaggagattctttctatattagaacccattttgaatatgaaaaggaatctccctatggacttagttttaacaaaggagaggtgttccgtgctgtggataccttgtacaatggaaaactgggctcttggcttgctattcgaattggtaaaaatcataaggaggtagaacgaggcatcatccctaataagaacagagctgagcagctagccagtgtacagtatacacttccaaaaacagcaggcggagaccgtgctgacttctggagattcagaggtcttcgcagctccaagagaaatcttcgaaaaagcagagaggatttgtccgctcagcctgttcaaacaaagtttccagcttatgaaagagtggttcttcgagaagctggatttctgaggcctgtaaccatttttggaccaatagctgatgttgccagagaaaagctggcaagagaagaaccagatatttatcaaattgcaaagagtgaaccacgagacgctggaactgaccaacgtagctctggctatattcgcctgcatacaataaagcaaatcatagatcaagacaaacatgctttattagatgtaacaccaaatgcagttgatcgtcttaactatgcccagtggtatccaattgttgtatttcttaaccctgattctaagcaaggagtaaaaacaatgagaatgaggttatgtccagaatctcggaaaagtgccaggaagttatacgagcgatctcataaacttgctaaaaataatcaccatctttttacaactacaattaacttaaattcaatgaatgatggttggtatggtgcgctgaaagaagcagttcaacaacagcaaaaccagctggtatgggtttccgagggaaaggcggatggtgctacaagtgatgaccttgatttgcatgatgatcgtctgtcctacctgtcagctccaggtagtgaatactcaatgtatagcacggacagtagacacacttctgactatgaagacacagacacagaaggcggggcctacactgatcaagaactagatgaaactcttaatgatgaggttgggactccaccggagtctgccattacacggtcctctgagcctgtaagagaggactcctctggaatgcatcatgaaaaccaaacatatcctccttactcaccacaagcgcagccacaaccaattcatagaatagactcccctggatttaagccagcctctcaacagaaagcagaagcttcatctccagtcccttacctttcgcctgaaacaaacccagcatcatcaacctctgctgttaatcataatgtaaatttaactaatgtcagactggaggagcccaccccagctccttccacctcttactcaccacaagctgattctttaagaacaccaagtactgaggcagctcacataatgctaagagatcaagaaccatcattgtcgtcgcatgtagatccaacaaaggtgtatagaaaggatccatatcccgaggaaatgatgaggcagaaccatgttttgaaacagccagccgttagtcacccagggcacaggccagacaaagagcctaatctgacctatgaaccccaactcccatacgtagagaaacaagccagcagagacctcgagcagcccacatacagatacgagtcctcaagctatacggaccagttttctcgaaactatgaacatcgtctgcgatacgaagatcgcgtccccatgtatgaagaacagtggtcatattatgatgacaaacagccctacccatctcggccaccttttgataatcagcactctcaagaccttgactccagacagcatcccgaagagtcctcagaacgagggtactttccacgttttgaagagccagcccctctgtcttacgacagcagaccacgttacgaacaggcacctagagcatccgccctgcggcacgaagagcagccagctcctgggtatgacacacatggtagactcagaccggaagcccagccccacccttcagcagggcccaagcctgcagagtccaagcagtattttgagcaatattcacgcagttacgagcaagtaccaccccaaggatttacctctagagcaggtcattttgagcctctccatggtgctgcagctgtccctccgctgataccttcatctcagcataagccagaagctctgccttcaaacaccaaaccactgcctccacccccaactcaaaccgaagaagaggaagatccagcaatgaagccacagtctgtactcaccagagttaagatgtttgaaaacaaaagatctgcatccttagagaccaagaaggatgtaaatgacactggcagttttaagcctccagaagtagcatctaaaccttcaggtgctcccatcattggtcccaaacccacttctcagaatcaattcagtgaacatgacaaaactctgtacaggatcccagaacctcaaaaacctcaactgaagccacctgaagatattgttcggtccaatcattatgaccctgaagaagatgaagaatattatcgaaaacagctgtcatactttgaccgaagaagttttgagaataagcctcctgcacacattgctgccagccatctctccgagcctgcaaagccagctcattctcagaatcaatcaaatttttctagttattcttcaaagggaaagcctcctgaagctgatggtgtggatagatcatttggcgagaaacgctatgaacccatccaggccactccccctcctcctccattgccctcgcagtatgcccagccatctcagcctgtcaccagcgcgtctctccacatacattctaagggagcacatggtgaaggtaattcagtgtcattggattttcagaattccttagtgtccaaaccagacccacctccatctcagaataagccagcaactttcagaccaccaaaccgagaagatactgctcaggcagctttctatccccagaaaagttttccagataaagccccagttaatggaactgaacagactcagaaaacagtcactccagcatacaatcgattcacaccaaaaccatatacaagttctgcccgaccatttgaacgcaagtttgaaagtcctaaattcaatcacaatcttctgccaagtgaaactgcacataaacctgacttgtcttcaaaaactcccacttctccaaaaactcttgtgaaatcgcacagtttggcacagcctcctgagtttgacagtggagttgaaactttctctatccatgcagagaagcctaaatatcaaataaataatatcagcacagtgcctaaagctattcctgtgagtccttcagctgtggaagaggatgaagatgaagatggtcatactgtggtggccacagcccgaggcatatttaacagcaatgggggcgtgctgagttccatagaaactggtgttagtataattatccctcaaggagccattcccgaaggagttgagcaggaaatctatttcaaggtctgccgggacaacagcatccttccacctttagataaagagaaaggtgaaacactgctgagtcctttggtgatgtgtggtccccatggcctcaagttcctgaagcctgtggagctgcgcttaccacactgtgatcctaaaacctggcaaaacaagtgtcttcccggagatccaaattatctcgttggagcaaactgtgtttctgtccttattgaccacttttaactcttgaaatataggaacttaaataatgtgaaactggattaaacttaatctaaatggaaccactctatcaagtattataccttttttagagttgatactacagtttgttagtatgaggcatttgtttgaactgataaagatgagtgagcatgcccctgaaccatggtcggaaaacatgctacacactgcatgtttgtgattgacgggactgttggtattggctagaggttcaaagatattttgctttgtgatttttgtaatttttttatcgtcactgcttaacttcacatattgatttccgttaaaataccagccagtaaatgggggtgcatttgaggtctgttctttccaaagtacactgtttcaaactttactatggccctggcctagcatacgtacacattttattttattatgcatgaagtaatatgcacacattttttaaatgcacctggaatatataaccagtgttgtggatttaacagaaatgtacagcaaggagatttacaactgggggagggtgaagtgaagacaatgacttactgtacatgaaaacacatttttcttagggaaggatacaaaagcatgtgagactggttccatggcctcttcagatctctaacttcaccatattaccacagacatactaaccagcagaaatgccttaccctcatgttcttaattcttagctcattctccttgtgttactaagtttttatggcttttgtgcattatctagatactgtatcatgacaaagactgagtacgttgtgcatttggtggtttcagaaatgtgttatcacccagaagaaaatagtggtgtgatttggggatatttttttcttttcttttcttttcttttttttttttttttgacaaggggcagtggtggttttctgttctttctggctatgcatttgaaaattttgatgttttaaggatgcttgtacataatgcgtgcataccacttttgttcttggtttgtaaattaacttttataaactttaccttttttatacataaacaagaccacgtttctaaaggctacctttgtattctctcctgtacctcttgagccttgaactttgacctctgcagcaataaagcagcgtttctatgacacatgcaaggtcattttttttaagaaaaaggatgcacagagttgttacatttttaagtgctgcatttaaaagatacagttactcagaattctctagtttgattaaattcttgcaaagtatccctactgtaatttgtgatacaatgctgtgccctaaagtgtatttttttactaatagacaatttattatgacacatcagcacgatttctgtttaaataatacaccactacattctgttaatcattaggtgtgactgaatttcttttgccgttattaaaaatctcaaatttctaaatctccaaaataaaactttttaaaataaaaaaaaat

SEQ ID NO: 1032 - DNA, 3091 bp, Homo sapiens
tttaaacgagctgtattaccccgcacagtgcaggagaaaagataattggctcaggtctcggctctgccatctaccacctgtggagccttagataagtcagttcttatctctgtcactcaacggtctcggtcttgtcatcttttacatggaatgtcatgaaatatacagtacattgcaggaactgcctcaggtaaagacttctagggttcagtaggtctcagtcgatccctctgagaaaggccgcaccctaaatgcacagactctgactctaaggggatggggtcggggaatctgcattttagtagcttctcaggtgattcagatgctcagtcaggattgagaaaccaggactcttcccagccctcctgttctctgatccacttctctgcttcctccacgtcctaacgattctccagttcccgcacagcaggagcgaagggaagaggggagagaaggcaccgctaaggaccgctggccccgccaggcggccgacctccccattccaggggcgccagccggcggattacataacgggctcggggcgcgttctcgcgaggtttccaccgccccctcctcgctccacgtcagagggaaccgggcggagcggccaacatggcggaacgcaggagacacaagaagcggatccaggaagttggtgaaccatctaaagaagagaaggctgtggccaagtatcttcgattcaactgtccaacaaagtccaccaatatgatgggtcaccgggttgattattttattgcttcaaaagcagtggactgtcttttggattcaaagtgggcaaaggccaagaaaggagaggaagctttatttacaaccagggagtctgtggttgactactgcaacaggcttttaaagaagcagttttttcaccgagccctaaaagtaatgaaaatgaaatatgataaagacataaagaaagaaaaagataaaggaaaagctgaaagtggaaaagaagaagataaaaagagcaagaaagaaaatataaaggatgagaagacaaaaaaagaaaaagagaaaaaaaaagatggtgaaaaggaagaatccaaaaaggaggaaactccaggaactcctaaaaagaaggaaactaagaaaaaattcaaacttgagccacatgatgatcaggtttttctggatggaaatgaggtgtatgtatggatctatgacccagttcactttaaaacatttgtcatgggattaattcttgtgattgcagtaatagcggccaccctcttccccctttggccagcagaaatgagagtaggtgtttattacctcagtgtgggtgcaggctgttttgtagccagtattcttctccttgctgttgctcgatgcattctatttctcatcatttggctcataactggaggaaggcaccacttttggttcttgccaaatctgactgctgatgtgggcttcattgactccttcaggcctctgtacacacatgaatacaaaggaccaaaagcagacttaaagaaagatgagaagtctgaaaccaaaaagcaacagaagtccgacagtgaggaaaagtcagacagtgagaaaaaggaagatgaggaggggaaagtaggaccaggaaatcatggaacagaaggctcggggggagaacggcattcagacacggacagtgacaggagggaagatgatcgatcccagcacagtagtggaaatggaaatgattttgaaatgataacaaaagaggaactggaacagcaaacagatggggattgtgaagaggatgaggaagaggaaaatgatggagaaacacctaaatcttcacatgaaaaatcataatctgactaattttgggactgaatgaataagtacaagaggttggattttctatgttggctgattaccatattgaacacatggcatttgtagcattctttaaatctatctactgagatgtatttgacattcaagcagttatattcggtccttcattttatagaatattggcactattattggtacagtttaaagccattaatatgttttatccatttgataattttacagtaagtaggtctcattcattttgacagttatcaaagatgtactttccacagttaaatttacattaatggcaatttttgatagttttatggctttttactgttagactaatcaaaaataactttaaaaggaacaaagaaactccaacatttcacattatgcatagttatgtagccatttcacagtttctttaagatgtgtaaactcattgtccttgatagtttttatttttcattataaaattataccaggagatttcttttaagattctgagttagcagagttcaaaactattttgtggaaacaagccaactagtaacaatgcagcaacacttctggtttagctaaattatttttccaatgtaggaaatccacactgatttgtacgtctgactgagagaaagatggtcgtctccagcagagaaagtgaacagcatttgttggaaggtgatggctctccctcctccctccccatttcattggcgtaacgtaaagtgtattctgtacataatttacaaataaaacattttattttaattgttacttattatttagatatttctcaacacttaaattcataaaattaagaccatgtaagggtatgtttttagagaaatggaagtttgagtaacccacagaacatctgtgatctttctacagcagcttcagttttgtgccaacattccatgtattttgaatatgagcaaaaactgatcttaagagcagacttaaagtagctttgtacgccttaatgttcattttgatttattttaaatctttacattcagaaatgagatactgtattatcagaccaggaggcattgctgtgaaagataatttcctattctaaaatatcaaatttaaaataaagataatgaaagaaaacataagagaactattggactctaattgctttgaactagttttgcagtttgactttacgtcttatacatcttagttacaagtctttggaaactcttgtttacttatgagcataatcattccttggagttatactaactaataatgaatattaaatgatttttcttcagtc

SEQ ID NO: 1033 - DNA, 3934 bp, Homo sapiens
cctctcaccctttagcccagaactgctttgaatacaccaattgctgtggggcggctcgaggaagagaagacaccagtgcctcagaaactgctcggtcagacggtgatagcgagccacgcattcacagggccactgctgctcacagaagcagtgaggatgatgccaggatgatgtctgcctcgcgcctggctgggactctgatcccagccatggccttcctctcctgcgtgagaccagaaagctgggagccctgcgtggagacttggccctaaaccacacagaagagctggcatgaaacccagagctttcagactccggagcctcagcccttcaccccgattccattgcttcttgctaaatgctgccgttttatcacggaggtggttcctaatattacttatcaatgcatggagctgaatttctacaaaatccccgacaacctccccttctcaaccaagaacctggacctgagctttaatcccctgaggcatttaggcagctatagcttcttcagtttcccagaactgcaggtgctggatttatccaggtgtgaaatccagacaattgaagatggggcatatcagagcctaagccacctctctaccttaatattgacaggaaaccccatccagagtttagccctgggagccttttctggactatcaagtttacagaagctggtggctgtggagacaaatctagcatctctagagaacttccccattggacatctcaaaactttgaaagaacttaatgtggctcacaatcttatccaatctttcaaattacctgagtatttttctaatctgaccaatctagagcacttggacctttccagcaacaagattcaaagtatttattgcacagacttgcgggttctacatcaaatgcccctactcaatctctctttagacctgtccctgaaccctatgaactttatccaaccaggtgcatttaaagaaattaggcttcataagctgactttaagaaataattttgatagtttaaatgtaatgaaaacttgtattcaaggtctggctggtttagaagtccatcgtttggttctgggagaatttagaaatgaaggaaacttggaaaagtttgacaaatctgctctagagggcctgtgcaatttgaccattgaagaattccgattagcatacttagactactacctcgatgatattattgacttatttaattgtttgacaaatgtttcttcattttccctggtgagtgtgactattgaaagggtaaaagacttttcttataatttcggatggcaacatttagaattagttaactgtaaatttggacagtttcccacattgaaactcaaatctctcaaaaggcttactttcacttccaacaaaggtgggaatgctttttcagaagttgatctaccaagccttgagtttctagatctcagtagaaatggcttgagtttcaaaggttgctgttctcaaagtgattttgggacaaccagcctaaagtatttagatctgagcttcaatggtgttattaccatgagttcaaacttcttgggcttagaacaactagaacatctggatttccagcattccaatttgaaacaaatgagtgagttttcagtattcctatcactcagaaacctcatttaccttgacatttctcatactcacaccagagttgctttcaatggcatcttcaatggcttgtccagtctcgaagtcttgaaaatggctggcaattctttccaggaaaacttccttccagatatcttcacagagctgagaaacttgaccttcctggacctctctcagtgtcaactggagcagttgtctccaacagcatttaactcactctccagtcttcaggtactaaatatgagccacaacaacttcttttcattggatacgtttccttataagtgtctgaactccctccaggttcttgattacagtctcaatcacataatgacttccaaaaaacaggaactacagcattttccaagtagtctagctttcttaaatcttactcagaatgactttgcttgtacttgtgaacaccagagtttcctgcaatggatcaaggaccagaggcagctcttggtggaagttgaacgaatggaatgtgcaacaccttcagataagcagggcatgcctgtgctgagtttgaatatcacctgtcagatgaataagaccatcattggtgtgtcggtcctcagtgtgcttgtagtatctgttgtagcagttctggtctataagttctattttcacctgatgcttcttgctggctgcataaagtatggtagaggtgaaaacatctatgatgcctttgttatctactcaagccaggatgaggactgggtaaggaatgagctagtaaagaatttagaagaaggggtgcctccatttcagctctgccttcactacagagactttattcccggtgtggccattgctgccaacatcatccatgaaggtttccataaaagccgaaaggtgattgttgtggtgtcccagcacttcatccagagccgctggtgtatctttgaatatgagattgctcagacctggcagtttctgagcagtcgtgctggtatcatcttcattgtcctgcagaaggtggagaagaccctgctcaggcagcaggtggagctgtaccgccttctcagcaggaacacttacctggagtgggaggacagtgtcctggggcggcacatcttctggagacgactcagaaaagccctgctggatggtaaatcatggaatccagaaggaacagtgggtacaggatgcaattggcaggaagcaacatctatctgaagaggaaaaataaaaacctcctgaggcatttcttgcccagctgggtccaacacttgttcagttaataagtattaaatgctgccacatgtcaggccttatgctaagggtgagtaattccatggtgcactagatatgcagggctgctaatctcaaggagcttccagtgcagagggaataaatgctagactaaaatacagagtcttccaggtgggcatttcaaccaactcagtcaaggaacccatgacaaagaaagtcatttcaactcttacctcatcaagttgaataaagacagagaaaacagaaagagacattgttcttttcctgagtcttttgaatggaaattgtattatgttatagccatcataaaaccattttggtagttttgactgaactgggtgttcactttttcctttttgattgaatacaatttaaattctacttgatgactgcagtcgtcaaggggctcctgatgcaagatgccccttccattttaagtctgtctccttacagaggttaaagtctagtggctaattcctaaggaaacctgattaacacatgctcacaaccatcctggtcattctcgagcatgttctattttttaactaatcacccctgatatatttttatttttatatatccagttttcatttttttacgtcttgcctataagctaatatcataaataaggttgtttaagacgtgcttcaaatatccatattaaccactatttttcaaggaagtatggaaaagtacactctgtcactttgtcactcgatgtcattccaaagttattgcctactaagtaatgactgtcatgaaagcagcattgaaataatttgtttaaagggggcactcttttaaacgggaagaaaatttccgcttcctggtcttatcatggacaatttgggctagaggcaggaaggaagtgggatgacctcaggaggtcaccttttcttgattccagaaacatatgggctgataaacccggggtgacctcatgaaatgagttgcagcagaagtttatttttttcagaacaagtgatgtttgatggacctctgaatctctttagggagacacagatggctgggatccctcccctgtacccttctcactgccaggagaacta

SEQ ID NO: 1034 - DNA, 2036 bp, Homo sapiens
gggactccgcgtctcgctctctgtgttccaatcgcccggtgcggtggtgcagggtctcgggctagtcatggcgtccccgtctcggagactgcagactaaaccagtcattacttgtttcaagagcgttctgctaatctacacttttattttctggatcactggcgttatccttcttgcagttggcatttggggcaaggtgagcctggagaattacttttctcttttaaatgagaaggccaccaatgtccccttcgtgctaattgctactggtaccgtcattattcttttgggcacctttggttgttttgctacctgccgagcttctgcatggatgctaaaactgtatgcaatgtttctgactctcgtttttttggtcgaactggtcgctgccatcgtaggatttgttttcagacatgagattaagaacagctttaagaataattatgagaaggctttgaagcagtataactctacaggagattatagaagccatgcagtagacaagatccaaaatacgttgcattgttgtggtgtcaccgattatagagattggacagatactaattattactcagaaaaaggatttcctaagagttgctgtaaacttgaagattgtactccacagagagatgcagacaaagtaaacaatgaaggttgttttataaaggtgatgaccattatagagtcagaaatgggagtcgttgcaggaatttcctttggagttgcttgcttccaactgattggaatctttctcgcctactgcctctctcgtgccataacaaataaccagtatgagatagtgtaacccaatgtatctgtgggcctattcctctctacctttaaggacatttaggtcccccctgtgaattagaaagttgcttggctggagaactgacagcactacttactgatagaccaaaaaactacaccagtaggttgattcaatcaagatgtatgtagacctaaaactacaccaataggctgattcaatcaagatccgtgctcgcagtgggctgattcaatcaagatgtatgtttgctatgttctaagtccaccttctatcccattcatgttagatcgttgaaacctggtctccctctgaaacactggaagagctagtaaattgtaaatgaagtaatactgtgttcctcttgactgttatttttcttagtagggggcctttggaaggcactgtgaatttgctattttgatgtagtgttaccaagatggaaaattgattcctctgactttgctattgatgtagtgtgatagaaaattcacccctctgaactggctccttcccagtcaaggttatctggtttgattgtataatttgcaccaagaagttaaaatgttttatgactctctgttctgctgacaggcagagagtcacattgtgtaatttaatttcagtcagtcaatagatggcatccctcatcagggttgccagatggtgataacagtgtaaggccttgggtctaaggcatccacgactggaagggactactgatgttctgtgatacatcaggtttcagcacacaacttacatttctttgcctccaaattgaggcatttattatgatgttcatactttccctcttgtttgaaagtttctaattattaaatggtgtcggaattgttgtattttccttaggaattcagtggaacttatcttcattaaatttagctggtaccaggttgatatgacttgtcaatattatggtcaactttaagtcttagttttcgtttgtgcctttgattaataagtataactcttatacaataaatactgctttcctctaaaaagatcgtgtttaaattaacttgtagaaaatctgctggaatggttgttgttttccactgagaaagctaagccctacatttctattcagagtactgtttttagatgtgaaatataagcctgcggccttaactctgtattaaaaaaaatgtttttgtttaaaaaaaactgttcccataggtgcagcaaaccaccatggcacatgtatacctatgtaacaaacctgcacattttg

SEQ ID NO: 1035 - DNA, 1358 bp, Homo sapiens
cttggtcgcacccaccacctgcctgcccactggtcagccttcagggaccctgagcaccgcctggtctctttcctgtggccagcccagaactgaagcgctgcggcatggcgcgcgcctgcctccaggccgtcaagtacctcatgttcgccttcaacctgctcttctggctgggaggctgtggcgtgctgggtgtcggcatctggctggccgccacacaggggagcttcgccacgctgtcctcttccttcccgtccctgtcggctgccaacctgctcatcatcaccggcgcctttgtcatggccatcggcttcgtgggctgcctgggtgccatcaaggagaacaagtgcctcctgctcactttcttcctgctgctgctgctggtgttcctgctggaggccaccatcgccatcctcttcttcgcctacacggacaagattgacaggtatgcccagcaagacctgaagaaaggcttgcacctgtacggcacgcagggcaacgtgggcctcaccaacgcctggagcatcatccagaccgacttccgctgctgtggcgtctccaactacactgactggttcgaggtgtacaacgccacgcgggtacctgactcctgctgcttggagttcagtgagagctgtgggctgcacgcccccggcacctggtggaaggcgccgtgctacgagacggtgaaggtgtggcttcaggagaacctgctggctgtgggcatctttgggctgtgcacggcgctggtgcagatcctgggcctgaccttcgccatgaccatgtactgccaagtggtcaaggcagacacctactgcgcgtaggccgcccaccgcccgcttctctgccaaaaggacgcccacggggagatggccgcacccacagctgcctttcccaccaccagcctcggtgctctgccccatgctgggaggagggagggagggacaggtgcctggagcccccggaaccctgtttctggaaggccctggctcaggtggcttcagggcctccggaccccccctgggaggggtggccacgtgctggctgcggaacccagggcaggggtgggaggggcctccagcactttttatatttacgtattctccaaagcagtgttcacacgggagccagcctgtggcccccagcctcctggaaaacaggttggcgctggaggagccgggtcttggcatcctggaggtggccccactggtcctggtgctccaggcggggccgtggacccctcacctacattccatagtgggcccgtggggctcctggtgcatcttaataaagtgtgagcagcaaaaaaaaaaaaaaaaaaaaaaaaaaaaaaaaaaaaaaaaaaaaaaaaaaaaaaaaaa

SEQ ID NO: 1036 - DNA, 874 bp, Homo sapiens
gggcgggaagacgtgcagcctgggccgtggctgctcactgcgttcggacccagacccgctgcaggcagcagcagcccccgcccgcgcacgagcatggagctctggggggcctacctcctcctctgcctcttctccctcctgacccaggtcaccaccgagccaccaacccagaagcccaagaagattgtaaatgccaagaaagatgttgtgaacacaaagatgtttgaggagctcaagagccgtctggacaccctggcccaggaggtggccctgctgaaggagcagcaggccctgcagacggtctgcctgaaggggaccaaggtgcacatgaaatgctttctggccttcacccagacgaagaccttccacgaggccagcgaggactgcatctcgcgcgggggcaccctgagcacccctcagactggctcggagaacgacgccctgtatgagtacctgcgccagagcgtgggcaacgaggccgagatctggctgggcctcaacgacatggcggccgagggcacctgggtggacatgaccggcgcccgcatcgcctacaagaactgggagactgagatcaccgcgcaacccgatggcggcaagaccgagaactgcgcggtcctgtcaggcgcggccaacggcaagtggttcgacaagcgctgccgcgatcagctgccctacatctgccagttcgggatcgtgtagccggcggggcgggggccgtggggggcctggaggagggcaggagccgcgggaggccgggaggagggtggggaccttgcagcccccatcctctccgtgcgcttggagcctctttttgcaaataaagttggtgcacgttcgcggagaggaaaaaaaaaaaaaaaaaaaaaaaaaa

SEQ ID NO: 1037 - DNA, 1325 bp, Homo sapiens
cagaagcggctagtggcggctgcctgcgtccccaaccccctccgcgcagcgctcgcgacacgcgtgccaggagtgggagcgagcggcggggccagctgcgttctgagcctgggcgcagctgccatctgctctgggaagcaccagggtgtccccgccgccctcagctcgaagtcagccaccatggaggcgcaggcacaaggtttgttggagactgaaccgttgcaaggaacagacgaagatgcagtagccagtgctgacttctctagcatgctctctgaggaggaaaaggaagagttaaaagcagagttagttcagctagaagacgaaattacaacactacgacaagttttgtcagcgaaagaaaggcatctagttgagataaaacaaaaactcggcatgaacctgatgaatgaattaaaacagaacttcagcaaaagctggcatgacatgcagactaccactgcctacaagaaaacacatgaaaccctgagtcacgcagggcaaaaggcaactgcagctttcagcaacgttggaacggccatcagcaagaagttcggagacatgagttactccattcgccattccataagtatgcctgctatgaggaattctcctactttcaaatcatttgaggagagggttgagacaactgtcacaagcctcaagacgaaagtaggcggtacgaaccctaatggaggcagttttgaggaggtcctcagctccacggcccatgccagtgcccagagcttggcaggaggctcccggcggaccaaggaggaggagctgcagtgctaagtccagccagcgtgcagctgcatccagaaaccggccactacccagcccatctctgcctgtgcttatccagataagaagaccaaaatcccgctgggaaaaacccaggccttgacattgttattcaaatggcccctccagaaagtttaatgatttccatttgtatttgtgttgatgatggaccacttgaccatcacatttcagtattcatagatgactgtcacattttaaaatgttcccacttgagcaggtacacaactggtcataattcctgtctgtgtaattcgatgtatatttttccaaacatgtagctattgtttgctttgatttttgcttggcctcctttatgatgtgcatgtccttgaaggctgaatgaacagtccctttcagttcagcagatcaacaggatggagctcttcatgactgtctccagcaataggatgatttactataaatttcatccaactacttgtgatctctctcacctacatcaattatgtatgttaatttcagcaattaaaagaattgatttt

SEQ ID NO: 1038 - DNA, 2285 bp, Homo sapiens
acgcggcgagcttctcccggcgccgcccgctcggctcccatagcgcccgcgacagcggtccggacgccgcccgaacatggactccgccggccaagatatcaacctgaattctcctaacaaaggtctgctgtctgactccatgacggatgttcctgtcgacacaggtgtggctgcccggactcctgctgttgagggtctgacagaggctgaggaggaggagctcagggctgagcttaccaaggtggaagaggaaattgtcactctgcgccaggtcctggcagccaaggagaagcactgtggagagctcaagaggaggctgggcctctccaccctgggggagctgaaacagaacctgtccaggagctggcatgacgtgcaggtctctagcgcctatgtgaaaacttctgagaaacttggagagtggaatgagaaagtgacccagtcagacctctacaagaagactcaggaaactctttcacaggcaggacagaagacttcagctgccctgtccacagtgggctctgccatcagcaggaagcttggagacatgaggaactctgcgaccttcaagtcgtttgaggaccgagttgggaccataaagtctaaggttgtgggtgacagagagaacggcagtgacaacctcccttcctcagcggggagtggtgacaagcccctgtcggatcccgcacctttctaagcctgtggttgcttcacccgctgcagagcacacgcaacccagcctcagcatcacagccgcagctctgttcagcggagcagccagccagggcggatgagcagagccggccctgaggacagtcctgcccatccacgcggagatgtggctgccgcgtttgcatgaatttgaagaacacaggcttgtacacagatgttttacactcacgtttgtagatgaaacagatcactgtgctgtccttcctaggggtgcaggaagtggacagggcggagggtttgaaagaatattgagccaaagcccaggctccctttgggaatcatgttagcccatcagaatgttgaaggattgaagagttctaagcataaaataagtggcattttctgacttcttcctcctcctccttccctgactcacagaaggaatgcaatcacccagcaagtcctacctgttacgcaattttttatctcaaaatgccgaacgagaaaactgtccattttctgagacccccagaaaggaaactgaccctcagcagctgcctgattgttacgcgaatctagctttaacggaagcaaattcattattttttaaatgcagtggacttttcaaaaagtttaaattaggcaaagcagctttagcctcatagaatattatttctttggactcaagctgaaatacaagccttacattgccttatgctttatttctttctaatttttatatgtatatagatgagggttccttaatggttgtgagcattgtgtggaattttacacctggcctgcgtggcagcctcttccagttgaggtgttttatgtcacgcacactccatcccagtgtacaaaacctgcttctcttctcaaccgtggcagctcccgctggctcctatgccctgccctaaagggctcttgagcctctgggaatgggaggggccaagagaaggaaaaccctgtctttagcaccctttaaaagaactgtgccccccttctcagtgctgcctttgcatgggcctggcccggctcacattcgtcagtgactccaaccctcctgcttgctgtacttgggatgaaacgaccccacaggtcaggtggagggtggggcgtgggcatcagccaggattgccgttacagtctttttctcaggagctacaaagatctcttcctgttactaaatagtcgcaccccagcagcctctctcgcacaccggggccctgcatgtcagatggcgtggtctgcagggggagctctgtgccttagtggctcttggcaggacactgagggcctgcctgtggtgtgcccggctctgccactcccgggaggggaagggctgctcagctcaaggtgtcctgttcggtagagcaagtgtcctctgacagccgtgtccccggacagttcagacacccttggggatggcactccacacacgacagagatgcaggggccagggaagcccagcgctcggtgcccttcgtccagggttaaaatcggcctgtggggtgtggtgagaaggcaggttgtgcgggtgttgaccgatgtatcttttccttaaagttattataataatgggtaatttgtcaataaagcattcctttggg

SEQ ID NO: 1039 - DNA, 1044 bp, Homo sapiens
tgctgctctcctcccgctccgtcctcctcgcctgccaccggtgcacccagtccgctcacccagcccagtccgtccggtcctcaccgcctgccggccggcccaccccccaccgcaggccatggacgccatcaagaagaagatgcagatgctgaagctggacaaggagaacgccatcgaccgcgccgagcaggccgaagccgacaagaagcaagctgaggaccgctgcaagcagctggaggaggagcagcaggccctccagaagaagctgaaggggacagaggatgaggtggaaaagtattctgaatccgtgaaggaggcccaggagaaactggagcaggccgagaagaaggccactgatgctgaggcagatgtggcctccctgaaccgccgcattcagctggttgaggaggagctggaccgggcccaggagcgcctggctacagccctgcagaagctggaggaggccgagaaggcggctgatgagagcgagagaggaatgaaggtcatcgaaaaccgggccatgaaggatgaggagaagatggaactgcaggagatgcagctgaaggaggccaagcacatcgctgaggattcagaccgcaaatatgaagaggtggccaggaagctggtgatcctggaaggagagctggagcgctcggaggagagggctgaggtggccgagagccgagccagacagctggaggaggaacttcgaaccatggaccaggccctcaagtccctgatggcctcagaggaggagtattccaccaaagaagataaatatgaagaggagatcaaactgttggaggagaagctgaaggaggctgagacccgagcagagtttgccgagaggtctgtggcaaagttggagaaaaccatcgatgacctagaagagaccttggccagtgccaaggaggagaacgtcgagattcaccagaccttggaccagaccctgctggaactcaacaacctgtgagggccagccccacccccagccaggctatggttgccaccccaacccaataaaactgatgttactagcctctc

SEQ ID NO: 1040 - DNA, 4626 bp, Homo sapiens
gaattcccctccatcctgcgtccatggccaccgctgcgactgaggagcccttcccttttcacggtctcctgccgaagaaggagaccggagccgcctccttcctctgccgctacccggagtatgatgggcggggggtgctcatcgcagtcctggacacgggggtcgacccgggggctccgggcatgcaggttacaactgatggaaaaccaaaaatcgttgatatcattgatacaacaggaagtggcgatgtgaatactgctacagaagtagagccaaaggatggtgagattgttggcctttcaggaagagtgcttaagattcctgcaagctggacaaatccctcaggcaaatatcatattggcataaaaaatggctatgacttctatcctaaggcactcaaggaaaggatacagaaagaacggaaggaaaaaatctgggaccctgttcacagagtggcccttgcagaagcctgtagaaaacaggaagaatttgatgttgccaacaacggctcttctcaagcaaataaactaatcaaggaggaacttcaaagtcaagtggaattgctaaattcttttgagaagaaatacagcgatcctggccctgtatatgactgcttggtatggcatgatggcgaagtctggagagcctgcattgattctaatgaagatggggacttgagtaaatctaccgtgttgagaaactacaaagaagcccaagaatatggctcttttggcacagctgagatgttgaattactccgttaatatatacgatgatagaaacctgctctccattgtgaccagtggaggagctcatgggacacatgtagctagtatagctgctggacactttccagaagaacctgaacggaatggggtagctcctggtgctcaaattctttccatcaagattggtgatacaagactaagcacaatggaaacaggcacaggcctcataagagctatgatagaagttataaatcataagtgtgatcttgtcaactacagttacggagaagcaactcactggccaaattctgggagaatttgtgaagtaattaatgaagcagtatggaagcataatataatttatgtttcaagtgctggaaataatggtccatgcctgtctacagttggttgtccaggtggaactacatcaagtgtgataggtgttggtgcttatgtttctcctgatatgatggttgctgagtattcactgagagagaaattacctgcaaatcaatatacttggtcttctagaggacctagtgctgacggggcccttggtgtgagtatcagtgcgccaggaggagccattgcttctgttcctaactggacactgagagggacgcagctgatgaatggaacatctatgtcttcccccaatgcatgtggaggcattgccctgatcctttcaggtctgaaagctaataacattgactacacagttcattcagtcagaagagctctagaaaacactgcagtgaaggctgacaatatagaagtatttgctcaaggacatggtattattcaggttgataaagcctatgactacctcgttcagaatacatcatttgctaataaattaggttttactgttactgttggaaataaccgtggcatctacctccgagatcctgttcaggtggctgcaccttcagatcatggcgttggcattgaacctgtatttccggagaacacagaaaactctgaaaaaatatcccttcagcttcatttagctctgacttcaaattcatcttgggttcagtgtcccagccatttggaactcatgaatcaatgtagacacataaacatacgtgtggatcccaggggcttaagagaaggattgcattatacagaggtatgtggctatgatatagcatcccctaacgcaggtccgctcttcagagttccgatcactgcagttatagcagcaaaagtaaatgaatcatcacattatgatctagcctttacagatgtacactttaaacctggtcaaattcgaaggcattttattgaggttcctgagggtgcaacatgggctgaagtgacagtgtgttcgtgttcttctgaggtgtcagcaaagtttgttctacatgcagtccagcttgtgaagcaaagagcatatcgaagccatgaattctataagttttgttctcttccagagaaaggaacactgactgaagcttttcctgtcctaggtggaaaagcaattgaattttgcattgctcgttggtgggcaagtctcagtgatgtcaacattgattataccatttctttccatgggatagtgtgtactgctcctcagttaaacattcatgcatcggaaggaatcaaccgctttgatgttcagtcctccttgaaatacgaagatctggctccctgcataactttgaagaactgggtccaaacactgcgcccagtgagtgcaaaaacaaaacctttaggatcaagagatgttttgccaaataaccgtcaactttatgagatggtcctgacatataactttcatcaacccaagagtggggaagtaactccaagctgcccactactttgtgaactattatatgaatctgaatttgacagccaactgtggattatttttgaccagaacaaaagacagatgggttcaggcgatgcctatccacatcagtattctttgaaactggagaaaggagattatacaattcgactacagattcgccatgagcaaatcagtgatttggaacgccttaaagaccttccatttattgtttctcatagattgtctaataccttgagcttagatattcatgaaaatcatagttttgcacttctagggaagaagaaatcaagcaatttgacattaccacccaaatataaccagccattctttgttacttccttacctgatgataaaatacctaaaggggcaggacctggatgctatcttgcaggatccttaacattgtcaaagactgaactaggaaagaaagctgatgtaatccctgttcattactacttaatacctccaccaacaaagactaagaatggcagcaaagataaggaaaaagattcagaaaaagagaaagatttaaaagaagagtttactgaagcattacgagatcttaaaattcagtggatgacaaagctggattctagtgacatttataacgaattgaaagaaacatatcctaattatcttcctctgtacgttgcacgacttcatcaattggatgctgaaaaggaacgaatgaaaagacttaatgaaattgttgatgcggcaaatgctgttatttctcatatagatcaaacagccctagcagtttatattgcaatgaagactgatcccaggcctgatgcagctactataaaaaatgacatggacaaacaaaaatccaccctcgtagatgccctttgtaggaaaggttgtgccctggcagaccatcttcttcacacccaggctcaagacggagccatttccactgatgcagaaggaaaggaggaggaaggagaaagtcctttggattctctggcagaaacattttgggaaactactaaatggactgatctctttgacaataaggttttgacatttgcatataaacatgcattagtaaataaaatgtatgggagaggccttaaatttgcaactaaacttgtggaagaaaaaccaacaaaagaaaactggaaaaattgtattcaactgatgaagttacttggatggacccattgtgcatcttttactgaaaactggctccccatcatgtatcctcccgattattgcgtattctaaaataggaaacaagactttaaattttaaaaaaggaagttttatagtgaatgggtataaaaacaaatttgtggcatttttagtctaatgcatgttttcatccactatccagtactgattattaaaatgacatgtatttatcagagaattcactgacgtgtggcttaatacatgtaaatctagacctctgacatcatggtgttttcttaatgcctcacattgctggcacggggatgtgccctgcctgccagcacctaggacttcgagttgggttgcagcttatgacatgcatgataggttttggaaggtaacttttaactgcaaacctataaagtactattttttattttataaatgaacagggttttaacgtgctcaactttaatttttttcaattgtatgaaggccttaaaaaagctacattaagcgtagctaaaattatttattggactaaaaactaacagaacttcatttccagaattttttttttttttttttttttggcaaatgtttacattcaattaaggggaaaaagtagaaccagcacaaatgagtggcagttgctggagcataactgcttcaataaatcttcatcttggggtaattacaggcaagtcattttcacatcctcttgaggttcagagcatcagaatgaactctatgaatacatgtgtaagtgccagacagctgaatctttatcaggtattgtaaagatacacatatgatatgtttattaaaattgaaataatgtaaaacacatgaataaatttgcaaaaccaagatcacagtacaccatatgcactctggtaccttaatttttttttataaataataaaagtgaatattgaagcttctt

SEQ ID NO: 1041 - DNA, 7497 bp, Homo sapiens
gcgcaagaggatcagggatagcctctgagctcgggttcccagggttcgtagcttccaacggctgcgcgcgcacttcggtcgcgggcggtgaggtgctgttgctgaaacgctgccgctgagggtggactcgatttcccagggtcccgccgcgggagtctccggcgggcgggcgcgcgcgagccaccgagcgaggtgatagaggcggcggcccaggcgtctgggtcctgctggtcttcgcctttcttctccgcttctaccccgtcggccgctgccactggggtccctggccccaccgacatggcggcggtgttgcagcaagtcctggagcgcacggagctgaacaagctgcccaagtctgtccagaacaaacttgaaaagttccttgctgatcagcaatccgagatcgatggcctgaaggggcggcatgagaaatttaaggtggagagcgaacaacagtattttgaaatagaaaagaggttgtcccacagtcaggagagacttgtgaatgaaacccgagagtgtcaaagcttgcggcttgagctagagaaactcaacaatcaactgaaggcactaactgagaaaaacaaagaacttgaaattgctcaggatcgcaatattgccattcagagccaatttacaagaacaaaggaagaattagaagctgagaaaagagacttaattagaaccaatgagagactatctcaagaacttgaatacttaacagaggatgttaaacgtctgaatgaaaaacttaaagaaagcaatacaacaaagggtgaacttcagttaaaattggatgaacttcaagcttctgatgtttctgttaagtatcgagaaaaacgcttggagcaagaaaaggaattgctacatagtcagaatacatggctgaatacagagttgaaaaccaaaactgatgaacttctggctcttggaagagaaaaagggaatgagattctagagcttaaatgtaatcttgaaaataaaaaagaagaggtttctagactggaagaacaaatgaatggcttaaaaacatcaaatgaacatcttcaaaagcatgtggaggatctgttgaccaaattaaaagaggccaaggaacaacaggccagtatggaagagaaattccacaatgaattaaatgcccacataaaactttctaatttgtacaagagtgccgctgatgactcagaagcaaagagcaatgaactaacccgggcagtagaggaactacacaaacttttgaaagaagctggtgaagccaacaaagcaatacaagatcatcttctagaggtggagcaatccaaagatcaaatggaaaaagaaatgcttgagaaaatagggagattggagaaggaattagagaatgcaaatgaccttctttctgccacaaaacgtaaaggagccatattgtctgaagaagagcttgccgccatgtctcctactgcagcagctgtagctaagatagtgaaacctgggatgaaactaactgagctctataatgcttatgtggaaactcaggatcagttgcttttggagaaactagagaacaaaagaattaataagtacctagatgaaatagtgaaagaagtggaagccaaagcaccaattttgaaacgccagcgtgaggaatatgaacgtgcacagaaagctgtagcaagtttatctgttaagcttgaacaagctatgaaggagattcagcgattgcaggaggacactgataaagccaacaagcaatcatctgtacttgagagagataatcgaagaatggaaatacaagtaaaagatctttcacaacagattagagtgcttttgatggaacttgaagaagcaaggggtaaccacgtaattcgtgatgaggaagtaagctctgctgatataagtagttcatctgaggtaatatcacagcatctagtatcttacagaaatattgaagagcttcaacaacaaaatcaacgtctcttagtggcccttagagagcttggggaaaccagagaaagagaagaacaagaaacaacttcatccaaaatcactgagcttcagctcaaacttgagagtgcccttactgaactagaacaactccgcaaatcacgacagcatcaaatgcagcttgttgattccatagttcgtcagcgtgatatgtaccgtattttattgtcacaaacaacaggagttgccattccattacatgcttcaagcttagatgatgtttctcttgcatcaactccaaaacgtccaagtacatcacagactgtttccactcctgctccagtacctgttattgaatcaacagaggctatagaggctaaggctgcccttaaacagttgcaggaaatttttgagaactacaaaaaagaaaaagcagaaaatgaaaaaatacaaaatgagcagcttgagaaacttcaagaacaagttacagatttgcgatcacaaaataccaaaatttctacccagctagattttgcttctaaacgttatgaaatgctgcaagataatgttgaaggatatcgtcgagaaataacatcacttcatgagagaaatcagaaactcactgccacaactcaaaagcaagaacagattatcaatacgatgactcaagatttgagaggagcaaatgagaagctagctgtcgcagaagtaagagcagaaaatttgaagaaggaaaaggaaatgcttaaattgtctgaagttcgtctttctcagcaaagagagtctttgttagctgaacaaagggggcaaaacttactgctaactaatctgcaaacaattcagggaatactggagcgatctgaaacagaaaccaaacaaaggcttagtagccagatagaaaaactggaacatgagatctctcatctaaagaagaagttggaaaatgaggtggaacaaaggcatacacttactagaaatctagatgttcaacttttagatacaaagagacaactggatacagagacaaatcttcatcttaacacaaaagaactattaaaaaatgctcaaaaagaaattgccacattgaaacagcacctcagtaatatggaagtccaagttgcttctcagtcttcacagagaactggtaaaggtcagcctagcaacaaagaagatgtggatgatcttgtgagtcagctaagacagacagaagagcaggtgaatgacttaaaggagagactcaaaacaagtacgagcaatgtggaacaatatcaagcaatggttactagtttagaagaatccctgaacaaggaaaaacaggtgacagaagaagtgcgtaagaatattgaagttcgtttaaaagagtcagctgaatttcagacacagttggaaaagaagttgatggaagtagagaaggaaaaacaagaacttcaggatgataaaagaagagccatagagagcatggaacaacagttatctgaattgaagaaaacactttctagtgttcagaatgaagtacaagaagctcttcagagagcaagcacagctttaagtaatgagcagcaagccagacgtgactgtcaggaacaagctaaaatagctgtggaagctcagaataagtatgagagagaattgatgctgcatgctgctgatgttgaagctctacaagctgcgaaggagcaggtttcaaaaatggcatcagtccgtcagcatttggaagaaacaacacagaaagcagaatcacagttgttggagtgtaaagcatcttgggaggaaagagagagaatgttaaaggatgaagtttccaaatgtgtatgtcgctgtgaagatctggagaaacaaaacagattacttcatgatcagatcgaaaaattaagtgacaaggtcgttgcctctgtgaaggaaggtgtacaaggtccactgaatgtatctctcagtgaagaaggaaaatctcaagaacaaattttggaaattctcagatttatacgacgagaaaaagaaattgctgaaactaggtttgaggtggctcaggttgagagtctgcgttatcgacaaagggttgaacttttagaaagagagctgcaggaactcgaagatagtctaaatgctgaaagggagaaagtccaggtaactgcaaaaacaatggctcagcatgaagaactgatgaagaaaactgaaacaatgaatgtagttatggagaccaataaaatgctaagagaagagaaggagagactagaacaggatctacagcaaatgcaagcaaaggtgaggaaactggagttagatattttacccttacaagaagcaaatgctgagctgagtgagaaaagcggtatgttgcaggcagagaagaagctcttagaagaggatgtcaaacgttggaaagcacgtaaccagcatctagtaagtcaacagaaagatccagatacagaagaatatcggaagctcctttctgaaaaggaagttcatactaagcgtattcaacaattgacagaagaaattggtagacttaaagctgaaattgcaagatcaaatgcatctttgactaacaaccagaacttaattcagagtctgaaggaagatctaaataaagtaagaactgaaaaggaaaccatccagaaggacttagatgccaaaataattgatatccaagaaaaagtcaaaactattactcaagttaagaaaattggacgtaggtacaagactcaatatgaagaacttaaagcacaacaggataaggttatggagacatcggctcagtcctctggagaccatcaggagcagcatgtttcagtccaggaaatgcaggaactcaaagaaacgctcaaccaagctgaaacaaaatcaaaatcacttgaaagtcaagtagagaatctgcagaagacattatctgaaaaagagacagaagcaagaaatctccaggaacagactgtgcaacttcagtctgaactttcacgacttcgtcaggatcttcaagatagaaccacacaggaggagcagctccgacaacagataactgaaaaggaagaaaaaaccagaaaggctattgtagcagcaaagtcaaaaattgcacacttagctggtgtaaaagatcagctaactaaagaaaatgaggagcttaaacaaaggaatggagccttagatcagcagaaagatgaattggatgttcgcattactgcgctaaagtcccaatatgaaggtcgaattagtcgcttggaaagagaactcagggagcatcaagagagacaccttgagcagagagatgagcctcaagaaccttctaataaggtccctgaacagcagagacagatcacattgaaaacaactccagcttctggtgaaagaggaattgccagcacatcagacccaccaacagccaatatcaagccaactcctgttgtgtctactccaagtaaagtgacagctgcagctatggctggaaataagtcaacacccagggctagtatccgcccaatggttacacctgcaactgttacaaatcccactactaccccaacagctacagtgatgcccactacacaagtggaatcacaggaagctatgcagtcagaagggcctgtggaacatgttccagtttttggaagcacaagtggatccgttcgttctactagtcctaatgtccagccttctatctctcaacctattttaactgttcagcaacaaacacaggctacagcttttgtgcaacccactcaacagagtcatcctcagattgagcctgccaatcaagagttatcttcaaacatagtagaggttgttcagagttcaccagttgagcggccttctacttccacagcagtatttggcacagtttcggctacccccagttcttctttgccaaagcgtacacgtgaagaggaagaggatagcaccatagaagcatcagaccaagtctctgatgatacagtggaaatgcctcttccaaagaagttgaaaagtgtcacacctgtaggaactgaggaagaagttatggcagaagaaagtactgatggagaggtagagactcaggtatacaaccaggattctcaagattccattggagaaggagttacccagggagattatacacctatggaagacagtgaagaaacctctcagtctctacaaatagatcttgggccacttcaatcagatcagcagacgacaacttcatcccaggatggtcaaggcaaaggagatgatgtcattgtaattgacagtgatgatgaagaagaggatgaggaagatgatgatgatgatgaagatgacacagggatgggagatgagggtgaagatagtaatgaaggaactggtagtgccgatggcaatgatggttatgaagctgatgatgctgagggtggtgatgggactgatccaggtacagaaacagaagaaagtatgggtggaggtgaaggtaatcacagagctgctgattctcaaaacagtggtgaaggaaatacaggtgctgcagaatcttctttttctcaggaggtttctagagaacaacagccatcatcagcatctgaaagacaggcccctcgagcacctcagtcaccgagacgcccaccacatccacttcccccaagactgaccattcatgccccacctcaggagttgggaccaccagttcagagaattcagatgacccgaaggcagtctgtaggacgtggccttcagttgactccaggaataggtggcatgcaacagcatttttttgatgatgaagacagaacagttccaagtactccaactcttgtggtgccacatcgtactgatggatttgctgaagcaattcattcgccgcaggttgctggtgtccctagattccggtttgggccacctgaagatatgccacaaacaagttctagtcactctgatcttggccagcttgcttctcaaggaggtttaggaatgtatgaaacacccctgttcctagctcatgaagaagagtcaggtggccgaagtgttcccactactccactacaagtagcagccccagtgactgtatttactgagagcaccacctctgatgcttcggaacatgcctctcaatctgttccaatggtgactacatccactggcactttatctacaacaaatgaaacagcaacaggtgatgatggagatgaagtatttgtggaggcagaatctgaaggtattagttcagaagcaggcctagaaattgatagccagcaggaagaagagccggttcaagcatctgatgagtcagatctcccctccaccagccaggatcctccttctagctcatctgtagatactagtagtagtcaaccaaagcctttcagacgagtaagacttcagacaacattgagacaaggtgtccgtggtcgtcagtttaacagacagagaggtgtgagccatgcaatgggagggagaggaggaataaacagaggaaatattaattaaatggtctgtaaacaataacaactgtgaataagattatcaaatctgttttagtgtaatgattgtcaagtttaaaaacatttttatatataaactggtatactcatgtcaatattctttattaataaaatgtttttcagtgtcaaaaaaaaa

SEQ ID NO: 1042 - DNA, 1158 bp, Homo sapiens
ggaattccgtggccaggatgctgagcctgctgctgctggcgctgcccgtcctggcgagccgcgcctacgcggcccctgccccagtccaggccctgcagcaagcgggtatcgtcgggggtcaggaggcccccaggagcaagtggccctggcaggtgagcctgagagtccgcgaccgatactggatgcacttctgcgggggctccctcatccacccccagtgggtgctgaccgcggcgcactgcctgggaccggacgtcaaggatctggccaccctcagggtgcaactgcgggagcagcacctctactaccaggaccagctgctgccagtcagcaggatcatcgtgcacccacagttctacatcatccagactggagcggatatcgccctgctggagctggaggagcccgtgaacatctccagccgcgtccacacggtcatgctgccccctgcctcggagaccttccccccggggatgccgtgctgggtcactggctggggcgatgtggacaatgatgagcccctcccaccgccatttcccctgaagcaggtgaaggtccccataatggaaaaccacatttgtgacgcaaaataccaccttggcgcctacacgggagacgacgtccgcatcatccgtgacgacatgctgtgtgccgggaacagccagagggactcctgcaagggcgactctggagggcccctggtgtgcaaggtgaatggcacctggctacaggcgggcgtggtcagctgggacgagggctgtgcccagcccaaccggcctggcatctacacccgtgtcacctactacttggactggatccaccactatgtccccaaaaagccgtgagtcaggcctgggtgtgccacctgggtcactggaggaccaacccctgctgtccaaaacaccactgcttcctacccaggtggcgactgccccccacaccttccctgccccgtcctgagtgccccttcctgtcctaagccccctgctctcttctgagccccttcccctgtcctgaggacccttccccatcctgagcccccttccctgtcctaagcctgacgcctgcactgggccctccggccctcccctgcccaggcagctggtggtgggcgctaatcctcctgagtgctggacctcattaaagtgcatggaaatc

SEQ ID NO: 1043 - DNA, 1193 bp, Homo sapiens
ataaatggggaggggagagcccactgggtagaaggaacagggagcggccaggatgctgaatctgctgctgctggcgctgcccgtcctggcgagccgcgcctacgcggcccctgccccaggccaggccctgcagcgagtgggcatcgtcgggggtcaggaggcccccaggagcaagtggccctggcaggtgagcctgagagtccacggcccatactggatgcacttctgcgggggctccctcatccacccccagtgggtgctgaccgcagcgcactgcgtgggaccggacgtcaaggatctggccgccctcagggtgcaactgcgggagcagcacctctactaccaggaccagctgctgccggtcagcaggatcatcgtgcacccacagttctacaccgcccagatcggagcggacatcgccctgctggagctggaggagccggtgaacgtctccagccacgtccacacggtcaccctgccccctgcctcagagaccttccccccggggatgccgtgctgggtcactggctggggcgatgtggacaatgatgagcgcctcccaccgccatttcctctgaagcaggtgaaggtccccataatggaaaaccacatttgtgacgcaaaataccaccttggcgcctacacgggagacgacgtccgcatcgtccgtgacgacatgctgtgtgccgggaacacccggagggactcatgccagggcgactccggagggcccctggtgtgcaaggtgaatggcacctggctgcaggcgggcgtggtcagctggggcgagggctgtgcccagcccaaccggcctggcatctacacccgtgtcacctactacttggactggatccaccactatgtccccaaaaagccgtgagtcaggcctgggttggccacctgggtcactggaggaccaacccctgctgtccaaaacaccactgcttcctacccaggtggcgactgccccccacaccttccctgccccgtcctgagtgccccttcctgtcctaagccccctgctctcttctgagccccttcccctgtcctgaggacccttccctatcctgagcccccttccctgtcctaagcctgacgcctgcaccgggccctccagccctcccctgcccagatagctggtggtgggcgctaatcctcctgagtgctggacctcattaaagtgcatggaaatc

SEQ ID NO: 1044 - DNA, 830 bp, Homo sapiens
cccccccgagcgccgctccggctgcaccgcgctcgctccgagtttcaggctcgtgctaagctagcgccgtcgtcgtctcccttcagtcgccatcatgattatctaccgggacctcatcagccacgatgagatgttctccgacatctacaagatccgggagatcgcggacgggttgtgcctggaggtggaggggaagatggtcagtaggacagaaggtaacattgatgactcgctcattggtggaaatgcctccgctgaaggccccgagggcgaaggtaccgaaagcacagtaatcactggtgtcgatattgtcatgaaccatcacctgcaggaaacaagtttcacaaaagaagcctacaagaagtacatcaaagattacatgaaatcaatcaaagggaaacttgaagaacagagaccagaaagagtaaaaccttttatgacaggggctgcagaacaaatcaagcacatccttgctaatttcaaaaactaccagttctttattggtgaaaacatgaatccagatggcatggttgctctattggactaccgtgaggatggtgtgaccccatatatgattttctttaaggatggtttagaaatggaaaaatgttaacaaatgtggcaattattttggatctatcacctgtcatcataactggcttctgcttgtcatccacacaacaccaggacttaagacaaatgggactgatgtcatcttgagctcttcatttattttgactgtgatttatttggagtggaggcattgtttttaagaaaaacatgtcatgtaggttgtctaaaaataaaatgcatttaaactcatttgagag

SEQ ID NO: 1045 - DNA, 2780 bp, Homo sapiens
gtgggcggaccgcgcggctggaggtgtgaggatccgaacccaggggtggggggtggaggcggctcctgcgatcgaaggggacttgagactcaccggccgcacgccatgagggccctgtgggtgctgggcctctgctgcgtcctgctgaccttcgggtcggtcagagctgacgatgaagttgatgtggatggtacagtagaagaggatctgggtaaaagtagagaaggatcaaggacggatgatgaagtagtacagagagaggaagaagctattcagttggatggattaaatgcatcacaaataagagaacttagagagaagtcggaaaagtttgccttccaagccgaagttaacagaatgatgaaacttatcatcaattcattgtataaaaataaagagattttcctgagagaactgatttcaaatgcttctgatgctttagataagataaggctaatatcactgactgatgaaaatgctctttctggaaatgaggaactaacagtcaaaattaagtgtgataaggagaagaacctgctgcatgtcacagacaccggtgtaggaatgaccagagaagagttggttaaaaaccttggtaccatagccaaatctgggacaagcgagtttttaaacaaaatgactgaagcacaggaagatggccagtcaacttctgaattgattggccagtttggtgtcggtttctattccgccttccttgtagcagataaggttattgtcacttcaaaacacaacaacgatacccagcacatctgggagtctgactccaatgaattttctgtaattgctgacccaagaggaaacactctaggacggggaacgacaattacccttgtcttaaaagaagaagcatctgattaccttgaattggatacaattaaaaatctcgtcaaaaaatattcacagttcataaactttcctatttatgtatggagcagcaagactgaaactgttgaggagcccatggaggaagaagaagcagccaaagaagagaaagaagaatctgatgatgaagctgcagtagaggaagaagaagaagaaaagaaaccaaagactaaaaaagttgaaaaaactgtctgggactgggaacttatgaatgatatcaaaccaatatggcagagaccatcaaaagaagtagaagaagatgaatacaaagctttctacaaatcattttcaaaggaaagtgatgaccccatggcttatattcactttactgctgaaggggaagttaccttcaaatcaattttatttgtacccacatctgctccacgtggtctgtttgacgaatatggatctaaaaagagcgattacattaagctctatgtgcgccgtgtattcatcacagacgacttccatgatatgatgcctaaatacctcaattttgtcaagggtgtggtggactcagatgatctccccttgaatgtttcccgcgagactcttcagcaacataaactgcttaaggtgattaggaagaagcttgttcgtaaaacgctggacatgatcaagaagattgctgatgataaatacaatgatactttttggaaagaatttggtaccaacatcaagcttggtgtgattgaagaccactcgaatcgaacacgtcttgctaaacttcttaggttccagtcttctcatcatccaactgacattactagcctagaccagtatgtggaaagaatgaaggaaaaacaagacaaaatctacttcatggctgggtccagcagaaaagaggctgaatcttctccatttgttgagcgacttctgaaaaagggctatgaagttatttacctcacagaacctgtggatgaatactgtattcaggcccttcccgaatttgatgggaagaggttccagaatgttgccaaggaaggagtgaagttcgatgaaagtgagaaaactaaggagagtcgtgaagcagttgagaaagaatttgagcctctgctgaattggatgaaagataaagcccttaaggacaagattgaaaaggctgtggtgtctcagcgcctgacagaatctccgtgtgctttggtggccagccagtacggatggtctggcaacatggagagaatcatgaaagcacaagcgtaccaaacgggcaaggacatctctacaaattactatgcgagtcagaagaaaacatttgaaattaatcccagacacccgctgatcagagacatgcttcgacgaattaaggaagatgaagatgataaaacagttttggatcttgctgtggttttgtttgaaacagcaacgcttcggtcagggtatcttttaccagacactaaagcatatggagatagaatagaaagaatgcttcgcctcagtttgaacattgaccctgatgcaaaggtggaagaagagcccgaagaagaacctgaagagacagcagaagacacaacagaagacacagagcaagacgaagatgaagaaatggatgtgggaacagatgaagaagaagaaacagcaaaggaatctacagctgaaaaagatgaattgtaaattatactctcaccatttggatcctgtgtggagagggaatgtgaaatttacatcatttctttttgggagagacttgttttggatgccccctaatccccttctcccctgcactgtaaaatgtgggattatgggtcacaggaaaaagtgggttttttagttgaattttttttaacattcctcatgaatgtaaatttgtactatttaactgactattcttgatgtaaaatcttgtcatgtgtataaaaataaaaaagatcccaaat

SEQ ID NO: 1046 - DNA, 1312 bp, Homo sapiens
ctagaattcagcggccgctgaattctagaacccaggtgcaactgacatgggtgaaccccagggatccatgcggattctagtgacagggggctctgggctggtaggcaaagccatccagaaggtggtagcagatggagctggacttcctggagaggactgggtgtttgtctcctctaaagacgccgatctcacggatacagcacagacccgcgccctgtttgagaaggtccaacccacacacgtcatccatcttgctgcaatggtggggggcctgttccggaatatcaaatacaatttggacttctggaggaaaaacgtgcacatgaacgacaacgtcctgcactcggcctttgaggtgggggcccgcaaggtggtgtcctgcctgtccacctgtatcttccctgacaagacgacctacccgatagatgagaccatgatccacaatgggcctccccacaacagcaattttgggtactcgtatgccaagaggatgatcgacgtgcagaacagggcctacttccagcagtacggctgcaccttcaccgctgtcatccccaccaacgttttcgggccccacgacaacttcaacatcgaggatggccacgtgctgcctggcctcatccacaaggtgcacctggccaagagcagcggctcggccctgacggtgtggggtacagggaatccgcggaggcagttcatatactcgctggacctggcccagctctttatctgggtcctgcgggagtacaatgaagtggagcccatcatcctctccgtgggcgaggaagatgaggtctccatcaaggaggcagccgaggcggtggtggaggccatggacttccatggggaagtcacctttgatacaaccaagtcggatgggcagtttaagaagacagccagtaacagcaagctgaggacctacctgcccgacttccggttcacacccttcaagcaggcggtgaaggagacctgtgcttggttcactgacaactacgagcaggcccggaagtgaagctggaagacaggatcaggtgccagcggaccatcggctggcagagcccagcggccaccacccgtcaaccctgccaggagctgagggcaccacccagcaacctgggcctgcattccatccgctctgcagccccaagcatctttccagtggggcccccattcacgttggtcctcagggaaaccagggtccggggcaggcccggcgctttgctccccacaccagccccctgcgcgtgtccactctgatcctgcatcccactccctgggagccaataaagtgcattttcacagaaaaaaaaaa

SEQ ID NO: 1047 - DNA, 8992 bp, Homo sapiens
ctgaactagttgccagtgatcttgaaacgtgacagtaaccaagagataaataggtgacaatgacaggaaaattagatgtagtaaaagagagtgtttgagagcagaagctatggcaactaaagactggatttgaatccttcctagcttggtgacatgagcaaattacttgatttaagtgagcattttcccatctgtacagtggagataacgataattgtgcctgctaagaagaattgctgtgaagattagtgaaataatgcatgtaaaacatttggtacagtatgtgacacatagtacaaatagtttgctaggaagattgttattattcttcacttgtgatattgtgaagttttcatacagcaaattggacatcatgagatggattgattaaataaatagatttgaacttcaaggactggtagtgttcttgctttggaaagaagaaacttggtttatcctaataatagtaggataataatggtgaagtgataggtacaagtaatagtgtttatgatgcgctggtgatgataggaaaagaaagccattatatgggcaagagctagaagtaataaaatggtgcatttttcagtgatgtttggcctatgtagctattctctgataactataaaaatccttattattgaagattcttcaggaaaaaaaaacccttagtctgaaactttagcaccaatcccccttgccccccattgaaatacgtatttttaaaacatggcttttgataatgtgagggttttttcctttttgcgatttagcagtgctgattgtgtattgcagtagttgtgagagcattagaagcagcagtcgataggaggatggaaggtctggatgccgccttggggagttaggagattggcagacttaccctgtaccactctagccctactcctttgcccaagacagaaacacactgagatggataggagaatatgagcagttgataggaaagttctcagtggagtcaggatttaggttaggccaggagattgagaatataacagtttgtgtatgatgaaatggcatatttcacagaatgcagtaaaagcaggtagggtacaagtgcagcaacaggaagatgtcttttcttcattcagcaaacacttatttgagagcttaccatgtgctaggcacatacaaagataaataagatgcccttgatgatcctctatttaaaggagacatgtaaacaggttaacttagagtagagatggtgaatatgtgaacctgaggaaaggaagaaatagattaaattatctggagagagaggaaaagtcagcagaatggggacgagaatctttcggagctcagtgttctgataggagttatttccttgggcataggttccaagtatttttctaatataccatagaagccaggaaaactttcttctgttatctcaaatgatttaattactgacttgagtttgtgttgtctccttagacttgtgcaccatggacaattttgctgagggagatttcactgtggcggattatgccttgttagaagattgccctcacgtggatgattgtgtctttgctgctgaatttatgagcaatgattatgttcgtgtgactcagctttactgtgatggggtgggtgtgcaatataaagattatatccaaagtgagaggaatttggaatttgacatctgcagtatatggtgtagtaaaccaatttctgtcctgcaagattattgcgatgccattaaaataaacatcttctggccacttctgtttcaacatcaaaacagttccgtaatatcacgattgcatccctgtgtggacgccaacaattcacgtgcttctgagataaatttgaagaaactacaacatcttgagttgatggaagatattgtggatttggcaaagaaagttgctaatgattcattccttattggaggcttattgagaattggttgtaaaatagaaaataaaatcttggcaatggaagaagctctgaattggataaaatatgcaggcgatgtaacaattctaactaaattaggatcaattgacaattgttggcctatgttaagtattttctttactgaatgaaggagaactaatgaaaatgaaaggaaatgaagagttttccaaagaaagatttgatatagctattatctattacaccagagccattgaatatagacctgaaaactaccttctttatggtaaccgagctctttgttttcttcgtactggacagtttagaaatgcactcggtgatggaaagagagccactattctgaagaacacttggccaaagggtcattatcgttattgtgatgctctttctatgctgggggaatatgactgggccctgcaagcaaacataaaagctcaaaaactctgtaaaaatgaccctgagggaatcaaggatctaattcagcagcatgtaaagttacaaaaacaaatagaagacctacaaggtcgaacagcaaataaggatccaattaaagccttttatgaaaacagggcctacacacctaggagtttatcagcacctatatttactacttcacttaactttgtggagaaggaaagagatttcagaaaaattaatcacgaaatggccaacggtggtaatcagaatctaaaggtggcggatgaggcgttgaaggtagatgattgtgactgtcatcctgaattttcaccaccatcaagtcagcctccaaaacataaaggaaaacaaaaatctcgaaacaatgaatcagaaaagttcagttctagttcaccattgactttaccagcagatttgaagaacatcttggagaaacagttttctaaatcttccagagctgcacaccaggattttgctaatataatgaaaatgctgagaagcttaattcaagatggctatatggccttattggagcagcgttgccgcagcgctgcacaggcctttacagagttgctgaacggtttagatcctcaaaaaataaagcaattgaacctggccatgattaactatgttttggtcgtctatggacttgccatttctctccttggaataggacagcctgaggaattatctgaagccgaaaaccagtttaagaggattattgaacactaccccagtgagggccttgattgcttggcctactgtggaattggaaaagtgtatttgaaaaaaaacagatttctagaagctctcaatcactttgagaaagcaagaaccttgatttatcgtcttcctggagtgttaacttggcccacgagtaatgtgattattgaagagtctcagccacaaaaaataaagatgctgttagagaaatttgttgaagaatgcaagttccctccagtgccagatgccatttgttgctatcagaagtgccatggatattctaagatccagatatacataactgatccagactttaagggttttatacgcatcagctgttgccagtactgtaaaatagaatttcacatgaattgctggaagaagttaaaaactacaacctttaatgataaaattgacaaggattttctacaaggaatatgtcttacccctgactgtgaaggtgtcatttctaagattatcatcttcagcagtggtggtgaagttaaatgtgaatttgaacacaaggtcataaaagaaaaggttcctccaagacctattctgaaacagaaatgttctagcctagagaaactaagactgaaagaagacaaaaaattgaagagaaagatccaaaaaaaagaagcaaaaaagttagcacaagaaagaatggaggaggacttaagagaaagtaatccacccaaaaatgaagagcagaaagaaactgtagacaatgttcagcgttgtcagttccttgatgacagaattctacagtgtataaagcagtatgctgacaagattaaatccggcatacagaatacagccatgcttctcaaagaattgctttcttggaaagttttgagcacagaagactatacaacctgtttttctagcagaaattttctaaatgaagcagtggactatgttattcgccacttgattcaagaaaataacagagtaaagacaagaatatttctgcatgttttgagtgagcttaaagaagtggagcccaaattagccgcctggatccaaaaacttaatagctttggcttagatgccacaggaactttcttttctcgttatggagcatctcttaaactgcttgattttagtatcatgactttcctctggaatgagaaatatggtcacaaactagactctatagaaggaaagcaacttgattatttctctgagccagcatcattgaaggaagcccgttgtttaatatggctgctagaagaacacagagacaagttcccagcattgcatagtgctttagatgaattctttgatataatggacagccgctgtactgtgttaaggaaacaagatagtggtgaagcaccgtttagttcaaccaaggtgaaaaacaaaagcaagaaaaagaagccaaaggattcaaagcctatgttagttgggtctggaacaacttcagtaacttcaaataatgagatcatcacttcaagtgaagaccatagcaatcgaaattcagattctgcaggcccatttgcagtgcctgaccatcttcggcaagatgtagaagaattcgaagctctctatgaccaacacagtaacgaatatgttgtccgcaataagaagctatgggacatgaacccaaaacaaaaatgttcaactctatatgattacttctctcagtttttggaggaacatggtcccttggacatgagtaacaagatgttctctgcagaatatgagtttttcccagaagaaactcgacagatactagaaaaagcaggaggtttaaaaccttttctcttgggatgccctcgttttgttgtgattgacaactgtattgcactgaagaaggttgcatcacggctcaagaaaaaaaggaagaagaaaaacattaaaacaaaagtagaagaaatttcaaaagcaggggagtatgtacgagttaaactacaactgaatccagctgctagggaatttaaaccagatgtaaagtctaaaccagtgtcagattcatcttcagcaccagcttttgaaaatgtgaaacccaaacctgtgtctgcaaattctcccaagccagcttgtgaagatgtgaaggccaaaccagtatccgacaattcttctagacaagtttctgaggatgggcaacccaaaggggtctcttctaattctcctaaaccaggctctgaggatgcaaattacaagcgagtctcctgtaattcccccaaaccggttcttgaggatgtgaaaccaacttattgggctcaatcccatttggtcacaggatactgtacgtatcttcctttccagagatttgatatcacccagacaccgccagcatacataaacgtgttaccaggtttgccccagtacaccagcatatatacacccttggccagcctttctcctgaatatcagctaccaagatcagtaccagtggtgccgtcttttgtagccaatgacagagcagataaaaatgctgctgcctattttgagggtcatcatttgaatgctgagaatgttgctggtcaccagattgcctctgaaacacagatccttgagggctctttgggaatatctgtaaagtcacactgcagcacaggtgatgctcatacagtcctgagtgagtctaacagaaatgatgagcactgtggaaattctaacaacaaatgtgaagtaattccagaaagcaccagtgcagtaacaaacattccacacgtgcagatggttgccatacaggtatcttggaacataatacaccaagaagtcaatactgagccatataatccttttgaggaacgacaaggggaaatttcacggattgaaaaggagcaccaagtattacaagaccaacttcaagaagtgtatgaaaattatgagcagataaaacttaagggcttagaagagaccagggacctggaagagaagttgaaaaggcacttagaagaaaacaagatctcaaagacggaattagattggttccttcaagatttggaaagagaaattaaaaaatggcaacaggaaaaaaaagaaatccaagaaagactaaaatcactgaagaagaaaattaaaaaggtttcaaatgccagtgaaatgtatacccagaaaaatgatggaaaggaaaaggaacatgaattacatctggatcagtcccttgaaatcagcaacacacttacaaatgagaaaatgaaaatagaagagtatataaagaaagggaaagaggattatgaagagagtcatcagagagctgtggctgcagaggtatccgtacttgaaaactggaaggagagtgaagtgtataagctacagatcatggagtcacaagcagaagcctttctgaagaagctggggctgattagccgtgatcctgcagcatatcctgacatggagtctgatatacgttcatgggaattgtttctttctaatgttacaaaagaaattgagaaagcaaagtctcagtttgaagaacaaattaaggcaattaaaaatggttctcggctcagtgaactttctaaagtgcagatttctgagctttcatttcctgcctgtaacacggttcatcccgagttactccctgagtcttcaggccacgatggccaagggcttgtgacttctgcaagcgacgtgactggaaaccacgcagcacttcacagggatcctagtgtgttctctgctggtgattccccaggggaggctccttctgcgctgttgccagggccaccccctggtcagcctgaagccactcagctgacagggccaaaacgggctggccaggcagctctgtcagaacgaagccctgtggctgatcggaagcagcctgttcctccaggacgtgctgcgcgttcaagccagtctccaaaaaagccgttcaatagtattattgagcacctgtcagtggtattcccatgttacaacagcactgagcttgctggttttattaaaaaagtgcgaagcaaaaacaagaactcactctcaggattgagtattgatgaaattgtccaaagagtgacagaacacattctagatgaacagaaaaagaaaaagccaaacccaggaaaggacaagaggacttatgagcccagctctgccacccccgtgaccaggtcctcccagggctcaccctcggtggttgttgcaccatcacccaaaaccaaggggcagaaagcagaagatgtccctgtgaggattgcactgggtgcaagttcctgtgaaatatgccacgaggtgttcaaatcaaaaaacgtgcgtgtgctcaaatgtgggcacaagtatcacaaagggtgctttaagcagtggcttaaagggcagagcgcttgcccggcctgccagggtcgtgatctcctgacagaagagtcaccttctggaagaggctggcccagtcagaatcaggagctgccttcctgctcttctaggtagtcacacttcactaaagtgtcatccaccagtgtgttgaatccgaagaatgacaattttctaccactggtgtaaaaaacaaacatttgaagacccttgtgcattgtgtgtcacaaagctaaatacatggaaatcgttaatatcgctgatattaagtaatttccccactctgagtgaatactttgatgattgccaacagtggctaataaaatgacggctaccacactcatgggtcactggggctgcgcagggctctttgaggtgggtggcttcttttggaaagtactatgaacgtctcgaagcagtattctagtgataagaattcttaacatagccaagcgccccacgtttgttccccacgtttgttccccttttctgtttgaaaaacctgttctggtagctccacaagagagatgatactgactttttaaattttttacaagagtctgtattcctgatatgcctatatttttcctcaaagattctgcattttaaggatgggcataagcaaactatattttaataatttatagttaatgttaaaatattggctgatttagaccaaaagattcaaatctcctctttgtgaaatcccatctgcatttgattttttattattttatgttcccccgttagattgttttaagtgtttgcttttcatcttttatagatgtaatctgattttcaaaaatcattaacactttttaattagtatcgactaagactttttccccctggaatcgaggctgtgtgtccgtcatcccagcccccggttggagcctgctctttgaactccgctgccttccttagcagcttctgtcctcttctgtgagtcagtcagcgagtgcttgggatccgcatccagccgtgctgagcacacaacaggctgtgtgtggaaatggccaccaccattctccttccccaccccaccacaaaaagagaagctgtgtctttagacaaccctgaggtatctgtgttacaatcgttctgtgtttgatatttgtgtaaagtatgcatgcagtcttgtactgtgacctaagaacaaaactgtaactgcattagaaaccatgaaaaaattagatattgttttgtgacttttagacagtggtaaatatagaaccatgaattctggtcacattccatttctctccaacatgaaggatcaaaaaatgtttttcaatgtgttctttgttccactggaaacttagagtcatgagtttatgagctgatttggtcaccttcctctgcctttgttcactgtgagttctgatgtcttagtgacttagttcttagaagctcacgccttagtttgaaacagattctccacggtggtccccaaaacactgtctgcatatccataagaattgagcgctatgggtgttaacgtgcatgaggatcagtttgcagcagcaagtacaaaaggagaagaggaacatccgttgaatgagtgtgttttgtacataacttcagatacttgtgaacatgccttatatttgtccaacaactgtcagaataaagaacattctaaaatgag

SEQ ID NO: 1048 - DNA, 501 bp, Homo sapiens
gaattcgctttggatccatttccatcggtccttacagccgctcgtcagactccagcagccaagatggtgaagcagatcgagagcaagactgcttttcaggaagccttggacgctgcaggtgataaacttgtagtagttgacttctcagccacgtggtgtgggccttgcaaaatgatcaaccctttctttcattccctctctgaaaagtattccaacgtgatattccttgaagtagatgtggatgactgtcaggatgttgcttcagagtgtgaagtcaaatgcacgccaacattccagttttttaagaagggacaaaaggtgggtgaattttctggagccaataaggaaaagcttgaagccaccattaatgaattagtctaatcatgttttctgaaaacataaccagccattggctatttaaacttgtatttttttatttacaaaatataaatatgaagacataaccagttgccatctgcgtgacaataaacattatgctaa

SEQ ID NO: 1049 - DNA, 3419 bp, Homo sapiens
tggcggcggcgcgacccggggaaccggcattgatgtccagctcgccgctgtccaagaaacgtcgcgtgtccgggcctgatccaaagccgggttctaactgctcccctgcccagtccgtgttgtccgaagtgccctcggtgccaaccaacggaatggccaagaacggcagtgaagcagacatagacgagggcctttactcccggcagctgtatgtgttgggccatgaggcaatgaagcggctccagacatccagtgtcctggtatcaggcctgcggggcctgggcgtggagatcgctaagaacatcatccttggtggggtcaaggctgttaccctacatgaccagggcactgcccagtgggctgatctttcctcccagttctacctgcgggaggaggacatcggtaaaaaccgggccgaggtatcacagccccgcctcgctgagctcaacagctatgtgcctgtcactgcctacactggacccctcgttgaggacttccttagtggtttccaggtggtggtgctcaccaacacccccctggaggaccagctgcgagtgggtgagttctgtcacaaccgtggcatcaagctggtggtggcaggcacgcggggcctgtttgggcagctcttctgtgactttggagaggaaatgatcctcacagattccaatggggagcagccactcagtgctatggtttctatggttaccaaggacaaccccggtgtggttacctgcctggatgaggcccgacacgggtttgagagcggggactttgtctccttttcagaagtacagggcatggttgaactcaacggaaatcagcccatggagatcaaagtcctgggtccttatacctttagcatctgtgacacctccaacttctccgactacatccgtggaggcatcgtcagtcaggtcaaagtacctaagaagattagctttaaatccttggtggcctcactggcagaacctgactttgtggtgacggacttcgccaagttttctcgccctgcccagctgcacattggcttccaggccctgcaccagttctgtgctcagcatggccggccacctcggccccgcaatgaggaggatgcagcagaactggtagccttagcacaggctgtgaatgctcgagccctgccagcagtgcagcaaaataacctggacgaggacctcatccggaagctggcatatgtggctgctggggatctggcacccataaacgccttcattgggggcctggctgcccaggaagtcatgaaggcctgctccgggaagttcatgcccatcatgcagtggctatactttgatgcccttgagtgtctccctcaggacaaagaggtcctcacagaggacaagtgcctccagcgccagaaccgttatgacgggcaagtggctgtgtttggctcagacctgcaagagaagctgggcaagcagaagtatttcctggtgggtgcgggggccattggctgtgagctgctcaagaactttgccatgattgggctgggctgcggggagggtggagaaatcatcgttacagacatggacaccattgagaagtcaaatctgaatcgacagtttcttttccggccctgggatgtcacgaagttaaagtctgacacggctgctgcagctgtgcgccaaatgaatccacatatccgggtgacaagccaccagaaccgtgtgggtcctgacacggagcgcatctatgatgacgattttttccaaaacctagatggcgtggccaatgccctggacaacgtggatgcccgcatgtacatggaccgccgctgtgtctactaccggaagccactgctggagtcaggcacactgggcaccaaaggcaatgtgcaggtggtgatccccttcctgacagagtcgtacagttccagccaggacccacctgagaagtccatccccatctgtaccctgaagaacttccctaatgccatcgagcacaccctgcagtgggctcgggatgagtttgaaggcctcttcaagcagccagcagaaaatgtcaaccagtacctcacagaccccaagtttgtggagcgaacactgcggctggcaggcactcagcccttggaggtgctggaggctgtgcagcgcagcctggtgctgcagcgaccacagacctgggctgactgcgtgacctgggcctgccaccactggcacacccagtactcgaacaacatccggcagctgctgcacaacttccctcctgaccagctcacaagctcaggagcgccgttctggtctgggcccaaacgctgtccacacccgctcacctttgatgtcaacaatcccctgcatctggactatgtgatggctgctgccaacctgtttgcccagacctacgggctgacaggctctcaggaccgagctgctgtggccacattcctgcagtctgtgcaggtccccgaattcacccccaagtctggcgtcaagatccatgtttctgaccaggagctgcagagcgccaatgcctctgttgatgacagtcgtctagaggagctcaaagccactctgcccagcccagacaagctccctggattcaagatgtaccccattgactttgagaaggatgatgacagcaactttcatatggatttcatcgtggctgcatccaacctccgggcagaaaactatgacattccttctgcagaccggcacaagagcaagctgattgcagggaagatcatcccagccattgccacgaccacagcagccgtggttggccttgtgtgtctggagctgtacaaggttgtgcaggggcaccgacagcttgactcctacaagaatggtttcctcaacttggccctgcctttctttggtttctctgaaccccttgccgcaccacgtcaccagtactataaccaagagtggacattgtgggatcgctttgaggtacaagggctgcagcctaatggtgaggagatgaccctcaaacagttcctcgactattttaagacagagcacaaattagagatcaccatgctgtcccagggcgtgtccatgctctattccttcttcatgccagctgccaagctcaaggaacggttggatcagccgatgacagagattgtgagccgtgtgtcgaagcgaaagctgggccgccacgtgcgggcgctggtgcttgagctgtgctgtaacgacgagagcggcgaggatgtcgaggttccctatgtccgatacaccatccgctgaccccgtctgctcctctaggctggccccttgtccacccctctccacaccccttccagcccagggttcccatttggcttctggcagtggcccaactagccaagtctggtgttccctcatcatccccctacctgaacccctcttgccactgccttctaccttgtttgaaacctgaatcctaataaagaattaataactcccaaaaaaaaaaaa

SEQ ID NO: 1050 - DNA, 1743 bp, Homo sapiens
gcggttcctctgggtgcttccgcctccccttctcctgcttctccagcctcttcggcctcctcgcccgccgcgggaacccgagaccccagtgtatgccccacccctgaccccgctcgcgacatgtccaccccggctcggcggcgcctcatgcgggacttcaagaggttgcaggaggatcctccagccggagtcagcggggctccgtccgagaacaacataatggtgtggaacgcggtcattttcgggcctgaagggaccccgtttggggatggaacatttaaacttacaatagaattcactgaagaatatccaaataaaccacctacagttagatttgtctctaagatgttccatccaaatgtctatgcagatggtagtatatgtctggacatacttcagaaccgttggagtccaacctatgatgtgtcttccattctaacatccatacagtctctgttggatgaacccaatcccaatagtccagcaaacagccaggctgctcagctgtaccaggagaacaaacgggaatatgaaaagcgtgtttctgcaatagtagaacaaagctggcgtgattgttgaccccgggtacagtttaaagaagctggccataagaaaaatatatattgatgtgtttgtcacctccctactcctgtcattacatttactttattaaaagcaaaataactgttgtgctgtttccatcttccttgccaagttttcctaccccttctaccctctccttaaacatcagaaaacaccctctatgaaatcaaatgtactgtacctgggttacttgcaaaaattactaatgcttcagtttttctgttgtatttcatttccagttttcaggcagttatttttattattgtactttaagcttttaagatgaattgttatacaagaggtgcttatgcttagcttgatgaccaggatgttatttttaacaaaatgattgctgaagtgtttcatcctggctggtccttcacttgtgttggatttagaagtgaatgtgtttggaatatggcctacagagaatagaaacaaatccatgtaaacaattttgaaggaggcatgggagctaaaaatcctgtgatactaagatctcagtcatatgaattacaacgtagtatttactggcaagaaggagaaagttgaaggactcagctaaaggagtacagcaattgtagtaactgacacatcctctctttgcaagctgctgactgggcacactcatgccaagtttcagaattattggtcttctgggtttttgctttttaaaagaggtgtgggagcagaggaatggaaacaatcgtgagtttttgagctagggaaagttggagctcctttaatctttttaaaggatcagtgctgccctaagtgaataaactcaattgtccatctttattttagagttttaatgaattcaaggaagggagcatagcatatctgtggcaaactattttccactcaaatcctgagttattgctgcatgctttaatttcttccctttcagcatctgagaaccttaaagccaatgtctgcgatctttttttggatatttatacttttagatatatagtacctttaagtagcagtatgggacaaggcttgtaaatgttttgtctaatgttctattgtcaccttttatgcatttatcacttccaaatctaactttgcacaagtaacccatgtaaaaaaaaatgtacatttttcaaaagttgtaaataaaaataaccttaaaaa

SEQ ID NO: 1051 - DNA, 2591 bp, Homo sapiens
cgtccctctttctccaccccgccgagcctaaactagtgacggggagggagacgggatagtgtttctgtttccgtggtctttgaatccacaacctctagtctgaacacagagaacacaaatttgtcgattacttcaggaagcccagggggaaccgcgccccgctgaagggctcggggaaggcgcgctcccgcgtcccgccccctcctcccccagcactcacactgtggtagcggcggagggcggagggatccggaggcggcggagggagacgtcattgcagggttgtttgtcagtctcggcggcggcggcggcggcggcggcggcggcggcgatccacagtgattcggccgcgccgccgggggtgggggggctgcgcgggacttttttttttttcagactgaccgcggggcagctgcggagcatgtcgaccccggcccggaggaggctcatgcgggatttcaagcggttacaagaggacccacctgtgggtgtcagtggcgcaccatctgaaaacaacatcatgcagtggaatgcagttatatttggaccagaagggacaccttttgaagatggtacttttaaactagtaatagaattttctgaagaatatccaaataaaccaccaactgttaggtttttatccaaaatgtttcatccaaatgtgtatgctgatggtagcatatgtttagatatccttcagaatcgatggagtccaacatatgatgtatcttctatcttaacatcaattcagtctctgctggatgaaccgaatcctaacagtccagccaatagccaggcagcacagctttatcaggaaaacaaacgagaatatgagaaaagagtttcggccattgttgaacaaagctggaatgattcataatagacaactggtctgttaatctttttcatcattgttgtgtataatttacctctcattagaaaggctaacaaattttaagtgccacaggttttaaggattctgcagaaaaaaaagaaaaaagtccttcagtttagaacctacaaaagcttgtgtatcttgattaatgtactttttattgcatggtgtgaactaagttattgctgcataaatttgtaatatatcctgtttgtatttttttccaagtgtataatgttggtgtggagttttcatgacagaatatacacattttgtaaatctgtacttttttcaaatattgaatgccttatttttgaattctttagatttttaaattggagaaaagcacttaaagttttttatatatgaatattacatgtaaagctgttaaaatacataacttcagtgcaagagactttgtcacttatttccttatgtgtgtaggaggggttaataagtctctagctctccatctattgatagtttcatttacaatttcaaaagaacattcttatattttatcaaggaagtcttcaaatttgattctaaatagcgattataatctccaactttattttgaatgtacctctattagtttcaattgagtaattctagacataactggtttgactctgtccaactctgtatttaggccatttgttacagtttcttcatgcattacttactgttaaaactgtaccttttgcgatttcacagttggcacttctgccatgagcagagaactgatgcgacttgttttgctgcttggtagcactttaaaaaattttttgattaatgaagaaagtaaaaccataaacattgccaaaaattcatgccccagtattagcaatgaattagttgaattggtttgagaaaggcacatattggagggaaatcttggtgtaacttaaatatttgaaaattacctttaatgcaatgcatatctgtttattctgggaaatgttttaatgccagggcctgctgagttgcttcttcttgtggagattttttttttaatctcctgagttgtataaaagttgtactgcatcttagtttactggataaatttaaaacacagtattgtagaaagctaatacaaaactatcctatgccttcaaatagtatagaaaatggaaaatatacaagtaaattctgttgaaccacctgtgtagtctctctagtagttaaaacagctattttagtaaccccaagagtttcttctcatatccataaaattggattacagtatggcaatatctacagcttctattcattatgcaacgtttaacattgattggataaatgcttataggctgggccaggtggctcccacctgtagtcccagcactttgggaggcaaaggcgggaggatcacttgaggccaggactttgagaccagccagggcaacataataagacttttctctactttaaattttttaaaaaattagttgggcatagtggcacttgcctgtagtctcagctacttaggaggctgaggtggcagaatagcttatgcctaggaggttgaggctgcagtgagctgtgattatgccattgcactccagcctgggtgacagagcaataccctgtctttaaaaataaaagctattacttggcaaaaaattccgcactatataattcgcacacattaattagggtttatgtaccatacaaaaaaaaattaattagggct

SEQ ID NO: 1052 - DNA, 1450 bp, Homo sapiens
cacgaagttctcgcgagagtcgtctcctcgataccaagcgcctgtgtctggcagagctggtgtgagacgagacaatcctgccccgccgccgggataatcaagagttttggccggacctttgagcatacaccgagagagtgaggagccagacgacaagcacacactatggcgctgaaacggattaataaggaacttagtgatttggcccgtgaccctccagcacaatgttctgcaggtccagttggggatgatatgtttcattggcaagccacaattatgggacctaatgacagcccatatcaaggcggtgtattctttttgacaattcattttcctacagactaccccttcaaaccacctaaggttgcatttacaacaagaatttatcatccaaatattaacagtaatggcagcatttgtctcgatattctaagatcacagtggtcgcctgctttaacaatttctaaagttcttttatccatttgttcactgctatgtgatccaaacccagatgaccccctagtgccagagattgcacggatctataaaacagacagagataagtacaacagaatatctcgggaatggactcagaagtatgccatgtgatgctaccttaaagtcagaataacctgcattatagctggaataaactttaaattactgttccttttttgattttcttatccggctgctcccctatcagacctcatcttttttaattttattttttgtttacctccctccattcattcacatgctcatctgagaagacttaagttcttccagctttggacaataactgcttttagaaactgtaaagtagttacaagagaacagttgcccaagactcagaatttttaaaaaaaaaaatggagcatgtgtattatgtggccaatgtcttcactctaacttggttatgagactaaaaccattcctcactgctctaacatgctgaagaaatcatctgagggggagggagatggatgctcagttgtcacatcaaaggatacagcattattctagcagcatccattcttgtttaagccttccactgttagagatttgaggttacatgatatgctttatgctcataactgatgtggctggagaattggtattgaatttatagcatcagcagaacagaaaatgtgatgtattttatgcatgtcaataaaggaatgacctgttcttgttctacagagaatggaaattggaagtcaaacaccctttgtattccaaaatagggtctcaaacattttgtaattttcatttaaattgttaggaggcttggagctattagttaatctatcttccaatacactgtttaatatagcactgaataaatgatgcaagttgtcaatggatgagtgatcaactaatagctctgctagtaattgatttatttttcttcaataaagttgcataaaccaaaaaaaaaaaaaaaaaa

SEQ ID NO: 1053 - DNA, 1856 bp, Homo sapiens
ggatgggaagcgagcatggtgagtcctcaagtcgcagctgggcctgccacgtgggagtggagggtggaggaacgtgtggagtttcggagtccagcccagtgcgagacagccttgaaaccgtggttggcgggcgctccactccgctctgggctcgaaccctgcctgaccctagctgtgccccccactttctccctgtctggcccctgctccccgccccctcacttagaggagggcacggggaagggcaaacggtccagagggcgggcggctgcgggctcctctgcatcatgtgaggagggcgtggggaaggacatcctggtggggcccgatctgggctgcctccagcccgggcctgtgtcttggacttagtcgtggacctggaggccagtgcccggctggccctgtcaccctctcgctgtgacgccagcgcctgctgactggaggacccaggttccttcgcctgctttttctcaggctgccctgaggatctgtgtttggtgaaaaggagccaaattcacctgcagggcaggcggctctagcagcttcagaagcctggtgccctggcgacactggacctgccttggcttctttgatcccaaccccacccccgatttctgctctgctgactggggaagtcatcgtgccacccagaacctgagtgcgggcctctcagagctccttcgtccgtgggtctgccggggactgggccttgtctccctggcgagtgccaggtgaggctgcggcggctccgacgcaggtggagctgctgacctggcccctttctgcggctgcgagggactttgaacatgtcggggatcgccctcagcagactcgcccaggagaggaaagcatggaggaaagaccacccatttggtttcgtggctgtcccaacaaaaaatcccgatggcacgatgaacctcatgaactgggagtgcgccattccaggaaagaaagggactccgtgggaaggaggcttgtttaaactacggatgcttttcaaagatgattatccatcttcgccaccaaaatgtaaattcgaaccaccattatttcacccgaatgtgtacccttcggggacagtgtgcctgtccatcttagaggaggacaaggactggaggccagccatcacaatcaaacagatcctattaggaatacaggaacttctaaatgaaccaaatatccaagacccagctcaagcagaggcctacacgatttactgccaaaacagagtggagtacgagaaaagggtccgagcacaagccaagaagtttgcgccctcataagcagcgaccttgtggcatcgtcagaaggaagggattggtttggcaagaacttgtttacaacatttttgcaaatctaaagttgctccatacaatgactagtcacctgggggggttgggcgggcgccatcttccattgccgccgcgggtgtgcggtctcgattcgctgaattgcccgtttccatacagggtctcttccttcggtcttttgtatttttgattgttatgtaaaactcgcttttattttaatattgatgtcagtatttcaactgctgtaaaattataaacttttatacttgggtaagtcccccaggcgagttcctcgctctgggatgcaggcatgcttctcaccgtgcagagctgcacttggcctcagctggctgtatggaaatgcaccctccctcctgcgctcctctctagaacctgggctgtgctgcttttgagcctcagaccccagggcagcatctcggttctgcgccacttcctttgtgtttatatggcgttttgtctgtgttgctgtttaggtaaataaactgtttatataaaaaaaaaaaaaaaaaaaaaaaaaaaaaaaaa

SEQ ID NO: 1054 - DNA, 1856 bp, Homo sapiens; identical to SEQ ID NO: 1053

SEQ ID NO: 1055 - DNA, 2845 bp, Homo sapiens
agcaccaaatccaagatggcggccagcaggaggctgatgaaggagcttgaagaaatccgcaaatgtgggatgaaaaacttccgtaacatccaggttgatgaagctaatttattgacttggcaagggcttattgttcctgacaaccctccatatgataagggagccttcagaatcgaaatcaactttccagcagagtacccattcaaaccaccgaagatcacatttaaaacaaagatctatcacccaaacatcgacgaaaaggggcaggtctgtctgccagtaattagtgccgaaaactggaagccagcaaccaaaaccgaccaagtaatccagtccctcatagcactggtgaatgacccccagcctgagcacccgcttcgggctgacctagctgaagaatactctaaggaccgtaaaaaattctgtaagaatgctgaagagtttacaaagaaatatggggaaaagcgacctgtggactaaaatctgccacgattggttccagcaagtgtgagcagagaccccgtgcagtgcattcagacaccccgcaaagcaggactctgtggaaattgacacgtgccaccgcctggcgttcgcttgtggcagttactaactttctacagttttcttaatcaaaagtggtctaggtaacctgtaaagaaaggattaaaaatttaagatgttctagttctgctctctttgttttaaaaatcactgcttcaatctacttcaaaagaatggtgtttcttttcttgtccaattttatccaaaatcttcaagttacatttaacccataaggtttaaaaaaaaggaaaaaaaacggttgtggttccctttcttccctacccttgccactcccactttctggcaccgagtttatttttcacttacttacttccccagaccccgggctcgcctccacaaaggagaagagactgccctggcggtcctggtggcttttcttagcatgtgtggcactgttgcccagtgtgggagttggtttaaattctcctgactccagtttataacatccttttaaaaaatttaaaaacaaacagccacacccctcctccagtccttctcctcagttcttgtgtgaaactccagctgatgttaccacagtaacatcagttaattgggcaagccctgatgtcagtgtgtgtaactgacctctggcctggcctgcacagagaagccctataatcacaggtctgtggtggccccgaaatggggggcctgctagtcaggaggatgctgtgcacactgtgtgtgatgaatctcgccagaaaggctcctgaggtcccaggttggcacttctccctgcagccattgtagaagatctgctggtccttgcaggcaaagctacagccagaatgtccgtttgaaactcctagctcatctgtcaccgagcttcatccgaatgtgccacggagcttgctctccacttcctccgtgcagtggccctgccacagccctccctcggcacactttgaccctttgtaggattggaattagcaggactcggctatttaaagcaccagtctggggtcgcctgggcccctgctgaccccctcctccagagcagccagcccagcccgggaacaagacggacttcctctcccttcggactcacagcctttgcagagtcaagctccacttgaagctcactcagtaatatcctttcaatgtgttttatattgttttgactgcctttttttgtagaaataaaaattgaccttagaatttatcgtcagataaacttgtaaagatttgaatattaatgtcttttcaaggcaaatgggattgtccccgcactagtagagaatccatgtcgctctgacaccccaaggaagccgacgatccaaatgccgtgtgtcaccaaccccgcttctgccactggcggcttcccttcttggctcttgggggggactagatcctgtggagaagatgacttaaactttgctttttgttttaattttaattctataacttgagatctttccggggcctacaggcgtgtaagacagcttggtctggtctgtgcagaagtggggagtgatgggcaggttcggcagcctaacattgttcaggcgcatggcccctgcggtgtgtacacgaactcggcttcttttgtcctaggtacgccaagggcaggtttctggagactcccttgtgcccgggatggcaagggcaccgggctggcgtttccacatctgtcttcattagcagaaaagtgatgatggattttatttcactcacactccagtttgtaataaaatgccaaattctgtcagctatccaaacaagccaccatttgttcttgttgcttctctggatccagaaatgttgccattcttggaaactgtcccattgcttcgtatttctgccaacgtagctctgcctgcctgtcaacccctcactgcactctgctcatcacgggaggatacctgtgtgccggcagcccctcagggactctcagccctggcactggcaccccagggttggccccgtcagcagaggcttggctttcgagccagtgggtgtctctcctttgggcctgggcggcttgctcctgccagccatgccttcagggtaggctctgagcaagctggcgaacagccctggctgctccaaaaccaaaaagctgggtcctctggaggaggggcgagctgtggagcagccacccactgctgccccaagctcactcaggaattcacacccgcctggtttcttgaagtgtgctgggtccttccctctgctccctactccccaccacggcagagaataggctttctaagatgctgcgatcccgttctgctgcccgtaataaaaatgctctcagacactg

SEQ ID NO: 1056 - DNA, 2394 bp, Homo sapiens
ttcacacggcacgacttcatcgagaccaacggggacaactgcctggtgacactgctgccgctgctaaacatggcctacaagttccgcacccacagccctgaagccctggagcagctatacccctgggagtgcttcgtcttctgcctgatcatcttcggcaccttcaccaaccagatccacaagtggtcgcacacgtactttgggctgccacgctgggtcaccctcctgcaggactggcatgtcatcctgccacgtaaacaccatcgcatccaccacgtctcaccccacgagacctacttctgcatcaccacaggagtaaaagtccctcgcaatttccgactgttggaagaactcgaagaaggccagaaaggagtaggagatggcacagttagctggggtctagaagatgacgaagacatgacacttacaagatggacagggatgataattgggcctccaagaacaatttatgaaaaccgaatatacagccttaaaatagaatgtggacctaaatacccagaagcacccccctttgtaagatttgtaacaaaaattaatatgaatggagtaaatagttctaatggagtggtggacccaagagccatatcagtgctagcaaaatggcagaattcatatagcatcaaagttgtcctgcaagagcttcggcgcctaatgatgtctaaagaaaatatgaaactccctcagccgcccgaaggacagtgttacagcaattaatcaaaaagaaaaaccacaggcccttccccttccccccaattcgatttaatcagtcttcattttccacagtagtaaattttctagatacgtcttgtagacctcaaagtaccggaaaggaagctcccattcaaaggaaatttatcttaagatactgtaaatgatactaattttttgtccatttgaaatatataagttgtgctataacaaatcatcctgtcaagtgtaaccactgtccacgtagttgaacttctgggatcaagaaagtctatttaaattgattcccatcataactggtggggcacatctaactcaactgtgaaaagacacatcacacaatcaccttgctgctgattacacggcctggggtctctgccttctccctttaccctcccgcctcccaccctccctgcaacaacagccctctagcctggggggcttgttagagtagatgtgaaggtttcaggtcgcagcctgtgggactactgctaggtgtgtggggtgtttcgcctgcacccctggttcctttaagtcttaagtgatgccccttccaaaccatcatcctgtccccacgctcctccactcccgcccttggccgaagcatagattgtaacccctccactcccctctgagattggcttcggtgaggaattcagggctttccccatatcttctctccccccacctttatcgaggggtgctgctttttctccctcctcctcaagttcctttttgcaccgtcaccacccaacaccttccatgacacttccttgctttggccagaagccatcaggtaaggttggaaagagcctctgacctcccttgtttagttttggaaccatactcactcactctccaccagcctgggaaatgaatattgggtcctcagccctgccaccctctgctgtcatcagctgatgcattgtttttagctcaggttttgataaggtgaaaagaatagtcaccagggttactcagacctgccagctctcggagtccttggtggttgaacttggagaaagaccgcatgaagatacttgtaagcacacatgatccctctgaattgttttactttcctgtaactgcttttgcttttaaaaattgaagaagttttaaacagggctttcatttggtcatccttgcaatccattggggtctagtttggaatctgacaactggaacaaaaagaaccttgaatccggtgcatgccttggttttggtgctgctgctgcttcccaagatcctcagcagggattaagaaggaacccggtgtgcacagcagatccccgaaattggtgggcttgacctcctggcaaattgctgcgtctttccacttgctgttcaggaccactaaatgctgaaatgtggatgcataccgaaataaaagcaattcattgtgtactaaaggttttttttttttttttaatttagtatttgtgtaaaaccaccttttgaagcagcaactatcaagtctgaaaagcaattgatgtttccattaatctttttctggggggaaaaccttagttctaaggatttaacatcctgtaagtgaagtttaacataacagtattccataagcagcctttttattgtcagaccattgcctgattttaatataataaaaaaaaagtgtgcgttaataaaaaaaaaaaaaaaaaaaaa

SEQ ID NO: 1057 - DNA, 2950 bp, Homo sapiens
gcggcccgtaggaaggtgctgtccgatcgatcgggataggagcggtccctgcgcttgctgctgggaagtggtacaatcatgtttgaaattaagaagatctgttgcatcggtgcaggctatgttggaggacccacatgtagtgtcattgctcatatgtgtcctgaaatcagggtaacggttgttgatgtcaatgaatcaagaatcaatgcgtggaattctcctacacttcctatttatgagccaggactaaaagaagtggtagaatcctgtcgaggaaaaaatctttttttttctaccaatattgatgatgccatcaaagaagctgatcttgtatttatttctgtgaatactccaacaaaaacctatggaatggggaaaggccgggcagcagatctgaagtatattgaagcttgtgctagacgcattgtgcaaaactcaaatgggtacaaaattgtgactgagaaaagcacagttccagtgcgggcagcagaaagtatccgtcgcatatttgatgcaaacacaaaacccaacttgaatttacaggtgctgtccaaccctgagtttctggcagagggaacagccatcaaggacctaaagaacccagacagagtactgattggaggggatgaaactccagagggccagagagctgtgcaggccctgtgtgctgtatatgagcactgggttcccagagaaaagatcctcaccactaatacttggtcttcagagctttccaaactggcagcaaatgcttttcttgcccagagaataagcagcattaactccataagtgctctgtgtgaagcaacaggagctgatgtagaagaggtagcaacagcgattggaatggaccagagaattggaaacaagtttctaaaagccagtgttgggtttggtgggagctgtttccaaaaggatgttctgaatttggtttatctctgtgaggctctgaatttgccagaagtagctcgttattggcagcaggtcatagacatgaatgactaccagaggaggaggtttgcttcccggatcatagatagtctgtttaatacagtaactgataagaagatagctattttgggatttgcattcaaaaaggacactggtgatacaagagaatcttctagtatatatattagcaaatatttgatggatgaaggtgcacatctacatatatatgatccaaaagtacctagggaacaaatagttgtggatctttctcatccaggtgtttcagaggatgaccaagtgtcccggctcgtgaccatttccaaggatccatatgaagcatgtgatggtgcccatgctgttgttatttgcactgagtgggacatgtttaaggaattggattatgaacgcattcataaaaaaatgctaaagccagcctttatcttcgatggacggcgtgtcctggatgggctccacaatgaactacaaaccattggcttccagattgaaacaattggcaaaaaggtgtcttcaaagagaattccatatgctccttctggtgaaattccgaagtttagtcttcaagatccacctaacaagaaacctaaagtgtagagattgccatttttatttgtgatttttttttttttttggtacttcaggatagcaaatatctatctgctattaaatggtaaatgaaccaagtgtttttttttgttttttttttgagacagagtctcactgttgcccaggctggagtgcagtggtgcaatctcggctcactgcaagctctgcttcccaggttcacgccattctcctggctcagcctcccaagtagctgggactacaggcacccgccacagtgcctgggctaattttttgtatttttagtagagacagggtttcaccatgtgagccaggatggtctcaatctcctgaccttgtgaaccacccgtctcggcctcccaaagtgctgggattacaggtgtgagccaccacgcctgggcccatgaaccaagtgtttttaaggaaacaaaactatttttttaatcatcagatttatactagctatatggatattagcatatctggtaattatgaatctagaatttttttacatatttttataatactgttagctcagttattggatgagtgaaagataatcatgttggttttaatagtgtcaatttttgtaaaataaaaattaaacttcaaactctttactttataaattgtccataggccacactttaatatcacattataaagggaaggacagtcttcattcctcctggttattggtttgtttgtcattaaagatatattttgaatccatgaaattgctatgctaaacagcctttacatgtatggtctggttaaagttcctttgttccttttgttttaataaaatgtgtcactgattttttagctcaaaatcatcactgttaatttccagtcaccccaaatatggttaaaagatttttttttttaatcatgaagagaaaattagtagcatttctttctctccccattatttattggttttcctcactaatctttttttttttagtccaaaagccaaaaatatttatcttggttttacattttaatttccattcttaattgtaatttttttctttaaataaggaaaccaatataatctcatgtataaaaacttaaatattttacaagttacatatagcatcattctaaaataagaattttttttgttttctgtctgcttttttcttatgtctcttgttgagttttatattttcagtggttatttttgcttgtgttagatcattattaaaatatatccaatgtccctttgatacttgtgctctgctgagaatgtacagtttgcattaaacatcccaggtctcatccttcaggaattttgcagttcaatgagaagagggagacaaatataaagatgaggacagaagcatctctacagatgaaaattacataaataaaacattctccatcaacaaaa

SEQ ID NO: 1058 - DNA, 3064 bp, Homo sapiens
gagatggcggaaggtggaggctgccgtgagcgaccggatgcggagactcagaagtccgagcttggacccttaatgaggaccacactccaacgcggggcgcagtggtatcttattgacagccggtggttcaagcagtggaagaagtatgtgggctttgacagctgggacatgtacaatgtgggtgaacataacctatttcctggcccaatagacaactctgggctattttcagatcctgagagtcagaccttgaaagaacacttaattgatgaattggactatgtattggtccctaccgaggcgtggaataaactactaaactggtacggctgtgtagaaggccagcaacccatcgtcagaaaagttgtggagcatggcctgtttgtcaagcactgcaaagtcgaggtgtatttgctggaactgaagctctgtgagaacagtgaccccaccaatgtgctgagttgccatttcagcaaggcagacaccattgcaaccatcgagaaagagatgcggaagctattcaacatccctgcggagcgtgaaacacggctctggaacaaatacatgagcaacacctacgagcagttgagcaagctagacaacactgtccaggatgctgggctataccagggtcaggtgctagtaattgagcctcaaaatgaagatggcacatggcccaggcagaccttgcagtcaaaatcaagcactgcgcctagcagaaattttactacctctccaaaatcatcagcaagtccctattcctcagtgtctgcctctctcattgcaaatggtgatagcactagcacctgtgggatgcacagttccggtgtcagcaggggtggatctggcttttctgcttcgtataattgtcaggagccaccatcctctcatatacaacctgggctctgtggacttggaaacctgggaaacacctgcttcatgaactccgctttgcagtgtttgagcaacactgcaccactgactgactactttctcaaagatgagtatgaagccgaaatcaacagagacaaccctctggggatgaaaggggaaattgcagaagcctatgctgaactcattaagcagatgtggtctggaagggacgcccatgtggcaccctcgatgttcaaaactcaagtaggacgttttgctcctcaattttctggctaccagcaacaagattctcaggagctgctggcctttcttctagatggattgcatgaagatctgaaccgggtaaagaaaaagccctacttggagctgaaggatgccaatgggcggccagatgcggtggtggcaaaggaagcctgggagaatcacaggttgaggaatgattctgtgattgtggatactttccatggcctcttcaaatctactttggtttgcccagaatgtgctaaggtttctgtgacctttgacccattttgctatctaacgctgccactgcccttgaagaaagatcgagttatggaggttttcctggttcctgctgaccctcactgcagacctactcagtaccgtgtgactgtgccgctgatgggggctgtgtccgacctgtgcgaggctctctccaggctgtctggcattgctgcagaaaatatggtggtcgcagatgtgtataatcaccgattccacaaaattttccaaatggatgaaggtttaaaccacatcatgcctcgggatgacattttcgtgtacgaggtctgcagcacttccgtggatggctcggaatgtgtcacgcttccagtctacttcagggagaggaagtccaggccatcaagcacttcctccgcatcagcgctatatgggcagccactattgctttctgtccccaagcacaagttaacccttgagtctttgtaccaggctgtttgtgatcgtatcagccgctatgtgaaacagcctttacctgatgagtttggcagctcacccttggagccaggggcctgcaatggctccaggaacagctgtgaaggagaagatgaggaagaaatggagcatcaggaagaaggcaaagagcagctttcagaaacagaaggcagtggggaagatgagccaggaaatgaccccagtgagaccacccaaaagaagatcaaaggccagccctgcccaaaaaggctttttaccttcagtcttgtgaactcctatggaacagctgacataaattcacttgcagctgatggaaaactacttaaactcaactctcgatctacactggccatggattgggacagagaaactcggagactttactatgatgagcaagaatctgaggcctacgagaagcatgtgagcatgttgcagcctcagaagaagaagaagaccacagtggccctgagagactgcatcgagctcttcaccaccatggagacccttggggagcatgacccctggtactgtcccaactgtaagaagcatcaacaggccacaaaaaagtttgacctatggtccttgcccaagatcctggtggtccacctcaaacgtttctcctacaacagatactggagggataagctcgacacagtcgtagaattcccaatcagagggctgaacatgtccgagtttgtctgtaacctgtcagcaaggccttatgtgtacgacctcattgccgtgtccaatcattatggagccatgggggttggccactacactgcatatgcgaagaacaaactgaatggtaaatggtattactttgatgatagcaacgtgtccctggcctctgaggatcagatagtgactaaagcagcttatgtgctattttaccaacgtcgagatgatgaattttataagacaccttcacttagcagttctggttcctctgatggagggacacgaccaagcagctctcagcagggctttggggatgatgaggcttgcagcatggacaccaactaatgctgactccacgatcctgccaccctgtagcgccagtgtaatcccccaggagaacatctttgacactctgcagactgctagtgttctgtctaaaaaccagacaaggaaatacccttcttttatgagcagaaggaaacaaaaaaaaaaagaagaccgtttacctagaaag

SEQ ID NO: 1059 - DNA, 1985 bp, Homo sapiens
tactgactttcagcaccaacttgtggtcccaggtaagtttccacgctggtactttagccctgggctcgaacctgcggacacgctgtggctgcaactccccgcccgccagacctcagtacgcagcgcggctggtgagaaacataatgcactctgacttccacgcgtggaatggggagatggactgcacggcgggcggacctgctcgggctgatggacggcaggtggactgatgtgcgcagggactggcggcagcgcggtcagagccagtcagccaaagccaggccagcacaatagactgtcccggttcccgccaggaggcggccgagcaccaactgtacggtactgcgcctgcgccgcgaccgccaacgcgcccagtctacgcttgcgcggcgcaacagggccgactgcagctggaagatggcggcgtccgtggtctgtcgggccgctaccgccggggcacaagtgctattgcgcgcccgccgctcgccggccctgctgcggacgccagccttgcggagtacggcaaccttcgctcaggcgctccagttcgtgccggagacgcaggttagcctgctggacaacggcctgcgtgtggcctccgagcagtcctctcagcccacttgcacggtgggagtgtggattgatgttggcagccgttttgagactgagaagaataatggggcaggctactttttggagcatctggctttcaagggaacaaagaatcggcctggcagtgccctggagaaggaggtggagagcatgggggcccatcttaatgcctacagcacccgggagcacacagcttactacatcaaggcgctgtccaaggatctgccgaaagctgtggagctcctgggtgacattgtgcagaactgtagtctggaagactcacagattgagaaggaacgtgatgtgatcctgcgggagatgcaggagaatgatgcatctatgcgagatgtggtctttaactacctgcatgccacagcattccagggcacacctctagcccaggctgtggaggggcccagtgagaatgtcaggaagctgtctcgtgcagacttgaccgagtacctcagcacacattacaaggcccctcgaatggtgctggcagcagctggaggagtggagcaccagcaactgttagacctcgcccagaagcacctcggtggcatcccatggacatatgcagaggacgctgtgcccactcttactccatgccgcttcactggcagtgagatccgccaccgtgatgatgctctaccttttgcccacgtggccattgcagtagagggtcctggctgggccagcccggacagtgtggccttgcaagtggccaatgccatcatcggccactatgactgcacttatggtggtggcgtgcacctgtccagcccactggcttcaggtgctgtggccaacaagctatgccagagtttccagaccttcagcatctgctatgcagagacgggcttgctgggtgcacactttgtctgtgaccgaatgaaaatcgatgacatgatgttcgtcctgcaagggcagtggatgcgcctgtgtaccagtgccacggagagtgaggtggcccggggcaaaaacatcctcagaaatgccctggtatctcatctagatggcactactcctgtgtgtgaggacatcggacgcagcctcctgacctatggccgccgcatccccctggctgaatgggaaagccggattgcggaggtggatgccagtgtggtacgtgagatctgctccaagtacatctatgaccagtgcccagcagtggctggatatggccccattgagcagctcccagactacaaccggatccgtagcggcatgttctggctgcgcttctaggcgggaagcctatgtaagcaagagggcagggccggggtttgtggtcccccccccaccacaaacacagcacttcggctcctctaacctgtgccacaggtgaccaccaataaaatcctctgctgaga

SEQ ID NO: 1060 - DNA, 1588 bp, Homo sapiens
atcttgctttcctttaatccggcagtgaccgtgtgtcagaacaatcttgaatcatgaagctactaaccagagccggctctttctcgagattttattccctcaaagttgcccccaaagttaaagccacagctgcgcctgcaggagcaccgccacaacctcaggaccttgagtttaccaagttaccaaatggcttggtgattgcttctttggaaaactattctcctgtatcaagaattggtttgttcattaaagcaggcagtagatatgaggacttcagcaatttaggaaccacccatttgctgcgtcttacatccagtctgacgacaaaaggagcttcatctttcaagataacccgtggaattgaagcagttggtggcaaattaagtgtgaccgcaacaagggaaaacatggcttatactgtggaatgcctgcggggtgatgttgatattctaatggagttcctgctcaatgtcaccacagcaccagaatttcgtcgttgggaagtagctgaccttcagcctcagctaaagattgacaaagctgtggcctttcagaatccgcagactcatgtcattgaaaatttgcatgcagcagcttaccagaatgccttggctaatcccttgtattgtcctgactataggattggaaaagtgacatcagaggagttacattacttcgttcagaaccatttcacaagtgcaagaatggctttgattggacttggtgtgagtcatcctgttctaaagcaagttgctgaacagtttctcaacatgaggggtgggcttggtttatctggtgcaaaggccaactaccgtggaggtgaaatccgagaacagaatggagacagtcttgtccatgctgcttttgtagcagaaagtgctgtcgcgggaagtgcagaggcaaatgcatttagtgttcttcagcatgtcctcggtgctgggccacatgtcaagaggggcagcaacaccaccagccatctgcaccaggctgttgccaaggcaactcagcagccatttgatgtttctgcatttaatgccagttactcagattctggactctttgggatttatactatctcccaggccacagctgctggagatgttatcaaggctgcctataatcaagtaaaaagaatagctcaaggaaacctttccaacacagatgtccaagctgccaagaacaagctgaaagctggatacctaatgtcagtggagtcttctgagtgtttcctggaagaagtcgggtcccaggctctagttgctggttcttacatgccaccatccacagtccttcagcagattgattcagtggctaatgctgatatcataaatgcggcaaagaagtttgtttctggccagaagtcaatggcagcaagtggaaatttgggacatacaccttttgttgatgagttgtaatactgatgcacacattacaggagagagctgaacgttctctcacccagagcagcaaacacatgaaagtcagaagtctctaatatatcatttgtcttttttccagtgaggtaaaataaggcataaatgcaggtaattattcccagctgacctaaagtcaataaaacattctgttt

SEQ ID NO: 1061 - DNA, 3221 bp, Homo sapiens
ggcacgagccgccgcggacttcgctttgggccatgaccagatataattggtgattacaactttcctctataaattaactcttgacactccttgggatttgaagaaaaaaatgcctggtgtcatacctagtgaaagtaatggactttcaagaggtagcccttcaaagaaaaacagactttccttaaagttttttcagaaaaaggaaactaagagagctttggatttcacagattctcaagaaaatgaagaaaaagcttctgaatatagagcatctgaaattgatcaagttgttcctgcagcacagtcttcacctataaactgtgagaagagagaaaacttgttaccatttgtgggactgaataatctcggcaatacttgctatcttaatagtatacttcaggtattatatttttgtcccggttttaaatctggagtaaagcacttatttaatattatttcaaggaagaaagaagctctaaaggatgaagccaatcaaaaagacaagggaaattgcaaagaagattctttggcaagttatgaattgatatgcagtttacagtccttaatcatttcggttgaacagctccaggctagttttctcttaaatccagagaaatatactgatgaacttgccactcagccaaggcgactgcttaacacactgagggaactcaaccctatgtatgaaggatatctacagcatgatgcacaggaagtattacaatgtattttgggaaacattcaagaaacatgccaactcctaaaaaaagaagaagtaaaaaatgtggcagaattacctactaaggtagaagaaatacctcatccgaaagaggaaatgaatggtattaacagcatagagatggacagtatgaggcattctgaagactttaaagagaaactcccaaaaggaaatgggaaaagaaaaagtgacactgaatttggtaacatgaagaaaaaagttaaattatccaaggaacaccagtcattggaagagaaccagagacaaactagatcaaaaagaaaagctacaagtgatacattagagagtcctcctaaaataattcccaagtatatttctgaaaatgagagtccaagaccctcacaaaagaaatcaagagttaaaataaattggttaaagtctgcaactaagcaacccagcattctttctaaattttgtagtctgggaaaaataacaacaaaccaaggagtcaaaggacaatctaaagaaaatgaatgtgatcctgaagaggacttggggaagtgtgaaagtgataacacaactaatggttgtggacttgaatctccaggaaatactgttacacctgtaaatgttaatgaagttaaacccataaacaaaggtgaagaacaaattggttttgagctagtggagaaattatttcaaggtcagctggtattaaggacgcgttgcttggaatgtgaaagtttaacagaaagaagagaagattttcaagacatcagtgtgccagtacaagaagatgagctttccaaagtagaggagagttctgaaatttctccagagccaaaaacagaaatgaagaccctgagatgggcaatttcacaatttgcttcagtagaaaggattgtaggagaagataaatatttctgtgaaaactgccatcattatactgaagctgaacgaagtcttttgtttgacaaaatgcctgaagttataactattcatttgaagtgctttgctgctagtggtttggagtttgattgttatggtggtggactttccaagatcaacactcctttattgacacctcttaaattgtcactagaagaatggagcacaaagccaactaacgacagctatggattatttgcggttgtgatgcatagtggcattacaattagtagtgggcattacactgcttctgttaaagtcactgaccttaacagtttagaactagataaaggaaattttgtggttgaccaaatgtgtgaaataggtaagccagaaccattgaatgaggaggaagcaaggggtgtggttgagaattataatgatgaagaagtgtcaattagagttggtggaaatacacagccaagtaaagttttgaacaaaaaaaatgtagaagctattggacttcttggaggacaaaagagcaaagcagattatgagctatacaacaaagcctctaatcctgataaggttgctagtacagcgtttgctgaaaatagaaattctgagactagtgatactactgggacccatgaatctgatagaaacaaggaatccagtgaccaaacaggcattaatattagtggatttgagaacaaaatttcatacgtagtgcaaagcttaaaggagtatgaggggaagtggttgctttttgatgattctgaagtcaaagttactgaagagaaggactttctgaattctctttccccttctacatctcctacttctactccttacttgctattttataagaaattatagagtgagtgtattttccttgtgtatatattaaacacacccatacaaacattggtaaagttgattacatcaaagaatctttagcttatcttttgaagctactggatattattggtctctctaggtttttatataaatagtgaaatttgaattactgaaaaccatgttaatttttagaactcattttcctcagtagagactagtgatgcattagcttctgggaacaaacttgtatcggttcttaattaaattatccaaaacggaggcatttaaacacttggatttacaccagtcttttgtgtttgctttttaaaataaagtgctcgtatttgtattctccatattttggagtaattatctacatgatgtttatagttcctgtggtttttcacccaagaagcagaatctcattcagtacatttagttttataagagtcatgaagctaaatccttgggctatgtcagaggcacaaagtctagaatgtgtgtattcacaatggtgtatgtacattttgtgccttgattcacttagaagtgtctcagaaaacctggacagttcgcttctacacaagaattttatatgtatttatgaagatgattctgtaccctagtatatctttttgggcatggactaatttgtatctgtttaactcatattctgcacgatctgtatatagtacatcaaacttagaggtgtgaccttaaatttaactttttttaaaaactgggaggtcaataaaatttaaactgcttaact

SEQ ID NO: 1062 - DNA, 1806 bp, Homo sapiens
gccgctcgctcggctccgctccctggctcggctccctgcctccgcgtcgcagcccccgccgtagccgcctccgagcccgccgccacatcctctgagaagatggctgtgccacccacgtatgccgatcttggcaaatctgccagggatgtcttcaccaagggctatggatttggcttaataaagcttgatttgaaaacaaaatctgagaatggattggaatttacaagctcaggctcagccaacactgagaccaccaaagtgacgggcagtctggaaaccaagtacagatggactgagtacggcctgacgtttacagagaaatggaataccgacaatacactaggcaccgagattactgtggaagatcagcttgcacgtggactgaagctgaccttcgattcatccttctcacctaacactgggaaaaaaaatgctaaaatcaagacagggtacaagcgggagcacattaacctgggctgcgacatggatttcgacattgctgggccttccatccggggtgctctggtgctaggttacgagggctggctggccggctaccagatgaattttgagactgcaaaatcccgagtgacccagagcaactttgcagttggctacaagactgatgaattccagcttcacactaatgtgaatgacgggacagagtttggcggctccatttaccagaaagtgaacaagaagttggagaccgctgtcaatcttgcctggacagcaggaaacagtaacacgcgcttcggaatagcagccaagtatcagattgaccctgacgcctgcttctcggctaaagtgaacaactccagcctgataggtttaggatacactcagactctaaagccaggtattaaactgacactgtcagctcttctggatggcaagaacgtcaatgctggtggccacaagcttggtctaggactggaatttcaagcataaatgaatactgtacaattgtttaattttaaactattttgcagcatagctaccttcagaatttagtgtatcttttaatgttgtatgtctgggatgcaagtattgctaaatatgttagccctccaggttaaagttgattcagctttaagatgttacccttccagaggtacagaagaaacctatttccaaaaaaggtcctttcagtggtagactcggggagaacttggtggcccctttgagatgccaggtttcttttttatctagaaatggctgcaagtggaagcggataatatgtaggcactttgtaaattcatattgagtaaatgaatgaaattgtgatttcctgagaatcgaaccttggttccctaaccctaattgatgagaggctcgctgcttgatggtgtgtacaaactcacctgaatgggacttttttagacagatcttcatgacctgttcccaccccagttcatcatcatctcttttacaccaaaaggtctgcagggtgtggtaactgtttcttttgtgccattttggggtggagaaggtggatgtgatgaagccaataattcaggacttattccttcttgtgttgtgtttttttttggcccttgcaccagagtatgaaatagcttccaggagctccagctataagcttggaagtgtctgtgtgattgtaatcacatggtgacaacactcagaatctaaattggacttctgttgtattctcaccactcaatttgttttttagcagtttaatgggtacattttagagtcttccattttgttggaattagatcctccccttcaaatgctgtaattaacaacacttaaaaaacttgaataaaatattgaaacctc

SEQ ID NO: 1063 - DNA, 1404 bp, Homo sapiens
gctgcagctgcagcagctggagggcgaagtgaaggagacaccgttccgcccgcggcctcgccatggcgacccacggacagacttgcgcgcgtccaatgtgtattcctccatcatatgctgaccttggcaaagttgccagagatattttcaacaaaggatttggttttgggttggtgaaactggatgtgaaaacaaagtcttgcagtggcgtggaattttcaacgtccggttcatctaatacagacactggtaaagttactgggaccttggagaccaaatacaagtggtgtgagtatggtctgactttcacagaaaagtggaacactgataacactctgggaacagaaatcgcaattgaagaccagatttgtcaaggtttgaaactgacatttgatactaccttctcaccaaacacaggaaagaaaagtggtaaaatcaagtcttcttacaagagggagtgtataaaccttggttgtgatgttgactttgattttgctggacctgcaatccatggttcagctgtctttggttatgagggctggcttgctggctaccagatgacctttgacagtgccaaatcaaagctgacaaggaataactttgcagtgggctacaggactggggacttccagctacacactaatgtcaatgatgggacagaatttggaggatcaatttatcagaaagtttgtgaagatcttgacacttcagtaaaccttgcttggacatcaggtaccaactgcactcgttttggcattgcagctaaatatcagttggatcccactgcttccatttctgcaaaagtcaacaactctagcttaattggagtaggctatactcagactctgaggcctggtgtgaagcttacactctctgctctggtagatgggaagagcattaatgctggaggccacaaggttgggctcgccctggagttggaggcttaatccagctgaaagaaacctttgggaatggatatcagaagatttggccttaatatatttccattgtgaccagcagcaggcttttttcccccaagaagatgatcaaaacaaaggatgatctcaacaagagctgtattttaagtatttagacagttctttgttagctggtttctagttggttatctagttaccaatgctgcagtcctgcagtcacctatacattatttaaatgtatttaactgttaaatgcgctacccaccaataatgaaatagacctttatgaaaactgtgcaattgtgtgcatgtttgtttttatgttcctttagaaaacattgactgttaccattgaatgagatggatcagtggatattaagatgaggttacaaattttgttaagttcagccattattacttttggtatcccagaacatgacaaattatgaataaaacaagtatacat

SEQ ID NO: 1064 - DNA, 1851 bp, Homo sapiens
gggcgcgccagagacgcagccgcgctcccaccacccacacccaccgcgccctcgttcgcctcttctccgggagccagtccgcgccaccgccgccgcccaggccatcgccaccctccgcagccatgtccaccaggtccgtgtcctcgtcctcctaccgcaggatgttcggcggcccgggcaccgcgagccggccgagctccagccggagctacgtgactacgtccacccgcacctacagcctgggcagcgcgctgcgccccagcaccagccgcagcctctacgcctcgtccccgggcggcgtgtatgccacgcgctcctctgccgtgcgcctgcggagcagcgtgcccggggtgcggctcctgcaggactcggtggacttctcgctggccgacgccatcaacaccgagttcaagaacacccgcaccaacgagaaggtggagctgcaggagctgaatgaccgcttcgccaactacatcgacaaggtgcgcttcctggagcagcagaataagatcctgctggccgagctcgagcagctcaagggccaaggcaagtcgcgcctaggggacctctacgaggaggagatgcgggagctgcgccggcaggtggaccagctaaccaacgacaaagcccgcgtcgaggtggagcgcgacaacctggccgaggacatcatgcgcctccgggagaaattgcaggaggagatgcttcagagagaggaagccgaaaacaccctgcaatctttcagacaggatgttgacaatgcgtctctggcacgtcttgaccttgaacgcaaagtggaatctttgcaagaagagattgcctttttgaagaaactccacgaagaggaaatccaggagctgcaggctcagattcaggaacagcatgtccaaatcgatgtggatgtttccaagcctgacctcacggctgccctgcgtgacgtacgtcagcaatatgaaagtgtggctgccaagaacctgcaggaggcagaagaatggtacaaatccaagtttgctgacctctctgaggctgccaaccggaacaatgacgccctgcgccaggcaaagcaggagtccactgagtaccggagacaggtgcagtccctcacctgtgaagtggatgcccttaaaggaaccaatgagtccctggaacgccagatgcgtgaaatggaagagaactttgccgttgaagctgctaactaccaagacactattggccgcctgcaggatgagattcagaatatgaaggaggaaatggctcgtcaccttcgtgaataccaagacctgctcaatgttaagatggcccttgacattgagattgccacctacaggaagctgctggaaggcgaggagagcaggatttctctgcctcttccaaacttttcctccctgaacctgagggaaactaatctggattcactccctctggttgatacccactcaaaaaggacattcctgattaagacggttgaaactagagatggacaggttatcaacgaaacttctcagcatcacgatgaccttgaataaaaattgcacacactcagtggcaggcgatatattacccaggcaagaataaaaaagaaatcccatatcttaaagaaacagctttcaagtgcctttctgcagtttttcaggagcgcaagatagatttggaataggaataagctctagttcttaacaaccgacactcctacaagatttagaaaaaagtttacaacataatctagtttacagaaaaatcttgtgctagaatactttttaaaaggtattttgaataccattaaaactgcttttttttttccagcaagtatccaaccaacttggttctgcttcaataaatctttggaaaactcca

SEQ ID NO: 1065 - DNA, 3431 bp, Homo sapiens
caccctatcctacactactaggaacttgcacagtccgcctcgggcagcccaaagctcctctgcccaccctggctcccaaaaccctccaaaacaaaagaccagaaaagcactctccacccagcagccaaacgcctccttcttgacgccagcccccaccctctgtctgctcgagcccaggaaaggcctgaaggaacaggccggggaaggagccctccctctctcccttgtccctccatccacccagcgccggcatctggagaccctatggcccgggctcactggggctgctgcccctggctggtcctcctctgtgcttgtgcctggggccacacaaagccactggaccttggagggcaggatgtgagaaattgttccaccaaccccccttaccttccagttactgtggtcaataccacaatgtcactcacagccctccgccagcagatgcagacccagaatctctcagcctacatcatcccaggcacagatgctcacatgaacgagtacatcggccaacatgacgagaggcgtgcgtggattacaggctttacagggtctgcaggaactgcagtggtgactatgaagaaagcagctgtctggaccgacagtcgctactggactcaggctgagcggcaaatggactgtaattgggagctccataaggaagttggcaccactcctattgtcacctggctcctcaccgagattcccgctggagggcgtgtgggttttgaccccttcctcttgtccattgacacctgggagagttatgatctggccctccaaggctctaacagacagctggtgtccatcacaaccaatcttgtggacctggtatggggatcagagaggccaccggttccaaatcaacccatttatgccctgcaggaggcattcacagggagcacttggcaggagaaagtatctggcgtccgaagccagatgcagaagcatcaaaaggtcccgactgccgtccttctgtcggcgcttgaggagacggcctggctcttcaaccttcgagccagtgacatcccctataaccccttcttctattcctacacgctgctcacagactcttctattaggttgtttgcaaacaagagtcgctttagctccgaaaccttgagctatctgaactccagttgcacaggccccatgtgtgtgcaaatcgaggattacagccaagttcgtgacagcatccaggcctactcattgggagatgtgaggatctggattgggaccagctataccatgtatgggatctatgaaatgataccaagggagaaactcgtgacagacacctactccccagtgatgatgaccaaggcagtgaagaacagcaaggagcaggccctcctcaaggccagccacgtgcgggacgctgtggctgtgatccggtacttggtctggctggagaagaacgtgcccaaaggcacagtggatgagttttcgggggcagagatcgtggacaagttccgaggagaagaacagttctcctccggacccagttttgaaaccatctctgctagtggtttgaatgctgccctggcccactacagcccgaccaaggagctgaaccgcaagctgtcctcagatgagatgtacctgctggactctggggggcagtactgggacgggaccacagacatcaccagaacagtccactggggcaccccctctgcctttcagaaggaggcatatacccgtgtgctgataggaaatattgacctgtccaggctcatctttcccgctgctacatcagggcgaatggtggaggcctttgcccgcagagccttgtgggatgctggtctcaattatggtcatgggacaggccacggcattggcaacttcctgtgtgtgcatgagtggccagtgggattccagtccaacaacatcgctatggccaagggcatgttcacttccattgaacctggttactataaggatggagaatttgggatccgtctcgaagatgtggctctcgtggtagaagcaaagaccaagtacccagggagctacctgacctttgaagtggtatcatttgtgccctatgaccggaacctcatcgatgtcagcctgctgtctcccgagcatctccagtacctgaatcgctactaccagaccatccgggagaaggtgggtccagagctgcagaggcgccagctactagaggagttcgagtggcttcaacagcacacagagcccctggccgccagggccccagacaccgcctcctgggcctctgtgttagtggtctccacccttgccatccttggctggagtgtctagaggctccagactctcctgttaaccctccatctagatggggggctcccttgcttagctcccctcaccctgcactgaacataccccaagagcccctgctggcccattgcctagaaacctttgcattcatcctccttctccaagacctatggagaaggtcccaggccccaggaaacacagggcttcttggccccagatggcacctccctgcaccccggggttgtataccacaccctgggcccctaatcccaggccccgaaataggaaagccagctagtctcttctcttctgtgatctcagtaggcctaacctataacctaacacagactgctacagctgctcccctcccgccaaacaaagccccaagaaaacaatgcccctaccacccaagggtgccatggtcccgggaaaacccaacctgtcaccgcgtgttgggcgtaaccagaactgttcccccccaccagggcttaaaaatcgcccccactttttaaccatcgtccattaaccacctggtgggcatagccagagctgttcgaacccagccagggatgaaaaatcaacccccgacatggaacccatgattcctaaacccggggtaggttccatgccaagtaacagcagagggagttaagccataggaatttggctgtggagtaagagggaatgcggtgaggcagtgtggaatatgaccctaccagaggttggagaacaaacttgggcagccggaacccgtcactattttagattcctggcattcgaggagccctttgaactttccaaagtgcagccacagctacaatgctgttaaatcctcccacatttcttggatgccccttcaccttgtgtggacagtgtctggtttccccattttacagacaggaaaactgagcttcagacagggggtgggctttgcctaaggacacacaaatttggttgggagttgatggggccagatgagccagcattccagctgtttcacccttcagcaacatgcagagtccctgagcccacctcccagccctctcctcattctctgaacccactgtggtgagaagaatttgctccggccaaattggccgttagccacctgggtccacatcctgctaagacgtttaaaacagcctaacaaagacacttgcctgtgg

SEQ ID NO: 1066 - DNA, 4148 bp, Homo sapiens
aggaaggaaggagcagttggttcaatctctggtaatctatgccagcaattatgacaatgttagcagaccatgcagctcgtcagctgcttgatttcagccaaaaactggatatcaacttattagataatgtggtgaattgcttataccatggagaaggagcccagcaaagaatggctcaagaagtactgacacatttaaaggagcatcctgatgcttggacaagagtcgacacaattttggaattttctcagaatatgaatacgaaatactatggactacaaattttggaaaatgtgataaaaacaaggtggaagattcttccaaggaaccagtgcgaaggaataaaaaaatacgttgttggcctcattatcaagacgtcatctgacccaacttgtgtagagaaagaaaaggtgtatatcggaaaattaaatatgatccttgttcagatactgaaacaagaatggcccaaacattggccaacttttatcagtgatattgttggagcaagtaggaccagcgaaagtctctgtcaaaataatatggtgattcttaaactcttgagtgaagaagtatttgatttctctagtggacagataacccaagtcaaatctaagcatttaaaagacagcatgtgcaatgaattctcacagatatttcaactgtgtcagtttgtaatggaaaattctcaaaatgctccacttgtacatgcaaccttggaaacattgctcagatttctgaactggattcccctgggatatatttttgagaccaaattaatcagcacattgatttataagttcctgaatgttccaatgtttcgaaatgtctctctgaagtgcctcactgagattgctggtgtgagtgtaagccaatatgaagaacaatttgtaacactatttactctgacaatgatgcaactaaagcagatgcttcctttaaataccaatattcgacttgcgtactcaaatggaaaagatgatgaacagaacttcattcaaaatctcagtttgtttctctgcacctttcttaaggaacatgatcaacttatagaaaaaagattaaatctcagggaaactcttatggaggcccttcattatatgttgttggtatctgaagtagaagaaactgaaatctttaaaatttgtcttgaatactggaatcatttggctgctgaactctatagagagagtccattctctacatctgcctctccgttgctttctggaagtcaacattttgatgttcctcccaggagacagctatatttgcccatgttattcaaggtccgtttattaatggttagtcgaatggctaaaccagaggaagtattggttgtagagaatgatcaaggagaagttgtgagagaattcatgaaggatacagattccataaatttgtataagaatatgagggaaacattggtttatcttactcatctggattatgtagatacagaaagaataatgacagagaagcttcacaatcaagtgaatggtacagagtggtcatggaaaaatttgaatacattgtgttgggcaataggctccattagtggagcaatgcatgaagaggacgaaaaacgatttcttgttactgttataaaggatctattaggattatgtgaacagaaaagaggcaaagataataaagctattattgcatcaaatatcatgtacatagtaggtcaatacccacgttttttgagagctcactggaaatttctgaagactgtagttaacaagctgttcgaattcatgcatgagacccatgatggagtccaggatatggcttgtgatactttcattaaaatagcccaaaaatgccgcaggcatttcgttcaggttcaggttggagaagtgatgccatttattgatgaaattttgaacaacattaacactattatttgtgatcttcagcctcaacaggttcatacgttttatgaagctgtggggtacatgattggtgcacaaacagatcaaacagtacaagagcacttgatagaaaagtacatgttactccctaatcaagtgtgggatagtataatccagcaggcaaccaaaaatgtggatatactgaaagatcctgaaacagtcaagcagcttggtagcattttgaaaacaaatgtgagagcctgcaaagctgttggacacccctttgtaattcagcttggaagaatttatttagatatgcttaatgtatacaagtgcctcagtgaaaatatttctgcagctatccaagctaatggtgaaatggttacaaagcaaccattgattagaagtatgcgaactgtaaaaagggaaactttaaagttaatatctggttgggtgagccgatccaatgatccacagatggtcgctgaaaattttgttccccctctgttggatgcagttctcattgattatcagagaaatgtcccagctgctagagaaccagaagtgcttagtactatggccataattgtcaacaagttagggggacatataacagctgaaatacctcaaatatttgatgctgtttttgaatgcacattgaatatgataaataaggactttgaagaatatcctgaacatagaacgaactttttcttactacttcaggctgtcaattctcattgtttcccagcattccttgctattccacctacacagtttaaacttgttttggattccatcatttgggctttcaaacatactatgaggaatgtcgcagatacgggcttacagatactttttacactcttacaaaatgttgcacaagaagaagctgcagctcagagtttttatcaaacttatttttgtgatattctccagcatatcttttctgttgtgacagacacttcacatactgctggtttaacaatgcatgcatcaattcttgcatatatgtttaatttggttgaagaaggaaaaataagtacatcattaaatcctggaaatccagttaacaaccaaatctttcttcaggaatatgtggctaatctccttaagtcggccttccctcacctacaagatgctcaagtaaagctctttgtgacagggcttttcagcttaaatcaagatattcctgctttcaaggaacatttaagagatttcctagttcaaataaaggaatttgcaggtgaagacacttctgatttgtttttggaagagagagaaatagccctacggcaggctgatgaagagaaacataaacgtcaaatgtctgtccctggcatctttaatccacatgagattccagaagaaatgtgtgattaaaatccaaattcatgctgttttttttctctgcaactccgttagcagaggaaaacagcatgtgggtatttgtcgaccaaaatgatgccaatttgtaaattaaaatgtcacctagtggccctttttcttatgtgtttttttgtataagaaattttctgtgaaatatccttccattgtttaagcttttgttttggtcatctttatttagtttgcatgaagttgaaaattaaggcatttttaaaaattttacttcatgcccatttttgtggctgggctggggggaggaggcaaattcaatttgaacatatacttgtaattctaatgcaaaattatacaatttttcctgtaaacaataccaatttttaattagggagcattttccttctagtctatttcagcctagaagaaaagataatgagtaaaacaaattgcgttgtttaaaggattatagtgctgcattgtctgaagttagcacctcttggactgaatcgtttgtctagactacatgtattacaaagtctctttggcaagattgcagcaagatcatgtgcatatcatcccattgtaaagcgacttcaaaaatatgggaacacagttagttatttttacacagttctttttgtttttgtgtgtgtgtgctgtcgcttgtcgacaacagctttttgttttcctcaatgaggagtgttgctcatttgtgagccttcattaactcgaagtgaaatggttaaaaatatttatcctgttagaataggctgcatctttttaacaactcattaaaaaacaaaacaactctggcttttgagatgacttatactaatttacattgtttaccaagctgtagtgctttaagaacactacttaaaaagcaaaataaacttggtttacatttaaaaaaaa

SEQ ID NO: 1067 - DNA, 1213 bp, Homo sapiens
taccgccaccgccgccgccgattccggagccggggtagtcgccgccgccgccgccgccgctgcagccactgcaggcaccgctgccgccgcctgagtagtgtaccgccaccgccgccgccgattccggagccggggtagtcgccgccgccgccgccgccgctgcagccactgcaggcaccgctgccgccgcctgagtagtgggcttaggaaggaagaggtcatctcgctcggagcttcgctcggaagggtctttgttccctgcagccctcccacggcagagtctccagagatttgggccgctacaaaaagtgcattttgcccattcggctgtggatagagaagcaggaagagcactggacttggagtcagggaatgacaatggataaaagtgagctggtacagaaagccaaactcgctgagcaggctgagcgctatgatgatatggctgcagccatgaaggcagtcacagaacaggggcatgaactctccaacgaagagagaaatctgctctctgttgcctacaagaatgtggtaggcgcccgccgctcttcctggcgtgtcatctccagcattgagcagaaaacagagaggaatgagaagaagcagcagatgggcaaagagtaccgtgagaagatagaggcagaactgcaggacatctgcaatgatgttctggagctgttggacaaatatcttattcccaatgctacacaaccagaaagtaaggtgttctacttgaaaatgaaaggagattattttaggtatctttctgaagtggcatctggagacaacaaacaaaccactgtgtcgaactcccagcaggcttaccaggaagcatttgaaattagtaagaaagaaatgcagcctacacacccaattcgtcttggtctggcactaaatttctcagtcttttactatgagattctaaactctcctgaaaaggcctgtagcctggcaaaaacggcatttgatgaagcaattgctgaattggatacgctgaatgaagagtcttataaagacagcactctgatcatgcagttacttagggacaatctcactctgtggacatcggaaaaccagggagacgaaggagacgctggggagggagagaactaatgtttctcgtgctttgtgatctgtccagtgtcactctgtaccctcaacatatatcccttgtgcgataaaaaaaaaaaaaaaaaaaaaaaaaaaaaaaaaa

SEQ ID NO: 1068 - DNA, 2834 bp, Homo sapiens
gcccactcccaccgccagctggaaccctggggactacgacgtccctcaaaccttgcttctaggagataaaaagaacatccagtcatggataaaaatgagctggttcagaaggccaaactggccgagcaggctgagcgatatgatgacatggcagcctgcatgaagtctgtaactgagcaaggagctgaattatccaatgaggagaggaatcttctctcagttgcttataaaaatgttgtaggagcccgtaggtcatcttggagggtcgtctcaagtattgaacaaaagacggaaggtgctgagaaaaaacagcagatggctcgagaatacagagagaaaattgagacggagctaagagatatctgcaatgatgtactgtctcttttggaaaagttcttgatccccaatgcttcacaagcagagagcaaagtcttctatttgaaaatgaaaggagattactaccgttacttggctgaggttgccgctggtgatgacaagaaagggattgtcgatcagtcacaacaagcataccaagaagcttttgaaatcagcaaaaaggaaatgcaaccaacacatcctatcagactgggtctggcccttaacttctctgtgttctattatgagattctgaactccccagagaaagcctgctctcttgcaaagacagcttttgatgaagccattgctgaacttgatacattaagtgaagagtcatacaaagacagcacgctaataatgcaattactgagagacaacttgacattgtggacatcggatacccaaggagacgaagctgaagcaggagaaggaggggaaaattaaccggccttccaacttttgtctgcctcattctaaaatttacacagtagaccatttgtcatccatgctgtcccacaaatagttttttgtttacgatttatgacaggtttatgttacttctatttgaatttctatatttcccatgtggtttttatgtttaatattaggggagtagagccagttaacatttagggagttatctgttttcatcttgaggtggccaatatggggatgtggaatttttatacaagttataagtgtttggcatagtacttttggtacattgtggcttcaaaagggccagtgtaaaactgcttccatgtctaagcaaagaaaactgcctacatactggtttgtcctggcggggaataaaagggatcattggttccagtcacaggtgtagtaattgtgggtactttaaggtttggagcacttacaaggctgtggtagaatcataccccatggataccacatattaaaccatgtatatctgtggaatactcaatgtgtacacctttgactacagctgcagaagtgttcctttagacaaagttgtgacccattttactctggataagggcagaaacggttcacattccattatttgtaaagttacctgctgttagctttcattatttttgctacactcattttatttgtatttaaatgttttaggcaacctaagaacaaatgtaaaagtaaagatgcaggaaaaatgaattgcttggtattcattacttcatgtatatcaagcacagcagtaaaacaaaaacccatgtatttaacttttttttaggatttttgcttttgtgattttttttttttttttttgatacttgcctaacatgcatgtgctgtaaaaatagttaacagggaaataacttgagatgatggctagctttgtttaatgtcttatgaaattttcatgaacaatccaagcataattgttaagaacacgtgtattaaattcatgtaagtggaataaaagttttatgaatggacttttcaactactttctctacagcttttcatgtaaattagtcttggttctgaaacttctctaaaggaaattgtacattctttgaaatttattccttattccctcttggcagctaatgggctcttaccaagtttaaacacaaaatttatcataacaaaaatactactaatataactactgtttccatgtcccatgatcccctctcttcctccccaccctgaaaaaaatgagttcctattttttctgggagagggggggattgattagaaaaaaatgtagtgtgttccatttaaaattttggcatatggcattttctaacttaggaagccacaatgttcttggcccatcatgacattgggtagcattaactgtaagttttgtgcttccaaatcactttttggtttttaagaatttcttgatactcttatagcctgccttcaattttgatcctttattctttctatttgtcaggtgcacaagattaccttcctgttttagccttctgtcttgtcaccaaccattcttacttggtggccatgtacttggaaaaaggccgcatgatctttctggctccactcagtgtctaaggcaccctgcttcctttgcttgcatcccacagactatttccctcatcctatttactgcagcaaatctctccttagttgatgagactgtgtttatctccctttaaaaccctacctatcctgaatggtctgtcattgtctgcctttaaaatccttcctctttcttcctcctctattctctaaataatgatggggctaagttatacccaaagctcactttacaaaatatttcctcagtactttgcagaaaacaccaaacaaaaatgccattttaaaaaaggtgtattttttcttttagaatgtaagctcctcaagagcagggacaatgttttctgtatgttctattgtgcctagtacactgtaaatgctcaataaatattgatgatgggaggcagtgagtcttgatgataagggtgagaaactgaaatccc

SEQ ID NO: 1069 - DNA, 1746 bp, Homo sapiens
gagcctgacttcagcgctcccactctcggccgacacccctcatggccaaccgttacaccatggatctgactgccatctacgagagcctcctgtcgctgagccctgacgtgcccgtgccatccgaccatggagggactgagtccagcccaggctggggctcctcgggaccctggagcctgagcccctccgactccagcccgtctggggtcacctcccgcctgcctggccgctccaccagcctagtggagggccgcagctgtggctgggtgcccccaccccctggcttcgcaccgctggctccccgcctgggccctgagctgtcaccctcacccacttcgcccactgcaacctccaccaccccctcgcgctacaagactgagctatgtcggaccttctcagagagtgggcgctgccgctacggggccaagtgccagtttgcccatggcctgggcgagctgcgccaggccaatcgccaccccaaatacaagacggaactctgtcacaagttctacctccagggccgctgcccctacggctctcgctgccacttcatccacaaccctagcgaagacctggcggccccgggccaccctcctgtgcttcgccagagcatcagcttctccggcctgccctctggccgccggacctcaccaccaccaccaggcctggccggcccttccctgtcctccagctccttctcgccctccagctccccaccaccacctggggaccttccactgtcaccctctgccttctctgctgcccctggcacccccctggctcgaagagaccccaccccagtctgttgcccctcctgccgaagggccactcctatcagcgtctgggggcccttgggtggcctggttcggaccccctctgtacagtccctgggatccgaccctgatgaatatgccagcagcggcagcagcctggggggctctgactctcccgtcttcgaggcgggagtttttgcaccaccccagcccgtggcagccccccggcgactccccatcttcaatcgcatctctgtttctgagtgacaaagtgactgcccggtcagatcagctggatctcagcggggagccacgtctcttgcactgtggtctctgcatggaccccagggctgtggggacttgggggacagtaatcaagtaatccccttttccagaatgcattaacccactcccctgacctcacgctggggcaggtccccaagtgtgcaagctcagtattcatgatggtgggggatggagtgtcttccgaggttcttgggggaaaaaaaattgtagcatatttaagggaggcaatgaaccctctcccccacctcttccctgcccaaatctgtctcctagaatcttatgtgctgtgaataataggccttcactgcccctccagtttttatagacctgaggttccagtgtctcctggtaactggaacctctcctgagggggaatcctggtgctcaaattaccctccaaaagcaagtagccaaagccgttgccaaaccccacccataaatcaatgggccctttatttatgacgactttatttattctaatatgattttatagtatttatatatattgggtcgtctgcttcccttgtatttttcttcctttttttgtaatattgaaaacgacgatataattattataagtagactataatatatttagtaatatatattattaccttaaaagtctatttttgtgttttgggcatttttaaataaacaatctgagtgt

SEQ ID NO: 1070 - DNA, 1500 bp, Homo sapiens
gaattccaaacagcctctaccttgcgagccgtcttccccaggcctgcgtccgagtctccgccgctgcgggcccgctccgacgcggaagatctgactgcagccatgagcagcaatgagtgcttcaagtgtggacgatctggccactgggcccgggaatgtcctactggtggaggccgtggtcgtggaatgagaagccgtggcagaggtggttttacctcggatagaggtttccagtttgtttcctcgtctcttccagatatttgttatcgctgtggtgagtctggtcatcttgccaaggattgtgatcttcaggaggatgcctgctataactgcggtagaggtggccacattgccaaggactgcaaggagcccaagagagagcgagagcaatgctgctacaactgtggcaaaccaggccatctggctcgtgactgcgaccatgcagatgagcagaaatgctattcttgtggagaattcggacacattcaaaaagactgcaccaaagtgaagtgctataggtgtggtgaaactggtcatgtagccatcaactgcagcaagacaagtgaagtcaactgttaccgctgtggcgagtcagggcaccttgcacgggaatgcacaattgaggctacagcctaattattttcctttgtcgcccctcctttttctgattgatggttgtattattttctctgaatcctcttcactggccaaaggttggcagatagaggcaactcccaggccagtgagctttacttgccgtgtaaaaggaggaaaggggtggaaaaaaaccgactttctgcatttaactacaaaaaaagtttatgtttagtttggtagaggtgttatgtataatgctttgttaaagaaccccctttccgtgccactggtgaatagggattgatgaatgggaagagttgagtcagaccagtaagcccgtcctgggttccttgaacatgttcccatgtaggaggtaaaaccaattctggaagtgtctatgaacttccataaataactttaattttagtataatgatggtcttggattgtctgacctcagtagctattaaataacatcaagtaacatctgtatcaggccctacatagaacatacagttgagtgggagtaaacaaaaagataaacatgcgtgttaatggctgttcgagagaaatcggaataaaagcctaaacaggaacaacttcatcacagtgttgatgttggacacatagatggtgatggcaaaggtttagaacacattattttcaaagactaaatctaaaacccagagtaaacatcaatgctcagagttagcataatttggagctattcaggaattgcagagaaatgcattttcacagaaatcaagatgttatttttgtatactatatcacttagacaactgtgtttcatttgctgtaatcagtttttaaaagtcagatggaaagagcaactgaagtcctagaaaatagaaatgtaattttaaactattccaataaagctgga

SEQ ID NO: 1071 - DNA, 3257 bp, Homo sapiens
gaattcggggtgcagtccccgactcgtcccggcccgttcggagccgcccgagagcgcacaaaggccgacggtttgggcgcgtgcgcgggacacgggggacgggcggtgtcacgtgatcgcgaggccgcgggcgcgcgggcgcgactcggcttcaacttctttttccacagatcctggtcctacaaataagcctgctcatgtgagataagaaagagttcctggaaccaggaattcattctcagtgtagaagacctagctgagacctcactccacagttttggggcagaagcagaagagacgcacagtagaaccgatctcagccttgctgatcatctcgtacagcagcagaaaatgaccatgttacaggagtcattctcatttgacgatttatctgtggacttcacccaaaaggagtggcagctactggatccctctcagaagaatttatacaaggatgtgatgttggagaactatagcagcctagtgtcactggggtatgaagttatgaaaccagatgtcatcttcaaattggaggaaggagaagagccgtgggtaggagatggagaaattccaagttcagattctccagaagtctggaaagtagatggtaacatgatgtggcaccaggataaccaagacaagcttaaaattataaaaagaggtcatgaatgtgatgcatttggaaaaaatttcaatctgaacatgaactttgttcctttaaggaaatcaaacagtgaaggtgacttagatggattgattttaaaacatcatttagatttgcttattccaaaaggagattatggaaaagcagaatcagatgactttaatgtgtttgataatttttttctccattccaagcctgaggatactgatacctggttaaaatactatgactgtgataaatataaagagagctataaaaagtcacagattatcatatatcatagaaatcgtttaggggagaaactctatgaatgcagtgaatgtaggaagcgcttcagtaagaaaccaagtctcattaaacatcagagcagacatataagagacatagcctttggctgtggtaattgtggcaaaacctttccccagaagtctcagtttattacacatcacagaactcatacaggagaaaaaccttataattgtagccagtgtgggaaagccttctcccaaaagtcacagctcacatcccatcagcggacacatacaggagagaaaccttatgagtgtggtgaatgtgggaaagccttctcccggaagtcacatctcatatcgcattggagaacacacacaggagagaaaccctatggatgcaatgaatgtgggagggcctttagtgaaaagtccaatctcattaaccatcagagaattcataccggtgagaagccttttgaatgcagggaatgtgggaaagccttcagcaggaagtcacaactcgttacacatcacagaactcacacaggaacaaaaccctttggatgtagtgattgtagaaaagccttctttgagaagtcagagcttattagacatcagacaattcatactggagagaaaccctatgaatgcagcgagtgtaggaaagcatttagagagaggtcgagtctcattaatcatcagagaacacatacaggagagaaacctcatggatgcattcagtgtgggaaggccttctcccagaagtcacatctcatatcacatcagatgacacacacaggagaaaaaccctttatatgcagtaaatgtgggaaagccttcagcaggaaatcacagctcgttagacatcagagaactcatacgggagaaaaaccgtatgaatgcagtgagtgtgggaaagctttcagtgaaaaattaagtctcactaatcatcaaagaattcatacaggagaaaaaccatatgtatgcagtgaatgtgggaaagccttttgtcagaagtcacatctcatatcacatcagaggacacatacaggggagaaaccctatgaatgcagtgaatgtgggaaggcctttggtgagaagtcaagtcttgcaactcatcagagaactcatactggagaaaaaccgtatgaatgcagggactgtgaaaaagctttctcccagaaatcacagctaaatacccatcagagaattcacactggagagaaaccctatgaatgcagtctttgtaggaaagctttttttgagaagtcggagctaattagacatctgagaactcatacaggagaaaaaccttatgaatgcaatgaatgtagaaaagccttcagggagaagtcaagtctcatcaatcatcagagaatacatacaggagagaagccttttgaatgcagtgagtgtggcaaagctttctctcggaagtcacaccttataccacatcaaaggacacatacgggtgagaaaccctatggatgcagtgaatgtaggaaggccttctctcagaagtcacagctggttaatcatcagagaattcatacaggagagaagccttatcgatgcattgaatgtgggaaagctttctcacagaagtcacagctcatcaatcatcagagaactcatacagtaaaaaaatcctaggaatacagttaatagtagtctttgacagatcatcttggacttcaggaaatgcaattatgataacgtttgtagacagtcacgtcatgttaggtgtctgtactccatgaggatgagaactctaaatgaggtggtgtatggaaagccgatcataattcatagagtagagtgaacctatgactgcagtggatctcaaaaacttttaaaaccatagacaagccttatagagtagaacattcacagcaaagaagaatcctgtgaatgtccaaaagccttccagaagtcaagtctcttaagctattagaaatattccactggggatgagggaaaaccccatgaatgcgggaaatgaggcaatatttttaagaaatgacagttcattgtacataagaaaatgctcttaggaatgaagttctatgaaagtactaaatatgggacagtgcaacaagtaaccagactattttgtattttggagaattcatattatggagaacctaacaatttaaagacactgggaacacttgcccctcagaatagtactgtcaagggaagccatacactttttgtagacatgggtaccaaaaatacccaattctaagtggttgacagatgttcactttgaagtgtgaagttttaaaaatacgtgaataaattggttattgaaacatctaaaaaaaaaaaaacccgaattc

SEQ ID NO: 1072 - DNA, 3839 bp, Homo sapiens
caggtctcgacttcactgctctgtgtcctctgctccaggaggcccagcctgtgtggccctgtgacctgcaggtattggaagagccacagctaagatgccaggaacccctggaagcctagaaatgggactgttgacatttagggatgtggccatagaattctctccggaggagtggcaatgtctggacactgcacagcagaatttatataggaatgtgatgttagagaactacagaaacctggccttcctgggtattgctctctctaagccagacctgattacttatctggagcaaggaaaagagccctggaatatgaagcaacatgagatggtggatgaacccacaggtatatgtcctcattttcctcaagacttttggccagagcagagcatggaagattcttttcaaaaagtattactgagaaaatatgaaaaatgtggacatgagaatttacagttaagaaaaggttgtaaaagtgtggatgagtgtaaggtgcacaaagaaggttataataaacttaaccagtgtctcacaactgcccagagcaaagtatttcaatgtgggaaatatttgaaagtcttctataaatttttaaattcaaacagacatacgataagacataccggaaagaaatgcttcaaatgtaaaaaatgtgtcaagtcattttgcatccgtttacacaaaacccaacataaatgcgtttatattacagagaagtcctgtaaatgtaaagaatgtgaaaaaacctttcattggtcctcaacccttactaatcataaggaaattcatactgaagataaaccctacaaatgtgaagaatgtggcaaagcttttaagcagctctcaacccttactacacataaaataatctgtgctaaagagaaaatctacaagtgtgaagaatgtggcaaagcatttctatggtcctcaaccctaactagacataagaggatacacactggagagaaaccctacaaatgtgaagaatgtggcaaagcttttagccattcttcaacccttgctaaacataagagaattcatactggagagaaaccctacaaatgtgaagaatgtggcaaagcttttagccattcttcagcccttgctaaacataagagaattcatactggagagaaaccctacaaatgtaaagaatgtggcaaagcttttagcaattcctcaacccttgctaatcataagataactcatactgaagagaaaccctacaaatgtaaagaatgtgacaaaacttttaagcgactctcaacccttactaaacataaaataatacatgctggagagaaactctacaaatgtgaagaatgtggcaaagcttttaatcgatcttcaaatcttactatacataagtttattcatactggagagaaaccttacaagtgtgaagaatgtggcaaagcatttaactggtcctcaagccttactaaacataaaagatttcatactagagagaaacccttcaaatgtaaagaatgtggcaaaggatttatatggtcttcaaccctaactagacataagaggatacacactggagagaagccctacaaatgtgaagaatgtggcaaagcttttaggcaatcctcaacccttactaaacataagataattcatactggagagaaaccctacaaatttgaagaatgtggcaaagcttttagacaatccttaacccttaataaacataagataattcatagtagagagaaaccctacaaatgtaaagaatgtggcaaagcttttaagcaattctcaacccttactacacataaaataattcatgctggaaagaaactctacaaatgtgaagaatgtggcaaagcttttaatcattcctcaagtctttctacacataagataattcatactggagagaagtcttacaagtgtgaagaatgtggcaaagcatttctatggtcctcaaccctaagaagacataagaggatacacactggagagaaaccctacaaatgtgaagaatgtggcaaagcttttagccattcttcagcccttgctaaacataagagaattcatactggagagaaaccctacaaatgtaaagaatgtggcaaagcttttagcaattcctcaacccttgctaatcataagataactcatactgaagagaaaccctacaaatgtaaagaatgtgacaaaacttttaagcgactctcaacccttactaaacataaaataatacatgctggagagaaactctacaaatgtgaagaatgtggcaaagcttttaatcgatcttcaaatcttactatacataagtttattcatactggagagaaaccttacaagtgtgaagaatgtggcaaagcatttaactggtcctcaagccttactaaacataaaagaattcatactagagagaaacccttcaaatgtaaagaatgtggcaaagcatttatatggtcttcaaccctaactagacataagaggatacacactggagagaagccctacaaatgtgaagaatgtggcaaagcttttagccgttcctcaacccttactaagcataagacaattcatactggagagaaaccctacaaatgtaaagaatgtggcaaagcttttaagcactcctcagcccttgctaaacataaaataatacatgctggagagaaactctacaaatgtgaggaatgtggcaaagcttttaatcaatcttcaaatcttacgacacataagataattcatactaaagagaaaccttccaagagtgaagaatgtgacaaagcatttatctggtcctcaacccttactgaacataagagaattcataccagagagaaaccctacaaatgtgaagaatgtggcaaagcatttagccagccttcacaccttactacacataagaggatgcacactggagagaaaccctacaaatgtgaagaatgtggcaaagcttttagccaatcctcaacccttactacacataagataattcatactggagagaaaccctacaaatgtgaagaatgtggcaaagcttttaggaaatcttcaactcttactgaacataagataattcatactggagagaaaccctacaaatgtgaagaatgtggcaaagcatttagccaatcctcaaccctaactagacatacgaggatgcacactggagagaaaccatacaaatgtgaagaatgtgggaaagcttttaatcgatcctcaaagcttactacacataagataattcatactggagagaaaccttacaagtgtgaagaatgtggcaaagcatttatatcatcctcaaccctaaatggacataagagaattcatactagagagaaaccctacaaatgtgaagaatgtggcaaagcatttagccaatcttcaaccctaactagacataagaggttgcacaccggagagaaaccctacaaatgtggagaatgtggcaaagcctttaaagagtcctcagctcttactaaacataagataattcacactggagagaaaccctacaaatgtgaaaaatgttgcaaagcctttaaccagtcttcaatccttactaaccataagaaaattcatactatcacacctgtaatcccactactttgggaggccgaggcgggcggatcacgaggtcaggagatggagaccatcctggctaacacagtgaaaccccttctctactaaaaaatacaaaaaactagccgggcgtggtggcgggcgcctgtagtcccagctatgcgagaggctgaggcaggagaatggcgtgaacccgggaggcggagcttgcagtgagccgagatcacgccactgcactcaagcctgggcgacagagcgagactccgtctcaaaaaaa

SEQ ID NO: 1073 - DNA, 3250 bp, Homo sapiens
ggagtcaggaatggagagaagggtaatggtgttacctcttattgtggaaacctgttgagatcacagagaatatactgacggcataaaagggcagaaccatagcagggtgcgcgctgctgtagttgccttccatggatctataggagagcaagtcctccaggagaagaagtcctcaccagtgaacggagacctctctgaactaagaataccatggccacgtcagccccactacggagcctggaagaggaggtgacctgctccatctgtcttgattacctgcgggaccctgtgaccattgactgtggccacgtcttctgccgcagctgcaccacagacgtccgccccatctcagggagccgccccgtctgcccactctgcaagaagccttttaagaaggagaacatccgacccgtgtggcaactggccagcctggtggagaacattgagcggctgaaggtggacaagggcaggcagccgggagaggtgacccgggagcagcaggatgcaaagttgtgcgagcgacaccgagagaagctgcactactactgtgaggacgacgggaagctgctgtgcgtgatgtgccgggagtcccgggagcacaggccccacacggccgtcctcatggagaaggccgcccagccccacagggaaaaaatcctgaaccacctgagtaccctaaggagagacagagacaaaattcagggcttccaggcaaagggagaagctgatatcctggccgcgctgaagaagctccaggaccagaggcagtacattgtggctgagtttgagcagggtcatcagttcctgagggagcgggaggaacacctgctggaacagctggcgaagctggagcaggagctcacggagggcagggagaagttcaagagccggggcgtcggggagcttgcccggctggccctggtcatctccgaactggagggcaaggcgcagcagccagctgcagagctcatgcaggacacgagagacttcctaaacaggtatccacggaagaagttctgggttgggaaacccattgctcgagtggttaaaaaaaagaccggagaattctcagataaactcctctctctgcaacgaggcctgagggaattccaggggaagctgctgagagacttggaatataagacagtgagcgtcaccctggacccacagtcggccagtgggtacctgcagctgtcagaggactggaagtgcgtgacctacaccagcctgtacaagagtgcctacctgcacccccagcagtttgactgtgagcctggggtgctgggcagcaagggcttcacctggggcaaggtctactgggaagtggaagtggagagggagggctggtctgaggatgaagaagagggggatgaggaggaagagggagaagaggaggaggaggaagaggaggccggctatggggatggatatgacgactgggaaacggacgaagatgaggaatcgttgggcgatgaagaggaagaagaggaggaggaagaggaggaagttctggaaagctgcatggtgggggtggctagagactctgtgaagaggaagggagacctctccctgcggccagaggatggcgtgtgggcgctgcgcctctcctcctccggcatctgggccaacaccagccccgaggctgagcttttcccagcactgcggccccggagagtgggcatcgccctggattatgaagggggcaccgtgactttcaccaacgcagagtcacaggaactcatctacaccttcactgccaccttcacccggcgcctggtccccttcctgtggctcaagtggccaggaacacgcctcctgctaagaccctgagccctgacatctgcccccagccccaaccctcagatgcttcacttctttggaattccaggactctcaatggggggacgggatgcctggcctaagcacctggagcaggggaccccatatccactggtagccacctccccattgctgtggccccctgaaatctcactcagtgctgttgctccatctactgccctaatggggctcttttcccacctcctgctggtttcccgagggaacttctgaccctggagtccatgagggctcctttcctttttgaccacgaccttggccctagctctgcactctctggaataagggcccgatgcagcattttcttgcccagtgtggcaagacctcagaaaaaccagtcaattacgcctaagatcattttgctgtccttaaaccccccaggttccttcttgcacaaatccactctgctgcccaccttccctggcattttaaacagacctaccccaccccaactcagagttaagcatacatggcaatgctgaaaataaacaaaatccactgaggcttcccaggccatttaaagcctggagtaccagcgcatatcatctcatggggtccagagtggagtccaggcttctctgaaaccagggctgagcatatttccatagccaaggaggtgggactccctggagctatctgtggtcttagggaaggatccagacatacacggctttggggtacaagctgtgatcactgatcaataaattatctctagattggtccttgtgaggggagttttaagaatccagaacatcttgctcttgatcagcacatccaaaaacaccaagacaaacatccagtggagcagaacctctcctgcctcgggagttctgaccgggttccccagcagggtgttaagcctctgtctctggccctaccagcatccaggttccactttcctaggagagagtggagatgggaagacagggaaaggaaggcagcaggaggccacaagcccaccaggtcttcatgtcaagagagggagtaacatgtcttctcattgcccacggacccaacctctgtccaggtgcccctcatcatcacagtttaacacaagctcccctgctccagccaaattgatctcccagtcttgtccttacccattccaagtgctctgccagcccctgttcatccaagttttaagtcctccaccctgttataagagactgttccaacggctctgggcctcagtggtcacttgaccaccattgtctcagagctgcccactttgtgtgtgtcacatgctgcctgagtcacatgtacatcttatttctgcctctagttttgtaagctcctggagggcggataacatcttatactactcttgtattctcatggcacctagtgcagtgctgggcacagagtaggtgctcaataaagacttgttgaatga

SEQ ID NO: 1074 - DNA, 2347 bp, Homo sapiens
agagagagagagagagagagagagagagagagagagagagagagagagagagagagagagagaggaacgaggccgtcgcatctttgtgtctgcttcctgtgggacgtggtggtagccgttgggttgggaaagtgagggatttttggcctcgtttctcctgcttcttttctcctcccttttactttgccggtagaacacagttatgggtcgcaagaagaagaagcagctgaagccgtggtgctggtattgtaatagagattttgatgatgagaagatccttattcagcaccaaaaagcaaagcattttaaatgccatatatgtcacaagaaattgtatacaggacctggcttagctattcattgcatgcaggtacataaagaaacaatagatgccgtaccaaatgcaatacctggaagaacagacatagagttggaaatatatggtatggaaggtattccagaaaaagacatggatgaaagacgacgacttcttgaacagaaaacacaagaaagtcaaaaaaagaagcaacaagatgattctgatgaatatgatgatgacgactctgcagcctcaacttcatttcagccacagcctgttcaacctcagcaaggttatattcctccaatggcacagccaggactgccaccagtaccaggagcaccaggaatgcctccaggcatacctccattaatgccaggtgttcctcctctgatgccaggaatgccaccagttatgccaggcatgccacctggaatgatgccaatgggtggaatgatgccacctggaccaggaataccacctctgatgcctggaatgccaccaggtatgcccccacctgttccacgtcctggaattcctccaatgactcaagcacaggctgtttcagcgccaggtattcttaatagaccacctgcaccaacagcaactgtacctgccccacagcctccagttactaagcctcttttccccagtgctggacagatggggacacctgtcacaagctcaagtacagcttcatccaattcagaaagtctgtctgcatcttctaaagctctgtttcctagcacagcacaagctcaggcagctgtccaaggacctgttggtacagatttcaaacccttaaatagtacccctgcaacaactacagaacccccaaagcctacattccctgcttatacacagtctacagcttcaacaactagtacaacaaatagtactgcagctaaaccagcggcttcaataacaagtaagcctgctacacttacaacaactagtgcaaccagtaagttgatccatccagatgaggatatatccctggaagagagaagggcacagttacctaagtatcaacgtaatcttcctcggccaggacaggcccccatcggtaatccaccagttggaccaattggaggtatgatgccaccacagccaggcatcccacagcaacaaggaatgagacccccaatgccacctcatggtcagtatggtggtcatcatcaaggcatgccaggataccttcctggtgctatgcccccgtatgggcagggaccgccaatggtgcccccttaccagggtgggcctcctcgacctccgatgggaatgagacctcctgtaatgtcgcaaggtggccgttactgatcttacttcatccagtctaataggtttggagattaaaccttttctcaacttgtgctgtttatatagccaagcttccgtcaataaggcttcattgtgactttaacaaacattatcttcccacataccaggaactattggacatttattttacatgggaaaaattatttggaataataaagcaggaacttttcctgaagttgcaatttatactgtatggcttctttttcatgtttcatctaggtttttagaagtgaagtatagtaaatttggttcgttaaattgtgaaggcgctggaattacatgaacataccaccctagtaaaggcaagttctgtaagcttacattgctatttgtaaagtttgccttcacagcatttcagatgctgttggacttcatgtccccaacctagcttggtgagggctgtaactgtttccaagtacttgtacattggaagtctgaatgtgtaacaatatttaatgtatttagagttcctcatgttgcagggtttaagaaatctgacccaccaaggtcatgtgacttttctgtactgttaaacttcattgtaataaaatgagagaaaaatttatgcctttttattcataacccagctgtggaccactgcctgaaaggtttgtacagatgcatgccacagtagatgtccacataataaaattcatagttaccaatgcaataaaaaaaaaaaaaaaa

SEQ ID NO: 1075 - DNA, 4394 bp, Homo sapiens
ccggctcggtacgcgctctgctccgagccgctcactgcgtggtagagtctggtgcccccgccgtcgcctgcatcgccgccaccgccgctccgccacgaccaccgccgcctcctgccctgcagccaccgccaccgcctgtgtcgccgccgcctcgggaccggctgtatgattaggccacaatcttcaatgagtaaacatattcctcaattctgtggtgttcttggtcacacatttatggagtttctgaagggcagtggagattactgccaggcacagcacgacctctatgcagacaagtgaactgtagaaactgattactgctccaccaagaagcccccataagagtggttatcctggacacagaagtgttgaattgaaatccacagagcattttacaagagttctgacctggatggggtaaacctcagtgcacttcttttctgttggcctcagtattactggattgaagaattgctgcttcttgttaggaggttcatttcacttatcattacttacaacttcatactcaaagcactgagaatttcaagtggagtatattgaagtagacttcagtttctttgcatcatttctgtattcaatttttttaattatttcataaccctattgagtgttttttaactaaattaacatggctcgaatgaaccgcccagctcctgtggaagtcacatacaagaacatgagatttcttattacacacaatccaaccaatgcgaccttaaacaaatttatagaggaacttaagaagtatggagttaccacaatagtaagagtatgtgaagcaacttatgacactactcttgtggagaaagaaggtatccatgttcttgattggccttttgatgatggtgcaccaccatccaaccagattgttgatgactggttaagtcttgtgaaaattaagtttcgtgaagaacctggttgttgtattgctgttcattgcgttgcaggccttgggagagctccagtacttgttgccctagcattaattgaaggtggaatgaaatacgaagatgcagtacaattcataagacaaaagcggcgtggagcttttaacagcaagcaacttctgtatttggagaagtatcgtcctaaaatgcggctgcgtttcaaagattccaacggtcatagaaacaactgttgcattcaataaaattggggtgcctaatgctactggaagtggaacttgagatagggcctaatttgttatacatattagccaacatgttggcttagtaagtctaatgaagcttccataggagtattgaaaggcagttttaccaggcctcaagctagacagatttggcaacctctgtatttgggttacagtcaacctatttggatacttggcaaaagattcttgctgtcagcatataaaatgtgcttgtcatttgtatcaattgacctttccccaaatcatgcagtattgagttatgacttgttaaatctattcccatgccagaatcttatcaatacataagaaatttaggaagattaggtgccaaaatacccagcacaatacttgtatatttttagtaccatacagaagtaaaatcccaggaactatgaacactagaccttatgtggtttattccttcaatcatttcaaacattgaaagtagggcctacatggttatttgcctgctcactttatgtttacatctcccacattcataccaatatacgtcaggtttgcttaaccattgatttttttttttttttaccaagtcttacagtgattattttacgtgtttccatgtatctcactttgtgctgtattaaaaaaacctccattttgaaaatctacgttgtacagaagcacatgtctttaatgtcttcagacaaaaaagccttacattaatttaatgtttgcactctgaggtgcaacttaacagggagggcctgagaaaagaatgggagggggctattaattattttttagcaaaatgttgcctttgtcttgtgcaaacatgtagaatatgctctttaatttagtaaaatatttttttaaaaggtagagatgctttgttattgtaatcataaacttcctgaaattcttgtaatttttttcccatacttatcagaagtgtgtttaccaacttatttttgtttgaaagtgtgattttttttttccttcccaacctctcttgcaaaaaaagaaatgggtttctgctaatgaattgagcacatctaatattttatatgccttttggagctgtgtaagttaatatttgatacttgacaatttgttttattatgtaattgataaaatggtgatgtgtattaatgttagttcaaccatatatttatactgtctggggatgtgtggttatagttctgtgggagaaataattttgtcagtgttcaccagcttgtaaaaacttagtgcgagagctgaaacatctaaataaataatgacatgcatttatcatcattgagattggtttgctttaaattaacttattttgtagaagacaaaatgaattgcacttcacttaatgtgtgtcctcatctttttacaaataaatgaaggattataaatgatgtcagcattttagtaaacttttagacaaaatttgttagggtcattcatgaaaactttaatactaaaagcactttccattatatactttttaaaggtctagataattttgaaccaatttattattgtgtactgaggagaaataatgtatagtagaggacagccttggtttgtaaagctcagttccactagttcatggttttgtgcaacttctgagcctcagttttctcctttgcaaattaataattacatacctttatagattttgaaattaatttaaatattagtatttggtacatgaaggcttaatgttaagtttcctttaatgatccacaataatccctttgatcacgttaatctaaatctagatgtctttgtctaattttttttgaatagcagttataaatgtaaaggactcaaagtttaagtaaaaagtgatactccaccttgtgtttcaaagaatttagttccacctcttcataccagtttaacacttaatatatttcattggattttagacagggcaaaaggaagaacaggggcctctggaggcccttggttatttaaatcttggattatttgtgatagtaatcacaaatttttggctaatttttaacctgaggttttgttttttttttaaaggaaatgcagcctagtcttgagaacataattttatataatcaattactaaatgttaaactattaccacacagcccataaaacagcatttgcgtttattgagagagaggatgtgccatcatgattaatgaaaactatcttttgagtttgaaaagaaattaatttgcagtgtttggattgtatatatggtgctaaaaataaattaatttactttataaaccttatctgtacattatacgatgtgatgaaatttgctttttatccaaatattttgtatcttgtaaatatggctaattataggaatgcctataatacatcttagattccttatatctaataagagttcaaagagttatgagttgaagtcttgaatgcaggaaactatctgatagtgttctaaaatttggttacttgggtttggatacccttagtgggatgatgtaaatagaggctagctacctaggcttgtctatagcaaccataatgttgatgtaagtaatgcggttactgaatcataagaaaatgccatctctttttagttgaaggaaaactctggaagtaggtgccattggtcattctgcagtgcactgcaaccattgtttcccctagtgccctcttttccctagggcattgctctcctattcccacgccttaacacagctctatacctagaagcagccagcccaggcatgcagtcacatttaatcacatcccccttctagagtgcttcaaaatgatgtagtccctcaacttggctaaagaatctcaatctcttgaaatttatttttttaatgtcatattcatctggtaaatatctactgtttgccaggcatttaagaatatggcaaagaacataaaagatggtgtcaccagattttggtcaccaatgagtacccgacccgttgccatgattaagagagaatgctttctattggagtttcaggaaatataatttgagaatactttaaagggaagtggaagtataagtgaatgatatttttcttttacatgtaaacaatgaagttatttcaaagttaagttttaaacaaaatacatgaagtagtgtctgccatacatgttaatattctacattcttgcttccttaaattaatatgtttgtgtgtatatatgtgcctcacacctgaattgaaaattaaagactggtttaaaagtggttaaaaaaaaaaaaaaaaaa

SEQ ID NO: 1076 - DNA, 4022 bp, Homo sapiens
gtacgtgcgcgtctccctgccgccgccgccgcccgccgcgggccgccccggggccgccgtcgccgacgacgcgcgggaggaggaggaggaggccgccccgccgccgccgccgccgccgccgccccggctcgccgccgcccgcccgccgggctcgcagccccggcccccggccgcaggcgaggcccaggccgcggccgacatgaaccaccagcagcagcagcagcagcagaaagcgggcgagcagcagttgagcgagcccgaggacatggagatggaagcgggagatacagatgacccaccaagaattactcagaaccctgtgatcaatgggaatgtggccctgagtgatggacacaacaccgcggaggaggacatggaggatgacaccagttggcgctccgaggcaacctttcagttcactgtggagcgcttcagcagactgagtgagtcggtccttagccctccgtgttttgtgcgaaatctgccatggaagattatggtgatgccacgcttttatccagacagaccacaccaaaaaagcgtaggattctttctccagtgcaatgctgaatctgattccacgtcatggtcttgccatgcacaagcagtgctgaagataataaattacagagatgatgaaaagtcgttcagtcgtcgtattagtcatttgttcttccataaagaaaatgattggggattttccaattttatggcctggagtgaagtgaccgatcctgagaaaggatttatagatgatgacaaagttacctttgaagtctttgtacaggcggatgctccccatggagttgcgtgggattcaaagaagcacacaggctacgtcggcttaaagaatcagggagcgacttgttacatgaacagcctgctacagacgttatttttcacgaatcagctacgaaaggctgtgtacatgatgccaaccgagggggatgattcgtctaaaagcgtccctttagcattacaaagagtgttctatgaattacagcatagtgataaacctgtaggaacaaaaaagttaacaaagtcatttgggtgggaaactttagatagcttcatgcaacatgatgttcaggagctttgtcgagtgttgctcgataatgtggaaaataagatgaaaggcacctgtgtagagggcaccatacccaaattattccgcggcaaaatggtgtcctatatccagtgtaaagaagtagactatcggtctgatagaagagaagattattatgatatccagctaagtatcaaaggaaagaaaaatatatttgaatcatttgtggattatgtggcagtagaacagctcgatggggacaataaatacgacgctggggaacatggcttacaggaagcagagaaaggtgtgaaattcctaacattgccaccagtgttacatctacaactgatgagatttatgtatgaccctcagacggaccaaaatatcaagatcaatgataggtttgaattcccagagcagttaccacttgatgaatttttgcaaaaaacagatcctaaggaccctgcaaattatattcttcatgcagtcctggttcatagtggagataatcatggtggacattatgtggtttatctaaaccccaaaggggatggcaaatggtgtaaatttgatgacgacgtggtgtcaaggtgtactaaagaggaagcaattgagcacaattatgggggtcacgatgacgacctgtctgttcgacactgcactaatgcttacatgttagtctacatcagggaatcaaaactgagtgaagttttacaggcggtcaccgaccatgatattcctcagcagttggtggagcgattacaagaagagaaaaggatcgaggctcagaagcggaaggagcggcaggaagcccatctctatatgcaagtgcagatagtcgcagaggaccagttttgtggccaccaagggaatgacatgtacgatgaagaaaaagtgaaatacactgtgttcaaagtattgaagaactcctcgcttgctgagtttgttcagagcctctctcagaccatgggatttccacaagatcaaattcgattgtggcccatgcaagcaaggagtaatggaacaaaacgaccagcaatgttagataatgaagccgacggcaataaaacaatgattgagctcagtgataatgaaaacccttggacaatattcctggaaacagttgatcccgagctggctgctagtggagcgaccttacccaagtttgataaagatcatgatgtaatgttatttttgaagatgtatgatcccaaaacgcggagcttgaattactgtgggcatatctacacaccaatatcctgtaaaatacgtgacttgctcccagttatgtgtgacagagcaggatttattcaagatactagccttatcctctatgaggaagttaaaccgaatttaacagagagaattcaggactatgacgtgtctcttgataaagcccttgatgaactaatggatggtgacatcatagtatttcagaaggatgaccctgaaaatgataacagtgaattacccaccgcaaaggagtatttccgagatctctaccaccgcgttgatgtcattttctgtgataaaacaatccctaatgatcctggatttgtggttacgttatcaaatagaatgaattattttcaggttgcaaagacagttgcacagaggctcaacacagatccaatgttgctgcagtttttcaagtctcaaggttatagggatggcccaggtaatcctcttagacataattatgaaggtactttaagagatcttctacagttcttcaagcctagacaacctaagaaactttactatcagcagcttaagatgaaaatcacagactttgagaacaggcgaagttttaaatgtatatggttaaacagccaatttagggaagaggaaataacactatatccagacaagcatgggtgtgtccgggacctgttagaagaatgtaaaaaggccgtggagcttggggagaaagcatcagggaaacttaggctgctagaaattgtaagctacaaaatcattggtgttcatcaagaagatgaactattagaatgtttatctcctgcaacgagccggacgtttcgaatagaggaaatccctttggaccaggtggacatagacaaagagaatgagatgcttgtcacagtggcgcatttccacaaagaggtcttcggaacgttcggaatcccgtttttgctgaggatacaccagggcgagcattttcgagaagtgatgaagcgaatccagagcctgctggacatccaggagaaggagtttgagaagtttaaatttgcaattgtaatgacgggccgacaccagtacataaatgaagacgagtatgaagtaaatttgaaagactttgagccacagcccggtaatatgtctcatcctcggccttggctagggctcgaccacttcaacaaagccccaaagaggagtcgctacacttaccttgaaaaggccattaaaatccataactgatttccaagctggtgtgttcaaggcgaggacggtgtgtgggtggccccttaacagcctagaactttggtgcacgtgccctctagccgaagtcttcagcaagaggattcgctgctggtgttaattttattttattgaggctgttcagtttggcttctctgtatctattgactgccctttttgagcaaaatgaagatgtttttataaagcttggatgccaatgagagttattttatggtaaccacagtgcaaggcaactgtcagcgcaatgggggagaagaggttagtggatcgggggtccctggctcaaggtctctgggctgtccctagtgggcacgagtggctcggctgccttcctggggtcccgtgcaccagccctgcagctagcaagtcttgtgtttaggctcgtctgacctatttccttcagttatactttcaatgaccttttgtgcatctgttaaggcaaaacagagaaactcacaacctaataaatagcgctcttcccttcaaaaaaaaa

SEQ ID NO: 1077 - DNA, 2699 bp, Homo sapiens
  misc_feature (1740)..(1740): n is a, c, g, or t
ggcccgcggcggccgaaatccgcggttcacagcatgtccgcctcggcccctgctgcggagggggagggaacccccacccagcccgcgtccgagaaagaacccgaaatgcccggtcccagagaggagagcgaggaggaagaggacgaggacgacgaggaggaggaggaggaggaaaaagaaaagagtctcatcgtggaaggcaagagggaaaagaaaaaagtagagaggttgacaatgcaagtctcttccttacagagagagccatttacaattgcacaaggaaaggggcagaaactttgtgaaattgagaggatacatttttttctaagtaagaagaaaaccgatgaacttagaaatctacacaaactgctttacaacaggccaggcactgtgtcctcattaaagaagaatgtgggtcagttcagtggctttccatttgaaaaaggaagtgtccaatataaaaagaaggaagaaatgttgaaaaaatttagaaatgccatgttaaagagcatctgtgaggttcttgatttggagagatcaggtgtaaatagtgaactagtgaagaggatcttgaatttcttaatgcatccaaagccttctggcaaaccattgccgaaatctaaaaaaacttgtagcaaaggcagtaaaaaggaacggaacagttctggaatggcaaggaaggctaagcgaaccaaatgtcctgaaattctgtcagatgaatctagtagtgatgaagatgaaaagaaaaacaaggaagagtcttcagatgatgaagataaagaaagtgaagaggagccaccaaaaaagacagccaaaagagaaaaacctaaacagaaagctacttctaaaagtaaaaaatctgtgaaaagtgccaatgttaagaaagcagatagcagcaccaccaagaagaatcaaaacagttccaaaaaagaaagtgagtctgaggatagttcagatgatgaacctttaattaaaaagttgaagaaaccccctacagatgaagagttaaaggaaacaataaagaaattactggccagtgctaacttggaagaagtcacaatgaaacagatttgcaaaaaggtctatgaaaattatcctacttatgatttaactgaaagaaaagatttcataaaaacaactgtaaaagagctaatttcttgagatagaggacagagaagatgactcgttcccatagatttgaagatctgatttataccattataccagcaaagagaatgtatttccttttctaaatccttgttaagcaacgttagtagaacttactgctgacctttttatcttgagtgttatgtgaatttgagtttgctgttttaaattgcatttctatgccatttttagtttaaaatcttgcatggcattaattgttccttgcttttatagttgtattttgtacattttggatttctttatataaggtcatagattcttgagctgttgtggtttttagtgcacttaatattagcttgcttaaggcatacttttaatcaagtagaacaaaaactattatcaccaggatttatacatacagagattgtagtatttagtatatgaaatattttgaatacacatctctgtcagtgtgaaaattcagcggcagtgtgtccatcatattaaaaatatacaagctacagttgtccagatcactgaattggaacttttctcctgcatgtgtatatatgtcaaattgtcagcatgacaaaagtgacagatgttattttngtatttttaaaaaacaattggttgtatataaagtttttttatttcttttgtgcagatcactttttaaactcacataggtaggtatctttatagttgtagactatggaatgtcagtgttcagccaaacagtatgatggaacagtgaaagtcaattcagtgatggcaacactgaaggaacagttaccctgctttgcctcgaaagtgtcatcaatttgtaattttagtattaactctgtaaaagtgtctgtaggtacgttttatattatataaggacagaccaaaaatcaacctatcaaagcttcaaaaactttgggaaagggtgggattaagtacaagcacatttggcttacagtaaatgaactgatttttattaactgcttttgcccatataaaatgctgatatttactggaaacctagccagcttcacgattatgactaaagtaccagattataatgccagaatataatgtgcaggcaatcgtggatgtctctgacaaagtgtgtctcaaaaataatatacttttacattaaagaaatttaatgtttctctggagttggggctcttggctttcagagtttggttaatcagtgttgattctagatgatcaacataatggaccactcctgaatgagacttaattttgtctttcaaatttactgtcttaaatcagtttattaaatctgaattttaaaacatgctgtttatgacacaatgacacatttgttgcaccaattaagtgttgaaaaatatctttgcatcatagaacagaaatatataaaaatatatgttgaatgttaacaggtattttcacaggtttgtttcttgatagttactcagacactagggaaaggtaaatacaagtgaacaaaataagcaactaaatgagacctaataattggccttcgattttaaatatttgttcttataaaccttgtcaataaaaataaatctaaatca

SEQ ID NO: 1078 - DNA, 5062 bp, Homo sapiens
cactaacgctcttcctagtccccgggccaactcggacagtttgctcatttattgcaacggtcaaggctggcttgtgccagaacggcgcgcgcgcgacgcacgcacacacacggggggaaacttttttaaaaatgaaaggctagaagagctcagcggcggcgcgggccgtgcgcgagggctccggagctgactcgccgaggcaggaaatccctccggtcgcgacgcccggccccgctcggcgcccgcgtgggatggtgcagcgctcgccgccgggcccgagagctgctgcactgaaggccggcgacgatggcagcgcgcccgctgcccgtgtcccccgcccgcgccctcctgctcgccctggccggtgctctgctcgcgccctgcgaggcccgaggggtgagcttatggaaccaaggaagagctgatgaagttgtcagtgcctctgttcggagtggggacctctggatcccagtgaagagcttcgactccaagaatcatccagaagtgctgaatattcgactacaacgggaaagcaaagaactgatcataaatctggaaagaaatgaaggtctcattgccagcagtttcacggaaacccactatctgcaagacggtactgatgtctccctcgctcgaaattacacggtaattctgggtcactgttactaccatggacatgtacggggatattctgattcagcagtcagtctcagcacgtgttctggtctcaggggacttattgtgtttgaaaatgaaagctatgtcttagaaccaatgaaaagtgcaaccaacagatacaaactcttcccagcgaagaagctgaaaagcgtccggggatcatgtggatcacatcacaacacaccaaacctcgctgcaaagaatgtgtttccaccaccctctcagacatgggcaagaaggcataaaagagagaccctcaaggcaactaagtatgtggagctggtgatcgtggcagacaaccgagagtttcagaggcaaggaaaagatctggaaaaagttaagcagcgattaatagagattgctaatcacgttgacaagttttacagaccactgaacattcggatcgtgttggtaggcgtggaagtgtggaatgacatggacaaatgctctgtaagtcaggacccattcaccagcctccatgaatttctggactggaggaagatgaagcttctacctcgcaaatcccatgacaatgcgcagcttgtcagtggggtttatttccaagggaccaccatcggcatggccccaatcatgagcatgtgcacggcagaccagtctgggggaattgtcatggaccattcagacaatccccttggtgcagccgtgaccctggcacatgagctgggccacaatttcgggatgaatcatgacacactggacaggggctgtagctgtcaaatggcggttgagaaaggaggctgcatcatgaacgcttccaccgggtacccatttcccatggtgttcagcagttgcagcaggaaggacttggagaccagcctggagaaaggaatgggggtgtgcctgtttaacctgccggaagtcagggagtctttcgggggccagaagtgtgggaacagatttgtggaagaaggagaggagtgtgactgtggggagccagaggaatgtatgaatcgctgctgcaatgccaccacctgtaccctgaagccggacgctgtgtgcgcacatgggctgtgctgtgaagactgccagctgaagcctgcaggaacagcgtgcagggactccagcaactcctgtgacctcccagagttctgcacaggggccagccctcactgcccagccaacgtgtacctgcacgatgggcactcatgtcaggatgtggacggctactgctacaatggcatctgccagactcacgagcagcagtgtgtcacactctggggaccaggtgctaaacctgcccctgggatctgctttgagagagtcaattctgcaggtgatccttatggcaactgtggcaaagtctcgaagagttcctttgccaaatgcgagatgagagatgctaaatgtggaaaaatccagtgtcaaggaggtgccagccggccagtcattggtaccaatgccgtttccatagaaacaaacatccccctgcagcaaggaggccggattctgtgccgggggacccacgtgtacttgggcgatgacatgccggacccagggcttgtgcttgcaggcacaaagtgtgcagatggaaaaatctgcctgaatcgtcaatgtcaaaatattagtgtctttggggttcacgagtgtgcaatgcagtgccacggcagaggggtgtgcaacaacaggaagaactgccactgcgaggcccactgggcacctcccttctgtgacaagtttggctttggaggaagcacagacagcggccccatccggcaagcagataaccaaggtttaaccataggaattctggtgaccatcctgtgtcttcttgctgccggatttgtggtttatctcaaaaggaagaccttgatacgactgctgtttacaaataagaagaccaccattgaaaaactaaggtgtgtgcgcccttcccggccaccccgtggcttccaaccctgtcaggctcacctcggccaccttggaaaaggcctgatgaggaagccgccagattcctacccaccgaaggacaatcccaggagattgctgcagtgtcagaatgttgacatcagcagacccctcaacggcctgaatgtccctcagccccagtcaactcagcgagtgcttcctcccctccaccgggccccacgtgcacctagcgtccctgccagacccctgccagccaagcctgcacttaggcaggcccaggggacctgtaagccaaacccccctcagaagcctctgcctgcagatcctctggccagaacaactcggctcactcatgccttggccaggaccccaggacaatgggagactgggctccgcctggcacccctcagacctgctccacaatatccacaccaagtgcccagatccacccacaccgcctatattaagtgagaagccgacaccttttttcaacagtgaagacagaagtttgcactatctttcagctccagttggagttttttgtaccaacttttaggattttttttaatgtttaaaacatcattactataagaactttgagctactgccgtcagtgctgtgctgtgctatggtgctctgtctacttgcacaggtacttgtaaattattaatttatgcagaatgttgattacagtgcagtgcgctgtagtaggcatttttaccatcactgagttttccatggcaggaaggcttgttgtgcttttagtattttagtgaacttgaaatatcctgcttgatgggattctggacaggatgtgtttgctttctgatcaaggccttattggaaagcagtcccccaactacccccagctgtgcttatggtaccagatgcagctcaagagatcccaagtagaatctcagttgattttctggattccccatctcaggccagagccaaggggcttcaggtccaggctgtgtttggctttcagggaggccctgtgccccttgacaactggcaggcaggctcccagggacacctgggagaaatctggcttctggccaggaagctttggtgagaacctgggttgcagacaggaatcttaaggtgtagccacaccaggatagagactggaacactagacaagccagaacttgaccctgagctgaccagccgtgagcatgtttggaaggggtctgtagtgtcactcaaggcggtgcttgatagaaatgccaagcacttctttttctcgctgtcctttctagagcactgccaccagtaggttatttagcttgggaaaggtggtgtttctgtaagaaacctactgcccaggcactgcaaaccgccacctccctatactgcttggagctgagcaaatcaccacaaactgtaatacaatgatcctgtattcagacagatgaggactttccatgggaccacaactattttcagatgtgaaccattaaccagatctagtcaatcaagtctgtttactgcaaggttcaacttattaacaattaggcagactctttatgcttgcaaaaactacaaccaatggaatgtgatgttcatgggtatagttcatgtctgctatcattattcgtagatattggacaaagaaccttctctatggggcatcctctttttccaacttggctgcaggaatctttaaaagatgcttttaacagagtctgaacctatttcttaaacacttgcaacctacctgttgagcatcacagaatgtgataaggaaatcaacttgcttatcaacttcctaaatattatgagatgtggcttgggcagcatccccttgaactcttcactcttcaaatgcctgactagggagccatgtttcacaaggtctttaaagtgactaatggcatgagaaatacaaaaatactcagataaggtaaaatgccatgatgcctctgtcttctggactggttttcacattagaagacaattgacaacagttacataattcactctgagtgttttatgagaaagccttcttttggggtcaacagttttcctatgctttgaaacagaaaaatatgtaccaagaatcttggtttgccttccagaaaacaaaactgcatttcactttcccggtgttccccactgtatctaggcaacatagtattcatgactatggataaactaaacacgtgacacaaacacacacaaaagggaacccagctctaatacattccaactcgtatagcatgcatctgtttattctatagttattaagttctttaaaatgtaaagccatgctggaaaataatactgctgagatacatacagaattactgtaactgattacacttggtaattgtactaaagccaaacatatatatactattaaaaaggtttacagaattttatggtgcattacgtgggcattgtctttttagatgcccaaatccttagatctggcatgttagcccttcctccaattataagaggatatgaaccaaaaaaaaaaaaaaaaaaa

SEQ ID NO: 1079 - DNA, 3925 bp, Homo sapiens
agcggggctgcgcgaagtcatcgctgttccagacagcgatgactcgagagcggtgggggtggcggcgcgatcggccgggctgtaaccgtcgtctgtccgggagcggctggagcggcagcggcggccgggcacggcgcgaggtgacgccacagggcagcggcggcagcggaggcagcggcggcagcaggagacgcagcggcggccgcagcagcagcagcaagacggactcgtggagacgcgccgccgccgccgccgccgggccgggccgggtgtcgcgcgccgaggctgggggggagtcgtcgccgccgccgccaccgctaccgccgccgccgccgccgccgaggtgactgaggagagaggcgcctcctcgctcccgccaccgccggacttcaatgcccagtccccagctcgccagcgtttttcgttggaatatacgttgcacatttatggcgattctgagtgtgagggcagacttctgccaggctcagcacagcattttcgctgacaagtgagcttggaggttctatgtgccataattaacattgccttgaagactcctggacaccgagactggcctcagaaatagttggcttttttttttttttaattgcaagcatatttcttttaatgactccagtaaaattaagcatcaagtaaacaagtggaaagtgacctacacttttaacttgtctcactagtgcctaaatgtagtaaaggctgcttaagttttgtatgtagttggattttttggagtccgaatatttccatctgcagaaattgaggcccaaattgaatttggattcaagtggattctaaatactttgcttatcttgaagagagaagcttcataaggaataaacaagttgaatagagaaaacactgattgataataggcattttagtggtctttttaatgttttctgctgtgaaacatttcaagatttattgatttttttttttcactttccccatcacactcacacgcacgctcacactttttatttgccataatgaaccgtccagcccctgtggagatctcctatgagaacatgcgttttctgataactcacaaccctaccaatgctactctcaacaagttcacagaggaacttaagaagtatggagtgacgactttggttcgagtttgtgatgctacatatgataaagctccagttgaaaaagaaggaatccacgttctagattggccatttgatgatggagctccaccccctaatcagatagtagatgattggttaaacctgttaaaaaccaaatttcgtgaagagccaggttgctgtgttgcagtgcattgtgttgcaggattgggaagggcacctgtgctggttgcacttgctttgattgaatgtggaatgaagtacgaagatgcagttcagtttataagacaaaaaagaaggggagcgttcaattccaaacagctgctttatttggagaaataccgacctaagatgcgattacgcttcagagataccaatgggcattgctgtgttcagtagaaggaaatgtaaacgaaggctgacttgattgtgccatttagagggaactcttggtacctggaaatgtgaatctggaatattacctgtgtcatcaaagtagtgatggattcagtactcctcaaccactctcctaatgattggaacaaaagcaaacaaaaaagaaatctctctataaaatgaataaaatgtttaagaaaagagaaagagaaaaggaattaattcagtgaaggatgattttgctcctagttttggagtttgaatttctgccaggattgaattattttgaaatctcctgtctttttaaactttttcaaaataggtctctaaggaaaaccagcagaacattaggcctgtgcaaaaccatctgtttggggagcacactcttccattatgcttggcacatagatctccctgtggtgggattttttttttccctttttttgtgggggagggttggtggtatatttttcccctcttttttccttcctctcctacatctcccttttcccccgatccaagttgtagatggaatagaagcccttgttgctgtagatgtgcgtgcagtctggcagccttaagcccacctgggcacttttagataaaaaaaaaaaaaaacaaaaaacaacaccaaaaaaacagcagtgatatatatattccaggtggtttttagtctttactgatgaaagggtgttcatgttagtttcttcaaaaccctatctaatactaggcaaagtagccaagagccttttgttttgtttttattttgataaattagtggagaaatggcattttaagaggagtctcttctcaacttacctgagagtcgaattcttctcttccctaaccaatgaagctaagtggttatcccagaaacttgtcttctaaaagggaggactccaggccatcaataaagatgtccaggcagtgagcgtactttttacaccctgtagaattgtgggctgtagcgttactctgattttctgtctagtatcagagaatgctggtagcttaaaatttttattttaggacttgtactctgaattttcaggaaccgtcaaaggagcagcagcaaattcacatattttcgacttgagaaatgcttgtggtatgtgttttccaaactgccccctatatgtaaagttcagtttaaccactgattgccttgttattactaggttttttgagattaaaaaaaaaaaatccctggtttaaaaccaacaatgatgcctagtgagtatgtgtccacaggccataacagggtagaagagagacatcgtgcaacccaatgagtagtgaagggactgtgttgcttgtgaagcggtgtagtagcatttttgcagattcttggctgggtttagtgtactgatctagaaaagctgtttttctgctcctttgtggaaggcagttatgatcaggctgcatggacaaagcaggtagaggggcaccatcaggggctcttgcactattttcacctctaaatattacgtactcagtagtgccctgcttctagggctctgaatacgggcttaaagtcatcttgtcctgctggaatttgctgtgcagagccataagcctcccattttgttagcgtcagctaggccaataggaacagaccgggaccttgtctcacactgatgatacctcacatgttgaccggctatgtgaactgcctatttcctatgctggagttttgatttttaactaaacgcaaatctgtagattctctcctctcccatcccagaaaacaaaacaaaataatgcttttcgaaattgtttctaggactttaaaacataatggtatatccaaaattctttatttcagaatgcaacaatagattccattaatatagactcaagatcaaaacagcatacctgctaagctaagatagatggtgttgattccactgggttttgatcaatacaataacaaacctttttcctttgacatactctgaattttgttgtttggggggagggggtgtgtgtgtgtgtgtgtgtgtgtgtgtgtattgtgtgtgtgtgtgtgtgcacgcgcagtgtccatcagtatcagtgcctgcctgagttaggaaaattacattcctggttctgtattgaggagaaggatgtataaagcaacatgaaacattagccctccttttattttaaagactaatgttaattgttcttaaaactggattttttttccttaaagcaatttttttcttttcgatttaatgaagtattgctagctgaagccagtttgacatagagagatgtcagattgatttgaaaggtgtgcagcctgatttaaaaccaaaccctgaacccttttaaagaacaataaaacatattttacacgctcaaaaaaaaaaaaaaaaaaaaaaaaaaaaaaaaaaaaaaaaaaaaaaaaaaaaaaaaaaaaaaaaaaa

SEQ ID NO: 1080 - DNA, 3102 bp, Homo sapiens
gcggccgcggatccgcggccgcggagaagctgctgccggtgtcatggcggagctgagtgaggaggcgctgctgtcagtattaccgacgatccgggtccctaaggctggagaccgggtccacaaagacgagtgcgccttctccttcgacacgccggagtctgaggggggcctctacatctgtatgaacacgtttctgggctttgggaaacagtatgtggagagacatttcaataagaccggccagcgagtctacttgcacctccggcggacccggcgcccgaaagaggaggaccctgctacaggcactggagacccaccccggaagaagcccacgcggctggctattggtgttgaaggcggatttgaccttagcgaggagaagtttgaattagacgaggatgtgaagattgtcattttgccagattacctggagattgcccgggatggactggggggactgcctgacattgtcagagatcgggtgaccagtgcagtggaggccctactgtcggccgactcagcctcccgcaagcaggaggtgcaggcatgggatggggaagtacggcaggtgtctaagcatgccttcagcctcaagcagttggacaaccctgctcgaatccctccctgtggctggaagtgctccaagtgtgacatgagagagaacctgtggctcaacctgactgatggctccatcctctgtgggcgacgctacttcgatggcagtgggggcaacaaccacgctgtggagcactaccgagagacaggctacccgttagctgtcaagctgggcaccatcacccctgatggagctgacgtgtactcatatgatgaggatgacatggtcctggaccccagcctggctgagcacctgtcccacttcggcatcgacatgctgaagatgcagaagacagacaagacgatgactgagttggagatagacatgaaccagcggattggtgaatgggagctgatccaggagtcaggtgtgccactcaagcccctgtttgggcctggctacacaggcatccggaacctgggtaacagctgctacctcaactctgtggtccaggtgctcttcagcatccctgacttccagaggaagtatgtggataagctggagaagatcttccagaatgccccgacagaccctacccaggatttcagcacccaggtggccaagctgggccatggccttctctccggggagtattccaagccagtaccggagtcgggcgatggggagcgggtgccagaacagaaggaagttcaagatggcattgcccctcggatgttcaaggccctcatcggcaagggccaccctgaattctccaccaaccggcagcaggatgcccaggagttcttccttcaccttatcaacatggtggagaggaattgccggagctctgaaaatcctaatgaagtgttccgcttcttggtggaggaaaggatcaagtgcctggccacagagaaggtgaagtacacccagcgagttgactacatcatgcagctgcctgtgcccatggatgcagcccttaacaaagaggagcttctggagtacgaggagaagaagcggcaagccgaagaggagaagatggcactgccagaactggttcgggcccaggtgcccttcagctcttgcctggaggcctacggggcccctgagcaggtcgatgacttctggagcacggccctgcaggccaagtcagtagctgtcaagaccacacgatttgcctcattccctgactacctggtcatccagatcaagaagttcaccttcggcttagactgggtgcccaagaaactggatgtgtccatcgagatgccagaggagctcgacatctcccagttgaggggcacagggctgcagcccggagaggaggagctgccagacattgccccacccctggtcactccggatgagcccaaagcgcccatgctggatgaatcagtcatcatccagctggtggagatgggattccctatggacgcctgccgcaaagctgtctactacacggacaacagcggggctgaggccgccatgaactgggtcatgtcacacatggatgatccagattttgcaaaccccctcatcctgcctggctctagtgggccgggctccacaagcgcagcagccgacccccctcctgaggactgtgtgaccaccattgtctccatgggcttctcccgggaccaggccttgaaagcgctgcgggccacgaacaatagtttagaacgggctgtggactggatcttcagtcacattgacgacctggatgctgaagctgccatggacatctcagagggccgctcagctgccgactccatctctgagtctgtgccagtgggacctaaagtccgggatggtcctggaaagtatcagctctttgccttcattagtcacatgggcacctctaccatgtgtggtcactacgtctgccacatcaagaaagaaggcagatgggtgatctacaatgaccagaaagtgtgtgcctccgagaagccgcccaaggacctgggctacatctacttctaccagagagtggccagctaagagcctgcctcaccccttaccaatgagggcaggggaagaccacctggcatgagggagaggggctgagggatggacttcagcccctctgctctgtaccctttttccttttgtccccggcagcagggaagaagctggaggccgtgggagaatggctgggcagagcagaggggcagcgatagactctggggatggagcaggacggggacgggaggggccggccacctgtctgtaaggagactttgttgcttcccctccccccggaatccacagtgctctgcttctctgtgtcgccccgcccagccccctggtgtggagggaggggtctcgtttgtgcgcgtgggtgtagctttgtgcatcctctcccagtggagcgatcacctgtgcctcccctccccctttgtttgcccctgtgtggttggtcaaggagggatgtgagggaaatagggaccccccgacttgccctcctgcctcagtctttcccccaccctgtctcttccttgtccttctctggaaatgccaaaatacacgatgtgaataaaagtacaacggct

SEQ ID NO: 1081 - DNA, 4111 bp, Homo sapiens
acacaccacacacactcacactcacacacactcacacacactcatccccttgaatcttggggcaggaactcagaaaacttccagcccgggcagcgcgcgcttggtgcaagactcaggagctagcagcccgtccccctccgactctccggtgccgccgctgcctgctcccgccaccctaggaggcgcggtgccacccactactctgtcctctgcctgtgctccgtgcccgaccctatcccggcggagtctccccatcctcctttgctttccgactgcccaaggcactttcaatctcaatctcttctctctctctctctctctctctgtctctctctctctctctctctctctctctctcgcagggtggggggaagaggaggaggaattctttccccgcctaacatttcaagggacacaattcactccaagtctcttccctttccaagccgcttccgaagtgctcccggtgcccgcaactcctgatcccaacccgcgagaggagcctctgcgacctcaaagcctctcttccttctccctcgcttccctcctcctcttgctacctccacctccaccgccacctccacctccggcacccacccaccgccgccgccgccaccggcagcgcctcctcctctcctcctcctcctcccctcttctctttttggcagccgctggacgtccggtgttgatggtggcagcggcggcagcctaagcaacagcagccctcgcagcccgccagctcgcgctcgccccgccggcgtccccagccctatcacctcatctcccgaaaggtgctgggcagctccggggcggtcgaggcgaagcggctgcagcggcggtagcggcggcgggaggcaggatgagcgcacgcggtgagggcgcggggcagccgtccacttcagcccagggacaacctgccgccccagcgcctcagaagagaggacgcggccgccccaggaagcagcagcaagaaccaaccggtgagccctctcctaagagacccaggggaagacccaaaggcagcaaaaacaagagtccctctaaagcagctcaaaagaaagcagaagccactggagaaaaacggccaagaggcagacctaggaaatggccacaacaagttgttcagaagaagcctgctcaggaggaaactgaagagacatcctcacaagagtctgccgaagaggactagggggcgcaacgttcgatttctacctcagcagcagttggatcttttgaagggagaagacactgcagtgaccacttattctgtattgccatggtctttccactttcatctggggtggggtggggtggggtgggggaggggggggtggggtggggagaaatcacataaccttaaaaaggactatattaatcaccttctttgtaatcccttcacagtcccaggtttagtgaaaaactgctgtaaacacaggggacacagcttaacaatgcaacttttaattactgttttcttttttcttaacctactaatagtttgttgatctgataagcaagagtgggcgggtgagaaaaaccgaattgggtttagtcaatcactgcactgcatgcaaacaagaaacgtgtcacacttgtgacgtcgggcattcatataggaagaacgcggtgtgtaacactgtgtacacctcaaataccaccccaacccactccctgtagtgaatcctctgtttagaacaccaaagataaggactagatactactttctctttttcgtataatcttgtagacacttacttgatgatttttaactttttatttctaaatgagacgaaatgctgatgtatcctttcattcagctaacaaactagaaaaggttatgttcatttttcaaaaagggaagtaagcaaacaaatattgccaactcttctatttatggatatcacacatatcagcaggagtaataaatttactcacagcacttgttttcaggacaacacttcattttcaggaaatctacttcctacagagccaaaatgccatttagcaataaataacacttgtcagcctcagagcatttaaggaaactagacaagtaaaattatcctctttgtaatttaatgaaaaggtacaacagaataatgcatgatgaactcacctaattatgaggtgggaggagcgaaatctaaatttcttttgctatagttatacatcaatttaaaaagcaaaaaaaaaaaggggggggcaatctctctctgtgtctttctctctctctctccctctccctctctcttttcatgtgtatcagtttccatgaaagacctgaataccacttacctcaaattaagcatatgtgttacttcaagtaatacgttttgacataagatggttgaccaaggtgcttttcttcggcttgagttcaccatctcttcattcaaactgcacttttagccagagatgcaatatatccccactactcaatactacctctgaatgttacaacgaatttacagtctagtacttattacatgctgctatacacaagcaatgcaagaaaaaaacttactgggtaggtgattctaatcatctgcagttctttttgtacacttaattacagttaaagaagcaatctccttactgtgtttcagcatgactatgtatttttctatgtttttttaattaaaaatttttaaaatacttgtttcagcttctctgctagatttctacattaacttgaaaattttttaaccaagtcgctcctaggttcttaaggataattttcctcaatcacactacacatcacacaagatttgactgtaatatttaaatattaccctccaagtctgtacctcaaatgaattctttaaggagatggactaattgacttgcaaagacctacctccagacttcaaaaggaatgaacttgttacttgcagcattcatttgttttttcaatgtttgaaatagttcaaactgcagctaaccctagtcaaaactatttttgtaaaagacatttgatagaaaggaacacgtttttacatacttttgcaaaataagtaaataataaataaaataaagccaaccttcaaagaacttgaagctttgtaggtgagatgcaacaagccctgcttttgcataatgcaatcaaaaatatgtgtttttaagattagttgaatataagaaaatgcttgacaaatattttcatgtattttacacaaatgtgatttttgtaatatgtctcaaccagatttattttaaacgcttcttatgtagagtttttatgcctttctctcctagtgagtgtgctgactttttaacatggtattatcaactgggccaggaggtagtttctcatgacggcttttgtcagtatggcttttagtactgaagccaaatgaaactcaaaaccatctctcttccagctgcttcagggaggtagtttcaaaggccacatacctctctgagactggcagatcgctcactgttgtgaatcaccaaaggagctatggagagaattaaaactcaacattactgttaactgtgcgttaaataagcaaataaacagtggctcataaaaataaaagtcgcattccatatctttggatgggccttttagaaacctcattggccagctcataaaatggaagcaattgctcatgttggccaaacatggtgcaccgagtgatttccatctctggtaaagttacacttttatttcctgtatgttgtacaatcaaaacacactactacctcttaagtcccagtatacctcatttttcatactgaaaaaaaaagcttgtggccaatggaacagtaagaacatcataaaatttttatatatatagtttatttttgtgggagataaattttataggactgttctttgctgttgttggtcgcagctacataagactggacatttaacttttctaccatttctgcaagttaggtatgtttgcaggagaaaagtatcaagacgtttaactgcagttgactttctccctgttcctttgagtgtcttctaactttattctttgttctttatgtagaattgctgtctatgattgtactttgaatcgcttgcttgttgaaaatatttctctagtgtattatcactgtctgttctgcacaataaacataacagcctctgtga

SEQ ID NO: 1082 - DNA, 2184 bp, Homo sapiens
ccgccttcggcccgggcctcccgggatggccgtggcgcctctgcggggggcgctgctgctgtggcagctgctggcggcgggcggcgcggcactggagatcggccgcttcgacccggagcgcgggcgcggggctgcgccgtgccaggcggtggagatccccatgtgccgcggcatcggctacaacctgacccgcatgcccaacctgctgggccacacgtcgcagggcgaggcggctgccgagctagcggagttcgcgccgctggtgcagtacggctgccacagccacctgcgcttcttcctgtgctcgctctacgcgcccatgtgcaccgaccaggtctcgacgcccattcccgcctgccggcccatgtgcgagcaggcgcgcctgcgctgcgcgcccatcatggagcagttcaacttcggctggccggactcgctcgactgcgcccggctgcccacgcgcaacgacccgcacgcgctgtgcatggaggcgcccgagaacgccacggccggccccgcggagccccacaagggcctgggcatgctgcccgtggcgccgcggcccgcgcgccctcccggagacctgggcccgggcgcgggcggcagtggcacctgcgagaaccccgagaagttccagtacgtggagaagagccgctcgtgcgcaccgcgctgcgggcccggcgtcgaggtgttctggtcccggcgcgacaaggacttcgcgctggtctggatggccgtgtggtcggcgctgtgcttcttctccaccgccttcactgtgctcaccttcttgctggagccccaccgcttccagtaccccgagcgccccatcatcttcctctccatgtgctacaacgtctactcgctggccttcctgatccgtgcggtggccggagcgcagagcgtggcctgtgaccaggaggcgggcgcgctctacgtgatccaggagggcctggagaacacgggctgcacgctggtcttcctactgctctactacttcggcatggccagctcgctctggtgggtggtcctgacgctcacctggttcctggctgccgggaagaaatggggccacgaggccatcgaggcccacggcagctatttccacatggctgcctggggcctgcccgcgctcaagaccatcgtcatcctgaccctgcgcaaggtggcgggtgatgagctgactgggctttgctacgtggccagcacggatgcagcagcgctcacgggcttcgtgctggtgcccctctctggctacctggtgctgggcagtagtttcctcctgaccggcttcgtggccctcttccacatccgcaagatcatgaagacgggcggcaccaacacagagaagctggagaagctcatggtcaagatcggggtcttctccatcctctacacggtgcccgccacctgcgtcatcgtttgctatgtctacgaacgcctcaacatggacttctggcgccttcgggccacagagcagccatgcgcagcggccgcggggcccggaggccggagggactgctcgctgccagggggctcggtgcccaccgtggcggtcttcatgctcaaaattttcatgtcactggtggtggggatcaccagcggcgtctgggtgtggagctccaagactttccagacctggcagagcctgtgctaccgcaagatagcagctggccgggcccgggccaaggcctgccgcgcccccgggagctacggacgtggcacgcactgccactataaggctcccaccgtggtcttgcacatgactaagacggacccctctttggagaaccccacacacctctagccacacaggcctggcgcggggtggctgctgccccctccttgccctccacgccctgccccctgcatcccctagagacagctgactagcagctgcccagctgtcaaggtcaggcaagtgagcaccggggactgaggatcagggcgggaccccgtgaggctcattaggggagatgggggtctcccctaatgcgggggctggaccaggctgagtccccacagggtcctagtggaggatgtggaggggcggggcagaggggtccagccggagtttatttaatgatgtaatttattgttgcgttcctctggaagctgtgactggaataaacccccgcgtggcactgctgatcctctctggctgggaagggggaaggtaggaggtgaggc

SEQ ID NO: 1083 - DNA, 1642 bp, Homo sapiens
gaatcggcggtcccgcaggtcccggatgttgcggacagtatgaggcaagcgcagggggacggggaccagcagctgtcgccgccgctctcagggtgaagagggaacagaaatctttgccccctgactttggaaatctcgtttaaccttcaaactggcgatgtcaagggttccaagtcctccacctccggcagaaatgtcgagtggccccgtagctgagagttggtgctacacacagatcaaggtagtgaaattctcctacatgtggaccatcaataactttagcttttgccgggaggaaatgggtgaagtcattaaaagttctacattttcatcaggagcaaatgataaactgaaatggtgtttgcgagtaaaccccaaagggttagatgaagaaagcaaagattacctgtcactttacctgttactggtcagctgtccaaagagtgaagttcgggcaaaattcaaattctccatcctgaatgccaagggagaagaaaccaaagctatggagagtcaacgggcatataggtttgtgcaaggcaaagactggggattcaagaaattcatccgtagagattttcttttggatgaggccaacgggcttctccctgatgacaagcttaccctcttctgcgaggtgagtgttgtgcaagattctgtcaacatttctggccagaataccatgaacatggtaaaggttcctgagtgccggctggcagatgagttaggaggactgtgggagaattcccggttcacagactgctgcttgtgtgttgccggccaggaattccaggctcacaaggctatcttagcagctcgttctccggtttttagtgccatgtttgaacatgaaatggaggagagcaaaaagaatcgagttgaaatcaatgatgtggagcctgaagtttttaaggaaatgatgtgcttcatttacacggggaaggctccaaacctcgacaaaatggctgatgatttgctggcagctgctgacaagtatgccctggagcgcttaaaggtcatgtgtgaggatgccctctgcagtaacctgtccgtggagaacgctgcagaaattctcatcctggccgacctccacagtgcagatcagttgaaaactcaggcagtggatttcatcaactatcatgcttcggatgtcttggagacctctgggtggaagtcaatggtggtgtcacatccccacttggtggctgaggcataccgctctctggcttcagcacagtgcccttttctgggacccccacgcaaacgcctgaagcaatcctaagatcctgcttgttgtaagactccgtttaatttccagaagcagcagccactgttgctgccactgaccaccaggtagacagcgcaatctgtggagcttttactctgttgtgaggggaagagactgcattgtggccccagacttttaaaacagcactaaataacttgggggaaacggggggagggaaaatgaaatgaaaaccctgttgctgcgtcactgtgttccctttggcctgtctgagtttgatactgtggggattcagtttaggcgctggcccgaggatatcccagcggtggtacttcggagacacctgtctgcatctgactgagcagaacaaatcgtcaggtgcctggagcaaaaagg

SEQ ID NO: 1084 - DNA, 5054 bp, Homo sapiens
atgggagacgtaaaagcgttgctgtttgtcgttgctgcccgggccagacgtttaggaggagccgctgcatccgagtccctggctgtctccgaagccttctgcagggtccgaagctgccagcccaaaaagtgtgcaggcccccagcggtgcctgaacccagtgcctgcagtgcccagtcccagccccagcgtgaggaagagacaggtgtccctcaactggcagccactgacgctccaggaggccagagctctactgaagcggcggcggccccgggggccagggggccggggactactgagaaggaggcccccacagcgtgcccccgctggcaaggccccggtcctgtgtcccttgatctgtcacaatggcggtgtgtgcgtgaagcctgaccgctgcttctgtcccccggacttcgctggcaagttctgccagttgcactcctcgggcgcccggcccccggccccggctgtaccaggcctcacccgctccgtgtacactatgccactggccaaccaccgcgacgacgagcacggcgtggcatctatggtgagcgtccacgtggagcacccgcaggaggcgtcggtggtggtgcaccaggtggagcgtgtgtctggcccttgggaggaggcggacgctgaggcggtggcgcgggcggaagcggcggcgcgggcggaggcggcagcgccctacacggtgttggcacagagcgcgccgcgggaggacggctactcagatgcctcgggcttcggttactgctttcgggagctgcgcggaggcgaatgcgcgtccccgctgcccgggctccggacgcaggaggtctgctgccgaggggccggcttggcctggggcgttcacgactgtcagctgtgctccgagcgcctggggaactccgaaagagtgagcgccccagatggaccttgtccaaccggctttgaaagagttaatgggtcctgcgaagatgtggatgagtgcgcgactggcgggcgctgccagcacggcgagtgtgcaaacacgcgcggcgggtacacgtgtgtgtgccccgacggctttctgctcgactcgtcccgcagcagctgcatctcccaacacgtgatctcagaggccaaagggccctgcttccgcgtgctccgcgacggcggctgttcgctgcccattctgcggaacatcactaaacagatctgctgctgcagccgcgtaggcaaggcctggggccggggctgccagctctgcccacccttcggctcagagggtttccgggagatctgcccggctggtcctggttaccactactcggcctccgacctccgctacaacaccagacccctgggccaggagccaccccgagtgtcactcagccagcctcgtaccctgccagccacctctcggccatctgcaggctttctgcccacccatcgcctggagccccggcctgaaccccggcccgatccccggcccggccctgagcttcccttgcccagcatccctgcctggactggtcctgagattcctgaatcaggtccctcctccggcatgtgtcagcgcaacccccaggtctgcggcccaggacgctgcatttcccggcccagcggctacacctgcgcttgcgactctggcttccggctcagcccccagggcacccgatgcattgatgtggacgaatgtcgccgcgtgcccccgccctgtgctcccgggcgctgcgagaactcaccaggcagcttccgctgcgtgtgcggcccgggcttccgagccggcccacgggctgcggaatgcctggatgtggacgagtgccaccgcgtgccgccgccgtgtgacctcgggcgctgcgagaacacgccaggcagcttcctgtgcgtgtgccccgccgggtaccaggctgcaccgcacggagccagctgccaggatgtggatgaatgcacccagagcccaggcctgtgtggccgagggggctgcaagaacctgcctggctctttccgctgtgtttgcccggctggcttccggggctcggcgtgtgaagaggatgtggatgagtgtgcccaggaaccgccgccctgtgggcccggccgctgtgacaacacggcaggctcctttcactgtgcctgccctgctggcttccgctcccgagggcccggggccccctgccaagatgtggatgagtgtgcccgaagccccccaccctgcacctacgggcggtgtgagaacacagaaggcagcttccagtgtgtctgccccatgggcttccaacccaacactgctggctccgagtgcgaagatgtggatgaatgtgaaaaccacctcgcatgccctgggcaggaatgtgtgaactcgcccggctccttccagtgcaggacctgtccttctggccaccacctgcaccgtggcagatgcactgatgtggacgaatgcagttcgggtgcccctccctgtggtccccacggccactgcactaacaccgaaggctccttccgctgcagctgcgcgccaggctaccgggcgccgtcgggtcggcccgggccctgcgcagacgtgaacgagtgcctggagggcgatttctgcttccctcacggcgagtgcctcaacactgacggctcctttgcctgtacttgtgcccctggctaccgacccggaccccgcggagcctcttgcctcgacgttgacgagtgcagcgaggaggacctttgccagagcggcatctgtaccaacaccgacggctccttcgagtgcatctgtcctccgggacaccgcgctggtccggacctcgcctcctgtctcgacgtggacgaatgtcgcgagcgaggtccagccctgtgcgggtcgcagcgttgtgagaactctcccggctcctaccgctgtgtccgggactgcgatcctgggtaccacgcgggccccgagggcacctgtgacgatgtggatgagtgccaagaatatggtcccgagatttgtggagcccagcgttgtgagaacacccctggctcctaccgctgtacaccagcctgtgaccctggctatcagcccacgccagggggcggatgccaggatgtggacgaatgccggaaccggtccttctgcggtgcccacgccgtgtgccagaacctgcccggctccttccagtgcctctgtgaccagggttacgagggggcacgggatgggcgtcactgcgtggatgtgaacgagtgtgaaacactacagggtgtatgtggagctgccctgtgtgaaaatgtcgaaggctccttcctctgtgtctgccccaacagcccggaagagtttgaccccatgactggacgctgtgttcccccacgaacttctgttggcatgtccccaggctcgcagccccaggcacctgttagccccgttctgcccgccaggccacctccgccacccctgtcccgccgacccagaaaacctaggaagggccctgtggggagtgggtgccgggagtgctattttgacacagcggccccggatgcatgtgacaacatcctggctcggaatgtgacatggcaggagtgctgctgtactgtgggtgagggctggggcagcggctgccgcatccagcagtgcccgggcaccgagacagctgagtaccagtcattgtgccctcacggccggggctacctggcgcccagtggagacctgagcctccggagagacgtggacgaatgtcagctcttccgagaccaggtgtgcaagagtggcgtgtgtgtgaacacggccccgggctactcatgctattgcagcaacggctactactaccacacacagcggctggagtgcatcgataatgacgagtgcgccgatgaggaaccggcctgtgagggcggccgctgtgtcaacactgtgggctcttatcactgtacctgcgagcccccactggtgctggatggctcgcagcgccgctgcgtctccaacgagagccagagcctcgatgacaatctgggagtgtgctggcaggaagtgggggctgacctcgtgtgcagccaccctcggctggaccgtcaggccacctacacagagtgctgctgcctgtatggagaggcctggggcatggactgcgccctctgccctgcgcaggactcagatgacttcgaggccctgtgcaatgtgctacgcccccccgcatatagccccccgcgaccaggtggctttggactcccctacgagtacggcccagacttaggtccaccttaccagggcctcccatatgggcctgagttgtacccaccacctgcgctaccctacgacccctacccaccgccacctgggcccttcgcccgccgggaggctccttatggggcaccccgcttcgacatgccagactttgaggacgatggtggcccctatggcgaatctgaggctcctgcgccacctggcccgggcacccgctggccctatcggtcccgggacacccgccgctccttcccagagcccgaggagcctcctgaaggtggaagctatgctggttccctggctgagccctacgaggagctggaggcggaggagtgcgggatcctggacggctgcaccaacgaccgctgcgtgcgcgtccccgaaggcttcacctgccgttgcttcgacggctaccgcctggacatgacccgcatggcctgcgttgacatcaacgagtgtgatgaggccgaggctgcctccccgctgtgcgtcaacgcgcgttgcctcaacacggatggctccttccgctgcatctgccgcccgggattcgcacccacgcaccagccgcaccactgtgcgcccgcacggccccgggcctgagccctggcacccgctggccacccacccgcgcccgccactcggggcccctgccgcgcatcctgcagcccgcttatgcgtatgtgcacggggccgcccgcctggacctggagaagggacctacggacgcctggaagctgcgacgccctgcactgctcccgcctccaccagcgcctcccactgatgtcgtggtcccgggcctggcccaggggcccctttacatgccctctcccttttataaaattttccattaaaaaccacctattttctaaaaaaaaaaaaaaaaaaaaaaa

SEQ ID NO: 1085 - DNA, 2505 bp, Homo sapiens
tttgggttagggagagtgctttcgtttgttttaaatgggagaaactggagcatgttgccaaggcagagagccagcagagaggggtgaatggaagaaggagcgagaagggggttactgacgaagccttatcctggaggagagaaggatggactccagagcccagctttggggactggccttgaataaaaggagggccactctacctcatcctggagggagcacgaacctaaaggcagacccagaagagctttttacaaaactagagaaaattgggaagggctcctttggagaggtgttcaaaggcattgacaatcggactcagaaagtggttgccataaagatcattgatctggaagaagctgaagatgagatagaggacattcaacaagaaatcacagtgctgagtcagtgtgacagtccatatgtaaccaaatattatggatcctatctgaaggatacaaaattatggataataatggaatatcttggtggaggctccgcactagatctattagaacctggcccattagatgaaacccagatcgctactatattaagagaaatactgaaaggactcgattatctccattcggagaagaaaatccacagagacattaaagcggccaacgtcctgctgtctgagcatggcgaggtgaagctggcggactttggcgtggctggccagctgacagacacccagatcaaaaggaacaccttcgtgggcaccccattctggatggcacccgaggtcatcaaacagtcggcctatgactcgaaggcagacatctggtccctgggcataacagctattgaacttgcaagaggggaaccacctcattccgagctgcaccccatgaaagttttattcctcattccaaagaacaacccaccgacgttggaaggaaactacagtaaacccctcaaggagtttgtggaggcctgtttgaataaggagccgagctttagacccactgctaaggagttattgaagcacaagtttatactacgcaatgcaaagaaaacttcctacttgaccgagctcatcgacaggtacaagagatggaaggccgagcagagccatgacgactcgagctccgaggattccgacgcggaaacagatggccaagcctcggggggcagtgattctggggactggatcttcacaatccgagaaaaagatcccaagaatctcgagaatggagctcttcagccatcggacttggacagaaataagatgaaagacatcccaaagaggcctttctctcagtgtttatctacaattatttctcctctgtttgcagagttgaaggagaagagccaggcgtgcggagggaacttggggtccattgaagagctgcgaggggccatctacctagcggaggaggcgtgccctggcatctccgacaccatggtggcccagctcgtgcagcggctccagagatactctctaagtggtggaggaacttcatcccactgaaattcctttggcatttggggttttgtttttccttttttccttcttcatcctcctccttttttaaaagtcaacgagagccttcgctgactccaccgaagaggtgcgccactgggagccaccccagcgccaggcgcccgtccagggacacacacagtcttcactgtgctgcagccagatgaagtctctcagatgggtggggagggtcagctccttccagcgatcattttattttattttattacttttgtttttaattttaaccatagtgcacatattccaggaaagtgtctttaaaaacaaaaacaaaccctgaaatgtatatttgggattatgataaggcaactaaagacatgaaacctcaggtatcctgctttaagttgataactccctctggagcttggagaatcgctctggtggatgggtgtacagatttgtatataatgtcatttttacggaaaccctttcggcgtgcataaggaatcactgtgtacaaactggccaagtgcttctgtagataacgtcagtggagtaaatattcgacaggccataaacttgagtctattgccttgcctttattacatgtacattttgaattctgtgaccagtgatttgggttttattttgtatttgcagggtttgtcattaataattaatgcccctctcttacagaacactcctatttgtacctcaacaaatgcaaattttccccgtttgccctacgccccttttggtacacctagaggttgatttcctttttcatcgatggtactatttcttagtgttttaaattggaacatatcttgcctcatgaagctttaaattataattttcagtttctccccatgaagcgctctcgtctgacatttgtttggaatcgtgccactgctggtctgcgccagatgtaccgtcctttccaatacgattttctgttgcaccttgtagtggattctgcatatcatctttcccacctaaaaatgtctgaatgcttacacaaataaattttataacacgcttaaaaaaaaaaaaaa

SEQ ID NO: 1086 - DNA, 1276 bp, Homo sapiens
gtgccaaagaaggactccatgaaagatgacagaagaagttattgtgatagccaagtgggactacaccgcccagcaggaccaggagctggacatcaagaaggtgaacgagcggctgtggttgctggacgactccaagacgtggtggcgggtgaggaacgcggccaacaggacgggctatgtaccgtccaactacgtggagcggaagaacagcctgaagaagggctccctcgtgaagaacctgaaggacacactaggcctcggcaagacgcgcaggaagaccagcgcgcgggatgcgtcccccacgcccagcacggacgccgagtaccccgccaatggcagcggcgccgaccgcatctacgacctcaacatcccggccttcgtcaagttcgcctatgtggccgagcgggaggatgagttgtccctggtgaaggggtcgcgcgtcaccgtcatggagaagtgcagcgacggttggtggcggggcagctacaacgggcagatcggctggttcccctccaactacgtcttggaggaggtggacgaggcggctgcggagtccccaagcttcctgagcctgcgcaagggcgcctcgctgagcaatggccagggctcccgcgtgctgcatgtggtccagacgctgtaccccttcagctcagtcaccgaggaggagctcaacttcgagaagggggagaccatggaggtgattgagaagccggagaacgaccccgagtggtggaaatgcaaaaatgcccggggccaggtgggcctcgtccccaaaaactacgtggtggtcctcagtgacgggcctgccctgcaccctgcgcacgccccacagataagctacaccgggccctcgtccagcgggcgcttcgcgggcagagagtggtactacgggaacgtgacgcggcaccaggcgcagtgcgccctcaacgagcggggcgtggagggcgacttcctcattagggacagcgagtcctcgcccagcgacttctccgtgtcccttaaagcgtcagggaagaacaaacacttcaaggtgcagctcgtggacaatgtctactgcattgggcagcggcgcttccacaccatggacgagctggtggaacactacaaaaaggcgcccatcttcaccagcgagcacggggagaagctctacctcgtcagggccctgcagtgacggcgccccggccccacactcgcctcccgggccccacggtggagctgcccgcccggccttgtggcagaggctcctcccgcggggacggccccgacggcttctctg

SEQ ID NO: 1087 - DNA, 1593 bp, Homo sapiens
ctgggagcgcggcgtaggtggctgccgagtcttttcctgtttagggtcttatcctggcattgagggcgccggactggcgcttttggccggcttggcattgggtgggcggcttcttgggacccacatgagccagtggcatcatccccgcagtggctggggccggagacgcgacttttcaggacgctcctcagccaagaagaagggcggaaaccacatccccgaaaggtggaaagactatctcccagttggacagcggatgcctgggactcgtttcattgctttcaaagttcctttgcaaaagagttttgaaaagaaacttgctccagaagaatgcttttcccctttggatctttttaacaaaatccgagaacaaaatgaagaacttggactgattattgatttaacatatactcaacgctattataaaccagaggatttgccagaaactgttccttacttaaaaatttttacagttggacatcaagtgcctgatgatgagactatttttaaattcaaacacgctgttaatgggtttttgaaagaaaataaagataatgataaacttattggtgtccactgtacccatggtttaaacaggactggctacctcatttgcagatatttgattgatgtagaaggcgtgaggccagatgatgcaattgaattattcaataggtgccggggacattgcttagaaagacaaaactacattgaagaccttcagaatggtcctatcagaaagaattggaattccagtgtacccaggtcaagtgattttgaagactcagcacatctcatgcaaccagtccacaataagcctgttaaacaaggacctaggtataatctacatcagatccagggtcactcagctcctcgacatttccacacccagacccaaagtttgcaacaatcagtcagaaaattttcagagaatccacatgtttaccagagacaccatctccctcctcctggtccccctggagaggactattcacacaggaggtattcttggaatgtgaagcccaatgccagtcgggcagcccaggatagaagaaggtggtatccttataattactccagactctcctatccagcctgttgggaatggacccagtgatacaaacctgtcctggaattctacctggagaccagagctggcctgaaaattactggtgtgacttttaattagttcaggtctaatcaggtttctttattgttcccttatgtattcaagcttaaggaaaaattgcattgctgtttacctctttgctgataaatttgcagtaattacagcattgcaggaaaaacaatctgttattccagtcttaaatttttctaaaagaagacaatattttagaactgaagcattgagaacttcccttgcaaattatttttaaaattctatcttgtttttctatgtatttctttctgactagacttgtgatatgcgtgtgtttatgtacagaaatttttagtgtttttgttatgttctgttattgacccaaaggccatctttattttctataactgttcaaaatttatattaaaatctacttaggagataatttctttagaaaaaaaaaaaaaaaaaaa

SEQ ID NO: 1088 - DNA, 4376 bp, Homo sapiens
tgtttctgtgcagtattttgaggtctttttcaacctattgtatttaatctgttattccttataacactgacaatcggtatgattgatccggattttgcagataagcctaaattaccagaaaactacacagatgaaacctggcaaaaactgaaagaagcagtggaagctattcagaatagtacttcaattaagtacaatttagaagaactctaccaggctgtagaaaatctctgttcttacaagatttctgcaaacttgtacaaacagctgagacagatctgcgaagatcacatcaaagcacagattcatcaattcagagaggattcattggatagcgttctttttttaaagaagattgatagatgctggcaaaaccattgcagacaaatgatcatgatcaggagcatttttttgtttctggatagaacttacgttcttcagaattcaatgctaccctccatttgggacatgggactggagttatttagggctcatattataagtgatcagaaagtgcagaataagacaattgatggcattcttctcttgattgagagggaaaggaatggtgaagcaattgatagaagtttacttcgaagccttttaagcatgctgtctgatttgcaaatttatcaagattcttttgaacaacgatttttggaagaaactaaccggctctatgcagctgaaggccaaaaattaatgcaagaaagagaggttcctgaatatctacatcatgttaacaaacgtctagaagaagaagcagacagacttattacttacttagatcagaccacccagaagtcattaattgctactgtagaaaaacaacttctaggtgaacacttaacagcaattcttcagaaaggtttaaataacctccttgatgaaaaccgaattcaagatttgtctcttctgtatcagctcttcagtagagttcgaggtggagttcaggttcttttgcagcagtggatcgaatatatcaaggcatttggcagcactattgtaattaatcctgaaaaagataaaaccatggttcaagaattgctggattttaaagataaggttgaccatataattgatatctgctttctgaagaatgagaaatttatcaatgccatgaaagaagcatttgaaacgttcattaacaaaagaccaaataaaccagctgaacttatagctaagtatgtagattcaaaacttcgtgcaggcaacaaagaagctacagatgaagaacttgagaaaatgttggataaaattatgatcatatttagatttatctatggcaaggatgtttttgaggccttctataagaaagatttagccaagcgcctgttagtcggaaagagtgcatctgtagatgctgaaaaatcaatgctgtccaaacttaaacatgaatgcggagctgctttcaccagcaaacttgaaggaatgtttaaagacatggaactttctaaagacatcatgattcagttcaaacagtatatgcagaatcagaatgttccgggaaatattgagttaactgtgaatatcctgacaatgggctattggccgacatatgtgcctatggaagttcatttaccaccagagatggtaaaacttcaggagattttcaagacattttacctaggcaaacatagtggcaggaaacttcagtggcagtcaaccctaggacactgtgtgttaaaagcagaatttaaagagggtaaaaaggaactccaggtctctctttttcaaacactggtgctgctaatgtttaatgagggagaggagttcagtttagaagagatcaagcaggcaactggaatagaggatggagagttaaggagaacactgcagtcattagcctgtggcaaagctagagttctggcgaaaaatccaaagggcaaagacattgaagatggtgacaagttcatttgtaatgatgatttcaaacataaacttttcaggataaagatcaatcaaatccagatgaaagaaacggttgaagaacaagcaagcactacagaaagagtatttcaagacagacagtatcaaattgatgctgcaattgttcgaattatgaagatgagaaagacacttagccacaatctccttgtttcagaagtgtacaaccagttgaaatttccagtaaagcctgctgatcttaagaagagaatagaatctttaattgaccgggactacatggaaagagataaagaaaatccaaaccagtacaactatattgcatagaatgttggccttgcagcatttggtgtcatatgcagtagccagtggataaactaacctgttgattcaatattatttgactccttttttactaccgatgaccaaatgaagcagtgtaattaatggaaatagttgagtggactttttctcagtggttaacatgcccattttaaagagtaatacttacctttaagaagaatgttgttgaactctttgcatgttatttagtatgatgtgcagaaaacacttaagaacgtacctggtcttcatgaattcctctttggaactgggaaagagatccctgtggctattaaaaaggggggagggttcttacacaccattaattatgaagcaaaaggtttatttgcttaaaatgtcatttaaagatacttaaactgcatgcaaactttatttactgtacagagttctggatgtatttatcaaatagaaaaaccacccttgacttggttgttcacccgttttgtgatttcccttgaaaagagaaatgaattgtcatagctattgatattttactaggtgatgttctgttacactgaaagggatgttttttaaaaaaaaaattatttggaaacaagttttcaagtagggggacagttgcttacataatatcttgtatattcacatcctaaaaattttcatttatgagtatgggatgtgtgtatatggcttagccccaagttaactgtgctgattaacaagtacttataaaaatagctaaagtagaaaattaatgatcagttgtactagaggaacatcatagaagagaaaaatccaactctttatattaaaaatgaatacaataagaaaattgcaaaagagaccaaaatgaacgtgttttgtaaattgttacaggagcaaaaactttgcaactagttttcaacatactttagactttaaatgttgtttggacagttttgtcttcaacttggaccaattgtagattgttacaggcttcctaggatttagcattcctattttctctaccaaagttttttttagaagcatcccaactcttctctttgttgataaataagcctttcctgtcatcttcattttaacttgctaaaaccctagatacaaaggtcctccctcatttttcccacagagcccctgtttgggaatttgagattctgtgtcatgctggttttcctttcagaattgcttgaaatcgagttctcttagccactggacacctagttttcaggagaatgtcccaagattgtttatatatacaaaatggcaaaagtactgtttttcgaattgataattcaagcaaaggcttctctttactgtcactgatttttttttgtttttattttgtttccttgtttctatttccttgaagctttgaagggaggagaagcagaaaattttgtttatgtttgttaaaaatcagaactacttaatgctttttgccacagcatatttccttgcctgttggagccgttaggaagattacctatgtcctaatcttcaacctgagaagatttttgactcttgtgtctactgttgattgtttgcttgagttctcaaagacctgtggccaggtattttaaaaagtcgtctatttctttctagttgcatcaacttgcacactggtgtctaactatatgtggtattcggaacttgtaattcttattgagcagccattgcctatattttctcagctcctcactgatttctttatatgagctcagctgacaagcaaatgcagctattttgtttaccctctcttcataccggaccatcaacaacagtgttctaactcatccctgatggtctgtgagatgtagactattacacaagattcaagttactcgtaagcaacttttagatagagttggtcctgttaggaggagactcttgatgtcaccttcagtatcttgaaagcgggtcccctccccgaggctcttaattctttgaaaacttgatgctgtttcagctgaaaaattagcaagactgttaaaaaaaaaaagttgaggggagctgtttaagaaactgaaaagtaattgcaaactacattggataattgtgactttcagttgttgttctgtatcagttgaatttttgtgctcttttccctgtgtacgtggtggttctatttttctccaataaaacttttattt

SEQ ID NO: 1089 - DNA, 4175 bp, Homo sapiens
tgaggagtcctgctcaagacacggtcactggatctgagaaacttcccaggggaccgcattccagagtcagtgactctgtgaagcacccacatctacctcttgccacgttcccacgggcttgggggaaagatggtggggaccaaggcctgggtgttctccttcctggtcctggaagtcacatctgtgttggggagacagacgatgctcacccagtcagtaagaagagtccagcctgggaagaagaaccccagcatctttgccaagcctgccgacaccctggagagccctggtgagtggacaacattgttcaacatcgactacccaggcgggaagggcgactatgagcggctggacgccattcgcttctactatggggaccgtgtatgtgcccgtcccctgcggctagaggctcggaccactgactggacacctgcgggcagcactggccaggtggtccatggtagtccccgtgagggtttctggtgcctcaacagggagcagcggcctggccagaactgctctaattacaccgtacgcttcctctgcccaccaggatccctgcgccgagacacagagcgcatctggagcccatggtctccctggagcaagtgctcagctgcctgtggtcagactggggtccagactcgcacacgcatttgcttggcagagatggtgtcgctgtgcagtgaggccagcgaagagggtcagcactgcatgggccaggactgtacagcctgtgacctgacctgcccaatgggccaggtgaatgctgactgtgatgcctgcatgtgccaggacttcatgcttcatggggctgtctcccttcccggaggtgccccagcctcaggggctgctatctacctcctgaccaagacgccgaagctgctgacccagacagacagtgatgggagattccgaatccctggcttgtgccctgatggcaaaagcatcctgaagatcacaaaggtcaagtttgcccccattgtactcacaatgcccaagactagcctgaaggcagccaccatcaaggcagagtttgtgagggcagagactccatacatggtgatgaaccctgagacaaaagcacggagagctgggcagagcgtgtctctgtgctgtaaggccacagggaagcccaggccagacaagtatttttggtatcataatgacacattgctggatccttccctctacaagcatgagagcaagctggtgctgaggaaactgcagcagcaccaggctggggagtacttttgcaaggcccagagtgatgctggggctgtgaagtccaaggttgcccagctgattgtcacagcatctgatgagactccttgcaacccagttcctgagagctatcttatccggctgccccatgattgctttcagaatgccaccaactccttctactatgacgtgggacgctgccctgttaagacttgtgcagggcagcaggataatgggatcaggtgccgtgatgctgtgcagaactgctgtggcatctccaagacagaggaaagggagatccagtgcagtggctacacgctacccaccaaggtggccaaggagtgcagctgccagcggtgtacggaaactcggagcatcgtgcggggccgtgtcagtgctgctgacaatggggagcccatgcgctttggccatgtgtacatggggaacagccgtgtaagcatgactggctacaagggcactttcaccctccatgtcccccaggacactgagaggctggtgctcacatttgtggacaggctgcagaagtttgtcaacaccaccaaagtgctacctttcaacaagaaggggagtgccgtgttccatgaaatcaagatgcttcgtcggaaagagcccatcactttggaagccatggagaccaacatcatccccctgggggaagtggttggtgaagaccccatggctgaactggagattccatccaggagtttctacaggcagaatggggagccctacataggaaaagtgaaggccagtgtgaccttcctggatccccggaatatttccacagccacagctgcccagactgacctgaacttcatcaatgacgaaggagacactttcccccttcggacgtatggcatgttctctgtggacttcagagatgaggtcacctcagagccacttaatgctggcaaagtgaaggtccaccttgactcgacccaggtcaagatgccagagcacatatccacagtgaaactctggtcactcaatccagacacagggctgtgggaggaggaaggtgatttcaaatttgaaaatcaaaggaggaacaaaagagaagacagaaccttcctggtgggcaacctggagattcgtgagaggaggctctttaacctggatgttcctgaaagcaggcggtgctttgttaaggtgagggcctaccggagtgagaggttcttgcctagtgagcagatccagggggttgtgatctccgtgattaacctggagcctagaactggcttcttgtccaaccctagggcctggggccgctttgacagtgtcatcacaggccccaacggggcctgtgtgcctgccttctgtgatgaccagtcccctgatgcctactctgcctatgtcttggcaagcctggctggggaggaactgcaagcagtggagtcttctcctaaattcaacccaaatgcaattggcgtccctcagccctatctcaacaagctcaactaccgtcggacggaccatgaggatccacgggttaaaaagacagctttccagattagcatggccaagccaaggcccaactcagctgaggagagcaatgggcccatctatgcctttgagaacctccgggcatgtgaagaggcaccacccagtgcagcccacttccggttctaccagattgagggggatcgatatgactacaacacagtccccttcaacgaagatgaccctatgagctggactgaagactatctggcatggtggccaaagccgatggaattcagggcctgctatatcaaggtgaagattgtggggccactggaagtgaatgtgcgatcccgcaacatggggggcactcatcggcggacagtggggaagctgtatggaatccgagatgtgaggagcactcgggacagggaccagcccaatgtctcagctgcctgtctggagttcaagtgcagtgggatgctctatgatcaggaccgtgtggaccgcaccctggtgaaggtcatcccccagggcagctgccgtcgagccagtgtgaaccccatgctgcatgagtacctggtcaaccacttgccacttgcagtcaacaacgacaccagtgagtacaccatgctggcacccttggacccactgggccacaactatggcatctacactgtcactgaccaggaccctcgcacggccaaggagatcgcgctcggccggtgctttgatggcacatccgatggctcctccagaatcatgaagagcaatgtgggagtagccctcaccttcaactgtgtagagaggcaagtaggccgccagagtgccttccagtacctccaaagcaccccagcccagtcccctgctgcaggcactgtccaaggaagagtgccctcgaggaggcagcagcgagcgagcaggggtggccagcgccagagtggagtggtggcctctctgagatttcctagagttgctcaacagcccctgatcaactaagttttgtggtacttcaccctcttctgccctcatttcatgtgacagccattgtgagactgatgcacaaactgtcacttggttaatttaagcacttctgttttcgtgaatttgcttgtttgtttcttcatgcctttacttactttgtcccatgctactgattggcacgtggcccccacaatggcacaataaagcccctttgtgaaactgttctttaaatgaaacacaagaaattggccactggtaaaactctgcagcttcaactgtacttcatttaatgccattaatgcaaatatacttcctcttctttttgcatggttttgcccacctctgcaatagtgataatctgatgctgaagatcaaataaccaatataaagcatatttcttggccttgctccacaggacataggcaagccttgatcatagttcatacatataaatggtggtgaaataaagaaataaaacacaatacttttactggaaaaaaaaaaaa

SEQ ID NO: 1090 - DNA, 2076 bp, Homo sapiens
agacagttttgaagttttcaaagactggctctgctgttaagaagttgtacttaaagcggaggagctaagccacctgccaaaatgtgcaaaggacttgcagctttgccccactcatgcctggaaagggccaaggagattaagatcaagttgggaattctcctccagaagccagactcagttggtgaccttgtcattccgtacaatgagaagccagagaaaccagccaagacccagaaaacctcgctggacgaggccctgcagtggcgtgattccctggacaaactcctgcagaacaactatggacttgccagtttcaaaagtttcctgaagtctgaattcagtgaggaaaaccttgagttctggattgcctgtgaggattacaagaagatcaagtcccctgccaagatggctgagaaggcaaagcaaatttatgaagaattcattcaaacggaggctcctaaagaggtgaatattgaccacttcactaaggacatcacaatgaagaacctggtggaaccttccctgagcagctttgacatggcccagaaaagaatccatgccctgatggaaaaggattctctgcctcgctttgtgcgctctgagttttatcaggagttaatcaagtagtaatttagccaggctatgaaatcatcctgtgagttatttcctccataataaccctgcatttcccattaatctacatatcttcccacagcagctttgctcagtgatacccacatgggaaaaatcccaggggatgttgcttactctttttgcccacactgctttggatacttatctactgtccgaaggccttctttccccactcaattcttcctgccctgttattaattaagatatcttcagcttgtagtcagacccaatcagaatcacagaaaaatcctgcctaaggcaaagaaatataagacaagactatgatatcaatgaatgtgggttaagtaatagatttccagctaaattggtctaaaaaagaatattaagtgtggacagacctatttcaaaggagcttaattgatctcacttgttttagttctgatccagggagatcacccctctaattatttctgaacttggttaataaaagtttataagatttttatgaagcagccactgtatgatattttaagcaaatatgttatttaaaatattgatccttcccttggaccaccttcatgttagttgggtattataaataagagatacaaccatgaatatattatgtttatacaaaatcaatctgaacacaattcataaagatttctcttttataccttcctcactggccccctccacctgcccatagtcaccaaattctgttttaaatcaatgacctaagatcaacaatgaagtattttataaatgtatttatgctgctagactgtgggtcaaatgtttccattttcaaattatttagaattcttatgagtttaaaatttgtaaatttctaaatccaatcatgtaaaatgaaactgttgctccattggagtagtctcccacctaaatatcaagatggctatatgctaaaaagagaaaatatggtcaagtctaaaatggctaattgtcctatgatgctattatcatagactaatgacatttatcttcaaaacaccaaattgtctttagaaaaattaatgtgattacaggtagaggccttctaggtgagacacttttaaggtacactgcattttgcagaaaaaaaaaaaaaaaagtaatcttttagcaaccccagtattccttcactatttcgcttcctgcattagcaaattttacttacagtcaaaagtgcagatttatactcctgacgtgtctcattcacagctaaataataggccataggacttttggtaggtttaaacttttaattctgtatttcatgattataagtcttgctagaattttttctaatctttagtagatttgattaaataatgattcacagaatttagtaacagaatcaaactaagccatgtatgagggtaatcgagatgaggatattaactcaaaagaaatagggtgatttttaaaggattaataaaattctgaaatgttaagtag

SEQ ID NO: 1091 - DNA, 3344 bp, Homo sapiens
aagctggggagcatggaccagaccccgcagcgctggcaccatgacgctcgcccgcttcgtgctagccctgatgttaggggcgctccccgaagtggtcggctttgattctgtcctcaatgattccctccaccacagccaccgccattcgccccctgcgggtccgcactacccctattaccttcccacccagcagcggcccccgacgacgcgtccgccgccgcctctcccgcgcttcccgcgccccccgcgggcgctccctgcccagcgcccgcacgccctccaggccgggcacacgccccggccgcacccctggggctgccccgccggcgagccatgggtcagcgtgacggacttcggcgccccgtgtctgcggtgggcggaggtgccacccttcctggagcggtcgcccccagcgagctgggctcagctgcgaggacagcgccacaacttttgtcggagccccgacggcgcgggcagaccctggtgtttctacggagacgcccgtggcaaggtggactggggctactgcgactgcagacacggatcagtacgacttcgtggcggcaaaaatgagtttgaaggcacagtggaagtatatgcaagtggagtttggggcactgtctgtagcagccactgggatgattctgatgcatcagtcatttgtcaccagctgcagctgggaggaaaaggaatagcaaaacaaaccccgttttctggactgggccttattcccatttattggagcaatgtccgttgccgaggagatgaagaaaatatactgctttgtgaaaaagacatctggcagggtggggtgtgtcctcagaagatggcagctgctgtcacgtgtagcttttcccatggcccaacgttccccatcattcgccttgctggaggcagcagtgtgcatgaaggccgggtggagctctaccatgctggccagtggggaaccgtttgtgatgaccaatgggatgatgccgatgcagaagtgatctgcaggcagctgggcctcagtggcattgccaaagcatggcatcaggcatattttggggaagggtctggcccagttatgttggatgaagtacgctgcactgggaatgagctttcaattgagcagtgtccaaagagctcctggggagagcataactgtggccataaagaagatgctggagtgtcctgtacccctctaacagatggggtcatcagacttgcaggtgggaaaggcagccatgagggtcgcttggaggtatattacagaggccagtggggaactgtctgtgatgatggctggactgagctgaatacatacgtggtttgtcgacagttgggatttaaatatggtaaacaagcatctgccaaccattttgaagaaagcacagggcccatatggttggatgacgtcagctgctcaggaaaggaaaccagatttcttcagtgttccaggcgacagtggggaaggcatgactgcagccaccgcgaagatgttagcattgcctgctaccctggcggcgagggacacaggctctctctgggttttcctgtcagactgatggatggagaaaataagaaagaaggacgagtggaggtttttatcaatggccagtggggaacaatctgtgatgatggatggactgataaggatgcagctgtgatctgtcgtcagcttggctacaagggtcctgccagagcaagaaccatggcttactttggagaaggaaaaggacccatccatgtggataatgtgaagtgcacaggaaatgagaggtccttggctgactgtatcaagcaagatattggaagacacaactgccgccacagtgaagatgcaggagttatttgtgattattttggcaagaaggcctcaggtaacagtaataaagagtccctctcatctgtttgtggcttgagattactgcaccgtcggcagaagcggatcattggtgggaaaaattctttaaggggtggttggccttggcaggtttccctccggctgaagtcatcccatggagatggcaggctcctctgcggggctacgctcctgagtagctgctgggtcctcacagcagcacactgtttcaagaggtatggcaacagcactaggagctatgctgttagggttggagattatcatactctggtaccagaggagtttgaggaagaaattggagttcaacagattgtgattcatcgggagtatcgacccgaccgcagtgattatgacatagccctggttagattacaaggaccagaagagcaatgtgccagattcagcagccatgttttgccagcctgtttaccactctggagagagaggccacagaaaacagcatccaactgttacataacaggatggggtgacacaggacgagcctattcaagaacactacaacaagcagccattcccttacttcctaaaaggttttgtgaagaacgttataagggtcggtttacagggagaatgctttgtgctggaaacctccatgaacacaaacgcgtggacagctgccagggagacagcggaggaccactcatgtgtgaacggcccggagagagctgggtggtgtatggggtgacctcctgggggtatggctgtggagtcaaggattctcctggtgtttataccaaagtctcagcctttgtaccttggataaaaagtgtcaccaaactgtaattcttcatggaaacttcaaagcagcatttaaacaaatggaaaactttgaacccccactattagcactcagcagagatgacaacaaatggcaagatctgtttttgctttgtgttgtggtaaaaaattgtgtaccccctgctgcttttgagaaatttgtgaacattttcagaggcctcagtgtagtggaagtgataatccttaaatgaacattttctaccctaatttcactggagtgacttattctaagcctcatctatcccctacctatttctcaaaatcattctatgctgattttacaaaagatcatttttacatttgaactgagaaccccttttaattgaatcagtggtgtctgaaatcatattaaatacccacatttgacataaatgcggtaccctttactacactcatgagtggcatatttatgcttaggtcttttcaaaagacttgacaagaaatcttcatattctctgtagcctttgtcaagtgaggaaatcagtggttaaagaattccactataaacttttaggcctgaataggagtagtaaagcctcaaggacatctgcctgtcacaatatattctcaaagtgatctgatatttggaaacaagtatccttgttgagtaccaagtgctacagaaaccataagataaaaatactttctacctacagcgtgc

SEQ ID NO: 1092 - DNA, 4313 bp, Homo sapiens
gaattccgggcccccggccgtccctcttaaggctcttcctccgctccgccagtgtccggccgcgggccggccttagtgactggggcggcgggccccggggccgcggcgtggggcgggcaggcggacgccggccgcgggctgctttcgtcggctcccaagctctcccggagcgagcagccgcccgcgagccgccgcggagcctcctcgcccgctcccgccggcgagcaagatgatgtgcgaggtgatgccgaccatcagcgaagcagaaggcccccctggaggaggtggaggccatggttccggctccccttcacagccagatgcagattcacattttgaacagttgatggtctccatgctagaagaaagggaccgccttcttgatacactgagagagactcaagaaacgctggccttaacccaggggaagttacacgaggttggtcatgaaagagattccttgcagagacagctcaacacggcacttccacaggagttcgcagcacttactaaagaactcaatgtatgcagggaacagctccttgaaagggaagaagaaattgctgaactgaaagcagaaaggaataacaccaggctgctgttagagcatttggaatgccttgtctccaggcatgagcggtctcttaggatgaccgtggtgaagagacaagcgcagtctccagcaggcgtgtccagcgaagtggaagtgctgaaagcactgaagtccttatttgaacaccacaaagctctggatgaaaaggtgagagagcgattacgagtagcacttgaaagatgtagtttgttagaagaggaattaggtgccacacacaaagagctaatgattcttaaagaacagaataatcagaaaaaaactctaacagatggagtgctggacataaaccatgaacaagaaaatacaccaagcacgagtggaaagagatcttctgatggttctttaagccacgaggaagaccttgctaaagtaattgagctccaagaaatcataagtaagcagtcaagggaacagagccaaatgaaagaacgcctggcttccctttccagtcatgtgacagaactggaagaggatctggacacggctagaaaagatctcatcaaatctgaagaaatgaacacaaaattgcaacgagatgtccgtgaagccatggcccaaaaggaagatatggaagagagaatcactactcttgaaaaacgctacctcgctgcacagcgtgaagccacatctgtgcatgacctcaatgataaacttgaaaatgaaattgcaaataaagattctatgcatcgacagactgaagataaaaaccgccagttacaggagcgcttggaattggcagagcaaaagctgcaacagacactgaggaaggcagagacgctcccggaggtggaggcggagctggcccagagggtggcagcgctttccaaggctgaagagagacacggcaacattgaagaaaggttacgacagatggaagcacagttggaggagaagaatcaagaactgcagcgggcaaggcaaagagaaaaaatgaacgaagaacataataaacgtttatcagacactgttgacaagctgctttcagaatctaatgagaggcttcaacttcatcttaaagagagaatggctgctttggaagataagaactctcttttaagagaagttgaaagtgcaaaaaagcagttagaagaaacacaacacgataaggatcagcttgtcctaaacattgaagcactgagggctgaactagaccacatgagactaagaggtgcttcacttcatcatggccgaccccacttgggcagtgtcccagatttcaggttccccatggcagacggccacacagactcctacagcaccagtgcagtgctgcggcgcccacagaaaggccggctggcagccctgcgagatgagccttccaaggtacaaactcttaatgagcaggattgggaacgtgcccagcaagctagtgtcttggcaaatgtagcacaagcattcgagagtgatgctgacgtgtctgatggtgaagatgacagggacactctcctcagctcagttgacctgctatcgcccagcgggcaggccgacgcgcacacactagccatgatgcttcaggagcagctggacgccatcaacaaagagatcaggttgattcaggaagaaaaagaaaatacagagcagcgggcagaggagattgaaagtcgagttggcagtggaagtctagacaatcttggtcgttttagatcaatgagctccattcccccctaccctgcttcctcgcttgctagctcctcccctccgggcagtgggcgctccaccccacgaaggatccctcacagcccagctcgggaagtggacagactgggcgtcatgacccttttgccaccttccagagaagaggtacgagatgacaagacaaccataaagtgtgaaacctccccgccttcctccccgagagcccttcggttagaccggctgcacaaaggggcgctgcacaccgtcagccacgaggacatcagggacataaggaactccacaggctcccaggatggtcccgtgagcaaccccagcagtagcaacagtagccaggactcgctccacaaagccccaaagaagaaaggcattaagtcctccattggccgcttgtttggcaagaaagaaaagggccgacctggacaaactggcaaagaagcattaggacaagctggtgtttccgagacggataactcatctcaggatgccttgggacttagcaaattggggggacaggctgaaaaaaatcgtaaacttcaaaaaaagcatgaattgctggaggaagcccggagacaaggtttaccttttgcccaatgggacgggccaacggttgtggtctggctagagctctgggttgggatgccagcctggtatgtggctgcctgccgagcaaacgtgaaaagcggggccatcatgtcggccctgtccgacacagagatccagcgtgagattggcatcagcaaccccctgcacaggctgaagctgaggctggccatccaggagatcatgtcgctgaccagcccgtctgccccgcccacatctagaacgacactcgcctatggggacatgaaccacgagtggatcggcaacgagtggctccccagcctgggcctcccccagtaccgcagctacttcatggagtgccttgtagacgccaggatgctggaccacttgaccaagaaagaccttcgagggcagctgaaaatggtcgacagttttcacagaaacagtttccagtgtggaattatgtgcctgagaaggttaaattatgaccggaaagaactggaaagaaaaagagaagaaagtcagagtgaaataaaagacgtgcttgtttggagcaatgatcgagtgattcgctggatcctgtcaattggccttaaagaatatgcaaacaatcttatagagagtggtgttcacggagcacttctggccttagatgaaaccttcgacttcagtgcactggcactgctgttacagatcccgacgcagaacacacaggctcgtgctgtcttggaaagagaatttaacaaccttttggtcatggggactgatagaaggtttgatgaagatgatgataaaagctttaggagagcaccttcatggagaaaaaagtttagaccaaaggacattcgtggcttagctgctgggtcagcagagactctccctgcaaacttccgggtgacttcttctatgtcttccccctctatgcagccaaagaagatgcagatggacggcaatgtatcaggaacacagaggttggattctgctacagtcaggacttactcctgctaaagtctcctgttgtttacccacactacttctacagatgattatgcagcatttgaatccaacaaagactacattttggaaccagtggaatctttaatcttgttaatacttgttatatggaccctaagatattttattacagagtttttaattagtgaaaaattcatgaataccatagagaaaatattttagaatttaatgtttcttatatttatgtaaacttatgactcttcatttatatagttacttactttttcatgtatatccaggctataaatatcctttcaaatcatgttcttatacctaattttagtctttcaaatgaatgtactgtaatgcttgtatgtataaatcctatgaatagagggcttttgtaaattatgcatttattgtaattatcattaattttttaatgataaaccatgacaaaggattttacgtttataaaattatgacagaagccatgtgccccgaattc

SEQ ID NO: 1093 - DNA, 3859 bp, Homo sapiens
caggtcagaaaccgatcaggcatggaactccccttcgtcactcacctgttcttgcccctggtgttcctgacaggtctctgctccccctttaacctggatgaacatcacccacgcctattcccagggccaccagaagctgaatttggatacagtgtcttacaacatgttgggggtggacagcgatggatgctggtgggcgccccctgggatgggccttcaggcgaccggaggggggacgtttatcgctgccctgtagggggggcccacaatgccccatgtgccaagggccacttaggtgactaccaactgggaaattcatctcatcctgctgtgaatatgcacctggggatgtctctgttagagacagatggtgatgggggattcatggcctgtgcccctctctggtctcgtgcttgtggcagctctgtcttcagttctgggatatgtgcccgtgtggatgcttcattccagcctcagggaagcctggcacccactgcccaacgctgcccaacatacatggatgttgtcattgtcttggatggctccaacagcatctacccctggtctgaagttcagaccttcctacgaagactggtagggaaactgtttattgacccagaacagatacaggtgggactggtacagtatggggagagccctgtacatgagtggtccctgggagatttccgaacgaaggaagaagtggtgagagcagcaaagaacctcagtcggcgggagggacgagaaacaaagactgcccaagcaataatggtggcctgcacagaagggttcagtcagtcccatgggggccgacccgaggctgccaggctactggtggttgtcactgatggagagtcccatgatggagaggagcttcctgcagcactaaaggcctgtgaggctggaagagtgacacgctatgggattgcagtccttggtcactacctccggcggcagcgagatcccagctctttcctgagagaaattagaactattgccagtgatccagatgagcgattcttcttcaatgtcacagatgaggctgctctgactgacattgtggatgcactaggagatcggatttttggccttgaagggtcccatgcagaaaacgaaagctcctttgggctggaaatgtctcagattggtttctccactcatcggctaaaggatgggattctttttgggatggtgggggcctatgactggggaggctctgtgctatggcttgaaggaggccaccgccttttccccccacgaatggcactggaagacgagttcccccctgcactgcagaaccatgcagcctacctgggttactctgtttcttccatgcttttgcggggtggacgccgcctgtttctctctggggctcctcgatttagacatcgaggaaaagtcatcgccttccagcttaagaaagatggggctgtgagggttgcccagagcctccagggggagcagattggttcatactttggcagtgagctctgcccattggatacagatagggatggaacaactgatgtcttacttgtggctgcccccatgttcctgggaccccagaacaaggaaacaggacgtgtttatgtgtatctggtaggccagcagtccttgctgaccctccaaggaacacttcagccagaacccccccaggatgctcggtttggctttgccatgggagctcttcctgatctgaaccaagatggttttgctgatgtggctgtgggggcgcctctggaagatgggcaccagggagcactgtacctgtaccatggaacccagagtggagtcaggccccatcctgcccagaggattgctgctgcctccatgccacatgccctcagctactttggccgaagtgtggatggtcggctagatctggatggagatgatctggtcgatgtggctgtgggtgcccagggggcagccatcctgctcagctcccggcccattgtccatctgaccccatcactggaggtgaccccacaggccatcagtgtggttcagagggactgtaggcggcgaggccaagaagcagtctgtctgactgcagccctttgcttccaagtgacctcccgtactcctggtcgctgggatcaccaattctacatgaggttcaccgcatcactggatgaatggactgctggggcacgtgcagcatttgatggctctggccagaggttgtcccctcggaggctccggctcagtgtggggaatgtcacttgtgagcagctacacttccatgtgctggatacatcagattacctccggccagtggccttgactgtgacctttgccttggacaatactacaaagccagggcctgtgctgaatgagggctcacccacctctatacaaaagctggtccccttctcaaaggattgtggccctgacaatgaatgtgtcacagacctggtgcttcaagtgaatatggacatcagaggctccaggaaggccccatttgtggttcgaggtggccggcggaaagtgctggtatctacaactctggagaacagaaaggaaaatgcttacaatacgagcctgagtatcatcttctctagaaacctccacctggccagtctcactcctcagagagagagcccaataaaggtggaatgtgccgccccttctgctcatgcccggctctgcagtgtggggcatcctgtcttccagactggagccaaggtgacctttctgctagagtttgagtttagctgctcctctctcctgagccaggtctttgggaagctgactgccagcagtgacagcctggagagaaatggcacccttcaagaaaacacagcccagacctcagcctacatccaatatgagccccacctcctgttctctagtgagtctaccctgcaccgctatgaggttcacccatatgggaccctcccagtgggtcctggcccagaattcaaaaccactctcagggttcagaacctaggctgctatgtggtcagtggcctcatcatctcagccctccttccagctgtggcccatgggggcaattacttcctatcactgtctcaagtcatcactaacaatgcaagctgcatagtgcagaacctgactgaacccccaggcccacctgtgcatccagaggagcttcaacacacaaacagactgaatgggagcaatactcagtgtcaggtggtgaggtgccaccttgggcagctggcaaaggggactgaggtctctgttggactattgaggctggttcacaatgaatttttccgaagagccaagttcaagtccctgacggtggtcagcacctttgagctgggaaccgaagagggcagtgtcctacagctgactgaagcctcccgttggagtgagagcctcttggaggtggttcagacccggcctatcctcatctccctgtggatcctcataggcagtgtcctgggagggttgctcctgcttgctctccttgtcttctgcctgtggaagcttggcttctttgcccataagaaaatccctgaggaagaaaaaagagaagagaagttggagcaatgaatgtagaataagggtctagaaagtcctccctggcagctttcttcaagagacttgcataaaagcagaggtttgggggctcagatgggacaagaagccgcctctggactatctccccagaccagcagcctgacttgacttttgagtcctagggatgctgctggctagagatgaggctttacctcagacaagaagagctggcaccaaaactagccatgctcccaccctctgcttccctcctcctcgtgatcctggttccatagccaacactggggcttttgtttggggtccttttatccccaggaatcaataatttttttgcctaggaaaaaaaaaa

SEQ ID NO: 1094 - DNA, 4803 bp, Homo sapiens
gcggctgcctagttgacgcacccattgagtcgctggcttctttgcagcgcttcagcgttttcccctggagggcgcctccatccttggaggcctagtgccgtcggagaagagagcgggagccgcggacagagacgcgtgcgcaattcggagccgactctgggtgcggactgtgggagctgactctgggtagccggctgcgcgtggctggggaggcgaggccggacgcacctctgtttgggggtcctcagagattaatgattcatcaagggatagttgtactgttctcgtgggaatcacttcatcatgcgaaatctgaaattatttcggaccctggagttcagggatattcaaggtccagggaatcctcagtgcttctctctccgaactgaacaggggacggtgctcattggttcagaacatggcctgatagaagtagaccctgtctcaagagaagtgaaaaatgaagtttctttggtggcagaaggctttcttccagaggatggaagtggccgcattgttggtgttcaggacttgctggatcaggagtctgtgtgtgtggccacagcctctggagacgtcatactctgcagtctcagcacacaacagctggagtgtgttgggagtgtagccagtggtatctctgttatgagttggagtcctgaccaagagctggtgcttcttgccacaggtcaacagaccctgattatgatgacaaaagattttgagccaatcctggagcagcagatccatcaggatgattttggtgaaagcaagtttatcactgttggatggggtaggaaggagacacagttccatggatcagaaggcagacaagcagcttttcagatgcaaatgcatgagtctgctttgccctgggatgaccatagaccacaagttacctggcggggggatggacagttttttgctgtgagtgttgtttgcccagaaacaggggctcggaaggtcagagtgtggaaccgagagtttgctttgcagtcaaccagtgagcctgtggcaggactgggaccagccctggcttggaaaccctcaggcagtttgattgcatctacacaagataaacccaaccagcaggatattgtgttttttgagaaaaatggactccttcatggacactttacacttcccttccttaaagatgaggttaaggtaaatgacttgctctggaatgcagattcctctgtgcttgcagtccggctggaagaccttcagagagaaaaaagctccattccgaaaacctgtgttcagctctggactgttggaaactatcactggtatctcaagcaaagtttatccttcagcacctgtgggaagagcaagattgtgtctctgatgtgggaccctgtgaccccataccggctgcatgttctctgtcagggctggcattacctcgcctatgattggcactggacgactgaccggagcgtgggagataattcaagtgacttgtccaatgtggctgtcattgatggaaacagggtgttggtgacagtcttccggcagactgtggttccgcctcccatgtgcacctaccaactgctgttcccacaccctgtgaatcaagtcacattcttagcacaccctcaaaagagtaatgaccttgctgttctagatgccagtaaccagatttctgtttataaatgtggtgattgtccaagtgctgaccctacagtgaaactgggagctgtgggtggaagtggatttaaagtttgccttagaactcctcatttggaaaagagatacaaaatccagtttgagaataatgaagatcaagatgtaaacccgctgaaactaggccttctcacttggattgaagaagacgtcttcctggctgtaagccacagtgagttcagcccccggtctgtcattcaccatttgactgcagcttcttctgagatggatgaagagcatggacagctcaatgtcagttcatctgcagcggtggatggggtcataatcagtctatgttgcaattccaagaccaagtcagtagtattacagctggctgatggccagatatttaagtacctttgggagtcaccttctctggctattaaaccatggaagaactctggtggatttcctgttcggtttccttatccatgcacccagaccgaattggccatgattggagaagaggaatgtgtccttggtctgactgacaggtgtcgctttttcatcaatgacattgaggttgcgtcaaatatcacgtcatttgcagtatatgatgagtttttattgttgacaacccattcccatacctgccagtgtttttgcctgagggatgcttcatttaaaacattacaggccggcctgagcagcaatcatgtgtcccatggggaagttctgcggaaagtggagaggggttcacggattgtcactgttgtgccccaggacacaaagcttgtattacagatgccaaggggaaacttagaagttgttcatcatcgagccctggttttagctcagattcggaagtggttggacaaacttatgtttaaagaggcatttgaatgcatgagaaagctgagaatcaatctcaatccgatttatgatcataaccctaaggtgtttcttggaaatgtggaaaccttcattaaacagatagattctgtgaatcatattaacttgttttttacagaattgaaagaagaagatgtcacgaagaccatgtaccctgcaccagttaccagcagtgtctacctgtccagggatcctgacgggaataaaatagaccttgtctgcgatgctatgagagcagtcatggagagcataaatcctcataaatactgcctatccatacttacatctcatgtaaagaagacaaccccagaactggaaattgtactgcaaaaagtacacgagcttcaaggaaatgctccctctgatcctgatgctgtgagtgctgaagaggccttgaaatatttgctgcatctggtagatgttaatgaattatatgatcattctcttggcacctatgactttgatttggtcctcatggtagctgagaagtcacagaaggatcccaaagaatatcttccatttcttaatacacttaagaaaatggaaactaattatcagcggtttactatagacaaatacttgaaacgatatgaaaaagccattggccacctcagcaaatgtggacctgagtacttcccagaatgcttaaacttgataaaagataaaaacttgtataacgaagctctgaagttatattcaccaagctcacaacagtaccaggatatcagcattgcttatggggagcacctgatgcaggagcacatgtatgagccagcggggctcatgtttgcccgttgcggtgcccacgagaaagctctctcagcctttctcacatgtggcaactggaagcaagccctctgtgtggcagcccagcttaactttaccaaagaccagctggtgggcctcggcagaactctggcaggaaagctggttgagcagaggaagcacattgatgcggccatggttttggaagagtgtgcccaggattatgaagaagctgtgctcttgctgttagaaggagctgcctgggaagaagctttgaggctggtatacaaatataacagactggatattatagaaaccaacgtaaagccttccattttagaagcccagaaaaattatatggcatttctggactctcagacagccacattcagtcgccacaagaaacgtttattggtagttcgagagctcaaggagcaagcccagcaggcaggtctggatgatgaggtaccccacgggcaagagtcagacctcttctctgaaactagcagtgtcgtgagtggcagtgagatgagtggcaaatactcccatagtaactccaggatatcagcgagatcatccaagaatcgccgaaaagcggagcggaagaagcacagcctcaaagaaggcagtccgctggaggacctggccctcctggaggcactgagtgaagtggtgcagaacactgaaaacctgaaagatgaagtataccatattttaaaggtactctttctctttgagtttgatgaacaaggaagggaattacagaaggcctttgaagatacgctgcagttgatggaaaggtcacttccagaaatttggactcttacttaccagcagaattcagctaccccggttctaggtcccaattctactgcaaatagtatcatggcatcttatcagcaacagaagacttcggttcctgttcttgatgctgagctttttataccaccaaagatcaacagaagaacccagtggaagctgagcctgctagactgagtgactgcagttaggagggatccgacagagaagaccatttccactcattcctgttgtcctaccaccccttgctctttgagggctggctattgagaactggaaagagtaaaatgataacttaccttagcattgccaagaacttcagcagacaacaagcaattctatttattttatgttgtgtatacatcttgatcattagcaagacattaagctttaaccattatggcaccattttgtgagaatgattgttctttcacttgggctgtttgagagcataattatggtaatcatgagattaatgtttcatgatttctacctccaaagtgtgaagacaagtaaaacaatgtttctaaattgtcttattttgttggcggagaagattacaatggctattagtgctacatttggtcaaatgtaatcacttaaatagcttcttgtcaccttaaactaaagcagaataaaaagtatcctttgaaattaaaaaaaacaaaaaagctaaaa

SEQ ID NO: 1095 - DNA, 928 bp, Homo sapiens
gctgtggccctggcacctgcccctgggctgggacagcccactgttccatgctgcccaagaaggctcagcacaggcacaaaccattgcccggcactggcccgtgctgcctgagaaggattggcacgggcacagaccactgcccccacctgccctgcgccatctacccaagaaggctcggcacgggcaccaaccactgcctccaactgccccatgctgcctgagaaggcactgcacggccacccccaactgccccgcactgtccctacccgggcagccatgcgagcggctggaactctgctggccttctgctgcctggtcttgagcaccactgggggcccttccccagatacttgttcccaggaccttaactcacgtgtgaagccaggatttcctaaaacaataaagaccaatgacccaggagtcctccaagcagccagatacagtgttgaaaagttcaacaactgcacgaacgacatgttcttgttcaaggagtcccgcatcacaagggccctagttcagatagtgaaaggcctgaaatatatgctggaggtggaaattggcagaactacctgcaagaaaaaccagcacctgcgtctggatgactgtgacttccaaaccaaccacaccttgaagcagactctgagctgctactctgaagtctgggtcgtgccctggctccagcacttcgaggtgcctgttctccgttgtcactgacccccgcctcttcagcaagaccacagccatgacaaacaccaggatgcatgctccttgtcccctcccacccgcctcatgacccagcctcacagaccctctcaggcctctgacgagtgagcgggtgaagtgccactgggtcaccgcagggcagctggaatggcagcatggtagcacctcctaacagattaaatagatcacatttgcttctaaaatt

SEQ ID NO: 1096 - DNA, 1809 bp, Homo sapiens
ggcacgagggcgaggagcccaagagcgagcgcgcagcacgaagctcgagccgcctccgccgcgcgaccccacctcggccgccgccgcctgcgccgcgagatccgccccggcctccccgagagcgagccccggccgccgcgaccaccagccgcgctaaccgccgaccaaccgccaccgaggcgcctgagcgagagcagaggaggaggaggcatgagtgaggcgggcgaggccaccaccaccaccaccaccaccctcccgcaggctccgacggaggcggccgccgcggctccccaggaccccgcgcccaagagcccggtgggcagcggtgcgccccaggccgcggccccggcgcccgccgcccacgtcgcaggaaaccccggtggggacgcggcccccgcagccacgggcaccgcggccgccgcctctttagccgccgccgccggcagcgaagacgcggagaaaaaagttctcgccaccaaagtccttggcactgtcaaatggttcaacgtcagaaatggatatggatttataaatcgaaatgacaccaaagaagatgtatttgtacatcagactgccatcaagaagaataacccacggaaatatctgcgcagtgtaggagatggagaaactgtagagtttgatgtggttgaaggagagaagggtgcagaagctgccaatgtgactggcccggatggagttcctgtggaagggagtcgttacgctgcagatcggcgccgttacagacgtggctactatggaaggcgccgtggccctccccggaattacgctggggaggaggaggaggaagggagcggcagcagtgaaggatttgacccccctgccactgataggcagttctctggggcccggaatcagctgcgccgcccccagtatcgccctcagtaccggcagcggcggttcccgccttaccacgtgggacagacctttgaccgtcgctcacgggtcttaccccatcccaacagaatacaggctggtgagattggagagatgaaggatggagtcccagagggagcacaacttcagggaccggttcatcgaaatccaacttaccgcccaaggtaccgtagcaggggacctcctcgcccacgacctgccccagcagttggagaggctgaagataaagaaaatcagcaagccaccagtggtccaaaccagccgtctgttcgccgtggatatcggcgtccctacaattaccggcgtcgcccgcgtcctcctaacgctccttcacaagatggcaaagaggccaaggcaggtgaagcaccaactgagaaccctgctccacccacccagcagagcagtgctgagtaacaccaggctcctcaggcaccttcaccatcggcaggtgacctaaagaattaatgaccattcagaaataaagcaaaaagcaggccacaaccttaaccaacaccaaagaaacatccaagcaataaagtggaagactaaccaagatttggacattggaatgtttactgttattctttaagaaacatctacaaaaagaaaatgtcaacaaatttttccagcaagctgagaacctgggaattcctgcacggaagacaagagagtagcctctccagtttcagcaaccgctaggtttctattttttttcctggtttttactgttttggtaatatatatattgaaacaagaaatattaataccacatggggagaaccccaaccaaagaaatctgaaatatatagtaaatgcttttttttccgtttttgttcattttggatgctggtgctaaacctccaagtgtcatgatttaaaaaaaaaaaaaaaaaa

SEQ ID NO: 1097 - DNA, 2100 bp, Homo sapiens
acatcactgcgctggccgtccaaggtccgccgccccaccatgccgcccccgccgctgctgctgctccttacagtcctggtcgtcgccgctgcccggccggggtgcgagtttgagcggaaccccgccgccacctgcgtggacctgcagctcaggacctgcagcgatgccgcctacaaccacaccaccttccccaacctgcttcagcaccggtcgtgggaggtggtggaggccagctccgagtacatcctgctgagcgttctacaccagctcctggaaggccagtgcaacccggacctgcggctgctgggctgtgctgtgctggccccccggtgtgagggcggctgggtgcgcagaccctgccggcacatctgcgagggcctgcgggaggtctgccagcccgccttcgacgccattgacatggcctggccctacttccttgactgccaccgctacttcacgagagaggacgagggctgctatgacccgctggagaagcttcggggaggcctggaggctgacgaggcactgccctcagggctgccgcccaccttcatccgcttcagccaccactcctacgcccagatggtgcgtgtgctgaggcggacggcctcccgctgtgcccacgtggccaggacctacagcatcgggcgcagcttcgacggcagggagctgctggtcatcgagttctccagccgccccggccagcacgagctgatggagcccgaggtgaagctcatcggcaacattcatggcaacgaggtggcgggccgggagatgctcatctacctagcccagtacctgtgctctgagtacctgcttggtaacccccgcatccagcgcctgctcaacaccacccgcatccacctgctgccctccattaaccctgacggctatgaggtggcagctgccgagggtgccggctacaacgggtggacgagcgggaggcagaacgcgcagaacctggatctgaaccgaaatttcccggacctgacgtccgagtactaccggctggcggagacccgcggcgcacgcagcgaccacatccccatcccccagcactactggtggggtaaggtggccccggagacaaaggcaatcatgaagtggatgcagaccataccctttgtgctctcagccagccttcatgggggcgacctggtggtgtcctaccccttcgacttctccaagcacccccaggaggagaagatgttttctcccacgcccgacgagaagatgttcaagctgctgtccagagcctacgctgacgtccaccccatgatgatggacaggtcggagaataggtgtggaggcaatttcctgaagagggggagcatcatcaacggggcggactggtacagcttcacgggaggcatgtccgatttcaactacctgcacaccaactgctttgagatcacggtagagctgggctgtgtgaagttcccccccgaggaggccctgtacacactctggcagcacaacaaggagtcactcctgaatttcgtggagacggtgcaccggggcatcaaaggtgtggtgacagataaattcggcaagccagtcaaaaacgcccggatctcagtcaaaggcattcgccacgacatcaccacagccccagatggtgactactggagactgctgcccccaggtatccacattgtcattgcccaagcccctggctacgccaaagtcatcaagaaagtcatcatccccgcccggatgaagagggctggccgtgtggacttcattctgcaacctctggggatgggacccaagaactttattcatgggctgcggaggactgggccccacgacccgctgggaggtgccagctctttgggggaggccacggagcccgacccgctccgggcgcgcaggcagccctcggccgacgggagtaagccctggtggtggtcctacttcacatcgctgagcacccacaggccacgctggctgctcaagtactagccccggccccagcacccgccaggatgtggagaccgaggcccatctccgcatcccgggctcctggctcttgattttgtctgccacagacatcccacaaagccgctgccattttattaaagtgttttgatccacaaa

SEQ ID NO: 1098 - DNA, 1043 bp, Homo sapiens
gccgccgcggggctcgatcgggcaacggcggcgacggcggcagcgacggatcctcctcctcccttattcccttgctcctctttcttccttttcttttcctttccggccgggcctcgtccactttgcctaacggcggcctcgatcctacgtaaaggcatgacttcctggcaccacagggaaaatcgggtgcaagcccagaaactatttccccaccaccacttgttgaaaaactgatttgaaggcatctccggggttgaacaaacggaaagtgccaggatttgatgcgtctctggtttcgctctggagaccattccctgctaagtatcaagacgaaaaaaactggaaactaatccgaatttctgtggaatgtttaatcttctggatccatgactgtctgatacgttggcaatttaaagtccttttgaaagagagttcatgttacccagctattctctaaaccatatttatttagagtcagaatggagcgatttgtagtaacagcaccacctgctcgaaaccgttctaagactgctttgtatgtgactcccctggatcgagtcactgagtttggaggtgagctgcatgaagatggaggaaaactcttctgcacttcttgcaatgtggttctgaatcatgttcgcaagtctgccattagtgaccacctcaagtcaaagactcataccaagaggaaggcagaatttgaagagcagaatgtgagaaagaagcagaggcccctaactgcatctcttcagtgcaacagtactgcgcaaacagagaaagtcagtgttatccaggactttgtgaaaatgtgcctggaagccaacatcccacttgagaaggctgatcacccagcagtccgtgctttcctatctcgccatgtgaagaatggaggctccatacctaagtcagaccagctacggagggcatatcttcctgatggatatgagaatgagaatcaactcctcaactcacaagattgttgactaggaggttaccaccattgtgatcaagataaatgtggagtattaaagttatgtgttgat

SEQ ID NO: 1099 - DNA, 2922 bp, Homo sapiens
ggacaccgggccatgcacgcccccaactgaagctgcatctcaaagccgaagattccagcagcccaggggatttcaaagagctcagactcagaggaacatctgcggagagacccccgaagccctctccagggcagtcctcatccagacgctccgctagtgcagacaggagcgcgcagtggccccggctcgccgcgccatggagcggatccccagcgcgcaaccaccccccgcctgcctgcccaaagcaccgggactggagcacggagacctaccagggatgtaccctgcccacatgtaccaagtgtacaagtcaagacggggaataaagcggagcgaggacagcaaggagacctacaaattgccgcaccggctcatcgagaaaaagagacgtgaccggattaacgagtgcatcgcccagctgaaggatctcctacccgaacatctcaaacttacaactttgggtcacttggaaaaagcagtggttcttgaacttaccttgaagcatgtgaaagcactaacaaacctaattgatcagcagcagcagaaaatcattgccctgcagagtggtttacaagctggtgagctgtcagggagaaatgtcgaaacaggtcaagagatgttctgctcaggtttccagacatgtgcccgggaggtgcttcagtatctggccaagcacgagaacactcgggacctgaagtcttcgcagcttgtcacccacctccaccgggtggtctcggagctgctgcagggtggtacctccaggaagccatcagacccagctcccaaagtgatggacttcaaggaaaaacccagctctccggccaaaggttcggaaggtcctgggaaaaactgcgtgccagtcatccagcggactttcgctcactcgagtggggagcagagcggcagcgacacggacacagacagtggctatggaggagaatcggagaagggcgacttgcgcagtgagcagccgtgcttcaaaagtgaccacggacgcaggttcacgatgggagaaaggatcggcgcaattaagcaagagtccgaagaaccccccacaaaaaagaaccggatgcagctttcggatgatgaaggccatttcactagcagtgacctgatcagctccccgttcctgggcccacacccacaccagcctcctttctgcctgcccttctacctgatcccaccttcagcgactgcctacctgcccatgctggagaagtgctggtatcccacctcagtgccagtgctatacccaggcctcaacgcctctgccgcagccctctctagcttcatgaacccagacaagatctcggctcccttgctcatgccccagagactcccttctcccttgccagctcatccgtccgtcgactcttctgtcttgctccaagctctgaagccaatcccccctttaaacttagaaaccaaagactaaactctctaggggatcctgctgctttgctttccttcctcgctacttcctaaaaagcaacaaaaaagtttttgtgaatgctgcaagattgttgcattgtgtatactgagataatctgaggcatggagagcagattcagggtgtgtgtgtgtgtgtgtgtgtgtgtgtgtatgtgcgtgtgcgtgcacatgtgtgcctgcgtgttggtataggactttaaagctccttttggcatagggaagtcacgaaggattgcttgacatcaggagacttgggggggattgtagcagacgtctgggcttttccccacccagagaatagcccccttcgatacacatcagctggattttcaaaagcttcaaagtcttggtctgtgagtcactcttcagtttgggagctgggtctgtggctttgatcagaaggtactttcaaaagagggctttccagggctcagctcccaaccagctgttaggaccccacccttttgcctttattgtcgacgtgactcaccagacgtcggggagagagagcagtcagaccgagctttctgctaacatggggaggtagcaggcactggcatagcacggtagtggtttggggaggtttccgcaggtctgctccccacccctgcctcggaagaataaagagaatgtagttccctactcaggctttcgtagtgattagcttactaaggaactgaaaatgggccccttgtacaagctgagctgccccggagggagggaggagttccctgggcttctggcacctgtttctaggcctaaccattagtacttactgtgcagggaaccaaaccaaggtctgagaaatgcggacaccccgagcgagcaccccaaagtgcacaaagctgagtaaaaagctgcccccttcaaacagaactagactcagttttcaattccatcctaaaactccttttaaccaagcttagcttctcaaaggcctaaccaagccttggcaccgccagatcctttctgtaggctaattcctcttgcccaacggcatatggagtgtccttattgctaaaaaggattccgtctccttcaaagaagttttatttttggtccagagtacttgttttcccgatgtgtccagccagctccgcagcagcttttcaagatgcactatgcctgattgctgatcgtgttttaactttttcttttcctgtttttattttggtattaagtcgttgcctttatttgtaaagctgttataaatatatattatataaatatattaaaaaggaaaatgtttcagatgtttatttgtataattacttgattcacacagtgagaaaaaatgaatgtattcctgtttttgaagagaagaataatttttttttctctagggagaggtacagtgtttatattttggagccttcctgaaggtgtaaaattgtaaatatttttatctatgagtaaatgttaagtagttgttttaaaatacttaataaaataattcttttcctgtggaag

SEQ ID NO: 1100 - DNA, 1683 bp, Homo sapiens
atgggggacgctcccagccctgaagagaaactgcaccttatcacccggaacctgcaggaggttctgggggaagagaagctgaaggagatactgaaggagcgggaacttaaaatttactggggaacggcaaccacgggcaaaccacatgtggcttactttgtgcccatgtcaaagattgcagacttcttaaaggcagggtgtgaggtaacaattctgtttgcggacctccacgcatacctggataacatgaaagccccatgggaacttctagaactccgagtcagttactatgagaatgtgatcaaagcaatgctggagagcattggtgtgcccttggagaagctcaagttcatcaaaggcactgattaccagctcagcaaagagtacacactagatgtgtacagactctcctccgtggtcacacagcacgattccaagaaggctggagctgaggtggtaaagcaggtggagcaccctttgctgagtggcctcttataccccggactgcaggctttggatgaagagtatttaaaagtagatgcccaatttggaggcattgatcagagaaagattttcacctttgcagagaagtacctccctgcacttggctattcaaaacgggtccatctgatgaatcctatggttccaggattaacaggcagcaaaatgagctcttcagaagaggagtccaagattgatctccttgatcggaaggaggatgtgaagaaaaaactgaagaaggccttctgtgagccaggaaatgtggagaacaatggggttctgtccttcatcaagcatgtcctttttccccttaagtccgagtttgtgatcctacgagatgagaaatggggtggaaacaaaacctacacagcttacgtggacctggaaaaggactttgctgctgaggttgtacatcctggagacctgaagaattctgttgaagtcgcactgaacaagttgctggatccaatccgggaaaagtttaatacccctgccctgaaaaaactggccagcgctgcctacccagatccctcaaagcagaagccaatggccaaaggccctgccaagaattcagaaccagaggaggtcatcccatcccggctggatatccgtgtggggaaaatcatcactgtggagaagcacccagatgcagacagcctgtatgtagagaagattgacgtgggggaagctgaaccacggactgtggtgagcggcctggtacagttcgtgcccaaggaggaactgcaggacaggctggtagtggtgctgtgcaacctgaaaccccagaagatgagaggagtcgagtcccaaggcatgcttctgtgtgcttctatagaagggataaaccgccaggttgaacctctggaccctccggcaggctctgctcctggtgagcacgtgtttgtgaagggctatgaaaagggccaaccagatgaggagctcaagcccaagaagaaagtcttcgagaagttgcaggctgacttcaaaatttctgaggagtgcatcgcacagtggaagcaaaccaacttcatgaccaagctgggctccatttcctgtaaatcgctgaaaggggggaacattagctagccagcccagcatcttccccccttcttccaccactgagtcatctgctgtctcttcagtctgctccatccatcacccatttacccatctctcaggaca

SEQ ID NO: 1101 - DNA, 1331 bp, Homo sapiens
ccgcgtctcgcgtagtctcccgcgccgccgtccactgcgcgcttcgctctccgccgcccgaggcccgcgcgctcgccatgtcccggccaccgccaccgcgggtcgcctcggtgctgggcaccatggagatggggcgccgcatggacgcgcccgccagcgccgcggccgtgcgcgcctttctggagcgcggccacaccgaactggacacggccttcatgtacagcgacggccagtccgagaccatcctgggcggcctggggctcgggctgggcggtggcgactgcagagtgaaaattgccaccaaggccaacccttgggatggaaaatcactaaagcctgacagtgtccggtcccagctggagacgtcattgaagaggctgcagtgtccccaagtggacctcttctacctacacacacctgaccacggcaccccggtggaagagacgctgcatgcctgccagcggctgcaccaggagggcaagttcgtggagcttggcctctccaactatgctagctgggaagtggccgagatctgtaccctctgcaagagcaatggctggatcctgcccactgtgtaccagggcatgtacaacgccaccacccggcaggtggaaacggagctcttcccctgcctcaggcactttggactgaggttctatgcctacaaccctctggctgggggcctgctgactggcaagtacaagtatgaggacaaggacgggaaacagcctgtgggccgcttctttgggaatagctgggctgagacctacaggaatcgcttctggaaggagcaccacttcgaggccattgcgttggtggagaaggccctgcaggccgcatatggcgccagcgcccccagtgtgacctcggctgccctccggtggatgtaccaccactcacagctgcagggtgcccacggggacgcggtcatcctgggcatgtccagcctggagcagctggagcagaacttggcagcaacagaggaagggcccctggagccggctgtcgtggatgcctttaatcaagcctggcatttggttgctcacgaatgtcccaactacttccgctaggcccatcatggctcaggctgcccaaggcttttctgtcacctcttttgttctctcacactgaccagtcttggccttaagctgacttagaagggtttttctgaattgtctagatccatgcattatttttctagcttcctgccttgctccctattcactttacactgtgaaaggtggggggtgagtcccacttgagcgcttcctgttgaataaagcaggcacttgacctggctgtagcctaggtcttgagtgaaccccaaaaaa

SEQ ID NO: 1102 - DNA, 1672 bp, Homo sapiens
aaaaaaattaaaaaaaaaaaaaaaaacagaaaaaaaaacatagtacatgccaagatattattatgacaattacaaatacaaataaattatgatctttgacctcagcatatttattaactaaaagggaagataaaacaggcacataactataacaggggcaccagtcatgggcgccgcagccgctcaggcgcctctcgggctgcctgcggcctccgctcgccttctgctgctagcgacgtcggtgcttctgctcttcgccttctctctgcccgggagccgcgcgtccaaccagcccccgggtggtggcggcggcacgggcggggactgtcccggcggcaaaggcaagagcatcaactgctcagaattaaatgtgagggagtctgacgtaagagtttgtgatgagtcatcatgtaaatatggaggagtctgtaaagaagatggagatggtttgaaatgtgcatgccaatttcagtgccatacaaattatattcctgtctgtggatcaaatggggacacttatcaaaatgaatgctttctcagaagggctgcttgtaagcaccagaaagagataacagtaatagcaagaggaccatgctactctgataatggatctggatctggagaaggagaagaggaagggtcaggggcagaagttcacagaaaacactccaagtgtggaccctgcaaatataaagctgagtgtgatgaagatgcagaaaatgttgggtgtgtatgtaatatagattgcagtggatacagttttaatcctgtgtgtgcttctgatgggagttcctataacaatccctgttttgttcgagaagcatcttgtataaagcaagaacaaattgatataaggcatcttggtcattgcacagatacagatgacactagtttgttgggaaagaaagatgatggactacaatatcgaccagatgtgaaagatgctagtgatcaaagagaagatgtttatattggaaaccacatgccttgccctgaaaacctcaatggttactgcatccatggaaaatgtgaattcatctatctactcagaagggcttcttgtagatgtgaatctggctacactggacagcactgtgaaaagacagactttagtattctctatgtagtgccaagtaggcaaaagctcactcatgttcttattgcagcaattattggagctgtacagattgccatcatagtagcaattgtaatgtgcataacaagaaaatgccccaaaaacaatagaggacgtcgacagaagcaaaacctaggtcattttacttcagatacgtcatccagaatggtttaaactgatgacttttatatgtacactgaccatgtgtatgtacatttattatgtctttttttaaagaatggaaatatttatttcagaaggccttatttttggacattttatagtgtagtactgttggctcgatatttgaatattcagctacgacagttttggactgtttagtagtctttgttttatgtttttaaatacagaaattgcttcacaaatttgtaccacatggtaattctaagacttgttctttacccatggaatgtaatatttttgcaaagatggactacttcacaaatggttataaagtcatatccacttcttccacaatgaccacagcaaatgacccaagcatgaactaaagaagag

SEQ ID NO: 1103 - DNA, 2226 bp, Homo sapiens
ctcgacccacgcgtccgcgcgccccaggagccaaagccgggctccaagtcggcgccccacgtcgaggctccgccgcagcctccggagttggccgcagacaagaaggggagggagcgggagagggaggagagctccgaagcgagagggccgagcgccatgcgccgcgccagcagagactacaccaagtacctgcgtggctcggaggagatgggcggcggccccggagccccgcacgagggccccctgcacgccccgccgccgcctgcgccgcaccagccccccgccgcctcccgctccatgttcgtggccctcctggggctggggctgggccaggttgtctgcagcgtcgccctgttcttctatttcagagcgcagatggatcctaatagaatatcagaagatggcactcactgcatttatagaattttgagactccatgaaaatgcagattttcaagacacaactctggagagtcaagatacaaaattaatacctgattcatgtaggagaattaaacaggcctttcaaggagctgtgcaaaaggaattacaacatatcgttggatcacagcacatcagagcagagaaagcgatggtggatggctcatggttagatctggccaagaggagcaagcttgaagctcagccttttgctcatctcactattaatgccaccgacatcccatctggttcccataaagtgagtctgtcctcttggtaccatgatcggggttgggccaagatctccaacatgacttttagcaatggaaaactaatagttaatcaggatggcttttattacctgtatgccaacatttgctttcgacatcatgaaacttcaggagacctagctacagagtatcttcaactaatggtgtacgtcactaaaaccagcatcaaaatcccaagttctcataccctgatgaaaggaggaagcaccaagtattggtcagggaattctgaattccatttttattccataaacgttggtggattttttaagttacggtctggagaggaaatcagcatcgaggtctccaacccctccttactggatccggatcaggatgcaacatactttggggcttttaaagttcgagatatagattgagccccagtttttggagtgttatgtatttcctggatgtttggaaacattttttaaaacaagccaagaaagatgtatataggtgtgtgagactactaagaggcatggccccaacggtacacgactcagtatccatgctcttgaccttgtagagaacacgcgtatttacagccagtgggagatgttagactcatggtgtgttacacaatggtttttaaattttgtaatgaattcctagaattaaaccagattggagcaattacgggttgaccttatgagaaactgcatgtgggctatgggaggggttggtccctggtcatgtgccccttcgcagctgaagtggagagggtgtcatctagcgcaattgaaggatcatctgaaggggcaaattcttttgaattgttacatcatgctggaacctgcaaaaaatactttttctaatgaggagagaaaatatatgtatttttatataatatctaaagttatatttcagatgtaatgttttctttgcaaagtattgtaaattatatttgtgctatagtatttgattcaaaatatttaaaaatgtcttgctgttgacatatttaatgttttaaatgtacagacatatttaactggtgcactttgtaaattccctggggaaaacttgcagctaaggaggggaaaaaaatgttgtttcctaatatcaaatgcagtatatttcttcgttctttttaagttaatagattttttcagacttgtcaagcctgtgcaaaaaaattaaaatggatgccttgaataataagcaggatgttggccaccaggtgcctttcaaatttagaaactaattgactttagaaagctgacattgccaaaaaggatacataatgggccactgaaatctgtcaagagtagttatataattgttgaacaggtgtttttccacaagtgccgcaaattgtacctttttttttttttcaaaatagaaaagttattagtggtttatcagcaaaaaagtccaattttaatttagtaaatgttatcttatactgtacaataaaaacattgcctttgaatgttaattttttggtacaaaaataaatttatatgaaaacctgaaaaaaaaaacaaaaaaaaaaa

SEQ ID NO: 1104 - DNA, 2399 bp, Homo sapiens
cggccgagcccagctctccgagcaccgggtcggaagccgcgacccgagccgcgcaggaagctgggaccggaacctcggcggacccggccccacccaactcacctgcgcaggtcaccagcaccctcggaacccagaggcccgcgctctgaaggtgacccccctggggaggaaggcgatggcccctgcgaggacgatggcccgcgcccgcctcgccccggccggcatccctgccgtcgccttgtggcttctgtgcacgctcggcctccagggcacccaggccgggccaccgcccgcgccccctgggctgcccgcgggagccgactgcctgaacagctttaccgccggggtgcctggcttcgtgctggacaccaacgcctcggtcagcaacggagctaccttcctggagtcccccaccgtgcgccggggctgggactgcgtgcgcgcctgctgcaccacccagaactgcaacttggcgctagtggagctgcagcccgaccgcggggaggacgccatcgccgcctgcttcctcatcaactgcctctacgagcagaacttcgtgtgcaagttcgcgcccagggagggcttcatcaactacctcacgagggaagtgtaccgctcctaccgccagctgcggacccagggctttggagggtctgggatccccaaggcctgggcaggcatagacttgaaggtacaaccccaggaacccctggtgctgaaggatgtggaaaacacagattggcgcctactgcggggtgacacggatgtcagggtagagaggaaagacccaaaccaggtggaactgtggggactcaaggaaggcacctacctgttccagctgacagtgactagctcagaccacccagaggacacggccaacgtcacagtcactgtgctgtccaccaagcagacagaagactactgcctcgcatccaacaaggtgggtcgctgccggggctctttcccacgctggtactatgaccccacggagcagatctgcaagagtttcgtttatggaggctgcttgggcaacaagaacaactaccttcgggaagaagagtgcattctagcctgtcggggtgtgcaaggcccctccatggaaaggcgccatccagtgtgctctggcacctgtcagcccacccagttccgctgcagcaatggctgctgcatcgacagtttcctggagtgtgacgacacccccaactgccccgacgcctccgacgaggctgcctgtgaaaaatacacgagtggctttgacgagctccagcgcatccatttccccagtgacaaagggcactgcgtggacctgccagacacaggactctgcaaggagagcatcccgcgctggtactacaaccccttcagcgaacactgcgcccgctttacctatggtggttgttatggcaacaagaacaactttgaggaagagcagcagtgcctcgagtcttgtcgcggcatctccaagaaggatgtgtttggcctgaggcgggaaatccccattcccagcacaggctctgtggagatggctgtcgcagtgttcctggtcatctgcattgtggtggtggtagccatcttgggttactgcttcttcaagaaccagagaaaggacttccacggacaccaccaccacccaccacccacccctgccagctccactgtctccactaccgaggacacggagcacctggtctataaccacaccacccggcccctctgagcctgggtctcaccggctctcacctggccctgcttcctgcttgccaaggcagaggcctgggctgggaaaaactttggaaccagactcttgcctgtttcccaggcccactgtgcctcagagaccagggctccagcccctcttggagaagtctcagctaagctcacgtcctgagaaagctcaaaggtttggaaggagcagaaaacccttgggccagaagtaccagactagatggacctgcctgcataggagtttggaggaagttggagttttgtttcctctgttcaaagctgcctgtccctaccccatggtgctaggaagaggagtggggtggtgtcagaccctggaggccccaaccctgtcctcccgagctcctcttccatgctgtgcgcccagggctgggaggaaggacttccctgtgtagtttgtgctgtaaagagttgctttttgtttatttaatgctgtggcatgggtgaagaggaggggaagaggcctgtttggcctctctgtcctctcttcctcttcccccaagattgagctctctgcccttgatcagccccaccctggcctagaccagcagacagagccaggagaggctcagctgcattccgcagcccccacccccaaggttctccaacatcacagcccagcccacccactgggtaataaaagtggtttgtggaaa

SEQ ID NO: 1105 - DNA, 1043 bp, Homo sapiens
cccggcccgggctcgagaatcaagggcctcggccgccgtcccgcagctcagtccatcgcccttgccgggcagcccgggcagagaccatgtttgacaagacgcggctgccgtacgtggccctcgatgtgctctgcgtgttgctggctggattgccttttgcaatttttacttcaaggcatattacttcaaggcatacccccttccaacgaggagtattctgtaatgatgagtccatcaagtacccttacaaagaagacaccataccttatgcgttattaggtggaataatcattccattcagtattatcgttattattcttggagaaaccctgtctgtttactgtaaccttttgcactcaaattcctttatcaggaataactacatagccactatttacaaagccattggaacctttttatttggtgcagctgctagtcagtccctgactgacattgccaagtattcaataggcagactgcggcctcacttcttggatgtttgtgatccagattggtcaaaaatcaactgcagcgatggttacattgaatactacatatgtcgagggaatgcagaaagagttaaggaaggcaggttgtccttctattcaggccactcttcgttttccatgtactgcatgctgtttgtggcactttatcttcaagccaggatgaagggagactgggcaagactcttacgccccacactgcaatttggtcttgttgccgtatccatttatgtgggcctttctcgagtttctgattataaacaccactggagcgatgtgttgactggactcattcagggagctctggttgcaatattagttgctgtatatgtatcggatttcttcaaagaaagaacttcttttaaagaaagaaaagaggaggactctcatacaactctgcatgaaacaccaacaactgggaatcactatccgagcaatcaccagccttgaaaggcagcagggtgcccaggtgaagctggcctgttttctaaaggaaaatgattgccacaaggcaagaggatgcatctttcttcctgg

SEQ ID NO: 1106 - DNA, 2380 bp, Homo sapiens
gaggaggagggaaaaggcgagcaaaaaggaagagtgggaggaggaggggaagcggcgaaggaggaagaggaggaggaggaagaggggagcacaaaggatccaggtctcccgacgggaggttaataccaagaaccatgtgtgccgagcggctgggccagttcatgaccctggctttggtgttggccacctttgacccggcgcgggggaccgacgccaccaacccacccgagggtccccaagacaggagctcccagcagaaaggccgcctgtccctgcagaatacagcggagatccagcactgtttggtcaacgctggcgatgtggggtgtggcgtgtttgaatgtttcgagaacaactcttgtgagattcggggcttacatgggatttgcatgacttttctgcacaacgctggaaaatttgatgcccagggcaagtcattcatcaaagacgccttgaaatgtaaggcccacgctctgcggcacaggttcggctgcataagccggaagtgcccggccatcagggaaatggtgtcccagttgcagcgggaatgctacctcaagcacgacctgtgcgcggctgcccaggagaacacccgggtgatagtggagatgatccatttcaaggacttgctgctgcacgaaccctacgtggacctcgtgaacttgctgctgacctgtggggaggaggtgaaggaggccatcacccacagcgtgcaggttcagtgtgagcagaactggggaagcctgtgctccatcttgagcttctgcacctcggccatccagaagcctcccacggcgccccccgagcgccagccccaggtggacagaaccaagctctccagggcccaccacggggaagcaggacatcacctcccagagcccagcagtagggagactggccgaggtgccaagggtgagcgaggtagcaagagccacccaaacgcccatgcccgaggcagagtcgggggccttggggctcagggaccttccggaagcagcgagtgggaagacgaacagtctgagtattctgatatccggaggtgaaatgaaaggcctggccacgaaatctttcctccacgccgtccattttcttatctatggacattccaaaacatttaccattagagaggggggatgtcacacgcaggattctgtggggactgtggacttcatcgaggtgtgtgttcgcggaacggacaggtgagatggagacccctggggccgtggggtctcaggggtgcctggtgaattctgcacttacacgtactcaagggagcgcgcccgcgttatcctcgtacctttgtcttctttccatctgtggagtcagtgggtgtcggccgctctgttgtgggggaggtgaaccagggaggggcagggcaaggcagggcccccagagctgggccacacagtgggtgctgggcctcgccccgaagcttctggtgcagcagcctctggtgctgtctccgcggaagtcagggcggctggattccaggacaggagtgaatgtaaaaataaatatcgcttagaatgcaggagaagggtggagaggaggcaggggccgagggggtgcttggtgccaaactgaaattcagtttcttgtgtggggccttgcggttcagagctcttggcgagggtggagggaggagtgtcatttctatgtgtaatttctgagccattgtactgtctgggctgggggggacactgtccaagggagtggcccctatgagtttatattttaaccactgcttcaaatctcgatttcactttttttatttatccagttatatctacatatctgtcatctaaataaatggctttcaaacaaagcaactgggtcattaaaaccagctcaaagggggtttaaaaaaaaaaaaaccagcccatcctttgaggctgatttttcttttttttaagttctattttaaaagctatcaaacagcgacatagccatacatctgactgcctgacatggactcctgcccacttgggggaaaccttatacccagaggaaaatacacacctggggagtacatttgacaaatttcccttaggatttcgttatctcaccttgaccctcagccaagattggtaaagctgcgtcctggcgattccaggagacccagctggaaacctggcttctccatgtgaggggatgggaaaggaaagaagagaatgaagactacttagtaattcccatcaggaaatgctgaccttttacataaaatcaaggagactgctgaaaatctctaagggacaggattttccagatcctaattggaaatttagcaataaggagaggagtccaaggggacaaataaaggcagagagagagagagagagagggagaggaagaaaagagagagagaaaagagcctcgtgcc

SEQ ID NO: 1107 - DNA, 1539 bp, Homo sapiens
gctgactccagtgtcccgagaggcgccgcttcttccgctttctcgtcaggctcctgcaaccccaggcatgaaccaaggtttctgaactactgggcgggagccaacgtctcttctttctcccgctctggcggaggctttgtcgctgcgggctgggccccagggtgtcccccatggcggggccgcgggtggaggtcgatggcagcatcatggaagggggcggccagatcctgagagtctctacggccttgagctgtctcctaggcctccccttgcgggtgcagaagatccgagccggccggagcacgccaggcctgaggcctcaacatttatctggactggaaatgattcgagatttgtgtgatgggcaactggagggggcagaaattggctcaacagaaataacctttacaccagagaagatcaaaggtggaatccacacagcagataccaagacagcagggagtgtgtgcctcttgatgcaggtctcaatgccgtgtgttctctttgctgcttctccatcagaacttcatttgaaaggtggaactaatgctgaaatggcaccacagatcgattatacagtgatggtcttcaagccaattgttgaaaaatttggtttcatatttaattgtgacattaaaacaaggggatattacccaaaagggggtggtgaagtgattgttcgaatgtcaccagttaaacaattgaaccctataaatttaactgagcgtggctgtgtgactaagatatatggaagagctttcgttgctggtgttttgccatttaaagtagcaaaagatatggcagcggcagcagttagatgcatcagaaaggagatccgggatttgtatgttaacatccagcctgttcaagaacctaaagaccaagcatttggcaatggaaatggaataataattattgctgagacctccactggctgtttgtttgctggatcatcgcttggtaaacgaggtgtaaatgcagacaaagttggaattgaagctgccgaaatgctattagcaaatcttagacatggtggtactgtggatgagtatctgcaagaccagctgattgttttcatggcattagccaatggagtttccagaataaaaacaggaccagttacactccatacgcaaaccgcgatacattttgctgaacaaatagcaaaggctaaatttattgtgaagaaatcagaagatgaagaagacgccgctaaagatacttatattattgaatgccaaggaattgggatgacaaatccaaatctatagagtatttgcctcttaaatgatacctcattgatatattgcactatttcataaatactataaaataatgactaggaagtaacttattaaaggctatgacttaaatttgaagatgaagtacagtgttctaggtttgctgagaaggcttcattaaattaatctcactttgaatatctcctgagagatggacaatgaaatatcagttggtggatatgtgtgatagctgatttcaatattgaagtattgaaataaaatattctttacacctgag

SEQ ID NO: 1108 - DNA, 3027 bp, Homo sapiens
tctctctcggcgtttccgctgtcagggcctgcggtgtgactcgcgggctcagctggtccggccgtagcacctccgcgccgtcgccatgtcgcggtttttcaccaccggttcggacagcgagtccgagtcgtccttgtccggggaggagctcgtcaccaaacctgtcggaggcaactatggcaaacagccattgttgctgagcgaggatgaagaagataccaagagagttgtccgcagtgccaaggacaagaggtttgaggagctgaccaaccttatccggaccatccgtaatgccatgaagattcgtgatgtcaccaagtgcctggaagagtttgagctcctgggaaaagcatatgggaaggccaaaagcattgtggacaaagaaggtgtcccccggttctatatccgcatcctggctgacctagaggactatcttaatgagctttgggaagataaggaagggaagaagaagatgaacaagaacaatgccaaggctctgagcaccttgcgtcagaagatccgaaaatacaaccgtgatttcgagtcccatatcacaagctacaagcagaaccccgagcagtctgcggatgaagatgctgagaaaaatgaggaggattcagaaggctcttcagatgaggatgaggatgaggacggagtcagtgctgcaactttcttgaagaagaaatcagaagctccttctggggagagtcgcaagttcctcaaaaagatggatgatgaagatgaggactcagaagattccgaagatgatgaagactgggacacaggttccacatcttccgattccgactcagaggaggaagaagggaaacaaaccgcgctggcctcaagatttcttaaaaaggcacccaccacagatgaggacaagaaggcagccgagaagaaacgggaggacaaagctaagaagaagcacgacaggaaatccaagcgcctggatgaggaggaggaggacaatgaaggcggggagtgggaaagggtccggggcggagtgccgttggttaaggagaagccaaaaatgtttgccaagggaactgagatcacccatgctgttgttatcaagaaactgaatgagatcctacaggcacgaggcaagaagggaactgatcgtgctgcccagattgagctgctgcaactgctggttcagattgcagcggaaaacaacctgggagagggcgtcattgtcaagatcaagttcaatatcatcgcctctctctatgactacaaccccaacctggcaacctacatgaagccagagatgtgggggaagtgcctggactgcatcaatgagctgatggatatcctgtttgcaaatcccaacatttttgttggagagaatattctggaagagagtgagaacctgcacaacgctgaccagccactgcgtgtccgtggctgcatcctaactctggtggaacgaatggatgaagaatttaccaaaataatgcaaaatactgaccctcactcccaagagtacgtggagcacttgaaggatgaggcccaggtgtgtgccatcatcgagcgtgtgcagcgctacctggaggagaagggcactaccgaggaggtctgccgcatctacctgctgcgcatcctgcacacctactacaagtttgattacaaggcccatcagcgacagctgaccccgcctgagggctcctcaaagtctgagcaagaccaggcagaaaatgagggcgaggactcggctgtgttgatggagagactgtgcaagtacatctacgccaaggaccgcacagaccggatccgcacatgtgccatcctctgccacatctaccaccatgctctgcactcgcgctggtaccaggcccgcgacctcatgctcatgagccacttgcaggacaacattcagcatgcagacccgccagtgcagatcctttacaaccgcaccatggtgcagctgggcatctgtgccttccgccaaggcctgaccaaggacgcacacaacgccctgctggacatccagtcgagtggccgagccaaggagcttctgggccagggcctgctgctgcgcagcctgcaggagcgcaaccaggagcaggagaaggtggagcggcgccgtcaggtccccttccacctgcacatcaacctggagctgctggagtgtgtctacctggtgtctgccatgctcctggagatcccctacatggccgcccatgagagcgatgcccgccgacgcatgatcagcaagcagttccaccaccagctgcgcgtgggcgagcgacagcccctgctgggtccccctgagtccatgcgggaacatgtggtcgctgcctccaaggccatgaagatgggtgactggaagacctgtcacagttttatcatcaatgagaagatgaatgggaaagtgtgggaccttttccccgaggctgacaaagtccgcaccatgctggttaggaagatccaggaagagtcactgaggacctacctcttcacctacagcagtgtctatgactccatcagcatggagacgctgtcagacatgtttgagctggatctgcccactgtgcactccatcatcagcaaaatgatcattaatgaggagctgatggcctccctggaccagccaacacagacagtggtgatgcaccgcactgagcccactgcccagcagaacctggctctgcagctggccgagaagctgggcagcctggtggagaacaacgaacgggtgtttgaccacaagcagggcacctacgggggctacttccgagaccagaaggacggctaccgcaaaaacgagggctacatgcgccgcggtggctaccgccagcagcagtctcagacggcctactgagctctccactctgtttcccgcctgggccatccaaccttgaagtcctaaaccacacctcagtcactaaaggtctgtttaaagttgttctggttgattgcttgttgccacaaaggtgtgttgagcccattcatttgctgattatacttctgagctgctaccacatgacagacacaaggctcagatgaagaggtgaattgaac

SEQ ID NO: 1109 - DNA, 1231 bp, Homo sapiens
gacaagatggccacaccggcggtaccagtaagtgctcctccggccacgccaaccccagtcccggcggcggccccagcctcagttccagcgccaacgccagcaccggctgcggctccggttcccgctgcggctccagcctcatcctcagaccctgcggcagcagcggctgcaactgcggctcctggccagaccccggcctcagcgcaagctccagcgcagaccccagcgcccgctctgcctggtcctgctcttccagggcccttccccggcggccgcgtggtcaggctgcacccagtcattttggcctccattgtggacagctacgagagacgcaacgagggtgctgcccgagttatcgggaccctgttgggaactgtcgacaaacactcagtggaggtcaccaattgcttttcagtgccgcacaatgagtcagaagatgaagtggctgttgacatggaatttgctaagaatatgtatgaactgcataaaaaagtttctccaaatgagctcatcctgggctggtacgctacgggccatgacatcacagagcactctgtgctgatccatgagtactacagccgagaggcccccaaccccatccacctcactgtggacacaagtctccagaacggccgcatgagcatcaaagcctacgtcagcactttaatgggagtccctgggaggaccatgggagtgatgttcacgcctctgacagtgaaatacgcgtactacgacactgaacgcatcggagttgacctgatcatgaagacctgctttagccccaacagagtgattggactctcaagtgacttgcagcaagtaggaggggcatcagctcgcatccaggatgccctgagtacagtgttgcaatatgcagaggatgtactgtctggaaaggtgtcagctgacaatactgtgggccgcttcctgatgagcctggttaaccaagtaccgaaaatagttcccgatgactttgagaccatgctcaacagcaacatcaatgaccttttgatggtgacctacctggccaacctcacacagtcacagattgcactcaatgaaaaacttgtaaacctgtgaatggaccccaagcagtacacttgctggtctaggtattaaccccaggactcagaagtgaaggagaaatgggttttttgtggtcttgagtcacactgagatagtcagttgtgtgtgactctaataaacggagcctaccttttgtaaaaaaaaa

SEQ ID NO: 1110 - DNA, 1280 bp, Homo sapiens
gaaagatggcgtcccgcaaggaaggtaccggctctactgccacctcttccagctccaccgccggcgcagcagggaaaggcaaaggcaaaggcggctcgggagattcagccgtgaagcaagtgcagatagatggccttgtggtattaaagataatcaaacattatcaagaagaaggacaaggaactgaagttgttcaaggagtgcttttgggtctggttgtagaagatcggcttgaaattaccaactgctttcctttccctcagcacacagaggatgatgctgactttgatgaagtccaatatcagatggaaatgatgcggagccttcgccatgtaaacattgatcatcttcacgtgggctggtatcagtccacatactatggctcattcgttacccgggcactcctggactctcagtttagttaccagcatgccattgaagaatctgtcgttctcatttatgatcccataaaaactgcccaaggatctctctcactaaaggcatacagactgactcctaaactgatggaagtttgtaaagaaaaggatttttcccctgaagcattgaaaaaagcaaatatcacctttgagtacatgtttgaagaagtgccgattgtaattaaaaattcacatctgatcaatgtcctaatgtgggaacttgaaaagaagtcagctgttgcagataaacatgaattgctcagccttgccagcagcaatcatttggggaagaatctacagttgctgatggacagagtggatgaaatgagccaagatatagttaaatacaacacatacatgaggaatactagtaaacaacagcagcagaaacatcagtatcagcagcgtcgccagcaggagaatatgcagcgccagagccgaggagaacccccgctccctgaggaggacctgtccaaactcttcaaaccaccacagccgcctgccaggatggactcgctgctcattgcaggccagataaacacttactgccagaacatcaaggagttcactgcccaaaacttaggcaagctcttcatggcccaggctcttcaagaatacaacaactaagaaaaggaagtttccagaaaagaagttaacatgaactcttgaagtcacaccagggcaactcttggaagaaatatatttgcatattgaaaagcacagaggatttctttagtgtcattgccgattttggctataacagtgtctttctagccataataaaataaaaaaaaaaaaaaaaaaaaaaaaaaaaaaaaaaaaaaaaaaaaaaaaaaaaaaaaa

SEQ ID NO: 1111 - DNA, 1402 bp, Homo sapiens
ctcgcgtcacagccgggatgaagccgatcctactgcagggccatgagcggtccattacgcagattaagtataaccgcgaaggagacctcctctttactgtggccaaggaccctatcgtcaatgtatggtactctgtgaatggtgagaggctgggcacctacatgggccataccggagctgtgtggtgtgtggacgctgactgggacaccaagcatgtcctcactggctcagctgacaacagctgtcgtctctgggactgtgaaacaggaaagcagctggcccttctcaagaccaattcggctgtccggacctgcggttttgactttgggggcaacatcatcatgttctccacggacaagcagatgggctaccagtgctttgtgagcttttttgacctgcgggatccgagccagattgacaacaatgagccctacatgaagatcccttgcaatgactctaaaatcaccagtgctgtttggggacccctgggggagtgcatcatcgctggccatgagagtggagagctcaaccagtatagtgccaagtctggagaggtgttggtgaatgttaaggagcactcccggcagatcaacgacatccagttatccagggacatgaccatgtttgtgaccgcgtccaaggacaacacagccaagctttttgactccacaactcttgaacatcagaagactttccggacagaacgtcctgtcaactcagctgccctctcccccaactatgaccatgtggtcctgggcggtggtcaggaagccatggatgtaaccacaacctccaccaggattggcaagtttgaggccaggttcttccatttggcctttgaagaagagtttggaagagtcaagggtcactttggacctatcaacagtgttgccttccatcctgatggcaagagctacagcagcggcggcgaagatggttacgtccgtatccattacttcgacccacagtactttgaatttgagtttgaggcttaagaagctggatctcctgccgggcgtggttggctcatgcctgtaatcccaccactttttttttaaggcaggcggatcacctgaggtcaggagtttaagaccagcctgaccaacatggagaaacctcgtctctactaaaaatacaaaaattagccaggcatggtggcacacgcctatagtcccagctactcaggaggctgaggcaggagaatcacttgaacccaggaggcagaggttgcagtgagctgagatcacgtcattgcactccatcctgagccacaagagcaaaactccgtctcaaaaaaaaaaaagaagaaggtggatctccaaccaggccagagaagattctcacagaaggttttgaactctaagaaataaattggtttggtaataaatggcttctggtcaga

SEQ ID NO: 1112 - DNA, 2144 bp, Homo sapiens
gctgaagacagagcgatggtagttctggaggcctcgctccggggccgacccgaggccacagtgcctccgcggtagaccggacttgggtgacgggctccgggctcccgaggtgaagagcatcgggggctgagggatggaagggtctaagacgtccaacaacagcaccatgcaggtgagcttcgtgtgccagcgctgcagccagcccctgaaactggacacgagtttcaagatcctggaccgtgtcaccatccaggaactcacagctccattacttaccacagcccaggcgaaaccaggagagacccaggaggaagagactaactcaggagaggagccatttattgaaactcctcgccaggatggtgtctctcgcagattcatccccccagccaggatgatgtccacagaaagtgccaacagcttcactctgattggggaggcatctgatggcggcaccatggagaacctcagccgaagactgaaggtcactggggacctttttgacatcatgtcgggccagacagatgtggatcacccactctgtgaggaatgcacagatactcttttagaccagctggacactcagctcaacgtcactgaaaatgagtgtcagaactacaaacgctgtttggagatcttagagcaaatgaatgaggatgacagtgaacagttacagatggagctaaaggagctggcactagaggaggagaggctgatccaggagctggaagacgtggaaaagaaccgcaagatagtggcagaaaatctcgagaaggtccaggctgaggctgagagactggatcaggaggaagctcagtatcagagagaatacagtgaatttaaacgacagcagctggagctggatgatgagctgaagagtgttgaaaaccagatgcgttatgcccagacgcagctggataagctgaagaaaaccaacgtctttaatgcaaccttccacatctggcacagtggacagtttggcacaatcaataacttcaggctgggtcgcctgcccagtgttcccgtggaatggaatgagattaatgctgcttggggccagactgtgttgctgctccatgctctggccaataagatgggtctgaaatttcagagataccgacttgttccttacggaaaccattcatatctggagtctctgacagacaaatctaaggagctgccgttatactgttctggggggttgcggtttttctgggacaacaagtttgaccatgcaatggtggctttcctggactgtgtgcagcagttcaaagaagaggttgagaaaggcgagacacgtttttgtcttccctacaggatggatgtggagaaaggcaagattgaagacacaggaggcagtggcggctcctattccatcaaaacccagtttaactctgaggagcagtggacaaaagctctcaagttcatgctgacgaatcttaagtggggtcttgcttgggtgtcctcacaattttataacaaatgacttttttccttagggggaggtttgccttaaaggcttttaattttgttttgtttgcaaacatgttttaaattaaattcgggtaatattaaacagtacatgtttacaataccaaaaaagaaaaaatccacaaaagccactttattttaaaatatcatgtgacagatactttccagagctacaacatgccatctatagttgccagccctggtcagttttgattcttaaccccatggactcctttccctttcttctctgaaaaaaactaatttaaatttgcttttcttttttttaactgagttgaattgagattgatgtgttttcactggatttttatctctctcaacttcctgcacttaacaatatgaaatagaaacttttgtctttactgagatgaggatatgtttgagatgcacagttggataatgtgggaaaatgacatctaagctttacctggtcaccatgtgatgtgatcagatgcttgaaatttaacacttttcacttggttcttatactgaatgccgactctgctctgtgttagagatatgaaatggtgtttgatactgtttgagacattatggagagatttaattatttgtaataaaagatttgctgcagtctgaaaactgaaaaaaaaaaaaaaaaaaaaaaaaaaaaaaaa

SEQ ID NO: 1113 - DNA, 1069 bp, Homo sapiens
ggcggcggcggcgacgtgggctgcggcgggcccgcggcgtcgggcggtgcggatgtcgggctgggcggacgagcgcggcggcgagggcgacgggcgcatctacgtggggaaccttccgaccgacgtgcgcgagaaggacttggaggacctgttctacaagtacggccgcatccgcgagatcgagctcaagaaccggcacggcctcgtgcccttcgccttcgtgcgcttcgaggacccccgagatgcagaggatgctatttatggaagaaatggttatgattatggccagtgtcggcttcgtgtggagttccccaggacttatggaggtcggggtgggtggccccgtggtgggaggaatgggcctcctacaagaagatctgatttccgagttcttgtttcaggacttcctccgtcaggcagctggcaggacctgaaggatcacatgcgagaagctggggatgtctgttatgctgatgtgcagaaggatggagtggggatggtcgagtatctcagaaaagaagacatggaatatgccctgcgtaaactggatgacaccaaattccgctctcatgagggtgaaacttcctacatccgagtttatcctgagagaagcaccagctatggctactcacggtctcggtctgggtcaaggggccgtgactctccataccaaagcaggggttccccacactacttctctcctttcaggccctactgagacaggtgatgggaattttttctttattttttaggttaactgagctgctttgtgctcagaatctacattccagattgaggatttagtgtcttaggaaatttttttaattttttttttttaaagaagaaaaaaaactacataatttctaccagggccatattagcagtgaaacattttaaactgcagaaattgtggttttggttcagaaacaagttgtatatttttcacccctgattatgggaaaaaatcgttctgtctttgtggggttcgctctactatggagatcaacagttactgtgactgagtcggcccattctgtttagaaatatattttaaatgtttagtaattga

SEQ ID NO: 1114 - DNA, 1890 bp, Homo sapiens
gccagcagccggatgcccgggcccactgggcgggccagtggccgcctgcgggatgagcagactgctgggggggacgctggagcgcgtctgcaaggctgtgctccttctctgcctgctgcacttcctcgtggccgtcatcctctactttgacgtctacgcccagcacctggccttcttcagccgcttcagtgcccgaggccctgcccatgccctccacccagctgctagcagcagcagcagcagcagcaactgctcccggcccaacgccaccgcctctagctccgggctccctgaggtccccagtgccctgcccggtcccacggctcccacgctgccaccctgtcctgactcgccacctggtcttgtgggcagactgctgatcgagttcacctcacccatgcccctggagcgggtgcagagggagaacccaggcgtgctcatgggcggccgatacacaccgcccgactgcaccccagcccagacggtggcggtcatcatcccctttagacaccgggaacaccacctgcgctactggctccactatctacaccccatcttgaggcggcagcggctgcgctacggcgtctatgtcatcaaccagcatggtgaggacaccttcaaccgggccaagctgcttaacgtgggcttcctagaggcgctgaaggaggatgccgcctatgactgcttcatcttcagcgatgtggacctggtccccatggatgaccgcaacctataccgctgcggcgaccaaccccgccactttgccattgccatggacaagtttggcttccggcttccctatgctggctactttggaggtgtgtcaggcctgagtaaggctcagtttctgagaatcaatggcttccccaatgagtactggggctggggtggcgaggatgatgacatcttcaaccggatctccctgactgggatgaagatctcacgcccagacatccgaatcggccgctaccgcatgatcaagcacgaccgcgacaagcataacgaacctaaccctcagaggtttaccaagattcaaaacacgaagctgaccatgaagcgggacggcattgggtcagtgcggtaccaggtcttggaggtgtctcggcaaccactcttcaccaatatcacagtggacattgggcggcctccgtcgtggccccctcggggctgacactaatggacagaggctctcggtgccgaagattgcctgccagaggactgaccacagcctggctggcagctgctctgtggaggacctccaggactgagactgggctctgttttccaagggtcttcactaggccccctagctacacctggaagtttcagaacccactttggggggcctcctgcctgggcaggctcttcaagtgtggccctctttggagtcaaccctccttcccgaccccctccccctagcccagccccagtcactgtcagggtcgggccagcccctgcactgcctcgcagagtggcctgggctaggtcactccacctctctgtgcctcagtttcccccccttgagtcccctagggcctggaagggtgggaggtatgtctagggggcagtgtctcttccagggggaattctcagctcttgggaacccccttgctcccaggggaggggaaacctttttcattcaacattgtagggggcaagctttggtgcgccccctgctgaggagcagccccaggaggggaccagaggggatgctgtgtcgctgcctgggatcttggggttggcctttgcatgggaggcaggtggggcttggatcagtaagtctggttcccgcctccctgtctgagagaggaggcaggagccccagggccggcttgtgtttgtacattgcacagaaacttgtgtgggtgctttagtaaaaaacgtgaatgg

SEQ ID NO: 1115 - DNA, 2249 bp, Homo sapiens
gtctacttatcaataagcagctgcctgtgcagagtgcaggctgcacctttggacagcctttaaaactgaattctcagaattttagaacaaatttttgtctagaaatgctgactttggttcattaggtagtggtaaaacaggctcccttcgaagctctccttcatcaccttcctaagtgcatgtacagggaagctctccttcatcaccttcctaagtgcatgggggaaaatacctagggctcaacagtcttgagaagtgtggaaacattttctttgtgagtgagaacagatcacctagagaaaggaaaccagattcccatcactgcttctgggtatcagatgctagcgctgcactccattttgcaatggcctcccttgctgcagcaaatgcagagttttgcttcaacctgttcagagagatggatgacaatcaaggaaatggaaatgtgttcttttcctctctgagcctcttcgctgccctggccctggtccgcttgggcgctcaagatgactccctctctcagattgataagttgcttcatgttaacactgcctcaggatatggaaactcttctaatagtcagtcagggctccagtctcaactgaaaagagttttttctgatataaatgcatcccacaaggattatgatctcagcattgtgaatgggctttttgctgaaaaagtgtatggctttcataaggactacattgagtgtgccgaaaaattatacgatgccaaagtggagcgagttgactttacgaatcatttagaagacactagacgtaatattaataagtgggttgaaaatgaaacacatggcaaaatcaagaacgtgattggtgaaggtggcataagctcatctgctgtaatggtgctggtgaatgctgtgtacttcaaaggcaagtggcaatcagccttcaccaagagcgaaaccataaattgccatttcaaatctcccaagtgctctgggaaggcagtcgccatgatgcatcaggaacggaagttcaatttgtctgttattgaggacccatcaatgaagattcttgagctcagatacaatggtggcataaacatgtacgttctgctgcctgagaatgacctctctgaaattgaaaacaaactgacctttcagaatctaatggaatggaccaatccaaggcgaatgacctctaagtatgttgaggtattttttcctcagttcaagatagagaagaattatgaaatgaaacaatatttgagagccctagggctgaaagatatctttgatgaatccaaagcagatctctctgggattgcttcggggggtcgtctgtatatatcaaggatgatgcacaaatcttacatagaggtcactgaggagggcaccgaggctactgctgccacaggaagtaatattgtagaaaagcaactccctcagtccacgctgtttagagctgaccacccattcctatttgttatcaggaaggatgacatcatcttattcagtggcaaagtttcttgcccttgaaaatccaattggtttctgttatagcagtccccacaacatcaaagraccaccacaagtcaatagatytgrgtttaattggaaaaatgtggtgtttcctttgagtttatttcttcctaacattggtcagcagatgacactggtgacttgacccttcctagacacctggttgattgtcctgatccctgctcttagcattctaccaccatgtgtctcacccatttctaatttcattgtctttcttcccacgctcatttctatcattctcccccatgacccgtctggaaattatggagrgtgctcaactggtaaggagaacgtagaagtagccctagggatcctttttgaaactctacagttatcgcagatattctagcttcattgtaagcaatctaggaaataagccctgctgctttctagaaataagtgtgaaggataaattttctttgttgacctatgaagattttagagtttaccttcatatgtttgattttaaatcagtgtataatctagatggtaaaaaatgtgaaattgggattagggacctaccaaaatatttcattaatgctttcaattgacaaattttggcctttctttgataagacaatatgtacatgttttttcaaatattaaagatcttttaactgttggcagttgttatctacagaatcatatttcatatgctgtgtagtttataagtttttcctctatttatcagaataaagaaatacaacatacctgtaaa

SEQ ID NO: 1116 - DNA, 4338 bp, Homo sapiens
cagggcacgctgggtcggcggagctgaggctcccagctgtgggcctcgctggcccggtcgcccagtctcgcgagagttgggagtaaacagccccgaatggagtgcccaggcgtgttcgccgcggaggcgccgttatcccgggcccgccggccctgagctcccggcggcgcagattggctcacagtggttgattgatcaaccccattggacgttggttctgtggtacaaatggagtacaggactcagtcgtcacggcctgagtgagagaagccttatttccaagatggagaagaagcggagaaagaaatgaaagcctctcttcaggctgaaccacaaaaggccatgggatttaacttttatttatgttgggcaagactgtaagatggctgatcagtaatgttgcagcttttagctgaaacaaaaattcacttttaatcaagaagaaaaaagtgtgatttgaatatatgcaattttatgatcatattcgcttgtgaccatgaagcttgtcaacatctggctgcttctgctcgtggttttgctctgtgggaagaaacatctgggcgacagactggaaaagaaatcttttgaaaaggccccatgccctggctgttcccacctgactttgaaggtggaattctcatcaacagttgtggaatatgaatatattgtggctttcaatggatactttacagccaaagctagaaattcatttatttcaagtgccctgaagagcagtgaagtagacaattggagaattatacctcgaaacaatccatccagtgactaccctagtgattttgaggtgattcagataaaagaaaaacagaaagcggggctgctaacacttgaagatcatccaaacatcaaacgggtcacgccccaacgaaaagtctttcgttccctcaagtatgctgaatctgaccccacagtaccctgcaatgaaacccggtggagccagaagtggcaatcatcacgtcccctgcgaagagccagcctctccctgggctctggcttctggcatgctacgggaaggcattcgagcagacggctgctgagagccatcccgcgccaggttgcccagacactgcaggcagatgtgctctggcagatgggatatacaggtgctaatgtaagagttgctgtttttgacactgggctgagcgagaagcatccccacttcaaaaatgtgaaggagagaaccaactggaccaacgagcgaacgctggacgatgggttgggccatggcacattcgtggcaggtgtgatagccagcatgagggagtgccaaggatttgctccagatgcagaacttcacattttcagggtctttaccaataatcaggtatcttacacatcttggtttttggacgccttcaactatgccattttaaagaagatcgacgtgttaaacctcagcatcggcggcccggacttcatggatcatccgtttgttgacaaggtgtgggaattaacagctaacaatgtaatcatggtttctgctattggcaatgacggacctctttatggcactctgaataaccctgctgatcaaatggatgtgattggagtaggcggcattgactttgaagataacatcgcccgcttttcttcaaggggaatgactacctgggagctaccaggaggctacggtcgcatgaaacctgacattgtcacctatggtgctggcgtgcggggttctggcgtgaaaggggggtgccgggccctctcagggaccagtgttgcttctccagtggttgcaggtgctgtcaccttgttagtgagcacagtccagaagcgtgagctggtgaatcccgccagtatgaagcaggccctgatcgcgtcagcccggaggctccccggggtcaacatgtttgagcaaggccacggcaagctcgatctgctcagagcctatcagatcctcaacagctacaagccacaggcaagtttgagccccagctacatagatctgactgagtgtccctacatgtggccctactgctcccagcccatctactatggaggaatgccgacagttgttaatgtcaccatcctcaacggcatgggagtcacaggaagaattgtagataagcctgactggcagccctatttgccacagaacggagacaacattgaagttgccttctcctactcctcggtcttatggccttggtcgggctacctggccatctccatttctgtgaccaagaaagcggcttcctgggaaggcattgctcagggccatgtcatgatcactgtggcttccccagcagagacagagtcaaaaaatggtgcagaacagacttcaacagtaaagctccccattaaggtgaagataattcctactcccccgcgaagcaagagagttctctgggatcagtaccacaacctccgctatccacctggctatttccccagggataatttaaggatgaagaatgaccctttagactggaatggtgatcacatccacaccaatttcagggatatgtaccagcatctgagaagcatgggctactttgtagaggtcctcggggcccccttcacgtgttttgatgccagtcagtatggcactttgctgatggtggacagtgaggaggagtacttccctgaagagatcgccaagctccggagggacgtggacaacggcctctcgctcgtcatcttcagtgactggtacaacacttctgttatgagaaaagtgaagttttatgatgaaaacacaaggcagtggtggatgccggataccggaggagctaacatcccagctctgaatgagctgctgtctgtgtggaacatggggttcagcgatggcctgtatgaaggggagttcaccctggccaaccatgacatgtattatgcgtcagggtgcagcatcgcgaagtttccagaagatggcgtcgtgataacacagactttcaaggaccaaggattggaggttttaaagcaggaaacagcagttgttgaaaacgtccccattttgggactttatcagattccagctgagggtggaggccggattgtactgtatggggactccaattgcttggatgacagtcaccgacagaaggactgcttttggcttctggatgccctcctccagtacacatcgtatggggtgacaccgcctagcctcagtcactctgggaaccgccagcgccctcccagtggagcaggctcagtcactccagagaggatggaaggaaaccatcttcatcggtactccaaggttctggaggcccatttgggagacccaaaacctcggcctctaccagcctgtccacgcttgtcttgggccaagccacagcctttaaacgagacggcgcccagtaacctttggaaacatcagaagctactctccattgacctggacaaggtggtgttacccaactttcgatcgaatcgccctcaagtgaggcccttgtcccctggagagagcggcgcctgggacattcctggagggatcatgcctggccgctacaaccaggaggtgggccagaccattcctgtctttgccttcctgggagccatggtggtcctggccttctttgtggtacaaatcaacaaggccaagagcaggccgaagcggaggaagcccagggtgaagcgcccgcagctcatgcagcaggttcacccgccaaagaccccttcggtgtgaccggcagcctggctgaccgtgagggccagagagagccttcacggacggcgctggtgggtgagccgagctgtggtggcggctggtttaaaagggatccagtttccagctgcaggtttgttagagtctgttctacatgggcctgccctcctgtgatgggcagaggctcctggtacatcgagaagattcctgtggatcccgtcaggagggacttagtggctctgccgccagtgagacttcccgccggcagctgtgcgcaccaaagactcgggagaactggaaaggctgtctggggtcttctgactgcaggggaaggatgtactttccaaacaaatgatacaaccctgaccaagctaaaagacgcttgttaaaggctattttctatatttattgttgggaaaagtcactttaaagacttgtgctatttggaagcaaagctattttttttgtcagtggaatgcagtttttttactattccatcatgaggaacaacatagattccatgatctttttaatgacagtacagactgagatttgaaggaaacatgcacaaatctgtaaaacatagaccttcgctttatttttgtaagtatcacctgccaccatgttttgtaatttgaggtcttgatttcaccattgtcggtgaagaaaattttcaataaatatgtattacccgtctgaagctt

SEQ ID NO: 1117 - DNA, 2039 bp, Homo sapiens
ggaggactcaggccccgctggccgcgggctcggtacccggtgggtcggtggagcgtctgttgggtccgggccgccggcttcgccctcgccatggcgccctggctgcagctcctgtcgctgctggggctgctcccgggcgcagtggccgcccccgcccagccccgagccgccagctttcaggcctgggggccgccgtccccggagctgctggcgcctacccgcttcgcgctggagatgttcaaccgcggccgggctgcggggacgcgggccgtgctgggccttgtgcgcggccgcgtccgccgggcgggccaagggtcgctgtactccctggaggccaccctggaggagccaccctgcaacgaccccatggtgtgccggctccccgtgtccaagaaaaccctgctctgcagcttccaagtcctggatgagctcggaagacacgtgctgctgcggaaggactgtggcccagtggacaccaaggttccaggtgctggggagcccaagtcagccttcactcagggctcagccatgatttcttctctgtcccaaaaccatccagacaacagaaacgagactttcagctcagtcatttccctgttgaatgaggatcccctgtcccaggacttgcctgtgaagatggcttcaatcttcaagaactttgtcattacctataaccggacatatgagtcaaaggaagaagcccggtggcgcctgtccgtctttgtcaataacatggtgcgagcacagaagatccaggccctggaccgtggcacagctcagtatggagtcaccaagttcagtgatctcacagaggaggagttccgcactatctacctgaatactctcctgagaaaagagcctggcaacaagatgaagcaagccaagtctgtgggtgacctcgccccacctgaatgggactggaggagtaagggggctgtcacaaaagtcaaagaccagggcatgtgtggctcctgctgggccttctcagtcacaggcaatgtggagggccagtggtttctcaaccaggggaccctgctctccctctctgaacaggagctcttggactgtgacaagatggacaaggcctgcatgggcggcttgccctccaatgcctactcggccataaagaatttgggagggctggagacagaggatgactacagctaccagggtcacatgcagtcctgcaacttctcagcagagaaggccaaggtctacatcaatgactccgtggagctgagccagaacgagcagaagctggcagcctggctggccaagagaggcccaatctccgtggccatcaatgcctttggcatgcagttttaccgccacgggatctcccgccctctccggcccctctgcagcccttggctcattgaccatgcggtgttgcttgtgggctacggcaaccgctctgacgttcccttttgggccatcaagaacagctggggcactgactggggtgagaagggttactactacttgcatcgcgggtccggggcctgtggcgtgaacaccatggccagctcggcggtggtggactgaagaggggcccccagctcgggacctggtgctgatcagagtggctgctgccccagcctgacatgtgtccaggcccctccccgggaggtacagctggcagagggaaaggcactgggtacctcagggtgagcagagggcactgggctggggcacagcccctgcttccctgcaccccattcccaccctgaagttctgcacctgcacctttgttgaattgtggtagcttaggaggatgtcggggtgaagggtggtatcttggcagttgaagctggggcaagaactctgggcttgggtaatgagcaggaagaaaattttctgatcttaagcccagctctgttctgcccccgctttcctctgtttgatactataaattttctggttcccttggatttagggatagtgtccctctccatgtccaggaaacttgtaaccacccttttctaacagcaataaagaggtgtccttgtaaaaaaaaaaaaaaaaaaaaaaaaaaaaaa

SEQ ID NO: 1118 - DNA, 1201 bp, Homo sapiens
gggcgaggagggagcccgcggcggcggcagcagctacagcgaaatggcggagaccgtggctgacacccggcggctgatcaccaagccgcagaacctgaatgacgcctacggaccccccagcaacttcctcgagatcgatgtgagcaacccgcaaacggtgggggtcggccggggccgcttcaccacttacgaaatcagggtcaagacaaatcttcctattttcaagctgaaagaatctactgttagaagaagatacagtgactttgaatggctgcgaagtgaattagaaagagagagcaaggtcgtagttcccccgctccctgggaaagcgtttttgcgtcagcttccttttagaggagatgatggaatatttgatgacaattttattgaggaaagaaaacaagggctggagcagtttataaacaaggtcgctggtcatcctctggcacagaacgaacgttgtcttcacatgtttttacaagatgaaataatagataaaagctatactccatctaaaataagacatgcctgaaatttggcaagaaggggcaaaaacgtgactattaatgattgataagcaccagtgaagaagttctaacttttagcatgctgcacagaaactggtataacatgccttcagtatactaacactcatatgctcagttttgttttgttttggcagttgacaagaagttaatttgctttagtaaaaatccctcattccagcctttctatataaatagctctttcttgctgttttaatgtggtgcacactatagcctcacaaacctgttattccagtgtaatctgcagtgtcgtaactaaagttactggcttggtcttatttgcacagtttttgcgtcttgtttgcttcttgcatctgattaactagaatatttctctttcccccttttaatttgtgatgtcacttgaccccatttatgtgtaggagcactacaccattggtttccaatactgcacacataagatacatacttgtgtgcagaaagtatcttcctccaggcttgtaatacccttcacatggaagattaatgagggaaatctttatattctgtataaaaacaaaagcaaatttatatactaaaatcatttgtctaaaaatttaagttgttttcaaataaaaattaaaatgcatttctgatatgcaaaaaaaaaaaaaaaaaaaaaaaaaaaaaaaaaa

SEQ ID NO: 1119 - DNA, 2446 bp, Homo sapiens
gcgccgcggcgcggagtcccggctgcgggatagaccgagggccatggccgcctctcccggacccgccggcgttggcggcgccggagcagtctacggctccggctcttcgggcttcgccctcgactcgggactggagatcaaaactcgctcggtggagcagacgctactcccgctggtttctcagatcaccacgcttattaatcataaagataataccaaaaagtctgataaaactctgcaagcaattcagcgtgtaggacaagctgtcaacttggcagttggaagatttgttaaagtaggagaagctatagccaatgaaaactgggatttgaaagaagaaataaatattgcttgtattgaagctaaacaagcaggagaaacaattgcagcacttacagacataaccaacttgaaccatctggaatctgatgggcagatcacaatttttacagacaaaacaggagtgataaaggctgcaagattacttctttcttcagtgacaaaagtgttgttgctggcagaccgagtagtcattaaacagataataacatcaagaaataaggttctcgcaactatggaaagactagagaaagtgaatagctttcaagagtttgtccaaatattcagtcaatttggaaatgaaatggtggagtttgcacatctgagtggagatagacaaaatgatttgaaagatgaaaagaaaaaggcaaaaatggcagcagctagggcagttcttgaaaagtgtacaatgatgcttctcacagcttcaaagacatgtctgaggcatcctaactgcgaatcagcccataaaaacaaagaaggagtatttgaccgtatgaaagtggcattggataaggtcattgaaattgtgactgactgtaaaccgaatggagagactgacatttcatctatcagtatttttactggaattaaggaattcaagatgaatattgaagctcttcgggagaatctttattttcagtccaaagagaacctttctgtgacattggaagtcatcttggagcgtatggaggactttactgattctgcctacaccagccatgagcacagagaacgcatcttggaactgtcaactcaggcgagaatggaactgcagcagttaatttctgtgtggattcaagctcaaagcaagaaaacaaaaagcatcgctgaagaactggaactcagtattttgaaaatcagtcacagtcttaatgaacttaagaaagaacttcatagtacagcgacacagctggcagcagatctattaaaataccatgctgatcatgtggttctaaaagcattaaaacttactggagtagaaggaaatttagaagctttggctgaatatgcctgtaaactctctgaacagaaagagcagcttgttgagacctgtcgattgttacgacacatatctgggacagaacctctggaaataacctgtatacatgcagaggagacatttcaggtgactggccaacagataatttctgctgctgaaacattgacattgcatccatctagtaaaattgctaaagaaaacctagatgtattttgtgaagcttgggaatcccaaattagtgacatgtcaacactgctgagagaaatcaatgacgtgtttgaaggaagacgaggagagaagtatggctacctttcacttccaaagccaatgaagaataatgcaaacctgaaatcattaaagccagacaagcctgactctgaggagcaagccaagatagcaaagcttggacttaagctgggtttgctcacctctgacgctgactgcgaaattgagaagtgggaagatcaggagaatgagattgttcaatatggacggaacatgtccagtatggcctattctctgtatttatttactagaggagaggggccactgaaaacttcccaggatttaattcatcaactagaggtttttgctgcagagggtttaaagcttacttccagtgttcaagctttttcaaaacagctgaaagacgatgacaagcttatgcttctcctggaaataaacaagctaattcctctatgccaccagctccagacagtaactaagacttctttgcagaataaagtatttctaaaggttgacaagtgtattacgaagacaagatccatgatggctctcttagtccaacttctttcactttgttataaactgctgaagaagcttcagatggaaaataacggatgggtctcagttacaaataaggacactatggatagtaaaacttgagaagcttttggggtcagatctctggaacatcatgtgatgaagctgacatttttaaaaatcaaatgatcctttatcttttcagaaattcatcaattttataaagaaaacaatattgaaattttgctctattttctgatcatgaaactgattgtaaagctttttgacaactaataaatgtcttggtaattgctagattct

SEQ ID NO: 1120 - DNA, 2047 bp, Homo sapiens
gcgcgggtccccgggtctgacaggagcagcctgtgggcaccgcggcggtagttggaggcgggagagggtccgtagccgcgccgccctgccccgccatgggcctcctgtcggacccggttcgccggcgcgcgctcgcccgcctagtgctgcgcctcaacgcgccgttgtgcgtgctgagctacgtggcgggcatcgcctggttcttggcgctggttttcccgccgctgacccagcgcacttacatgtcggagaacgccatgggctccaccatggtggaggagcagtttgcgggcggagaccgtgcccgggcttttgcccgggacttcgccgcccaccgcaagaagtcgggggctctgccagtggcctggcttgaacggacgatgcggtcagtagggctggaggtctacacgcagagtttctcccggaaactgcccttcccagatgagacccacgagcgctatatggtgtcgggcaccaacgtgtacggcatcctgcgggccccgcgtgctgccagcaccgagtcgcttgtgctcaccgtgccctgtggctctgactctaccaacagccaggctgtggggctgctgctggcactggctgcccacttccgggggcagatttattgggccaaagatatcgtcttcctggtaacagaacatgaccttctgggcactgaggcttggcttgaagcctaccacgatgtcaatgtcactggcatgcagtcgtctcccctgcagggccgagctggggccattcaggcagccgtggccctggagctgagcagtgatgtggtcaccagcctcgatgtggccgtggaggggcttaacgggcagctgcccaaccttgacctgctcaatctcttccagaccttctgccagaaagggggcctgttgtgcacgcttcagggcaagctgcagcccgaggactggacatcattggatggaccgctgcagggcctgcagacactgctgctcatggttctgcggcaggcctccggccgcccccacggctcccatggcctcttcctgcgctaccgtgtggaggccctaaccctgcgtggcatcaatagcttccgccagtacaagtatgacctggtggcagtgggcaaggctttggagggcatgttccgcaagctcaaccacctcctggagcgcctgcaccagtccttcttcctctacttgctccccggcctctcccgcttcgtctccatcggcctctacatgcccgctgtcggcttcttgctcctggtccttggtctcaaggctctggaactgtggatgcagctgcatgaggctggaatgggccttgaggagcccgggggtgcccctggccccagtgtaccccttcccccatcacagggtgtggggctggcctcgctcgtggcacctctgctgatctcacaggccatgggactggccctctatgtcctgccagtgctgggccaacacgttgccacccagcacttcccagtggcagaggctgaggctgtggtgctgacactgctggcgatttatgcagctggcctggccctgccccacaatacccaccgggtggtaagcacacaggccccagacaggggctggatggcactgaagctggtagccctgatctacctagcactgcagctgggctgcatcgccctcaccaacttctcactgggcttcctgctggccaccaccatggtgcccactgctgcgcttgccaagcctcatgggccccggaccctttatgctgccctgctggtgctgaccagcccggcagccacgctccttggcagcctgttcctgtggcgggagctgcaggaggcgccactgtcactggccgagggctggcagctcttcctggcagcgctagcccagggtgtgctggagcaccacacctacggcgccctgctcttcccactgctgtccctgggcctctacccctgctggctgcttttctggaatgtgctcttctggaagtgagatctgcctgtccgggctgggacagagactccccaaggaccccattctgcctccttctggggaaataaatgagtgtctgtttcagc

SEQ ID NO: 1121 - DNA, 3054 bp, Homo sapiens
tcctctgcgtcccgccccgggagtggctgcgaggctaggcgagccgggaaagggggcgccgcccagccccgagccccgcgccccgtgccccgagcccggagccccctgcccgcggcggcaccatgcgcgccgagccggcgtgaccggctccgcccgcggccgccccgcagctagcccggcgctctcgccggccacacggagcggcgcccgggagctatgagccatgaagccgcccggcagcagctcgcggcagccgcccctggcgggctgcagccttgccggcgcttcctgcggcccccaacgcggccccgccggctcggtgcctgccagcgccccggcccgcacgccgccctgccgcctgcttctcgtccttctcctgctgcctccgctcgccgcctcgtcccggccccgcgcctggggggctgctgcgcccagcgctccgcattggaatgaaactgcagaaaaaaatttgggagtcctggcagatgaagacaatacattgcaacagaatagcagcagtaatatcagttacagcaatgcaatgcagaaagaaatcacactgccttcaagactcatatattacatcaaccaagactcggaaagcccttatcacgttcttgacacaaaggcaagacaccagcaaaaacataataaggctgtccatctggcccaggcaagcttccagattgaagccttcggctccaaattcattcttgacctcatactgaacaatggtttgttgtcttctgattatgtggagattcactacgaaaatgggaaaccacagtactctaagggtggagagcactgttactaccatggaagcatcagaggcgtcaaagactccaaggtggctctgtcaacctgcaatggacttcatggcatgtttgaagatgataccttcgtgtatatgatagagccactagagctggttcatgatgagaaaagcacaggtcgaccacatataatccagaaaaccttggcaggacagtattctaagcaaatgaagaatctcactatggaaagaggtgaccagtggccctttctctctgaattacagtggttgaaaagaaggaagagagcagtgaatccatcacgtggtatatttgaagaaatgaaatatttggaacttatgattgttaatgatcacaaaacgtataagaagcatcgctcttctcatgcacataccaacaactttgcaaagtccgtggtcaaccttgtggattctatttacaaggagcagctcaacaccagggttgtcctggtggctgtagagacctggactgagaaggatcagattgacatcaccaccaaccctgtgcagatgctccatgagttctcaaaataccggcagcgcattaagcagcatgctgatgctgtgcacctcatctcgcgggtgacatttcactataagagaagcagtctgagttactttggaggtgtctgttctcgcacaagaggagttggtgtgaatgagtatggtcttccaatggcagtggcacaagtattatcgcagagcctggctcaaaaccttggaatccaatgggaaccttctagcagaaagccaaaatgtgactgcacagaatcctggggtggctgcatcatggaggaaacaggggtgtcccattctcgaaaattttcaaagtgcagcattttggagtatagagactttttacagagaggaggtggagcctgccttttcaacaggccaacaaagctatttgagcccacggaatgtggaaatggatacgtggaagctggggaggagtgtgattgtggttttcatgtggaatgctatggattatgctgtaagaaatgttccctctccaacggggctcactgcagcgacgggccctgctgtaacaatacctcatgtctttttcagccacgagggtatgaatgccgggatgctgtgaacgagtgtgatattactgaatattgtactggagactctggtcagtgcccaccaaatcttcataagcaagacggatatgcatgcaatcaaaatcagggccgctgctacaatggcgagtgcaagaccagagacaaccagtgtcagtacatctggggaacaaaggctgcagggtctgacaagttctgctatgaaaagctgaatacagaaggcactgagaagggaaactgcgggaaggatggagaccggtggattcagtgcagcaaacatgatgtgttctgtggattcttactctgtaccaatcttactcgagctccacgtattggtcaacttcagggtgagatcattccaacttccttctaccatcaaggccgggtgattgactgcagtggtgcccatgtagttttagatgatgatacggatgtgggctatgtagaagatggaacgccatgtggcccgtctatgatgtgtttagatcggaagtgcctacaaattcaagccctaaatatgagcagctgtccactcgattccaagggtaaagtctgttcgggccatggggtgtgtagtaatgaagccacctgcatttgtgatttcacctgggcagggacagattgcagtatccgggatccagttaggaaccttcacccccccaaggatgaaggacccaagggtcctagtgccaccaatctcataataggctccatcgctggtgccatcctggtagcagctattgtccttgggggcacaggctggggatttaaaaatgtcaagaagagaaggttcgatcctactcagcaaggccccatctgaatcagctgcgctggatggacaccgccttgcactgttggattctgggtatgacatactcgcagcagtgttactggaactattaagtttgtaaacaaaacctttgggtggtaatgactacggagctaaagttggggtgacaaggatggggtaaaagaaaactgtctcttttggaaataatgtcaaagaacacctttcaccacctgtcagtaaacgggggagggggcaaaagaccatgctataaaaagaactgttccagaatctttttttttccctaatggacgaaggaacaacacacacacaaaaattaaatgcaataaaggaatcattaaaaa

SEQ ID NO: 1122 - DNA, 2406 bp, Homo sapiens
atggcagtggatgggaccctcgtgtacatcagggtcactcttctgctgctctggcttggggtatttttgtctatttccggctactgtcaggctgggccctcccagcatttcacttccccggaagtggtgatccccttgaaggtgatcagcaggggcagaagtgcaaaggctcctggatggctctcctatagtctgcggtttgggggccagaaacacgttgttcatatgagggtcaagaagctcttagtttctagacacctcccagtgttcacctacacagatgagcgtgcactcctggaggatcagctcttcatcccagatgactgttactatcatggttacgtggagggtgcccctgagtctctggttgtgttcagtgcttgttttgggggctttcgaggagtattaaaaataagtggcctcacttatgaaattgaacccatcaggcactctgccacatttgaacacctggtttacaaagtaaacagtaatgagacacaattcccagctatgagatgtggcttaacagagaaggaagtagcacgccaacagttggaatttgaagaggctgagaactcagctctggaaccaaaatctgctggtgactggtggactcatgcatggtttctggagctagttgttgtggtgaaccatgatttcttcatttactctcaaagcaacatctcaaaggtgcaagaggatgtatttcttgttgtcaacatagtggattccatgtatcagcagttaggtacttacataattttgattggaattgaaatttggaatcaaggaaatgttttcccaatgacaagcatagaacaggtcctgaacgatttctctcaatggaaacaaatcagtctttcccagctacagcatgatgctgcacatatgttcataaaaaattcacttataagtatacttggcctagcctatgttgcaggaatatgtcgtccacctattgattgtggagttgataattttcaaggagatacctggtctctttttgccaacactgtggcccatgagttaggtcatacgttgggtatgcagcatgatgaagaattctgtttttgtggggaaagaggttgcatcatgaatacttttagagtgccagcagagaaattcaccaattgcagttacgctgattttatgaagaccaccttaaaccagggatcatgtctgcataatcctccaagattgggggaaatctttatgctaaagcgctgtgggaatggtgtggttgaaagagaagagcagtgtgactgtggatccgtacagcagtgtgaacaagacgcctgttgtctgttgaactgcactctaaggcctggggctgcctgtgcttttgggctttgttgcaaagactgcaagttcatgccatcaggggaactctgtagacaagaggtcaatgaatgtgaccttccagaatggtgcaatggaacatctcatcagtgtccagaagatagatatgtgcaggacgggatcccctgtagtgacagtgcctactgctatcaaaagaggtgtaataaccatgaccagcattgcagggagatttttggtaaagatgcaaaaagtgcatctcagaattgctataaagaaatcaactctcagggaaaccgttttggtcactgtggtataaatggcacaacatacctaaaatgtcatatctctgatgtcttttgtgggagagttcaatgtgagaatgtgagagacattcctcttctccaagatcattttactttgcagcacactcatatcaatggtgtcacctgctggggtattgactatcatttaaggatgaacatatctgacattggtgaagtgaaagatggtactgtgtgtggcccaggaaagatctgcatccataagaagtgtgtcagtctgtctgtcttgtcacatgtctgccttcctgagacctgcaatatgaaggggatctgcaataacaaacatcactgccactgtggctatgggtggtccccaccctactgccagcacagaggctatgggggcagtattgacagtggcccagcatctgcaaagagaggagtttttttgccgctgattgtgattccttctttgtctgttttgactttcctgtttactgtcgggcttcttatgtatctacgacaatgttctggtcccaaagaaactaaggctcattcatcaggttaagaaaatgtctctaacttaatattccatgcattagtacactttagtctcttggcagtagaaacattagtacatccctgaaactgagcacatttctgaccatttccagaaagctgcaaagatcttcccttacattagtaccacaaacattgtcattaagttcaagttattcttaacatgtttctatctattgtttattgttttaagcagcaaataaagctacatccttccctcccttta

SEQ ID NO: 1123 - DNA, 2578 bp, Homo sapiens
agtttttattttcagcactgcagctctgatggtccagctccaccaggacacagatccccagatccctaaaggtcagccatgcaccctgaacagctcagagggaggagccagaccagcagtgcctcacaccttgttctcttctgctctagacagatggctccataatgacagcttcataatggcagtgggtgagcccctggtgcacatcagggtcactcttctgctgctctggtttgggatgtttttgtctatttctggccactctcaggccaggccctcccagtatttcacttctccagaagtggtgatccctttgaaggtgatcagcaggggcagaggtgcaaaggctcctggatggctctcctatagcctgcggtttgggggacagagatacattgtccacatgagggtaaataagctgttgtttgctgcacaccttcctgtgttcacctacacagagcagcatgccctgctccaggatcagcccttcatccaggatgactgctactaccatggttatgtggagggggtccctgagtccttggttgcccttagtacctgttctgggggctttcttggaatgctacagataaatgaccttgtttatgaaatcaagccaattagtgtttctgccacatttgaacacctagtatataagatagacagtgatgatacacagtttccacctatgagatgtgggttaacagaagagaaaatagcacaccagatggagttgcaattgtcatataatttcactctgaagcaaagttcttttgtgggctggtggacccatcagcggtttgttgagctggtagtggtcgtggataatattagatatcttttctctcaaagtaatgcaacaacagtgcagcatgaagtatttaacgttgtcaatatagtggattccttctatcatcctttggaggttgatgtaattttgactggaattgatatatggactgcatcaaatccacttcctaccagtggagacctagataatgttttagaggacttttctatttggaagaattataaccttaataatcgactacaacatgatgttgcacatcttttcataaaagacacacaaggcatgaagcttggtgttgcctatgttaaaggaatatgccagaatccttttaatactggagttgatgtttttgaagacaacaggttggtcgtttttgcaattactttgggccacgagcttggtcataatttgggtatgcaacatgacacccagtggtgtgtgtgcgagctacagtggtgcataatgcatgcctatagaaaggtgacaactaaatttagcaactgcagttatgcccaatattgggacagtactatcagtagtggattatgtattcaaccgcctccatatccagggaatatatttagactgaagtactgtgggaatctagtggttgaagaaggggaggaatgtgactgtggaaccatacggcagtgtgcaaaagatccctgttgtctgttaaactgtactctacatcctggggctgcttgtgcttttggaatatgttgcaaagactgcaaatttctgccatcaggaactttatgtagacaacaagttggtgaatgtgaccttccagagtggtgcaatgggacatcccatcaatgcccagatgatgtgtatgtgcaggacgggatctcctgtaatgtgaatgccttctgctatgaaaagacgtgtaataaccatgatatacaatgtaaagagatttttggccaagatgcaaggagtgcatctcagagttgctaccaagaaatcaacacccaaggaaaccgtttcggtcactgtggtattgtaggcacaacatatgtaaaatgttggacccctgatatcatgtgtgggagggttcagtgtgaaaatgtgggagtaattcccaatctgatagagcattctacagtgcagcagtttcacctcaatgacaccacttgctggggcactgattatcatttagggatggctatacctgatattggtgaggtgaaagatggcacagtatgtggtccagaaaagatctgcatccgtaagaagtgtgccagtatggttcatctgtcacaagcctgtcagcctaagacctgcaacatgaggggaatctgcaacaacaaacaacactgtcactgcaaccatgaatgggcacccccatactgcaaggacaaaggctatggaggtagtgctgatagtggcccacctcctaagaacaacatggaaggattaaatgtgatgggaaagttgcgttacctgtcactattgtgccttcttcctttggttgcttttttattattttgcttacatgtgctttttaagaaacgcacaaaaagtaaagaagatgaagaaggataagagaaatgggaaaaagaaggagactaaactttatacttcatttttaatatccaattttttaatagaaaaatatgaagccatgtctcactgtttaaataaaacttcatggacatttcatgtcaggattgcaagcattagctatcacagcaaaggattcctagcctattcttacttactctacagtgtcttaagcaatattaaaggttccttttcccagaa

SEQ ID NO: 1124 - DNA, 2740 bp, Homo sapiens
cgctgccatgcggctggcgctgctctgggccctggggctcctgggcgcgggcagccctctgccttcctggccgctcccaaatataggtggcactgaggagcagcaggcagagtcagagaaggccccgagggagcccttggagccccaggtccttcaggacgatctcccaattagcctcaaaaaggtgcttcagaccagtctgcctgagcccctgaggatcaagttggagctggacggtgacagtcatatcctggagctgctacagaatagggagttggtcccaggccgcccaaccctggtgtggtaccagcccgatggcactcgggtggtcagtgagggacacactttggagaactgctgctaccagggaagagtgcggggatatgcaggctcctgggtgtccatctgcacctgctctgggctcagaggcttggtggtcctgaccccagagagaagctataccctggagcaggggcctggggaccttcagggtcctcccattatttcgcgaatccaagatctccacctgccaggccacacctgtgccctgagctggcgggaatctgtacacactcagacgccaccagagcaccccctgggacagcgccacattcgccggaggcgggatgtggtaacagagaccaagactgtggagttggtgattgtggctgatcactcggaggcccagaaataccgggacttccagcacctgctaaaccgcacactggaagtggccctcttgctggacacattcttccggcccctgaatgtacgagtggcactagtgggcctggaggcctggacccagcgtgacctggtggagatcagcccaaacccagctgtcaccctcgaaaacttcctccactggcgcagggcacatttgctgcctcgattgccccatgacagtgcccagctggtgactggtacttcattctctgggcctacggtgggcatggccattcagaactccatctgttctcctgacttctcaggaggtgtgaacatggaccactccaccagcatcctgggagtcgcctcctccatagcccatgagttgggccacagcctgggcctggaccatgatttgcctgggaatagctgcccctgtccaggtccagccccagccaagacctgcatcatggaggcctccacagacttcctaccaggcctgaacttcagcaactgcagccgacgggccctggagaaagccctcctggatggaatgggcagctgcctcttcgaacggctgcctagcctaccccctatggctgctttctgcggaaatatgtttgtggagccgggcgagcagtgtgactgtggcttcctggatgactgcgtcgatccctgctgtgattctttgacctgccagctgaggccaggtgcacagtgtgcatctgacggaccctgttgtcaaaattgccagctgcgcccgtctggctggcagtgtcgtcctaccagaggggattgtgacttgcctgaattctgcccaggagacagctcccagtgtccccctgatgtcagcctaggggatggcgagccctgcgctggcgggcaagctgtgtgcatgcacgggcgttgtgcctcctatgcccagcagtgccagtcactttggggacctggagcccagcccgctgcgccactttgcctccagacagctaatactcggggaaatgcttttgggagctgtgggcgcaaccccagtggcagttatgtgtcctgcacccctagagatgccatttgtgggcagctccagtgccagacaggtaggacccagcctctgctgggctccatccgggatctactctgggagacaatagatgtgaatgggactgagctgaactgcagctgggtgcacctggacctgggcagtgatgtggcccagcccctcctgactctgcctggcacagcctgtggccctggcctggtgtgtatagaccatcgatgccagcgtgtggatctcctgggggcacaggaatgtcgaagcaaatgccatggacatggggtctgtgacagcaacaggcactgctactgtgaggagggctgggcaccccctgactgcaccactcagctcaaagcaaccagctccctgaccacagggctgctcctcagcctcctggtcttattggtcctggtgatgcttggtgccggctactggtaccgtgcccgcctgcaccagcgactctgccagctcaagggacccacctgccagtacagggcagcccaatctggtccctctgaacggccaggacctccgcagagggccctgctggcacgaggcactaagtctcaggggccagccaagcccccacccccaaggaagccactgcctgccgacccccagggccggtgcccatcgggtgacctgcccggcccaggggctggaatcccgcccctagtggtaccctccagaccagcgccaccgcctccgacagtgtcctcgctctacctctgacctctccggaggttccgctgcctccaagccggacttagggcttcaagaggcgggcgtgccctctggagtcccctaccatgactgaaggcgccagagactggcggtgtcttaagactccgggcaccgccacgcgctgtcaagcaacactctgcggacctgccggcgtagttgcagcgggggcttggggaggggctgggggttggacgggattgaggaaggtccgcacagcctgtctctgctcagttgcaataaacgtgacatcttgggagcgttaaaaaaaaaaaaaaa

SEQ ID NO: 1125 - DNA, 3865 bp, Homo sapiens
cggcagggttggaaaatgatggaagaggcggaggtggaggcgaccgagtgctgagaggaacctgcggaatcggccgagatggggtctggcgcgcgctttccctcggggacccttcgtgtccggtggttgctgttgcttggcctggtgggcccagtcctcggtgcggcgcggccaggctttcaacagacctcacatctttcttcttatgaaattataactccttggagattaactagagaaagaagagaagcccctaggccctattcaaaacaagtatcttatgttattcaggctgaaggaaaagagcatattattcacttggaaaggaacaaagaccttttgcctgaagattttgtggtttatacttacaacaaggaagggactttaatcactgaccatcccaatatacagaatcattgtcattatcggggctatgtggagggagttcataattcatccattgctcttagcgactgttttggactcagaggattgctgcatttagagaatgcgagttatgggattgaacccctgcagaacagctctcattttgagcacatcatttatcgaatggatgatgtctacaaagagcctctgaaatgtggagtttccaacaaggatatagagaaagaaactgcaaaggatgaagaggaagagcctcccagcatgactcagctacttcgaagaagaagagctgtcttgccacagacccggtatgtggagctgttcattgtcgtagacaaggaaaggtatgacatgatgggaagaaatcagactgctgtgagagaagagatgattctcctggcaaactacttggatagtatgtatattatgttaaatattcgaattgtgctagttggactggagatttggaccaatggaaacctgatcaacatagttgggggtgctggtgatgtgctggggaacttcgtgcagtggcgggaaaagtttcttatcacacgtcggagacatgacagtgcacagctagttctaaagaaaggttttggtggaactgcaggaatggcatttgtgggaacagtgtgttcaaggagccacgcaggcgggattaatgtgtttggacaaatcactgtggagacatttgcttccattgttgctcatgaattgggtcataatcttggaatgaatcacgatgatgggagagattgttcctgtggagcaaagagctgcatcatgaattcaggagcatcgggttccagaaactttagcagttgcagtgcagaggactttgagaagttaactttaaataaaggaggaaactgccttcttaatattccaaagcctgatgaagcctatagtgctccctcctgtggtaataagttggtggacgctggggaagagtgtgactgtggtactccaaaggaatgtgaattggacccttgctgcgaaggaagtacctgtaagcttaaatcatttgctgagtgtgcatatggtgactgttgtaaagactgtcggttccttccaggaggtactttatgccgaggaaaaaccagtgagtgtgatgttccagagtactgcaatggttcttctcagttctgtcagccagatgtttttattcagaatggatatccttgccagaataacaaagcctattgctacaacggcatgtgccagtattatgatgctcaatgtcaagtcatctttggctcaaaagccaaggctgcccccaaagattgtttcattgaagtgaattctaaaggtgacagatttggcaattgtggtttctctggcaatgaatacaagaagtgtgccactgggaatgctttgtgtggaaagcttcagtgtgagaatgtacaagagatacctgtatttggaattgtgcctgctattattcaaacgcctagtcgaggcaccaaatgttggggtgtggatttccagctaggatcagatgttccagatcctgggatggttaacgaaggcacaaaatgtggtgctggaaagatctgtagaaacttccagtgtgtagatgcttctgttctgaattatgactgtgatgttcagaaaaagtgtcatggacatggggtatgtaatagcaataagaattgtcactgtgaaaatggctgggctcccccaaattgtgagactaaaggatacggaggaagtgtggacagtggacctacatacaatgaaatgaatactgcattgagggacggacttctggtcttcttcttcctaattgttccccttattgtctgtgctatttttatcttcatcaagagggatcaactgtggagaagctacttcagaaagaagagatcacaaacatatgagtcagatggcaaaaatcaagcaaacccttctagacagccggggagtgttcctcgacatgtttctccagtgacacctcccagagaagttcctatatatgcaaacagatttgcagtaccaacctatgcagccaagcaacctcagcagttcccatcaaggccacctccaccacaaccgaaagtatcatctcagggaaacttaattcctgcccgtcctgctcctgcacctcctttatatagttccctcacttgatttttttaaccttctttttgcaaatgtcttcagggaactgagctaatactttttttttttcttgatgttttcttgaaaagcctttctgttgcaactatgaatgaaaacaaaacaccacaaaacagacttcactaacacagaaaaacagaaactgagtgtgagagttgtgaaatacaaggaaatgcagtaaagccagggaatttacaataacatttccgtttccatcattgaataagtcttattcagtcatcggtgaggttaatgcactaatcatggattttttgaacatgttattgcagtgattctcaaattaactgtattggtgtaagatttttgtcattaagtgtttaagtgttattctgaattttctaccttagttatcattaatgtagttcctcattgaacatgtgataatctaatacctgtgaaaactgactaatcagctgccaataatatctaatatttttcatcatgcacgaattaataatcatcatactctagaatcttgtctgtcactcactacatgaataagcaaatattgtcttcaaaagaatgcacaagaaccacaattaagatgtcatattattttgaaagtacaaaatatactaaaagagtgtgtgtgtattcacgcagttactcgcttccatttttatgacctttcaactataggtaataactcttagagaaattaatttaatattagaatttctattatgaatcatgtgaaagcatgacattcgttcacaatagcactattttaaataaattataagctttaaggtacgaagtatttaatagatctaatcaaatatgttgattcatggctataataaagcaggagcaattataaaatcttcaatcaattgaacttttacaaaaccacttgagaatttcatgagcactttaaaatctgaactttcaaagcttgctattaaatcatttagaatgtttacatttactaaggtgtgctgggtcatgtaaaatattagacactaatattttcatagaaattaggctggagaaagaaggaagaaatggttttcttaaatacctacaaaaaagttactgtggtatctatgagttatcatcttagctgtgttaaaaatgaatttttactatggcagatatggtatggatcgtaaaattttaagcactaaaaattttttcataacctttcataataaagtttaataataggtttattaactgaatttcattagttttttaaaagtgtttttggtttgtgtatatatacatatacaaatacaacatttacaataaataaaatacttgaaattctcaaaaaaaaaaaaaaaaaaaaaaaaaa

SEQ ID NO: 1126 - DNA, 3065 bp, Homo sapiens
gcagcctgaggaaaaaaagagaaaaagataaaaaaaatctgaaaacgcttcaaaatcctgaaaaaaaaaaggaaaagaaaaaacgaatcctcggagaacccgcggggaagtcactttcgtacgcttccggcctgccccgcgcccgccgccgcagcgcttggcgtccgtcggtctccgtccgtcggtccgggggtgagccgcccgcccggcccgccgtgccctccccccgctcgggccccgagccccgcgccccggcctgccccggcgcaccacgtgtccgtgctgcccttcgccgcccgcccggggtcgccgagtcggcgcccacaaagatttggtttccctctgcccggcggttgtaatcttaaaccgccggagcccgaggcctatatttatagagaaacgcgtgtccccgaggcccgccgtgggcagcgtccggtcgcctcttaaaggatttttacccttcggaaggggattccccgtttaatttttttcctactttgattttttgaaatttggagccttcgcaccaggaccgcggagaagtgcaaagtcgcggggagggccgtattgtgcggagagccttttgtctgcggtgctgcggccgtgggagccggcccccgcctcccgtttccgtcccgtctccaagcccgccgactccagctcgtcctcgccgcgccggtgccacctgtgagccggcgcgggcccgggctccggctccgaaggcgcccctttgtcctgcggcgggcccgataagaagtcctctggcggggctcggggtggtggggggcggggagatgaacgctgcggccagcagctaccccatggcctccctgtacgtgggcgacctgcattcggacgtcaccgaggccatgctgtacgaaaagttcagccccgcggggcctgtgctgtccatccgggtctgccgcgatatgatcacccgccgctccctgggctatgcctacgtcaacttccagcagccggccgacgctgagcgggctttggacaccatgaactttgatgtgattaagggaaagccaatccgcatcatgtggtctcagagggatccctctttgagaaaatctggtgtgggaaacgtcttcatcaagaacctggacaaatctatagataacaaggcactttatgatactttttctgcttttggaaacatactgtcctgcaaggtggtgtgtgatgagaacggctctaagggttatgcctttgtccacttcgagacccaagaggctgccgacaaggccatcgagaagatgaatggcatgctcctcaatgaccgcaaagtatttgtgggcagattcaagtctcgcaaagagcgggaagctgagcttggagccaaagccaaggaattcaccaatgtttatatcaaaaactttggggaagaggtggatgatgagagtctgaaagagctattcagtcagtttggtaagaccctaagtgtcaaggtgatgagagatcccaatgggaaatccaaaggctttggctttgtgagttacgaaaaacacgaggatgccaataaggctgtggaagagatgaatggaaaagaaataagtggtaaaatcatatttgtaggccgtgcacaaaagaaagtagaacggcaggcagagttaaaacggaaatttgaacagttgaaacaggagagaattagtcgatatcagggggtgaatctctacattaagaacttggatgacactattgatgatgagaaattaaggaaagaattttctccttttggatcaattaccagtgctaaggtaatgctggaggatggaagaagcaaagggtttggcttcgtctgcttctcatctcctgaagaagcaaccaaagcagtcactgagatgaatggacgcattgtgggctccaagccactatatgttgccctggcccagaggaaggaagagagaaaggctcacctgaccaaccagtatatgcaacgagtggctggaatgagagcacttcctgccaatgccatcttaaatcagttccagcctgcagcgggtggctactttgtgccagcagtcccacaggctcagggaaggcctccatattatacacctaaccagttagcacagatgaggcctaatccacgctggcagcaaggtgggagacctcaaggcttccaaggaatgccaagtgctatacgccagtctgggcctcgtccaactcttcgccatctggctccaactgggtctgagtgcccggaccgcttggctatggactttggtggggctggtgccgcccagcaagggctgactgacagctgccagtctggaggcgttcccacagctgtgcagaacttagcgccacgcgctgctgttgctgctgctgctccccgggctgttgccccctacaaatacgcctccagtgtccgcagccctcatcctgccatacagcctctgcaggcaccccagcctgcggtccatgtgcaggggcaggagccactgactgcctccatgctggctgcagcacccccccaggaacagaagcagatgctgggagaacgcttgttcccactcatccaaacaatgcattcaaatctggctgggaagatcacgggaatgctgctggagatagacaactctgagctgctgcacatgttagagtcccccgagtctctccgctccaaggtggatgaagctgtagcagttctacaggctcatcatgccaagaaagaagctgcccagaaggtgggcgctgttgctgctgctacctcttagacaaggaaaaaccgattcaaaagccaaataaccccttatggaattcaactcaaggtttgaagacttcctagcttgtcctatggacctcaacaccaaggattacaaattgcaaatttaataggtcattttgtatcaaaaggtcaattatgaagcacctagaatttttcaattatacgaatatgttctttgggttctgctgtggcccagacagtgttaactttttttttattgtgggttttgattttttcccccagaaattggttttatttgatgtacccaagtcttacgtttcccaataaagaaaaaaaatctccataaaaaaagtcgagcggccgc

SEQ ID NO: 1127 - DNA, 1898 bp, Homo sapiens
ggcacgagggtcagctctggttcggagaagcagcggctggcgtgggccatccggggaatgggcgccctcgtgacctagtgttgcggggcaaaaagggtcttgccggcctcgctcgtgcaggggcgtatctgggcgcctgagcgcggcgtgggagccttgggagccgccgcagcagggggcacacccggaaccggcctgagcgcccgggaccatgaacggggaggccatctgcagcgccctgcccaccattccctaccacaaactcgccgacctgcgctacctgagccgcggcgcctctggcactgtgtcgtccgcccgccacgcagactggcgcgtccaggtggccgtgaagcacctgcacatccacactccgctgctcgacagtgaaagaaaggatgtcttaagagaagctgaaattttacacaaagctagatttagttacattcttccaattttgggaatttgcaatgagcctgaatttttgggaatagttactgaatacatgccaaatggatcattaaatgaactcctacataggaaaactgaatatcctgatgttgcttggccattgagatttcgcatcctgcatgaaattgcccttggtgtaaattacctgcacaatatgactcctcctttacttcatcatgacttgaagactcagaatatcttattggacaatgaatttcatgttaagattgcagattttggtttatcaaagtggcgcatgatgtccctctcacagtcacgaagtagcaaatctgcaccagaaggagggacaattatctatatgccacctgaaaactatgaacctggacaaaaatcaagggccagtatcaagcacgatatatatagctatgcagttatcacatgggaagtgttatccagaaaacagccttttgaagatgtcaccaatcctttgcagataatgtatagtgtgtcacaaggacatcgacctgttattaatgaagaaagtttgccatatgatatacctcaccgagcacgtatgatctctctaatagaaagtggatgggcacaaaatccagatgaaagaccatctttcttaaaatgtttaatagaacttgaaccagttttgagaacatttgaagagataacttttcttgaagctgttattcagctaaagaaaacaaagttacagagtgtttcaagtgccattcacctatgtgacaagaagaaaatggaattatctctgaacatacctgtaaatcatggtccacaagaggaatcatgtggatcctctcagctccatgaaaatagtggttctcctgaaacttcaaggtccctgccagctcctcaagacaatgattttttatctagaaaagctcaagactgttattttatgaagctgcatcactgtcctggaaatcacagttgggatagcaccatttctggatctcaaagggctgcattctgtgatcacaagaccactccatgctcttcagcaataataaatccactctcaactgcaggaaactcagaacgtctgcagcctggtatagcccagcagtggatccagagcaaaagggaagacattgtgaaccaaatgacagaagcctgccttaaccagtcgctagatgcccttctgtccagggacttgatcatgaaagaggactatgaacttgttagtaccaagcctacaaggacctcaaaagtcagacaattactagacactactgacatccaaggagaagaatttgccaaagttatagtacaaaaattgaaagataacaaacaaatgggtcttcagccttacccggaaatacttgtggtttctagatcaccatctttaaatttacttcaaaataaaagcatgtaagtgactgtttttcaagaagaaatgtgtttcataaaaggatatttataaaaaaaaaaaaaaaaaa

SEQ ID NO: 1128 - DNA, 1642 bp, Homo sapiens
ctctaaaggttcgggggtggaatccttgggccgctgggcaagcggcgagacctggccagggccagcgagccgaggacagagggcgcacggagggccgggccgcagccccggccgcttgcagaccccgccatggacccgttcctggtgctgctgcactcggtgtcgtccagcctgtcgagcagcgagctgaccgagctcaagttcctatgcctcgggcgcgtgggcaagcgcaagctggagcgcgtgcagagcggcctagacctcttctccatgctgctggagcagaacgacctggagcccgggcacaccgagctcctgcgcgagctgctcgcctccctgcggcgccacgacctgctgcggcgcgtcgacgacttcgaggcgggggcggcggccggggccgcgcctggggaagaagacctgtgtgcagcatttaacgtcatatgtgataatgtggggaaagattggagaaggctggctcgtcagctcaaagtctcagacaccaagatcgacagcatcgaggacagatacccccgcaacctgacagagcgtgtgcgggagtcactgagaatctggaagaacacagagaaggagaacgcaacagtggcccacctggtgggggctctcaggtcctgccagatgaacctggtggctgacctggtacaagaggttcagcaggcccgtgacctccagaacaggagtggggccatgtccccgatgtcatggaactcagacgcatctacctccgaagcgtcctgatgggccgctgctttgcgctggtggaccacaggcatctacacagcctggactttggttctctccaggaaggtagcccagcactgtgaagacccagcaggaagccaggctgagtgagccacagaccacctgcttctgaactcaagctgcgtttattaatgcctctcccgcaccaggccgggcttgggccctgcacagatatttccatttcttcctcactatgacactgagcaagatcttgtctccactaaatgagctcctgcgggagtagttggaaagttggaaccgtgtccagcacagaaggaatctgtgcagatgagcagtcacactgttactccacagcggaggagaccagctcagaggcccaggaatcggagcgaagcagagaggtggagaactgggatttgaacccccgccatccttcaccagagcccatgctcaaccactgtggcgttctgctgcccctgcagttggcagaaaggatgttttgtcccatttccttggaggccaccgggacagacctggacactagggtcaggcggggtgctgtggtggggagaggcatggctggggtgggggtggggagacctggttggccgtggtccagctcttggcccctgtgtgagttgagtctcctctctgagactgctaagtaggggcagtgatggttgccaggacgaattgagataatatctgtgaggtgctgatgagtgattgacacacagcactctctaaatcttccttgtgaggattatgggtcctgcaattctacagtttcttactgttttgtatcaaaatcactatctttctgataacagaattgccaaggcagcgggatctcgtatctttaaaaagcagtcctcttattcctaaggtaatcctattaaaa

SEQ ID NO: 1129 - DNA, 2856 bp, Homo sapiens
gaattcgcggccgccccgcctgtgtcctcggcggagcctgctgcccgtcctgccacctctctgctctgttcttgtctctgccttcattcccgaatggatctggtaggagtggcatcgcctgagcccgggacggcagcggcctggggacccagcaagtgtccatgggctattcctcaaaatacaatatcttgttctttggctgatgtaatgagtgaacagctggccaaagaattgcagttagaagaagaagctgccgtttttcctgaagttgctgttgctgaaggaccatttattactggagaaaacattgatacttccagtgaccttatgctggctcagatgctacagatggaatatgacagagaatatgatgcacagcttaggcgtgaagaaaaaaaattcaatggagatagcaaagtttccatttcctttgaaaattatcgaaaagtgcatccttatgaagacagcgatagctctgaagatgaggttgactggcaggatactcgtgatgatccctacagaccagcaaaaccggttcccactcctaaaaagggctttattggaaaaggaaaagatatcaccaccaaacatgatgaagtagtatgtgggagaaagaacacagcaagaatggaaaattttgcacctgagtttcaggtaggagatggaattggaatggatttaaaactatcaaaccatgttttcaatgctttaaaacaacatgcctactcagaagaacgtcgaagtgcccgcctacatgagaaaaaggagcattctacagcagaaaaagcagttgatcctaagacacgtttacttatgtataaaatggtcaactctggaatgttggagacaatcactggctgtattagtacaggaaaggagtctgttgtctttcatgcatatggagggagcatggaggatgaaaaggaagatagtaaagttatacctacagaatgtgccatcaaggtatttaaaacaacccttaatgaatttaagaatcgtgacaaatatattaaagatgatttcaggtttaaagatcgcttcagtaaactaaatccacgtaagatccaccgcatgtgggcagaaaaagaaatgcacaatctcgcaagaatgcagagagctggaattccttgtccaacagttgtactactgaagaaacacattttagttatgtcttttattggccatgatcaagttccagcccctaaattaaaagaagtaaagctcaatagtgaagaaatgaaagaagcctactatcaaactcttcatttgatgcggcagttatatcatgaatgtacgcttgtccatgctgacctcagtgagtataacatgctgtggcatgctggaaaggtctggttgatcgatgtcagtcagtcagtagaacctacccaccctcacggcctggagttcttgttccgggactgcaggaatgtctcgcagtttttccagaaaggaggagtcaaggaagcccttagtgaacgagaactcttcaatgctgtttcaggcttaaacatcacagcagataatgaagctgattttttagctgagatagaagctttggagaaaatgaatgaagatcacgttcagaagaatggaaggaaagctgcttcatttttgaaagatgatggagacccaccactactatatgatgaatagcactaatacccactgcttcagtgttaacacagcagtgattgtcagctgccaatagcaaatgaagttatgggtgacttgaaataccaaaacctgaggagtgggcaatggtgcttctgtgcttttcccccttgtaacccatgtgccagatgtgtggaatttttagctcagcattgagagaataaaatgtcactacctctcatcttatgaacaggataatataattctttaacagctataggttatctggctgaagtagacctaattttatgtgacttgtggtgtaaaatgtcttgatgataatttttaaaacttgggtaacacttccaaatatgggaggaaaggacagatgtgtttacaagggaggattttacaacatacttgctttattcacctccctgttttgtgttgcgtctttccttgaatattttattggcccagagttagcctttctcaattatgtttccagactgtggccgtgattctaaaggaaaatgtgtgctctttagtgggtagaacaaatggaaatttggtttcagaatggctgacagaaatcgacataagtcatgtaatttttgttgatatatcatgaaaatgaacagaattctttttccatacttatatctaagaaaaggcatcataggtttctgaaagagataactatataacagctttttaactatccagtcaactttcagcttttctacatttaggtaaaatggttaggatataactcatggtgtggctaatctacatttatcaataaaatgtaaattatctgaaaggacagaatataagatttaaccatgtttgacatattttaatttagttaatgaagcaaaattcagtttatatttcactagaactgtgtacttgattgattttcagagaaatatcacaaattagaaatattaaatctaaggatgaaaggtatatataaaacaatttgggggccaggcacgatggctcaaacctgtaatcccagcactttgggagaccaaggcgggtggatcacttgaggtcaggagttcaagaccagcctgggcaacatggcgaaaccctgtctctactaaaaatacaaaaattagccgggtgtggtggcacttctctgtaatctcagcttctcaggaggctgagacaggagaatcgcttgaacccgggaggcagaggttgcagtgagctgagatcatgcgcggccgcgaattc

SEQ ID NO: 1130 - DNA, 1227 bp, Homo sapiens
aacccttgccgctgccgctgacatcgctaccatggtctccggcagcagcggcctcgccgccgcccgtctcctgtcgcgcagcttcctcctgccgcagaatggaattcggcattgttcctacacagcttctcggcaacatctctatgttgataaaaatacaaagattatttgccagggtttcactggcaaacagggcacctttcacagccagcaggcattggaatatggcaccaaactcgttggaggaacactcccagggaaaggaggccagacacatctgggcttacctgtctttaatactgtgaaggaggccaaagaacagacaggagcaacggcttctgtcatttatgttcctccgccttttgctgctgctgccattaatgaagctattgaggcagaaattcccttggttgtgtgtatcactgaaggaattccccagcaggacatggtacgagtcaagcacaaactgctgcgccaggaaaagacaaggctaattgggcccaactgccctggagtcatcaatcctggagaatgtaaaattgggatcatgcctggccatattcacaaaaaaggaaggattggcattgtgtccagatctggcaccctgacttatgaagcagttcaccaaacaacgcaagttggattggggcagtctttgtgcgttggcattggaggtgatccttttaatggaacagattttattgactgcctcgaaatctttttgaacgattctgccacagaaggcatcatattgattggtgaaattggtggtaatgcagaagagaatgctgcagaatttttgaagcaacataattcaggtccaaattccaagcctgtagtgtccttcattgctggtttaactgctcctcctgggagaagaatgggtcatgccggggcaattattgctggaggaaaaggtggagctaaagagaagatctctgcccttcagagtgcaggagttgtggtcagtatgtctcctgcacagctgggaaccacgatctacaaggaatttgaaaagaggaagatgctatgaaagaaaaaaaaaattcctaaaactgtggaatggatcacgtagacatgtaacccagcagcagtttgcttctgttgtccactgattaatcagcctatgtgcctgacactggtcttgcagtacaactggaagccaaaacaaggtggaagatgtcctgaattaagacgttttcaccacattgtattacagagacagcc

SEQ ID NO: 1131 - DNA, 2178 bp, Homo sapiens
ccgcctgtcgcctgtgcgcctgcgcgcggcgccgaggggacggggtccgactcagaaatggcggcctccatgttctacggcaggctagtggccgtggccacccttcggaaccaccggcctcggacggcccagcgggctgctgctcaggttctgggaagttctggattgtttaataaccatggactccaagtacagcagcaacagcaaaggaatctctcactacatgaatacatgagtatggaattattgcaagaagctggtgtctccgttcccaaaggatatgtggcaaagtcaccagatgaagcttatgcaattgccaaaaaattaggttcaaaagatgtcgtgataaaggcacaggttttagctggtggtagaggaaaaggaacatttgaaagtggcctcaaaggaggagtgaagatagttttctctccagaagaagcaaaagctgtttcttcacaaatgattgggaaaaaattgtttaccaagcaaacgggagaaaagggcagaatatgcaatcaagtattggtctgtgagcgaaaatatcccaggagagaatactactttgcaataacaatggaaaggtcatttcaaggtcctgtattaataggaagttcacatggtggtgtcaacattgaagatgttgctgctgagtctcctgaagcaataattaaagaacctattgatattgaagaaggcatcaaaaaggaacaagctctccagcttgcacagaagatgggatttccacctaatattgtggaatcagcagcagaaaacatggtcaagctttacagcctttttctgaaatacgatgcaaccatgatagaaataaatccaatggtggaagattcagatggagctgtattgtgtatggatgcaaagatcaattttgactctaattcagcctatcgccaaaagaaaatctttgatctacaggactggacccaggaagatgaaagggacaaagatgctgctaaggcaaatctcaactacattggcctcgatggaaatataggctgcctagtaaatggtgctggtttggctatggccacaatggatataataaaacttcatggagggactccagccaacttccttgatgttggtggtggtgctacagtccatcaagtaacagaagcatttaagcttatcacttcagataaaaaggtactggctattctggtcaacatttttggaggaatcatgcgctgtgatgttattgcacagggtatagtcatggcagtaaaagacttggaaattaaaatacctgttgtggtacggttacaaggtacacgagtcgatgatgctaaggcactgatagcggacagtggacttaaaatacttgcttgtgatgacttggatgaagctgctagaatggttgtaaagctctctgaaatagtgaccttagcgaagcaagcacatgtggatgtgaaatttcagttgccaatatgatctgaaaacccagtggatggctgaaggtgttaaatgtgctataatcattaagaatactgtgttctgtgttattgttctttttctttttagtgtgtggagattgtaattgccatctaggcacacaaacatttaaaaggatttggactgcatttaattgtaccattcagaatggactgtttgtacgaagcatgtataatgcagttatcttctttctttcgtcgcagccagtcttttttgcttctcctacaaaacgtaacttgcaatttgccagtttattattgttggatacaaagttcttcattgataagagtcctataaataagataaatacgaagataaagctttattctttagtgttaaaatacagtatatctaataactagcctcattagtagagcagtatattaaaacaatgttttatgtaaaaagtgtttatcttcagcaccaaatacatgataaatgtatcaatcactatttataaacagagctttcaaacactcctcagaatattcttctaagtattttgatgaagtaactttgtaattatttgaacattgttttaatcattaggaaacactgattaactgcaagtcttcatgattctgtcatattaagaaacacctgtaggtttgcttcaaataaaggcatatataccaaggacttacagacaaaattaagaatgtcaatttaagttaataaaaatctcccaatatgaaaaaaaaaaaaaaa

SEQ ID NO: 1132 - DNA, 3803 bp, Homo sapiens
ccgcgagtccaccgagcggcctctgaggagcagccgcaggaggaggaggaggtcgtcgggggcggcgggcggagaccggctcttctcgcttccccggcggcggcaagggcaggacaatggaggtggcggtggagaaggcggtggcggcggcggcagcggcctcggctgcggcctccggggggccctcggcggcgccgagcggggagaacgaggccgagagtcggcagggcccggactcggagcgcggcggcgaggcggcccggctcaacctgttggacacttgcgccgtgtgccaccagaacatccagagccgggcgcccaagctgctgccctgcctgcactctttctgccagcgctgcctgcccgcgccccagcgctacctcatgctgcccgcgcccatgctgggctcggccgagaccccgccacccgtccctgccccggctcgccggtcagcctcgtcgccgttcgccacccaagttggagtcattcgttgcccagtttgcagccaagaatgtgcagagagacacatcatagataacttttttgtgaaggacactactgaggttcccagcagtacagtagaaaagtcaaatcaggtatgtacaagctgtgaggacaacgcagaagccaatgggttttgtgtagagtgtgttgaatggctctgcaagacgtgtatcagagctcatcagagggtaaagttcacaaaagaccacactgtcagacagaaagaggaagtatctccagaggcagttggtgtcaccagccagcgaccagtgttttgtccttttcataaaaaggagcagctgaagctgtactgtgagacatgtgacaaactgacatgtcgagactgtcagttgttagaacataaagagcatagataccaatttatagaagaagcttttcagaatcagaaagtgatcatagatacactaatcaccaaactgatggaaaaaacaaaatacataaaattcacaggaaatcagatccaaaacagaattattgaagtaaatcaaaatcaaaagcaggtggaacaggatattaaagttgctatatttacactgatggtagaaataaataaaaaaggaaaagctctactgcatcagttagagagccttgcaaaggaccatcgcatgaaacttatgcaacaacaacaggaagtggctggactctctaaacaattggagcatgtcatgcatttttctaaatgggcagtttccagtggcagcagtacagcattactttatagcaaacgactgattacataccggttacggcacctccttcgtgcaaggtgtgatgcatccccagtgaccaacaacaccatccaatttcactgtgatcctagtttctgggctcaaaatatcatcaacttaggttctttagtaatcgaggataaagagagccagccacaaatgcctaagcagaatcctgtcgtggaacagaattcacagccaccaagtggtttatcatcaaaccagttatccaagttcccaacacagatcagcctagctcaattacggctccagcatatgcagcaacagcaaccgcctccacgtttgataaactttcagaatcacagccccaaacccaatggaccagttcttcctcctcatcctcaacaactgagatatccaccaaaccagaacataccacgacaagcaataaagccaaaccccctacagatggctttcttggctcaacaagccataaaacagtggcagatcagcagtggacagggaaccccatcaactaccaacagcacatcctctactccttccagccccacgattactagtgcagcaggatatgatggaaaggcttttggttcacctatgatcgatttgagctcaccagtgggagggtcttataatcttccctctcttccggatattgactgttcaagtactattatgctggacaatattgtgaggaaagatactaatatagatcatggccagccaagaccaccctcaaacagaacggtccagtcaccaaattcatcagtgccatctccaggccttgcaggacctgttactatgactagtgtacaccccccaatacgttcacctagtgcctccagcgttggaagccgaggaagctctggctcttccagcaaaccagcaggagctgactctacacacaaagtcccagtggtcatgctggagccaattcgaataaaacaagaaaacagtggaccaccggaaaattatgatttccctgttgttatagtgaagcaagaatcagatgaagaatctaggcctcaaaatgccaattatccaagaagcatactcacctccctgctcttaaatagcagtcagagctctacttctgaggagactgtgctaagatcagatgcccctgatagtacaggagatcaacctggacttcaccaggacaattcctcaaatggaaagtctgaatggttggatccttcccagaagtcacctcttcatgttggagagacaaggaaagaggatgaccccaatgaggactggtgtgcagtttgtcaaaacggaggggaactcctctgctgtgaaaagtgccccaaagtattccatctttcttgtcatgtgcccacattgacaaattttccaagtggagagtggatttgcactttctgccgagacttatctaaaccagaagttgaatatgattgtgatgctcccagtcacaactcagaaaaaaagaaaactgaaggccttgttaagttaacacctatagataaaaggaagtgtgagcgcctacttttatttctttactgccatgaaatgagcctggcttttcaagaccctgttcctctaactgtgcctgattattacaaaataattaaaaatccaatggatttgtcaaccatcaagaaaagactacaagaagattattccatgtactcaaaacctgaagattttgtagctgattttagattgatctttcaaaactgtgctgaattcaatgagcctgattcagaagtagccaatgctggtataaaacttgaaaattattttgaagaacttctaaagaacctctatccagaaaaaaggtttcccaaaccagaattcaggaatgaatcagaagataataaatttagtgatgattcagatgatgactttgtacagccccggaagaaacgcctcaaaagcattgaagaacgccagttgcttaaataatatgcagcaccactagcttgtgctggtttttagatttttttgttttcaaaaaaacatttgtcagtaatttaacatcactacaaaaagaaggagtttgtgactattctcatctctgttttgcaggtttacgccgcacactttgatttccttaatagcccatttctgttaacctattatcactaagaaagaaaggaaagaaggagatgaatagaagaaagaaaatggaaagaaggaaaaaaggaggattgaaaaaggatggaagaaagaagccattgaaaacaaagacattcttcccacttcttggatttttaaaccacagtctggagtgatagctactgtagaaaggaaatagacttttatgaactctttaagttgaaaagtaaaaaatatatgtggtttggatgtgtgctttaattcagctttagaaattaataccactacccgtgaattatatggcctgacaatatgaattaggtgtactgtactgaagaacagtactccacaaacatgggtggtaacaagagttccatcccaggaggccaaacggtgcaacagaagggtaggttagatgctattaagaaggcacttaatagtacatcatgtaagatggcaactgtattaaagaaaaatccggaaaac

SEQ ID NO: 1133 - DNA, 1047 bp, Homo sapiens
atggcctccttggaagtcagtcgtagtcctcgcaggtctcggcgggagctggaagtgcgcagtccacgacagaacaaatattcggtgcttttacctacctacaacgagcgcgagaacctgccgctcatcgtgtggctgctggtgaaaagcttctccgagagtggaatcaactatgaaattataatcatagatgatggaagcccagatggaacaagggatgttgctgaacagttggagaagatctatgggtcagacagaattcttctaagaccacgagagaaaaagttgggactaggaactgcatatattcatggaatgaaacatgccacaggaaactacatcattattatggatgctgatctctcacaccatccaaaatttattcctgaatttattaggaagcaaaaggagggtaattttgatattgtctctggaactcgctacaaaggaaatggaggtgtatatggctgggatttgaaaagaaaaataatcagccgtggggccaattttttaactcagatcttgctgagaccaggagcatctgatttaacaggaagtttcagattataccgaaaagaagttctagagaaattaatagaaaaatgtgtttctaaaggctacgtcttccagatggagatgattgttcgggcaagacagttgaattatactattggcgaggttccaatatcatttgtggatcgtgtttatggtgaatccaagttgggaggaaatgaaatagtatctttcttgaaaggattattgactctttttgctactacataaaagaaagatactcatttatagttacgttcatttcaggttaaacatgaaagaagcctggttactgatttgtataaaatgtactcttaaagtataaaatataaggtaaggtaaatttcatgcatctttttatgaagaccacctattttatatttcaaattaaataattttaaagttgctggcctaatgagcaatgttctcaattttcgttttcattttgctgtattgagacctataaataaatgtatatttttttttgcataaagt

SEQ ID NO: 1134 - DNA, 1192 bp, Homo sapiens
ccagtgttcccagttcccaccagtccaactgcgaggagtgcgacgtgagtctgagtctgatccctccgaaaaccgtacttccggcgctgtctcggaggcctcccgtcccctcccttgtccgtcttctaactcttccccacgccaggtccgtcaagcctaagtccttgagttccgggtccgggcagcagagaaaggaagtcctctccctggaggcctatctccctcagaacggcgcgagaagcgagaccttagaaggcagcgcttcccgcgaaggaccggaaaggagcgcctactaaggacgccgtcgaggtccggggcgcctcaactctatagctctaactggctagaagtgcccaacgtggaatgtttcttttttaaaggcggctcttgaagcgacccggaagcggaagtggaagaaagttctagtggcttgaggtatccgcagagcggccgggtggcgggaggaaccgttacgggaactgaagttgcggattaagcctgatcaagatgacaacctcccaaaagcaccgagacttcgtggcagagcccatgggggagaagccagtggggagcctggctgggattggtgaagtcctgggcaagaagctggaggaaaggggttttgacaaggcctatgttgtccttggccagtttctggtgctaaagaaagatgaagacctcttccgggaatggctgaaagacacttgtggcgccaatgccaagcagtcccgggactgcttcggatgccttcgagagtggtgcgacgccttcttgtgatgctctctgggaagctctcaatccccagccctcatccagagtttgcagccgagtagggactcctcccctgtcctctacgaaggaaaagattgctattgtcgtactcacctccgacgtactccggggtcttttgggagttttctcccctaaccatttcaacttttttttggattctcgctcttgcatgcctcccccgtcctttttcccttgccagttccctggtgacagttaccagctttcctgaatggattcccggccccatccctcacccccaccctcactttcaatccgtttgataccatttggctccttttttggcagaacagtcactgtccttgtaaagttttttagatcaataaagtcagtggctttcaaaaaaaaaaaaaaaaaaaaaaaaaaaaaaaaaaaaaaaaaa

SEQ ID NO: 1135 - DNA, 1125 bp, Homo sapiens
cccccatgtgacagtgacggggtccccgctccaggagacgctcgagtctgcgtcccggccctcagcactgtccactgtttcggtgccagcagagaccagcaggcccgggacagttggtgtttggccgtgccgctgtctaacttggtgtgcagagtgaattgccgctgccggagcggagagaggcggagcggccaggagagaggggatttctgtcagcgccggcctcgggagctcggagacatgaacggcttcacgcctgacgagatgagccgcggcggggatgcggccgccgcagtggccgcagtggtcgctgccgcggccgccgccgcctcggcggggaacgggaccggcgcgggcaccggggctgaggtgccgggcgcgggggcggtctcagcggctgggcccccgggggcggccgggccgggccccgggcaactgtgctgcctgcgggaggatggtgagcggtgcggccgggcggcaggcaacgccagcttcagcaagaggatccagaagagcatctcccagaagaaggtgaagatcgagctggataagagcgcaaggcatctttacatatgtgattatcataaaaacttaattcagagtgttcgaaacagaagaaagagaaaagggagtgatgatgatggaggtgattcacctgttcaagatattgataccccagaggttgatttataccaattacaagtaaatacacttaggagatacaaaagacacttcaagctaccaaccagaccaggacttaataaagcacaacttgttgagatagttggttgccactttaggtctattccagtgaatgaaaaagacaccttaacatatttcatctactcagtgaagaatgacaagaacaaatcagatctcaaggttgatagtggtgttcactaggagacgtggaattgagactaataacttggatgttaacactgtttactgttttttcacatgtagaaatgttctttgtgtattttttctacagaggattttctctgattttattttctttgtttctgactctaataattagttggaaactcatataaaatgagctttcctaaattaaatctattttaaataaaggttattactattaaaaaaaaaaaaaaaaaa

SEQ ID NO: 1136 - DNA, 7573 bp, Homo sapiens
ggtattaaaactgatcttttgacatttttgacaatgttcttataaattactttcttttttatcatatatggatgggatgaagcacagagtaagatagagtgcacagcaaaggggatctgcccctcctatctgtccaataccccacaggttttggtgataatcttgggcaatgttccagtcaaacctgcctcccacttctcactaaagttagtgaacatgtgacccacattccccaaataagagcctcttataaactccattcttggctttttcattcatagagatagctattttatgagacatagataaagcattttttagtgatgtgcacgatgccttttttcttaattattaacttctcaaaacataaacacattggaggcacttaataaagggagctgtacgtaccgccgtccgcgcctccaaggtttcacggcttcctcagcagagactcgggctcgtccgccatgtccgccgcagacgaggttgacgggctgggcgtggcccggccgcactatggctctgtcctggataatgaaagacttactgcagaggagatggatgaaaggagacgtcagaacgtggcttatgagtacctttgtcatttggaagaagcgaagaggtggatggaagcatgcctaggggaagatctgcctcccaccacagaactggaggaggggcttaggaatggggtctaccttgccaaactggggaacttcttctctcccaaagtagtgtccctgaaaaaaatctatgatcgagaacagaccagatacaaggcgactggcctccactttagacacactgataatgtgattcagtggttgaatgccatggatgagattggattgcctaagattttttacccagaaactacagatatctatgatcgaaagaacatgccaagatgtatctactgtatccatgcactcagtttgtacctgttcaagctaggcctggcccctcagattcaagacctatatggaaaggttgacttcacagaagaagaaatcaacaacatgaagactgagttggagaagtatggcatccagatgcctgcctttagcaagattgggggcatcttggctaatgaactgtcagtggatgaagccgcattacatgctgctgttattgctattaatgaagctattgaccgtagaattccagccgacacatttgcagctttgaaaaatccgaatgccatgcttgtaaatcttgaagagcccttggcatccacttaccaggatatactttaccaggctaagcaggacaaaatgacaaatgctaaaaacaggacagaaaactcagagagagaaagagatgtttatgaggagctgctcacgcaagctgaaattcaaggcaatataaacaaagtcaatacattttctgcattagcaaatatcgacctggctttagaacaaggagatgcactggccttgttcagggctctgcagtcaccagccctggggcttcgaggactgcagcaacagaatagcgactggtacttgaagcagctcctgagtgataaacagcagaagagacagagtggtcagactgaccccctgcagaaggaggagctgcagtctggagtggatgctgcaaacagtgctgcccagcaatatcagagaagattggcagcagtagcactgattaatgctgcaatccagaagggtgttgctgagaagactgttttggaactgatgaatcccgaagcccagctgccccaggtgtatccatttgccgccgatctctatcagaaggagctggctaccctgcagcgacaaagtcctgaacataatctcacccacccagagctctctgtcgcagtggagatgttgtcatcggtggccctgatcaacagggcattggaatcaggagatgtgaatacagtgtggaagcaattgagcagttcagttactggtcttaccaatattgaggaagaaaactgtcagaggtatctcgatgagttgatgaaactgaaggctcaggcacatgcagagaataatgaattcattacatggaatgatatccaagcttgcgtggaccatgtgaacctggtggtgcaagaggaacatgagaggattttagccattggtttaattaatgaagccctggatgaaggtgatgcccaaaagactctgcaggccctacagattcctgcagctaaacttgagggagtccttgcagaagtggcccagcattaccaagacacgctgattagagcgaagagagagaaagcccaggaaatccaggatgagtcagctgtgttatggttggatgaaattcaaggtggaatctggcagtccaacaaagacacccaagaagcacagaagtttgccttaggaatctttgccattaatgaggcagtagaaagtggtgatgttggcaaaacactgagtgcccttcgctcccctgatgttggcttgtatggagtcatccctgagtgtggtgaaacttaccacagtgatcttgctgaagccaagaagaaaaaactggcagtaggagataataacagcaagtgggtgaagcactgggtaaaaggtggatattattattaccacaatctggagacccaggaaggaggatgggatgaacctccaaattttgtgcaaaattctatgcagctttctcgggaggagatccagagttctatctctggggtgactgccgcatataaccgagaacagctgtggctggccaatgaaggcctgatcaccaggctgcaggctcgctgccgtggatacttagttcgacaggaattccgatccaggatgaatttcctgaagaaacaaatccctgccatcacctgcattcagtcacagtggagaggatacaagcagaagaaggcatatcaagatcggttagcttacctgcgctcccacaaagatgaagttgtaaagattcagtccctggcaaggatgcaccaagctcgaaagcgctatcgagatcgcctgcagtacttccgggaccatataaatgacattatcaaaatccaggcttttattcgggcaaacaaagctcgggatgactacaagactctcatcaatgctgaggatcctcctatggttgtggtccgaaaatttgtccacctgctggaccaaagtgaccaggattttcaggaggagcttgaccttatgaagatgcgggaagaggttatcaccctcattcgttctaaccagcagctggagaatgacctcaatctcatggatatcaaaattggactgctagtgaaaaataagattacgttgcaggatgtggtttcccacagtaaaaaacttaccaaaaaaaataaggaacagttgtctgatatgatgatgataaataaacagaagggaggtctcaaggctttgagcaaggagaagagagagaagttggaagcttaccagcacctgttttatttattgcaaaccaatcccacctatctggccaagctcatttttcagatgccccagaacaagtccaccaagttcatggactctgtaatcttcacactctacaactacgcgtccaaccagcgagaggagtacctgctcctgcggctctttaagacagcactccaagaggaaatcaagtcgaaggtagatcagattcaagagattgtgacaggaaatcctacggttattaaaatggttgtaagtttcaaccgtggtgcccgtggccagaatgccctgagacagatcttggccccagtcgtgaaggaaattatggatgacaaatctctcaacatcaaaactgaccctgtggatatttacaaatcttgggttaatcagatggagtctcagacaggagaggcaagcaaactgccctatgatgtgacccctgagcaggcgctagctcatgaagaagtgaagacacggctagacagctccatcaggaacatgcgggctgtgacagacaagtttctctcagccattgtcagctctgtggacaaaatcccttatgggatgcgcttcattgccaaagtgctgaaggactcgttgcatgagaagttccctgatgctggtgaggatgagctgctgaagattattggtaacttgctttattatcgatacatgaatccagccattgttgctcctgatgcctttgacatcattgacctgtcagcaggaggccagcttaccacagaccaacgccgaaatctgggctccattgcaaaaatgcttcagcatgctgcttccaataagatgtttctgggagataatgcccacttaagcatcattaatgaatatctttcccagtcctaccagaaattcagacggtttttccaaactgcttgtgatgtcccagagcttcaggataaatttaatgtggatgagtactctgatttagtaaccctcaccaaaccagtaatctacatttccattggtgaaatcatcaacacccacactctcctgttggatcaccaggatgccattgctccggagcacaatgatccaatccacgaactgctggacgacctcggcgaggtgcccaccatcgagtccctgataggggaaagctctggcaatttaaatgacccaaataaggaggcactggctaagacggaagtgtctctcaccctgaccaacaagttcgacgtgcctggagatgagaatgcagaaatggatgctcgaaccatcttactgaatacaaaacgtttaattgtggatgtcatccggttccagccaggagagaccttgactgaaatcctagaaacaccagccaccagtgaacaggaagcagaacatcagagagccatgcagagacgtgctatccgtgatgccaaaacacctgacaagatgaaaaagtcaaaatctgtaaaggaagacagcaacctcactcttcaagagaagaaagagaagatccagacaggtttaaagaagctaacagagcttggaaccgtggacccaaagaacaaataccaggaactgatcaacgacattgccagggatattcggaatcagcggaggtaccgacagaggagaaaggccgaactagtgaaactgcaacagacatacgctgctctgaactctaaggccaccttttatggggagcaggtggattactataaaagctatatcaaaacctgcttggataacttagccagcaagggcaaagtctccaaaaagcctagggaaatgaaaggaaagaaaagcaaaaagatttctctgaaatatacagcagcaagactacatgaaaaaggagttcttctggaaattgaggacctgcaagtgaatcagtttaaaaatgttatatttgaaatcagtccaacagaagaagttggagacttcgaagtgaaagccaaattcatgggagttcaaatggagacttttatgttacattatcaggacctgctgcagctacagtatgaaggagttgcagtcatgaaattatttgatagagctaaagtaaatgtcaacctcctgatcttccttctcaacaaaaagttctacgggaagtaattgatcgtttgctgccagcccagaaggatgaaggaaagaagcacctcacagctcctttctaggtccttctttcctcattggaagcaaagacctagccaacaacagcacctcaatctgatacactcccgatgccacatttttaactcctctcgctctgatgggacatttgttacccttttttcatagtgaaattgtgtttcaggcttagtctgacctttctggtttcttcattttcttccattacttaggaaagagtggaaactccactaaaatttctctgtgttgttacagtcttagaggttgcagtactatattgtaagctttggtgtttgtttaattagcaatagggatggtaggattcaaatgtgtgtcatttagaagtggaagctattagcaccaatgacataaatacatacaagacacagaactaaaatgtcatgttattaacagttattaggttgtcatttaaaaataaagttcctttatatttctgtcccatcaggaaaactgaaggatatggggaatcattggttatcttccattgtgtttttctttatggacaggagctaatggaagtgacagtcatgttcaaaggaagcatttctagaaaaaaggagataatgtttttaaatttcattatcaaacttgggcaattctgtttgtgtaactccccgactagtggatgggagagtcccattgctaaaattcagctactcagataaattcagaatgggtcaaggcacctgcctgtttttgttggtgcacagagattgacttgattcagagagacaattcactccatccctatggcagaggaatgggttagccctaatgtagaatgtcattgtttttaaaactgttttatatcttaagagtgccttattaaagtatagatgtatgtcttaaaatgtgggtgataggaattttaaagatttatataatgcatcaaaagccttagaataagaaaagctttttttaaattgctttatctgtatatctgaactcttgaaacttatagctaaaacactaggatttatctgcagtgttgcagggagataattctgccttaaattgtctaaaacaaaaacaaaaccagccaacctatgttacacgtgagattaaaaccaattttttccccattttttctccttttttctcttgctgcccacattgtgcctttattttatgagccccagttttctgggcttagtttaaaaaaaaaatcaagtctaaacattgcatttagaaagcttttgttcttggataaaaagtcatacactttaaaaaaaaaaaaaaaactttttccaggaaaatatattgaaatcatgctgctgagcctctattttctttctttgatgttttgattcagtattcttttatcataaatttttagcatttaaaaattcactgatgtacattaagccaataaactgctttaatgaataacaaactatgtagtgtgtccctattataaatgcattggagaagtatttttatgagactctttactcaggtgcatggttacagccacagggaggcatggagtgccatggaaggattcgccactacccagaccttgttttttgttgtattttggaagacaggttttttaaagaaacattttcctcagattaaaagatgatgctattacaactagcattgcctcaaaaactgggaccaaccaaagtgtgtcaaccctgtttccttaaaagaggctatgaatcccaaaggccacatccaagacaggcaataatgagcagagtttacagctcctttaataaaatgtgtcagtaattttaaggtttatagttccctcaacacaattgctaatgcagaatagtgtaaaatgcgcttcaagaatgttgatgatgatgatatagaattgtggctttagtagcacagaggatgccccaacaaactcatggcgttgaaaccacacagttctcattactgttatttattagctgtagcattctctgtctcctctctctcctcctttgaccttctcctcgaccagccatcatgacatttaccatgaatttacttcctcccaagagtttggactgcccgtcagattgtttctgcacatagttgcctttgtatctctgtatgaaataaaaggtcatttgttc

SEQ ID NO: 1137 - DNA, 2781 bp, Homo sapiens
atggatatgtttcctctcacctgggttttcttagccctctacttttcaagacaccaagtgagaggccaaccagacccaccgtgcggaggtcgtttgaattccaaagatgctggctatatcacctctcccggttacccccaggactacccctcccaccagaactgcgagtggattgtttacgcccccgaacccaaccagaagattgtcctcaacttcaaccctcactttgaaatcgagaagcacgactgcaagtatgactttatcgagattcgggatggggacagtgaatccgcagacctcctgggcaaacactgtgggaacatcgccccgcccaccatcatctcctcgggctccatgctctacatcaagttcacctccgactacgcccggcagggggcaggcttctctctgcgctacgagatcttcaagacaggctctgaagattgctcaaaaaacttcacaagccccaacgggaccatcgaatctcctgggtttcctgagaagtatccacacaacttggactgcacctttaccatcctggccaaacccaagatggagatcatcctgcagttcctgatctttgacctggagcatgaccctttgcaggtgggagagggggactgcaagtacgattggctggacatctgggatggcattccacatgttggccccctgattggcaagtactgtgggaccaaaacaccctctgaacttcgttcatcgacggggatcctctccctgacctttcacacggacatggcggtggccaaggatggcttctctgcgcgttactacctggtccaccaagagccactagagaactttcagtgcaatgttcctctgggcatggagtctggccggattgctaatgaacagatcagtgcctcatctacctactctgatgggaggtggacccctcaacaaagccggctccatggtgatgacaatggctggacccccaacttggattccaacaaggagtatctccaggtggacctgcgctttttaaccatgctcacggccatcgcaacacagggagcgatttccagggaaacacagaatggctactacgtcaaatcctacaagctggaagtcagcactaatggagaggactggatggtgtaccggcatggcaaaaaccacaaggtatttcaagccaacaacgatgcaactgaggtggttctgaacaagctccacgctccactgctgacaaggtttgttagaatccgccctcagacctggcactcaggtatcgccctccggctggagctcttcggctgccgggtcacagatgctccctgctccaacatgctggggatgctctcaggcctcattgcagactcccagatctccgcctcttccacccaggaatacctctggagccccagtgcagcccgcctggtcagcagccgctcgggctggttccctcgaatccctcaggcccagcccggtgaggagtggcttcaggtagatctgggaacacccaagacagtgaaaggtgtcatcatccagggagcccgcggaggagacagtatcactgctgtggaagccagagcatttgtgcgcaagttcaaagtctcctacagcctaaacggcaaggactgggaatacattcaggaccccaggacccagcagccaaagctgttcgaagggaacatgcactatgacacccctgacatccgaaggtttgaccccattccggcacagtatgtgcgggtatacccggagaggtggtcgccggcggggattgggatgcggctggaggtgctgggctgtgactggacagactccaagcccacggtaaaaacgctgggacccactgtgaagagcgaagagacaaccaccccctaccccaccgaagaggaggccacagagtgtggggagaactgcagctttgaggatgacaaagatttgcagctcccttcgggattcaattgcaacttcgatttcctcgaggagccctgtggttggatgtatgaccatgccaagtggctccggaccacctgggccagcagctccagcccaaacgaccggacgtttccagatgacaggaatttcttgcggctgcagagtgacagccagagagagggccagtatgcccggctcatcagcccccctgtccacctgccccgaagcccggtgtgcatggagttccagtaccaggccacgggcggccgcggggtggcgctgcaggtggtgcgggaagccagccaggagagcaagttgctgtgggtcatccgtgaggaccagggcggcgagtggaagcacgggcggatcatcctgcccagctacgacatggagtaccagattgtgttcgagggagtgatagggaaaggacgttccggagagattgccattgatgacattcggataagcactgatgtcccactggagaactgcatggaacccatctcggcttttgcagtggacatcccagaaatacatgagagagaaggatatgaagatgaaattgatgatgaatacgaggtggactggagcaattcttcttctgcaacctcagggtctggcgccccctcgaccgacaaagaaaagagctggctgtacaccctggatcccatcctcatcaccatcatcgccatgagctcactgggcgtcctcctgggggccacctgtgcaggcctcctgctctactgcacctgttcctactcgggcctgagctcccgaagctgcaccacactggagaactacaacttcgagctctacgatggccttaagcacaaggtcaagatgaaccaccaaaagtgctgctccgaggcatga

SEQ ID NO: 1138 - DNA, 2212 bp, Homo sapiens
tgccggctgctcctcgaccaggcctccttctcaacctcagcccgcggcgccgacccttccggcaccctcccgccccgtctcgtactgtcgccgtcaccgccgcggctccggccctggccccgatggctctgtgcaacggagactccaagctggagaatgctggaggagaccttaaggatggccaccaccactatgaaggagctgttgtcattctggatgctggtgctcagtacgggaaagtcatagaccgaagagtgagggaactgttcgtgcagtctgaaattttccccttggaaacaccagcatttgctataaaggaacaaggattccgtgctattatcatctctggaggacctaattctgtgtatgctgaagatgctccctggtttgatccagcaatattcactattggcaagcctgttcttggaatttgctatggtatgcagatgatgaataaggtatttggaggtactgtgcacaaaaaaagtgtcagagaagatggagttttcaacattagtgtggataatacatgttcattattcaggggccttcagaaggaagaagttgttttgcttacacatggagatagtgtagacaaagtagctgatggattcaaggttgtggcacgttctggaaacatagtagcaggcatagcaaatgaatctaaaaagttatatggagcacagttccaccctgaagttggccttacagaaaatggaaaagtaatactgaagaatttcctttatgatatagctggatgcagtggaaccttcaccgtgcagaacagagaacttgagtgtattcgagagatcaaagagagagtaggcacgtcaaaagttttggttttactcagtggtggagtagactcaacagtttgtacagctttgctaaatcgtgctttgaaccaagaacaagtcattgctgtgcacattgataatggctttatgagaaaacgagaaagccagtctgttgaagaggccctcaaaaagcttggaattcaggtcaaagtgataaatgctgctcattctttctacaatggaacaacaaccctaccaatatcagatgaagatagaaccccacggaaaagaattagcaaaacgttaaatatgaccacaagtcctgaagagaaaagaaaaatcattggggatacttttgttaagattgccaatgaagtaattggagaaatgaacttgaaaccagaggaggttttccttgcccaaggtactttacggcctgatctaattgaaagtgcatcccttgttgcaagtggcaaagctgaactcatcaaaacccatcacaatgacacagagctcatcagaaagttgagagaggagggaaaagtaatagaacctctgaaagattttcataaagatgaagtgagaattttgggcagagaacttggacttccagaagagttagtttccaggcatccatttccaggtcctggcctggcaatcagagtaatatgtgctgaagaaccttatatttgtaaggactttcctgaaaccaacaatattttgaaaatagtagctgatttttctgcaagtgttaaaaagccacataccctattacagagagtcaaagcctgcacaacagaagaggatcaggagaagctgatgcaaattaccagtctgcattcactgaatgccttcttgctgccaattaaaactgtaggtgtgcagggtgactgtcgttcctacagttacgtgtgtggaatctccagtaaagatgaacctgactgggaatcacttatttttctggctaggcttatacctcgcatgtgtcacaacgttaacagagttgtttatatatttggcccaccagttaaagaacctcctacagatgttactcccactttcttgacaacaggggtgctcagtactttacgccaagctgattttgaggcccataacattctcagggagtctgggtatgctgggaaaatcagccagatgccggtgattttgacaccattacattttgatcgggacccacttcaaaagcagccttcatgccagagatctgtggttattcgaacctttattactagtgacttcatgactggtatacctgcaacacctggcaatgagatccctgtagaggtggtattaaagatggtcactgagattaagaagattcctggtatttctcgaattatgtatgacttaacatcaaagcccccaggaactactgagtgggagtaataaacttc

SEQ ID NO: 1139 - DNA, 1280 bp, Homo sapiens
tgccgcagcccccgcccgcccgcagagcttttgaaaggcggcgggaggcggcgagcgccatggccagtccgggctgcctgctgtgcgtgctgggcctgctactctgcggggcggcgagcctcgagctgtctagaccccacggcgacaccgccaagaagcccatcatcggaatattaatgcaaaaatgccgtaataaagtcatgaaaaactatggaagatactatattgctgcgtcctatgtaaagtacttggagtctgcaggtgcgagagttgtaccagtaaggctggatcttacagagaaagactatgaaatacttttcaaatctattaatggaatccttttccctggaggaagtgttgacctcagacgctcagattatgctaaagtggccaaaatattttataacttgtccatacagagttttgatgatggagactattttcctgtgtggggcacatgccttggatttgaagagctttcactgctgattagtggagagtgcttattaactgccacagatactgttgacgtggcaatgccgctgaacttcactggaggtcaattgcacagcagaatgttccagaattttcctactgagttgttgctgtcattagcagtagaacctctgactgccaatttccataagtggagcctctccgtgaagaattttacaatgaatgaaaagttaaagaagtttttcaatgtcttaactacaaatacagatggcaagattgagtttatttcaacaatggaaggatataagtatccagtatatggtgtccagtggcatccagagaaagcaccttatgagtggaagaatttggatggcatttcccatgcacctaatgctgtgaaaaccgcattttatttagcagagttttttgttaatgaagctcggaaaaacaaccatcattttaaatctgaatctgaagaggagaaagcattgatttatcagttcagtccaatttatactggaaatatttcttcatttcagcaatgttacatatttgattgaaagtcttcaatttgttaacagagcaaatttgaataattccatgattaaactgttagaataacttgctactcatggcaagattaggaagtcacagattcttttctataatgtgcctggctctgattcttcattatgtatgtgactatttatataacattagataattaaatagtgagacataaatagagtgctttttcatggaaaagccttcttatatctgaagattgaaaaataaatttactgaaatacaaaaaaaaaaaaaaa

SEQ ID NO: 1140 - DNA, 2084 bp, Homo sapiens
gcggccgcgtcgaccacgcatggagaattttaccacccagagacacgcgagtggccctgtgcaagtttcaactgcgcggggggcggggaattccgcagacaggattctagaatttatgtcttgtgtggtaacatttcagccggtgggtggcggggattaggcgtgaagcggttcagcaggcagaggttctcggacgccctccggcgaagccacctgttgatgcttttgactttctgtccttgttcctcgtcccatctggagcatttccaattctggttttgcggagcagcaggtctgagcttgtccggcgagggtgggagttggtcccggcggagatccagtgggaagagccggcggctgcccgggcaactcccccactggaaaggattctgaaagaaatgaagtcagccctcagaaatgaagttgactgcctgctggctttctgttgactggcccggagctgtactgcaagacccttgtgagcttccctagtctaagagtaggatgtctgctgaagtcatccatcaggttgaagaagcacttgatacagatgagaaggagatgctgctctttttgtgccgggatgttgctatagatgtggttccacctaatgtcagggaccttctggatattttacgggaaagaggtaagctgtctgtcggggacttggctgaactgctctacagagtgaggcgatttgacctgctcaaacgtatcttgaagatggacagaaaagctgtggagacccacctgctcaggaaccctcaccttgtttcggactatagagtgctgatggcagagattggtgaggatttggataaatctgatgtgtcctcattaattttcctcatgaaggattacatgggccgaggcaagataagcaaggagaagagtttcttggaccttgtggttgagttggagaaactaaatctggttgccccagatcaactggatttattagaaaaatgcctaaagaacatccacagaatagacctgaagacaaaaatccagaagtacaagcagtctgttcaaggagcagggacaagttacaggaatgttctccaagcagcaatccaaaagagtctcaaggatccttcaaataacttcaggctccataatgggagaagtaaagaacaaagacttaaggaacagcttggcgctcaacaagaaccagtgaagaaatccattcaggaatcagaagcttttttgcctcagagcatacctgaagagagatacaagatgaagagcaagcccctaggaatctgcctgataatcgattgcattggcaatgagacagagcttcttcgagacaccttcacttccctgggctatgaagtccagaaattcttgcatctcagtatgcatggtatatcccagattcttggccaatttgcctgtatgcccgagcaccgagactacgacagctttgtgtgtgtcctggtgagccgaggaggctcccagagtgtgtatggtgtggatcagactcactcagggctccccctgcatcacatcaggaggatgttcatgggagattcatgcccttatctagcagggaagccaaagatgttttttattcagaactatgtggtgtcagagggccagctggaggacagcagcctcttggaggtggatgggccagcgatgaagaatgtggaattcaaggctcagaagcgagggctgtgcacagttcaccgagaagctgacttcttctggagcctgtgtactgcggacatgtccctgctggagcagtctcacagctcaccatccctgtacctgcagtgcctctcccagaaactgagacaagaaagaaaacgcccactcctggatcttcacattgaactcaatggctacatgtatgattggaacagcagagtttctgccaaggagaaatattatgtctggctgcagcacactctgagaaagaaacttatcctctcctacacataagaaaccaaaaggctgggcgtagtggctcacacctgtaatcccagcactttgggaggccaaggagggcagatcacttcaggtcaggagttcgagaccagcctggccaacatggtaaacgctgtccctagtaaaaatac

SEQ ID NO: 1141 - DNA, 1307 bp, Homo sapiens
cctgagtcccgggaggaaagtgctcgcccattcctgacctgtgacacgctcactgcgaaggcaggttattagaagagtcccatgaaaggtggctccacggtcccagcgacatgcaggggctcctcttctccactcttctgcttgctggcctggcacagttctgctgcagggtacagggcactggaccattagatacaacacctgaaggaaggcctggagaagtgtcagatgcacctcagcgtaaacagttttgtcactggccctgcaaatgccctcagcagaagccccgttgccctcctggagtgagcctggtgagagatggctgtggatgctgtaaaatctgtgccaagcaaccaggggaaatctgcaatgaagctgacctctgtgacccacacaaagggctgtattgtgactactcagtagacaggcctaggtacgagactggagtgtgtgcataccttgtagctgttgggtgcgagttcaaccaggtacattatcataatggccaagtgtttcagcccaaccccttgttcagctgcctctgtgtgagtggggccattggatgcacacctctgttcataccaaagctggctggcagtcactgctctggagctaaaggtggaaagaagtctgatcagtcaaactgtagcctggaaccattactacagcagctttcaacaagctacaaaacaatgccagcttatagaaatctcccacttatttggaaaaaaaaatgtcttgtgcaagcaacaaaatggactccctgctccagaacatgtgggatgggaatatctaacagggtgaccaatgaaaacagcaactgtgaaatgagaaaagagaaaagactgtgttacattcagccttgcgacagcaatatattaaagacaataaagattcccaaaggaaaaacatgccaacctactttccaactctccaaagctgaaaaatttgtcttttctggatgctcaagtactcagagttacaaacccactttttgtggaatatgcttggataagagatgctgtatccctaataagtctaaaatgattactattcaatttgattgcccaaatgaggggtcatttaaatggaagatgctgtggattacatcttgtgtgtgtcagagaaactgcagagaacctggagatatattttctgagctcaagattctgtaaaaccaagcaaatgggggaaaagttagtcaatcctgtcatataataaaaaaattagtgagtaaaaaaaaaaaaaaaaaaaaaaaaaaaaaaaaaaaaaaaaaaaaaaaaaaagaaaaaaaaaaaaaaaaaaaa

SEQ ID NO: 1142 - DNA, 1433 bp, Homo sapiens
tgtgtgtgtgtgtgtgtgagcgcgcgcgcgcgcgcgcgtgtgtactcgtgcgtgtgcctgtgtgtgcctgggagtgacctcacagctgccggaacataaagactcacaggtccgcctcccaggctcaaagctggctctgcaggggacatgagaggcacaccgaagacccacctcctggccttctccctcctctgcctcctctcaaaggtgcgtacccagctgtgcccgacaccatgtacctgcccctggccacctccccgatgcccgctgggagtacccctggtgctggatggctgtggctgctgccgggtatgtgcacggcggctgggggagccctgcgaccaactccacgtctgcgacgccagccagggcctggtctgccagcccggggcaggacccggtggccggggggccctgtgcctcttggcagaggacgacagcagctgtgaggtgaacggccgcctgtatcgggaaggggagaccttccagccccactgcagcatccgctgccgctgcgaggacggcggcttcacctgcgtgccgctgtgcagcgaggatgtgcggctgcccagctgggactgcccccaccccaggagggtcgaggtcctgggcaagtgctgccctgagtgggtgtgcggccaaggagggggactggggacccagccccttccagcccaaggaccccagttttctggccttgtctcttccctgccccctggtgtcccctgcccagaatggagcacggcctggggaccctgctcgaccacctgtgggctgggcatggccacccgggtgtccaaccagaaccgcttctgccgactggagacccagcgccgcctgtgcctgtccaggccctgcccaccctccaggggtcgcagtccacaaaacagtgccttctagagccgggctgggaatggggacacggtgtccaccatccccagctggtggccctgtgcctgggccctgggctgatggaagatggtccgtgcccaggcccttggctgcaggcaacactttagcttgggtccaccatgcagaacaccaatattaacacgctgcctggtctgtctggatcccgaggtatggcagaggtgcaagacctagtcccctttcctctaactcactgcctaggaggctggccaaggtgtccagggtcctctagcccactccctgcctacacacacagcctatatcaaacatgcacacgggcgagctttctctccgacttcccctgggcaagagatgggacaagcagtcccttaatattgaggctgcagcaggtgctgggctggactggccatttttctgggggtaggatgaagagaaggcacacagagattctggatctcctgctgccttttctggagtttgtaaaattgttcctgaatacaagcctatgcgtgaaaaaaaaaaaaaaaaaaaaaaaaaaaaaa

SEQ ID NO: 1143 - DNA, 1955 bp, Homo sapiens
gcggcggccgcgggcggcgggcggcggaggtgcggggcctgctcccgccggcaccatggccaagaccgtggcctatttctacgaccccgacgtgggcaacttccactacggagctggacaccctatgaagccccatcgcctggcattgacccatagcctggtcctgcattacggtctctataagaagatgatcgtcttcaagccataccaggcctcccagcatgacatgtgccgcttccactccgaggactacattgacttcctgcagagagtcagccccaccaatatgcaaggcttcaccaagagtcttaatgccttcaacgtaggcgatgactgcccagtgtttcccgggctctttgagttctgctcgcgttacacaggcgcatctctgcaaggagcaacccagctgaacaacaagatctgtgatattgccattaactgggctggtggtctgcaccatgccaagaagtttgaggcctctggcttctgctatgtcaacgacattgtgattggcatcctggagctgctcaagtaccaccctcgggtgctctacattgacattgacatccaccatggtgacggggttcaagaagctttctacctcactgaccgggtcatgacggtgtccttccacaaatacggaaattacttcttccctggcacaggtgacatgtatgaagtcggggcagagagtggccgctactactgtctgaacgtgcccctgcgggatggcattgatgaccagagttacaagcaccttttccagccggttatcaaccaggtagtggacttctaccaacccacgtgcattgtgctccagtgtggagctgactctctgggctgtgatcgattgggctgctttaacctcagcatccgagggcatggggaatgcgttgaatatgtcaagagcttcaatatccctctactcgtgctgggtggtggtggttatactgtccgaaatgttgcccgctgctggacatatgagacatcgctgctggtagaagaggccattagtgaggagcttccctatagtgaatacttcgagtactttgccccagacttcacacttcatccagatgtcagcacccgcatcgagaatcagaactcacgccagtatctggaccagatccgccagacaatctttgaaaacctgaagatgctgaaccatgcacctagtgtccagattcatgacgtgcctgcagacctcctgacctatgacaggactgatgaggctgatgcagaggagaggggtcctgaggagaactatagcaggccagaggcacccaatgagttctatgatggagaccatgacaatgacaaggaaagcgatgtggagatttaagagtggcttgggatgctgtgtcccaaggaatttcttttcacctcttggttgggctggagggaaaaggagtggctcctagagtcctgggggtcaccccagggcttttgctgactctgggaaagagtctggagaccacatttggttctcgaaccatctacctgcttttcctctctctcccaaggcctgacaatggtacctattagggatggagatacagacaaggatagctatctgggacattattggcagtgggccctggaggccagtccctagccccccttgccccttatttcttccctgcttccctcgaacccagagatttttgagggatgaacgggtagacaaggactgagattgcctctgacttcctcctcccctgggttctgacttcttcctccccttgcttccagggaagatgaagagagagagatttggaaggggctctggctccctaacacctgaatcccagatgatgggaagtatgttttcaagtgtggggaggatatgaaaatgttctgttctcacttttggctttatgtccattttaccactgtttttatccaataaactaagtcggtattttttgtacctttaaaaaaaaaaaaaaaaaaaa

SEQ ID NO: 1144 - DNA, 5711 bp, Homo sapiens
cgcccctctccgcgggaggcgtcggggcccgcggctgggtggcgggtagttcccgccggctgtgcgcgcccgcctcggggctcgctctgagaggacgcggcggcagcggactcggagccctcggcgcgcaggcgggcggaccggccgagctgcgcggggctgcgcgccgcccctgctccgccgccaggccccgcgcggctcccgcgcccggcgctcccctttgtccgcgggccggagcggcggcggcagcggcggtgtccgagcggcggtcggagcctgctgcggcagttgaggcggcggcgcccctgcggctgtgcgccagcgccctcgcgccgaggcgatgccggaccagatctccgtgtcggaattcgtggccgagacccatgaggactacaaggcgcccacggcctccagcttcaccacccgcacggcgcagtgccggaacactgtggcggccatcgaggaggctttggacgtggaccggatggttctttacaaaatgaagaaatccgtgaaagcaatcaacagctctgggctggctcacgtggaaaatgaagagcagtacacccaggctctggagaagtttggcggcaactgtgtatgcagagatgacccagatttaggaagtgcgttcctgaagttctcagtgtttacaaaggagttgacagcacttttcaaaaacctgattcagaatatgaacaacataatctccttccctttggacagtttgctgaagggggacctgaaaggagtgaaaggggatctgaaaaagccttttgataaagcttggaaggactatgaaacaaaaataaccaagatagaaaaggagaaaaaggaacacgccaagctccatgggatgattcggactgaaataagcggagcggaaattgccgaagagatggaaaaggagaggcgcttcttccagctacagatgtgcgagtatctgctgaaggtcaacgaaatcaagattaaaaagggagtagatttacttcagaatctgatcaaatactttcatgcccaatgcaatttttttcaggatggactcaaagccgtggaaagcctcaaaccttccattgaaacgctgtctacggatcttcacacgatcaaacaggcccaggatgaagaaagaaggcagttgatacagcttcgagatattttgaaatccgcattgcaggttgaacagaaagaggactcccaaattcgtcagagcacagcttatagcttacatcagcctcagggaaacaaggaacatgggaccgagcggaacggcagcctctacaagaagagtgacgggatccgaaaagtgtggcagaaaaggaaatgttcagttaaaaatggttttctgaccatatcccatggtaccgctaaccggcctcctgcaaagctcaacctgctaacctgccaggtgaagaccaaccctgaggagaagaagtgctttgaccttatttcacatgacagaacttaccactttcaagctgaagatgaacaggaatgtcaaatatggatgtctgtgctgcaaaatagcaaagaagaagctttaaacaatgcatttaagggggatgacaatactggagaaaataacatcgtccaagaactgacaaaggagatcatctcagaagtgcagaggatgacgggcaatgacgtctgctgtgactgtggggcgccagatcctacatggctttccaccaacctgggcatcctgacctgcatcgagtgttccggaatccaccgagagctgggggttcattattccaggatgcagtccctgaccttagatgtactgggaacatctgagctgctgctcgccaagaatattgggaatgcaggctttaatgagatcatggaatgttgcctaccagctgaggactcagtcaaacccaacccaggcagcgacatgaatgcaagaaaggactacatcacagccaagtacatcgagaggagatacgcaaggaagaagcacgcggataacgcggcgaagcttcacagtctttgcgaggccgtcaaaacgagagatatttttggattgctccaagcttatgctgatggtgtggatcttacggaaaaaatcccactggccaacggacatgagccggatgaaacggccctccaccttgcagtcagatccgtggatcgaacctctcttcacattgtagactttttagttcagaacagtgggaacctggataaacagacagggaaaggcagcacagccctgcactactgctgcctgaccgacaatgccgagtgcctcaagttgctcctgcgggggaaggcctccatcgagatagcaaacgagtcaggagagactccgctggacattgccaagcgcctcaagcacgagcactgtgaggagctgctgacccaagccttatctggaagatttaattctcacgttcacgttgaatatgaatggcgactactccacgaagacctggatgaaagtgatgacgacatggatgagaaattgcagcccagtcccaaccggcgggaagaccggcccatcagcttctaccagctgggctccaaccagcttcagtctaacgctgtatctttggccagagatgctgcaaaccttgccaaggagaagcagagggctttcatgcccagcatcttgcagaatgagacttacggagccctcctgagtggcagcccacctcccgcccagcctgcagcccccagcaccaccagcgcccccccgcttcctccacggaatgttggcaaagttcagacagcctcctctgctaacaccctgtggaagacaaactctgtaagtgtggacggtggaagccggcagcgatcttcgtcagatccgccagctgtccatccaccgctgccccctcttcgcgtgacatctaccaatcccctgacccccacgccgcccccacccgttgccaagacgcccagcgtaatggaagccttgagccagccgagcaagcctgccccgcctgggatctcacagatcaggcccccacctctgcccccacagccgcccagccgcctcccgcagaagaagcctgcgccgggggctgacaagtccaccccactgaccaacaaaggccaaccgagaggacctgtggatctctctgcaacggaagctctgggtcctctgtccaatgctatggtcctgcagccccctgcacccatgcctaggaagtcgcaggcaaccaagttgaagcctaagcgggtgaaagcgctctataactgtgtggctgacaaccccgatgagctcaccttctccgagggggatgtgatcatcgtggacggggaggaggaccaggagtggtggattggccacattgatggagatcctggtcgcaaaggcgcattcccggtgtcatttgtgcactttatcgctgactgaattgctactgaacaaaagcattaacagttatgttcctgtttcgttattggtaccaaaactcttgccagataaccagtttcatgaactgtttgtatggcagcccatgttctctaatgccactgctctgttttaaaaactcagaggcaatttttacatatcagtaattgtttttataatttgtggttttcatgaaacattgctatgcatttattaggaaaaactgaatttcccaacaggtgaactgaaaagttattttaactattatacataatcaagatcctgcctctacggaattagctaaacctaaaaatgtttgcattaatgaataaattcttcctgcattccttggcccagttctggagttggtgacctttatcacaattattattttaggcggccagtgaactgctgcttcagaagtccatagcccagctctgaactttctcgataaaatgccatcagttcacctttaaagacacacattcctttgaaatccacccagtgtttaaaaagcaacttggaaatttacacattagcattgtactttctagccctaatttgtgaggttgcagctatcattatattctgcatgtatgtataacctgttgtgaacaatcatacttaacaaaactactgatggtttatgacaacgtagggtaactacagttcattctgttccaggttatataaaactgcatttcctgaatttggttaaaaactaaggatgatggattgcaaaacagttcttttaaattagtttatatgctttaggtgttttggaatttgccttcttgaacttcctgagtcacacagaaagcaactgtacacagtagaattctgtggcgcagaccatgctgtattaacacatcacttgctgtttcctactgagtgtaccactgccttcccttctagcccaggagaatgtttactcagtttagtgtcttgtatttctataatactccaacaggaatggtagtcacactgtcttgaaattgaatctgtccatctgtttataatcaagaacatatcagaaatatataggtcccaggtaatactcccaaacatcccactttttactgtttcaggccatcatatcattcttaagctacttggggtggtagtagaggattaggttgtctattataaaaccaaaactcattcgtttaatgaacttgactgtcatacctctatttagtaattgcgagggtaagattcatagtaggaatattggaaattttggcactctgagaataaataggcatatgatacccacttggacttttaacaaaagtaaaggaataaatttgcatataggcttggaaagtgaggcagcaatgctgttaactgcatttgttgtgatggtgcatttgattgaagcagcttgtctttattatgcaagactgtgtagagttttttttttttttggcattgtactttttgtttttgttataaaggaagacagaacaaactggaatgttttatgatgttgtatagcaatcgctttttacctttcaaagttccgggtaaaaatgtgttatatctgtagttttttgtttttgtttttttttaaagcactacatctgttttcactaattgttaatttctgtttgaacccttcatttaattttctcatagatttaagtaaacagatgtattttgcacagtgcacttatgtctattttaacaatcctcctgcatctgtattttatagtcagccttttgaccacctggtgccagctatataaggaataaagttgattcatatcaacattagaactccagtcccaaactaatctgtcaggttcactggtacataaatacctaggaaatatttttccagtctacaatttggtgctattgtgcagtaactaatagtactcttaccagaggagaaattatattaacgaccctgctaatatcctttcttagttatttgctccttgcaaattaaaaaagcaactaagagaaagaaaaacattgtagatatctatttatatttaaagtttatgtttcatgaactgcagctgcaggattctggcattttgcatgccattctccatcagatctgggatgatggctcagaacatgtacacagactaagagtaactgtgtgatctgttaaggggtggataacataatatgcagcttaggatgctattttgagatgtatgatattcagttcattcacctgattactttggttgcagcacaactgtatatattgtataaccgaaattgattattttcattgtccttaatgcagtgatttataattagagcatgtttaataagtttactcttcttgttaactagtcatttgactggaaaaaaataaaatacttttaaatgg

SEQ ID NO: 1145 - DNA, 1485 bp, Homo sapiens
ggtgggaatggcaggctgcgtcccactgctccagggcctggtcctggtcctcgccctccatcgtgtggagccctcagtatttctcccggcctccaaagcaaacgacgttctggtgaggtggaagcgtgcgggctcctatcttctggaagaactcttcgagggaaacttggaaaaagaatgttatgaagaaatctgtgtctatgaagaagcaagagaagtgtttgaaaatgaagtagtcactgatgaattctggagacgatataagggcggctccccgtgcatctcccagccctgcctccacaacggctcttgccaggacagcatctggggctacacctgcacctgctcccccggctatgagggcagcaactgcgagctggctaaaaatgaatgtcacccagagcggactgatgggtgtcaacacttctgcctcccaggacaggaatcctacacgtgcagctgtgctcagggctacaggcttggtgaggaccacaaacagtgtgtgccccacgaccagtgtgcctgcggggtgctgacctctgagaagcgtgcaccggatctacaggacctcccgtggcaggtaaagttaacaaattccgaaggaaaagacttctgtggtggtgttataatacgggaaaattttgtactgacaacagcaaaatgttcactgttacacaggaatattactgtaaaaacatattttaacagaacgagccaagacccgctgatgatcaagataacgcacgtccatgtgcacatgcggtatgacgcggacgcgggggagaatgacctgtcactgctggagctggagtggcccatccagtgcccaggtgcggggctccccgtgtgcacccctgagaaagacttcgctgagcacctcctcatcccacgcaccaggggcctcctcagcggctgggcacgcaatggcactgacctgggcaactcgctgaccacgcggcctgtcacacttgtggagggggaggagtgcgggcaggtcctgaatgtgactgtcaccaccaggacctactgtgagagaagcagcgtggcggccatgcactggatggatggaagtgtggtcaccagagaacacagaggctcctggtttctcacgggggtcctgggctcgcagccagtaggagggcaggctcacatggtccttgtcaccaaggtctccaggtactcactctggtttaaacagatcatgaactaactgaaactcagctagccagaatgaacaacacaaccggaagcgggattccaagctggcactgccactgtggagggcgctgaaacttcatcacacactgagaggccgtcacagccccagaccacccgcttggcccacgcagcagcagagccgccgtttgctgggttgtttaccgagcactgtgacctttctttccctggaactctttatctcaatagagaccttaaaagaaaacatgagatacgttaaataataaaataagataatctgtcagtcat

SEQ ID NO: 1146 - DNA, 1236 bp, Homo sapiens
acttggccttacactccgctcggctcaccatgtgtcactctcgcagctgccacccgaccatgaccatcctgcaggccccgaccccggccccctccaccatcccgggaccccggcggggctccggtcctgagatcttcaccttcgaccctctcccggagcccgcagcggcccctgccgggcgccccagcgcctctcgcgggcaccgaaagcgcagccgcagggttctctaccctcgagtggtccggcgccagctgccagtcgaggaaccgaacccagccaaaaggcttctctttctgctgctcaccatcgtcttctgccagatcctgatggctgaagagggtgtgccggcgcccctgcctccagaggacgcccctaacgccgcatccctggcgcccacccctgtgtcccccgtcctcgagccctttaatctgacttcggagccctcggactacgctctggacctcagcactttcctccagcaacacccggccgccttctaactgtgactccccgcactccccaaaaagaatccgaaaaaccacaaagaaacaccaggcgtacctggtgcgcgagagcgtatccccaactgggacttccgaggcaacttgaactcagaacactacagcggagacgccacccggtgcttgaggcgggaccgaggcgcacagagaccgaggcgcatagagaccgaggcacagcccagctggggctaggcccggtgggaaggagagcgtcgttaatttatttcttattgctcctaattaatatttatatgtatttatgtacgtcctcctaggtgatggagatgtgtacgtaatatttattttaacttatgcaagggtgtgagatgttccccctgctgtaaatgcaggtctcttggtatttattgagctttgtgggactggtggaagcaggacacctggaactgcggcaaagtaggagaagaaatggggaggactcgggtgggggaggacgtcccggctgggatgaagtctggtggtgggtcgtaagtttaggaggtgactgcatcctccagcatctcaactccgtctgtctactgtgtgagacttcggcggaccattaggaatgagatccgtgagatccttccatcttcttgaagtcgcctttagggtggctacgaggtagaggggtgggggttggtgggctgtcacggagcgactgtcgagatcgcctagtatgttctgtgaacacaaataaaattgatttactgtctgc

SEQ ID NO: 1147 - DNA, 1810 bp, Homo sapiens
cgcgcttgtggagctggtggcggcgctccgcaggggctcggctgttttccgcgcggcaggcgcggccatggcgcagctgggaaagctgctcaaggagcagaagtacgaccggcagctgaggttgtggggtgatcatgggcaagaggctttagaatctgctcatgtttgcctaataaatgcaacagccacaggaactgaaattcttaaaaacttggtactaccaggtattggttcgtttacaattattgatggaaatcaggtcagcggagaagatgctggaaacaatttcttccttcaaagaagcagtatcggcaagaaccgagctgaagctgccatggaattcttacaagaattaaatagcgatgtctctggaagttttgtggaagagagtccagaaaaccttctagacaatgatccctcatttttctgtaggtttactgttgtagttgcaactcagcttcctgaaagcacttcactacgcttagcagatgtcctctggaattcccagattcctcttttgatctgtaggacatatggactagttggttatatgaggatcattataaaagaacatccagtaatagaatctcatccagataatgcattagaggatctacgactagataagccatttcctgaactgagagaacattttcagtcctatgatttggatcatatggaaaaaaaggaccacagtcatactccatggattgtgatcatagctaaatatttagcacagtggtatagtgaaacaaatggacgaatacctaaaacgtataaagaaaaagaggacttcagagatttgattagacaaggaattctaaaaaatgaaaatggggctccagaagatgaagagaattttgaagaagctattaaaaatgtgaacacagcactaaatacaactcagatcccaagcagtattgaagatatatttaatgatgatcgctgcataaatatcaccaaacagactccatcattttggattttagctcgtgccttaaaggaatttgtggccaaagagggtcaaggaaatttacctgttcgaggcacaattcctgatatgattgcagattcaggcaaatatataaaactgcaaaacgtttaccgtgaaaaagcaaagaaagatgctgccgctgtgggtaatcatgttgccaaattgctgcagtccattggccaggcaccagagtccatttcagagaaagaattaaaattactctgcagcaattctgcatttcttcgagtggtaagatgtcgatccttagctgaagaatatggtttggatacaattaacaaggatgaaattatttctagcatggacaatccagataatgaaatagtgttgtacttaatgttacgggctgttgatagatttcataaacaacagggtagatatccaggagtatctaactatcaagttgaagaagatataggaaagttgaagtcttgtctcactggcttccttcaggaatatggtttatctgtaatggtgaaagatgattatgtccacgaattttgccgatatggagctgctgagccacataccattgctgcattcttggggggagctgctgctcaagaggtcatcaaaataatcaccaaacaatttgtaatttttaataatacttacatttacagtggcatgtcacaaacttcagcaactttccagttgtagagtaagcaagcaccttaagtagtgtgttaatgattgaaactgtaattgccttcgggttgtgctttagtctgtaaaattctaaaggagagctgctaaattgttttcttaataaacatttttctcatttgtaaaaaaaaa

SEQ ID NO: 1148 - DNA, 1416 bp, Homo sapiens
cgttgaagacattgtcgggtggtgggagaggtatcggcaggggcagcgctgccgccggggcctggggctgacccgtctgacttcccgtccgtgccgagcccactcgagccgcagccatgtctggggacgagatgatttttgatcctactatgagcaagaagaaaaagaagaagaagaagccttttatgttagatgaggaaggggatacccaaacagaggaaacccagccttcagaaacaaaagaagtggagccagagccaactgaggacaaggatttggaagctgatgaagaggacactaggaaaaaagatgcttctgatgatctagatgacttgaacttctttaatcaaaagaaaaagaagaaaaaaactaaaaagatatttgatattgatgaagctgaagaaggtgtaaaggatcttaagattgaaagtgatgttcaagaaccaactgaaccagaggatgaccttgacattatgcttggcaataaaaagaagaaaaagaagaatgttaagttcccagatgaggatgaaatactagagaaagatgaagctctagaagatgaagacaacaaaaaagatgatggtatctcattcagtaatcagacaggccctgcttgggcaggctcagaaagagactacacatacgaggagctgctgaatcgagtgttcaacatcatgagggaaaagaatccagatatggttgctggggagaaaaggaaatttgtcatgaaacctccacaagtcgtccgagtaggaaccaagaaaacttcttttgtcaactttacagatatctgtaaactattacatcgtcagcccaaacatctccttgcatttttgttggctgaattgggtacaagtggttctatagatggtaataaccaacttgtaatcaaaggaagattccaacagaaacagatagaaaatgtcttgagaagatatatcaaggaatatgtcacttgtcacacatgccgatcaccggacacaatcctgcagaaggacatacgactctatttcctacagtgcgaaacttgtcattctagatgttctgttgccagtatcaaaaccggcttccaggctgtcacgggcaagcgagcacagctccgtgccaaagctaactaatttgctaatcactgattttgcaaagcttgttgtggagatgtggctggacaggtttgccatcagagtggatataccgttgtattaaaaacaagataaaaaagctgccaagatttttggcgagtggttggtctgaagtccttgcaagacgctgatgctcaagctgttgacatactcattgcctactttaacacctgtcagagaaacgtgatatggggtaaggaggtgcttttttaaaatcgttcatagacttctgtaaaatgcaagataaattaaagttattataacagtgattctttca

SEQ ID NO: 1149 - DNA, 1932 bp, Homo sapiens
atggagacgagctcgagctgcgagagtcttggctcccagccggcggcggctcggccgcccagcgtggactccttgtccagtgcctccacttctcattcagagaattcagtgcatacaaaatcagcttctgttgtatcatcagattccatttcaacttctgccgacaacttttctcctgatttgagggtcctgagggagtctaacaagttagcagaaatggaagaaccacccttgcttccaggagaaaatattaaagacatggccaaagatgtaacttatatatgtccattcactggcgctgtacgaggaactctgactgtcacgaattataggttatatttcaaaagcatggaacgggatcccccatttgttttagatgcttcccttggtgtgataaatagagtagaaaaaattggtggtgcttctagtcgaggtgaaaattcttatggactagaaactgtgtgtaaggatattaggaatttacgatttgctcataaacctgaggggcggacaagaagatccatatttgagaatctaatgaaatatgcatttcctgtctctaataacctgcctctttttgcttttgaatacaaagaagtattccctgaaaatgggtggaagctatatgaccctcttttagagtatagaaggcagggaattccaaatgaaagctggagaataacaaagataaatgaacgatatgaactttgtgatacataccctgccctcctggttgtgccagcaaatattcctgatgaagaattaaagagagtggcatccttcagatcaagaggccgtatcccagttttatcatggattcatcctgaaagtcaagccacaatcactcggtgtagccagcccatggttggagtgagtggaaagcgaagcaaagaagatgaaaaataccttcaagctatcatggattccaatgcccagtctcacaaaatctttatatttgatgcccggccaagtgttaatgctgttgccaacaaggcaaagggtggaggttatgaaagtgaagatgcctatcaaaatgctgaactagttttcctggatatccacaatattcatgttatgagagaatcattacgaaaacttaaggagattgtgtaccccaacattgaggaaactcactggttgtctaacttggaatctactcattggctagaacatattaagcttattcttgcaggggctcttaggattgctgacaaggtagagtcagggaagacgtctgtggtagtgcattgcagtgatggttgggatcgcacagctcagctcacttcccttgccatgctcatgttggatggatactatcgaaccatccgaggatttgaagtccttgtggagaaagaatggctaagttttggacatcgatttcaactaagagttggccatggagataagaaccatgcagatgcagacagatcgcctgtttttcttcaatttattgactgtgtctggcagatgacaagacagtttcctaccgcatttgaattcaatgagtattttctcattaccattttggaccacctatacagctgcttattcggaacattcctctgtaatagtgaacaacagagaggaaaagagaatcttcctaaaaggactgtgtcactgtggtcttacataaacagccagctggaagacttcactaatcctctctatgggagctattccaatcatgtcctttatccagtagccagcatgcgccacctagagctctgggtgggatattacataaggtggaatccacggatgaaaccacaggaacctattcacaacagatacaaagaacttcttgctaaacgagcagagcttcagaaaaaagtagaggaactacagagagagatttctaaccgatcaacctcatcctcagagagagccagctctcctgcacagtgtgtcactcctgtccaaactgttgtataa

SEQ ID NO: 1150 - DNA, 1985 bp, Homo sapiens
  misc_feature (1822)..(1822): n is a, c, g, or t
accaggcaaatattccattcagcattacaaagatggatgttcttcagttcctagaaggaatcccagtggatgaaaatgctgtacatgttcttgttgataacaatgggcaaggtctaggacaggcattggttcagtttaaaaatgaagatgatgcacatggcccactgcgtgaccttggttcagctgtccatttcctgtgaccatctcattgacaaggacatcggctccaagtctgacccactctgcgtccttttacaggatgtgggagggggcagctgggctgagcttggccggactgaacgggtgcggaactgctcaagccctgagttctccaagactctacagcttgagtaccgctttgagacagtccagaagctacgctttggaatctatgacatagacaacaagacgccagagctgagggatgatgacttcctagggggtgctgagtgttccctaggacagattgtgtccagccaggtactgactctccccttgatgctgaagcctggaaaacctgctgggcgggggaccatcacggtctcagctcaggaattaaaggacaatcgtgtagtaaccatggaggtagaggccagaaacctagataagaaggacttcctgggaaaatcagatccatttctggagttcttccgccagggtgatgggaaatggcacctggtgtacagatctgaggtcatcaagaacaacctgaaccctacatggaagcgtttctcagtccccgttcagcatttctgtggtgggaaccccagcacacccatccaggtgcaatgctccgattatgacagtgacgggtcacatgatctcatcggtaccttccacaccagcttggcccagctgcaggcagtcccggctgagtttgaatgcatccaccctgagaagcagcagaaaaagaaaagctacaagaactctggaactatccgtgtcaagatttgtcgggtagaaacagagtactcctttctggactatgtgatgggaggctgtcagatcaacttcactgtgggcgtggacttcactggctccaatggagacccctcctcacctgactccctacactacctgagtccaacaggggtcaatgagtacctgatggcactgtggagtgtgggcagcgtggttcaggactatgactcagacaagctgttccctgcatttggatttggggcccaggttccccctgactggcaggtctcgcatgaatttgccttgaatttcaaccccagtaacccctactgtgcaggcatccagggcattgtggatgcctaccgccaagccctgccccaagttcgcctctatggccctaccaactttgcacccatcatcaaccatgtggccaggtttgcagcccaggctgcacatcaggggactgcctcgcaatacttcatgctgttgctgctgactgatggtgctgtgacggatgtggaagccacacgtgaggctgtggtgcgtgcctcgaacctgcccatgtcagtgatcattgtgggtgtgggtggtgctgactttgaggccatggagcagctggacgctgatggtggacccctgcatacacgttctgggcaggctgctgcccgcgacattgtgcagtttgtaccctaccgccggttccagaatgcccctcgggaggcattggcacagaccgtgctcgcagaagtgcccacacaactggtctcatacttcagggcccagggttgggccccgctcaagccacttccaccctcagccaaggatcctgcacaggccccccaggcctaggttcccttggaggctgtggcaagtcctcaatcctgtgtcccagaggtccctntgggccacaacccaacccttctcactctcctcagtgctagcactttgtattttttgatacttttatacttgtttctgcttttgctgctcttgatcccacctttgctcctgacaaccctcattcaataaagaccagtgaagaccaaaaaaaaaaaaaaaaaaaa

SEQ ID NO: 1151 - DNA, 2443 bp, Homo sapiens
ccacacttcccgcctccctaaaacgcacaccccgctagccatgggcagccgcgaccacctgttcaaagtgctggtggtgggggacgccgcagtgggcaagacgtcgctggtgcagcgatattcccaggacagcttcagcaaacactacaagtccacggtgggagtggattttgctctgaaggttctccagtggtctgactacgagatagtgcggcttcagctgtgggatattgcagggcaggagcgcttcacctctatgacacgattgtattatcgggatgcctctgcctgtgttattatgtttgacgttaccaatgccactaccttcagcaacagccagaggtggaaacaggacctagacagcaagctcacactacccaatggagagccggtgccctgcctgctcttggccaacaagtgtgatctgtccccttgggcagtgagccgggaccagattgaccggttcagtaaagagaacggtttcacaggttggacagaaacatcagtcaaggagaacaaaaatattaatgaggctatgagagtcctcattgaaaagatgatgagaaattccacagaagatatcatgtctttgtccacccaaggggactacatcaatctacaaaccaagtcctccagctggtcctgctgctagtagtgtttggcttattttccatcccagttctgggaggtcttttaagtctcttccctttggttgcccacctgaccattttattaagtacatttgaattgtctcctgactactgtccagtaaggaggcccattgtcacttagaaaagacacctggaacccatgtgcatttctgcatctcctggattagcctttcacatgttgctgactcacattagtgccagttagtgccttcggtgtaagatcttctcatcagccctcaatttgtgatccggaattttgtgagaaggattagaaatcagcacctgcgttttagagatcataattctcacctacttctgagcttatttttccatttgatattcattgatatcatgacttccaattgagaggaaaatgagatcaaatgtcatttcccaaatttcttgtaggccgttgtttcagattctttctgtcttggaatgtaaacatctgattctggaatgcagaaggaggggtctgggcatctgtggatttttggctactagaagtgtcccagaagtcactgtatttttgaaacttctaacgtcataattaagtttctcttgtcttggcatcaagaatagtcaagttttttggccgggcatggtggctcatgcctgtaatcccagcacttggggaggccaaggcaggcggatcacatgaggccaggaattcgagaccaacctggtcagcatggcaaaaccccgtctctactaaaagtacaaaaattagccaggcgtgatggcacgtgtctgtaatcccagctactctggagactgaggtgggagaatcgcttgagactgggaggcagaggttgcagtgaaccgagatcatgccaccgcacttcagcctgggtgacagagaaggactccgtctcaaaaaaaaaagaaaaaagaatagtcatttttaaactacctatctcatgcaatgaaagcattttcttccacaaagagcttaatcctcatgataggattgcctagtgtctcccatttgcaggtttctgggttgatgtcttaatgcataatactgcaagtgacatcagctggctgtgatgcttcgaaataggtctgctcctcacagctttgggaatctgaatggaagaagaaaagagagaagttaacaacctccactggggcaactttgtgaacatgtaggcacttagtcataggaaacatattatgtgcaggtcctagcctggggtaggaaagtagatagacagaaaatcattaggtaatttaagtactaaattgggcagggctttttagtatcaaatcactactagaccgtttaatttgttaaattatctctaggatggtgatttataacctacccaaagttatcgatattcttactaaactctgaggcctgaagttctgtgatagaccttaaataagtgtcctaagtcagtggttcccaaatctggctggtcgggaatacctgggaagtttgttaaaattttttaaaaatgttttaagatttttgggtcctgagccaggcgtggtggctcacacctgtaatcccagcactttgggaggctgaggcaggtggatcgcctgaggtcaggagttcaagatcaacctggccaacatactgaaaccccgtctctactaaaaataagaaaaattagctgggcgtggtggcgggcacctgtaatcccagctacttgggaggctgaggcaggagaatcacttgaacctgggagttagaggttgcagtgagctgagatcacaccattgcgcttcagcctgggcaacaagagtgaaactccatctcc

SEQ ID NO: 1152 - DNA, 2238 bp, Homo sapiens
gtgacttccttgttgtgagccccggcccggcagtgtcccgactcgtagccccgctgttcttaatccgggccgctagcctgagtctaggtcgcagccgcagccccaccccgtcggtcaccttttcagcgcaggtcctttccccgcacgccctgcgctccctaacatgcccaaccccagcagcacctcctctccctaccccctccctgaggaaattaggaacctgttggcagatgttgaaacatttgtagcagatatactgaaaggagaaaatttatccaagaaagcaaaggaaaagagagaatcccttattaagaagataaaagatgtaaagtctatctatcttcaggaatttcaagacaaaggtgatgcagaagatggggaagaatatgatgacccttttgctgggcctccagacactatttcattagcctcagaacgatatgataaagacgatgaagccccctctgatggagcccagtttcctccaattgcagcacaagaccttccttttgttctaaaggctggctaccttgaaaaacgcagaaaagatcacagctttctgggatttgaatggcagaaacggtggtgtgctctcagtaaaacggtattctattattatggaagtgataaagacaaacaacagaaaggtgaatttgcaatagatggctacagtgtcagaatgaataacactctaagaaaggatggaaagaaagattgctgttttgaaatctctgctcctgataaacgtatatatcagtttacagcagcttctcccaaagatgctgaagaatgggtacagcagctgaaatttgtattgcaagatatggaatctgatattattcctgaggattatgatgagagaggagaattatatgatgatgttgatcatcctctaccaataagcaatccactaacaagcagtcaaccaatagatgatgaaatttatgaagaacttccagaagaagaagaggacagtgctccagtgaaagtggaagaacaaaggaagatgagtcaggatagtgtccatcacacctcaggggataagagcactgattatgctaatttttaccagggattgtgggattgtactggagctttttctgatgagttgtcatttaagcgtggtgatgtgatttacattcttagcaaggaatacaatagatatggctggtgggtaggagaaatgaagggagccattggcttggtgcctaaagcctacataatggagatgtatgatatttgagagtcctggaaaaggaaaattcttctgcttgtctgcaaatgctttggatttagaagcgtcatgaaagcacgagtgacagctcctaacctctccttgttttattaaacattacttatctttgactgttattttatgcagtcgctcattaaaatattcctctgatgtgaaattaaatgaaggatattaatgtaaattagatgcaaccagttaagttatacctgttgctattttgcaaagaaataattatagtttttatttacccatttgatttgtgtgaagaattcatcactattttatacgtaacatatagtctactatagcatagtatgctactattgctacttctggtgtgatttgtaatgtttcttaatcattggacatcaattatttttagagagtaatgtataatttcatagcattttaaatttagtgtatcatgcgagttttttttggtagatgctgaagaatgtggttgctaaacaaagaatgctaaagaatgttcaaactttatagataactttattgttattatttattttcacacatttaattcctattaagtacagccgcaagaaagaaaaaatgatgaagttgcaaatggcagtgtgctgtcacctgcaacagaagtgcgtaccagaagtatgactcatgcaaagcattttaccgtacaaatatcctggtgcgatgatgggcctggcaacattttctactgtacttttgtttaaatttaatgaaacaaaaaattcctaagaaataccaccctaccactaacaaaatggtataaagaatctcccagccaggccaacatggtgaaaccctgtctctactaaaaattagccaagtgtggtaatgttcacctgcagtcccagctacttgggaggccaaggcacgagaattgcttgaacaaggtaggcagaggttgcagtgagccaagatcgcgccactgcactccagcctgggcgacagagtgagactccatctcagaaaaaaaaaaa

SEQ ID NO: 1153 - DNA, 3145 bp, Homo sapiens
gcggtcacgccgagccagcgcctgggcctggaaccgggccgtagccccccagtttcgcccaccacctccctaccatggacccccgcaaagtgaacgagcttcgggcctttgtgaaaatgtgtaagcaggatccgagcgttctgcacaccgaggaaatgcgcttcctgagggagtgggtggagagcatgggtggtaaagtaccacctgctactcagaaagctaaatcagaagaaaataccaaggaagaaaaacctgatagtaagaaggtggaggaagacttaaaggcagacgaaccatcaagtgaggaaagtgatctagaaattgataaagaaggtgtgattgaaccagacactgatgctcctcaagaaatgggagatgaaaatgcggagataacggaggagatgatggatcaggcaaatgataaaaaagtggctgctattgaagccctaaatgatggtgaactccagaaagccattgacttattcacagatgccatcaagctgaatcctcgcttggccattttgtatgccaagagggccagtgtcttcgtcaaattacagaagccaaatgctgccatccgagactgtgacagagccattgaaataaatcctgattcagctcagccttacaagtggcgggggaaagcacacagacttctaggccactgggaagaagcagcccatgatcttgcccttgcctgtaaattggattatgatgaagatgctagtgcaatgctgaaagaagttcaacctagggcacagaaaattgcagaacatcggagaaagtatgagcgaaaacgtgaagagcgagagatcaaagaaagaatagaacgagttaagaaggctcgagaagagcatgagagagcccagagggaggaagaagccagacgacagtcaggagctcagtatggctcttttccaggtggctttcctgggggaatgcctggtaattttcccggaggaatgcctggaatgggagggggcatgcctggaatggctggaatgcctggactcaatgaaattcttagtgatccagaggttcttgcagccatgcaggatccagaagttatggtggctttccaggatgtggctcagaacccagcaaatatgtcaaaataccagagcaacccaaaggttatgaatctcatcagtaaattgtcagccaaatttggaggtcaagcgtaatgtccttctgataaataaagcccttgctgaaggaaaagcaacctagatcaccttatggatgtcgcaataatacaaaccagtgtacctctgaccttctcatcaagagagctggggtgctttgaagataatccctacccctctcccccaaatgcagctgaagcattttacagtggtttgccattagggtattcattcagataatgttttcctactaggaattacaaactttaaacactttttaaatcttcaaaatatttaaaacaaatttaaagggcctgttaattcttatatttttctttactaatcattttggatttttttctttgaattattggcagggaatatacttatgtatggaagattactgctctgagtgaaataaaagttattagtgcgaggcaaacataactcatttgaggataaagtttgtgttggatatgtggttcctgatgcattttgacttgtctttttaaatgctttatctttttctttaaagatttatttcaataaaactaattgggaccacccgtatttcagtaggacctgggtagggattggaagtacttggcagggcagcagcaatcttgctgtgtttgatataacatgcatccttgggcaggttgcccttaaatcttacactgtggtgaagggatgttttttttgtaatgctgcagtagagttggagtacttagttctcttgttgtccagtatatctaataagtgtttttcatattatttccacgtaagggaaataaggtagtacttttctttttatatttctatgcttaaaattctctttcctagtcaaaaattgcccaaatctgtgtttgctttctgcttgctacatttgtctcccttacttttcttgagctaaagacaggctttttccaccggcatcatcactgctatcatcattaacagcgtaattatacaagcatatttaatgctgagtttaatttaatatgtaatacatatggtaattgtagggtaatacccacaacaactgtagtttcttacttggccaagagaatgcttatttaagtgttagacttccattctggcaaaatcttgccttatcagaagacattggaaagagggattccctttggtgtttggtcttctacttagaaaaacctattgcagttagtttatcttgtagtattcatctttgtattctgaagataaggtttgaattaaattgatacacacagaggggaaccgattttttttatccaatgtgaattataaatgagataatccacagttattcattgtggagttgttgagactatgaaagactcattgtctttgtattcagctcttaaatagtgtaactatatccccacctctgcttgctttctttccctcccctccaatgataaagaaaatgataaattttctgttgtgcattcaattcttattttaaataagactaagtataggcattgtacctgacattgctacgtttctaccagtgtttcaatttaaagtgctagtgtttaaaaacattttcaagggataaggccttctgtactttgcttatttgaagaatcagtggtaggagcagtgaagtaaattctatggagtacatttctaaaataccacatttctgaaatcataaataagtttattcaggttctaaccctttgctgtacacaagcagacagaaatgcatctgttacataaatgagaaaaagctattatgctgatggagcatgctttttaaatcctttaaaaacactcaccatataaacttgcatttgagcttgtgtgttcttttgttaatgtgtagagttctcctttctcgaaattgccagtgtgtacttggcttaactcaagaacagtttcttctggattccttatttgatttatttaacctaattatattctaatattgcaaatattaccataagtgggtaaaagtaaaattcctcttctgaaaaaaaaaaaaaaaaaaaaaa

SEQ ID NO: 1154 - DNA, 2738 bp, Homo sapiens
cgcggaattccgcggaattccgcgccgccgccgccggcagaccccgcgctccggctccggctcggctcgctcggctccggtgcgcgccgaggccatgcagcgccggggcgccctgttcggcatgccgggcggcagcggaggcaggaagatggctgcaggagacatcggcgagctgctagtgccccacatgcccacgatccgcgtgcccaggtccggcgacagggtctacaagaacgagtgcgccttctcctacgactctcccaattctgaaggtggactctatgtatgcatgaatacatttttggcctttggaagggaacatgttgaaagacattttcgaaaaactggacagagtgtatacatgcacctgaaaagacatgcgcgagagaaggtaagaggggcgtctggtggagcgttaccaaaaaggaggaattccaagatttttttagatctagatactgatgacgatttaaatagcgacgattatgaatatgaagatgaagccaaacttgttatattcccagatcactatgaaatagcactaccaaatattgaggagttaccagccctggtaacaattgcttgtgatgcagttctcagctcaaaatctccatacagaaagcaggacccagacacgtgggaaaatgaattgccagtatctaaatatgccaacaacctcacccagctggacaatggagtcaggattcctccaagtggttggaagtgtgccagatgcgacctgcgagaaaacctctggttgaatctgactgacggctctgtcctgtgtggaaagtggttctttgacagctctgggggcaacgggcatgcgctggagcattacagagacatgggctacccactagccgtgaaactgggaaccatcactcctgacggggcagatgtttattcttttcaagaagaagaacctgttttggatcctcatttggccaagcacttagcgcattttggaattgatatgcttcatatgcatgggacagagaatgggctccaggacaatgacatcaagctgagggtcagtgagtgggaagtgatccaggagtcgggcacgaaactgaagccaatgtatggtcctggctacacgggtctgaagaacctgggcaacagctgctatctcagctctgtcatgcaggccatcttcagcatcccagaattccagagagcgtatgtaggaaaccttcccagaatatttgactactcgcctttagatccaacacaagatttcaacacacagatgactaagttaggacatggccttctctcaggccagtattcaaagcctccggtgaaatctgaactcattgaacaggtgatgaaggaggagcacaagccacagcagaacgggatctctccgcgcatgtttaaggcctttgtaagcaagagccacccggaattctcctctaacaggcagcaagatgcccaggaattcttcttgcacctggtgaatctagtagagaggaaccgcatcggctcagaaaacccaagcgatgtttttcgttttttggtggaagaacgcattcagtgctgtcagacccggaaagtccgctacacggagagggtggattacctgatgcagttacctgtggccatggaggcggcaaccaacaaggatgaactgatcgcttatgaactaacgagaagggaagcagaagcaaacagaagaccccttcctgagttggtacgtgccaagataccatttagtgcctgccttcaggccttctctgaaccagaaaatgttgatgatttctggagcagtgccctacaagcaaagtctgcgggtgtgaaaacatctcgctttgcttcattccctgaatacttggtagtgcagataaagaagttcacttttggtcttgactgggttcccaaaaaatttgatgtttctattgatatgccagacctacttgatatcaaccatctccgagccagggggttacagccaggagaggaagaacttccagacatcagcccccccatagtcattcctgatgactcaaaagatcgcctgatgaaccaattgatagacccatcagacatcgatgagtcatcagtgatgcagctggccgagatgggtttcccgctggaagcatgtcgcaaggctgtgtacttcactggaaatatgggcgccgaggtggccttcaactggatcattgttcacatggaagagccagattttgctgagccgctgaccatgcctggttatggaggggcagcttctgctggagcctctgtttttggtgcttctggactggataaccaacctccagaggaaatcgtagctatcatcacctccatgggatttcagcgaaatcaggctattcaggcactacgagcaacgaataataacctggaaagagcactggattggatctttagccaccctgagtttgaagaagacagtgattttgtgattgagatggagaataatgccaatgcaaacattatttctgaggccaagcccgaaggacctagagtcaaggatggatctggaacatatgagctatttgcattcatcagtcacatgggaacatccacaatgagtggtcattacatttgccatatcaaaaaggaaggaagatgggtgatttacaatgaccacaaagtttgtgcctcagaaaggccccctaaagacctgggctacatgtacttttaccgcaggataccaagctaaacctcaaatataaaaattggcgaaaagaagccatacgcctttttaatttgcc

SEQ ID NO: 1155 - DNA, 1721 bp, Homo sapiens
caccagcacagcaaacccgccgggatcaaagtgtaccagtcggcagcatggctacgaaatgtgggaattgtggacccggctactccacccctctggaggccatgaaaggacccagggaagagatcgtctacctgccctgcatttaccgaaacacaggcactgaggccccagattatctggccactgtggatgttgaccccaagtctccccagtattgccaggtcatccaccggctgcccatgcccaacctgaaggacgagctgcatcactcaggatggaacacctgcagcagctgcttcggtgatagcaccaagtcgcgcaccaagctggtgctgcccagtctcatctcctctcgcatctatgtggtggacgtgggctctgagccccgggccccaaagctgcacaaggtcattgagcccaaggacatccatgccaagtgcgaactggcctttctccacaccagccactgcctggccagcggggaagtgatgatcagctccctgggagacgtcaagggcaatggcaaagggggttttgtgctgctggatggggagacgttcgaggtgaaggggacatgggagagacctgggggtgctgcaccgttgggctatgacttctggtaccagcctcgacacaatgtcatgatcagcactgagtgggcagctcccaatgtcttacgagatggcttcaaccccgctgatgtggaggctggactgtacgggagccacttatatgtatgggactggcagcgccatgagattgtgcagaccctgtctctaaaagatgggcttattcccttggagatccgcttcctgcacaacccagacgctgcccaaggctttgtgggctgcgcactcagctccaccatccagcgcttctacaagaacgagggaggtacatggtcagtggagaaggtgatccaggtgccccccaagaaagtgaagggctggctgctgcccgaaatgccaggcctgatcaccgacatcctgctctccctggacgaccgcttcctctacttcagcaactggctgcatggggacctgaggcagtatgacatctctgacccacagagaccccgcctcacaggacagctcttcctcggaggcagcattgttaagggaggccctgtgcaagtgctggaggacgaggaactaaagtcccagccagagcccctagtggtcaagggaaaacgggtggctggaggccctcagatgatccagctcagcctggatgggaagcgcctctacatcaccacgtcgctgtacagtgcctgggacaagcagttttaccctgatctcatcagggaaggctctgtgatgctgcaggttgatgtagacacagtaaaaggagggctgaagttgaaccccaacttcctggtggacttcgggaaggagccccttggcccagcccttgcccatgagctccgctaccctgggggcgattgtagctctgacatctggatttgaactccaccctcatcacccacactccctattttgggccctcacttccttggggacctggcttcattctgctctctcttggcacccgacccttggcagcatgtaccacacagccaagctgagactgtggcaatgtgttgagtcatatacatttactgaccactgttgcttgttgctcactgtgctgcttttccatgagctcttggaggcaccaagaaataaactcgtaaccctgtccttcaaaaaaaaaaaaaaaaa

SEQ ID NO: 1156 - DNA, 4895 bp, Homo sapiens
ctcccacgggctggctggcaagcggccctggtgggtctgcgggggcaggggcagccttcctggtttatctccaccggcgcgatctgctcgtccgcctcggctccagaagctggggctcagggtccggcgaggcaggaagcctgaggccacagcccagagcagcctgagtgcagtcatgtgggggcgactgctcctgtggcccctggtgctggggttcagcctgtctggcggcacccagacccccagcgtctacgacgagagcgggagcaccggaggtggtgatgacagcacgccctcaatcctgcctgccccccgcggctacccaggccaagtctgtgccaatgacagtgacaccctggagctcccggacagctcacgggcactgcttctgggctgggtgcccaccaggctggtgcccgccctctatgggctggtcctggtggtggggctgccggccaatgggctggcgctgtgggtgctggccacgcaggcacctcggctgccctccaccatgctgctgatgaacctcgcgactgctgacctcctgctggccctggcgctgcccccgcggatcgcctaccacctgcgtggccagcgctggcccttcggggaggccgcctgccgcctggccacggccgcactctatggtcacatgtatggctcagtgctgctgctggccgccgtcagcctggatcgctacctggccctggtgcacccgctgcgggcccgcgccctgcgtggccggcgcctggcccttggactctgcatggctgcttggctcatggcggccgccctggcactgcccctgacactgcagcggcagaccttccggctggcgcgctccgatcgcgtgctctgccatgacgcgctgcccctggacgcacaggcctcccactggcaaccggccttcacctgcctggcgctgttgggctgtttcctgcccctgctggccatgctgctgtgctacggggccaccctgcacacgctggcggccagcggccggcgctacggccacgcgctgaggctgaccgcagtggtgctggcctccgccgtggccttcttcgtgcccagcaacctgctgctgctgctgcattactcggacccgagccccagcgcctggggcaacctctatggtgcctacgtgcccagcctggcgctgagcaccctcaacagctgcgtggatcccttcatctactactacgtgtcggccgagttcagggacaaggtgcgggcagggctcttccaacggtcgccgggggacaccgtggcctccaaggcctctgcggaagggggcagccggggcatgggcacccactcctctttgctccagtgacacaaagtggggaaggctgtactgggtcgaacagggtcccttcccccacttcacgtccttcctgggacctcagaatgtgaccttatttggaaatagggttgttacaactgtcactagcggaggtcactttggagaagggtgggccttacatccagtgtgggtggtgtcctcataagataaggagaggccaggcctggtggctcacgcctgtaatcccagcactttaagaggccaaggcggatggatcacttgagcccaggagttcaacaccagcctgagcaacatggtaaaaccccatctctaccaaaaatacaaaaattagctgggcttggtggctggcgcctgtaatcccagctactcaggagactgaggcagaaggatcgcttgaacctgggaggcagaggttgcagtgagccgagattgcgccactggactccagcctgcgtgacagagagcctgtctctaaattaattaattaattaatttaattcaattttaaaaagacgaaaagtgacggccaggtgcagtggctcacgcctataatctcagcactctgggaggccaagatggaggattgcttgaagccaggagtttgggaccagcctgggcaacatagggggatcccatctctacacacaaaaaaattttttaatgaaccaggcattgtggcatgcgcctatagtcccagccactcaagaggcacaggcgggaggatcacttgagcctgggaggttgtggttgcagtgagctatgattgtaccactgcactccagcctgggcaacagagcaagaccttgtctcaaaaataaacaaactaaaattaaaaaaagaagacgagagatagtgggtgtggtggctcacacctgcaatcccagcactttggaaggccgaggtgggcagatcatctgaggccaggagttcaagaccagcctggctaacatggtgaaatcctatctctaccaaaaatacaaaaattagccaggcgtggtggtgggcacctgtactggggaggtgcccacccagctactggggaggctgagtcaggagaatcgcttgaacctgggaggcggaggttgcggtcagctgagatggtgccactgcactccagcctgggcgaaagagcgactctgtctccaaaaaaaagagaagaggagaggacacagagacacacagagaagaaagccatgtggcggcagaggcagagatgggagtgatgcggacggacacaaactaagggatgccacgatgccaagcacagccaacagccaccagcagccaggagacaggcctgggacgggctctccctcacagcctccagagggaaccagccctgccaccaccttgaccctggacttctggcctgcagaactgtgagacaataaactctcattgttttaagctgcctggcatgtggcactttgtcagggcagcccaggaatctgaaacaggatcaaactctgcttcctgggccctgccagcatctctggctcggctttctgggctggatgcagcccacgacgcactggtgtctgagatggggctggagctggggctggggctgcattccctggagactcactgcaagttcctgcccaggaggctgagggcaccccatcctcagtgcccaatgctgtggccccaccaggcccagagcctggttggccattctcatgcccaccagcttctggctttgggatgtctcttgagcaaccagaatagcacccccaactctgctccccaaaacccatcactagcacggctcagcctcctgctatcccctgactgctggggaccctcgccttccctcctctcacctgcaggctgatccttcttttcactttctgtcaatgtcaccagggataaggtgggacaatggggggtgggggtggacagtgtgtgctggggggttcgggtgctgcagacctggaactcccttctgccaggatgttggcagccggttgtaagccttgcacgggacagaccacacccaccgcaacctcatcccctcagcactaaccacatccactctcaaccccgtccccttcgcactgaccacacccaccccgttcggccccgccccccgcactgaacactcccgccctcaaccccgcaccctccgcactcacctccccctcgccgctcgaccccgccctcaccacactgaccaccctcaacccattgcgcccagtccccaccacagtgaccacaccctcactggctcggccctgcccccagtatactgaccattccccagccacttcccttccgcacttaccactcccccagccacgcccctccccgctgaccgctcctccagccccgcctcccccgtacaggcagagcgcccgcccacctctatgctgcgttctcctgactttacgttggcccctcctctgccaagcccccaggggagccctccctggcgtccgagggtgggagtcggggtgtggcaggccgcggtggggggcggcagtggctccgcgcactcacccgggccccgggcaggggcgcgctccacttcgttgcacgcgggtccggcgcacagttcccgggcgagtgggctgtgcgtgctgacgttgtagaagcgagtggcctcgaaggctacgggacgagggtggcgggtgaccaagtgcaggcgcgacgggtcagggaccgggccgggccgggggtgcgggcgcgcgggcctaccgggttcgtagtagtcgtacacggagactggcagcgccgacgtcctgcccaccacgcactcccggagagcacggaaccgcacgcacgtcaggcaccggctggggatctgtggggcagcggcgggcgcaggctcgacccgggccaggaggcccggggcgctgagctcaggcccagaactggctgatttcagggatacccaggacgcgtgaaacacagaagaaacgtgatcccattttctttttttcttttacttttctttttttttttttttcctgagacagagtctcgcgctgttgcccaggctggagtgcagtggcgtgatctcggctcactgcaagctcggcctcctgggttcaaatgattctcctgcctcagcctcccaagtagctgggataacaggcgcccaccaccgcaccctgctaattttttgtatttttgatcaagacggagtttcaccatgttggccaggctggtctccaactcctgccctcaagtgatccgcctcggtcccattttttattctttgggtccttccatcccactgggaaaacgtctcaggtggcctctgaaacaccactcctttttgtgtgtgtgcacgcatggctgagcatgtgtgggtgggagtcagcacattcacgatactgtgcaatcatcacctctgtctagttacaggacggtttctttctcccccaaagaaaccccatcgccatcagcactcactccccactcccccagcccctggcaaccacaaatctttccaactctacggatttgcctgttctgggcatttcatgtcaatggaatcatgtactctgtgaaaaaaaaaaaaaaaaaaaaaaaaaaaaaaaaaaaaaaaaaaaaaaaaaaaaaaaaa

SEQ ID NO: 1157 - DNA, 1601 bp, Homo sapiens
gcttaacggtcctctggtctctctctcccctcagctgagtcccttccctgtctttcactcttctggcatcggtggttttacttcttcgattgaaccctgcttcctcgacccccctgggaggccgccttcttcaggcgcctcccttctctccacgagctcgctctgacagctgaggaactggcaagatcctgctacccagagggtgaatgggtatctttcccggaataatcctaatttttctaagggtgaagtttgcaacggcggccgtgattgtaagcggacaccagaaaagtaccactgtaagtcatgagatgtctggtctgaattggaaaccctttgtatatggcggccttgcctctatcgtggctgagtttgggactttccctgtggaccttaccaaaacacgacttcaggttcaaggccaaagcattgatgcccgtttcaaagagataaaatatagagggatgttccatgcgctgtttcgcatctgtaaagaggaaggtgtattggctctctattcaggaattgctcctgcgttgctaagacaagcatcatatggcaccattaaaattgggatttaccaaagcttgaagcgcttattcgtagaacgtttagaagatgaaactcttttaattaatatgatctgtggggtagtgtcaggagtgatatcttccactatagccaatcccaccgatgttctaaagattcgaatgcaggctcaaggaagcttgttccaagggagcatgattggaagctttatcgatatataccaacaagaaggcaccaggggtctgtggaggggtgtggttccaactgctcagcgtgctgccatcgttgtaggagtagagctaccagtctatgatattactaagaagcatttaatattgtcaggaatgatgggcgatacaattttaactcacttcgtttccagctttacatgtggtttggctggggctctggcctccaacccggttgatgtggttcgaactcgcatgatgaaccagagggcaatcgtgggacatgtggatctctataagggcactgttgatggtattttaaagatgtggaaacatgagggcttttttgcactctataaaggattttggccaaactggcttcggcttggaccctggaacatcattttttttattacatacgagcagctaaagaggcttcaaatctaagaactgaattatatgtgagcccagccctgccagcctttctactcctttgcccttttcccgtgttctaatgtattttgacaatgttgtaagtgtttaccaagccgttggtctcctaagggcctcctgatggaagaacagtggggtggttcaaagttatttctatgtttgtgttaccatgttaacttttccccgagagaaagtgttaacattgagactctggccccagattggtatcttctatgaagatggatactgatgggtgacattgaaaacggcctgctttccaaatgtggttaaatgtaattggttagccccagacttgggctagagcagaaggcataggccagggtggttattgctatatgtgttacagacctcggttctcattaaagtatttattggcagaatcacaaaaaa

SEQ ID NO: 1158 - DNA, 1805 bp, Homo sapiens
ggcacgaggctgggaccggagtggggagcgcggcgtggaggtgccacccggcgcgggtggcggagagatcagaagcctcttccccaagccgagccaacctcagcggggacccgggctcagggacgcggcggcggcggcggcgactgcagtggctggacgatggcagcgtccgccggagccggggcggtgattgcagccccagacagccggcgctggctgtggtcggtgctggcggcggcgcttgggctcttgacagctggagtatcagccttggaagtatatacgccaaaagaaatcttcgtggcaaatggtacacaagggaagctgacctgcaagttcaagtctactagtacgactggcgggttgacctcagtctcctggagcttccagccagagggggccgacactactgtgtcgtttttccactactcccaagggcaagtgtaccttgggaattatccaccatttaaagacagaatcagctgggctggagaccttgacaagaaagatgcatcaatcaacatagaaaatatgcagtttatacacaatggcacctatatctgtgatgtcaaaaaccctcctgacatcgttgtccagcctggacacattaggctctatgtcgtagaaaaagagaatttgcctgtgtttccagtttgggtagtggtgggcatagttactgctgtggtcctaggtctcactctgctcatcagcatgattctggctgtcctctatagaaggaaaaactctaaacgggattacactggctgcagtacatcagagagtttgtcaccagttaagcaggctcctcggaagtccccctccgacactgagggtcttgtaaagagtctgccttctggatctcaccagggcccagtcatatatgcacagttagaccactccggcggacatcacagtgacaagattaacaagtcagagtctgtggtgtatgcggatatccgaaagaattaagagaatacctagaacatatcctcagcaagaaacaaaaccaaactggactctcgtgcagaaaatgtagcccattaccacatttagccttggagacccaggcaaggacaagtacacgtgtactcacagagggagagaaagatgtgtacaaaggatatgtataaatattctatttagtcatcctgatatgaggagccagtgttgcatgatgaaaagatggtatgattctacatatgtacccattgtcttgctgtttttgtactttcttttcaggtcatttacaattgggagatttcagaaacattcctttcaccatcatttagaaatggtttgccttaatggagacaatagcagatcctgtagtatttccagtagacatggccttttaatctaagggcttaagactgattagtcttagcatttactgtagttggaggatggagatgctatgatggaagcatacccagggtggcctttagcacagtatcagtaccatttatttgtctgccgcttttaaaaaatacccattggctatgccacttgaaaacaatttgagaagtttttttgaagtttttctcactaaaatatggggcaattgttagccttacatgttgtgtagacttactttaagtttgcacccttgaaatgtgtcatatcaatttctggattcataatagcaagattagcaaaggataaatgccgaaggtcacttcattctggacacagttggatcaatactgattaagtagaaaatccaagctttgcttgagaacttttgtaacgtggagagtaaaaagtatcggttttaaaaaaaaaaaaaaaaaaaaaaaaaaaaaaaa

SEQ ID NO: 1159 - DNA, 843 bp, Homo sapiens
gggcgggtcttcttccttctcgcctaacgccgccaacatggtgttcaggcgcttcgtggaggttggccgggtggcctatgtctcctttggacctcatgccggaaaattggtcgcgattgtagatgttattgatcagaacagggctttggtcgatggaccttgcactcaagtgaggagacaggccatgcctttcaagtgcatgcagctcactgatttcatcctcaagtttccgcacagtgcccaccagaagtatgtccgacaagcctggcagaaggcagacatcaatacaaaatgggcagccacacgatgggccaagaagattgaagccagagaaaggaaagccaagatgacagattttgatcgttttaaagttatgaaggcaaagaaaatgaggaacagaataatcaagaatgaagttaagaagcttcaaaaggcagctctcctgaaagcttctcccaaaaaagcacctggtactaagggtactgctgctgctgctgctgctgctgctgctgctgctaaagttccagcaaaaaagatcaccgccgcgagtaaaaaggctccagcccagaaggttcctgcccagaaagccacaggccagaaagcagcgcctgctccaaaagctcagaagggtcaaaaagctccagcccagaaagcacctgctccaaaggcatctggcaagaaagcataagtggcaatcataaaaagtaataaaggttctttttgacctgttgacaaatgtatttaagcctttggatttaaagcctgttgaggctagagttaggaggcagattgatagtaggattataataaacattaaataatcaaaaaaaaaaaaaaaaaaaa

SEQ ID NO: 1160 - DNA, 1244 bp, Homo sapiens
gcacgaggaaaatggcgctagctcggaagctaccgaggtgctaggagttgccgaagcaagtccggaagctaccgagcgagtccggaagttgccgaaagggagcagcggggaaggaggatggcggatatcatcgcaagactccgggaggacgggatccaaaaacgtgtgatacaggaaggccgaggagagctcccggactttcaagatgggaccaaggccacgttccactaccggacgctgcacagtgacgacgagggcaccgtgctggacgacagccgggctcgtggcaagcccatggagctcatcattggcaagaagttcaagctgcctgtgtgggagaccatcgtgtgcaccatgcgagaaggggagattgcccagttcctctgtgacatcaagcatgtggtcctgtacccgctggtggccaagagtctccgcaacatcgcggtgggcaaggaccccctggagggccagcggcactgctgcggtgttgcacagatgcgtgaacacagctccctgggccatgctgacctggacgccctgcagcagaacccccagcccctcatcttccacatggagatgctgaaggtggagagccctggcacgtaccagcaggacccatgggccatgacagacgaagagaaggcaaaggcagtgccacttatccaccaggagggcaaccggttgtaccgcgaggggcatgtgaaggaggctgctgccaagtactacgatgccattgcctgcctcaagaacctgcagatgaaggaacagcctgggtcccctgaatggatccagctggacaagcagatcacgccgctgctgctcaactactgccagtgcaagctggtggtcgaggagtactacgaggtgctggaccactgctcttccatcctcaacaagtacgacgacaacgtcaaggcctacttcaagcggggcaaggcccacgcggccgtgtggaatgcccaggaggcccaggctgactttgccaaagtgctggagctggacccagccctggcgcctgtggtgagccgagagctgcgggccctggaggcacggatccggcagaaggacgaagaggacaaagcccggttccgggggatcttctcccattgacaggagcacttggccctgccttacctgccaagcccactgctgcagctgccagcccccctgcccgtgctgcgtcatgcttctgtgtatataaaggcctttatttatctctcaaaaaaaaaaaaaaaaaaaaaaaa

SEQ ID NO: 1161 - DNA, 3044 bp, Homo sapiens
gtttgcgggtggttgttgctctcggggccgtgtggagtaggtctggacctggactcacggctgcttggagcgtccgccatgaggagaagtgaggtgctggcggaggagtccatagtatgtctgcagaaagccctaaatcaccttcgggaaatatgggagctaattgggattccagaggaccagcggttacaaagaactgaggtggtaaagaagcatatcaaggaactcctggatatgatgattgctgaagaggaaagcctgaaggaaagactcatcaaaagcatatccgtctgtcagaaagagctgaacactctgtgcagcgagttacatgttgagccatttcaggaagaaggagagacgaccatcttgcaactagaaaaagatttgcgcacccaagtggaattgatgcgaaaacagaaaaaggagagaaaacaggaactgaagctacttcaagagcaagatcaagaactgtgcgaaattctttgtatgccccactatgatattgacagtgcctcagtgcccagcttagaagagctgaaccagttcaggcaacatgtgacaactttgagggaaacaaaggcttctaggcgtgaggagtttgtcagtataaagagacagatcatactgtgtatggaagaattagaccacaccccagacacaagctttgaaagagatgtggtgtgtgaagacgaagatgccttttgtttgtctttggagaatattgcaacactacaaaagttgctacggcagctggaaatgcagaaatcacaaaatgaagcagtgtgtgaggggctgcgtactcaaatccgagagctctgggacaggttgcaaatacctgaagaagaaagagaagctgtggccaccattatgtctgggtcaaaggccaaggtccggaaagcgctgcaattagaagtggatcggttggaagaactgaaaatgcaaaacatgaagaaagtgattgaggcaattcgagtggagctggttcagtactgggaccagtgcttttatagccaggagcagagacaagcttttgcccctttctgtgctgaggactacacagaaagtctgctccagctccacgatgctgagattgtgcggttaaaaaactactatgaagttcacaaggaactctttgaaggtgtccagaagtgggaagaaacctggaggcttttcttagagtttgagagaaaagcttcagatccaaatcgatttacaaaccgaggaggaaatcttctaaaagaagaaaaacaacgagccaagctccagaaaatgctgcccaagctggaagaagagttgaaggcacgaattgaattgtgggaacaggaacattcaaaggcatttatggtgaatgggcagaaattcatggagtatgtggcagaacaatgggagatgcatcgattggagaaagagagagccaagcaggaaagacaactgaagaacaaaaaacagacagagacagagatgctgtatggcagcgctcctcgaacacctagcaagcggcgaggactggctcccaatacaccgggcaaagcacgtaagctgaacactaccaccatgtccaatgctacggccaatagtagcattcggcctatctttggagggacagtctaccactcccccgtgtctcgacttcctccttctggcagcaagccagtcgctgcttccacctgttcagggaagaaaacaccccgtactggcaggcatggagccaacaaggagaacctggagctcaacggcagcatcctgagtggtgggtaccctggctcggcccccctccagcgcaacttcagcattaattctgttgccagcacctattctgagtttgcgaaggatccgtccctctctgacagttccactgttgggcttcagcgagaactttcaaaggcttccaaatctgatgctacttctggaatcctcaattcaaccaacatccagtcctgagaagccctgatcagtcaaccagctgtggcttcctgtgcctagactggacctaattatatgggggtgactttagtttttcttcagcttaggagtgcttgaaaccttggccaggttccatgaccatgggcctaacttaaagatgtgaatgagtgttacagttgaaagcccatcataggtttagtggtcctaggagacttggttttgacttatatacatgaaaagtttatggcaagaagtgcaaattttagcatatggggcctgacttctctaccacataattctacttgctgaagcatgatcaaagcttgttttatttcaccactgtaggaaaatgattgactatgcccatccctgggggtaattttggcatgtatacctgtaactagtaattaacatcttttttgtttaggcatgttcaattaatgctgtagctatcatagctttgctcttacctgaagccttgtccccaccacacaggacagccttcctcctgaagagaatgtctttgtgtgtccgaagttgagatggcctgccctactggcaaagaggtgacaggaaggctgggagcagctttgttaaattgtgttcagttctgttacacagtgcattgccctttgttgggggtatgcatgtatgaacacacatgcttgtcggaacgctttctcggcgtttgtcccttggctctcatctcccccattcctgtgcctactttgcctgagttcttctacccccgcagttgccagccagattgggagtctgtttgttccaatgggttgagctgtctttgtcgtggagatctggaactttgcacatgtcactactggggaggtgttcctgctctagcttccacgatgaggcgccctctttacctatcctctcaatcactactcttcttgaagcactattatttattcttccgctgtctgcctgcagcagtactactgtcaacatagtgtaaatggttctcaaaagcttaccagtgtggacttggtgttagccacgctgtttacctcatacagtacgtgtcctgtttttaaaatatacaattattcttaaaaataaattaaaatcgtatacttacatttcaaaaaaaaaaaaaaaaa

SEQ ID NO: 1162 - DNA, 3625 bp, Homo sapiens
ggccaccggagcggcccggcgacgatcgctgacagcttcccctgcccttcccgtcggtcgggccgccagccgccgcagccctcggcctgcacgcagccaccggccccgctcccggagcccagcgccgccgaggccgcagccgcccggccagtaaggcggcgccgcccgcggccaccgcgggccctgccgttccctccgccgcgctgcgccatggcgcggcgctgactggcctggcccggccccgccgcgctcccgctcgccccgacccgcactcgggcccgcccgggctccggcctgccgccgcctcttccttctccagccggcaggccccgccgcttaggagggagagcccacccgcgccaggaggccgaacgcggactcgccacccggcttcagaatggcagaagatgatccatatttgggaaggcctgaacaaatgtttcatttggatccttctttgactcatacaatatttaatccagaagtatttcaaccacagatggcactgccaacagatggcccataccttcaaatattagagcaacctaaacagagaggatttcgtttccgttatgtatgtgaaggcccatcccatggtggactacctggtgcctctagtgaaaagaacaagaagtcttaccctcaggtcaaaatctgcaactatgtgggaccagcaaaggttattgttcagttggtcacaaatggaaaaaatatccacctgcatgcccacagcctggtgggaaaacactgtgaggatgggatctgcactgtaactgctggacccaaggacatggtggtcggcttcgcaaacctgggtatacttcatgtgacaaagaaaaaagtatttgaaacactggaagcacgaatgacagaggcgtgtataaggggctataatcctggactcttggtgcaccctgaccttgcctatttgcaagcagaaggtggaggggaccggcagctgggagatcgggaaaaagagctaatccgccaagcagctctgcagcagaccaaggagatggacctcagcgtggtgcggctcatgtttacagcttttcttccggatagcactggcagcttcacaaggcgcctggaacccgtggtatcagacgccatctatgacagtaaagcccccaatgcatccaacttgaaaattgtaagaatggacaggacagctggatgtgtgactggaggggaggaaatttatcttctttgtgacaaagttcagaaagatgacatccagattcgattttatgaagaggaagaaaatggtggagtctgggaaggatttggagatttttcccccacagatgttcatagacaatttgccattgtcttcaaaactccaaagtataaagatattaatattacaaaaccagcctctgtgtttgtccagcttcggaggaaatctgacttggaaactagtgaaccaaaacctttcctctactatcctgaaatcaaagataaagaagaagtgcagaggaaacgtcagaagctcatgcccaatttttcggatagtttcggcggtggtagtggtgccggagctggaggcggaggcatgtttggtagtggcggtggaggagggggcactggaagtacaggtccagggtatagcttcccacactatggatttcctacttatggtgggattactttccatcctggaactactaaatctaatgctgggatgaagcatggaaccatggacactgaatctaaaaaggaccctgaaggttgtgacaaaagtgatgacaaaaacactgtaaacctctttgggaaagttattgaaaccacagagcaagatcaggagcccagcgaggccaccgttgggaatggtgaggtcactctaacgtatgcaacaggaacaaaagaagagagtgctggagttcaggataacctctttctagagaaggctatgcagcttgcaaagaggcatgccaatgcccttttcgactacgcggtgacaggagacgtgaagatgctgctggccgtccagcgccatctcactgctgtgcaggatgagaatggggacagtgtcttacacttagcaatcatccaccttcattctcaacttgtgagggatctactagaagtcacatctggtttgatttctgatgacattatcaacatgagaaatgatctgtaccagacgcccttgcacttggcagtgatcactaagcaggaagatgtggtggaggatttgctgagggctggggccgacctgagccttctggaccgcttgggtaactctgttttgcacctagctgccaaagaaggacatgataaagttctcagtatcttactcaagcacaaaaaggcagcactacttcttgaccaccccaacggggacggtctgaatgccattcatctagccatgatgagcaatagcctgccatgtttgctgctgctggtggccgctggggctgacgtcaatgctcaggagcagaagtccgggcgcacagcactgcacctggctgtggagcacgacaacatctcattggcaggctgcctgctcctggagggtgatgcccatgtggacagtactacctacgatggaaccacacccctgcatatagcagctgggagagggtccaccaggctggcagctcttctcaaagcagcaggagcagatcccctggtggagaactttgagcctctctatgacctggatgactcttgggaaaatgcaggagaggatgaaggagttgtgcctggaaccacgcctctagatatggccaccagctggcaggtatttgacatattaaatgggaaaccatatgagccagagtttacatctgatgatttactagcacaaggagacatgaaacagctggctgaagatgtgaagctgcagctgtataagttactagaaattcctgatccagacaaaaactgggctactctggcgcagaaattaggtctggggatacttaataatgccttccggctgagtcctgctccttccaaaacacttatggacaactatgaggtctctgggggtacagtcagagagctggtggaggccctgagacaaatgggctacaccgaagcaattgaagtgatccaggcagcctccagcccagtgaagaccacctctcaggcccactcgctgcctctctcgcctgcctccacaaggcagcaaatagacgagctccgagacagtgacagtgtctgcgacacgggcgtggagacatccttccgcaaactcagctttaccgagtctctgaccagtggtgcctcactgctaactctcaacaaaatgccccatgattatgggcaggaaggacctctagaaggcaaaatttagcctgctgacaatttcccacaccgtgtaaaccaaagccctaaaattccactgcgttgtccacaagacagaagctgaagtgcatccaaaggtgctcagagagccggcccgcctgaatcattctcgatttaactcgagaccttttcaacttggcttcctttcttggttcataaatgaattttagtttggttcacttacagatagtatctagcaatcacaacactggctgagcggatgcatctggggatgaggttgcttactaagctttgccagctgctgctggatcacagctgctttctgttgtcattgctgttgtccctctgc

SEQ ID NO: 1163 - DNA, 4171 bp, Homo sapiens
gggccgcctctgcacgtccgccccggagcccgcacccgcgccccacgcgccgccgaggactcggcccggctcgtggagcccttcgcccgcggcgtgagtacccccgacccgcccgtccccgctctgctcgcgccctgccgctgcgccgccctcggtggcttttccgacgggcgagccccgtgctgtgcgggaaagaatccgacaacttcgcagcccatcccggctggacgcgaccgggagtgcagcagcccgttcccctcctcggtgccgcctctgcccagcgtttgcttggctgggctaccacctgcgctcggacggcgctcggagggtcctcgcccccggcctgcctacctgaaaaccagaactgatggctctatttgcagtctttcagacaacattcttcttaacattgctgtccttgaggacttaccagagtgaagtcttggctgaacgtttaccattgactcctgtatcacttaaagtttccaccaattctacgcgtcagagtttgcacttacaatggactgtccacaaccttccttatcatcaggaattgaaaatggtatttcagatccagatcagtaggattgaaacatccaatgtcatctgggtggggaattacagcaccactgtgaagtggaaccaggttctgcattggagctgggaatctgagctccctttggaatgtgccacacactttgtaagaataaagagtttggtggacgatgccaagttccctgagccaaatttctggagcaactggagttcctgggaggaagtcagtgtacaagattctactggacaggatatattgttcgttttccctaaagataagctggtggaagaaggcaccaatgttaccatttgttacgtttctaggaacattcaaaataatgtatcctgttatttggaagggaaacagattcatggagaacaacttgatccacatgtaactgcattcaacttgaatagtgtgcctttcattaggaataaagggacaaatatctattgtgaggcaagtcaaggaaatgtcagtgaaggcatgaaaggcatcgttctttttgtctcaaaagtacttgaggagcccaaggacttttcttgtgaaaccgaggacttcaagactttgcactgtacttgggatcctgggacggacactgccttggggtggtctaaacaaccttcccaaagctacactttatttgaatcattttctggggaaaagaaactttgtacacacaaaaactggtgtaattggcaaataactcaagactcacaagaaacctataacttcacactcatagctgaaaattacttaaggaagagaagtgtcaatatcctttttaacctgactcatcgagtttatttaatgaatccttttagtgtcaactttgaaaatgtaaatgccacaaatgccatcatgacctggaaggtgcactccataaggaataatttcacatatttgtgtcagattgaactccatggtgaaggaaaaatgatgcaatacaatgtttccatcaaggtgaacggtgagtacttcttaagtgaactggaacctgccacagagtacatggcgcgagtacggtgtgctgatgccagccacttctggaaatggagtgaatggagtggtcagaacttcaccacacttgaagctgctccctcagaggcccctgatgtctggagaattgtgagcttggagccaggaaatcatactgtgaccttattctggaagccattatcaaaactgcatgccaatggaaagatcctgttctataatgtagttgtagaaaacctagacaaaccatccagttcagagctccattccattccagcaccagccaacagcacaaaactaatccttgacaggtgttcctaccaaatctgcgtcatagccaacaacagtgtgggtgcttctcctgcttctgtaatagtcatctctgcagaccccgaaaacaaagaggttgaggaagaaagaattgcaggcacagagggtggattctctctgtcttggaaaccccaacctggagatgttataggctatgttgtggactggtgtgaccatacccaggatgtgctcggtgatttccagtggaagaatgtaggtcccaataccacaagcacagtcattagcacagatgcttttaggccaggagttcgatatgacttcagaatttatgggttatctacaaaaaggattgcttgtttattagagaaaaaaacaggatactctcaggaacttgctccttcagacaaccctcacgtgctggtggatacattgacatcccactccttcactctgagttggaaagattactctactgaatctcaacctggttttatacaagggtaccatgtctatctgaaatccaaggcgaggcagtgccacccacgatttgaaaaggcagttctttcagatggttcagaatgttgcaaatacaaaattgacaacccggaagaaaaggcattgattgtggacaacctaaagccagaatccttctatgagtttttcatcactccattcactagtgctggtgaaggccccagtgctacgttcacgaaggtcacgactccggatgaacactcctcgatgctgattcatatcctactgcccatggttttctgcgtcttgctcatcatggtcatgtgctacttgaaaagtcagtggatcaaggagacctgttatcctgacatccctgacccttacaagagcagcatcctgtcattaataaaattcaaggagaaccctcacctaataataatgaatgtcagtgactgtatcccagatgctattgaagttgtaagcaagccagaagggacaaagatacagttcctaggcactaggaagtcactcacagaaaccgagttgactaagcctaactacctttatctccttccaacagaaaagaatcactctggccctggcccctgcatctgttttgagaacttgacctataaccaggcagcttctgactctggctcttgtggccatgttccagtatccccaaaagccccaagtatgctgggactaatgacctcacctgaaaatgtactaaaggcactagaaaaaaactacatgaactccctgggagaaatcccagctggagaaacaagtttgaattatgtgtcccagttggcttcacccatgtttggagacaaggacagtctcccaacaaacccagtagaggcaccacactgttcagagtataaaatgcaaatggcagtctccctgcgtcttgccttgcctcccccgaccgagaatagcagcctctcctcaattacccttttagatccaggtgaacactactgctaaccagcatgccgatttcataccttatgctacacagacattaagaagagcagagctggcaccctgtcatcaccagtggccttggtccttaatcccagtacaatttgcaggtctggtttatataagaccactacagtctggctaggttaaaggccagaggctatggaacttaacactccccattggagcaagcttgccctagagacggcaggatcatgggagcatgcttaccttctgctgtttgttccaggctcacctttagaacaggagacttgagcttgacctaaggatatgcattaaccactctacagactcccactcagtactgtacagggtggctgtggtcctagaagttcagtttttactgaggaaatatttccattaacagcaattattatattgaaggctttaataaaggccacaggagacattactatagcatagattgtcaaatgtaaatttactgagcgtgttttataaaaaactcacaggtgtttgaggccaaaacagattttagacttaccttgaacggataagaatctatagttcactgacacagtaaaattaactctgtgggtgggggcggggggcatagctctaatctaatatataaaatgtgtgatgaatcaacaagatttccacaattcttctgtcaagcttactacagtgaaagaatgggattggcaagtaacttctgacttactgtcagttgtacttctgctccatagacatcagtattctgccatcatttttgatgactacctcagaacataaaaaggaacgtatatcacataattccagtcacagtttttggttcctcttttctttcaagaactatatataaatgacctgttttcacgcggccgc

SEQ ID NO: 1164 - DNA, 1418 bp, Homo sapiens
agaagaagctggccaaggatatgggagcaaccaccatggaccagaagtctctctgggcaggtgtagtggtcttgctgcttctccagggaggatctgcctacaaactggtttgctactttaccaactggtcccaggaccggcaggaaccaggaaaattcacccctgagaatattgaccccttcctatgctctcatctcatctattcattcgccagcatcgaaaacaacaaggttatcatcaaggacaagagtgaagtgatgctctaccagaccatcaacagtctcaaaaccaagaatcccaaactgaaaattctcttgtccattggagggtacctgtttggttccaaagggttccaccctatggtggattcttctacatcacgcttggaattcattaactccataatcctgtttctgaggaaccataactttgatggactggatgtaagctggatctacccagatcagaaagaaaacactcatttcactgtgctgattcatgagttagcagaagcctttcagaaggacttcacaaaatccaccaaggaaaggcttctcttgactgcgggcgtatctgcagggaggcaaatgattgataacagctatcaagttgagaaactggcaaaagatctggatttcatcaacctcctgtcctttgacttccatgggtcttgggaaaagccccttatcactggccacaacagccctctgagcaaggggtggcaggacagagggccaagctcctactacaatgtggaatatgctgtggggtactggatacataagggaatgccatcagagaaggtggtcatgggcatccccacatatgggcactccttcacactggcctctgcagaaaccaccgtgggggcccctgcctctggccctggagctgctggacccatcacagagtcttcaggcttcctggcctattatgagatctgccagttcctgaaaggagccaagatcacgcgcctccaggatcagcaggttccctacgcagtcaaggggaaccagtgggtgggctatgatgatgtgaagagtatggagaccaaggttcagttcttaaagaatttaaacctgggaggagccatgatctggtctattgacatggatgacttcactggcaaatcctgcaaccagggcccttaccctcttgtccaagcagtcaagagaagccttggctccttgtgaaggattaacttacagagaagcaggcaagatgaccttgctgcctggggcctgctctctcccaggaattctcatgtgggattccccttgccaggctggcctttggatctctcttccaagcctttcctgacttcctcttagatcatagattggacctggttttgttttcctgcagctgttgacttgttgccctgaagtacaataaaaaaaattcattttgctccagta

SEQ ID NO: 1165 - DNA, 1418 bp, Homo sapiens; identical to SEQ ID NO: 1164

SEQ ID NO: 1166 - DNA, 3702 bp, Homo sapiens
ggcacgaggctgttgcgtgactcccccacagtccggccgcgggagtccgaccctgaatgcccagggagtgttgagagaaatctggacgagtttcgggtcccgctcccttgggagcacgtggcctaccagcctctcgattgcagggttgggtggtcgcgacaccggggtcgccttgaggccagtccggctgccgaggtctgcgggagtccacctccggccagctggcaattttgaaagactgccttactttccccatctcagtgccagggcaggggcccttggagtgacttggctggggtctgtggcccgatccccctgccgtccctcaggacccgggctttctgctgtacagacttctcgtgggcagcctcccctcggaactcgggcatcatggcctcagaggctcggggtggtctgggggcccctccgctgcagtctgcccgatccctgccgggccccgccccctgcctcaagcacttcccgctcgacctgcgcacgtctatggatggcaaatgcaaggagatcgccgaggagctgttcacccgctcactggctgagagcgagctccgtagtgccccgtatgagttccccgaggagagccccattgaacagctggaggagcggcggcagcggctggagcggcagatcagccaggatgtcaagctggagccagacatcctgcttcgggccaagcaagatttcctgaagacggacagtgactcggacctacagctctacaaggaacagggtgaggggcagggtgaccggagcctgcgggagcgtgatgtgctggaacgggagtttcagcgggtcaccatctctggggaggagaagtgtggggtgccgttcacagacctgctggatgcagccaagagtgtggtgcgggcgctcttcatccgggagaagtacatggccctgtccctgcagagcttctgccccaccacccgccgctacctgcagcagctggctgaaaagcctctggagacccggacctatgaacagggccccgacacccctgtgtctgctgatgccccggtgcacccccctgcgctggagcagcacccgtatgagcactgtgagccaagcaccatgcctggggacctgggcttgggtctgcgcatggtgcggggtgtggtgcacgtctacacccgcagggaacccgacgagcattgctcagaggtggagctgccataccctgacctgcaggaatttgtggctgacgtcaatgtgctgatggccctgattatcaatggccccataaagtcattctgctaccgccggctgcagtacctgagctccaagttccagatgcatgtgctactcaatgagatgaaggagctggccgcccagaagaaagtgccacaccgagatttctacaacatccgcaaggtggacacccacatccatgcctcgtcctgcatgaaccagaagcatctgctgcgcttcatcaagcgggcaatgaagcggcacctggaggagatcgtgcacgtggagcagggccgtgaacagacgctgcgggaggtctttgagagcatgaatctcacggcctacgacctgagtgtggacacgctggatgtgcatgcggacaggaacactttccatcgctttgacaagtttaatgccaaatacaaccctattggggagtccgtcctccgagagatcttcatcaagacggacaacagggtatctgggaagtactttgctcacatcatcaaggaggtgatgtcagacctggaggagagcaaataccagaatgcagagctgcggctctccatttacgggcgctcgagggatgagtgggacaagctggcgcgctgggccgtcatgcaccgcgtgcactcccccaacgtgcgctggctggtgcaggtgccccgcctctttgatgtgtaccgtaccaagggccagctggccaacttccaggagatgctggagaacatcttcctgccactgttcgaggccactgtgcaccctgccagccacccggaactgcatctcttcttagagcacgtggatggttttgacagcgtggatgatgagtccaagcctgaaaaccatgtcttcaacctggagagccccctgcctgaggcgtgggtggaggaggacaacccaccctatgcctactacctgtactacacctttgccaacatggccatgttgaaccacctgcgcaggcagaggggcttccacacgtttgtgctgaggccacactgtggggaggctgggcccatccaccacctggtgtcagccttcatgctggctgagaacatttcccacgggctccttctgcgcaaggcccccgtcctgcagtacctgtactacctggcccagatcggcatcgccatgtctccgctcagcaacaacagcctcttcctcagctatcaccggaatccgctaccggagtacctgtcccgcggcctcatggtctccctgtccactgatgatcccttgcagttccacttcaccaaggagccgctgatggaggagtacagcatcgccacccaggtgtggaagctcagctcctgcgatatgtgtgagctggcccgcaacagcgtgctcatgagcggcttctcgcacaaggtaaagagccactggctgggacccaactataccaaggaaggccctgaggggaatgacatccgccggaccaatgtgccagacatccgcgtgggctaccgctacgagaccctgtgccaggagctggcgctcatcacgcaggcagtccagagtgagatgctggagaccattccagaggaggcgggtatcaccatgagcccagggcctcaatgagcctggtccatgaagtgcccaccacatcgcagcacttttaccacgttttgtcctcagaccccgcccatgctgtgtggtctctgcatgtctccattcttctctgtctctgtcttgcatgtctcctaccatgtcactgtccctgggccacccagtgaaagcaaagcctgggaatctgctcattgttgtttgggctcaggtattgagcctgatggcccaggtattgagggcctcccctgctggtggccctgtcctgggatcctcagaagcctgactgtcctatgggcttctccagtgtccacaggggcttgggatggttgtggggggctggcccctctagcctttccggtccttcctgggcaaatctaagccttggccagggccgaagtttaggcccctgtcttgttcatgtagccgaggggcaggcgggggacctctacacctctgctgtgggcacggggctgctgagggtctgtggaactccagcagctctgcactgggtagagctgggcctagagctcagtcacaggcctgggcttcctggcctgagtgggtagacgcaggcggcagaggtgctggaccacatctccgccaagtcactgcccagcagccttctccgtcctgtccccagcccacgtgctccttgggtgtcagcttcctgtgcctctgtgggagagggcagctgccttgtgttatgtctggggccacagttgctgcaaagtcctggatctgccactcaaccccgggagtggtgttcccagtgtggctcccagagctttgaccagattgtgatcccagctggcccctatgttgtgttctggactgaggcctttgctgtgaactgcagtgtttcatacgaaccatctttcctagtgcatgagaaataaagattatttaagtaaaaaaaaaaaaaaaaaa

SEQ ID NO: 1167 - DNA, 1362 bp, Homo sapiens
catttggggacgctctcagctctcggcgcacggcccagcttccttcaaaatgtctactgttcacgaaatcctgtgcaagctcagcttggagggtgatcactctacacccccaagtgcatatgggtctgtcaaagcctatactaactttgatgctgagcgggatgctttgaacattgaaacagccatcaagaccaaaggtgtggatgaggtcaccattgtcaacattttgaccaaccgcagcaatgcacagagacaggatattgccttcgcctaccagagaaggaccaaaaaggaacttgcatcagcactgaagtcagccttatctggccacctggagacggtgattttgggcctattgaagacacctgctcagtatgacgcttctgagctaaaagcttccatgaaggggctgggaaccgacgaggactctctcattgagatcatctgctccagaaccaaccaggagctgcaggaaattaacagagtctacaaggaaatgtacaagactgatctggagaaggacattatttcggacacatctggtgacttccgcaagctgatggttgccctggcaaagggtagaagagcagaggatggctctgtcattgattatgaactgattgaccaagatgctcgggatctctatgacgctggagtgaagaggaaaggaactgatgttcccaagtggatcagcatcatgaccgagcggagcgtgccccacctccagaaagtatttgataggtacaagagttacagcccttatgacatgttggaaagcatcaggaaagaggttaaaggagacctggaaaatgctttcctgaacctggttcagtgcattcagaacaagcccctgtattttgctgatcggctgtatgactccatgaagggcaaggggacgcgagataaggtcctgatcagaatcatggtctcccgcagtgaagtggacatgttgaaaattaggtctgaattcaagagaaagtacggcaagtccctgtactattatatccagcaagacactaagggcgactaccagaaagcgctgctgtacctgtgtggtggagatgactgaagcccgacacggcctgagcgtccagaaatggtgctcaccatgcttccagctaacaggtctagaaaaccagcttgcgaataacagtccccgtggccatccctgtgagggtgacgttagcattacccccaacctcattttagttgcctaagcattgcctggccttcctgtctagtctctcctgtaagccaaagaaatgaacattccaaggagttggaagtgaagtctatgatgtgaaacactttgcctcctgtgtactgtgtcataaacagatgaataaactgaatttgtacttt

SEQ ID NO: 1168 - DNA, 2725 bp, Homo sapiens
ggcacgaggagccttggcaagaggagtgtggcccttcctggaatccctctggacacaccctcctagcatcctctaggaaagatgcggcagctcaaagggaagcccaagaaggagacctccaaggacaagaaggagcggaagcaagccatgcaggaggcccggcagcagatcactacagtggtgctgcccacgctggccgtggtcgtgctcttgatcgtggtgtttgtgtacgtggccacgcgccccaccatcaccgagtgagccccgcagccggctgcggaccccatcggcagggagaggaggcgcgggagggggacgcaaacaaaaaatggctttcatattcagagatgttcatgttgctgagctgtaagcaggagcaccctgtcttctctggtctttgacttgattaaagtatctccgctttcttgggagggaataggggatgttttatcagtgaatgtgccatacaccttatggtccacttcatgtgcctttcagacttcaaagcgcgcgcgcatgtgtgtgtgtgtgtgtgtgtgtgtgtgtgtgtgtgtgtgtgcttctttttctctcctaaaaatcgataagtagctccacctgaagagggatggaacctctgggtcaggaaacagctggaatccacactcacctcattcccattgtttggatcatgcttctttccaacacgtgttcacaatctccaaagggactgtatttcttctctgtgcttaatgtgatttgaaatatgttgaatcaaagtgaaatatttattttttgaataaaggagataatagccttaaaaaaaaaaaaaaaaaaaactcgagactagttctctctctccctcgtgccgaattcggcacgaggccggaggctgcggctgcagaagtaccgcctgcggagtaactgcaaagatgctgtccgtgcgcgttgctgcggccgtggtccgcgcccttcctcggcgggccggactggtctccagaaatgctttgggttcatctttcattgctgcaaggaacttccatgcctctaacactcatcttcaaaagactgggactgctgagatgtcctctattcttgaagagcgtattcttggagctgatacctctgttgatcttgaagaaactgggcgtgtcttaagtattggtgatggtattgcccgcgtacatgggctgaggaatgttcaagcagaagaaatggtagagttttcttcaggcttaaagggtatgtccttgaacttggaacctgacaatgttggtgttgtcgtgtttggaaatgataaactaattaaggaaggagatatagtgaagaggacaggagccattgtggacgttccagttggtgaggagctgttgggtcgtgtagttgatgcccttggtaatgctattgatggaaagggtccaattggttccaagacgcgtaggcgagttggtctgaaagcccccggtatcattcctcgaatttcagtgcgggaaccaatgcagactggcattaaggctgtggatagcttggtgccaattggtcgtggtcagcgtgaactgattattggtgaccgacagactgggaaaacctcaattgctattgacacaatcattaaccagaaacgtttcaatgatggatctgatgaaaagaagaagctgtactgtatttatgttgctattggtcaaaagagatccactgttgcccagttggtgaagagacttacagatgcagatgccatgaagtacaccattgtggtgtcggctacggcctcggatgctgccccacttcagtacctggctccttactctggctgttccatgggagagtattttagagacaatggcaaacatgctttgatcatctatgacgacttatccaaacaggctgttgcttaccgtcagatgtctctgttgctccgccgaccccctggtcgtgaggcctatcctggtgatgtgttctacctacactcccggttgctggagagagcagccaaaatgaacgatgcttttggtggtggctccttgactgctttgccagtcatagaaacacaggctggtgatgtgtctgcttacattccaacaaatgtcatttccatcactgacggacagatcttcttggaaacagaattgttctacaaaggtatccgccctgcaattaacgttggtctgtctgtatctcgtgtcggatccgctgcccaaaccagggctatgaagcaggtagcaggtaccatgaagctggaattggctcagtatcgtgaggttgctgcttttgcccagttcggttctgacctcgatgctgccactcaacaacttttgagtcgtggcgtgcgtctaactgagttgctgaagcaaggacagtattctcccatggctattgaagaacaagtggctgttatctatgcgggtgtaaggggatatcttgataaactggagcccagcaagattacaaagtttgagaatgctttcttgtctcatgtcgtcagccagcaccaagccttgttgggcactatcagggctgatggaaagatctcagaacaatcagatgcaaagctgaaagagattgtaacaaatttcttggctggatttgaagcttaaactcctgtggattcacatcaaataccagttcagttttgtcattgttctagtaaattagttccatttgtaaaagggttactctcatactccttatgtacagaaatcacatgaaaaataaaggttccataatgcgtaaaaaaaaaaaaaaaaaa

SEQ ID NO: 1169 - DNA, 1007 bp, Homo sapiens
gacgctgcggggcgggcggacagactgcgggacggacggtggacgctgggacgcgtttgtagctccggccccgccgttccgacccccgccgccgtcgccgccatgacggggctagcactgctctactccggggtcttcgtggccttctgggcctgcgcgctggccgtgggagtctgctacaccatttttgatttgggcttccgctttgatgtggcatggttcctgacggagacttcgcccttcatgtggtccaacctgggcattggcctagctatctccctgtctgtggttggggcagcctggggcatctatattaccggctcctccatcattggtggaggagtgaaggcccccaggatcaagaccaagaacctggtcagcatcatcttctgtgaggctgtggccatctacggcatcatcatggcaattgtcattagcaacatggctgagcctttcagtgccacagaccccaaggccatcggccatcggaactaccatgcaggctactccatgtttggggctggcctcaccgtaggcctgtctaacctcttctgtggagtctgcgtgggcatcgtgggcagtggggctgccctggccgatgctcagaaccccagcctctttgtaaagattctcatcgtggagatctttggcagcgccattggcctctttggggtcatcgtcgcaattcttcagacctccagagtgaagatgggtgactagatgatatgtgtgggtggggccgtgcctcacttttatttattgctggttttcctgggacagctggagctgtgtcccttagcctttcagaggcttggtgttcagggccctccctgcactcccctcttgctgcgtgttgatttggaggcactgcagtccaggccgagtcctcagtgcggggagcaggctgctgctgctgactctgtgcagctgcgcacctgtgtcccccacctccaccctcaacccatcttcctagtgtttgtgaaataaacttggtatttgtctgggtc

SEQ ID NO: 1170 - DNA, 925 bp, Homo sapiens
ggcacgagccgagatgtctcgctccgtggccttagctgtgctcgcgctactctctctttctggcctggaggctatccagcgtactccaaagattcaggtttactcacgtcatccagcagagaatggaaagtcaaatttcctgaattgctatgtgtctgggtttcatccatccgacattgaagttgacttactgaagaatggagagagaattgaaaaagtggagcattcagacttgtctttcagcaaggactggtctttctatctcttgtactacactgaattcacccccactgaaaaagatgagtatgcctgccgtgtgaaccatgtgactttgtcacagcccaagatagttaagtgggatcgagacatgtaagcagcatcatggaggtttgaagatgccgcatttggattggatgaattccaaattctgcttgcttgctttttaatattgatatgcttatacacttacactttatgcacaaaatgtagggttataataatgttaacatggacatgatcttctttataattctactttgagtgctgtctccatgtttgatgtatctgagcaggttgctccacaggtagctctaggagggctggcaacttagaggtggggagcagagaattctcttatccaacatcaacatcttggtcagatttgaactcttcaatctcttgcactcaaagcttgttaagatagttaagcgtgcataagttaacttccaatttacatactctgcttagaatttgggggaaaatttagaaatataattgacaggattattggaaatttgttataatgaatgaaacattttgtcatataagattcatatttacttcttatacatttgataaagtaaggcatggttgtggttaatctggtttatttttgttccacaagttaaataaatcataaaacttg

SEQ ID NO: 1171 - DNA, 1535 bp, Homo sapiens
cctccgctcagtccgggagcgcacgtgggccgcggcgctccgacctccgctttcccaccgcccgcagctgaagcacatcccgcagcccggcgcggactccgatcgccgcagttgccctctggcgccatgtcgcagaacggagcgcccgggatgcaggaggagagcctgcagggctcctgggtagaactgcacttcagcaataatgggaacgggggcagcgttccagcctcggtttctatttataatggagacatggaaaaaatactgctggacgcacagcatgagtctggacggagtagctccaagagctctcactgtgacagcccacctcgctcgcagacaccacaagataccaacagggcttctgaaacagatacccatagcattggagagaaaaacagctcacagtctgaggaagatgatattgaaagaaggaaagaagttgaaagcatcttgaagaaaaactcagattggatatgggattggtcaagtcggccggaaaatattccccccaaggagttcctctttaaacacccgaagcgcacggccaccctcagcatgaggaacacgagcgtcatgaagaaagggggcatattctctgcagaatttctgaaagttttccttccatctctgctgctctctcatttgctggccatcggattggggatctatattggaaggcgtctgacaacctccaccagcaccttttgatgaagaactggagtctgacttggttcgttagtggattacttctgagcttgcaacatagctcactgaagagctgttagatcctggggtggccacgtcacttgtgtttatttgttctgtaaatgctgcgttcctaatttagtaaaataaaagaatagacactaaaatcatgttgatctataattacacctatgggatcaataagcatgtcagactgattaatgtctactgtgaaaatttggtagtaaattttcatttgatattagatataaatatctgaatataaataattttaatatactagtcatgatgtgtgttgtattttaaaaattatctgcaaccttaattcagctgaagtactttatatttcaaaagaatgaataacattgataataaaatcgctactttaaggggtttgtccaaaataaatattgtggccttatatatcacactattgtagaaagtattatttaatttaaatggatgcaggttgtctactaaagaaagattatatataactatgctaattgttcataatcaacagaaaccaagatagagctacaaactcagctgtacagttcgtacactaaactcttcttgcttttgcattataaggaattaagtctccgattattaggtgatcaccctggatgatcagttttctgctgaaggcacctactcagtatcttttcctctttatcactctgcattggtgaatttaatcctctcctttgtgttcaacttttgtgtgcttttaaaatcagctttattctaagcaaatctgtgtctactttaaaaaactggaaatggaaaaaaaaataaatctt

SEQ ID NO: 1172 - DNA, 2374 bp, Homo sapiens
cggcgccgggcggctgcagcctccgctccagcgcccgcgccgtgccctgcatcccgggagcccggctggacccgcggcggctcggccggtgttccccctcccctccctggggcagcagccaccatgttctcgtgtgtgaagccctatgaggaccagaactactcagccctgaggcaggactgccggcgcaggaaggtgctcttcgaggaccccctcttccccgccactgacgactcactctactataagggcacgccggggcccgccgtcaggtggaagcgacccaagggcatctgcgaggacccccgcctctttgtggatggcatcagctcccacgacctgcaccagggccaggtgggcaactgctggtttgtggcagcctgctcgtcacttgcctcccgggagtcgctgtggcaaaaggtcatcccagactggaaggagcaggaatgggacccccgaaaagcccaagcctacgcgggcatcttccacttccacttctggcgcttgggaatggtggacgtggtcatcgatgaacggctgcccacagtcaacaaccagctcatctactgccactccaactcccgcaatgagttttggtgcgccctagtggagaaggcctatgccaaactggcaggctgttaccaggccctggatggaggcaacacagcagacgcactggtggacttcacgggtggtgtttctgagcccatcgacctgaccgagggtgactttgccaacgatgagactaagaggaaccagctctttgagcgcatgttaaaggtgcacagccggggcggcctcatcagtgcctccatcaaggcagtgacagcagctgacatggaggcccgcctggcgtgcggcctggtaaagggccacgcatacgccgtcactgatgtgcgcaaggtgcgcctgggccacggcctactggccttcttcaagtcagagaagttggacatgatccgcctgcgcaacccctggggcgagcgggagtggaacgggccctggagtgacacctcggaggagtggcagaaagtgagcaagagtgagcgggagaagatgggtgtgaccgtgcaggacgacggtgagttctggatgaccttcgaggacgtgtgccggtacttcacggacatcatcaagtgccgcgtgatcaacacatcccacctgagcatccacaagacgtgggaggaggcccggctgcatggcgcctggacgctgcatgaggacccgcgacagaaccgcggtggcggctgcatcaaccacaaggacaccttcttccagaacccacagtacatcttcgaagtcaagaagccagaagatgaagtcctgatctgcatccagcagcggccaaagcggtctacgcgccgggagggcaagggtgagaacctggccattggctttgacatctacaaggtggaggagaaccgccagtaccgcatgcacagcctgcagcacaaggccgccagctccatctacatcaactcacgcagcgtcttcctgcgcaccgaccagcccgagggccgctatgtcatcatccccacaaccttcgagccaggccacactggcgagttcctgctccgagtcttcactgatgtgccctccaactgccgggagctgcgcctggataagcccccacacacctgctggagctccctctgtggctacccccagctggtgacccaggtacatgtcctgggagctgctggcctcaaggactccccaacaggggctaactcttatgtgatcatcaagtgtgagggagacaaagtccgctcggctgtgcagaagggcacctccacaccagagtacaatgtgaaaggcatcttctaccgcaagaagctgagccagcccatcactgtacaggtctggaaccaccgagtgctgaaggatgaatttctgggccaggtgcacctaaaggctgacccggacaacctccaggccctgcataccctccacctccgggaccgaaatagccggcagcccagcaacctgccaggcactgtggccgtgcacattctcagcagcacctccctcatggctgtctgacacctgcccacctacctggctctgaccgttcccaccaccatctgcatgtccccactgggcctgagtctagcctgggagccaggatactggggtccttttcccactcttccactgacttgctgtgtgaccttaggaagtctctgcccctctctcagcctcagtgtcccgagggccccgaagcattccattctcgtggaggagtttccttgctgagatttcaaatagtcctccccacctcaactgtcaccactgctaagggactctatccattgagcacattttcctaaggccctgctgtctgccgaggagcgccaagaagatgtcacttgcc

SEQ ID NO: 1173 - DNA, 1247 bp, Homo sapiens
accccatctccagaggcaccttccactagcaacagtctccccaggcacaacacagctaacacaaggccccgcaggcaggactctgggacagacgcaggccagctgcccagagcccagaccaagcatggacgccgtggatgccaccatggagaaactccgggcacagtgcctgtcccgcggggcctcgggcatccagggcctggccaggtttttccgccaactagaccgggacgggagcagatccctggacgctgatgagttccggcagggtctggccaaactcgggctggtgctggaccaggcggaggcagagggtgtgtgcaggaagtgggaccgcaatggcagcgggacgctggatctggaggagttccttcgggcgctgcggccccccatgtcccaggcccgggaggctgtcatcgcagctgcatttgccaagctggaccgcagtggggacggcgtcgtgacggtggacgacctccgcggggtgtacagtggccgtgcccaccccaaggtgcgcagtggggagtggaccgaggacgaggtgctgcgccgcttcctggacaacttcgactcctctgagaaggacgggcaggtcacactggcggaattccaggactactacagcggcgtgagtgcctccatgaacacggatgaggagttcgtggccatgatgaccagtgcctggcagctgtgagcagctccggctcagccctgctgccctggcctgtcactccccacccctgccggagacctcccttccctgggccccttctctcctgggcagccacaccacagagcggggaggggcaggtgggggaatggaggctgcaggactggctagaccaggtccctgccggtccaccaggcggaggtgggacaaaggtcctaacaggagtcactggctcaggaccccagggagaaacgctctccccacccacgccatgctgaccagaggtcttgcagcccctgtggatgcccccgccgaggtcccccgatccccgcacccggactgctgctccctgcccctcccttgcgggtcccccaggaagccaggtgaccccaggtgggaggctgtgtgtggaggccatcctggaaggaagtttagacctgcccaggtgtggagcgaggggcacaggggcatcctaacctcagaaactgaaataaagcctttgaaaaaaaaatctgtaaaacatcaacccccaatcagaagatggcaaatggggaataaaaatagcaggtaacacgtc

SEQ ID NO: 1174 - DNA, 1936 bp, Homo sapiens
ccgaggcagcgggcagacgagcagggggcgggcggacatcttgggatccggagagtggccgggccggcagagcagggggccgaggacaccaggtctgttctcagagcgatgggccgcggagactgatctgccgccatgattggaggcttattcatctataatcacaagggggaggtgctcatctcccgagtctaccgagatgacatcgggaggaacgcagtggatgcctttcgggtcaatgttatccatgcccggcagcaggtgcgcagccccgtcaccaacattgctcgcaccagcttcttccacgttaagcggtccaacatttggctggcagcagtcaccaagcagaatgtcaacgctgccatggtcttcgaattcctctataagatgtgtgacgtgatggctgcctactttggcaagatcagcgaggaaaacatcaagaacaattttgtgctcatatatgagctgctggatgagattctagactttggctacccacagaattccgagacaggcgcgctgaaaaccttcatcacgcagcagggcatcaagagtcagcatcagacaaaagaagagcagtcacagatcaccagccaggtaactgggcagattggctggcggcgagagggtatcaagtatcgtcggaatgagctcttcctggatgtgctggagagtgtgaacctgctcatgtccccacaagggcaggtgctgagtgcccatgtgtcgggccgggtggtgatgaagagctacctgagtggcatgcctgaatgcaagtttgggatgaatgacaagattgttattgaaaagcagggcaaaggcacagctgatgaaacaagcaagagcgggaagcaatcaattgccattgatgactgcaccttccaccagtgtgtgcgactcagcaagtttgactctgaacgcagcatcagctttatcccgccagatggagagtttgagcttatgaggtatcgcacaaccaaggacatcatccttcccttccgggtgatcccgctagtgcgagaagtgggacgcaccaaactggaggtcaaggtggtcatcaagtccaactttaaaccctcactgctggctcagaagatcgaggtgaggatcccaaccccactgaacacaagcggggtgcaggtgatctgcatgaaggggaaggccaagtacaaggccagcgagaatgccatcgtgtggaagatcaagcgcatggcaggcatgaaggaatcgcagatcagcgcagagattgagcttctgcctaccaacgacaagaagaaatgggctcgaccccccatttccatgaactttgaggtgccattcgcgccctctggcctcaaggtgcgctacttgaaggtgtttgaaccgaagctgaactacagcgaccatgatgtcatcaaatgggtgcgctacattggccgcagtggcatttatgaaactcgctgctagctgccactaggcagctagcccacctccccagccaccctcctccacaggtccaggtgccgctccctcccccaccacacatcagtgtctcctccctcctgctttgctgccttccctttgcaccagcccgagtctaggtctgggccaagcacattacaagtgggaccggtggagcagcccctgggctccctgggcaggggagttctgaggctcctgctctcccatccacctgtctgtcctggcctaatgccaggctctgagttctgtgaccaaagccaggtgggttccctttccttcccacccctgtggccacagctctggagtgggagggttggttgcccctcacctcagagctcccccaaaggccagtaatggatccccggcctcagtccctactctgctttgggatagtgtgagcttcattttgtacacgtgtgacttcgtccagttacaaacccaataaactctgtagagtggaaaaaaaaaaaaaaaaaaa

SEQ ID NO: 1175 - DNA, 1834 bp, Homo sapiens
atttttagataatcattaaagaccacagaaaatgtaacagatcctactcttcaaaataattgctattcagtattaaaacgagcagtcagctgcgtgattcccgtgattgcgttacaagctttgtctccttcgacttggagtctttgtccaggacgatgagacactcaaagagaacttactgtcctgattgggatgacaaggattgggattatggaaaatggaggagcagcagcagtcataaaagaaggaagagatcacatagcagtgcccaggagaacaagcgctgcaaatacaatcactctaaaatgtgtgatagccattatttggaaagcaggtctataaatgagaaagattatcatagtcgacgctacattgatgagtacagaaatgactacactcaaggatgtgaacctggacatcgccaaagagaccatgaaagccggtatcagaaccatagtagcaagtcttctggtagaagtggaagaagtagttataaaagcaaacacaggattcaccacagtacttcacatcgtcgttcacatgggaagagtcaccgaaggaaaagaaccaggagtgtagaggatgatgaggagggtcacctgatctgtcagagtggagacgtactaagtgcaagatatgaaattgttgatactttaggtgaaggagcttttggaaaagttgtggagtgcatcgatcataaagcgggaggtagacatgtagcagtaaaaatagttaaaaatgtggatagatactgtgaagctgctcgctcagaaatacaagttctggaacatctgaatacaacagaccccaacagtactttccgctgtgtccagatgttggaatggtttgagcatcatggtcacatttgcattgtttttgaactattgggacttagtacttacgacttcattaaagaaaatggttttctaccatttcgactggatcatatcagaaagatggcatatcagatatgcaagtctgtgaattttttgcacagtaataagttgactcacacagacttaaagcctgaaaacatcttatttgtgcagtctgactacacagaggcgtataatcccaaaataaaacgtgatgaacgcaccttaataaatccagatattaaagttgtagactttggtagtgcaacatatgatgacgaacatcacagtacattggtatctacaagacattatagagcacctgaagttattttagccctagggtggtcccaaccatgtgatgtctggagcataggatgcattcttattgaatactatcttgggtttaccgtatttccaacacacgatagtaaggagcatttagcaatgatggaaaggattcttggacctctaccaaaacatatgatacagaaaaccaggaaacgtaaatattttcaccacgatcgattagactgggatgaacacagttctgccggcagatatgtttcaagagcctgtaaacctctgaaggaatttatgctttctcaagatgttgaacatgagcgtctctttgacctcattcagaaaatgttggagtatgatccagccaaaagaattactctcagagaagccttaaagcatcctttctttgaccttctgaagaaaagtatatagatctgtaattggacagctctctcgaagagatcttacagactgtatcagtctaatttttaaattttaagttattttgtacagctttgtaaattcttaacatttttatattgccatgtttattttgtttgggtaatttggttcattaagtacatagctaaggtaatgaacatctttttcagtaattgtaaagtgatttattcagaataaattttttgtgcttatga

SEQ ID NO: 1176 - DNA, 1401 bp, Homo sapiens
atggctttacttactgcggccgcccggctcttgggaaccaagaatgcatcttgtcttgttcttgcagcccggcatgctagtgcttcctccacgaatttgaaagacatattggctgacctgatacctaaggagcaggccagaattaagactttcaggcagcaacatggcaagacggtggtgggccaaatcactgtggacatgatgtatggtggcatgagaggcatgaagggattggtgtatgaaacatcagttcttgatcctgatgagggcatccgtttccgaggctttagtatccctgaatgccagaaactgctacccaaggctaagggtggggaagaacccctgcctgagggcttattttggctgctggtaactggatgtatcccaacagaggaacaggtatcttggctctcaaaagagtgggcaaagagggcagctctgccttcccatgtggtcaccatgctggacaactttcccaccaatctacaccccatgtctcagctgagtgcagctgttacagccctcaacagtgaaagtaactttgcccaagcatatgcacggggtatcagccgaaccaagtactgggagttgatttatgaagattctgtggatctaatagcaaagctaccttgtgttgcagcaaagatctaccgaaatctctactgggaaggcagcggtattggggccattgactctaacctggactggtctcacaatttcaccaacatgttaggctatactgatcatcagttcactgagctcatgcgcctgtacctcaccatccacagtgaccatgagggtggcaatgtaagtgcccataccagccacttggtgggcagtgccctttccgacccttacctgtcctttgcagcagccatgaacgggctggcagggcctctccatggactggcaaatcaggaagtgcttgtctggctaacacagctgcagaaggaagttggcaaagatgtgtcagatgagaagttacgagactacatctggaacacactcaactcaggacgggttgttccaggctatggccatgcagtactaaggaagactgatccgcgatatacctgtcagcgagagtttgctctgaaacacctgcctaatgaccccatgtttaagttggttgctcagctgtacaagattgtgcccaatgtcctcttagagcagggtaaagccaagaatccttggcccaatgtagatgctcacagtggggtgctgctccagtattatggcatgacggagatgaattactacacggtcctgtttggggtgtcacgagcattgggtgtactggcacagctcatctggagccgagccttaggcttccctctagaaaggcccaagtccatgagcacagagggtctgatgaagtttgtggactctaagtcagggtaa

SEQ ID NO: 1177 - DNA, 1752 bp, Homo sapiens
ggcacgaggttagaagagagcccactaattcaaggactcttaccgtgggagcaactgctggttctatcacaatgaaacggctggtttgtgtgctcttggtgtgctcctctgcagtggcacagttgcataaagatcctaccctggatcaccactggcatctctggaagaaaacctatggcaaacaatacaaggaaaagaatgaagaagcagtacgacgtctcatctgggaaaagaatctaaagtttgtgatgcttcacaacctggagcattcaatgggaatgcactcatacgatctgggcatgaaccacctgggagacatgaccagtgaagaagtgatgtctttgatgagttccctgagagttcccagccagtggcagagaaatatcacatataagtcaaaccctaattggatattgcctgattctgtggactggagagagaaagggtgtgttactgaagtgaaatatcaaggttcttgtggtgcttgctgggctttcagtgctgtgggggccctggaagcacagctgaagctgaaaacaggaaagctggtgtctctcagtgcccagaacctggtggattgctcaactgaaaaatatggaaacaaaggctgcaatggtggcttcatgacaacggctttccagtacatcattgataacaagggcatcgactcagacgcttcctatccctacaaagccatggatcagaaatgtcaatatgactcaaaatatcgtgctgccacatgttcaaagtacactgaacttccttatggcagagaagatgtcctgaaagaagctgtggccaataaaggcccagtgtctgttggtgtagatgcgcgtcatccttctttcttcctctacagaagtggtgtctactatgaaccatcctgtactcagaatgtgaatcatggtgtacttgtggttggctatggtgatcttaatgggaaagaatactggcttgtgaaaaacagctggggccacaactttggtgaagaaggatatattcggatggcaagaaataaaggaaatcattgtgggattgctagctttccctcttacccagaaatctagaggatctctcctttttataacaaatcaagaaatatgaagcactttctcttaacttaatttttcctgctgtatccagaagaaataattgtgtcatgattaatgtgtatttactgtactaattagaaaatatagtttgaggccgggcacggtggctcacgcctgtaatcccagtacttgggaggccaaggcaggcatatcaacttgaggccaggagttaaagagcagcctggctaacatggtgaaaccccatctctactaaaaatacaaaaaattagccgagcacggtggtgcatgcctgtaatcccagctacttgggaggctgaggcacgagattccttgaacccaagaggttgaggctatgttgagctgagatcacaccactgtactccagcctggatgacagagtggagactctgtttcaaaaaaacagaaaagaaaatatagtttgattcttcatttttttaaatttgcaaatctcaggataaagtttgctaagtaaattagtaatgtactatagatataactgtacaaaaattgttcaacctaaaacaatctgtaattgcttattgttttattgtatactctttgtcttttaagacccctaatagccttttgtaacttgatggcttaaaaatacttaataaatctgccatttcaaatttcaaaaaaaaaaaaaaaaaaaaaa

SEQ ID NO: 1178 - DNA, 4992 bp, Homo sapiens
aacctttgccagccttgtgggagggggctagggtacttggcttgctttgctatgtgtgtgaagttgccttcattactgcccttctcttgctgcctcctgggcagggcctgcctcctctggctcagtgtgagattgaaatccaggccctactcacatgaatttggaccctgagtccagagtttagagaggggagggagagagaagagcaccagaaaggtagatgagagacccttattttggctgtgtggaggctctaggcagctgatcgctttgaagtgtcacttgatgcttatgggcctgctgaggccttacatcctgggggagaggggaacagtgatggtgagtgggtacagactaggaggacgtgtcaagactgcttccagccctaggacagtgtattcaagagttgagtgctgagggtctgtggcgtatgcccagcccttagtttctggcccacgtgaagcaggggggcactaggacccagaggctagcacggttcctgacaagtctagagcagcactagcgcagagtgagactcatcagctggcaagcaggattctgtgtctctgggttcaggaatcctcaggcagcagaggggacttgctcctcagcccccatcactgcccccacccctacccgtgtaggccaccgagtgaggcccatggactggggagggctgtgcctgacgactcctgtgtccctctatgagggcccagcgccctgaccctcctgcctaggtttctaccttttctctctgtctttggccagctgggggagtgggtagaggccgggtgagcaacatggcacagagcaagaggcacgtgtacagccggacgcccagcggcagcaggatgagtgcggaggcaagcgcccggcctctgcgggtgggctcccgtgtagaggtgattggaaaaggccaccgaggcactgtggcctatgttggagccacactgtttgccactggcaaatgggtaggcgtgattctggatgaagcaaagggcaaaaatgatggaactgttcaaggcaggaagtacttcacttgtgatgaagggcatggcatctttgtgcgccagtcccagatccaggtatttgaagatggagcagatactacttccccagagacacctgattcttctgcttcaaaagtcctcaaaagagagggaactgatacaactgcaaagactagcaaactgcggggactgaagcctaagaaggcaccgacagcccgaaagaccacaactcggcgacccaagcccacgcgcccagccagtactggggtggctggggccagtagctccctgggcccctctggctcagcgtcagcaggtgagctgagcagcagtgagcccagcaccccggctcagactccgctggcagcacccatcatccccacgccggtcctcacctctcctggagcagtccccccgcttccttccccatccaaggaggaggagggactaagggctcaggtgcgggacctggaggagaaactagagaccctgagactgaaacgggcagaagacaaagcaaagctaaaagagctggagaaacacaaaatccagctggagcaggtgcaggaatggaagagcaaaatgcaggagcagcaggccgacctgcagcggcgcctcaaggaggcgagaaaggaagccaaggaggcgctggaggcaaaggaacgctatatggaggagatggctgatactgctgatgccattgagatggccactttggacaaggagatggctgaagagcgggctgagtccctgcagcaggaggtggaggcactgaaggagcgggtggacgagctcactactgacttagagatcctcaaggctgagattgaagagaagggctcagatggcgctgcatccagttatcagctcaagcagcttgaggagcagaatgcccgcctgaaggatgccctggtgaggatgcgggatctttcttcctcagagaagcaggagcatgtgaagctccagaagctcatggaaaagaagaaccaagagctggaagttgtgaggcaacagcgggagcgtctgcaggaggagctaagccaggcagagagcaccattgatgagctcaaggagcaggtggatgctgctctgggtgctgaggagatggtggagatgctgacagatcggaacctgaatctggaagagaaagtgcgcgagttgagggagactgtgggagacttggaagcgatgaatgagatgaacgatgagctgcaggagaatgcacgtgagacagaactggagctgcgggagcagctggacatggcaggcgcgcgggttcgtgaggcccagaagcgtgtggaggcagcccaggagacggttgcagactaccagcagaccatcaagaagtaccgccagctgaccgcccatctacaggatgtgaatcgggaactgacaaaccagcaggaagcatctgtggagaggcaacagcagccacctccagagacctttgacttcaaaatcaagtttgctgagactaaggcccatgccaaggcaattgagatggaattgaggcagatggaggtggcccaggccaatcgacacatgtccctgctgacagccttcatgcctgacagcttccttcggccaggtggggaccatgactgcgttctggtgctgttgctcatgcctcgtctcatttgcaaggcagagctgatccggaagcaggcccaggagaagtttgaactaagtgagaactgttcagagcggcctgggctgcgaggagctgctggggagcaactcagctttgctgctggactggtgtactcgctgagcctgctgcaggccacgctacaccgctatgagcatgccctctctcagtgcagtgtggatgtgtataagaaagtgggcagcctgtaccctgagatgagtgcccatgagcgctccttggatttcctcattgaactgctgcacaaggatcagctggatgagactgtcaatgtggagcctctcaccaaggccatcaagtactatcagcatctgtacagcatccaccttgccgaacagcctgaggactgtactatgcagctggctgaccacattaagttcacgcagagtgctctggactgcatgagtgtggaggtaggacggctgcgtgccttcttgcagggtgggcaggaggctacagatattgccctcctgctccgggatctggaaacttcatgcagtgacatccgccagttctgcaagaagatccgaaggcgaatgccagggacagatgctcctgggatcccagctgcactggcctttggaccacaggtatctgacacgctcctagactgcaggaaacacttgacgtgggtcgtggctgtgctgcaggaggtggcagctgctgctgcccagctcattgccccactggcagagaatgaggggctacttgtggctgctctggaggaactggctttcaaagcaagcgagcagatctatgggaccccctccagcagcccctatgagtgtctgcgccagtcatgcaacatcctcatcagtaccatgaacaagctggccacagccatgcaggagggggagtatgatgcagagcggccccccagcaagcctccaccggttgaactgcgggctgctgcccttcgtgcagagatcacagatgctgaaggcctgggtttgaagctcgaagatcgagagacagttattaaggagttgaagaagtcactcaagattaagggagaggagctaagtgaggccaatgtgcggctgagcctcctggagaagaagttggacagtgctgccaaggatgcagatgagcgcatcgagaaagtccagactcggctggaggagacccaggcactgctgcgaaagaaggagaaagagtttgaggagacaatggatgcactccaggctgacatcgaccagctggaggcagagaaggcagaactaaagcagcgtctgaacagccagtccaaacgcacgattgagggactccggggccctcctccttcaggcattgctactctggtctctggcattgctggtgaagaacagcagcgaggagccatccctgggcaggctccagggtctgtgccaggcccagggctggtgaaggactcaccactgctgcttcagcagatctctgccatgaggctgcacatctcccagctccagcatgagaacagcatcctcaagggagcccagatgaaggcatccttggcatccctgccccctctgcatgttgcaaagctatcccatgagggccctggcagtgagttaccagctggagcgctgtatcgtaagaccagccagctgctggagacattgaatcaattgagcacacacacgcacgtagtagacatcactcgcaccagccctgctgccaagagcccgtcggcccaacttatggagcaagtggctcagcttaagtccctgagtgacaccgtcgagaagctcaaggatgaggtcctcaaggagacagtatctcagcgccctggagccacagtacccactgactttgccaccttcccttcatcagccttcctcagggccaaggaggagcagcaggatgacacagtctacatgggcaaagtgaccttctcatgtgcggctggttttggacagcgacaccggctggtgctgacccaggagcagctgcaccagcttcacagtcgcctcatctcctaagcactcctttcccctgctgtccccttcgaccctcagccctctggtgccgctctgcccgatgcacagccacctcagccagcccccaggtagaaacgtgggttaagctcttcctgccccgttcagcttcactcccaccctttcagcgtcctgccccttcaccttgacccgggttcccccactcccattccctggcctctgccataatttgttgttcaactgctccctccttcctgaggggcctcagggcttgtggggggtaggctgagaccccaccaccaaaggttaagtgaggtccccttgattgaggacttcaccccttgattaaagcaacttctgcttcagtgaaaaaaaaaaa

SEQ ID NO: 1179 - DNA, 490 bp, Homo sapiens
ctatagaagacctgggacagaggactgctgtctgccctctctggtcaccctgcctagctagaggatctgtgaccccagccatgaggaccctcgccatccttgctgccattctcctggtggccctgcaggcccaggctgagccactccaggcaagagctgatgaggttgctgcagccccggagcagattgcagcggacatcccagaagtggttgtttcccttgcatgggacgaaagcttggctccaaagcatccaggctcaaggaaaaacatggcctgctattgcagaataccagcgtgcattgcaggagaacgtcgctatggaacctgcatctaccagggaagactctgggcattctgctgctgagcttgcagaaaaagaaaaatgagctcaaaatttgctttgagagctacagggaattgctattactcctgtaccttctgctcaatttcctttcctcatcccaaataaatgccttggtacaagaaaag

SEQ ID NO: 1180 - DNA, 420 bp, Homo sapiens
gggggctggccgagcgccgtgcgcgcttgggagaaggccggaagcttaccagccgagaaggaattcctagctagcttcagagccggtgcctccggagccagcgtggtggccatagacaacaagttcgaacaggccatggatctggtgaagaatcatctgatgtatgctgtgagagaggaggtggagatcctgaaggagcagatccgagagctggtggagaagaactcccagctagagcgtgagaacaccctgttgaagaccctggcaagcccagagcagctggagaagttccagtcctgtctgagccctgaagagccagctcccgaatccccacaagtgcccgaggcccctggtggttctgcggtgtaagtcgctctgtcctcagggtgggcagagccactaaacttgttttacctaggg

SEQ ID NO: 1181 - DNA, 1326 bp, Homo sapiens
gcggagcgagccctgaaaggctataggcgagggggcggctccgcggggccgggcgaggagtccagagagccatggccgccctgcgtgtcctgctgtcctgcgcccgcggcccgctgaggcccccggttcgctgtcccgcctggcgtcccttcgcctcgggtgctaactttgagtacatcatcgcagaaaaaagagggaagaataacaccgtggggttgatccaactgaaccgccccaaggccctcaatgcactttgcgatggcctgattgacgagctcaaccaggccctgaagatcttcgaggaggacccggccgtgggggccattgtcctcaccggcggggataaggcctttgcagctggagctgatatcaaggaaatgcagaacctgagtttccaggactgttactccagcaagttcttgaagcactgggaccacctcacccaggtcaagaagccagtcatcgctgctgtcaatggctatgcctttggcgggggctgtgagcttgccatgatgtgtgatatcatctatgccggtgagaaggcccagtttgcacagccggagatcttaataggaaccatcccaggtgcgggcggcacccagagactcacccgtgctgttgggaagtcgctggcgatggagatggtcctcaccggtgaccggatctcagcccaggacgccaagcaagcaggtcttgtcagcaagatttgtcctgttgagacactggtggaagaagccatccagtgtgcagaaaaaattgccagcaattctaaaattgtagtagcgatggccaaagaatcagtgaatgcagcttttgaaatgacattaacagaaggaagtaagttggagaagaaactcttttattcaacctttgccactgatgaccggaaagaagggatgaccgcgtttgtggaaaagagaaaggccaacttcaaagaccagtgagaaccagctgcccctgcttcacacctctgcttggagaggacaagtgcagcctgtcagttttagaagcaagtaaatcatcctcttttcaagagcagtgtccgtggtgtgcagttcctctccaattgctgcgtggtcgtggcccgacctctcacggcatgacagccttcgtcacccagcctgtgagggtcctgactggagcaccttctaaatctaagattctgctgaggagcccccgctggtccctctgggcatgctgtgctcggacggaaagcggggcctgcgggtccttgtgtccctgccgctgaagaatggggctgctctgagggaaacgctgtctgctgccttcatacagatgctgattaaagtgatagcgattcagatt

SEQ ID NO: 1182 - DNA, 2512 bp, Homo sapiens
gccgagagcccgcgcccacagccatgtcctcgtcagccggcagcggccaccagcccagccagagccgcgccatccccacccgcaccgtggccatcagcgacgccgcgcagctacctcatgactattgcaccacgcccggggggacgctcttctccaccacaccgggaggaactcgaatcatttatgacagaaagtttctgttggatcgtcgcaattctcccatggctcagaccccaccctgccacctgcccaatatcccaggagtcactagccctggcaccttaattgaagactccaaagtagaagtaaacaatttgaacaacttgaacaatcacgacaggaaacatgcagttggggatgatgctcagttcgagatggacatctgactctcctgcaaggattagaagaaaagcagcaacactgatacttgtgtgcacctgatttggccaataggatcaacagtgaaaagacagaagaggcaataccagcagtccccattacagtctccacctccccgtcttcctctgggtgccaaatgatgggaagatgagcttcatctgaccatttcttctccctgtctcctgttccccttcccagttaaacaggttagattgaaggcccttgctgtatttctgtagagctaagcagcccttagaggaaaacagttcaactctgactttcctagttgtttttttattgagagccaccctcataccctgtaattttgtcccaaatcaaatatcaacctaccaacaactgcctggctgggaagtctggggaagggatacagagcttggtgggcctaacaccattcatattccttaccctctgtctctcctccctgtatcccacctatggttcagtgttgcaagagtctgggcttggggtctttaaaaccagcagggggaaatgataaaaagagagctgctttcccttttaccttgaggtatttgtccctcgggacagagcacagcttgtgcaactctggtagcgttaccctgtgacactgttttgaggtccacttcctttctttcctctgggaggaatgtcttctgtctttggtattatagttcatcttcccattcttttacttagtgcatttgtgcagatatttttaactctgtacatcagaagagagcccttggtaaccagttttgctcttcttctgccactcctccctgcttgcatctcgttgctggcagagtcctcttgtacttcaagaaagcaaagtgattttgtctgctcctagagcaggtccataccaagtaatagaggcactttagcttccacttggtgggtaaggcctgatcatagtattctgtcagataatgcctaagaatgaccgctgaagaacgttgacccatttgagtacccggtctcagtcgtcatttttaagtccagtgagcattgtggtagttgttcttagattgcagtttcttatgttttgagtttgaagttgattttcagaatgttcttagaaaagaactgcatttttttcctttgtggatctgctttgtttggctgctgggatagataagcatgggcttaaaaaatgtgttcctcccagttttcttgcctttcctgttgtactctgaatttctctccctacctccctcactttcttcctctctccttcctttccttcctttttctctaccaggccatttttcaaatttacatcaaagatacctgaagtgttggtatctgagaatatctgtcactcctcttatctgagaagtgaccttttatttttaagatgactacagacctatttttagatatgttttcagtacaattttgaacagcaactttttaattaaacatcttccagtgttaggaagttgagaaacgttcataggcaagtctgctgttctatgtcaccatcttttgtctcccctagtcccccaggagctctttcctttcccctctagttttgggtgtgcatgtttggagtttgtagtgggtggtttgtaaaactggaccattctgccttgctatgggttgttcaagaaagcctcattcttttctgtgaccctttcgcttttgcattcaccctccttcccacctacctgtcctggggctgttgagcagcataataatcccgggagaatgattcccctcatagaaagacaaaagcatccatcccctcatagttaagtagccactggtgtcctgggaatttctggttggatttggtgccctgaacttttttattaagaaatcagatcccagggtgagagtaacaggccatttggccaagaaagaaacctgtttgtttttcttttgaactatgaaaagaccctgtttgtgaatatattttagaaagagaggaaggatgtctgcagaactttgttctgttttctgccacaaaaatgtgaatagttcagagtgaaaaccttttgtgatggttgatgtctcaggaataagctggatctccaatgttttggggatgctttgagtctcaaaaaaaattgataatcagaaaagtaaaaaaaaaaaaaaaaaaaaaaaa

SEQ ID NO: 1183 - DNA, 1830 bp, Homo sapiens
cctgcctgcacggcacaggagagcaaacttctacagacagaccaaggcttccatttgctgctgacacatggaactgaggtgaaattgtgctccatgattttacagatttcataacgtttaagagacgggactcaggtcatcaaaatgaaagccctcatctttgcagctgctggcctcctgcttctgttgcccactttttgtcagagtggcatggaaaatgatacaaacaacttggcaaagccaaccttacccattaagacctttcgtggagctcccccaaattcttttgaagagttccccttttctgccttggaaggctggacaggagccacgattactgtaaaaattaagtgccctgaagaaagtgcttcacatctccatgtgaaaaatgctaccatggggtacctgaccagctccttaagtactaaactgatacctgccatctacctcctggtgtttgtagttggtgtcccggccaatgctgtgaccctgtggatgcttttcttcaggaccagatccatctgtaccactgtattctacaccaacctggccattgcagattttcttttttgtgttacattgccctttaagatagcttatcatctcaatgggaacaactgggtatttggagaggtcctgtgccgggccaccacagtcatcttctatggcaacatgtactgctccattctgctccttgcctgcatcagcatcaaccgctacctggccatcgtccatcctttcacctaccggggcctgcccaagcacacctatgccttggtaacatgtggactggtgtgggcaacagttttcttatatatgctgccatttttcatactgaagcaggaatattatcttgttcagccagacatcaccacctgccatgatgttcacaacacttgcgagtcctcatctcccttccaactctattacttcatctccttggcattctttggattcttaattccatttgtgcttatcatctactgctatgcagccatcatccggacacttaatgcatacgatcatagatggttgtggtatgttaaggcgagtctcctcatccttgtgatttttaccatttgctttgctccaagcaatattattcttattattcaccatgctaactactactacaacaacactgatggcttatattttatatatctcatagctttgtgcctgggtagtcttaatagttgcttagatccattcctttattttctcatgtcaaaaaccagaaatcactccactgcttaccttacaaaatagtgaaatgatcttagagaacaaggacagccatcacagagaacgtctgttttcaagaacaacataagcatagtgcaaggagctccatttccgagctcctaagaaatatgcttcaaaggtcaaacattacaaaagcattagtagtttgtttgtttgtttttgagactgagtctcactttatcacccagactggcgtgcagtggcactatcttggctcattgcaacctctgcctcccaggtcagcctcccaagtagctgggattacaccaccatgcccagctactaaaaatacttgtatttttagtagagacggggtttcaccatgttgaccaggctggtcttgaactcctgacctcaagtgatcttccggcctcagcctcccaaagtgctggattacaggcgtgagccactgagccagccagcattagtaatttttaaaaacactttatcagtattttaaaaatgttaatgcaggagaaaagatatcacaactctatggaaaatgacatttccatttgccttattgctacttcaagctctttaaatcaccatcttccctatttc

SEQ ID NO: 1184 - DNA, 2742 bp, Homo sapiens
ctagtattctactagaactggaagattgctctccgagttttttttttgttattttgttaaaaaataaaaagcttgagcagcaattcatattactgtcacaggtatttttgctgtgctgtgcaaggtaactctgctagctaagattcacaatgttgaaagcccttttcctaactatgctgactctggcgctggtcaagtcacaggacaccgaagaaaccatcacgtacacgcaatgcactgacggatatgagtgggatcctgtgagacagcaatgcaaagatattgatgaatgtgacattgtcccagacgcttgtaaaggtggaatgaagtgtgtcaaccactatggaggatacctctgccttccgaaaacagcccagattattgtcaataatgaacagcctcagcaggaaacacaaccagcagaaggaacctcaggggcaaccaccggggttgtagctgccagcagcatggcaaccagtggagtgttgcccgggggtggttttgtggccagtgctgctgcagtcgcaggccctgaaatgcagactggccgaaataactttgtcatccggcggaacccagctgaccctcagcgcattccctccaacccttcccaccgtatccagtgtgcagcaggctacgagcaaagtgaacacaacgtgtgccaagacatagacgagtgcactgcagggacgcacaactgtagagcagaccaagtgtgcatcaatttacggggatcctttgcatgtcagtgccctcctggatatcagaagcgaggggagcagtgcgtagacatagatgaatgtaccatccctccatattgccaccaaagatgcgtgaatacaccaggctcattttattgccagtgcagtcctgggtttcaattggcagcaaacaactatacctgcgtagatataaatgaatgtgatgccagcaatcaatgtgctcagcagtgctacaacattcttggttcattcatctgtcagtgcaatcaaggatatgagctaagcagtgacaggctcaactgtgaagacattgatgaatgcagaacctcaagctacctgtgtcaatatcaatgtgtcaatgaacctgggaaattctcatgtatgtgcccccagggataccaagtggtgagaagtagaacatgtcaagatataaatgagtgtgagaccacaaatgaatgccgggaggatgaaatgtgttggaattatcatggcggcttccgttgttatccacgaaatccttgtcaagatccctacattctaacaccagagaaccgatgtgtttgcccagtctcaaatgccatgtgccgagaactgccccagtcaatagtctacaaatacatgagcatccgatctgataggtctgtgccatcagacatcttccagatacaggccacaactatttatgccaacaccatcaatacttttcggattaaatctggaaatgaaaatggagagttctacctacgacaaacaagtcctgtaagtgcaatgcttgtgctcgtgaagtcattatcaggaccaagagaacatatcgtggacctggagatgctgacagtcagcagtatagggaccttccgcacaagctctgtgttaagattgacaataatagtggggccattttcattttagtcttttctaagagtcaaccacaggcatttaagtcagccaaagaatattgttaccttaaagcactattttatttatagatatatctagtgcatctacatctctatactgtacactcacccataacaaacaattacaccatggtataaagtgggcatttaatatgtaaagattcaaagtttgtctttattactatatgtaaattagacattaatccactaaactggtcttcttcaagagagctaagtatacactatctggtgaaacttggattctttcctataaaagtgggaccaagcaatgatgatcttctgtggtgcttaaggaaacttactagagctccactaacagtctcataaggaggcagccatcataaccattgaatagcatgcaagggtaagaatgagtttttaactgctttgtaagaaaatggaaaaggtcaataaagatatatttctttagaaaatggggatctgccatatttgtgttggtttttattttcatatccagcctaaaggtggttgtttattatatagtaataaatcattgctgtacaacatgctggtttctgtagggtatttttaattttgtcagaaattttagattgtgaatattttgtaaaaaacagtaagcaaaattttccagaattcccaaaatgaaccagataccccctagaaaattatactattgagaaatctatggggaggatatgagaaaataaattccttctaaaccacattggaactgacctgaagaagcaaactcggaaaatataataacatccctgaattcaggcattcacaagatgcagaacaaaatggataaaaggtatttcactggagaagttttaatttctaagtaaaatttaaatcctaacacttcactaatttataactaaaatttctcatcttcgtacttgatgctcacagaggaagaaaatgatgatggtttttattcctggcatccagagtgacagtgaacttaagcaaattaccctcctacccaattctatggaatattttatacgtctccttgtttaaaatctgactgctttactttgatgtatcatatttttaaataaaaataaatattcctttagaagatcactctaaaa

SEQ ID NO: 1185 - DNA, 2673 bp, Homo sapiens
gtgccgcgcccagagcagcagcaacagcgaagatgcgaggccattacctgtttgatccctgtcggaaacctggcacgggccaacttttcccgattatcacgccaagaagttgcaaggactagtcgaagactcggaggggccagggcgagggcgcgctcccccgcgcgctgcctcctccctcctccctccggccgcccgagctcccggcctctctcccgcccgcgctcactccctccgcccgcctccctcctctggccccctccgcgcggcacagggcggggggtgccgcgaaactccgacccgagccacttggacttgcacagtgtccgccgggcgcaggggccgaccgcacgcagtcgcgcagttctgcctccgcctgccagtctcgcccgcgatcccggcccggggctgtggcgtcgactccgacccaggcagccagcagcccgcgcgggagccggaccgccgccggaggagctcggacggcatgctgagccccctccttggctgaagcccgagtgcggagaagcccgggcaaacgcaggctaaggagaccaaagcggcgaagtcgcgagacagcggacaagcagcggaggagaaggaggaggaggcgaacccagagaggggcagcaaaagaagcggtggtggtgggcgtcgtggccatggcggcggctatcgccagctcgctcatccgtcagaagaggcaagcccgcgagcgcgagaaatccaacgcctgcaagtgtgtcagcagccccagcaaaggcaagaccagctgcgacaaaaacaagttaaatgtcttttcccgggtcaaactcttcggctccaagaagaggcgcagaagaagaccagagcctcagcttaagggtatagttaccaagctatacagccgacaaggctaccacttgcagctgcaggcggatggaaccattgatggcaccaaagatgaggacagcacttacactctgtttaacctcatccctgtgggtctgcgagtggtggctatccaaggagttcaaaccaagctgtacttggcaatgaacagtgagggatacttgtacacctcggaacttttcacacctgagtgcaaattcaaagaatcagtgtttgaaaattattatgtgacatattcatcaatgatataccgtcagcagcagtcaggccgagggtggtatctgggtctgaacaaagaaggagagatcatgaaaggcaaccatgtgaagaagaacaagcctgcagctcattttctgcctaaaccactgaaagtggccatgtacaaggagccatcactgcacgatctcacggagttctcccgatctggaagcgggaccccaaccaagagcagaagtgtctctggcgtgctgaacggaggcaaatccatgagccacaatgaatcaacgtagccagtgagggcaaaagaagggctctgtaacagaaccttacctccaggtgctgttgaattcttctagcagtccttcacccaaaagttcaaatttgtcagtgacatttaccaaacaaacaggcagagttcactattctatctgccattagaccttcttatcatccatactaaagccccattatttagattgagcttgtgcataagaatgccaagcattttagtgaactaaatctgagagaaggactgccaaattttctcatgatctcacctatgactttggggatgataatccaaaagtatttcacagcactaatgctgatcaaaatttgctctcccaccaagaaaatgtaaaagaccacaattgttcttcaaaaacaaacaaaacaaaacaaaacaaaattaactgcttaaatgttttgtcggggcaaacaaaattatgtgaattgtgttgttttcttggcttgatgttttctatctacgcttgattcacatgtactcttttctttggcatagtgcaactttatgatttctgaaattcaatggttctattgactttttgcgtcacttaatccaaatcaaccaaattcagggttgaatctgaattggcttctcaggctcaaggtaacagtgttcttgtggtttgaccaattgtttttctttctttttttttttttagatttgtggtattctggtcaagttattgtgctgtactttgtgcgtagaaatgtgagttgtattgtcaaccccagtcagtaaagagaacttcaaaaaattatcctcaagtgtagatttctcttaattccatttgtgtatcatgttaaactattgttgtggcttcttgtgtaaagacaggaactgtggaactgtgatgttgtcttttgtgttgttaaaataagaaatgtcttatctgtatatgtatgagtcttcctgtcattgtatttggcacatgaatattgtgtacaaggaattgttaagactggttttccctcaacaacatatattatacttgctactggaaaagtgtttaagacttagctaggtttccatttagatcttcatatctgttgcatggaagaaagttgggttcttggcatagagttgcatgatatgtaagattttgtgcattcataattgttaaaaatctgtgttccaaaagtggacatagcatgtacaggcagttttctgtcctgtgcacaaaaagtttaaaaaagttgtttaatatttgttgttgtatacccaaatacgcaccgaataaactctttatattcattcaaaga

SEQ ID NO: 1186 - DNA, 2107 bp, Homo sapiens
agtaaaagtccacagttaccgtgagagaaaaaaagaggagaaagcagtgcagccaaactcggaagaaaagagaggaggaaaaggactcgactttcacattggaacaaccttctttccagtgctaaggctctctgatctggggaacaacacctggacatggctccagagatcaacttgccgggcccaatgagcctcattgataacactaaagggcagctggtggtgaatccagaagctctgaagatcctatctgcaattacgcagcctgtggtggtggtggcgattgtgggcctctatcgcacaggcaaatcctacctgatgaacaagctggctgggaagaaaaacggcttctctctaggctccacagtgaagtctcacaccaagggaatctggatgtggtgtgtgcctcatcccaagaagccagaacacaccctagttctgctcgacactgagggcctgggagatatagagaagggtgacaatgagaatgactcctggatctttgccttggccatcctcctgagcagcaccttcgtgtacaatagcatgggaaccatcaaccagcaggccatggaccaacttcactatgtgacagagctgacagatcgaatcaaggcaaactcctcacctggtaacaattctgtagacgactcagctgactttgtgagcttttttccagcatttgtgtggactctcagagatttcaccctggaactggaagtagatggagaacccatcactgctgatgactacttggagctttcgctaaagctaagaaaaggtactgataagaaaagtaaaagctttaatgatcctcggttgtgcatccgaaagttcttccccaagaggaagtgcttcgtcttcgattggcccgctcctaagaagtaccttgctcacctagagcagctaaaggaggaagagctgaaccctgatttcatagaacaagttgcagaattttgttcctacatcctcagccattccaatgtcaagactctttcaggtggcattgcagtcaatgggcctcgtctagagagcctggtgctgacctacgtcaatgccatcagcagtggggatctaccctgcatggagaacgcagtcctggccttggcccagatagagaactcagccgcagtggaaaaggctattgcccactatgaacagcagatgggccagaaggtgcagctgcccacggaaaccctccaggagctgctggacctgcacagggacagtgagagagaggccattgaagtcttcatgaagaactctttcaaggatgtggaccaaatgttccagaggaaattaggggcccagttggaagcaaggcgagatgacttttgtaagcagaattccaaagcatcatcagattgttgcatggctttacttcaggatatatttggccctttagaagaagatgtcaagcagggaacattttctaaaccaggaggttaccgtctctttactcagaagctgcaggagctgaagaataagtactaccaggtgccaaggaaggggatacaggccaaagaggtgctgaaaaaatatttggagtccaaggaggatgtggctgatgcacttctacagactgatcagtcactctcagaaaaggaaaaagcgattgaagtggaacgtataaaggctgaatctgcagaagctgcaaagaaaatgttggaggaaatacaaaagaagaatgaggagatgatggaacagaaagagaagagttatcaggaacatgtgaaacaattgactgagaagatggagagggacagggcccagttaatggcagagcaagagaagaccctcgctcttaaacttcaggaacaggaacgccttctcaaggagggattcgagaatgagagcaagagacttcaaaaagacatatgggatatccagatgagaagcaaatcattggagccaatatgtaacatactctaaaagtccaaggagcaaaatttgcctgtccagctccctctccccaagaaacaacatgaatgagcaacttcagagtgtcaaacaactgccattaaacttaactcaaaatcatgatgcatgcatttttgttgaaccataaagtttgcaaagtaaaggttaagtatgaggtcaatgtttt

SEQ ID NO: 1187 - DNA, 1194 bp, Homo sapiens
ggcacgagcccagcgccgccgccatgtcctccggggctagcgcgagcgccctgcagcgcttggtagagcagctcaagttggaggctggcgtggagaggatcaaggtctctcaggcagctgcagagcttcaacagtactgtatgcagaatgcctgcaaggatgccctgctggtgggtgttccagctggaagtaaccccttccgggagcctagatcctgtgctttactctgaagactctaggagagaagtttgctgaggaatgccttcaagcacaaagtgatgaatgactgccttcaagtctcaagaaaacacttttccctaacttttagagatatttcagccctttcctgtggcctggtcctatagccaaaatcacagatattcatgagtttctacttgagtgagaaaactgggtgaaggaatagaattttaaatagtaataactgcttgttttttgtgtgcaagtacttttatacataagataaacaaaaaccttaccaccaaacataccaaaatgcacctctttcataagtgagttactaagatttctatacctggaatatcatgtatgtttcatttactggatgtttacattttaggaaggaaaatagttttgtttatttaaacaactgaatacttataaactgttgttcctggaagttatttattccataaaaaatttgttcttttctcatgaatttataattcctaaatgaagaccagaaagtacaaattgctgggaggaagaataggctttattaatcaactgatgtcttgatttttctaaatgggaagattgctttatttttaacactaattatgggagcagattcttaccaaacttctttggaaaagttaatgttatgatgtgcattaggctgccccatcgtgtatataaatgaaggcagatttgatttttgtattcttacgtttactctgctttgtagttgtggctgtacttaaagcaatacagaatttcatatatttaaaaatgtttaaaatgtgacccacagaacattgtaaatgattaaaaactaacatgaaaatattacaacctaaaagaattcttaacttcacaagtgttttacttcgacgatgtgcctttgatttaatttgggacacttttttagaaggatacattattcgtgtttgcaacggtctttgaagagcttggaaataaaatttctgcttaatt

SEQ ID NO: 1188 - DNA, 1866 bp, Homo sapiens
tctctgaagttccagaatcgatggaagtggacggcacgccgcggcggggtgggtgcaagatgccgctgccggttcaggtgtttaacttgcagggggccgtggagcccatgcagatcgacgtggacccccaggaagacccgcagaatgcacctgacgtcaactacgtggtggagaaccccagcctggatctggaacagtacgcggccagctacagcggcctgatgcgcatcgaacggctgcagttcattgctgatcactgccccacgctgcgggtggaggccctgaagatggccctctccttcgtgcagagaacctttaacgtggacatgtacgaggagatccaccgcaagctctcagaggccaccagggagctgcagaacgcacccgacgccatccctgagagcggcgtggagcccccagccctggacacggcctgggtggaggccacgcggaagaaggcgctgctgaagctggagaagctggacacagacctgaagaactacaagggcaactccatcaaagagagcatccggcgcggccacgacgacctgggcgaccactacctggactgtggggacctcagcaacgccctcaagtgctattcccgggcccgggactactgcaccagcgccaaacacgtcatcaacatgtgcctcaatgtcatcaaggtcagcgtctacttgcagaattggtctcatgtgctcagctacgtcagcaaggctgagtccaccccagagattgccgagcagcgaggagagcgtgacagccagacccaggccatcctcaccaagctcaagtgtgccgcaggcttggcagagctggccgccaggaagtacaagcaggctgccaagtgcctcctgctggcttcctttgatcactgtgacttccctgagctgctgtcccccagcaacgtggccatctacggtggcctgtgcgccttggctacctttgaccggcaggagctgcagcgcaatgtcatctccagcagctccttcaagttgttcttggagctggagccacaggtccgagacatcatcttcaaattctacgagtccaagtacgcctcatgtctcaagatgctggacgagatgaaggacaacctgctcctggacatgtatctggccccccatgtcaggaccctgtacacccagattcgcaaccgtgccctcatccagtatttcagcccctacgtgtcagccgacatgcataggatggcggcagccttcaataccacggtggccgccctggaggacgagctgacgcagctaatcctggaggggctgatcagtgcccgtgtggactcacacagcaagatcctatacgcccgggacgtggatcagcgcagcaccacctttgagaagtctctgttgatgggcaaggagttccagcgccgcgccaaggccatgatgctgcgggcagctgtgctccgcaaccagatccatgtcaagtccccgcccagagaagggagccagggggagctgactccagccaacagccagtcccggatgagcaccaacatgtgaggggtgaaccttggcctccaggacatctgcaccccctccccacctccacggacctcggacctccaggcggctcagtgctgcctgcggcccagctaaggggcctggccactgggtgccacccagcctgtgtgccctccctggggctgaggaggcaggcggctgctagttgtggcccttcctggaaggagaggcctgcagggctcgaccctgtgggtttctgtccccagggagcagactgtgcggcacccaggcccagtggcaccatttcccagacccctcctgttcccgcctcagtcaggtgcagacaagtgggcggtgtccattaaagagcagactcagcgtt

SEQ ID NO: 1189 - DNA, 1807 bp, Homo sapiens
ctctgagtcaccaacctgaggctgccccggccgcctgcgcacccggcagcaccatgacagatcaggcctttgtgacactaaccacaaacgatgcctacgccaaaggtgccctggtcctgggatcatctctgaaacagcacaggaccaccaggaggctggtcgtgctcgccacccctcaggtctcagactccatgagaaaagttttagagacagtctttgatgaagtcatcatggtagatgtcttggacagtggcgattctgctcatctaaccttaatgaagaggccagagttgggtgtcacgctgacaaagctccactgctggtcgcttacacagtattcaaaatgtgtattcatggatgcagatactctggtcctagcaaatattgatgatctttttgacagagaagaattgtcagcagcaccagacccagggtggcctgactgcttcaattccggagtcttcgtttatcagccttcagttgaaacatacaatcagctgttgcatcttgcttctgagcaaggtagttttgatggtggggaccaaggcatactgaacacattttttagcagctgggcaacaacagatatcagaaaacacctgccgtttatttataacctaagcagcatctctatatactcctacctcccggcatttaaagtgtttggtgcaagtgccaaagttgtgcatttcctgggacgagtcaaaccatggaattatacttatgatcccaaaacaaaaagtgtcaaaagtgaggcccatgatcccaacatgactcatccagagtttctcatcctgtggtggaacatctttaccaccaacgttttacctctgcttcaacaatttggccttgtcaaagacacctgctcatatgtaaatgtgctttcagacttggtctatacactggctttctcttgtggcttctgtagaaaggaagatgtctcaggagccatatcacatctgtcccttggggagatcccagctatggcacagccgtttgtatcctcggaagaacggaaggaacgatgggaacagggccaggctgattatatgggagcagattcctttgacaacatcaagaggaaacttgacacttacctccagtagaaacactgcatttttctgtgaacacatccacttcacaagccttgtttctgatacttagtatctagagctgggttgagaaaagtctgttacagttgctagaggttttcattaaaacttatcagatgagaggcttttttaggataagaggtgagaactgggcaaaagttgtgaagcagcaattctgttatatggacagtgttctgctttttaatcctatttagcttgtttcagaaattctcacttttgttgactgccaacatacaaagtaagggaaactcaagatattaagatggctgtatcagttcttaaaatctgcagagcctggttcaaaatcagtcactcccttcagaagcagacatggcatctgttccttgcttgcttgttggttgtgtacctttcacgagacctgaattttagaattgcccagtgctgccagagtgagtgagtgtaattctcctttcaggtaaagataggctatctcaacactgctgagtgattcataaacatatcaaccaatagcattaacccattttatttcctgtccttagtgtctgaagatgctcaccagttttctgtgtacagtaaggcagcatgctaaaatgcttttgttcagttctggatatttgaaaatagcagtgtgttctctgatggttacctgcagtggcaccctgtacaaaaaataaaagacttattggtgtaaa

SEQ ID NO: 1190 - DNA, 960 bp, Homo sapiens
agcagctccaaccagggcagccttcctgagaagatgcaaccaatcctgcttctgctggccttcctcctgctgcccagggcagatgcaggggagatcatcgggggacatgaggccaagccccactcccgcccctacatggcttatcttatgatctgggatcagaagtctctgaagaggtgcggtggcttcctgatacaagacgacttcgtgctgacagctgctcactgttggggaagctccataaatgtcaccttgggggcccacaatatcaaagaacaggagccgacccagcagtttatccctgtgaaaagacccatcccccatccagcctataatcctaagaacttctccaacgacatcatgctactgcagctggagagaaaggccaagcggaccagagctgtgcagcccctcaggctacctagcaacaaggcccaggtgaagccagggcagacatgcagtgtggccggctgggggcagacggcccccctgggaaaacactcacacacactacaagaggtgaagatgacagtgcaggaagatcgaaagtgcgaatctgacttacgccattattacgacagtaccattgagttgtgcgtgggggacccagagattaaaaagacttcctttaagggggactctggaggccctcttgtgtgtaacaaggtggcccagggcattgtctcctatggacgaaacaatggcatgcctccacgagcctgcaccaaagtctcaagctttgtacactggataaagaaaaccatgaaacgctactaactacaggaagcaaactaagcccccgctgtaatgaaacaccttctctggagccaagtccagatttacactgggagaggtgccagcaactgaataaatacctctcccagtgtaaatctggagccaagtccagatttacactgggagaggtgccagcaactgaataaatacctcttagctgagtgg

SEQ ID NO: 1191 - DNA, 3008 bp, Homo sapiens
cctgaatccttggagactgacatttttcccccctaaaggcatagacaacaaaagaaattttattgagaggaaaacacaagtccttaaactgcaaagatgtttgccaggatgtctgatctccatgttctgctgttaatggctctggtgggaaagacagcctgtgggttctccctgatgtctttattggaaagcctggacccagactggacccctgaccagtatgattacagctacgaggattataatcaggaagagaacaccagtagcacacttacccacgctgagaatcctgactggtactacactgaggaccaagctgatccatgccagcccaacccctgtgaacacggtggggactgcctcgtccatgggagcaccttcacatgcagctgcctggctcctttctctgggaataagtgtcagaaagtgcaaaatacgtgcaaggacaacccatgtggccggggccaatgtctcattacccagagtcctccctactaccgctgtgtctgtaaacacccttacacaggtcccagctgctcccaagtggttcctgtatgcaggccaaacccctgccagaatggggctacctgctcccggcataagcggagatccaagttcacctgtgcctgtcccgaccagttcaaggggaaattctgtgaaataggttctgatgactgctatgttggcgatggctactcttaccgagggaaaatgaataggacagtcaaccagcatgcgtgcctttactggaactcccacctcctcttgcaggagaattacaacatgtttatggaggatgctgaaacccatgggattggggaacacaatttctgcagaaacccagatgcggacgaaaagccctggtgctttattaaagttaccaatgacaaggtgaaatgggaatactgtgatgtctcagcctgctcagcccaggacgttgcctacccagaggaaagccccactgagccatcaaccaagcttccggggtttgactcctgtggaaagactgagatagcagagaggaagatcaagagaatctatggaggctttaagagcacggcgggcaagcacccatggcaggcgtccctccagtcctcgctgcctctgaccatctccatgccccagggccacttctgtggtggggcgctgatccacccctgctgggtgctcactgctgcccactgcaccgacataaaaaccagacatctaaaggtggtgctaggggaccaggacctgaagaaagaagaatttcatgagcagagctttagggtggagaagatattcaagtacagccactacaatgaaagagatgagattccccacaatgatattgcattgctcaagttaaagccagtggatggtcactgtgctctagaatccaaatacgtgaagactgtgtgcttgcctgatgggtcctttccctctgggagtgagtgccacatctctggctggggtgttacagaaacaggaaaagggtcccgccagctcctggatgccaaagtcaagctgattgccaacactttgtgcaactcccgccaactctatgaccacatgattgatgacagtatgatctgtgcaggaaatcttcagaaacctgggcaagacacctgccagggtgactctggaggccccctgacctgtgagaaggacggcacctactacgtctatgggatagtgagctggggcctggagtgtgggaagaggccaggggtctacacccaagttaccaaattcctgaattggatcaaagccaccatcaaaagtgaaagtggcttctaaggtactgtcttctggacctcagagcccactctccttggcaccctgacaccgggaggcctcatggccaacaatggacacctccagagcctccaggggaccacacagtagactatccctactctaagcagagacaactgccacccagcctgggccttcccagaccagcatttgcacaatatcaccaggcttcttctgcctcccttggtaacccaaggaatgatggaatcaacacaacatagtatgtttgctttccttacccaattgtaccttctagaaaatcagtgttcacagagactgcctccaccacaggcatcctgcaaatgcagactccagaatccccagcatcagcgggaaccaccatcacatctttattcctcagcccagacactcgaggcactcaacagaatcagccatccacgtctaggtatcagagaggaccacaaatacaacattctccatctgctttcagagttattattttaataaaggaagatctgggatgggctggtgggccattccagcttgccgaaatcaaagccatctgaagcctgtctctggtgaacaaacttcctctctggcctctcaggaatcagggtggcatggctcacaacagcagggccttcttctttttgacgtgcagaatctcagtggcatctgggttcacctccccactctgatgatctccagcctccactgcttctgccccccgctgctgaaatcaaacataccccaagttaaaatgaagctcccccacccccactcccggccccggttcccacaggacacgctaagaagcacagggagcatttaacaggctcaccctccctttccttttcccctcttctaccctccccaagaaaaagggccttcaaggcaggaatgagaaagcaaagccaatctctcatttagacctggcttctttcttctgaacaaagtagggttcaaaatgcagactgtcatatccagcgagtccctgaccctttctgcgaatgtaacgagcaagcagtcagcacagcctgggctgccctggcccgggattgatgtagccccggtaggtttgcctctgcagaactaatggctgtgacttcagagaaagccctgcaggaagtttaacctgcgtgtcatctgcctggtcatctcagacccatgaaattaggcgccttgtttgagctgcgtttcacacttctttagagctagctgacctttggccaaaaataaactttgaaaag

SEQ ID NO: 1192 - DNA, 2131 bp, Homo sapiens
cctgcctcgtactcctccatttatccgccatgataagtgccagccgagctgcagcagcccgtctcgtgggcgccgcagcctcccggggccctacggccgcccgccaccaggatagctggaatggccttagtcatgaggcttttagacttgtttcaaggcgggattatgcatcagaagcaatcaagggagcagttgttggtattgatttgggtactaccaactcctgcgtggcagttatggaaggtaaacaagcaaaggtgctggagaatgccgaaggtgccagaaccaccccttcagttgtggcctttacagcagatggtgagcgacttgttggaatgccggccaagcgacaggctgtcaccaacccaaacaatacattttatgctaccaagcgtctcattggccggcgatatgatgatcctgaagtacagaaagacattaaaaatgttccctttaaaattgtccgtgcctccaatggtgatgcctgggttgaggctcatgggaaattgtattctccgagtcagattggagcatttgtgttgatgaagatgaaagagactgcagaaaattacttggggcacacagcaaaaaatgctgtgatcacagtcccagcttatttcaatgactcgcagagacaggccactaaagatgctggccagatatctggactgaatgtgcttcgggtgattaatgagcccacagctgctgctcttgcctatggtctagacaaatcagaagacaaagtcattgctgtatatgatttaggtggtggaacttttgatatttctatcctggaaattcagaaaggagtatttgaggtgaaatccacaaatggggataccttcttaggtggggaagactttgaccaggccttgctacggcacattgtgaaggagttcaagagagagacaggggttgatttgactaaagacaacatggcacttcagagggtacgggaagctgctgaaaaggctaaatgtgaactctcctcatctgtgcagactgacatcaatttgccctatcttacaatggattcttctggacccaagcatttgaatatgaagttgacccgtgctcaatttgaagggattgtcactgatctaatcagaaggactatcgctccatgccaaaaagctatgcaagatgcagaagtcagcaagagtgacataggagaagtgattcttgtgggtggcatgactaggatgcccaaggttcagcagactgtacaggatctttttggcagagccccaagtaaagctgtcaatcctgatgaggctgtggccattggagctgccattcagggaggtgtgttggccggcgatgtcacggatgtgctgctccttgatgtcactcccctgtctctgggtattgaaactctaggaggtgtctttaccaaacttattaataggaataccactattccaaccaagaagagccaggtattctctactgccgctgatggtcaaacgcaagtggaaattaaagtgtgtcagggtgaaagagagatggctggagacaacaaactccttggacagtttactttgattggaattccaccagcccctcgtggagttcctcagattgaagttacatttgacattgatgccaatgggatagtacatgtttctgctaaagataaaggcacaagacgtgagcagcagattgtaatccagtcttctggtggattaagcaaagatgatattgaaaatatggttaaaaatgcagagaaatatgctgaagaagaccggcgaaagaaggaacgagttgaagcagttaatatggctgaaggaatcattcacgacacagaaaccaagatggaagaattcaaggaccaattacctgctgatgagtgcaacaagctgaaagaagagatttccaaaatgagggagctcctggctagaaaagacagtgaaacaggagaaaatattagacaggcagcatcctctcttcagcaggcatcattgaagctgttcgaaatggcatacaaaaagatggcatctgagcgagaaggctctggaagttctggcactggggaacaaaaggaagatcaaaaggaggaaaaacagtaataatagcagaaattttgaagccagaaggacaacatatgaagcttaggagtgaagagacttcc

SEQ ID NO: 1193 - DNA, 1506 bp, Homo sapiens
gggcgggggtcgcggtccccccctcaacatggcggcagcggtgctctaggcgccggaagggggcgtgaatcggtgcgaccgcgcgcgtgcgcagtaccgggtccgcgcctgtccccgaaacttcgcaccccgtcgaactctcgcgagagcgtatctgcgtgtcgggacgtgcggaggctctcactttccgtcatggcgctgaaggtagcgaccgtcgccggcagcgccgcgaaggcggtgctcgggccagcccttctctgccgtccctgggaggttctaggcgcccacgaggtcccctcgaggaacatcttttcagaacaaacaattcctccgtccgctaagtatggcgggcggcacacggtgaccatgatcccaggggatggcatcgggccagagctcatgctgcatgtcaagtccgtcttcaggcacgcatgtgtaccagtggactttgaagaggtgcacgtgagttccaatgctgatgaagaggacattcgcaatgccatcatggccatccgccggaaccgcgtggccctgaagggcaacatcgaaaccaaccataacctgccaccgtcgcacaaatctcgaaacaacatccttcgcaccagcctggacctctatgccaacgtcatccactgtaagagccttccaggcgtggtgacccggcacaaggacatagacatcctcattgtccgggagaacacagagggcgagtacagcagcctggagcatgagagtgtggcgggagtggtggagagcctgaagatcatcaccaaggccaagtccctgcgcattgccgagtatgccttcaagctggcgcaggagagcgggcgcaagaaagtgacggccgtgcacaaggccaacatcatgaaactgggcgatgggcttttcctccagtgctgcagggaggtggcagcccgctaccctcagatcaccttcgagaacatgattgtggataacaccaccatgcagctggtgtcccggccccagcagtttgatgtcatggtgatgcccaatctctatggcaacatcgtcaacaatgtctgcgcgggactggtcgggggcccaggccttgtggctggggccaactatggccatgtgtacgcggtgtttgaaacagctacgaggaacaccggcaagagtatcgccaataagaacatcgccaaccccacggccaccctgctggccagctgcatgatgctggaccacctcaagctgcactcctatgccacctccatccgtaaggctgtcctggcatccatggacaatgagaatatgcacactccggacatcgggggccagggcacaacatctgaagccatccaggacgtcatccgccacatccgcgtcatcaacggccgggccgtggaggcctaggctggccctaggaccttcttggtttgctccttggattccccttcccactccagcaccccagccagcctggtacgcagatcccagaataaagcaccttctccctagaaaaaaaaaaaaaaaaaaaaaaaaaaa

SEQ ID NO: 1194 - DNA, 1934 bp, Homo sapiens
ggagaccggccgcatggacccagggacagtggccaccatgcgtaagccccgctgctccctgcctgacgtgctgggggtggcggggctggtcaggcggcgtcgccggtacgctctgagcggcagcgtgtggaagaagcgaaccctgacatggagggtacgttccttcccccagagctcccagctgagccaggagaccgtgcgggtcctcatgagctatgccctgatggcctggggcatggagtcaggcctcacatttcatgaggtggattccccccagggccaggagcccgacatcctcatcgactttgcccgcgccttccaccaggacagctaccccttcgacgggttggggggcaccctagcccatgccttcttccctggggagcaccccatctccggggacactcactttgacgatgaggagacctggacttttgggtcaaaagcctctcagcagctggagcaggagctggcaggcggctcaccggttgatgaggagctgggcttcagccggggctggcgtgtgaatcctctgggtcctggcagtcctgagcgcctgagctgaatacagagggaagaggctgggagcaaggccgggtgctggggccggcaggctgtgttctgagagtgcctgctagaggagctctgtgttcccaaggagatggaggaagacctggggtgggggtggtacagggtagggagaggaggggcagaggctgtgaacagggagatgggggaggggggatggaggactcaagggatgtaagggatatggcttgaggagggatgggggcaggaatgagggaaggtcttgggtcaaggacatggacctacatccccagcagatgggggtggcaagggggagacgggtgggggtcgctgactatagactgtagctgggaggaggggatgctcccagggctggggctgcctgaagagaatggcacgcaccttgtaggctcctgccctcaccccaccgccctcttaagtttcttttattttctttttctttttttttctttttactttttttgagacggggccttattctgtcctccaggctggagtgcaatgacatggtcatgcgtcactgcagcctccacctcccgggctccagcgattctcctgcctccctgcctcagcctgggacctgagtagctgggaccacaggcatgcgccaccactcctggccaatttttaaaatttttttgtagagatggggatctccttatgttgtccaggccagtcttgaactcttgggctcaagcgatcctcccacctgggactccaaaagtgctgggtttacaggcatgagccaccacacccagctcctccccctcaaacttctgtgcacaaagtgctcccttcccagaggaggggccccatcggtgtgtaaggtggcctattcctctgtgtgttctctggatcttttcagccctgtggtccagtgtccatcacagccatgctgactgagtgactggagacagggatgatggagagttcatgaagggctgggcagagagctggggccacctctggaggtgtcctgctgttcctgttggccccagctgcactcgcagggccttcctgtggcccctttccccaagcaggggcggccgcagctctcacccactttctcctgcagacggcgaggggaccgacctgtttgccgtggctgtccatgagtttggccacgccctgggcctgggccactcctcagcccccaactccattatgaggcccttctaccagggtccggtgggcgaccctgacaagtaccgcctgtctcaggatgaccgcgatggcctgcagcaactctatggtagggggagagggacctgccgcgaaaccatcattgccccatccagtgtcctctgcagcaaggccaggggacgcacacctgcctgactctttcctcacagggaaggcgcccc

SEQ ID NO: 1195 - DNA, 1383 bp, Homo sapiens
gcggtggcagtttgccgcgggtgtgtgaagggagacagtgtggaggccacagggtactcgccacgatgagcagcaccttagctaagatcgcggagatagaagcagagatggctcggactcaaaagaacaaggccacagcacaccacttagggctgcttaaggctcgtcttgctaagcttcgtcgagaactcattactccaaagggtggtggtggtggaggtccaggagaaggttttgatgtggccaagacaggtgatgctcgaattggatttgttggttttccatctgtggggaagtcaacactgcttagtaacctggcaggggtatattctgaggtggcagcctatgaattcactactctgaccactgtgcctggtgtcatcagatacaaaggtgccaagatccagctcctggatctcccaggtatcattgaaggtgccaaggatgggaaaggtagaggtcgtcaagtcattgcagtggcccgaacctgtaacttgatcttgattgttctggatgtcctgaaacctttgggacataagaagataattgaaaatgagctggaaggctttggcattcgcttgaacagcaaaccccccaacattggctttaagaagaaggacaagggaggcattaatctcacagccacttgcccccagagtgagctggatgctgaaactgtgaagagcattctggctgaatacaagattcataatgccgatgtgactctacgtagtgatgctacagctgatgacctcattgatgtggtggaaggaaacagagtttatatcccctgtatctatgtgttaaataagattgaccaaatctccattgaggaattggatatcatctataaggtgcctcactgtgtacccatctctgcccatcaccgctggaattttgatgacctattggaaaagatctgggactatctgaaactagtgagaatttacaccaaacccaaaggccagttaccagattacacatccccagtggtgcttccttactccaggaccacagtggaggatttctgcatgaagattcacaaaaatcttatcaaagaatttaaatatgctctggtctggggtctctctgtgaaacacaatcctcagaaagtgggtaaagaccatacgttggaggatgaggatgtcattcaaattgtgaagaagtgaaacctttcccttttcccatctgccggacgaaccacaacagcgttccccatgatcaagcaccctaccccagttctttctggttttggcagtcactggatcaggatccaggggagggagatggaggcacccaaactggaacttcatttgtcttaccttggtgtcaccttgtatgtcgaactgcataaaagatctggtaggctggtcagctacatgc

SEQ ID NO: 1196 - DNA, 986 bp, Homo sapiens
tgcgaacggcgagcagcggcggcggcgcggagagacgcagcggaggttttcctggtttcggaccccagcggccggatggtgaaatcctccctgcagcggatcctcaatagccactgcttcgccagagagaaggaaggggataaacccagcgccaccatccacgccagccgcaccatgccgctccttagcctgcacagccgcggcggcagcagcagtgagagttccagggtctccctccactgctgtagtaacccgggtccggggcctcggtggtgctcctgatgcccctcacccacccctgaagatcccaggtgggcgagggaatagtcagagggatcacaatctttcagctaacttattctactccgatgatcggctgaatgtaacagaggaactaacgtccaacgacaagacgaggattctcaacgtccagtccaggctcacagacgccaaacgcattaactggcgaacagtgctgagtggcggcagcctctacatcgagatcccgggcggcgcgctgcccgaggggagcaaggacagctttgcagttctcctggagttcgctgaggagcagctgcgagccgaccatgtcttcatttgcttccacaagaaccgcgaggacagagccgccttgctccgaaccttcagctttttgggctttgagattgtgagaccggggcatccccttgtccccaagagacccgacgcttgcttcatggcctacacgttcgagagagagtcttcgggagaggaggaggagtagggccgcctcggggctgggcatccggcccctggggccaccccttgtcagccgggtgggtaggaaccgtagactcgctcatctcgcctgggtttgtccgcatgttgtaatcgtgcaaataaacgctcactccgaattagcggtgtatttcttgaagtttaatattgtgtttgtgatactgaagtatttgctttaattctaaataaaaatttatattttacttttt

SEQ ID NO: 1197 - DNA, 4130 bp, Homo sapiens
ggcacgaggctgcgcctcgggggtcggcgtccaggctcggagcgcggcacggagacggcggcagcgctggactaggtggcaggccctgcatcatggaaactctttctaatgcaagtggtacttttgccatacgccttttaaagatactgtgtcaagataacccttcgcacaacgtgttctgttctcctgtgagcatctcctctgccctggccatggttctcctaggggcaaagggaaacaccgcaacccagatggcccaggcactgtctttaaacacagaggaagacattcatcgggctttccagtcgcttctcactgaagtgaacaaggctggcacacagtacctgctgagaacggccaacaggctctttggagagaaaacttgtcagttcctctcaacgtttaaggaatcctgtcttcaattctaccatgctgagctgaaggagctttcctttatcagagctgcagaagagtccaggaaacacatcaacacctgggtctcaaaaaagaccgaaggtaaaattgaagagttgttgccgggtagctcaattgatgcagaaaccaggctggttcttgtcaatgccatctacttcaaaggaaagtggaatgaaccgtttgacgaaacatacacaagggaaatgccctttaaaataaaccaggaggagcaaaggccagtgcagatgatgtatcaggaggccacgtttaagctcgcccacgtgggcgaggtgcgcgcgcagctgctggagctgccctacgccaggaaggagctgagcctgctggtgctgctgcctgacgacggcgtggagctcagcacggtggaaaaaagtctcacttttgagaaactcacagcctggaccaagccagactgtatgaagagtactgaggttgaagttctccttccaaaatttaaactacaagaggattatgacatggaatctgtgcttcggcatttgggaattgttgatgccttccaacagggcaaggctgacttgtcggcaatgtcagcggagagagacctgtgtctgtccaagttcgtgcacaagagttttgtggaggtgaatgaagaaggcaccgaggcagcggcagcgtcgagctgctttgtagttgcagagtgctgcatggaatctggccccaggttctgtgctgaccaccctttccttttcttcatcaggcacaacagagccaacagcattctgttctgtggcaggttctcatcgccataaagggtgcacttaccgtgcactcggccatttccctcttcctgtgtccccagatccccactacagctccaagaggatgggcctagaaagccaagtgcaaagatgagggcagattccttacctgtctgccctcatgatttgccagcatgaattcatgatgctccacactcgcttatgctacttaatcagaatcttgagaaaatagaccataatgattccctgttgtattaaaattgcagtccaaatcccataggatggcaagcaaagttcttctagaattccacatgcaattcactctggcgaccctgtgctttcctgacactgcgaatacattccttaacccgctgcctcagtggtaataaatggtgctagatattgctactattttatagatttcctggtgcttagccttataaaaaaggttgtaaaatgtacatttatattttatcttttttttttttttttttctgagacgcagtctggctctctgtcgcccaggctggagtgcagtggctcgatctctgctcactgcaagctccgcctcccgggttcacgccattctcctgcctcagcctcccgagtagctgggactacaggcgcccgccaccacgcccggctaattttttgtatttttagtagagacggggtttcaccgtgttagccaggatggtgtcgatctcctgacctcgtgatccacccgcctcggcctcccaaagtgctgggattacaggcttgagccaccgcgcccggctatattttatcttttatctttttctttgacatttaccaatcaccaagcatgcaccaaacactgctttaggcactggggacacaaaggggacagagccatcctcctttgacacctggtcttcagttctgtgcccaacgtatatagttttgacaatgaccaggttggactgtttaatgtctttcaacttaccacgtaatcctcttgtagggatcacatctttctttatgatattgtatttctctacctctaacagtaaaaattccattcaacccttaaagctcacttcaaattcttctttgagaagtttttcctttctccgcaaccagatgtacatatttgaactctctttgtacttggagggcacttctttcgtggtagttcttttatttttattaatctctgtatccttagatagtcctccaacaaccaaaggttgggactctgtcttacatatctgggtgcccctcatagtgcagtaataagtaagttgattatatacgagctatgtaacttatattttttaatggttggatatcactgagtttttttttttaagaatttttttattgaggtaaacttcacataacataaaattaactattttaaagtgagaagttcagtgccacttagtattgttaacaatgttgcataaccaccacctttatttaaagttccaaaaaaaatgttctcctctaaaaggaaaccccatcccattaagcagatactctccattccttccttcctccagcccccagcaaccaccaatctgctttctgtctctatggttttatctattcttgctattttatataaatcgaattgtatgagaccttttgtgtctggcttctttcacttagtacaagtttttgagatttatttacatagtagcatgtatcaacacttcatttttatggccaaataaaattgtattatgtgtttatagcacaatttatttatccactcattcattgatggactttgggttgtttctgacttttggctattgggaatagtgctgctatgaatgtttgtgtacctgtatttgtttgaatgcctattttgcattctcttgggtatatatctaggagtggaactgctgggtcatatgttaattctatgtttagctttttgaggaacagacaaactgttttccacagcagttgaaccattccacattcccaccagcaatgtatgagaattccaatttctgtccacttcctcaccaacacttattattttccttttcctttttttaaaaaaaataagttatggccatcttagtgggtgtgaagtggtatctcattgtgttttttatttgcatttcctatgtaatgagctagaaactaaagtacaaactagatgggacatccagtccctttgatagataatgctgagtaaaaaatgagatgaaagacatttgtttgtttttagaacatgagtgacagtttgttaaaaagctttagaggaggaatgaaaacaaagtgaagtacacttagaaaagggccaagtggacatcttggatgtcaagtgcctagttcagtatcttttttttttttttttttttttttgagacagtgcctcactctgtcacccaggctggagtgtagtggcatgatctgggctcactgcaacctcctcctcctggattcaagcaattctcttgcttcagcctcccaagtagctgagactacaagcacccaccaccacacccggctaattttgtatttttcagtagagacggggtttcgccacattggccgtgttggtcttgaactcctggcctcaagcaatccgcctacctcagcctcccaaagtgctaggattacaggcataagccactgagcccagccctagttcagtatcttttatgtaaattataaacatctgcaacattatgtatcatatgcagatacttattgcatttcttttattagtggtgaaagtgttctatgcatttattggctcttgaatttcctcatctatgaattgtcattcacacacctacttttctgcttcgtttttacatatgtctttgcctattaaagatattatccctctgttttatattttctctcattcttgtattgccttttaaattttgttatgatgtttcattaataaacagtgttttgttttcctctataaaaaaaaaaaaaaaa

SEQ ID NO: 1198 - DNA, 1541 bp, Homo sapiens
ccgagccccagcccggccgccatggacgacaaggcgttcaccaaggagctggaccagtgggtcgagcagctgaacgagtgtaagcagctgaacgagaaccaagtgcggacgctgtgcgagaaggcaaaggaaattttaacaaaagaatcaaatgtgcaagaggttcgttgccctgttactgtctgtggagatgtgcatggtcaatttcatgatcttatggaactctttagaattggtggaaaatcaccggatacaaactacttattcatgggtgactatgtagacagaggatattattcagtggagactgtgactcttcttgtagcattaaaggtgcgttatccagaacgcattacaatattgagaggaaatcacgaaagccgacaaattacccaagtatatggcttttatgatgaatgtctgcgaaagtatgggaatgccaacgtttggaaatattttacagatctctttgattatcttccacttacagctttagtagatggacagatattctgcctccatggtggcctctctccatccatagacacactggatcatataagagccctggatcgtttacaggaagttccacatgagggcccaatgtgtgatctgttatggtcagatccagatgatcgtggtggatggggtatttcaccacgtggtgctggctacacatttggacaagacatttctgaaacctttaaccatgccaatggtctcacactggtttctcgtgcccaccagcttgtaatggagggatacaattggtgtcatgatcggaatgtggttaccattttcagtgcacccaattactgttatcgttgtgggaaccaggctgctatcatggaattagatgacactttaaaatattccttccttcaatttgacccggcgcctcgtcgtggtgagcctcatgttacacggcgcaccccagactacttcctataaatttctcctgggaaacctgcctttgtatgtggaagtatacctggctttttaaaatatatgtatttaaaaacaaaaagcaacagtaatctatgtgtttctgtaacaaattgggatctgtcttggcattaaaccacatcatggaccaaatgtgccatactaatgatgagcatttagcacaatttgagactgaaatttagtacactatgttctagataggtcagtctaacagtttgcctgctgtatttatagtaaccattttcctttggactgttcaagcaaaaaaggtaactaactgcttcatctccttttgcgcttatttggaaattttagttatagtgtttaactggcatggattaatagagttggagttttatttttaagaaaaattcacaagctaacttccactaatccattatcctttattttattgaaatgtataattaacttaactgaagaaaaggttcttcttgggagtatgttgtcataacatttaaagagatttcccttcatttaaactaaattactgttttatgttgatctgcatatttctgtatatttgtcatgacagtgcttgcatcctatttggtgtg

SEQ ID NO: 1199 - DNA, 1205 bp, Homo sapiens
gggcagaaagggcacgctcttgtgggtgactacaggttaggagaccgttgaacctggaggggccctaggatggaccccgtggaaagattcagagactgcgccctctccctggcgccgccttcccctacacgcggcgggtatattctgttgcagttggcccaggacctgtttccaagactctgccccctcgcacttccgtccctcctggttttgtaaagtgatgctcataggaacccccaccccgcgtgacactactcccagctcctggctgacttctagtcttctggttgaagctgcgcctttagatgacacgaccctacccacccctgtttccagcggatgcccgggcctggagcccacagaattcttccagtccctgggtggggacggagaaaggaacgttcagattgagatggcccatggcaccaccacgctcgccttcaagttccagcatggagtgattgcagcagtggattctcgggcctcagctgggtcctacattagtgccttacgggtgaacaaggtgattgagattaacccttacctgcttggcaccatgtctggctgtgcagcagactgtcagtactgggagcgcctgctggccaaggaatgcaggctgtactatctgcgaaatggagaacgtatttcagtgtcggcagcctccaagctgctgtccaacatgatgtgccagtaccggggcatgggcctctctatgggcagtatgatctgtggctgggataagaagggtcctggactctactacgtggatgaacatgggactcggctctcaggaaatatgttctccacgggtagtgggaacacttatgcctacggtgtcatggacagtggctatcggcctaatcttagccctgaagaggcctatgaccttggccgcagggctattgcttatgccactcacagagacagctattctggaggcgttgtcaatatgtaccacatgaaggaagatggttgggtgaaagtagaaagtacagatgtcagtgacctgctgcaccagtaccgggaagccaatcaataatggtggtggtggcagctgggcaggtctcctctgggaggtcttggccgactcagggacctaagccacgttaagtccaaggagaagaagaggcctagcctgagccaaagagagagtacgggctcagcagccagaggaggccggtgaagtgcatcttctgcgtgttctc

SEQ ID NO: 1200 - DNA, 723 bp, Homo sapiens
gggcggcggtcggcagcaaggcggcggtgcgccgccgcagctgcagtgacatgtccagcatgaatcccgaatatgattatttattcaagttacttctgattggcgactcaggggttggaaagtcttgccttcttcttaggtttgcagatgatacatatacagaaagctacatcagcacaattggtgtggatttcaaaataagaactatagagttagacgggaaaacaatcaagcttcaaatatgggacacagcaggccaggaaagatttcgaacaatcacctccagttattacagaggagcccatggcatcatagttgtgtatgatgtgacagatcaggagtccttcaataatgttaaacagtggctgcaggaaatagatcgttatgccagtgaaaatgtcaacaaattgttggtagggaacaaatgtgatctgaccacaaagaaagtagtagactacacaacagcgaaggaatttgctgattcccttggaattccgtttttggaaaccagtgctaagaatgcaacgaacgtagaacagtctttcatgacgatggcagctgagattaaaaagcgaatgggtcccggagcaacagctggtggtgctgagaagtccaatgttaaaattcagagcactccagtcaagcagtcaggtggaggttgctgctaaatttgcctccatccttttctcacagcaatgaatttgcaatctgaacccaagtgaa

SEQ ID NO: 1201 - DNA, 2191 bp, Homo sapiens
atcctacgggccacgcctgggccttgctgccaggaagcttcggccccgcagctcggcttgctgcggtctcaggtttctttacctccggaaagaagaatattggccccttgaattctggaagttcattgaagagtctgaaattagggacttatttcaaatttggacatggctagtcgaggcgcaacaagacccaacgggccaaatactggaaataaaatatgccagttcaaactagtacttctgggagagtccgctgttggcaaatcaagcctagtgcttcgttttgtgaaaggccaatttcatgaatttcaagagagtaccattggggctgcttttctaacccaaactgtatgtcttgatgacactacagtaaagtttgaaatatgggatacagctggtcaagaacgataccatagcctagcaccaatgtactacagaggagcacaagcagccatagttgtatatgatatcacaaatgaggagtcctttgcaagagcaaaaaattgggttaaagaacttcagaggcaagcaagtcctaacattgtaatagctttatcgggaaacaaggccgacctagcaaataaaagagcagtagatttccaggaagcacagtcctatgcagatgacaatagtttattattcatggagacatccgctaaaacatcaatgaatgtaaatgaaatattcatggcaatagctaaaaaattgccaaagaatgaaccacaaaatccaggagcaaattctgccagaggaagaggagtagaccttaccgaacccacacaaccaaccaggaatcagtgttgtagtaactaaacctctagtttgaactagctggaatagtcttctgcttcctaaatgttaataacaatggaattggagcatttaaccagcccagtatgacttccaaaagaagagacttatgatagagtcaagtttctaatacagaattattttaagtgttttgaacttaatttttaataacatgcatgggtccctctcactaatgtttcaacaatagggaaaaatgagaactatgtggacacttgtttcattggaaggttagggggaataatttctcatcactaggaatatagacaaatgactgtctgggcccacacagttaaccagcccatttctccacactggtacagtagtcacctgtgaaaaaaaaaattggaacttactaatttgggcttttcaaaaacattctttgtttagaaggagattctaaagttatttatgatgcttagccatagtattcaggcaaatgttcatttctcctggtacctgtatttaaaatgtacattccacattttaataaattaaccacaagaaaataatcccacatatacaaggtcaggggtggggaagagtattaatggtatcttaattatacccagtctggtttttttttttaaatggggtaaaaatcaaatgcaaccccatcttgttttaggaattttgagaactaataaatgcaccttaatggtcagtgttcctttcaaacatgtgagttctttaacaaaaatgaaataaaccaggtgtctgtgatttctaattaatcaccgctggccattacacaggttttgttgtttggggtggggagggggcttttgttcccttttgacataatatagtcaatgcactaacaattatgtatattcaaacttgattattttaaattcgatcttcagctgtactgtaaatagggtactgcattgtagtctccatatctgtattacttttctgtaatatttaagagttgcttaaaagcatacaaaatgtactgttactaaaacagctaattatttctctctccccctttgacaggaaggggcttcagttgttcctccatggctagaaccataataaacaatgtacccgtaatttgtaacataaagtattgcaatatgttagtaacaatcttgcagccttcctttccaaagttcattttattttgatcagttcagtatattgcactaattattttaggtattttcattatatgaaagctaccatgtgtcagagatgatttaatctatttaagtgttggactgctaggagaacttgtacatttatgataatgcagaattaggaaaacggttcaccagtgtttagttttatattgaggtgctcaggttggaataaagtggtataaaaagcaaaaaaaaaaaaaaaaaaaaaaaaaaaa

SEQ ID NO: 1202 - DNA, 2277 bp, Homo sapiens
gactgcgcggcggcaacagcagacatgtcgggggtccggggcctgtcgcggctgctgagcgctcggcgcctggcgctggccaaggcgtggccaacagtgttgcaaacaggaacccgaggttttcacttcactgttgatgggaacaagagggcatctgctaaagtttcagattccatttctgctcagtatccagtagtggatcatgaatttgatgcagtggtggtaggcgctggaggggcaggcttgcgagctgcatttggcctttctgaggcagggtttaatacagcatgtgttaccaagctgtttcctaccaggtcacacactgttgcagcgcagggaggaatcaatgctgctctggggaacatggaggaggacaactggaggtggcatttctacgacaccgtgaagggctccgactggctgggggaccaggatgccatccactacatgacggagcaggcccccgccgccgtggtcgagctagaaaattatggcatgccgtttagcagaactgaagatgggaagatttatcagcgtgcatttggtggacagagcctcaagtttggaaagggcgggcaggcccatcggtgctgctgtgtggctgatcggactggccactcgctattgcacaccttatatggacggtctctgcgatatgataccagctattttgtggagtattttgccttggatctcctgatggagaacggggagtgccgtggtgtcatcgcactgtgcatagaggacgggtccatccatcgcataagagcaaagaacactgttgttgccacaggaggctacgggcgcacctacttcagctgcacgtctgcccacaccagcactggcgacggcacggccatgatcaccagggcaggccttccttgccaggacctagagtttgttcagttccaccccacaggcatatatggtgctggttgtctcattacggaaggatgtcgtggagagggaggcattctcattaacagtcaaggcgaaaggtttatggagcgatacgcccctgtcgcgaaggacctggcgtctagagatgtggtgtctcggtcgatgactctggagatccgagaaggaagaggctgtggccctgagaaagatcacgtctacctgcagctgcaccacctacctccagagcagctggccacgcgcctgcctggcatttcagagacagccatgatcttcgctggcgtggacgtcacgaaggagccgatccctgtcctccccaccgtgcattataacatgggcggcattcccaccaactacaaggggcaggtcctgaggcacgtgaatggccaggatcagattgtgcccggcctgtacgcctgtggggaggccgcctgtgcctcggtacatggtgccaaccgcctcggggcaaactcgctcttggacctggttgtctttggtcgggcatgtgccctgagcatcgaagagtcatgcaggcctggagataaagtccctccaattaaaccaaacgctggggaagaatctgtcatgaatcttgacaaattgagatttgctgatggaagcataagaacatcggaactgcgactcagcatgcagaagtcaatgcaaaatcatgctgccgtgttccgtgtgggaagcgtgttgcaagaaggttgtgggaaaatcagcaagctctatggagacctaaagcacctgaagacgttcgaccggggaatggtctggaacacagacctggtggagaccctggagctgcagaacctgatgctgtgtgcgctgcagaccatctacggagcagaggcgcggaaggagtcacggggcgcgcatgccagggaagactacaaggtgcggattgatgagtacgattactccaagcccatccaggggcaacagaagaagccctttgaggagcactggaggaagcacaccctgtcctttgtggacgttggcactgggaaggtcactctggaatatagacccgtaatcgacaaaactttgaacgaggctgactgtgccaccatcccgccagccattcgctcctactgatgagacaagatgtggtgatgacagaatcagcttttgtaattatgtataatagctcatgcatgtgtccatgtcataactgtcttcatacgcttctgcactctggggaagaaggagtacattgaagggagattggcacctagtggctgggagcttgccaggaacccagtggccagggagcgtggcacttacctttgtcccttgcttcattcttgtgagatgataaaactgggcacagctcttaaataaaatataaatgag

SEQ ID NO: 1203 - DNA, 1014 bp, Homo sapiens
gcagaaatagcctagggagatcaaccccgagatgctgaacaaagtgctgtcccggctgggggtcgccggccagtggcgcttcgtggacgtgctggggctggaagaggagtctctgggctcggtgccagcgcctgcctgcgcgctgctgctgctgtttcccctcacggcccagcatgagaacttcaggaaaaagcagattgaagagctgaagggacaagaagttagtcctaaagtgtacttcatgaagcagaccattgggaattcctgtggcacaatcggacttattcacgcagtggccaataatcaagacaaactgggatttgaggatggatcagttctgaaacagtttctttctgaaacagagaaaatgtcccctgaagacagagcaaaatgctttgaaaagaatgaggccatacaggcagcccatgatgccgtggcacaggaaggccaatgtcgggtagatgacaaggtgaatttccattttattctgtttaacaacgtggatggccacctctatgaacttgatggacgaatgccttttccggtgaaccatggcgccagttcagaggacaccctgctgaaggacgctgccaaggtgtgcagagaattcaccgagcgtgagcaaggagaagtccgcttctctgccgtggctctctgcaaggcagcctaatgctctgtgggagggactttgctgatttcccctcttcccttcaacatgaaaatatataccccccatgcagtctaaaatgcttcagtacttgtgaaacacagctgttcttctgttctgcagacacgccttcccctcagccacacccaggcacttaagcacaagcagagtgcacagctgtccactgggccattgtggtgtgagcttcagatggtgaagcattctccccagtgtatgtcttgtatccgatatctaacgctttaaatggctactttggtttctgtctgtaagttaagaccttggatgtggttatgttgtcctaaagaataaattttgctgatagtagc

SEQ ID NO: 1204 - DNA, 574 bp, Homo sapiens
cggaagccgcggttcctaccaaccgttcttattgctggcggcctgaggagcccatcatggcgacgccccctaagcggcgggcggtggaggccacgggggagaaagtgctgcgctacgagaccttcatcagtgacgtgctgcagcgggacttgcgaaaggtgctggaccatcgagacaaggtatatgagcagctggccaaataccttcaactgagaaatgtcattgagcgactccaggaagctaagcactcggagttatatatgcaggtggatttgggctgtaacttcttcgttgacacagtggtcccagatacttcacgcatctatgtggccctgggatatggttttttcctggagttgacactggcagaagctctcaagttcattgatcgtaagagctctctcctcacagagctcagcaacagcctcaccaaggactccatgaatatcaaagcccatatccacatgttgctagaggggcttagagaactacaaggcctgcagaatttcccagagaagcctcaccattgacttcttccccccatcctcagacattaaagagcctgaatgccttt

SEQ ID NO: 1205 - DNA, 2786 bp, Homo sapiens
agcgggttccgggaggcgcccggtgagcccacgtctgttgcggcggagcgagggaaacggactcggcggcgccggcatgaggagctgagcgtctcgggcgaggcgggctgacggcagcaccatgcaggcggcagtggctgtgtccgtgcccttcttgctgctctgtgtcctggggacctgccctccggcgcgctgcggccaggcaggagacgcctcattgatggagctagagaagaggaaggaaaaccgcttcgtggagcgccagagcatcgtgccactgcgcctcatctaccgctcgggcggcgaagacgaaagtcggcacgacgcgctcgacacgcgggtgcggggcgacctcggtggcccgcagttgactcatgttgaccaagcaagcttccaggttgatgcctttggaacgtcattcattctcgatgtcgtgctaaatcatgatttgctgtcctctgaatacatagagagacacattgaacatggaggcaagactgtggaagttaaaggaggagagcactgttactaccagggccatatccgaggaaaccctgactcatttgttgcattgtcaacatgccacggacttcatgggatgttctatgacgggaaccacacatatctcattgagccagaagaaaatgacactactcaagaggatttccattttcattcagtttacaaatccagactgtttgaattttccttggatgatcttccatctgaatttcagcaagtaaacattactccatcaaaatttattttgaagccaagaccaaaaaggagtaaacggcagcttcgtcgatatcctcgtaatgtagaagaagaaaccaaatacattgaactgatgattgtgaatgatcaccttatgtttaaaaaacatcggctttccgttgtacataccaatacctatgcgaaatctgtggtgaacatggcagatttaatatataaagaccaacttaagaccaggatagtattggttgctatggaaacctgggcgactgacaacaagtttgccatatctgaaaatccattgatcaccctacgtgagtttatgaaatacaggagggattttatcaaagagaaaagtgatgcagttcaccttttttcgggaagtcaatttgagagtagccggagcggggcagcttatattggtgggatttgctcgttgctgaaaggaggaggcgtgaatgaatttgggaaaactgatttaatggctgttacacttgcccagtcattagcccataatattggtattatctcagacaaaagaaagttagcaagtggtgaatgtaaatgcgaggacacgtggtccgggtgcataatgggagacactggctattatcttcctaaaaagttcacccagtgtaatattgaagagtatcatgacttcctgaatagtggaggtggtgcctgccttttcaacaaaccttctaagcttcttgatcctcctgagtgtggcaatggcttcattgaaactggagaggagtgtgattgtggaaccccggccgaatgtgtccttgaaggagcagagtgttgtaagaaatgcaccttgactcaagactctcaatgcagtgacggtctttgctgtaaaaagtgcaagtttcagcctatgggcactgtgtgccgagaagcagtaaatgattgtgatattcgtgaaacgtgctcaggaaattcaagccagtgtgcccctaatattcataaaatggatggatattcatgtgatggtgttcagggaatttgctttggaggaagatgcaaaaccagagatagacaatgcaaatacatttgggggcaaaaggtgacagcatcagacaaatattgctatgagaaactgaatattgaagggacggagaagggtaactgtgggaaagacaaagacacatggatacagtgcaacaaacgggatgtgctttgtggttaccttttgtgtaccaatattggcaatatcccaaggcttggagaactcgatggtgaaatcacatctactttagttgtgcagcaaggaagaacattaaactgcagtggtgggcatgttaagcttgaagaagatgtagatcttggctatgtggaagatgggacaccttgtggtccccaaatgatgtgcttagaacacaggtgtcttcctgtggcttctttcaactttagtacttgcttgagcagtaaagaaggcactatttgctcaggaaatggagtttgcagtaatgagctgaagtgtgtgtgtaacagacactggataggttctgattgcaacacttacttccctcacaatgatgatgcaaagactggtatcactctgtctggcaatggtgttgctggcaccaatatcataataggcataattgctggcaccattttagtgctggccctcatattaggaataactgcgtggggttataaaaactatcgagaacagagacagttaccccagggagattatgtaaaaaagcctggagatggtgactctttttatagcgacattcctcccggagtcagcacaaactcagcatctagttctaagaagaggtcaaatgggctctctcattcttggagtgaaaggattccagacacaaaacatatttcagacatctgtgaaaatgggcgacctcgaagtaactcttggcaaggtaacctgggaggcaacaaaaagaaaatcagaggcaaaagatttagacctcggtctaattcaactgagtaagtctgaacctctaatggaaaaaggcactccaaggtcctgtgcaaatagtgtcaaaagtaaattaagcagatagtcaaagaactgt

SEQ ID NO: 1206 - DNA, 2194 bp, Homo sapiens
ggggaaggaacactgtaggggatagctgtccacggacgctgtctacaagaccctggagtgagataacgtgcctggtactgtgccctgcatgtgtaagatgcccagttgaccttcgcagcaggagcctggatcaggcacttcctgcctcaggtattgctggacagcccagacacttccctctgtgaccatgaaactctgggtgtctgcattgctgatggcctggtttggtgtcctgagctgtgtgcaggccgaattcttcacctctattgggcacatgactgacctgatttatgcagagaaagagctggtgcagtctctgaaagagtacatccttgtggaggaagccaagctttccaagattaagagctgggccaacaaaatggaagccttgactagcaagtcagctgctgatgctgagggctacctggctcaccctgtgaatgcctacaaactggtgaagcggctaaacacagactggcctgcgctggaggaccttgtcctgcaggactcagctgcaggttttatcgccaacctctctgtgcagcggcagttcttccccactgatgaggacgagataggagctgccaaagccctgatgagacttcaggacacatacaggctggacccaggcacaatttccagaggggaacttccaggaaccaagtaccaggcaatgctgagtgtggatgactgctttgggatgggccgctcggcctacaatgaaggggactattatcatacggtgttgtggatggagcaggtgctaaagcagcttgatgccggggaggaggccaccacaaccaagtcacaggtgctggactacctcagctatgctgtcttccagttgggtgatctgcaccgtgccctggagctcacccgccgcctgctctcccttgacccaagccacgaacgagctggagggaatctgcggtactttgagcagttattggaggaagagagagaaaaaacgttaacaaatcagacagaagctgagctagcaaccccagaaggcatctatgagaggcctgtggactacctgcctgagagggatgtttacgagagcctctgtcgtggggagggtgtcaaactgacaccccgtagacagaagaggcttttctgtaggtaccaccatggcaacagggccccacagctgctcattgcccccttcaaagaggaggacgagtgggacagcccgcacatcgtcaggtactacgatgtcatgtctgatgaggaaatcgagaggatcaaggagatcgcaaaacctaaacttgcacgagccaccgttcgtgatcccaagacaggagtcctcactgtcgccagctaccgggtttccaaaagctcctggctagaggaagatgatgaccctgttgtggcccgagtaaatcgtcggatgcagcatatcacagggttaacagtaaagactgcagaattgttacaggttgcaaattatggagtgggaggacagtatgaaccgcacttcgacttctctaggaatgatgagcgagatactttcaagcatttagggacggggaatcgtgtggctactttcttaaactacatgagtgatgtagaagctggtggtgccaccgtcttccctgatctgggggctgcaatttggcctaagaagggtacagctgtgttctggtacaacctcttgcggagcggggaaggtgactaccgaacaagacatgctgcctgccctgtgcttgtgggctgcaagtgggtctccaataagtggttccatgaacgaggacaggagttcttgagaccttgtggatcaacagaagttgactgacatccttttctgtccttccccttcctggtccttcagcccatgtcaacgtgacagacacctttgtatgttccttgtatgttcctatcaggctgatttttggagaaatgaatgtttgtctggagcagagggagaccatactagggcgactcctgtgtgactgaagtcccagcccttccattcagcctgtgccatccctggccccaaggctaggatcaaagtggctgcagcagagttagctgtctagcgcctagcaaggtgcctttgtacctcaggtgttttaggtgtgagatgtttcagtgaaccaaagttctgataccttgtttacatgtttgtttttatggcatttctatctattgtggctttaccaaaaaataaaatgtccctaccagaagccttaaa

SEQ ID NO: 1207 - DNA, 2070 bp, Homo sapiens
gtcaggcaggagccgaggccggggagccctcttcgtcagctggtgctcactgcgccgcgccagcgccagccgggactcacccgcagctccatgcttgtgcccggttcgactcgtccatcctccaagaagaggcagcccatgaggctcccagtccccactgagtgccaccctgaaggatgtcccagctctcctccaccctgaagcgctacacagaatcggcccgctacacagatgcccactatgccaagtcgggctatggtgcctacaccccatcctcctatggggccaatctggctgcctccttactggagaaggagaaacttggtttcaagccggtccccaccagcagcttcctcacccgtccccgtacctatggcccctcctccctcctggactatgaccggggccgccccctgctgagacccgacatcactgggggtggtaagcgggcagagagccagacccggggtactgagcggcctttaggcagtggcctcagcgggggcagcggattcccttatggagtgaccaacaactgcctcagctacctgcccatcaatgcctatgaccagggggtgaccctaacccagaagctggacagccaatcagacctggcccgggatttctccagcctccggacctcagatagctaccggatagaccccaggaacctgggccgcagccccatgctggcccggacgcgcaaggagctctgcaccctgcaggggctctaccagacagccagctgccctgaatacctggtcgactacctggagaactatggtcgcaagggcagtgcatctcaggtgccctcccaggcccctccctcacgagtccctgaaatcatcagcccaacctaccgacccattggccgctacacgctgtgggagacgggaaagggtcaggcccctgggcccagccgctccagctccccgggaagagacggcatgaattctaagagtgcccagggtctggctggtcttcgaaaccttgggaacacgtgcttcatgaactcaattctgcagtgcctgagcaacactcgggagttgagagattactgcctccagaggctctacatgcgggacctgcaccacggcagcaatgcacacacagccctcgtggaagagtttgcaaaactaattcagaccatatggacttcatcccccaatgatgtggtgagcccatctgagttcaagacccagatccagagatatgcaccgcgctttgttggctataatcagcaggatgctcaggagttccttcgctttcttctggatgggctccataacgaggtgaaccgagtgacactgagacctaagtccaaccctgagaacctcgatcatcttcctgatgacgagaaaggccgacagatgtggagaaaatatctagaacgggaagacagtaggatcggggatctctttgttgggcagctaaagagctcgctgacgtgtacagattgtggttactgttctacggtcttcgaccccttctgggacctctcactgcccattgctaagcgaggttatcctgaggtgacattaatggactgcatgaggctcttcaccaaagaggatgtgcttgatggagatgaaaagccaacatgctgtcgctgccgaggcagaaaacggtgtataaagaagttctccatccagaggttcccaaagatcttggtgctccatctgaagcggttctcagaatccaggatccgaaccagcaagctcacaacatttgtgaacttccccctaagagacctggacttaagagaatttgcctcagaaaacaccaaccatgctgtttacaacctgtacgctgtgtccaatcactccggaaccaccatgggtggccactatacagcctactgtcgcagtccagggacaggagaatggcacactttcaacgactccagcgtcactcccatgtcctccagccaagtgcgcaccagcgacgcctacctgctcttctacgaactggccagcccgccctcccgaatgtagcgccaggagccacgtcccttctcccttccccgtggtggccccgctccctaaattttttaaaaaaaaaaaaaaaaaa

SEQ ID NO: 1208 - DNA, 1982 bp, Homo sapiens
ggcgagaggcgggctgaggcggcccagcggcggcaggtgaggcggaaccaaccctcctggccatgggaggggccgtggtggacgagggccccacaggcgtcaaggcccctgacggcggctggggctgggccgtgctcttcggctgtttcgtcatcactggcttctcctacgccttccccaaggccgtcagtgtcttcttcaaggagctcatacaggagtttgggatcggctacagcgacacagcctggatctcctccatcctgctggccatgctctacgggacaggtccgctctgcagtgtgtgcgtgaaccgctttggctgccggcccgtcatgcttgtggggggtctctttgcgtcgctgggcatggtggctgcgtccttttgccggagcatcatccaggtctacctcaccactggggtcatcacggggttgggtttggcactcaacttccagccctcgctcatcatgctgaaccgctacttcagcaagcggcgccccatggccaacgggctggcggcagcaggtagccctgtcttcctgtgtgccctgagcccgctggggcagctgctgcaggaccgctacggctggcggggcggcttcctcatcctgggcggcctgctgctcaactgctgcgtgtgtgccgcactcatgaggcccctggtggtcacggcccagccgggctcggggccgccgcgaccctcccggcgcctgctagacctgagcgtcttccgggaccgcggctttgtgctttacgccgtggccgcctcggtcatggtgctggggctcttcgtcccgcccgtgttcgtggtgagctacgccaaggacctgggcgtgcccgacaccaaggccgccttcctgctcaccatcctgggcttcattgacatcttcgcgcggccggccgcgggcttcgtggcggggcttgggaaggtgcggccctactccgtctacctcttcagcttctccatgttcttcaacggcctcgcggacctggcgggctctacggcgggcgactacggcggcctcgtggtcttctgcatcttctttggcatctcctacggcatggtgggggccctgcagttcgaggtgctcatggccatcgtgggcacccacaagttctccagtgccattggcctggtgctgctgatggaggcggtggccgtgctcgtcgggcccccttcgggaggcaaactcctggatgcgacccacgtctacatgtacgtgttcatcctggcgggggccgaggtgctcacctcctccctgattttgctgctgggcaacttcttctgcattaggaagaagcccaaagagccacagcctgaggtggcggccgcggaggaggagaagctccacaagcctcctgcagactcgggggtggacttgcgggaggtggagcatttcctgaaggctgagcctgagaaaaacggggaggtggttcacaccccggaaacaagtgtctgagtggctgggcggggccggcaggcacagggaggaggtacagaagccggcaacgcttgctatttattttacaaactggactggctcaggcagggccacggctgggctccagctgccggcccagcggatcgtcgcccgatcagtgttttgagggggaaggtggcggggtgggaaccgtgtcattccagagtggatctgcggtgaagccaagccgcaaggttacaaggcatcctcaccaggggccccgcctgctgctcccaggtggcctgcggccactgctatgctcaaggacctggaaacccatgcttcgagacaacgtgactttaatgggagggtgggtgggccgcagacaggctggcagggcaggtgctgcgtggggccctctccagcccgtcctaccctgggctcacatggggcctgtgcccacccctcttgagtgtcttggggacagctctttccacccctggaagatggaaataaacctgcgtgtgggtggagtgttctcgtgccgaattcaaaaagctt

SEQ ID NO: 1209 - DNA, 1138 bp, Homo sapiens
gggcttgcgggcttcgccatgaccagtgagctggacatcttcgtggggaacacgacccttatcgacgaggacgtgtatcgcctctggctcgatggttactcggtgaccgacgcggtggccctgcgggtgcgctcgggaatcctggagcagactggcgccacggcagcggtgctgcagagcgacaccatggaccattaccgcaccttccacatgctcgagcggctgctgcatgcgccgcccaagctactgcaccagctcatcttccagattccgccctcccggcaggcactactcatcgagaggtactatgcctttgatgaggcctttgttcgggaggtgctgggcaagaagctgtccaaaggcaccaagaaagacctggatgacatcagcaccaaaacaggcatcaccctcaagagctgccggagacagtttgacaactttaaacgggtcttcaaggtggtagaggaaatgcggggctccctggtggacaatattcagcaacacttcctcctctctgaccggttggccagggactatgcagccatcgtcttctttgctaacaaccgctttgagacagggaagaaaaaactgcagtatctgagcttcggtgactttgccttctgcgctgagctcatgatccaaaactggacccttggagccgtcgactcacagatggatgacatggacatggacttagacaaggaatttctccaggacttgaaggagctcaaggtgctagtggctgacaaggaccttctggacctgcacaagagcctggtgtgcactgctctccggggaaagctgggcgtcttctctgagatggaagccaacttcaagaacctgtcccgggggctggtgaacgtggccgccaagctgacccacaataaagatgtcagagacctgtttgtggacctcgtggagaagtttgtggaaccctgccgctccgaccactggccactcagcgacgtgcggttcttcctgaatcagtattcagcgtctgtccactccctcgatggcttccgacaccaggccctctgggaccgctacatgggcaccctccgcggctgcctcctgcgcctgtatcatgactgaggtgcctcccaacgctccgcccacgctgacaataaagttgctctga

SEQ ID NO: 1210 - DNA, 1182 bp, Homo sapiens
ggtttccgggtcagggtgacctctggggtgaggaaactgcgactgggagcgggacccaggcgtgcagcattcgccatgctccgctcacgcgtgggagactgggctgtggggtaccggcccggaaagcacgcagcctccaaagccgccttcctcagggaaatttgcgtgaccttactgccctccgtctacaggccttgtacctctccaggccgatttttccacaatttaaatcccagttcacctggtatccagctccagcaacttagagcgtttcacgtcacgccgggcgccaggcgtcggcttgtataacctgaaaacgctcctgtttttctcatctgtgcagtgggttttgattcccaccatggccatcacccagtttcggttatttaaattttgtacctgcctagcaacagtattctcattcctaaagagattaatatgcagatctggcagaggacggaaattaagtggagaccaaataactttgccaactacagttgattattcatcagttcctaagcagacagatgttgaagagtggacttcctgggatgaagatgcacccaccagtgtaaagatcgaaggagggaatgggaatgtggcaacacaacaaaattctttggaacaactggaacctgactattttaaggacatgacaccaactattaggaaaactcagaaaattgttattaagaagagagaaccattgaattttggcatcccagatgggagcacaggtttctctagtagattagcagctacacaagatctgccttttattcatcagtcttctgaattaggtgacttagatacctggcaggaaaataccaatgcatgggaagaagaagaagatgcagcctggcaagcagaagaagttctgagacagcagaaactagcagacagagaaaagagagcagccgaacaacaaaggaagaaaatggaaaaggaagcacaacggctaatgaagaaggaacaaaacaaaattggtgtgaaactttcataacacatgttcaaattttatcatgccagtaggagaaatctcagctccacaacccaagcaacatttgtatggatttaagagtattttaagaagacatactgcttgattttaatacattgatcaggccatccaggacaccacgattctcccaaagtaccttgaactcttagtgattgagactc

SEQ ID NO: 1211 - DNA, 1953 bp, Homo sapiens
cgctcccacccgcccgtggcccgcgcccatggccgcgcgcgctccacacaactcaccggagtccgcgccctgcgccgccgaccagttcgcagctccgcgccacggcagccagtctcacctggcggcaccgcccgcccaccgccccggccacagcccctgcgcccacggcagcaatcgaggcgaccgcgacagtggtgggggacgctgctgagtggaagagagcgcagcccggccaccggacctacttactcgccttgctgattgtctatttttgcgtttacaacttttctaagaacttttgtatacaaaggaactttttaaaaaagacgcttccaagttatatttaatccaaagaagaaggatctcggccaatttggggttttgggttttggcttcgttttttctcttcgttgactttggggttcaggtgccccagctgcttcgggctgccgaggaccttctgggcccccacattaatgaggcagccacctggcgagtctgacatggctgtcagcgacgcgctgctcccatctttctccacgttcgcgtctggcccggcgggaagggagaagacactgcgtcaagcaggtgccccgaataaccgctggcgggaggagctctcccacatgaagcgacttcccccagtgcttcccggccgcccctatgacctggcggcggcgaccgtggccacagacctggagagcggcggagccggtgcggcttgcggcggtagcaacctggcgcccctacctcggagagagaccgaggagttcaacgatctcctggacctggactttattctctccaattcgctgacccatcctccggagtcagtggccgccaccgtgtcctcgtcagcgtcagcctcctcttcgtcgtcgccgtcgagcagcggccctgccagcgcgccctccacctgcagcttcacctatccgatccgggccgggaacgacccgggcgtggcgccgggcggcacgggcggaggcctcctctatggcagggagtccgctccccctccgacggctcccttcaacctggcggacatcaacgacgtgagcccctcgggcggcttcgtggccgagctcctgcggccagaattggacccggtgtacattccgccgcagcagccgcagccgccaggtggcgggctgatgggcaagttcgtgctgaaggcgtcgctgagcgcccctggcagcgagtacggcagcccgtcggtcatcagcgtcagcaaaggcagccctgacggcagccacccggtggtggtggcgccctacaacggcgggccgccgcgcacgtgccccaagatcaagcaggaggcggtctcttcgtgcacccacttgggcgctggaccccctctcagcaatggccaccggccggctgcacacaacttccccctggggcggcagctccccagcaggagtaccccgaccctgggttttgaggaagtgctgagcagcagggaatgtcaccctgccctgccgcttcctcccggcttccatccccacccggggcccaattacccatccttcctgcccgatcagatgcagccgcaagtcccgccgctccattaccaagagctcatgccacccggttcctgcatgccagaggagcccaagccaaagaggggaagacgatcgtggccccggaaaaggaccgccacccacacttgtgattacgcgggctgcggcaaaacctacacaaagagttcccatctcaaggcacacctgcgaacccacacaggtgagaaaccttaccactgtgactgggacggctgtggatggaaattcgcccgctcagatgaactgaccaggcactaccgtaaacacacggggcaccgcccgttccagtgccaaaaatgcgaccgagcattttccaggtcggaccacctcgccttacacatgaagaggcatttttaaatcccagacagtggatatgacccacactgccagaaga

SEQ ID NO: 1212 - DNA, 1958 bp, Homo sapiens
cagctaccatggcccaagggctagaagtggccctcacagacctccagagctccagaaataatgtgcggcaccacacggaggagatcactgtggaccacctgcttgttcgccggggccaggccttcaacctcaccctgtacttcaggaaccggagcttccagccaggcctggacaacatcatcttcgtggttgaaactgaggatgctgtctacttggacagtgaaccccagaggcaggagtatgtcatgaatgattatggcttcatctaccaaggcagcaagaactggatccgcccatgtccctggaactatggacagtttgaagacaaaatcatagacatctgcctgaagctgctagacaagagcctgcacttccagactgacccagccacagactgtgctctgcggggaagccccgtctacgtcagcagagtggtgtgtgccatgatcaacagcaatgatgataatggggtgctcaatggaaactggagtgagaattacacagacggcgccaaccctgcggagtggacgggcagcgtggccatcctgaagcagtggaacgccacaggctgccagcccgtgcgctacgggcaatgctgggtctttgctgccgtcatgtgcacagtgatgaggtgtctggggatccctacccgtgtgatcaccaacttcgactctggccacgatacagatggaaacctgatcatagatgagtattatgacaacacaggcaggattttggggaataagaagaaggatactatctggaacttccatgtctggaatgagtgctggatggcccggaaggatctgccccctgcatatggaggctggcaggtgctggacgccacacctcaggagatgagcaacggcgtctactgctgtggccctgcctctgtcagagccatcaaagaaggagaagtggacctgaactatgacacgccctttgtgttttcgatggtgaatgctgactgcatgtcctggctcgtccagggagggaaggagcagaagcttcaccaggacacgagttctgttggcaattttatcagcacaaagagcatccagagtgacgagcgggatgacatcacagagaactacaagtatgaagaaggatccctccaggagaggcaggtgtttctgaaggctctgcagaagctgaaggctagaagcttccatggctcccaaagaggagcagagttgcaaccttccaggcccacatcactgagccaggacagccctcggagcctgcatacaccttcccttcgacccagtgatgtggtgcaagtctccctgaaattcaagctgctcgacccgcccaacatgggccaggatatatgctttgtcctgctggccctcaacatgtcctcccagttcaaggacctcaaagtgaacctgagtgcccagtctctgctgcacgatggcagccccctgtccccattctggcaggacacagcgttcatcacactctctcctaaagaagcaaagacctacccctgcaaaatctcctattcccagtacagccagtacctgtcaacagacaagctgatccgcatcagtgccctgggtgaagagaaaagcagtcctgagaaaatcctggtgaacaagatcatcaccttatcttatccaagcatcacgattaatgttctaggagcagccgttgtgaaccagccactctccatacaggtgatattttcaaaccccctctcggagcaggttgaggactgtgtgctgactgtggaaggaagtggcctcttcaagaaacagcagaaagtcttccttggagtcctcaaaccccaacaccaagcaagcatcattctggagaccgtccccttcaagagtggacaaaggcagatccaagctaatatgagaagcaacaagtttaaggacattaagggttacaggaatgtttatgtagactttgcattataaattctggaacaacgcgccagacgtgtgagtttc

SEQ ID NO: 1213 - DNA, 3784 bp, Homo sapiens
ggcggaagcacgatctccggcagcggcctgggaactcttagctgagcaggcgagagcatcatggataccgacttatatgatgagtttgggaattatattggaccagagcttgattctgatgaagatgatgatgaattgggtagagagaccaaagatcttgatgagatggatgatgatgacgacgacgatgacgtaggagatcatgacgatgaccaccctgggatggaggtggtgctgcatgaggacaagaagtactacccaacagccgaggaggtgtatggtcctgaggtggagaccatagttcaagaggaagacactcagcctctcacagaacccattattaagccagtgaaaaccaagaaattcactctgatggagcagacattacctgttacggtgtatgagatggatttcttggcggatctgatggataactcagagctcatcagaaatgtgaccctttgtggacatctccaccatggcaagacatgttttgtggattgtttaattgaacagactcacccggaaatcagaaagcgctatgaccaagatctgtgctatactgacatcctcttcacagagcaagagagaggtgtaggcatcaaaagcactcctgtgacagtggtcttgccagacaccaaaggaaaatcttatctcttcaatatcatggacactccaggacatgtgaatttctctgatgaggtcacagctggcttgcgcatctcagatggagtggtccttttcattgatgctgctgagggggtgatgctgaacacagagcggctgatcaagcatgcggtgcaggagaggctggcagtcactgtgtgcatcaacaagattgaccggctgatcctggagctgaagctgcctccaactgatgcttattacaagctgcgccacattgtggatgaggtcaatggattaataagcatgtattccactgatgagaacctgatcctttccccactcctgggtaacgtctgcttctccagctcccagtacagcatctgcttcacgctgggctcctttgccaagatctatgccgacacctttggtgacattaattaccaagaatttgctaaaagactctggggtgacatctacttcaaccctaagacgcgaaagttcaccaaaaaggccccaactagcagctcccagagaagtttcgtggagtttatcttggagcctctttataagatcctcgcccaggttgtaggtgacgtggacaccagcctcccacggaccctagacgagcttggcatccacctgacgaaggaggagctgaagctgaacatccgccccttgctcaggctggtctgcaaaaagttctttggcgagttcacaggctttgtggacatgtgtgtgcagcatatcccttctccaaaggtgggcgccaagcccaagattgagcacacctacaccggtggtgtggactccgacctcggcgaggctatgagtgactgtgaccctgatggccccctgatgtgccacactactaagatgtacagcacagatgatggagtccagtttcacgcctttggccgggtgctgagtggcaccattcatgctgggcagcctgtgaaggtactgggggagaactacaccctggaggatgaggaagactcccagatatgcaccgtgggccgcctttggatctctgtggccaggtaccacatcgaggtgaaccgtgttcctgctggcaactgggttctgattgaaggtgttgatcaaccaattgtgaagacagcaaccataaccgaaccccgaggcaatgaggaggctcagattttccgacccttgaagttcaataccacatctgttatcaagattgctgtggagccagtcaacccctcagagctgcccaagatgcttgatggcctgcgcaaggtcaacaagagctatccatccctcaccaccaaggtggaggagtctggcgagcatgtgatcctgggcactggggagctctacctggactgtgtgatgcatgatttgcggaagatgtactcagagatagacatcaaggtggctgacccagttgtcacgttttgtgagacggtggtggaaacatcctccctcaagtgctttgctgaaacgcctaataagaagaacaagatcaccatgattgctgagcctcttgagaagggcctggcagaggacatagagaatgaggtggtccagattacgtggaacaggaagaagctgggagagttcttccagaccaagtacgattgggatctgctggctgcccgttccatctgggcttttggccctgatgcgactggccccaacattctggtggatgatactctgccctctgaggtggacaaggctcttcttggttcagtgaaggacagcatcgttcaaggtttccagtggggaaccagggagggccccctctgtgatgaattgattcggaatgtcaagtttaagatcctggatgcggtggttgcccaggagcccctgcaccggggcgggggccagatcatccccacagccaggagagtcgtctactctgccttcctcatggctactcctcgtctgatggagccttactactttgtagaggtccaggcccctgcagattgcgtctctgcagtttataccgtcctggccaggcgcagggggcacgtgactcaggatgcacccatcccaggctcccctctgtacaccatcaaagcttttatcccggccatcgactcttttggctttgagactgatctccggactcacacccagggacaagccttttctctgtctgtcttccaccactggcagattgtgcctggtgatcccctggacaagagcattgtcatccgccccttggagccacagccagctcctcacctggcccgggaattcatgatcaaaacccgccgtaggaagggcctcagtgaagatgtgagcatcagcaaattcttcgatgatcctatgttgctggaacttgccaaacaggatgttgtgctcaattaccccatgtgagtgcgtggactcctgggagctcctgctccctacagtgggctgcaactcctgtacttgaagctgagacctcatatgacgtggccttcgtgttgtcagagagtgtctggaagctgctgttgccatcttgaacaactcaccaacctccaacccagagccccagtgagagaggagcatttggcctcctgcttccttctgtggcctctgccgggctccattcccaaggaaaagagaggagcttgggctcacagaaagagaaggggatgaaaccccaaggggccctatctttgggatttacatggaattttattttctacaagtttgaccttagccatggtttgcaagtgaacagaacattctgacctctgtcttgctctgctcctttcatcctcgtctcccctgccccatctggtgcttacattctgaatatatgtcatctcccaagaggcttcactgcctctgcttccagctgcagcctccttcctgcctgggtccccagggaagccgcctgccttttaattcagtgttcccatgagcgccaaggccccattattgcccccttgctcccactccatgctgcttctgggtgggacctaagatggcttgggagttgttgggttcctgcgatcagaagtctaccccaccacctcctcaggaaactgctgcctcccctaagaatcttccttgccctggagtagggggccagagcactttgatttccagccatttactccaagtcctctccccagctaccaccagtcccttactctgttctcccccagtgaaaaagagtctgttgattttcctc

SEQ ID NO: 1214 - DNA, 645 bp, Homo sapiens
gcgccgccatcgccgtcatgctgggcgccgctctccgccgctgcgctgtggccgcaaccacccgggccgaccctcgaggcctcctgcactccgcccggacccccggccccgccgtggctatccagtcagttcgctgctattcccatgggtcacaggagacagatgaggagtttgatgctcgctgggtaacatacttcaacaagccagatatagatgcctgggaattgcgtaaagggataaacacacttgttacctatgatatggttccagagcccaaaatcattgatgctgctttgcgggcatgcagacggttaaatgattttgctagtctagttcgaatcctagaggttgttaaggacaaagcaggacctcataaggaaatctacccctatgtcatccaggaacttagaccaactttaaatgaactgggaatctccactccggaggaactgggccttgacaaagtgtaaaccgcatggatgggcttccccaaggatttattgacattgctacttgagtgtgaacagttacctggaaatactgatgataacatattaccttattttgaacaagtttccctttattgagtaccaagccatgtaatggtaacttggactttaataaaagggaaatgagtttgaactg

SEQ ID NO: 1215 - DNA, 1519 bp, Homo sapiens
agcgatggcggctgggccgagtgggtgtctggtgccggcgtttgggctacggttgttgttggcgactgtgcttcaagcggtgtctgcttttggggcagagttttcatcggaggcatgcagagagttaggcttttctagcaacttgctttgcagctcttgtgatcttctcggacagttcaacctgcttcagctggatcctgattgcagaggatgctgtcaggaggaagcacaatttgaaaccaaaaagctgtatgcaggagctattcttgaagtttgtggatgaaaattgggaaggttccctcaagtccaagcttttgttaggagtgataaacccaaactgttcagaggactgcaaatcaagtatgtccgtggttcagaccctgtattaaagcttttggacgacaatgggaacattgctgaagaactgagcattctcaaatggaacacagacagtgtagaagaattcctgagtgaaaagttggaacgcatataaatcttgcttaaattttgtcctatccttttgttaccttatcaaatgaaatattacagcacctagaaaataatttagttttgcttgcttccattgatcagtcttttacttgaggcattaaatatctaattaaatcgtgaaatggcagtatagtccatgatatctaaggagttggcaagcttaacaaaacccattttttataaatgtccatcctcctgcatttgttgataccactaacaaaatgctttgtaacagacttgcggttaattatgcaaatgatagtttgtgataattggtccagttttacgaacaacagatttctaaattagagaggttaacaagacagatgattactatgcctcatgtgctgtgtgctctttgaaaggaatgacagcagactacaaagcaaataagatatactgagcctcaacagattgcctgctcctcagagtctctcctatttttgtattacccagctttctttttaatacaaatgttatttatagtttacaatgaatgcactgcataaaaactttgtagcttcattattgtaaaacatattcaagatcctacagtaagagtgaaacattcacaaagatttgcgttaatgaagactacacagaaaacctttctagggatttgtgtggatcagatacatacttggcaaatttttgagttttacattcttacagaaaagtccatttaaaagtgatcatttgtaagaccaaaatataaataaaaagtttcaaaaatctatctgaatttggaattcttctggtttgttctttcatgtttaaaaatgatgtttttcaatgcatttttttcatgtaagccctttttttagccaaaatgtaaaaatggctgtaatatttaaaacttataacatcttattgttggtaatagtgctttatatttgtctgattttatttttcaaagttttttcatttatgaacacattttcattggtatattatttaaggaatatctcttgatatagaatttttatattaaaaatgatttttctttggc

SEQ ID NO: 1216 - DNA, 1500 bp, Homo sapiens
gagtgggaatctcaaagcagttgagtaggcagaaaaaagaacctcttcattaaggattaaaatgtataggccagcacgtgtaacttcgacttcaagatttctgaatccatatgtagtatgtttcattgtcgtcgcaggggtagtgatcctggcagtcaccatagctctacttgtttactttttagcttttgatcaaaaatcttacttttataggagcagttttcaactcctaaatgttgaatataatagtcagttaaattcaccagctacacaggaatacaggactttgagtggaagaattgaatctctgattactaaaacattcaaagaatcaaatttaagaaatcagttcatcagagctcatgttgccaaactgaggcaagatggtagtggtgtgagagcggatgttgtcatgaaatttcaattcactagaaataacaatggagcatcaatgaaaagcagaattgagtctgttttacgacaaatgctgaataactctggaaacctggaaataaacccttcaactgagataacatcacttactgaccaggctgcagcaaattggcttattaatgaatgtggggccggtccagacctaataacattgtctgagcagagaatccttggaggcactgaggctgaggagggaagctggccgtggcaagtcagtctgcggctcaataatgcccaccactgtggaggcagcctgatcaataacatgtggatcctgacagcagctcactgcttcagaagcaactctaatcctcgtgactggattgccacgtctggtatttccacaacatttcctaaactaagaatgagagtaagaaatattttaattcataacaattataaatctgcaactcatgaaaatgacattgcacttgtgagacttgagaacagtgtcacctttaccaaagatatccatagtgtgtgtctcccagctgctacccagaatattccacctggctctactgcttatgtaacaggatggggcgctcaagaatatgctggccacacagttccagagctaaggcaaggacaggtcagaataataagtaatgatgtatgtaatgcaccacatagttataatggagccatcttgtctggaatgctgtgtgctggagtacctcaaggtggagtggacgcatgtcagggtgactctggtggcccactagtacaagaagactcacggcggctttggtttattgtggggatagtaagctggggagatcagtgtggcctgccggataagccaggagtgtatactcgagtgacagcctaccttgactggattaggcaacaaactgggatctagtgcaacaagtgcatccctgttgcaaagtctgtatgcaggtgtgcctgtcttaaattccaaagctttacatttcaactgaaaaagaaactagaaatgtcctaatttaacatcttgttacataaatatggtttaacaaacactgtttaacctttctttattattaaaggttttctattttctcc

SEQ ID NO: 1217 - DNA, 781 bp, Homo sapiens
ggaacatggcggatcggctcacgcagcttcaggacgctgtgaattcgcttgcagatcagttttgtaatgccattggagtattgcagcaatgtggtcctcctgcctctttcaataatattcagacagcaattaacaaagaccagccagctaaccctacagaagagtatgcccagctttttgcagcactgattgcacgaacagcaaaagacattgatgttttgatagattccttacccagtgaagaatctacagctgctttacaggctgctagcttgtataagctagaagaagaaaaccatgaagctgctacatgtgtggaggatgttgtttatcgaggagacatgcttctggagaagatacaaagcgcacttgctgatattgcacagtcacagctgaagacaagaagtggtacccatagccagtctcttccagactcatagcatcagtggataccatgtggctgagaaaagaactgtttgagtgccattaagaattctgcatcagacttagatacaagccttaccaacaattacagaaacattaaacactatgacacattacctttttagctatttttaatagtcttctattttcactcttgataagcttataaatcatgattgaatcagctttaaagcatcataccatcattttttaactgagtgaaattattaaggcatgtaatacattaatgaacataatataaggaaacatatgtaaaattctgttatgacataatttatgtctccattttgttgtattggccagtacttttacaatc

SEQ ID NO: 1218 - DNA, 791 bp, Homo sapiens
ggaactgaagcagtttctgtgggcggacagggaaccctgcgtttctactgtgtgattctgccaccttcctggcccgacgccatgggagtgacttgtgtgtcccagatgcctgtggccgagggcaagagtgttcagcaaaccgtagagctccttacccggaaattggagatgcttggggcagagaagcaaggaacattttgtgtggactgtgagacttaccatacggccgcctctacccttggcagccaaggtcagaccgggaagctgatgtatgtgatgcacaactcagagtacccattgagctgtttcgccctctttgagaatggcccttgccttattgctgacaccaactttgatgtgcttatggtgaagctcaagggctttttccagagtgctaaggccagcaagattgagacccggggcaccaggtaccagtactgtgacttcctggtgaaggtgggcacggtcacaatggggccagtgccggggatctctgtggaggtggagtatggcccctgtgtggtagctagtgactgctggagtctgctgctcgagttcctacagagttttctaggcagccacacaccaggggctcccgcagtgtttgggaacagacatgatgcggtctacggcccagcagataccatggtccagtacatggaactcttcaacaagatccgcaagcagcagcaggtggctgggattcgttagtgatgagcagctgcagctgagctctgtcacaagggtactccacaggaggagcagtgctgacttcagtcctgacccagaaa

SEQ ID NO: 1219 - DNA, 1771 bp, Homo sapiens
gttcgtagcagaaatggcggctgcggcggctcgagtggtgttgtcatccgcggcgcgaggcggcctctggggtttcagcgagagtcttctaatccgaggcgctgcgggacggtcattatattttggagagaacagattaagaagtacacaggctgctacccaagttgttctgaatgttcctgaaacaagagtaacatgtttagaaagtggactcagagtagcttcggaagactctgggctctcaacatgcacagttggactctggattgatgctggaagtagatacgaaaatgagaagaacaatggaacagcacactttctggagcatatggctttcaagggcaccaagaagagatcccagttagatctggaacttgagattgaaaatatgggtgctcatctcaatgcctatacctccagagagcagactgtatactatgccaaagcattctctaaagacttgccaagagctgtagaaattcttgctgatataatacaaaacagcacattgggagaagcagagattgaacgtgagcgtggagtaatccttagagagatgcaggaagttgaaaccaatttacaagaagttgtttttgattatcttcatgccacagcttatcaaaatactgcacttggacggacaattttgggaccaactgaaaatatcaaatctataagtcgtaaggacttagtggattatataaccacacattataaggggccaagaatagtgcttgctgctgctggaggtgtttcccatgatgaattgcttgacttagcaaagtttcatttcggtgactctttatgcacacacaaaggagaaataccagctctgcctccctgcaaattcacaggaagtgagattcgtgtgagggatgacaagatgcctttggcgcaccttgcaatagctgttgaagctgttggttgggcacatccagatacaatctgtctcatggttgcaaacacgctgattggcaactgggatcgctcttttgggggaggaatgaatttatctagcaagctggcccagctcacttgtcatggcaatctttgccatagctttcagtctttcaacacttcctacacagatacaggattatggggactgtatatggtttgtgaatcatccactgttgcagacatgctacatgttgttcaaaaagaatggatgcgactctgtacaagtgtcacagaaagtgaggttgcacgagccagaaatcttctgaaaacaaacatgttgttgcagcttgatggttcaactccaatttgtgaagatattggtaggcaaatgttatgctataatagaaggattcccatccctgagcttgaagcaagaattgatgctgtgaatgctgagacaattcgagaagtatgtaccaaatacatttataataggagtccagctattgctgctgttggtcccattaagcaactaccagattttaaacagatacgcagtaacatgtgttggcttcgtgattaaaatgctcctaatcaagattgtttgaacacatgtatttataaaacagagctagagaaaaataaaaatgaacatgtatatacatttggaaatttgaattaaatactgtatcatactttcaaaggataaaaagactacccctctgaaggttgttttgtattaatggtcagtctttgttctctgagaaattatgttggaagcagcatactttcaaattattaccatgagtataattttaagaatgaaaatgtttacagtattttcagttttattataaaaatgcacacacaa

SEQ ID NO: 1220 - DNA, 1147 bp, Homo sapiens
ggctactagccgcgggggccaagcccctggcttcttactgcggcttcatactgagggccgagccgaggcggcgcgggtgcaggagcaggacttacggcatgggggctgacagggattcacctacgctcttaccagctggagggagtaactggctcgcccagcgcttccattgtcagaatggctgtatcctgggagatgagatgggcctggggaagacctgccagactattgctctcttcatttatttggcaggaagattaaatgatgaagggccatttctgattctttgtccctatgtctgttttgagcaactggaaagaagaaatgcagagatttgctccaggtctttcctgtgtaacatatgcagcgacaaggaggaaagagcctgccttcagcaagacctgaaacaggagtcacgttttcatgtgctactgactacctatgagatttgcttgaaagatgcatcatttctaaaatcattcccttggagtgttcttgttgtggatgaagctcacaggttgaaaaaccaaagctccctgctgcataagaccttgtcagagttctcagtagtcttcagtctcctgttgaccggaactcccatccagaacagcctccaagagctctactccctcctcagttttgtggagcctgatctcttttccaaggaagagtgggagattttattcaacgctaccaggatattgagaaagaatctgagtcagcaagtgaactgcacaaactcttgcagccatttctgctgagcgagtgaaagctgaggtagctacagagcttcccaagaagacagaagtagtgatataccatggcatgtccgcattgcagaagaaatactacaaggccattttgatgaaagacctagatgcatttgaaaatgagacggcaaagaaagttaaactacagaacattttgtcccagcttcgaaagtgtgtggatcacccatatttgtttgatggtgtggagccggagccttttgaagttggagaccacctgactgaggctagtgggaagcttcacctgctggataagctactagcattcctgtattctgggggccatcgggttttacttttctcccaaatgacccagatgttggatattctccaagactatatggattacagaggctacg

SEQ ID NO: 1221 - DNA, 2222 bp, Homo sapiens
aggacttcggaaccgccccgtcctcaagatcgaaaagcccagagccgcgcgctcaagcacggtgttgggggtggggtctcaggagcgcccagcaaggcgcccctgtcggcgtggacccgcgggctcaaaggcagttccccggtgacccgcccagcccctctatgcgaactcgaacgacagcaccacagcccgccagcgtcgagactcgcgctgtgccccaacccaggtgggcgccgcggagccgcgagcctgagcccgccctgcaggtgacccgcggcccttcctcctccaggtaccccttctcctgcggccccgtcccctataggtaacctttacctcccgcggctccttcccctccaagcgacccgcagcgcccgggccctccaggtgactgcgcccccgccaacccccgccccaccacacacacacaccccctcgccttcttccgccctactccctccaggtgaccccacccccgcagctcctcctcctccggacaacctgcagccccgcccctgcaggtgaacggcggcccagtccctgcaggtgacccgcggaccctccccgcccgtcctactaccgtcataggacgcctccgcaggcgcactggagccgattgcgcaggagccgattgcgcaggcgtggctctcacacgcgctgccctgttggcgttggtgcgggactgcgcaggcgcgcgggggcaagactggcagtgcgcctgcgcgcgtcggcgtgcggaacgccgcggtgtctcggcgcctctgcgcgcgggaagatggcggaacaggctaccaagtccgtgctgtttgtgtgtctgggtaacatttgtcgatcacccattgcagaagcagttttcaggaaacttgtaaccgatcaaaacatctcagagaattggagggtagacagcgcggcaacttccgggtatgagatagggaacccccctgactaccgagggcagagctgcatgaagaggcacggcattcccatgagccacgttgcccggcagattaccaaagaagattttgccacatttgattatatactatgtatggatgaaagcaatctgagagatttgaatagaaaaagtaatcaagttaaaacctgcaaagctaaaattgaactacttgggagctatgatccacaaaaacaacttattattgaagatccctattatgggaatgactctgactttgagacggtgtaccagcagtgtgtcaggtgctgcagagcgttcttggagaaggcccactgaggcaggttcgtgccctgctgcggccagcctgactagaccccaccctgaggtcctgcatttctcagtcggtgtgtaatcacgttccagggcccaaagccagctctttgttcagttgacttactgtttcttaccttaaaaagtaattgtagatggaaatcagttgtgtttggcaggagaatcaataaaaatgtttgattcagacagcttatggggtattttaagcattcttagactagttgaacatctcactttgccccagttacaaaaatagtagaacaagcaacataaaacaatgaaggaaaacctcacttgaaggcccaggtcaacatctaagcctgttgagacttagataatcgagtctacctcttcagtaggtttgtgtggatggcctggaggcaggtgcttgctccccagtgctacctctctcttccctagggccttttgtggattgacagtagtcccctccgtagagctcacagtctagattagaagtgttttaatttctacacacccatagtgcacacttgtatattgaaaagatagggaagagagaaacatttatggaatcagtcgttggcaccttcaatacttcatgatttttgtcgagtttacttcatgaggaggtcagcccattggctcccatctgaaccactttgcctctgaaacttaattacatccagaaagaaggacacttgtatgctagtctatggtcagttgaggaatatgactgtttttatatgcacatgtaacccaaatgtccaatataaattggcttattttttaaaataattttaaaagttgggaaaagtgttattatttggcatgcttaaatattgaataagtattcttcatcagcatttaataaatgtataggcagatgtaaggtaatttctgtgtattttgagataatgtcaaaatcatgaatatttcaaaataaactggggagttataaaaatacaactagagatat

SEQ ID NO: 1222 - DNA, 1921 bp, Homo sapiens
ggcacgagggggcggccgacgacgttcgtcatttagtgcgggagggatcctgaaccgcgcggccgaaccctccggtgtcccgacccaggctaagcttgagcatggctgagcaggagcccacagccgagcagctggcccagattgcagcggagaacgaggaggatgagcactcggtcaactacaagcccccggcccagaagagcatccaggagatccaggagctggacaaggacgacgagagcctgcgaaagtacaaggaggccctgctgggccgcgtggccgtttccgcagaccccaacgtccccaacgtcgtggtgactggcctgaccctggtgtgcagctcggccccgggccccctggagctggacctgacgggcgacctggagagcttcaagaagcagtcgtttgtgctgaaggagggtgtggagtaccggataaaaatctctttccgggttaaccgagagatagtgtccggcatgaagtacatccagcatacgtacaggaaaggcgtcaagattgacaagactgactacatggtaggcagctatgggccccgggccgaggagtacgagttcctgacccccgtggaggaggcacccaagggtatgctggcccggggcagctacagcatcaagtcccgcttcacagacgacgacaagaccgaccacctgtcctgggagtggaatctcaccatcaagaaggactggaaggactgagcccagccagaggcgggcagggcagactgacggacggacgacggacaggcggatgtgtcccccccagcccctcccctccccataccaaagtgctgacaggccctccgtgcccctcccaccctggtccgcctccctggcctggctcaaccgagtgcctccgacccccctcctcagccctcccccacccacaggcccagcctcctcggtctcctgtctcgttgctgcttctgcctgtgctgtgggggagagaggccgcagccaggcctctgctgccctttctgtgccccccaggttctatctccccgtcacacccgaggcctggcttcaggagggagcggagcagccattctccaggccccgtggttgcccctggacgtgtgcgtctgctgctccggggtggagctggggtgtgggatgcacggcctcgtgggggccgggccgtcctccagccccgctgctccctggccagcccccttgtcgctgtcggtcccgtctaaccatgatgccttaacatgtggagtgtaccgtggggcctcactagcctctaactccctgtgtctgcatgagcatgtggcctccccgtcccttccccggtggcgaacccagtgacccagggacacgtggggtgtgctgctgctgctccccagcccaccagtgcctggccagcctgcccccttccctggacagggctgtggagatggctccggcggcttggggaaagccaaattgccaaaactcaagtcacctcagtaccatccaggaggctgggtattgtcctgcctctgccttttctgtctcagcgggcagtgcccagagcccacacccccccaagagccctcgatggacagcctcacccaccccacctgggcccagccaggagccccgcctggccatcagtatttattgcctccgtccgtgccgtccctgggccactggcctggcgcctgttcccccaggctctcagtgccaccacccccggcaggccttccctgacccagccaggaacaaacaagggaccaagtgcacacattgctgagagccgtctcctgtgcctcccccgccccatccccggtcttcgtgttgtgtctgccaggctcaggcagaggcgcctgtccctgcttcttttctgaccgggaaataaatgcccctgaaggaaaaaaaaaaaaaaaaaaaaaaaaaaaaaaaaaaaaaaaaaaaaaaaaaaa

SEQ ID NO: 1223 - DNA, 900 bp, Homo sapiens
gggactcggcggaggatgggcttgctctcaattttgcgcaagttgaaaagtgcaccagaccaggaggtgagaatacttctcctgggcttggataatgctggcaagaccactcttctgaagcagcttgcatctgaagacatcagccacatcacacctacacagggtttcaacatcaaaagtgtacaatcacaaggttttaaactgaatgtatgggacattggtggacagaggaaaatcagaccatactggaagaattattttgaaaataccgatattcttatatatgtaatcgacagtgcagacagaaaaagatttgaagagacgggtcaggaactagcggaattactggaggaagaaaaactaagttgtgtgccagtgctcatctttgctaataagcaggatttgctcacagcagcccctgcctctgaaattgcagaaggactgaacctgcataccatccgcgaccgagtctggcagatccagtcttgctcagctctcacaggagagggcgttcaggatggcatgaactgggtctgcaaaaatgtcaatgcaaagaagaaataaaatctagacgaatggagatgcaggagctgcgggagccgaattcgggccttaaaaacactaatttgctgctttctgaccaaatgtttttcatctgtgtacactccagctgtttgaagagagggaacaacacggtttagaaagaatccccattccagcagtagatttaactgatctctgaggttcagtatcatttttcaaataaaggaattatattatttcctctgcataattgaaatagtattaaatgtctaaagcacatgattagaaaatgagatcttttaaatgagcaagagattgcattgcagtttagacaattccagtgggctttttttttcg

SEQ ID NO: 1224 - DNA, 2333 bp, Homo sapiens
ggcacgaggctagagcgatgccgggccggagttgcgtcgccttagtcctcctggctgccgccgtcagctgtgccgtcgcgcagcacgcgccgccgtggacagaggactgcagaaaatcaacctatcctccttcaggaccaacgtacagaggtgcagttccatggtacaccataaatcttgacttaccaccctacaaaagatggcatgaattgatgcttgacaaggcaccaatgctaaaggttatagtgaattctctgaagaatatgataaatacattcgtgccaagtggaaaagttatgcaggtggtggatgaaaaattgcctggcctacttggcaactttcctggcccttttgaagaggaaatgaagggtattgccgctgttactgatatacctttaggagagattatttcattcaatattttttatgaattatttaccatttgtacttcaatagtagcagaagacaaaaaaggtcatctaatacatgggagaaacatggattttggagtatttcttgggtggaacataaataatgatacctgggtcataactgagcaactaaaacctttaacagtgaatttggatttccaaagaaacaacaaaactgtcttcaaggcttcaagctttgctggctatgtgggcatgttaacaggattcaaaccaggactgttcagtcttacactgaatgaacgtttcagtataaatggtggttatctgggtattctagaatggattctgggaaagaaagatgccatgtggatagggttcctcactagaacagttctggaaaatagcacaagttatgaagaagccaagaatttattgaccaagaccaagatattggccccagcctactttatcctgggaggcaaccagtctggggaaggttgtgtgattacacgagacagaaaggaatcattggatgtatatgaactcgatgctaagcagggtagatggtatgtggtacaaacaaattatgaccgttggaaacatcccttcttccttgatgatcgcagaacgcctgcaaagatgtgtctgaaccgcaccagccaagagaatatctcatttgaaaccatgtatgatgtcctgtcaacaaaacctgtcctcaacaagctgaccgtatacacaaccttgatagatgttaccaaaggtcaattcgaaacttacctgcgggactgccctgacccttgtataggttggtgagcacacgtctggcctacagaatgcggcctctgagacatgaagacaccatctccatgtgaccgaacactgcagctgtctgaccttccaaagactaagactcgcggcaggttctctttgagtcaatagcttgtcttcgtccatctgttgacaaatgacagatctttttttttttccccctatcagttgatttttcttatttacagataacttctttaggggaagtaaaacagtcatctagaattcactgagttttgtttcactttgacatttggggatctggtgggcagtcgaaccatggtgaactccacctccgtggaataaatggagattcagcgtgggtgttgaatccagcacgtctgtgtgagtaacgggacagtaaacactccacattcttcagtttttcacttctacctacatatttgtatgtttttctgtataacagccttttccttctggttctaactgctgttaaaattaatatatcattatctttgctgttattgacagcgatattattttattacatatcattagagggatgagacagacattcacctgtatatttcttttaatgggcacaaaatgggcccttgcctctaaatagcactttttggggttcaagaagtaatcagtatgcaaagcaatcttttatacaataattgaagtgttccctttttcataattactctacttcccagtaaccctaaggaagttgctaacttaaaaaactgcatcccacgttctgttaatttagtaaataaacaagtcaaagacttgtggaaaataggaagtgaacccatattttaaattctcataagtagcattgatgtaataaacaggtttttagtttgttcttcagattgatagggagttttaaagaaattttagtagttactaaaattatgttactgtatttttcagaaatcaaactgcttatgaaaagtactaatagaacttgttaacctttctaaccttcacgattaactgtgaaatgtacgtcatttgtgcaagaccgtttgtccacttcattttgtataatcacagttgtgttcctgacactcaataaacagtcactggaaagagtgccagtcagcagtcatgcacgctgataaaaaaaaaaaaaaaaaa

SEQ ID NO: 1225 - DNA, 1311 bp, Homo sapiens
tagtcgggcggggttgtgagacgccgcgctcagcttccatcgctgggcggtcaacaagtgcgggcctggctcagcgcgggggggcgcggagaccgcgaggcgaccgggagcggctgggttcccggctgcgcgcccttcggccaggccgggagccgcgccagtcggagcccccggcccagcgtggtccgcctccctctcggcgtccacctgcccggagtactgccagcgggcatgaccgacccaccaggggcgccgccgccggcgctcgcaggccgcggatgaagaagaaaacccggcgccgctcgacccggagcgaggagttgacccggagcgaggagttgaccctgagtgaggaagcgacctggagtgaagaggcgacccagagtgaggaggcgacccagggcgaagagatgaatcggagccaggaggtgacccgggacgaggagtcgacccggagcgaggaggtgaccagggaggaaatggcggcagctgggctcaccgtgactgtcacccacagcaatgagaagcacgaccttcatgttacctcccagcagggcagcagtgaaccagttgtccaagacctggcccaggttgttgaagaggtcataggggttccacagtcttttcagaaactcatatttaagggaaaatctctgaaggaaatggaaacaccgttgtcagcacttggaatacaagatggttgccgggtcatgttaattgggaaaaagaacagtccacaggaagaggttgaactaaagaagttgaaacatttggagaagtctgtggagaagatagctgaccagctggaagagttgaataaagagcttactggaatccagcagggttttctgcccaaggatttgcaagctgaagctctctgcaaacttgataggagagtaaaagccacaatagagcagtttatgaagatcttggaggagattgacacactgatcctgccagaaaatttcaaagacagtagattgaaaaggaaaggcttggtaaaaaaggttcaggcattcctagccgagtgtgacacagtggagcagaacatctgccaggagactgagcggctgcagtctacaaactttgccctggccgagtgaggtgtagcagaaaaaggctgtgctgccctgaagaatggcgccaccagctctgccgtctctggatcggaatttacctgatttcttcagggctgctgggggcaactggccatttgccaattttcctactctcacactggttctcaatgaaaaatagtgtctttgtgatttgagtaaagctcctattctgtttttcacaaaaaaaaaaaaa

SEQ ID NO: 1226 - DNA, 4739 bp, Homo sapiens
ggggagataggtaggagtagcgtggtaagggcgatgagtgtgggccgggcgggagtgcggcgagagccggctggctgagcttagcgtccgaggaggcggcggcggcggcggcggcagcggcggcggcggggctgtggggcggtgcggaagcgagaggcgaggagcgcgcgggccgtggccagagtctggcggcggcctggcggagcggagagcagcgcccgcgcctcgccgtgcggaggagccccgcacacaatagcggcgcgcgcagcccgcgcccttccccccggcgcgccccgccccgcgcgccgagcgccccgctccgcctcacctgccaccagggagtgggcgggcattgttcgccgccgccgccgccgcgcggggccatgggggccgcccggcgcccggggccgggcctggcgaggccgccgcgccgccgctgagacgggccccgcgcgcagcccggcggcgcaggtaaggccggccgcgccatggtggacccggtgggcttcgcggaggcgtggaaggcgcagttcccggactcagagcccccgcgcatggagctgcgctcagtgggcgacatcgagcaggagctggagcgctgcaaggcctccattcggcgcctggagcaggaggtgaaccaggagcgcttccgcatgatctacctgcagacgttgctggccaaggaaaagaagagctatgaccggcagcgatggggcttccggcgcgcggcgcaggcccccgacggcgcctccgagccccgagcgtccgcgtcgcgcccgcagccagcgcccgccgacggagccgacccgccgcccgccgaggagcccgaggcccggcccgacggcgagggttctccgggtaaggccaggcccgggaccgcccgcaggcccggggcagccgcgtcgggggaacgggacgaccggggaccccccgccagcgtggcggcgctcaggtccaacttcgagcggatccgcaagggccatggccagcccggggcggacgccgagaagcccttctacgtgaacgtcgagtttcaccacgagcgcggcctggtgaaggtcaacgacaaagaggtgtcggaccgcatcagctccctgggcagccaggccatgcagatggagcgcaaaaagtcccagcacggcgcgggctcgagcgtgggggatgcatccaggcccccttaccggggacgctcctcggagagcagctgcggcgtcgacggcgactacgaggacgccgagttgaacccccgcttcctgaaggacaacctgatcgacgccaatggcggtagcaggcccccttggccgcccctggagtaccagccctaccagagcatctacgtcgggggcatgatggaaggggagggcaagggcccgctcctgcgcagccagagcacctctgagcaggagaagcgccttacctggccccgcaggtcctactccccccggagttttgaggattgcggaggcggctataccccggactgcagctccaatgagaacctcacctccagcgaggaggacttctcctctggccagtccagccgcgtgtccccaagccccaccacctaccgcatgttccgggacaaaagccgctctccctcgcagaactcgcaacagtccttcgacagcagcagtccccccacgccgcagtgccataagcggcaccggcactgcccggttgtcgtgtccgaggccaccatcgtgggcgtccgcaagaccgggcagatctggcccaacgatggcgagggcgccttccatggagacgcagatggctcgttcggaacaccacctggatacggctgcgctgcagaccgggcagaggagcagcgccggcaccaagatgggctgccctacattgatgactcgccctcctcatcgccccacctcagcagcaagggcaggggcagccgggatgcgctggtctcgggagccctggagtccactaaagcgagtgagctggacttggaaaagggcttggagatgagaaaatgggtcctgtcgggaatcctggctagcgaggagacttacctgagccacctggaggcactgctgctgcccatgaagcctttgaaagccgctgccaccacctctcagccggtgctgacgagtcagcagatcgagaccatcttcttcaaagtgcctgagctctacgagatccacaaggagttctatgatgggctcttcccccgcgtgcagcagtggagccaccagcagcgggtgggcgacctcttccagaagctggccagccagctgggtgtgtaccgggccttcgtggacaactacggagttgccatggaaatggctgagaagtgctgtcaggccaatgctcagtttgcagaaatctccgagaacctgagagccagaagcaacaaagatgccaaggatccaacgaccaagaactctctggaaactctgctctacaagcctgtggaccgtgtgacgaggagcacgctggtcctccatgacttgctgaagcacactcctgccagccaccctgaccaccccttgctgcaggacgccctccgcatctcacagaacttcctgtccagcatcaatgaggagatcacaccccgacggcagtccatgacggtgaagaagggagagcaccggcagctgctgaaggacagcttcatggtggagctggtggagggggcccgcaagctgcgccacgtcttcctgttcaccgagctgcttctctgcaccaagctcaagaagcagagcggaggcaaaacgcagcagtatgactgcaaatggtacattccgctcacggatctcagcttccagatggtggatgaactggaggcagtgcccaacatccccctggtgcccgatgaggagctggacgctttgaagatcaagatctcccagatcaagagtgacatccagagagagaagagggcgaacaagggcagcaaggctacggagaggctgaagaagaagctgtcggagcaggagtcactgctgctgcttatgtctcccagcatggccttcagggtgcacagccgcaacggcaagagttacacgttcctgatctcctctgactatgagcgtgcagagtggagggagaacatccgggagcagcagaagaagtgtttcagaagcttctccctgacatccgtggagctgcagatgctgaccaactcgtgtgtgaaactccagactgtccacagcattccgctgaccatcaataaggaagatgatgagtctccggggctctatgggtttctgaatgtcatcgtccactcagccactggatttaagcagagttcaaatctgtactgcaccctggaggtggattcctttgggtattttgtgaataaagcaaagacgcgcgtctacagggacacagctgagccaaactggaacgaggaatttgagatagagctggagggctcccagaccctgaggatactgtgctatgaaaagtgttacaacaagacgaagatccccaaggaggacggcgagagcacggacagactcatggggaagggccaggtccagctggacccgcaggccctgcaggacagagactggcagcgcaccgtcatcgccatgaatgggatcgaagtaaagctctcggtcaagttcaacagcagggagttcagcttgaagaggatgccgtcccgaaaacagacaggggtcttcggagtcaagattgctgtggtcaccaagagagagaggtccaaggtgccctacatcgtgcgccagtgcgtggaggagatcgagcgccgaggcatggaggaggtgggcatctaccgcgtgtccggtgtggccacggacatccaggcactgaaggcagccttcgacgtcaataacaaggatgtgtcggtgatgatgagcgagatggacgtgaacgccatcgcaggcacgctgaagctgtacttccgtgagctgcccgagcccctcttcactgacgagttctaccccaacttcgcagagggcatcgctctttcagacccggttgcaaaggagagctgcatgctcaacctgctgctgtccctgccggaggccaacctgctcaccttccttttccttctggaccacctgaaaagggtggcagagaaggaggcagtcaataagatgtccctgcacaacctcgccacggtctttggccccacgctgctccggccctccgagaaggagagcaagctccctgccaaccccagccagcctatcaccatgactgacagctggtccttggaggtcatgtcccaggtccaggtgctgctgtacttcctgcagctggaggccatccctgccccggacagcaagagacagagcatcctgttctccaccgaagtctaaaggtcccagtccatctcctggaggcagacagatggcctggaaacctctggctaatcgggccatccgtagagcgggaaccttcctgaggtgtccttgggccacccccaagtgttgggccatctgccaagagacagcgacccaaagccgaaggacaggtggcctgggcagatctcgcccaggtctgggagccccaggctggcctcagactgtggttttttatgtggccacccgagggcgccccaagccagttcatctcagagtccaggcctgaccctgggagacagggtgaagggagtgatttttatgaacttaacttagagtctaaaagatttctactggatcacttgtcaagatgcgccctctctggggagaagggaacgtgaccggattccctcactgttgtatcttgaataaacgctgctgcttcatcctgtg

SEQ ID NO: 1227 - DNA, 1337 bp, Homo sapiens
gcggcggactcggcttgttgtgttgctgcctgagtgccggagacggtcctgctgctgccgcagtcctgccagctgtccgacgatgtcgtcccacctagtcgagccgccgccgcccctgcacaacaacaacaacaactgcgaggaaaatgagcagtctctgcccccgccggccggcctcaacagttcctgggtggagctacccatgaacagcagcaatggcaatgataatggcaatgggaaaaatggggggctggaacacgtaccatcctcatcctccatccacaatggagacatggagaagattcttttggatgcacaacatgaatcaggacagagtagttccagaggcagttctcactgtgacagcccttcgccacaagaagatgggcagatcatgtttgatgtggaaatgcacaccagcagggaccatagctctcagtcagaagaagaagttgtagaaggagagaaggaagtcgaggctttgaagaaaagtgcggactgggtatcagactggtccagtagacccgaaaacattccacccaaggagttccacttcagacaccctaaacgttctgtgtctttaagcatgaggaaaagtggagccatgaagaaagggggtattttctccgcagaatttctgaaggtgttcattccatctctcttcctttctcatgttttggctttggggctaggcatctatattggaaagcgactgagcacaccctctgccagcacctactgagggaaaggaaaagcccctggaaatgcgtgtgacctgtgaagtggtgtattgtcacagtagcttatttgaacttgagaccattgtaagcatgacccaacctaccaccctgtttttacatatccaattccagtaaccctcaaattcaatattttattcaaactctgttgaggcattttactaaccttataccctttttggcctgaagacattttagaatttcctaacagagtttactgttgtttagaaatttgcaagggcttcttttccgcaaatgccaccagcagattataattttgtcggcaatgctattatctctaattagtgccaccagactagacctgtatcattcatggtataaattttactcttccaacataactaccatctctctcttaaaacgagatcaggttagcaaatgatgtaaaagaagctttattgtctagttgttttttttcccccaagacaaaggcaagtttccctaagtttgagttgatagttattaaaaagaaaacaaaacaaaaaaaaaaggcaaggcacaacaaaaaaatatcctgggcaataaaaaaaatattttaaaccaaaaaaaaaaaaaaaa

SEQ ID NO: 1228 - DNA, 8093 bp, Homo sapiens
ctcagctccctgtggtgggggatggcagaggcttcccgctccccgcagctggtttgcacagcctcccgactgtgccgtggtgtctccttccctaaagtgggacagtcgtttctgtgtcctgctggcctctgaggaacagacgtgtgtgagaggccttcagggcctgatggctggggtggtgacagtgcctggagaatgggtggggactggaggggccaggtggctaaccactctcctcttccatggcagcggagctggagttcgcccaaatcatcatcatcgtcgtggtggtcacggtgatggtggtggtcatcgtctgcctgctgaaccactacaaagtctccacgcggtccttcatcaaccgcccgaaccagagccggaggcgggaggacgggctgccgcaggaagggtgcctgtggccttcagacagcgccgcaccgcggctgggcgcctcggagatcatgcatgccccgcggtccagggacaggttcacagcgccgtccttcatccagagggatcgcttcagccgcttccagcccacctacccctatgtgcagcacgagattgatcttcctcccaccatctccctgtccgacggtgaagagccacctccttaccaggggccctgcaccctgcagctccgggaccctgaacagcagatggaactcaaccgagagtccgtgagggccccacccaaccgaaccatatttgacagtgatttaatagacattgctatgtatagcgggggtccatgcccacccagcagcaactcgggcatcagtgcaagcacctgcagcagtaacgggaggatggaggggccaccccccacatacagcgaggtgatgggccaccacccaggcgcctctttcctccatcaccagcgcagcaacgcacacaggggcagcagactgcagtttcagcagaacaatgcagagagcacaatagtacccatcaaaggcaaagataggaagcctgggaacctggtctgattccttccaacgtgcacttcagctggagaaagaaaccaagaagggaagcggccgctgggcccctcctgcgcacagtgttgttcagtttcacatggtacaaataagtaaaaccaaatgagcaaacacggtctttgtttctgattccttttaggggaattgcatgcaaactagactgaaatgatacaaacttccatctggtctgaccgcaaacagtgtttatttggggacaggggttgggatgggggtgtgggcaggggaaaacagagaacgggatgctttgaagataccatgaaataaaacccacagaggtatttgatgtatttaattgtgaaaggagactttgcagataaatgaggccagaatggcatgttttataattaactgaataaagaaggaagcattattatatattattgtggggaagaaccagccagttcgctttttctcctaaggtgtggacttttattttgttttaaaaatatgaatcaaaattcctgtgttgtgtgccaaggtataaagtggagaagttagatgagtgcaaggagctcctttgtgttgtgatgatgtgttttaaaagttgcactatcttaatgttgaaaatatttacaagggaactgttttacgtgaagttctgtatgttgtcttttcacctgtggattgtaatcaggcccaaggaatatcctggagtggtccccagaagcatccaagaaaagatatttggggacgtagcctaacattttaccaacttacgtaaatcaaaaaagtcattattgttgcaggagtttgcatcaaatagcagtgcatcgctgaagcttttggagacttttggatggaagataagatagggaagattaagttccagcatttctgacttgttattttgagttactctgctactcttaggctgcatagtttatgagaaaatgaacacatgcatttatggatccagtatcatgcagtgctgccctcatcctccagcagtgcaatttcttcagtaatttagatttttttcactatagcatgaaatatattcaaatacataccttattttatgcaataaattgtttaaaatgcaaggtggttattctgcatactgttgaaatatgtgactcctcagtatattcccattgcctctccccctttcctcgacagcttagttcagttctgcagggctgctcagttcacaggaggctcccagcagccaccccacatccagcctacacagaactttcgtgtgggagtggtgtgggtggtggttttcttatgctttggaagcccctagaaataatgacggaagaatgccatgttgctgatcgtggtaataagccattgtgggttattgtatgtcactagtattagcatagcattcttaaaggaatgcagtgttcaaaacctacccaaattccccgcaggattttaccaaacccttccccaggccagttttgtactgaaggcaagaactggacagtcagagaacagtggagggggcaagtgactgaagagcaccgggtaaaaagcacaacatgcagttaaaatgcaaactagaaaactaattttaaatattgttagttttaatatttcctgatatttacaaatattcattcttatatacaatgaaaaaaataactttcttctgcagatgtaagcactggcttttataagagcagcagccaacacgtttagcagacactgcgcgtggagaagggcttatctgcagtacactctgccatgtggagggtgggcctctgtggcctcttcacataacaagatgagctggaatgatgattccatgactcccacctatgcagccttaaagccaaatccgcgtgtgtgtgtttgtgtctgtctgtgggtctcgaaggtgatccgtcggtgcggtggctctgtgctgtaactggagagactgttccaaaccccaagagttgtctgatcctagtctgttcccttctgcttcttacctctgtagataggtcactggtttttgtttgtttgttttgaggattggaatttccattacattcatcctttgcacacagtaacatccacagaactagtccaactcttaaaaggagagaggaaaaacacaggcaccagttgtcagctcatgcttacaacctgtgtggaagtatatacagttgagagtcacagtggaggttctgagactggattcagtcttgttccagtgacagttggaaggcctctgctggagagacaccagctctcagggcagagattggcttggggccagaaggaccctccccaaccctggagacaccctgaaggttcactggctctccagattagcctctcttcctctgtcaggcaaagatgaggagcccgtgttcccatcgggccctgctggcagggacttgcagtggattcttggtcaggtgtgcccacagatgcggaggcgaggtgagtgattccatcatttcagttctcacctgcagttttggtgaagcaggagatgcaccccacagctctagctctcaaatggcttcacagtccttacttctctacctgcctcaagaaggggctcagagcagagacttgtgaattccttagtaactgtgagtatatgaatgtgttgcacatgtccacagtattggcgagataattacataattcagatacctttaatcatctttcaagaaagaggctcctcccattcaaccaccctagagaactgcctttgttaaatagttatttaaagactcatacatatcaaaccatgactttgaaaggtcttcgaggctggggctctgtaatgaattagtttaaaagccaaggtcataacatgaattgatggtcaatttcccttcagcagaaggaaaaggtgatttagatcagtagctcttttgaaggttgtggctgacctgttcataccgtgtcgcctcatggctagtgtggcgttgaaagagtagcgactgggaagatacaacttacacagtggggcctattgttctttcaagaaccctttttttagcttatagaacccatgggtccagtttagtaacgagtgatttaggcaatcaatgataggtttataatcttagattattccagcaaagtgtggattgcattgttaggaagaacatttggtgggaatgaacactcctgggcataccgctgacttttgtcccttgttcccggtgtaggagacccaaggcatcttgaatcccatctataagaacacaatcttccagcatacgtttgctttttcagaaactctagcattctctttaaatactgacgcaatccttaatggaaaagagatttcatgaagcaaattatgtatttcaatagttcttctatttttagtgtccaaaatttactaatacagaagcttgacaagcatgtcctcaccctccccaccacataaacacatggacacacacccaagccacaagaaatcccaagagagcagaagcgaatttttaaaagatttatcgtgaggactgcatttccattcactaattttggctcaaacttatgaggcaggaaataggggccaacagtaaatgggggaggcctcctgacaccagcagaggaattttgtacccaggcgaggacttcttgaacttctgcgtatctccgtttgatctctttcacctttatttcatcttcataagaatgagaaaggctcaaaaggaagcacttttagaaatcttctctgacctagaagaatccatccaaatccctgccttcctctctgaaccaacagttcccttctctgacagggggccatcctctatcttccatccagcggctcttccttttaggaaggctctggtgcagagcacttcaaatatgtcctcaggccagatactgattgctagtagagagacacccggcacccagtccgaagccctccctcaaaggaccggcttatggcgttggtcactggcaggctcagagacattctactgtgggcgcagggagcccggccccccatgcagccatgactggatgcgcccccatctcgggggcttgctgcactgcttgtttattgaattttgctacttagaatggcaacattaactttgtgtaccattcattttttaaaaattttccaaagctcggcagtgtatgaaagaaaaaactgggaaagatacttggtttctgttaacttttgtgttgcttgcttaagtgattaaagccagtgcttggagccaagccttcatgccacgaacatgctccacagcctgccctttgctctcctgctcacactgaccaagaatgccgcgtgcttggcctactgaggtgaaaggacaattgaatgacaggtgggcaaagggagaacttccccttcttggtgcgaggaaagtcacaaatttaaaaatgttgcttccagcccagatcctaaatgctagttctcagcagctgcgtggcttaccgttcgccatttccaccaccgccagctgccagcaccgctacagatcacagagatgtgaacagacaatggaaagcactcttagccttgcagtggtctacattttttaggaaccaatatttcagcattctttattacccggcacgctgtgtcctttgcagagttcaagtttatgttactgccagggtcagacagtcatttgctgctgctgctgctgctgctgctgcttctcgaactggatgcattaggaagctgctgtctgagtgtaggaatgtcttgctaagaaagcaatgtcttccttcatccttttctttcttccctctgcgtgtccttgtttttgtgtaatgcgggagagggttagagctatagagattatatatacactatccgtgcacattatatatatgtagatatacccctatcatgtcagagatctgcatgtcagtttttcagcaactaaggtgcctcatgttctgagttcagcagatataggaaccaagccgccccctcctgcacttgatgctcccacctttgttgtgcctcacttaaaatggtgcttttttcagttgtctgtcttttcttatgtttttatttgtaaggtgctgtatataagttgaatatattatgcacatatcctacccaatgggtagaacaaaaagttgttaatactgtaatataatgtatagatgataccaattttaacagaaatggcatagaatttgtgaatgcctatgtgctttgtcctcttttgtaaggaaatttgcaaatggatgcatacagattaaagtctatgtagtttattttcctattaaatatcaatattataacacaagagaaagaagtgtgaacaaacaagcaacagtttatgaccagcgtatatatagcaatggaaagttgcatctttgctgtgaaaacactttaaagaaaatactttttaaaaaatcccacagctttttggttgccactagacgcttcttattttaatcattttagtaatgctcagctggaccagtgttagttatatttgagtcagaaaaatgttgtttttcaacttgctttataatctcctgcatctatctcctgctgtagcatcaygaaggtgtcaggcaacagtgaaaagtgcacatttttgttgttgcagaaactgtgtcagaggaataagtaaatcagcctgcagcagaagactttgttcagctccagaggcatctgtgaccgtctgtgtccaagtctctctgtgcctttttcttttacaaactgaagctgtggagccaatgaagtaacagtagagattgtagggaaagaatacctcaggaaaaacaaatacacttacaagaagaccctgttcttagaaaatgtgtttagttatgggttagcactagaagagacttggctgtcagccagccaagtgaaggacctctcatccattcccattcatgtcccatcataatacggacmcaaaaagcaaactcggttttgccatcagttagaaattacgttttggattgtatattgttacatctctcttccagcttagtttttagtgtctgattgtgacctctgcatttatcttcaaataccctaattttaaaacaaaagaacaagaaaagtttataacaccatgttcactaaaaccacggttgaatcttgggtgtgggcatcctttcgagtgttgtccataagagcagttcgtggaattttgcccatctgacccatattatcagcttattctgccaccagagtagagtctaataaattccaaagtttttatttgctccatggtgtatgttctgactttgaaaatgtcagattctataatcatacccctaacatccaggagacaaatgacagattatctttaaactgaaattgactctacaatgcaacccttaatgctgaatggattaaaaaagtcagcccttttagtatctgtttgaaagggccgtaaaaagttgacacttttgttgttgtggatcctgcgtgtctagacccacgtgttgtttccatcgtatactgtagggtgcaccccttgggattcatcattaagaactgaggctcactgttgtcagaaacaaagctcccaccccccaggttcaaccttgtgggagaactgttgagcatgagaatgttctagactcagaggtactaaaatttgttaccacatcattgcttcctttctacaggacgaattgaggcttaaactttactgttaatgatactggttcattttaatgtgcttgttggtatgttgctatttttcatttcatagctttcaaaaatcatgctaattgtatacttgtctagtttaaggctattttaaaatatgtacaatactattcacagcatttagttcgtttaatttttattataaagcaatctactaaaaaagtacaactgtatttgaacttttcaatagttgtttgtgagctatgataatcaaaagtcattaaagtcttttttaacaaacattcgtgcttacttttcaacataattcccagttatatacagaaaaagatttccacctgtcacgtatctgcctcttttacctgagcaatggtgtagttcttagacctaaggtctgtaattgcaatacttttaaagaaagatgttgctctaagtgctgtttgttagttatgaaatcagatttttctgcttgttcttaatgctgtggtcaaaccatagcacaaaatcattaaaaataatcagcggcatac

SEQ ID NO: 1229 - DNA, 2737 bp, Homo sapiens
ctgaacctcagccgcgccgggaggcgagcccgttggcgaggggcggggcagatggcgagggagcggggcgagctgctttttgaggctgcgcactcgcatggccccacctcgcaggtccacttccggcgccgcggctgttccgggcggagaccgcttgtgctggagtcggagttgtaacgctccactgactgatagagcgaccggccgaccatggcgcccggagtggcccgcgggccgacgccgtactggaggttgcgcctcggtggcgccgcgctgctcctgctgctcatcccggtggccgccgcgcaggagcctcccggagctgcttgttctcagaacacaaacaaaacctgtgaagagtgcctgaagaacgtctcctgtctttggtgcaacactaacaaggcttgtctggactacccagttacaagcgtcttgccaccggcttccctttgtaaattgagctctgcacgctggggagtttgttgggtgaactttgaggcgctgatcatcaccatgtcggtagtcgggggaaccctcctcctgggcattgccatctgctgctgctgctgctgcaggaggaagaggagccggaagccggacaggagtgaggagaaggccatgcgtgagcgggaggagaggcggatacggcaggaggaacggagagcagagatgaagacaagacatgatgaaatcagaaaaaaatatggcctgtttaaagaagaaaacccgtatgctagatttgaaaacaactaaagcgctccagcacatcagtcccgacgcttcctgtgaggtgcacgctccgcagcccagcccagccgggagaccacgtggccattgcggtctcctgaccttggccagtgaacctgccagccttccaggacaggcggccggagagctgcccctgaaggacagtcctctcgtcttgcagactggtgaccttctattccctgttcatctctgtttctagatttagtcacttgaaataagaaatctttggggtttgggcttttttatactcttctcagtttgtgaaacgctaactgcacacgaagccgcctgacggcacccagcgctgtggctgtcattctcccagggcagaaccctgcgtttctctctgtccactaacaagcttcacacgcaacacagggaagtcggtttgacttttgtcatgaggagaactgaccagccctcatcattccccataaaaccacggacagcgtctgtgtgcgcatcttgagtcttcacacctgttgactcacacggcttttgctgatgacacggggctccagtacacagtctgataaggacttaacgtcctaacctcaattgtattaaatagcattggggaatagctaaacctttttaaaaaaatttattggattttcctccctgcttaaaagatttcaccagaaaaccttcatataaaaattcaggccctttttggacaatttttaaaatttgtatctttactagaacatgagaatctttttcccttggaagcttgaattataaatgtggtgtttggcctgcctcagcagcaccagttgactgctcgtgtgccagcggtgtggggaggacggggcaggacgctgcagctctctccagccctgttggcatcctcagtgcctgcaggcctctcgctgcctgttgggctgtctggggggtggccatttagggatcgtggggacggggtccaccccaagaagaaagaaaggcccgtccacaggcccggctctgggccacgtgccccggaagcaggtgtgtccagagtcagctgagggctctccccacaccacccagcaggcgctggtgctccttctgcctcatgggaccagtccagcttccagccgctctggctcgagggtggtctgagcacttccttctgagtgggcttctctgggagctctccagtggcactgctggacctgcccacgtttctgtaaaatcaggatacgtggctttagtaagcagaccaagcgcttcgtggcagggaaagcagcgtgcggggaagtcactgaaaagtgctgcctaaggaagtttggaaatagtccccgttccagattgccttgaattttaaaacattttgctttgggaaagtaggtcagcagcacctaagatcaaggatgcgttccattttcacacttcacagtcatgaaaactgagaagactgtcttcagcgtgaactaaagttcacaggcagatcactgatccagaacacttcaagaactcgtcaaacagctcgataagcctttttgactgtgtacatctgtaccgggaataacattcctaggctgaaatttccacaaagaatagaacctgtacccagttcttcaggctgatttccctgacctcttgggcatttgtatttgtagtaaagtattgcagagattcctaagtattttatagcagccatcaaaattggactttgtattgtttattcataaaagacacttggtaatagacttcagtgaactctgtatgaatgcagtagtgtgcgtgcaaaatccgcttcctgagcgtagggtgctgagctggcgctagggctcggttgtgaaatacagcgtagtcagcccttgcgctcagtgtagaaacccacgtctgtaaggtcggtcttcgtccatctgcttttttctgaaatacactaagagcagccacaaaactgtaacctcaaggaaaccataaagcttggagtgccttaatttttaaccagtttccaataaaacggtttactacctga

SEQ ID NO: 1230 - DNA, 1899 bp, Homo sapiens
gtccgtactgcagagccgctgccggagggtcgttttaaagggccgcgttgccgccccctcggcccgccatgctgctatccgtgccgctgctgctcggcctcctcggcctggccgtcgccgagcccgccgtctacttcaaggagcagtttctggacggagacgggtggacttcccgctggatcgaatccaaacacaagtcagattttggcaaattcgttctcagttccggcaagttctacggtgacgaggagaaagataaaggtttgcagacaagccaggatgcacgcttttatgctctgtcggccagtttcgagcctttcagcaacaaaggccagacgctggtggtgcagttcacggtgaaacatgagcagaacatcgactgtgggggcggctatgtgaagctgtttcctaatagtttggaccagacagacatgcacggagactcagaatacaacatcatgtttggtcccgacatctgtggccctggcaccaagaaggttcatgtcatcttcaactacaagggcaagaacgtgctgatcaacaaggacatccgttgcaaggatgatgagtttacacacctgtacacactgattgtgcggccagacaacacctatgaggtgaagattgacaacagccaggtggagtccggctccttggaagacgattgggacttcctgccacccaagaagataaaggatcctgatgcttcaaaaccggaagactgggatgagcgggccaagatcgatgatcccacagactccaagcctgaggactgggacaagcccgagcatatccctgaccctgatgctaagaagcccgaggactgggatgaagagatggacggagagtgggaacccccagtgattcagaaccctgagtacaagggtgagtggaagccccggcagatcgacaacccagattacaagggcacttggatccacccagaaattgacaaccccgagtattctcccgatcccagtatctatgcctatgataactttggcgtgctgggcctggacctctggcaggtcaagtctggcaccatctttgacaacttcctcatcaccaacgatgaggcatacgctgaggagtttggcaacgagacgtggggcgtaacaaaggcagcagagaaacaaatgaaggacaaacaggacgaggagcagaggcttaaggaggaggaagaagacaagaaacgcaaagaggaggaggaggcagaggacaaggaggatgatgaggacaaagatgaggatgaggaggatgaggaggacaaggaggaagatgaggaggaagatgtccccggccaggccaaggacgagctgtagagaggcctgcctccagggctggactgaggcctgagcgctcctgccgcagagcttgccgcgccaaataatgtctctgtgagactcgagaactttcatttttttccaggctggttcggatttggggtggattttggttttgttcccctcctccactctcccccaccccctccccgccctttttttttttttttttaaactggtattttatcctttgattctccttcagccctcacccctggttctcatctttcttgatcaacatcttttcttgcctctgtgccccttctctcatctcttagctcccctccaacctggggggcagtggtgtggagaagccacaggcctgagatttcatctgctctccttcctggagcccagaggagggcagcagaagggggtggtgtctccaaccccccagcactgaggaagaacggggctcttctcatttcacccctccctttctcccctgcccccaggactgggccacttctgggtggggcagtgggtcccagattggctcacactgagaatgtaagaactacaaacaaaatttctattaaattaaattttgtgtctc

SEQ ID NO: 1231 - DNA, 2646 bp, Homo sapiens
agtgcagacgcggctcctagcggatgggtgctattgtgaggcggttgtagaagagtttcgtgagtgctcgcagctcatacctgtggctgtgtatccgtggccacagctggttggcgtcgccttgaaatcccaggccgtgaggagttagcgagccctgctcacactcggcgctctggttttcggtgggtgtgccctgcacctgcctcttcccccattctcattaataaaggtatccatggagaacactgaaaactcagtggattcaaaatccattaaaaatttggaaccaaagatcatacatggaagcgaatcaatggactctggaatatccctggacaacagttataaaatggattatcctgagatgggtttatgtataataattaataataagaattttcataaaagcactggaatgacatctcggtctggtacagatgtcgatgcagcaaacctcagggaaacattcagaaacttgaaatatgaagtcaggaataaaaatgatcttacacgtgaagaaattgtggaattgatgcgtgatgtttctaaagaagatcacagcaaaaggagcagttttgtttgtgtgcttctgagccatggtgaagaaggaataatttttggaacaaatggacctgttgacctgaaaaaaataacaaactttttcagaggggatcgttgtagaagtctaactggaaaacccaaacttttcattattcaggcctgccgtggtacagaactggactgtggcattgagacagacagtggtgttgatgatgacatggcgtgtcataaaataccagtggaggccgacttcttgtatgcatactccacagcacctggttattattcttggcgaaattcaaaggatggctcctggttcatccagtcgctttgtgccatgctgaaacagtatgccgacaagcttgaatttatgcacattcttacccgggttaaccgaaaggtggcaacagaatttgagtccttttcctttgacgctacttttcatgcaaagaaacagattccatgtattgtttccatgctcacaaaagaactctatttttatcactaaagaaatggttggttggtggttttttttagtttgtatgccaagtgagaagatggtatatttggtactgtatttccctctcattttgacctactctcatgctgcagagggtactttaagacatactccttccatcaaatagaaccactatgaagctacctcaaacttccagtcaggtagttgcaattgaattaaattaggaataaataaaaatggatactggtgcagtcattatgagaggcaatgattgttaatttacagctttcatgattagcaagttacagtgatgctgtgctatgaattttcaagtaattgtgaaaaagttaaacattgaagtaatgaatttttatgatattccccccacttaagactgtgtattctagttttgtcaaactgtagaaatgatgatgtggaagaacttaggcatctgtgggcatggtcaaaggctcaaacctttattttagaattgatatacacggatgacttaactgcattttagaccatttatctgggattatggttttgtgatgtttgtcctgaacacttttgttgtaaaaaaataataataataatgtttaatattgagaaagaaactaatattttatgtgagagaaagtgtgagcaaactaacttgacttttaaggctaaaacttaacattcatagaggggtggagttttaactgtaaggtgctacaatgcccctggatctaccagcataaatatcttctgatttgtccctatgcatatcagttgagcttcatataccagcaatatatctgaagagctattatataaaaaccccaaactgttgattattagccaggtaatgtgaataaattctataggaacatatgaaaatacaacttaaataataaacagtggaatataaggaaagcaataaatgaatgggctgagctgcctgtaacttgagagtagatggtttgagcctgagcagagacatgactcagcctgttccatgaaggcagagccatggaccacgcaggaagggcctacagcccatttctccatacgcactggtatgtgtggatgatgctgccagggcgccatcgccaagtaagaaagtgaagcaaatcagaaacttgtgaagtggaaatgttctaaaggtggtgaggcaataaaaatcatagtactctttgtagcaaaattcttaagtatgttattttctgttgaagtttacaatcaaaggaaaatagtaatgttttatactgtttactgaaagaaaaagacctatgagcacataggactctagacggcatccagccggaggccagagctgagcactcagcccgggaggcaggctccaggcctcagcaggtgcggagccgtcactgcaccaagtctcactggctgtcagtatgacatttcacgggagatttcttgttgctcaaaaaatgagctcgcatttgtcaatgacagtttcttttttcttactagacctgtaacttttgtaaatacacacagcatgtaatggtatcttaaagtgtgtttctatgtgacaattttgtacaaatttgttattttccatttttatttcaaaatatacattcaaacttaaaatt

SEQ ID NO: 1232 - DNA, 1400 bp, Homo sapiens
cggcaaaaaaaaaaggcgtaagaattttgaagctatgttcaaaggtatccttcagagtggattggataacttcgtgataaaccacatgctaaagaacaacgtggctggacaaacatctatccagaccctagtacctaatacggatcaaaagtcgaccagtgtaaaaaaagacaaccacaaaaaaaaaacagttaagatgttggaatacctgggcaaagatgttcttcatggtgtttttaattatttggcaaaacacgatgttctgacattgaaggaagaggaaaagaaaaaatattatgatgccaaaattgaagacaaggccctgatcttggtagactctttgcgaaagaatcgcgtggctcatcaaatgtttacccaaacacttctcaatatggaccaaaagatcaccagtgtaaaacctcttctgcaaatcgaggctggaccacctgagtcagcagaatctacaaatatactcaaactttgtcctcgtgaagaattcctgagactgtgtaaaaaaaatcatgatgagatctatccaataaaaaagagagaggaccgcagacgcctggctctcatcatatgcaatacaaagtttgatcacctgcctgcaaggaatggggctcactatgacatcgtggggatgaaaaggctgcttcaaggcctgggctacactgtggttgacgaaaagaatctcacagccagggatatggagtcagtgctgagggcatttgctgccagaccagagcacaagtcctctgacagcacgttcttggtactcatgtctcatggcatcctagagggaatctgcggaactgcgcataaaaagaaaaaaccggatgtgctgctttatgacaccatcttccagatattcaacaaccgcaactgcctcagtctaaaggacaaacccaaggtcatcattgtccaggcctgcagaggtgaaaaacatggggaactctgggtcagagactctccagcatccttggcagtcatctcttcacagtcatctgagaacctggaggcagattctgtttgcaagatccacgaggagaaggacttcattgctttctgttcttcaacaccacataacgtgtcctggagagaccgcacaaggggctccatcttcattacggaactcatcacatgcttccagaaatattcttgctgctgccacctaatggaaatatttcggaaggtacagaaatcatttgaagttccacaggctaaagcccagatgcccaccatagaacgagcaaccttgacaagagatttctacctctttcctggcaattgaaaatgaaaccacaggcagcccagccctcctctgtcaacatcaaagagcacatttaccagtatagcttgcatagtcaatatttggtatttcaataaaagtaaagactgta

SEQ ID NO: 1233 - DNA, 1936 bp, Homo sapiens
ggtcctctgtggtgcacagcccaccccccagccatgcgctctctccttctgggcaccttatgcctcctggctgtggccctggcagccgaggtgaagaaacctgtagaggccgcagcccctggtactgcggagaagctgagttccaaggcgaccacactggcagagcccagcacaggcctggccttcagcctgtatcaggcaatggccaaggaccaggcagtggagaacatcctggtgtcacccgtggtggtggcctcgtcgctgggtctcgtgtcgctgggcggcaaggcgaccacggcgtcgcaggccaaggcagtgctgagcgccgagcagctgcgcgacgaggaggtgcacgccggcctgggtgagctgctgcgctcactcagcaactcgacggcgcgcaacgtgacctggaagctgggcagccgactgtacggacccagctcagtgagcttcgctgatgacttcgtgcgcagcagcaagcagcactacaactgcgagcactccaagatcaacttcccggacaagcgcagcgcgctgcagtccatcaacgagtgggccgcgcagaccaccgacggcaagctgcccgaggtcaccaaggacgtggagcgcacggacggcgccctgctagtcaacgccatgttcttcaagccacactgggatgagaaattccaccacaagatggtggacaaccgtggcttcatggtgactcggtcctatactgtgggtgttacgatgatgcaccggacaggcctctacaactactacgacgacgagaaggagaagctgcagctggtggagatgcccctggctcacaagctctccagcctcatcatcctcatgccccatcacgtggagcctctcgagcgccttgaaaagctgctaaccaaagagcagctgaagatctggatggggaagatgcagaagaaggctgttgccatctccttgcccaagggtgtggtggaggtgacccatgacctgcagaaacacctggctgggctgggcctgactgaggccattgacaagaacaaggccgacttatcacgcatgtctggcaagaaggatctgtacctggccagtgtgttccacgccaccgcctttgagttggacacagatggcaacccctttgaccaggacatctacgggcgcgaggagctgcgcagccccaagctgttctacgccgaccaccccttcatcttcctggtgcgggacacccaaagcggctccctgctattcattgggcgcctggtccggctcaagggtgacaagatgcgagacgagttatagggcctcagggtgcacacaggatggcaggaggcatccaaaggctcctgagacacatgggtgctattggggttgggggggaggtgaggtaccagccttggatactccatggaattcgagctccacttggacatgggccccagataccatgatgctgagcccggaaactccacatcctgtgggacctgggccatagtcattctgcctgccctgaaagtcccagatcaagcctgcctcaatcagtattcatatttatagccaggtaccttctcacctgtgagaccaaattgagctcggggggtcagccagccctcttctgacactaaaacacctcagctgcctccccagctctatcccaacctctcccaactataaaactaggtgctgcagcctgggaccaggcacccccagaatgacctggccgcagtgaggcgattgagaaggagctcccaggaggggcttctgggaagaccctggtcaagaagcatcgtctggcgttgtggggatgaactttttgttttgtttcttccttttttagttcttcaaggaatggggggccaggggggcaatgagcctttgttgctaatcaaatccgggacttgtttgtacgtttttttttctcactgaaaccttttccagtgccaaaaaaaaa

SEQ ID NO: 1234 - DNA, 1304 bp, Homo sapiens
ttcccagatgcacaggaggagaagcaggagctgtcgggaagatcagaagccagtcatggatgaccagcgcgaccttatctccaacaatgagcaactgcccatgctgggccggcgccctggggccccggagagcaagtgcagccgcggagccctgtacacaggcttttccatcctggtgactctgctcctcgctggccaggccaccaccgcctacttcctgtaccagcagcagggccggctggacaaactgacagtcacctcccagaacctgcagctggagaacctgcgcatgaagcttcccaagcctcccaagcctgtgagcaagatgcgcatggccaccccgctgctgatgcaggcgctgcccatgggagccctgccccaggggcccatgcagaatgccaccaagtatggcaacatgacagaggaccatgtgatgcacctgctccagaatgctgaccccctgaaggtgtacccgccactgaaggggagcttcccggagaacctgagacaccttaagaacaccatggagaccatagactggaaggtctttgagagctggatgcaccattggctcctgtttgaaatgagcaggcactccttggagcaaaagcccactgacgctccaccgaaagagtcactggaactggaggacccgtcttctgggctgggtgtgaccaagcaggatctgggcccagtccccatgtgagagcagcagaggcggtcttcaacatcctgccagccccacacagctacagctttcttgctcccttcagcccccagcccctcccccatgtcccaccctgtacctcatcccatgagacctggtgcctggctctttcgtcacccttgtacaagacaaaccaagtcggaacagcagataacaatgcagcaaggccctgctgcccaatctccatctgtcaacaggggcgtgaggtcccaggaagtggccaaaagctagacagatccccgttcctgacatcacagcagcctccaacacaaggctccaagacctaggctcatggacgagatgggaaggcacagggagaagggataaccctacacccagaccccaggctggacatgctgactgtcctctcccctccagcctttggccttggcttttctagcctatttacctgcaggctgagccactctcttccctttccccagcatcactccccaaggaagagccaatgttttggacccataatcctttctgccgacccctagttccctctgctcagccaagcttgttatcagctttcagggccatggttcacattagaataaaaggtagtaattag

SEQ ID NO: 1235 - DNA, 1496 bp, Homo sapiens
ccattgtgctggaaaggcgcgcaacggcggcgacggcggcgaccccaccgcgcatcctgccaggcctccgcgcccagccgcccacgcgcccccgcgccccgcgccccgaccctttcttcgcgcccccgcccctcggcccgccaggcccccttgccggccacccgccaggccccgcgccggcccgcccgccgcccaggaccggcccgcgccccgcaggccgcccgccgcccgcgccgccatgggagtggagggctgcaccaagtgcatcaagtacctgctcttcgtcttcaatttcgtcttctggctggctggaggcgtgatcctgggtgtggccctgtggctccgccatgacccgcagaccaccaacctcctgtatctggagctgggagacaagcccgcgcccaacaccttctatgtaggcatctacatcctcatcgctgtgggcgctgtcatgatgttcgttggcttcctgggctgctacggggccatccaggaatcccagtgcctgctggggacgttcttcacctgcctggtcatcctgtttgcctgtgaggtggccgccggcatctggggctttgtcaacaaggaccagatcgccaaggatgtgaagcagttctatgaccaggccctacagcaggccgtggtggatgatgacgccaacaacgccaaggctgtggtgaagaccttccacgagacgcttgactgctgtggctccagcacactgactgctttgaccacctcagtgctcaagaacaatttgtgtccctcgggcagcaacatcatcagcaacctcttcaaggaggactgccaccagaagatcgatgacctcttctccgggaagctgtacctcatcggcattgctgccatcgtggtcgctgtgatcatgatcttcgagatgatcctgagcatggtgctgtgctgtggcatccggaacagctccgtgtactgaggccccgcagctctggccacagggacctctgcagtgccccctaagtgacccggacacttccgagggggccatcaccgcctgtgtatataacgtttccggtattactctgctacacgtagcctttttacttttggggttttgtttttgttctgaactttcctgttaccttttcagggctgatgtcacatgtaggtggcgtgtatgagtggagacgggcctgggtcttggggactggagggcaggggtccttctgcccctggggtcccagggtgctctgcctgctcagccaggcctctcctgggagccactcgcccagagactcagcttggccaacttggggggctgtgtccacccagcccgcccgtcctgtgggctgcacagctcaccttgttccctcctgccccggttcgagagccgagtctgtgggcactctctgccttcatgcacctgtcctttctaacacgtcgccttcaactgtaatcacaacatcctgactccgtcatttaataaagaaggaacatcaggcatgctaaaaaaaaaaaaaaaa

SEQ ID NO: 1236 - DNA, 1486 bp, Homo sapiens
tcggacgcgtggtagcctagagtcctggggagcttctgtccacctgtcctgcagaggagtcgtttccagcccggctgccccaggatgggtgagttcaacgagaagaagacaacatgtggcaccgtttgcctcaagtacctgctgtttacctacaattgctgcttctggctggctggcctggctgtcatggcagtgggcatctggacgctggccctcaagagtgactacatcagcctgctggcctcaggcacctacctggccacagcctacatcctggtggtggcgggcactgtcgtcatggtgactggggtcttgggctgctgcgccaccttcaaggagcgtcggaacctgctgcgcctgtacttcatcctgctcctcatcatctttctgctggagatcatcgctggtatcctcgcctacgcctactaccagcagctgaacacggagctcaaggagaacctgaaggacaccatgaccaggcgctaccaccagtcgggccatgaggctgtgaccagcgctgtggaccagctgcagcaggagttccactgctgtggcagcaacaactcacaggactggcgagacagtgagtggatccgctcacaggaggccggtggccgtgtggtcccagacagctgctgcaagacggtggtggctctttgtggacagcgagaccatgcctccaacatctacaaggtggagggcggctgcatcaccaagttggagaccttcatccaggagcacctgagggtcattggggctgtggggatcggcattgcctgtgtgcaggtctttggcatgatcttcacgtgctgcctgtacaggagtctcaagctggagcactactgaccctgccttgggccttgctgctgctgcacccaactactgagctgagaccactgagtaccaggggctgggctccctgatgacacccaccctgtgccatcaccataacctctggggaccccaacctcagaggcagcttcaagtgccttttcgtgcgcaccaatgcccagcaggggaggtgaggggggctggcggggcgaagtttggggggtgttttgtggggctccccggacatactctctgcctggtggtcagatgcaggttggaaggggccttgctgagtggcgcaaggccgagatcgttcccagcagggggagaaacccttcacaccccaggcccttcaggaactggggctttgccttgcagccacatggccccatcccagttggggaagccaggtgagctctgacccttgggcctgggcctctgcccctcccaacccagccgtcgtctccctcgacagcgcccctgctgtcttccccaccgcagtcaccaccacccgaaatgccacgtggtcactgtgcactgccctgttcatgtgcctctgcggggcagggccttcctggttttgtacactgctgtacccagatgcctacaaccatccctgccacatacaggtgctcaataaacacttgtagagcag

SEQ ID NO: 1237 - DNA, 10558 bp, Homo sapiens
cagtttggagctcagtcttccaccaaaggccgttcagttctcctgggctccagcctcctgcaaggactgcaagagttttcctccgcagctctgagtctccacttttttggtggagaaaggctgcaaaaagaaaaagagacgcagtgagtgggaaaagtatgcatcctattcaaacctaattgaatcgaggagcccagggacacacgccttcaggtttgctcaggggttcatatttggtgcttagacaaattcaaaatgaggaaacatcggcacttgcccttagtggccgtcttttgcctctttctctcaggctttcctacaactcatgcccagcagcagcaagcagatgtcaaaaatggtgcggctgctgatataatatttctagtggattcctcttggaccattggagaggaacatttccaacttgttcgagagtttctatatgatgttgtaaaatccttagctgtgggagaaaatgatttccattttgctctggtccagttcaacggaaacccacataccgagttcctgttaaatacgtatcgtactaaacaagaagtcctttctcatatttccaacatgtcttatattgggggaaccaatcagactggaaaaggattagaatacataatgcaaagccacctcaccaaggctgctggaagccgggccggtgacggagtccctcaggttatcgtagtgttaactgatggacactcgaaggatggccttgctctgccctcagcggaacttaagtctgctgatgttaacgtgtttgcaattggagttgaggatgcagatgaaggagcgttaaaagaaatagcaagtgaaccgctcaatatgcatatgttcaacctagagaattttacctcacttcatgacatagtaggaaacttagtgtcctgtgtgcattcatccgtgagtccagaaagggctggggacacggaaacccttaaagacatcacagcacaagactctgctgacattattttccttattgatggatcaaacaacaccggaagtgtcaatttcgcagtcattctcgacttccttgtaaatctccttgagaaactcccaattggaactcagcagatccgagtgggggtggtccagtttagcgatgagcccagaaccatgttttccttggacacctactccaccaaggcccaggttctgggtgcagtgaaagccctcgggtttgctggtggggagttggccaatatcggcctcgcccttgatttcgtggtggagaaccacttcacccgggcagggggcagccgcgtggaggaaggggttccccaggtgctggtcctcataagtgccgggccttctagtgacgagattcgctacggggtggtagcactgaagcaggctagcgtgttctcattcggccttggagcccaggccgcctccagggcagagcttcagcacatagctaccgatgacaacttggtgtttactgtcccggaattccgtagctttggggacctccaggagaaattactgccgtacattgttggcgtggcccaaaggcacattgtcttgaaaccgccaaccattgtcacacaagtcattgaagtcaacaagagagacatagtcttcctggtggatggctcatctgcactgggactggccaacttcaatgccatccgagacttcattgctaaagtcatccagaggctggaaatcggacaggatcttatccaggtggcagtggcccagtatgcagacactgtgaggcctgaattttatttcaatacccatccaacaaaaagggaagtcataaccgctgtgcggaaaatgaagcccctggacggctcggccctgtacacgggctctgctctagactttgttcgtaacaacctattcacgagttcagccggctaccgggctgccgaggggattcctaagcttttggtgctgatcacaggtggtaagtccctagatgaaatcagccagcctgcccaggagctgaagagaagcagcataatggcctttgccattgggaacaagggtgccgatcaggctgagctggaagagatcgctttcgactcctccctggtgttcatcccagctgagttccgagccgccccattgcaaggcatgctgcctggcttgctggcacctctcaggaccctctctggaacccctgaagttcactcaaacaaaagagatatcatctttcttttggatggatcagccaacgttggaaaaaccaatttcccttatgtgcgcgactttgtaatgaacctagttaacagccttgatattggaaatgacaatattcgtgttggtttagtgcaatttagtgacactcctgtaacggagttctctttaaacacataccagaccaagtcagatatccttggtcatctgaggcagctgcagctccagggaggttcgggcctgaacacaggctcagccctaagctatgtctatgccaaccacttcacggaagctggcggcagcaggatccgtgaacacgtgccgcagctcctgcttctgctcacagctgggcagtctgaggactcctatttgcaagctgccaacgccttgacacgcgcgggcatcctgactttttgtgtgggagctagccaggcgaataaggcagagcttgagcagattgcttttaacccaagcctggtgtatctcatggatgatttcagctccctgccagctttgcctcagcagctgattcagcccctaaccacatatgttagtggaggtgtggaggaagtaccactcgctcagccagagagcaagcgagacattctgttcctctttgacggctcagccaatcttgtgggccagttccctgttgtccgtgactttctctacaagattatcgatgagctcaatgtgaagccagaggggacccgaattgcggtggctcagtacagcgatgatgtcaaggtggagtcccgttttgatgagcaccagagtaagcctgagatcctgaatcttgtgaagagaatgaagatcaagacgggcaaagccctcaacctgggctacgcgctggactatgcacagaggtacatttttgtgaagtctgctggcagccggatcgaggatggagtgcttcagttcctggtgctgctggtcgcaggaaggtcatctgaccgtgtggatgggccagcaagtaacctgaagcagagtggggttgtgcctttcatcttccaagccaagaacgcagaccctgctgagttagagcagatcgtgctgtctccagcgtttatcctggctgcagagtcgcttcccaagattggagatcttcatccacagatagtgaatctcttaaaatcagtgcacaacggagcaccagcaccagtttcaggtgaaaaggacgtggtgtttctgcttgatggctctgagggcgtcaggagcggcttccctctgttgaaagagtttgtccagagagtggtggaaagcctggatgtgggccaggaccgggtccgcgtggccgtggtgcagtacagcgaccggaccaggcccgagttctacctgaattcatacatgaacaagcaggacgtcgtcaacgctgtccgccagctgaccctgctgggagggccgacccccaacaccggggccgccctggagtttgtcctgaggaacatcctggtcagctctgcgggaagcaggataacagaaggtgtgccccagctgctgatcgtcctcacggccgacaggtctggggatgatgtgcggaacccctccgtggtcgtgaagaggggtggggctgtgcccattggcattggcatcgggaacgctgacatcacagagatgcagaccatctccttcatcccggactttgccgtggccattcccacctttcgccagctggggaccgtccaacaggtcatctctgagagggtgacccagctcacccgcgaggagctgagcaggctgcagccggtgttgcagcctctaccgagcccaggtgttggtggcaagagggacgtggtctttctcatcgatgggtcccaaagtgccgggcctgagttccagtacgttcgcaccctcatagagaggctggttgactacctggacgtgggctttgacaccacccgggtggctgtcatccagttcagcgatgaccccaaggcggagttcctgctgaacgcccattccagcaaggatgaagtgcagaacgcggtgcagcggctgaggcccaagggagggcggcagatcaacgtgggcaatgccctggagtacgtgtccaggaacatcttcaagaggcccctggggagccgcattgaagagggcgtcccacagttcctggtcctcatctcgtctggaaagtctgacgatgaggtggtcgtcccggcggtggagctcaagcagtttggcgtggcccctttcacgatcgccaggaacgcagaccaggaggagctggtgaagatctcgctgagccccgaatatgtgttctcggtgagcaccttccgggagctgcccagcctggagcagaaactgctgacgcccatcacgaccctgacctcagagcagatccagaagctcttagccagcactcgctatccacctccagcagttgagagtgatgctgcagacattgtctttctgatcgacagctctgagggagttaggccagatggctttgcacatattcgagattttgttagcaggattgttcgaagactcaacatcggccccagtaaagtgagagttggggtcgtgcagttcagcaatgatgtcttcccagaattctatctgaaaacctacagatcccaggccccggtgctggacgccatacggcgcctgaggctcagaggggggtccccactgaacactggcaaggctctcgaatttgtggcaagaaacctctttgttaagtctgcggggagtcgcatagaagacggggtgccccaacacctggtcctggtcctgggtggaaaatcccaggacgatgtgtccaggttcgcccaggtgatccgttcctcgggcattgtgagtttaggggtaggagaccggaacatcgacagaacagagctgcagaccatcaccaatgaccccagactggtcttcacagtgcgagagttcagagagcttcccaacatagaagaaagaatcatgaactcgtttggaccctccgcagccactcctgcacctccaggggtggacacccctcctccttcacggccagagaagaagaaagcagacattgtgttcctgttggatggttccatcaacttcaggagggacagtttccaggaagtgcttcgttttgtgtctgaaatagtggacacagtttatgaagatggcgactccatccaagtggggcttgtccagtacaactctgaccccactgacgaattcttcctgaaggacttctctaccaagaggcagattattgacgccatcaacaaagtggtctacaaagggggaagacacgccaacactaaggtgggccttgagcacctgcgggtaaaccactttgtgcctgaggcaggcagccgcctggaccagcgggtccctcagattgcctttgtgatcacgggaggaaagtcggtggaagatgcacaggatgtgagcctggccctcacccagaggggggtcaaagtgtttgctgttggagtgaggaatatcgactcggaggaggttggaaagatagcgtccaacagcgccacagcgttccgcgtgggcaacgtccaggagctgtccgaactgagcgagcaagttttggaaactttgcatgatgcgatgcatgaaaccctttgccctggtgtaactgatgctgccaaagcttgtaatctggatgtgattctggggtttgatggttctagagaccagaatgtttttgtggcccagaagggcttcgagtccaaggtggacgccatcttgaacagaatcagccagatgcacagggtcagctgcagcggtggccgctcgcccaccgtgcgtgtgtcagtggtggccaacacgccctcgggcccggtggaggcctttgactttgacgagtaccagccagagatgctcgagaagttccggaacatgcgcagccagcacccctacgtcctcacggaggacaccctgaaggtctacctgaacaagttcagacagtcctcgccggacagcgtgaaggtggtcattcattttactgatggagcagacggagatctggctgatttacacagagcatctgagaacctccgccaagaaggagtccgtgccttgatcctggtgggccttgaacgagtggtcaacttggagcggctaatgcatctggagtttgggcgagggtttatgtatgacaggcccctgaggcttaacttgctggacttggattatgaactagcggagcagcttgacaacattgccgagaaagcttgctgtggggttccctgcaagtgctctgggcagaggggagaccgcgggcccatcggcagcatcgggccaaagggtattcctggagaagacggctaccgaggctatcctggtgatgagggtggacccggtgagcgtggtccgcctggtgtgaacggcactcaaggtttccagggctgcccgggccagagaggagtaaagggctctcggggattcccaggagagaagggcgaagtaggagaaattggactggatggtctggatggtgaagatggagacaaaggattgcctggttcttctggagagaaagggaatcctggaagaaggggtgataaaggacctcgaggagagaaaggagaaagaggagatgttgggattcgaggggacccgggtaacccaggacaagacagccaggagagaggacccaaaggagaaaccggtgacctcggccccatgggtgtcccagggagagatggagtacctggaggacctggagaaactgggaagaatggtggctttggccgaaggggaccccccggagctaagggcaacaagggcggtcctggccagccgggctttgagggagagcaggggaccagaggtgcacagggcccagctggtcctgctggtcctccagggctgataggagaacaaggcatttctggacctaggggaagcggaggtgcccgtggcgctcctggagaacgaggcagaaccggtccactgggaagaaagggtgagcccggagagccaggaccaaaaggaggaatcgggaacccgggccctcgtggggagacgggagatgacgggagagacggagttggcagtgaaggacgcagaggcaaaaaaggagaaagaggatttcctggatacccaggaccaaagggtaacccaggtgaacctgggctaaatggaacaacaggacccaaaggcatcagaggccgaaggggaaattcgggacctccagggatagttggacagaaggggagacctggctacccaggaccagctggtccaaggggcaacaggggcgactccatcgatcaatgtgccctcatccaaagcatcaaagataaatgcccttgctgttacgggcccctggagtgccccgtcttcccaacagaactagcctttgctttagacacctctgagggagtcaaccaagacactttcggccggatgcgagatgtggtcttgagtattgtgaatgtcctgaccattgctgagagcaactgcccgacgggggcccgggtggctgtggtcacctacaacaacgaggtgaccacggagatccggtttgctgactccaagaggaagtcggtcctcctggacaagattaagaaccttcaggtggctctgacatccaaacagcagagtctggagactgccatgtcgtttgtggccaggaacacatttaagcgtgtgaggaacggattcctaatgaggaaagtggctgttttcttcagcaacacacccacaagagcatccccacagctcagagaggctgtgctcaaactctcagatgcggggatcacccccttgttccttacaaggcaggaagaccggcagctcatcaacgctttgcagatcaataacacagcagtggggcatgcgcttgtcctgcctgcagggagagacctcacagacttcctggagaatgtcctcacgtgtcatgtttgcttggacatctgcaacatcgacccatcctgtggatttggcagttggaggccttccttcagggacaggagagcggcagggagtgatgtggacatcgacatggctttcatcttagacagcgctgagaccaccaccctgttccagttcaatgagatgaagaagtacatagcgtacctggtcagacaactggacatgagcccagatcccaaggcctcccagcacttcgccagagtggcagttgtgcagcacgcgccctctgagtccgtggacaatgccagcatgccacctgtgaaggtggaattctccctgactgactatggctccaaggagaagctggtggacttcctcagcaggggaatgacacagttgcagggaaccagggccttaggcagtgccattgaatacaccatagagaatgtctttgaaagtgccccaaacccacgggacctgaaaattgtggtcctgatgctgacgggcgaggtgccggagcagcagctggaggaggcccagagagtcatcctgcaggccaaatgcaagggctacttcttcgtggtcctgggcattggcaggaaggtgaacatcaaggaggtatacaccttcgccagtgagccaaacgacgtcttcttcaaattagtggacaagtccaccgagctcaacgaggagcctttgatgcgcttcgggaggctgttgccgtccttcgtcagcagtgaaaatgctttttacttgtccccagatatcaggaaacagtgtgattggttccaaggggaccaacccacaaagaaccttgtgaagtttggtcacaaacaagtaaatgttccgaataacgttacttcaagtcctacatccaacccagtgacgacaacgaagccggtgactacgacgaagccggtgaccaccacaacaaagcctgtaaccaccacaacaaagcctgtgactattataaatcagccatctgtgaagccagccgctgcaaagccggcccctgcgaaacctgtggctgccaagcctgtggccacaaagacggccactgttagacccccagtggcggtgaagccagcaacagcagcgaagcctgtagcagcaaagccagcagctgtaagaccccccgctgctgctgcaaaaccagtggcgaccaagcctgaggtccctaggccacaggcagccaaaccagctgccaccaagccagccaccactaagcccgtggttaagatgctccgtgaagtccaggtgtttgagataacagagaacagcgccaaactccactgggagaggcctgagccccccggtccttatttttatgacctcaccgtcacctcagcccatgatcagtccctggttctgaagcagaacctcacggtcacggaccgcgtcattggaggcctgctcgctgggcagacataccatgtggctgtggtctgctacctgaggtctcaggtcagagccacctaccacggaagtttcagtacaaagaaatctcagcccccacctccacagccagcaaggtcagcttctagttcaaccatcaatctaatggtgagcacagaaccattggctctcactgaaacagatatatgcaagttgccgaaagacgaaggaacttgcagggatttcatattaaaatggtactatgatccaaacaccaaaagctgtgcaagattctggtatggaggttgtggtggaaacgaaaacaaatttggatcacagaaagaatgtgaaaaggtttgcgctcctgtgctcgccaaacccggagtcatcagtgtgatgggaacctaagcgtgggtggccaacatcatatacctcttgaagaagaaggagtcagccatcgccaacttgtctctgtagaagctccgggtgtagattcccttgcactgtatcatttcatgctttgatttacactcgaactcgggagggaacatcctgctgcatgacctatcagtatggtgctaatgtgtctgtggaccctcgctctctgtctccagcagttctctcgaatactttgaatgttgtgtaacagttagccactgctggtgtttatgtgaacattcctatcaatccaaattccctctggagtttcatgttatgcctgttgcaggcaaatgtaaagtctagaaaataatgcaaatgtcacggctactctatatacttttgcttggttcattttttttcccttttagttaagcatgactttagatgggaagcctgtgtatcgtggagaaacaagagaccaactttttcattccctgcccccaatttcccagactagatttcaagctaattttctttttctgaagcctctaacaaatgatctagttcagaaggaagcaaaatcccttaatctatgtgcaccgttgggaccaatgccttaattaaagaatttaaaaaagttgtaatagagaatatttttggcattcctctcaatgttgtgtgttttttttttttgtgtgctggagggaggggatttaattttaattttaaaatgtttaggaaatttatacaaagaaactttttaataaagtatattgaaagtttaaaaaaaaaaaaaaaa

SEQ ID NO: 1238 - DNA, 5064 bp, Homo sapiens
gagaaggggaccttcaggtccaggcaaagggggaacttctgtcgtgggaacgaaaaagaaagaggatttacagggtggggggacagaggggcagcaggaaccagaagggagacagtggcggtcgcaccggggccgatccgagagttccccttagagaacggagctcacgggcggggaggcctcacctgctagtaggacgcagaaagacagaaggcgaaggagaccccctgccgtagccatcttgcctctctgctgagcggaagcccccgttcggctcctgtctgttagcggcctctctaggctaccactgacaccgtctctgtggcccggagcctaagagaccggaagttcgtgtttccaggcgcttccggaaaccgcgggagagggtcgctgacgtggaggcgtccgaagggcagcagggtgtgtcggggctcggattaagacatcggagtcggagacctgagagatgttaaccaaattcgagaccaagagcgcgcgggtcaaagggctcagctttcaccccaaaagaccttggatcctgactagtttacataatggggtcatccagttatgggactatcggatgtgcactctcattgacaagtttgatgaacatgatggtccagtgcgaggcattgacttccataagcagcagccactgttcgtctctggaggagatgactataagattaaggtttggaattacaagcttcggcgctgtcttttcacattgcttgggcacttagattatattcgcaccacgttttttcatcatgaatatccctggattctgagtgcctccgatgatcagaccatccgagtgtggaattggcaatctagaacctgtgtttgtgtgttaacagggcacaaccattatgtgatgtgtgctcagttccaccccacagaagacttggtagtatcagccagcctggaccagactgtgcgcgtttgggatatttctggtctgaggaaaaaaaacctgtcccctggtgcggtggaatcggatgtgagaggaataactggggttgatctatttggaactacagatgcagtggtgaagcatgtactagagggtcacgatcgtggagtaaactgggctgccttccaccccactatgccccttattgtatctggggcagatgatcgtcaagtgaagatctggcgcatgaatgaatcaaaggcatgggaggttgatacctgccggggccattacaacaatgtatcttgtgccgtcttccaccctcgccaagagttgatcctcagcaattctgaggacaagagtattcgagtctgggatatgtctaagcggactggggttcagactttccgcagagaccatgatcgtttctgggtcctagctgctcaccctaaccttaacctctttgcagcaggccatgatggtggtatgattgtgtttaagctggaacgggaacggccagcctatgctgttcatggcaatatgctacactatgtcaaggaccgattcttacgacagctggatttcaacagctccaaagatgtagctgtgatgcagttgcggagtggttccaagtttccagtattcaatatgtcatacaatccagcagaaaatgcagtcctgctttgtacaagagctagcaatctagagaatagtacctatgacctgtacaccatccctaaagatgctgactcccagaatcctgatgcgcctgaagggaaacgatcctcaggcctgacagccgtttgggtcgctcgaaatcggtttgctgtcctagatcggatgcattcgcttctgatcaagaatctgaagaatgagatcaccaaaaaggtacaggtgcccaactgtgatgagatcttctatgctggcacaggcaatctcctgcttcgagatgcggactctatcacactctttgacgtacagcagaagcggactctggcatctgtgaagatttctaaagtgaaatacgttatctggtcagcagacatgtcacatgtagcactactagccaaacacgccattgtgatctgtaaccgcaaactggatgctttatgtaacattcatgagaacattcgtgtcaagagtggggcctgggatgagagtggggtatttatctataccacaagcaaccacatcaaatatgctgtcaccactggggaccacgggatcattcgaactctggatttacccatctatgtcacacgggtgaagggcaacaatgtatactgcctagacagggagtgtcgtccccgggtactcaccattgatcccactgagttcaaattcaagctggccctgatcaacagaaaatatgatgaggtactgcacatggtgaggaatgccaaactagttggccagtctattattgcttatctccagaagaagggctatcctgaagtggcactgcattttgtcaaggatgagaaaactcgctttagtctggcactggagtgtggaaacattgagattgctctggaagcagccaaagcactggatgacaagaactgctgggaaaagctgggagaagtggccctgctgcaggggaaccaccagattgtggaaatgtgctatcagcgtaccaaaaactttgacaaagtttccttcctgtatcttatcactggcaacttagaaaaacttcgcaagatgatgaagattgctgagatcagaaaggacatgagtggccactatcagaatgccctatacctgggtgatgtgtcagagcgtgtgcggatcctgaagaactgtggacagaagtccctggcctatctcacagctgctacccatggcttagatgaagaagctgagagcctaaaggagacatttgacccagagaaggagacaatcccagacattgaccctaatgccaagctgctccagccacctgcacctatcatgccattggataccaattggcctttattgactgtatccaaaggattttttgaaggcaccattgccagcaaagggaagggaggagcactggctgctgacattgacattgacactgttggtacagagggctggggagaggatgcagagctgcagttggatgaagatgggtttgtggaggctacagaaggtttgggggatgatgctcttggcaagggacaggaagaaggaggtggctgggatgtagaagaagatctggagctccctcctgagctggatatatcccctggggcagctggtggggctgaagatggtttctttgtgcccccaaccaagggaacaagtccaactcagatctggtgtaataactctcagcttccagttgatcacatcctggcaggctctttcgaaacagccatgcggctccttcatgaccaagtaggggtaatccagtttggcccctacaagcaactgttcctacagacatacgcccgaggccgcacaacctatcaggctctgccctgcctaccctccatgtatggctatcctaatcgcaactggaaggatgcagggctgaagaatggtgtaccagctgtgggcctgaagcttaatgacctcatccaacggttgcagctgtgctaccagctcaccacagttggcaaatttgaggaggctgtggaaaaattccgttccatccttctcagtgtgccacttcttgttgtggacaataaacaagagattgcagaggcccagcagctcatcaccatttgccgtgagtacattgtgggtttgtccgtggagacagaaaggaagaagctgcccaaagagactctagaacagcagaagcgcatctgtgagatggcagcctatttcacccactcaaacctgcagcctgtgcacatgatcctggtgctgcgtacagccctcaatctgttcttcaagctcaagaacttcaagacagctgccacctttgctcggcgcctactagaactcgggcccaagcctgaggtggcccaacagacccgaaaaatcctgtctgcctgtgagaagaatcccacagatgcctaccagctcaattatgacatgcacaacccctttgacatttgtgctgcatcatatcggcccatctaccgtggaaagccagtagaaaagtgtccactcagtggggcctgctattcccctgagttcaaaggtcaaatctgcagggtcaccacagtgacagagattggcaaagatgtgattggtttaaggatcagtcctctgcagtttcgctaaggccccctttgtgtgcatgggtcagtcaccatatgttccccccagagaatgtgtctatatcctccttctaacagcaccttccccctgcagctactcttcagatctggctctctgtaccctaaaacctagtatctttttctcttctatggaaaatccgaaggtctaaacttgacttttttgaggtcttctcaacttgactacagttgtgctcataattgtccttgcctttccagcttaattattttaaggaacaaatgaaaactctgggctgggtggagtggctcatacctgtaatcccagcactttgggaggctacggtgggcagatcatctgaggccaggagttcgagacctgcctggccaacatggcaacaccccgtctctaataaaaatataaaaattagcctggcatggtagcatgcgcctatagtcccagctgctcaggaggctgaggcatgagaatcgcttgaacctaggaggtggaggttgcattcaactgagatcataccacttcattccagcctgggtgacagagcaagactctgtctcaaaaaaaaaaaaaaaaaaaaaaaaaaaaaaaaaaggaaaactctgtgatggacatttgtttagtaaatcccttcagtatttatccctcctttccccacagcagctttctttcctgtcaactagaaaggagcaggatgtaataaatacattttggtgtgactaggccacaccaactcttaatcatctcccattttccttagacatttaaatttcaaggcaggtaccctctgtgtactcagaaatttgaagaagttatttggttttccaaaatgcacactgcgggttattgatttgttctttacaactattgttctcatatttctcacactaaataaatctctatgagagcttcttgaaaaaaaaaaaaaaaaagcg

SEQ ID NO: 1239 - DNA, 2420 bp, Homo sapiens
tccggggcggcccccggcagccagcgcgacgttccaaaatcgaacctcagtggcggcgctcggaagcggaactctgccggggccgcgccggctacattgtttcctccccccgactccctcccgcccccttcccccgcctttcttccctccgcgacccgggccgtgcgtccgtccccctgcctctgcctggcggtccctcctcccctctccttgcacccatacctctttgtaccgcaccccctggggacccctgcgcccctcccctcccccctgaccgcatggaccgtcccgcaggccgctgatgccgcccgcggcgaggtggcccggaccgcagtgccccaagagagctctaatggtaccaagtgacaggttggctttactgtgactcggggacgccagagctcctgagaagatgtcagcaatacaggccgcctggccatccggtacagaatgtattgccaagtacaacttccacggcactgccgagcaggacctgcccttctgcaaaggagacgtgctcaccattgtggccgtcaccaaggaccccaactggtacaaagccaaaaacaaggtgggccgtgagggcatcatcccagccaactacgtccagaagcgggagggcgtgaaggcgggtaccaaactcagcctcatgccttggttccacggcaagatcacacgggagcaggctgagcggcttctgtacccgccggagacaggcctgttcctggtgcgggagagcaccaactaccccggagactacacgctgtgcgtgagctgcgacggcaaggtggagcactaccgcatcatgtaccatgccagcaagctcagcatcgacgaggaggtgtactttgagaacctcatgcagctggtggagcactacacctcagacgcagatggactctgtacgcgcctcattaaaccaaaggtcatggagggcacagtggcggcccaggatgagttctaccgcagcggctgggccctgaacatgaaggagctgaagctgctgcagaccatcgggaagggggagttcggagacgtgatgctgggcgattaccgagggaacaaagtcgccgtcaagtgcattaagaacgacgccactgcccaggccttcctggctgaagcctcagtcatgacgcaactgcggcatagcaacctggtgcagctcctgggcgtgatcgtggaggagaagggcgggctctacatcgtcactgagtacatggccaaggggagccttgtggactacctgcggtctaggggtcggtcagtgctgggcggagactgtctcctcaagttctcgctagatgtctgcgaggccatggaatacctggagggcaacaatttcgtgcatcgagacctggctgcccgcaatgtgctggtgtctgaggacaacgtggccaaggtcagcgactttggtctcaccaaggaggcgtccagcacccaggacacgggcaagctgccagtcaagtggacagcccctgaggccctgagagagaagaaattctccactaagtctgacgtgtggagtttcggaatccttctctgggaaatctactcctttgggcgagtgccttatccaagaattcccctgaaggacgtcgtccctcgggtggagaagggctacaagatggatgcccccgacggctgcccgcccgcagtctatgaagtcatgaagaactgctggcacctggacgccgccatgcggccctccttcctacagctccgagagcagcttgagcacatcaaaacccacgagctgcacctgtgacggctggcctccgcctgggtcatgggcctgtggggactgaacctggaagatcatggacctggtgcccctgctcactgggcccgagcctgaactgagccccagcgggctggcgggcctttttcctgcgtcccagcctgcacccctccggccccgtctctcttggacccacctgtggggcctggggagcccactgaggggccagggaggaaggaggccacggagcgggcggcagcgccccaccacgtcgggcttccctggcctcccgccactcgccttcttagagttttattcctttccttttttgagattttttttccgtgtgtttattttttattatttttcaagataaggagaaagaaagtacccagcaaatgggcattttacaagaagtacgaatcttatttttcctgtcctgcccgtgaggtgggggggaccgggcccctctctagggacccctcgccccagcctcattccccattctgtgtcccatgtcccgtgtctcctcggtcgccccgtgtttgcgcttgaccatgttgcactgtttgcatgcgcccgaggcagacgtctgtcaggggcttggatttcgtgtgccgctgccacccgcccacccgccttgtgagatggaatcgtaataaaccacgccatgaggaaaaaa

SEQ ID NO: 1240 - DNA, 1399 bp, Homo sapiens
ttgccggcgcaagagccaagccgccagcgctgctatgtgggccacgctgccgctgctctgcgccggggcctggctcctgggagtccccgtctgcggtgccgccgaactgtccgtgaactccttagagaagtttcacttcaagtcatggatgtctaagcaccgtaagacctacagtacggaggagtaccaccacaggctgcagacgtttgccagcaactggaggaagataaacgcccacaacaatgggaaccacacatttaaaatggcactgaaccaattttcagacatgagctttgctgaaataaaacacaagtatctctggtcagagcctcagaattgctcagccaccaaaagtaactaccttcgaggtactggtccctacccaccttccgtggactggcggaaaaaaggaaattttgtctcacctgtgaaaaatcagggtgcctgcggcagttgctggactttctccaccactggggccctggagtctgcaatcgccatcgcaaccggaaagatgctgtccttggcggaacagcagctggtggactgcgcccaggacttcaataattacggctgccaagggggtctccccagccaggctttcgagtatatcctgtacaacaaggggatcatgggtgaagacacctacccctaccagggcaaggatggttattgcaagttccaacctggaaaggccatcggctttgtcaaggatgtagccaacatcacaatctatgacgaggaagcgatggtggaggctgtggccctctacaaccctgtgagctttgcctttgaggtgactcaggacttcatgatgtatagaacgggcatctactccagtacttcctgccataaaactccagataaagtaaaccatgcagtactggctgttgggtatggagaaaaaaatgggatcccttactggatcgtgaaaaactcttggggtccccagtggggaatgaacgggtacttcctcatcgagcgcggaaagaacatgtgtggcctggctgcctgcgcctcctaccccatccctctggtgtgagccgtggcagccgcagcgcagactggcggagaaggagaggaacgggcagcctgggcctgggtggaaatcctgccctggaggaagttgtggggagatccactgggacccccaacattctgccctcacctctgtgcccagcctggaaacctacagacaaggaggagttccaccatgagctcacccgtgtctatgacgcaaagatcaccagccatgtgccttagtgtccttcttaacagactcaaaccacatggaccacgaatattctttctgtccagaagggctactttccacatatagagctccagggactgtcttttctgtattcgctgttcaataaacattgagtgagcacctcca

SEQ ID NO: 1241 - DNA, 2232 bp, Homo sapiens
cgtggcactcacccggctcgcgcggccccggccgcccacgccgcgcgtcgttctcccgcccgctcgctccccggcgctcacacctgagctcactcgcgcacgcccgcccggcccgagaaccgcgccgccgcctcggccccgcggaagccccgccgcgccatgtcttcgcctcccgaagggaaactagagactaaagctggacacccgcccgccgtgaaagctggtggaatgcgaattgtgcagaaacacccacatacaggagacaccaaagaagagaaagacaaggatgaccaggaatgggaaagccccagtccacctaaacccactgtgttcatctctggggtcatcgcccggggtgacaaagatttccccccggcggctgcgcaggtggctcaccagaagccgcatgcctccatggacaagcatccttccccaagaacccagcacatccagcagccacgcaagtgagcctggagtccaccagcctgccccatggccccggctctgctgcacttggtatttccctgacagagagaaccagcagtttcgcccaaatcctactctgctgggaaatctaaggcaaaaccaagtgctctgtcctttgccttacatttccatatttaaaactagaaacagcttcagcccaaaccttgtttatggggagtctggttggatgtcatttgaggatcattgtgcccctagaggtgccattagcagaatttgccaagatccgagaaaaattttagctttagttctatttcagcagtcacctgacgtccttgtctatggtcttaaaaacaagaaggcacacatttgagaagatgagattaaggttaggagaaaacctcagtcattgcatgctttttagtatgggccaataaaatctcaacacctgtgggagagtaagaactaagggaatgagtttgggcgccccctcataaaggaccttagaggcagggaacagcaatgccaaatttccctctctcgtgagatgggggatcctgtgcaggctgatgaggcacccatgagaaaagccgaaaaagcatgcatcttagaaatagcccctcaattccaggagtcaacatgccaaagaatgaggctggagacaggtagctccgagggaggacttctggcatgagatctcggcacggcaagcccagcatcgcctcagcccagacaggctccaccaggagatcaagcaagggctgcctttcaggagtcacctcctgagccacttcagagttctggaagtgaccacggaccagggtggaggaatagacttctagttcattctgggacacttgagccagagagttgaaagcttggaaagaccagataagaaacctgccctttgtctccctagggacatgagacaccacattccatttgtgctagaaaaacctatccactgatgagtctaactgttccaaacgcctcccacctggtgtgcacagctgcctgggtccattgtcacttgggtgcatcaggttgtcctccgatttttagatgagtttcctgtctagagatgtcctagtctgctcactggctggtggcagtagggtaccctgcgtcctcgaaaagccagagggttcacctagtcagacgaaactccagaacagtgcttgtggagggcctgactgtcctgctcacccacagccgatctgctgcaggtcagcaactgtgtcgtgagcagctgccaaccaccagcctttctggtgctgttctccagttcacgtctgccagctggtgagggcagaggcagacctggtcagacccagcgcccctcctccctgagggagcatggcacagcctcacacttgaaagacggtgtttggtttcccatctaatcaacttaagggaagccggcatgtacccttcaaggccctgtcaccacctattttcctgatcagttggtataaactgagggtggcttttagagacccagacttggttggcagcgctgccatggaacaccccagcaagcacctcccagcctgcctttcggagcagcacccaggaggggatgccgcgctccagcaacaccaggtcaggcctgtgcagacccctgccctgccgctgcagaaatccagaagcatccttaatgcttctcagtcttcagccagagggagggctgttatttccagaggtgcgctttttatgtacttttagctagatgtggcatgcatctgtgagctttagatcattaaatccaaaatgtttgcctaaatgagg

SEQ ID NO: 1242 - DNA, 2325 bp, Homo sapiens
acctcattcatttctaccggtctctagtagtgcagcttcggctggtgtcatcggtgtccttcctccgctgccgcccccgcaaggcttcgccgtcatcgaggccatttccagcgacttgtcgcacgcttttctatatacttcgttccccgccaaccgcaaccattgacgccatgtcgggttattcgagtgaccgagaccgcggccgggaccgagggtttggtgcacctcgatttggaggaagtagggcagggcccttatctggaaagaagtttggaaaccctggggagaaattagttaaaaagaagtggaatcttgatgagctgcctaaatttgagaagaatttttatcaagagcaccctgatttggctaggcgcacagcacaagaggtggaaacatacagaagaagcaaggaaattacagttagaggtcacaactgcccgaagccagttctaaatttttatgaagccaatttccctgcaaatgtcatggatgttattgcaagacagaatttcactgaacccactgctattcaagctcagggatggccagttgctctaagtggattggatatggttggagtggcacagactggatctgggaaaacattgtcttatttgcttcctgccattgtccacatcaatcatcagccattcctagagagaggcgatgggcctatttgtttggtgctggcaccaactcgggaactggcccaacaggtgcagcaagtagctgctgaatattgtagagcatgtcgcttgaagtctacttgtatctacggtggtgctcctaagggaccacaaatacgtgatttggagagaggtgtggaaatctgtattgcaacacctggaagactgattgactttttagagtgtggaaaaaccaatctgagaagaacaacctaccttgtccttgatgaagcagatagaatgcttgatatgggctttgaaccccaaataaggaagattgtggatcaaataagacctgataggcaaactctaatgtggagtgcgacttggccaaaagaagtaagacagcttgctgaagatttcctgaaagactatattcatataaacattggtgcacttgaactgagtgcaaaccacaacattcttcagattgtggatgtgtgtcatgacgtagaaaaggatgaaaaacttattcgtctaatggaagagatcatgagtgagaaggagaataaaaccattgtttttgtggaaaccaaaagaagatgtgatgagcttaccagaaaaatgaggagagatgggtggcctgccatgggtatccatggtgacaagagtcaacaagagcgtgactgggttctaaatgaattcaaacatggaaaagctcctattctgattgctacagatgtggcctccagagggctagatgtggaagatgtgaaatttgtcatcaattatgactaccctaactcctcagaggattatattcatcgaattggaagaactgctcgcagtaccaaaacaggcacagcatacactttctttacacctaataacataaagcaagtgagcgaccttatctctgtgcttcgtgaagctaatcaagcaattaatcccaagttgcttcagttggtcgaagacagaggttcaggtcgttccaggggtagaggaggcatgaaggatgaccgtcgggacagatactctgcgggcaaaaggggtggatttaatacctttagagacagggaaaattatgacagaggttactctagcctgcttaaaagagattttggggcaaaaactcagaatggtgtttacagtgctgcaaattacaccaatgggagctttggaagtaattttgtgtctgctggtatacagaccagttttaggactggtaatccaacagggacttaccagaatggttatgatagcactcagcaatacggaagtaatgttccaaatatgcacaatggtatgaaccaacaggcatatgcatatcctgctactgcagctgcacctatgattggttatccaatgccaacaggatattcccaataagactttagaagtatatgtaaatgtctgtttttcataattgctctttatattgtgtgttatctgacaagatagttatttaagaaacatgggaattgcagaaatgactgcagtgcagcagtaattatggtgcactttttcgctatttaagttggatatttctctacattcctgaaacaatttttaggttttttttgtactagaaaatgcaggcagtgttttcacaaaagtaaatgtacagtgatttgaaatacaataatgaaggcaatgcatggccttccaataaaaaatatttgaagactgaaaaaaaaaa

SEQ ID NO: 1243 - DNA, 1738 bp, Homo sapiens
cgggggggtactgtgcgagccctcaaggaggtggctgttctgtagctggagagctccgtgggtggcaggactgaacttgaacaccagaaacaacccccaagccttgtgacctgggaggcaggaggcgggtctgtctccctgggacttgggtggctgagccgaggtactcgggaccctgtcccgcgcatggcagagtggctcctcacagcctgaagctcatccttctgcacgggccagccaggccagcacagaggcaccagggcagcagtgcacacaggtccccggggaccccaccatgtggagcggatggtggctgtggccccttgtggccgtctgcactgcagacttctttcgggacgaggcagagaggatcatgagggactcccctgtcattgatgggcacaatgacctcccctggcagctgctggatatgttcaacaaccggctgcaggacgagagggccaacctgaccaccttggccggcacacacaccaacatccccaagctgagggccggctttgtgggaggccagttctggtccgtgtacacgccctgcgacacccagaacaaagacgccgtgcggaggacgctggagcagatggacgtggtccaccgcatgtgccggatgtacccggagaccttcctgtatgtcaccagcagtgcaggcattcggcaggccttccgggaagggaaggtggccagcctgatcggcgtggagggcggccactccattgacagcagtttgggcgtcctgcgggcactctatcagctgggcatgcggtacctgaccctcacccacagctgcaacacgccctgggctgacaactggctggtggacacgggagacagcgagccccagagccaaggcttgtcaccctttgggcagcgtgtggtgaaggagctgaaccgtctgggggtcctcatcgacttggctcacgtgtctgtggccaccatgaaggccaccctgcagctgtccagagccccggtcatcttcagccactcctcggcctacagcgtgtgcgcaagccggcgcaacgtgcctgacgacgtcctgaggctggtgaaacagacagacagcctggtgatggtgaacttctacaacaattacatttcctgcaccaacaaggccaacctgtcccaagtggccgaccatctggatcacatcaaggaggtggcaggagccagagccgtgggttttggtggggactttgatggtgttccaagggtccctgaggggctggaggacgtctccaagtatccagacctgatcgctgagctgctcaggaggaactggacggaggcggaggtcaagggcgcactggctgacaacctgctgagggtcttcgaggctgtggaacaggccagcaacctcacacaggctcccgaggaggagcccatcccgctggaccagctgggtggctcctgcaggacccattacggctactcctctggggcttccagcctccatcgccactgggggctcctgctggcctccctcgctcccctggtcctctgtctgtctctcctgtgaaacctgggagaccagagtcccctttagggttcccggagctccgggaagacccgcccatcccaggactccagatgccaggagccctgctgcccacatgcaaggaccagcatctcctgagaggacgcctgggcttacctggggggcaggatgcctggggacagttcaggacacacacacagtaggcccgcaataaaagcaacacccctt

SEQ ID NO: 1244 - DNA, 2289 bp, Homo sapiens
ggcacgaggcgggggcggccgaggcggacgagggcggcggcgactggagcttcattgactgcgagatggaggaggtggacctgcaggacctgcccagcgccaccatcgcctgtcacctggacccgcgcgtgttcgtggacggcctgtgccgggccaaatttgagtccctctttaggacgtatgacaaggacatcacctttcagtattttaagagcttcaaacgagtcagaataaacttcagcaaccccttctccgcagcagatgccaggctccagctgcataagactgagtttctgggaaaggaaatgaagttatattttgctcagaccttacacataggaagctcacacctggctccgccaaatccagacaagcagtttctgatctcccctcccgcctctccgccagtgggatggaaacaagtggaagatgcgaccccagtcataaactatgatctcttatatgccatctccaagctggggccaggggaaaagtatgaattgcacgcagcgactgacaccactcccagcgtggtggtccatgtatgtgagagtgatcaagagaaggaggaagaagaggaaatggaaagaatgaggagacctaagccaaaaattatccagaccaggaggccggagtacacgccgatccacctcagctgaactggcacgcgacgaggacgcattccaaatcatactcacgggaggaatcttttactgtggaggtggctggtcacgacttcttcggaggtggcagccgagatcggggtggcagaaatcccagttcatgttgctcagaagagaatcaaggccgtgtccccttgttctaatgctgcacaccagttactgttcatggcacccgggaatgacttgggccaatcactgagtttgtggtgatcgcacaaggacatttgggactgtcttgagaaaacagataatgatagtgttttgtacttgttcttttctggtaggttctgtctgtgccaagggcaggttgatcagtgagctcaggagagagcttcctgtttctaagtggcctgcaggggccactctctactggtaggaagaggtaccacaggaagccgcctagtgcagagaggttgtgaaaacagcagcaatgcaatgtggaaattgtagcgtttcctttcttccctcatgttctcatgtttgtgcatgtatattactgatttacaagactaacctttgttcgtatataaagttacaccgttgttgttttacatcttttgggaagccaggaaagcgtttggaaaacgtatcacctttcccagattctcggattctcgactctttgcaacagcacttgcttgcggaactcttcctggaatgcattcactcagcatccccaaccgtgcaacgtgtaacttgtgcttttgcaaaagaagttgatctgaaattcctctgtagaatttagcttatacaattcagagaatagcagtttcactgccaacttttagtgggtgagaaattttagtttaggtgtttgggatcggacctcagtttctgttgtttcttttatgtggtggtttctatacatgaatcatagccaaaaacttttttggaaactgttggttgagatagttggttcttttaccccacgaagacatcaagatacacttgtaaataaagctgatagcatatattcatacctgttgtacacttgggtgaaaagtatggcagtgggagactaagatgtattaacctacctgtgaatcatatgttgtaggaaaagctgttcccatgtctaacaggacttgaattcaaagcatgtcaagtggatagtagatctgtggcgatatgagagggatgcagtgcctttccccattcattcctgatggaattgttatactaggttaacatttgtaatttttttctagttgtaatgtgtatgtctggtaaataggtattatattttggccttacaataccgtaacaatgtttgtcattttgaaatacttaatgccaagtaacaatgcatgctttggaaatttggaagatggttttattctttgagaagcaaatatgtttgcattaaatgctttgattgttcatatcaagaaattgattgaacgttctcaaaccctgtttacggtacttggtaagagggagccggtttgggagagaccattgcatcgctgtccaagtgtttcttgttaagtgcttttaaactggagaggctaacctcaaaatattttttttaactgcattctataataaatgggcacagtatgctccttacagaaaaaaaaaaaaaaaaaaaaaaaaaaaaaaaaaa

SEQ ID NO: 1245 - DNA, 2015 bp, Homo sapiens
tcgctgcgaaggacatttgggctgtgtgtgcgacgcgggtcggaggggcagtcgggggaaccgcgaagaagccgaggagcccggagccccgcgtgacgctcctctctcagtccaaaagcggcttttggttcggcgcagagagacccgggggtctagcttttcctcgaaaagcgccgccctgcccttggccccgagaacagacaaagagcaccgcagggccgatcacgctgggggcgctgaggccggccatggtcatggaagtgggcaccctggacgctggaggcctgcgggcgctgctgggggagcgagcggcgcaatgcctgctgctggactgccgctccttcttcgctttcaacgccggccacatcgccggctctgtcaacgtgcgcttcagcaccatcgtgcggcgccgggccaagggcgccatgggcctggagcacatcgtgcccaacgccgagctccgcggccgcctgctggccggcgcctaccacgccgtggtgttgctggacgagcgcagcgccgccctggacggcgccaagcgcgacggcaccctggccctggcggccggcgcgctctgccgcgaggcgcgcgccgcgcaagtcttcttcctcaaaggaggatacgaagcgttttcggcttcctgcccggagctgtgcagcaaacagtcgacccccatggggctcagccttcccctgagtactagcgtccctgacagcgcggaatctgggtgcagttcctgcagtaccccactctacgatcagggtggcccggtggaaatcctgccctttctgtacctgggcagtgcgtatcacgcttcccgcaaggacatgctggatgccttgggcataactgccttgatcaacgtctcagccaattgtcccaaccattttgagggtcactaccagtacaagagcatccctgtggaggacaaccacaaggcagacatcagctcctggttcaacgaggccattgacttcatagactccatcaagaatgctggaggaagggtgtttgtccactgccaggcaggcatttcccggtcagccaccatctgccttgcttaccttatgaggactaatcgagtcaagctggacgaggcctttgagtttgtgaagcagaggcgaagcatcatctctcccaacttcagcttcatgggccagctgctgcagtttgagtcccaggtgctggctccgcactgttcggcagaggctgggagccccgccatggctgtgctcgaccgaggcacctccaccaccaccgtgttcaacttccccgtctccatccctgtccactccacgaacagtgcgctgagctaccttcagagccccattacgacctctcccagctgctgaaaggccacgggaggtgaggctcttcacatcccattgggactccatgctccttgagaggagaaatgcaataactctgggaggggctcgagagggctggtccttatttatttaacttcacccgagttcctctgggtttctaagcagttatggtgatgacttagcgtcaagacatttgctgaactcagcacattcgggaccaatatatagtgggtacatcaagtccatctgacaaaatggggcagaagagaaaggactcagtgtgtgatccggtttctttttgctcgcccctgttttttgtagaatctcttcatgcttgacatacctaccagtattattcccgacgacacatatacatatgagaatataccttatttatttttgtgtaggtgtctgccttcacaaatgtcattgtctactcctagaagaaccaaatacctcaatttttgtttttgagtactgtactatcctgtaaatatatcttaagcaggtttgttttcagcactgatggaaaataccagtgttgggtttttttttagttgccaacagttgtatgtttgctgattatttatgacctgaaataatatatttcttcttctaagaagacattttgttacataaggatgacttttttatacaatggaataaattatggcatttctattg

SEQ ID NO: 1246 - DNA, 1837 bp, Homo sapiens
acaaccgtaacagccaccagacaagcttcagtggccggcccttcacatccagacttgcctgagaggacccacctctgagtgtccagtggtcagttgccccaggatggggaccacagccagagcagccttggtcttgacctatttggctgttgcttctgctgcctctgagggaggcttcacggctacaggacagaggcagctgaggccagagcactttcaagaagttggctacgcagctcccccctccccacccctatcccgaagcctccccatggatcaccctgactcctctcagcatggccctccctttgagggacagagtcaagtgcagccccctccctctcaggaggccacccctctccaacaggaaaagctgctacctgcccaactccctgctgaaaaggaagtgggtccccctctccctcaggaagctgtccccctccaaaaagagctgccctctctccagcaccccaatgaacagaaggaaggaacgccagctccatttggggaccagagccatccagaacctgagtcctggaatgcagcccagcactgccaacaggaccggtcccaagggggctggggccaccggctggatggcttcccccctgggcggccttctccagacaatctgaaccaaatctgccttcctaaccgtcagcatgtggtatatggtccctggaacctaccacagtccagctactcccacctcactcgccagggtgagaccctcaatttcctggagattggatattcccgctgctgccactgccgcagccacacaaaccgcctagagtgtgccaaacttgtgtgggaggaagcaatgagccgattctgtgaggccgagttctcggtcaagacccgaccccactggtgctgcacgcggcagggggaggctcggttctcctgcttccaggaggaagctccccagccacactaccagctccgggcctgccccagccatcagcctgatatttcctcgggtcttgagctgcctttccctcctggggtgcccacattggacaatatcaagaacatctgccacctgaggcgcttccgctctgtgccacgcaacctgccagctactgaccccctacaaagggagctgctggcactgatccagctggagagggagttccagcgctgctgccgccaggggaacaatcacacctgtacatggaaggcctgggaggatacccttgacaaatactgtgaccgggagtatgctgtgaagacccaccaccacttgtgttgccgccaccctcccagccctactcgggatgagtgctttgcccgtcgggctccttaccccaactatgaccgggacatcttgaccattgacatcagtcgagtcacccccaacctcatgggccacctctgtggaaaccaaagagttctcaccaagcataaacatattcctgggctgatccacaacatgactgcccgctgctgtgacctgccatttccagaacaggcctgctgtgcagaggaggagaaattaaccttcatcaatgatctgtgtggtccccgacgtaacatctggcgagaccctgccctctgctgttacctgagtcctggggatgaacaggtcaactgcttcaacatcaattatctgaggaacgtggctctagtgtctggagacactgagaacgccaagggccagggggagcagggctcaactggaggaacaaatatcagctccacctctgagcccaaggaagaatgagtcaccccagagccctagagggtcagatggggggaaccccaccctgccccacccatctgaacactcattacactaaacacctcttggatttggaaaaaaaaaaaaaaaaaa

SEQ ID NO: 1247 - DNA, 4289 bp, Homo sapiens
gatcaatactgaggccgcgtcgacccccttgagccgagacccccccccagcccagcccccaccccaccccccgcacacgccccaccccccccacgacccagcctcataccgcaccagctgaggcacccaagaggattaccccctggggccctctcccgccccccaaaaaagagaagatcccctctcctggcccatcccttcccttcttccctcccccctccccccgaactttccctctcgcatgcttttcccctgcaccacggatcgcctctcggatgccgcttgcctggaagctgcgttaggagcgagcggcggcggtggcggcggtggcggcggcggcggcagctcgggagtgctatgaccggcaaactcgccgagaagctgccggtgaccatgagcagtttgctaaaccaactgcctgacaatctgtaccccgaggagatccccagcgcgctcaacctcttctccggcagcagcgactcggtagtccattacaatcagatggctacagagaatgtaatggacatcggtctgaccaacgagaagcccaacccggaactctcttactccggctccttccagccagcccccgggaacaagaccgtgacctacttgggaaagttcgccttcgactccccttccaactggtgccaggacaacatcattagcctcatgagcgccggcatcttgggggtgcccccggcttcaggggcgctaagcacgcagacgtccacggccagcatggtgcagccaccgcagggtgacgtggaggccatgtatcccgcgctacccccctactccaactgcggcgacctctactcagagcccgtgtctttccacgacccccagggcaatcccgggctcgcctattccccccaggattaccaatcggccaagccggcgttggacagcaatctcttccccatgattcctgactacaacctctaccaccaccccaacgacatgggctccattccggagcacaagcccttccagggcatggaccccatccgggtcaacccgccccctactacccctctggagaccatcaaggcattcaaagacaagcagatccacccgggctttggcagcctgccccagccgccgctcaccctcaagcccatccggccccgcaagtaccccaaccggcctagcaagacaccgctccacgaacggccccacgcgtgcccggccgagggctgcgaccgccgtttcagccgttcggacgagctgacccggcacctgcgcatccacacgggccacaagcccttccagtgccggatctgcatgcggagcttcagccgcagcgaccacctcaccactcacatccgcactcatacgggcgagaagccctttgcctgcgagttctgcgggcgcaagtttgcgcgcagcgacgagcgcaagcgccacgccaagatccacctcaagcaaaaggagaagaaggcggagaagggcggtgcaccctctgcatcctcggcgccccccgtgtcgctggcccccgtggtcaccacctgcgcctgaggatcgggcccccagatccccacttttcccctccagtgcctcccggctgctagcctgaaagcagcgggaaagccagccacggaggcgtaggggccgcgccctggcctctccatggacgtgcggccccttgcttccccttcgatgcccccggttcccaacctttcacgccggccagcggtcaggggccagggctggaggcgccttcccctcgcggtcccccacttagccaaggcgtgggggcggaaaggtggcgtctagcccgctttgttcagttcggatcgccttgatccaggggccgccgggccgcgccaaggacctgcaagggactgaaggcggagcccatccaaccctcgcccgacccaaacacctcattgtttcccccacgtctccctctataccccctcgaagactcgagagggggagggggtaaggagcgcaccaaagcgcagagcttgctgcccgccgcacgcacgcgcgcctgcgtgcggggatgcgcgcgagtgtgtgcgtgctcgcgtgtgtgtgtatgtgtgtgtgtgagtgtgtgtgtgtgcgcgcgcgcaagcgtgtgtgtttaagactcttgagctgaactgggctgtgtttaccccaaactcttccccacctcgggtccccaagccgctgggagatgtcccatgctgggggtccgcacgtggctggaggaggtggtcttccatccgctctgaaatcatgtttcttagagaaatgcctcggatgccgccgacgcggtgctgctgccgccgcttcgggtttggcccctcagaacccctccttttctgagcgcttccctcttaggcctcagggcagtttgatctgtggggagaaagagcagccatcgctgagcctgccttttaaaatatatgtgtatttccttagccccactctaagaaatctatgttcctgagtttgccccctgccctcccactccttccccttttcccctctaaaccttctcccatctctttcaaaatcttttcccagaaaggcaggcttcaaccagccactccagctttgtgtcttctctcaattacatagcaatttctccttcccaccatcatggggaagctggctctgcttttgccctttgtcatcaccaacacaacagatagaatttaaatataagtatatggtgtgcgtgtgtatgtatgtgtatgtatatgcatgcatgtgtataaagatgcacatgcgtacatatacataacatacacacaatatgtattcctagcaaaataaaatctctaaggtacttggttatccagtgcagtgcaccggaataaagagaatttgtaggcgtatacagctttaaatgatttattttttatgaaaatgttaactgatgagattatatctacatacgtgtgttatgtgtgtggatatagatgcacacatatctgtacatatacatgtgagtgtacatatatacacatatacacatctatgtatggatatgtgtgtatacacatatacacatctctgtccaaaatttcctcaaagatatggggattttttcatgaatccatgtggatgaatgaggtgtctcctttccatacccagtctcaccttctccccaccctacctcacctcttctcaggcacccctcttccccagctgtcctgccagcccttctcgtacagggtggctcctttgaagtggagtaatagggaaggttgctctctgccacagcttgcagcatggtcttgactgaatgtactgttcctgttagcgttacttctcctgtggtcagtaagttgcccagagagaaggaacaaaggtctggagtttacagaatgtctgtttttaaagtcactttatgcgttttccacttttttcttttttaagaaaaagaagtaccatttttgttttgttttgttttgatttttggtggtggataaataatactaaaaggactctagtggaaaggggggatatcgaagagcagggggttgtgaatttccaggtacttggactttttgtagaagtagagagaagaagatgaagtttgccaggagggcccatattttttcagctgaagggtaaaatctttctttgcagagacagtattttgctgaatactttttataatgtgatgattattaaaaaagcaaaaattttggtcacttccaagctagaaggaggaatcagataccctttaatattttttcctcgctccttctggtatatgcatgtcactgcatgataattgagttttcctttgttttaataaaactgttctcagacattaagctaaactaagagaaaaataactttgttgccaaaaggttgtgctatccagattttttatatgtctgcatgtttaaaaaaaaaaaagcaacaaaagaaaatgcactctaacttatgtgaactgagagaaaaaaatcaggttttaaacaggaaaacctatggggaatgatattttttgaaagacttttgtataaagttgagtacttagaaaaaagacaaaccagatgtaatatattttgtggatgtttttatttcttggatttatagtaccttatactaaggttaaaaaaatatgcttgatattgtgaaaaggtgaaattcttcaccaacatttcatttgctcctttgtcatattgtaatgccaatataatatagttaatgaaaacagcatttttaaaaaccgaaatattgaaatggtgtaatgttgtaccatttgcactgtgagcaaatgctaatacagtaaatatattgtgtttgctgacaatcaaaaaaaaaaaaaaaaaaaa

SEQ ID NO: 1248 - DNA, 3962 bp, Homo sapiens
aggaattccggtgagctgagcgcggcgcgcggccgggccggggagcgggcgcgccggcggcctcagcatggaggacggcttctccagctacagcagcctgtacgacacgtcctcgctgctccagttctgcaacgatgacagcgcttctgctgcaagtagcatggaggtgacagaccgcattgcttcactggagcagagagtccagatgcaagaagacgacatccagctgctcaaatcagctctagctgatgtggttcggcggctgaacattactgaggaacagcaggccgtgcttaacaggaaaggacctaccaaagcaagaccactgatgcagaccctgccttttagatccacggtcaacaatggcactgtgttaccaaagatacctactggctctctaccatccccctccgggttcaggaaagatactgctgtgccagcaaccaaaagtaacatcaagaggaccagctcttctgaacgagtgtctcctgggggtcgaagggaaagcaatggggattccagaggaaaccggaatcgcacaggctccaccagcagctcttccagtggcaaaaaagaacagtgaaagcaaacccaaggagcctgtattcagtgcagaagaaggctatgtaaaattgtttcttcgtggacgccctgttaccatgtacatgcccaaagatcaagtggattcttacagcttggaagcaaaagtagaacttccaaccaagagactcaagctggaatgggtctatgggtacaggggtcgagactgccgtaacaacctgtacttgcttccgacgggagagaccgtctacttcatcgcatccgtggtggtgttatacaacgtggaggagcaactgcagaggcattacgctggccacaacgatgacgtgaagtgcctagcagttcatcctgatcggatcacgatagcaacaggacaagttgcgggcacatcgaaggatggaaaacaattgcccccacatgtgcgcatctgggattctgtgacattgaatactctccacgtcattggaataggtttttttgaccgagcagtcacctgtattgcattctcaaaatctaatggaggaaccaatctctgtgctgtggatgactccaacgaccatgtgctctctgtatgggactggcagaaagaagaaaaactagcagatgtgaagtgctctaatgaagctgtgtttgctgcggatttccaccccacggacaccaacatcatagttacttgtggagaaatcacatctctacttttggacactagaaggaagctcccattaataagaagcaaggattattcgagaacaagaaaagccaaagttgtcctctgtgtgactttctctgaaaacggtgacaccattactggagattcaagtggcaacatcttagtatggggaaaaggtacaaatcgaataagctatgcagttcagggggcccatgagggtggcatttctccactttgtatgttaagagatggcacactggtgtcgggaggtgggaaagaccgaaagctcatttcttggagcggaaactatcaaaaacttcgtaaaacggagattccagaacagtttggtccaatacggacagtggccgaggggaaaggcgatgtgatcttgattggcacaactcgaaactttgtcctgcagggcactctgtcaggggacttcacacccattactcagggtcacactgatgagctctggggactggccatccatgcctcaaaacctcagttcttgacctgtgggcatgacaagcatgccactctctgggacgctgtgggtcaccgtcccgtctgggacaaaataatagaggatccagctcagtcttctggttttcatccttcagggtctgtggttgcagtcggaacactcactgggaggtggtttgtgtttgacacagaaacaaaagacttggtcaccgttcacacagatggaaacgaacagctctctgtaatgcgatactcaccagatgggaatttcttagccataggctcacatgacaactgcatctatatatatggcgttagtgacaacgggaggaagtacacgcgagtgggcaagtgctcgggtcattccagcttcattactcacctggactggtctgtaaactcacagttcctcgtgtcaaattccggagactacgaaatcctctactgggttccctctgcctgtaagcaagtcgtaagtgtggaaactacaagagacattgaatgggctacctatacctgcactttgggattccatgtttttggagtgtggccagaaggctcggacggaaccgacatcaatgccgtctgtcgggcccatgagaagaaactcctgtcaacaggcgacgactttggcaaagtgcacctcttctcatacccctgctcgcagttcagggctccaagccacatctacggcgggcacagcagccatgtcaccaatgtcgatttcctctgtgaagacagccacctcatctccacgggcgggaaagacacaagcatcatgcagtggcgcgtcatttagtacccaccgagagctgtggggagcagcatgggcaaggaagacacagactcgcattacccttggtcactgtgatttctgttttgtttaaaaaattcttacaaacctcaggaaaactgtgccctccgccggctaccttagcttagcgtgtcagcgggcgccacagcggaatcagcggttccgtgttcacttttgttgtacaatatatgacacagtgcacattgaataccaacaaggttgcaacgtttacattatagccacatcaacagaagtaactgggtatattcttagtaacttttctatggaactcttcaaaaatgggtcacaggatggccttttaaaacattgtatattatcttcactgttttcaccttttaggttgctaagttcaatatttgtgatgataatgaggtactgaaccacgatggctgttgaggaattggtcctaaaaggacagatcacttcagaagagtgaataactgatttgcacagctgaatcaggagacacaaagatgagactgtgtttggttacattttccaaagtttcattgcattctcccttggggaggctgtgagagagggcttgtatccctcttgtgctaagcagactctactcctaactgacttcaatatttcagcagggtacacaggcgtttccaagtttcagtgacaccgtcctgcctaaccagatgcggtcagcctcttcacacccacctggcttgcatcccccatcccttgttcacacgccctgattcacggtgagacattttgccaccttcttgtgtatattacttggcatgagatgatattgtacttgtataggattctagcaattcataataaatatgtaagactaggctttactgtcttatgcttatggacattgtatatttgtattttatgaccaagtagaccaagtcagaaagatctctctcgagcgcaccataaacctgcagagagaagtctcgaaaggctccaccaaggtaccaagggcagctgcttttcctgtcttttgtgcatgggcgacccattacagtatgagataagattgagttctgatgcgttaaacggaggtggcagaaatttgtcaagaaggccttatccatttcgattgtgtgacagattgaaatttattgtttacattggggaatgtatctcaaatttttaaatagaagagtaataaacagactttaaagcaaatattaagatttttactcattcaaggcaagtaaatgaatggaattatctgagctctatggcactggttgtttagagtgactgatgaagtgcacctttcaaaaacatttttgatgccatcaccagcctactgcagaagtgcagggcacagtaaacaccatgtattattgaagatgatctgttttgtatgtatccttgtcaaatatattctataatggaataaaaaatcctggaaagtgggggtttccttaa

SEQ ID NO: 1249 - DNA, 4586 bp, Homo sapiens
tatacttcgctacttggctagagttgcaactacagctgggttatatggctctaatctgatggaacatactgagattgatcactggttggagttcagtgctacaaaattatcttcatgtgattcctttacttctacaattaatgaactcaatcattgcctgtctctgagaacatacttagttggaaactccttgagtttagcagatttatgtgtttgggccaccctaaaaggaaatgctgcctggcaagaacagttgaaacagaagaaagctccagttcatgtaaaacgttggtttggctttcttgaagcccagcaggccttccagtcagtaggtaccaagtgggatgtttcaacaaccaaagctcgagtggcacctgagaaaaagcaagatgttgggaaatttgttgagcttccaggtgcggagatgggaaaggttaccgtcagatttcctccagaggccagtggttacttacacattgggcatgcaaaagctgctcttctgaaccagcactaccaggttaactttaaagggaaactgatcatgagatttgatgacacaaatcctgaaaaagaaaaggaagattttgagaaggttatcttggaagatgttgcaatgttgcatatcaaaccagatcaatttacttatacttcggatcattttgaaactataatgaagtatgcagagaagctaattcaagaagggaaggcttatgtggatgatactcctgctgaacagatgaaagcagaacgtgagcagaggatagaatctaaacatagaaaaaaccctattgagaagaatctacaaatgtgggaagaaatgaaaaaagggagccagtttggtcactcctgttgtttgcgagcaaaaattgacatgagtagtaacaatggatgcatgagagatccaaccctttatcgctgcaaaattcaaccacatccaagaactggaaataaatacaatgtttatccaacatatgattttgcctgccccatagttgacagcatcgaaggtgttacacatgccctgagaacaacagaataccatgacagagatgagcagttttactggattattgaagctttaggcataagaaaaccatatatttgggaatatagtcggctaaatctcaacaacacagtgctatccaaaagaaaactcacatggtttgtcaatgaaggactagtagatggatgggatgacccaagatttcctacggttcgtggtgtactgagaagagggatgacagttgaaggactgaaacagtttattgctgctcagggctcctcacgttcagtcgtgaacatggagtgggacaaaatctgggcgtttaacaaaaaggttattgacccagtggctccacgatatgttgcattactgaagaaagaagtgatcccagtgaatgtacctgaagctcaggaggagatgaaagaagtagccaaacacccaaagaatcctgaggttggcttgaagcctgtgtggtatagtcccaaagttttcattgaaggtgctgatgcagagactttttcggagggtgagatggttacatttataaattggggcaacctcaacattacaaaaatacacaaaaatgcagatggaaaaatcatatctcttgatgcaaagtttaatttggaaaacaaagactacaagaaaaccactaaggtcacttggcttgcagagactacacatgctcttcctattccagtaatctgtgtcacttatgagcacttgatcacaaagccagtgctaggaaaagacgaggactttaagcagtatgtcaacaagaacagtaagcatgaagagctaatgctaggggatccctgccttaaggatttgaaaaaaggagatattatacaactccagagaagaggattcttcatatgtgatcaaccttatgaacctgttagcccatatagttgcaaggaagccccgtgtgttttgatatacattcctgatgggcacacaaaggaaatgccaacatcagggtcaaaggaaaagaccaaagtagaagccacaaaaaatgagacctctgctccttttaaggaaagaccaacaccttctctgaataataattgtactacatctgaggattccttggtcctttacaatagagtggctgttcaaggagatgtggttcgtgaattaaaagccaagaaagcaccaaaggaagatgtagatgcagctgtaaaacagcttttgtctttgaaagctgaatataaggagaaaactggccaggaatataaacctggaaaccctcctgctgaaataggacagaatatttcttctaattcctcagcaagtattctggaaagtaaatctctgtatgatgaagttgctgcacaaggggaggtggttcgtaagctaaaagctgaaaaatcccctaaggctaaaataaatgaagctgtagaatgcttactgtccctgaaggctcagtataaagaaaaaactgggaaggagtacatacctggtcagcccccattatctcaaagttcggattcaagcccaaccagaaattctgaacctgctggtttagaaacaccagaagcgaaagtactttttgacaaagtagcttctcaaggggaagtagttcggaaacttaaaactgaaaaagcccctaaggatcaagtagatatagctgttcaagaactccttcagctaaaggcacagtacaagtctttgataggagtagagtataagcctgtgtcggccactggagctgaggacaaagataagaagaagaaagaaaaagaaaataaatctgaaaagcagaataagcctcagaaacaaaatgatggccaaaggaaagacccttctaaaaaccaaggaggtgggctctcatcaagtggagcaggagaagggcaggggcctaagaaacagaccaggttgggtcttgaggcaaaaaaagaagaaaatcttgctgattggtattctcaggtcatcacaaagtcagaaatgattgaataccatgacataagtggctgttatattcttcgtccctgggcctatgccatttgggaagccatcaaggacttttttgatgctgagatcaagaaacttggtgttgaaaactgctacttccccatgtttgtgtctcaaagtgcattagagaaagagaagactcatgttgctgactttgccccagaggttgcttgggttacaagatctggcaaaaccgagctggcagaaccaattgccattcgtcctactagtgaaacagtaatgtatcctgcatatgcaaaatgggtacaatcacacagagacctgcccatcaagctcaatcagtggtgcaatgtggtgcgttgggaattcaagcatcctcagcctttcctacgtactcgtgaatttctttggcaggaagggcacagtgcttttgctaccatggaagaggcagcggaagaggtcttgcagatacttgacttatatgctcaggtatatgaagaactcctggcaattcctgttgttaaaggaagaaagacggaaaaggaaaaatttgcaggaggagactatacaactacaatagaagcatttatatctgctagtggaagagctatccagggaggaacatcacatcatttagggcagaatttttccaaaatgtttgaaatcgtttttgaagatccaaagataccaggagagaagcaatttgcctatcaaaactcctggggcctgacaactcgaactattggtgttatgaccatggttcatggggacaacatgggtttagtattaccaccccgtgtagcatgtgttcaggtggtgattattccttgtggcattaccaatgcactttctgaagaagacaaagaagcgctgattgcaaaatgcaatgattatcgaaggcgattactcagtgttaacatccgcgttagagctgatttacgagataattattctccaggttggaaattcaatcactgggagctcaagggagttcccattagacttgaagttgggccacgtgatatgaagagctgtcagtttgtagccgtcagacgagatactggagaaaagctgacagttgctgaaaatgaggcagagactaaacttcaagctattttggaagacatccaggtcacccttttcacaagggcttctgaagaccttaagactcatatggttgtggctaatacaatggaagactttcagaagatactagattctggaaagattgttcagattccattctgtggggaaattgactgtgaggactggatcaaaaagaccactgccagggatcaagatcttgaacctggtgctccatccatgggagctaaaagcctttgcatccccttcaaaccactctgtgaactgcagcctggagccaaatgtgtctgtggcaagaaccctgccaagtactacaccttatttggtcgcagctactgagggatgaacgaaagccccctcttcaactcctctcactttttaaagcattgatattagtatcttctcagatacagaccgttttatgattttttaaaaagtaaaagttctaaaatgaagtcacacaggacaattattcttatgcctaagttaacagtggataaaagacttttctgtaaacaactccagtaataaatatcatgaacta

SEQ ID NO: 1250 - DNA, 815 bp, Homo sapiens
gcggcgttgtagttaagctcgtgtaacggcggcggtgtcggcagctgctgtagcgaagagagtttggcgcgatgtctcacaccattttgctggtacagcctaccaagaggccagaaggcagaacttatgctgactacgaatctgtgaatgaatgcatggaaggtgtttgtaaaatgtatgaagaacatctgaaaagaatgaatcccaacagtccctctatcacatatgacatcagtcagttgtttgatttcatcgatgatctggcagacctcagctgcctggtttaccgagctgatacccagacataccagccttataacaaagactggattaaagagaagatctacgtgctccttcgtcggcaggcccaacaggctgggaaataattgtgttggaagcactgggggggttggggtgggcttggaacacaggtgtgtacagcgtgctgtagtggaagttttgtatcatagtaatcctgtttccactttgttatactctagccaagattgactgtattagatgaaatgtgaggatcttgttcaatcggaaacccccgttacctcctctttttctttctctttcttttttttttttttacttaaacatttttatgatgatttagatggaagttgttcttcgtcacttaatgttggttccagtccttcaactgttcatatctactttataacattcacatactaacccttcttcaagatggggtggggggtggaaatgcagtttagccatgtcctcaagataaagtcttggtaaaaataaataaatgtcctttagttataaaaaaaaaaaaaaaaaaa

SEQ ID NO: 1251 - DNA, 2788 bp, Homo sapiens
aagaacgcccccaaaatctgtttctaattttacagaaatcttttgaaacttggcacggtattcaaaagtccgtggaaagaaaaaaaccttgtcctggcttcagcttccaactacaaagacagacttggtccttttcaacggttttcacagatccagtgacccacgctctgaagacagaattagctaactttcaaaaacatctggaaaaatgaagacttgggtaaaaatcgtatttggagttgccacctctgctgtgcttgccttattggtgatgtgcattgtcttacgcccttcaagagttcataactctgaagaaaatacaatgagagcactcacactgaaggatattttaaatggaacattttcttataaaacattttttccaaactggatttcaggacaagaatatcttcatcaatctgcagataacaatatagtactttataatattgaaacaggacaatcatataccattttgagtaatagaaccatgaaaagtgtgaatgcttcaaattacggcttatcacctgatcggcaatttgtatatctagaaagtgattattcaaagctttggagatactcttacacagcaacatattacatctatgaccttagcaatggagaatttgtaagaggaaatgagcttcctcgtccaattcagtatttatgctggtcgcctgttgggagtaaattagcatatgtctatcaaaacaatatctatttgaaacaaagaccaggagatccaccttttcaaataacatttaatggaagagaaaataaaatatttaatggaatcccagactgggtttatgaagaggaaatgcttgctacaaaatatgctctctggtggtctcctaatggaaaatttttggcatatgcggaatttaatgatacggatataccagttattgcctattcctattatggcgatgaacaatatcctagaacaataaatattccatacccaaaggctggagctaagaatcccgttgttcggatatttattatcgataccacttaccctgcgtatgtaggtccccaggaagtgcctgttccagcaatgatagcctcaagtgattattatttcagttggctcacgtgggttactgatgaacgagtatgtttgcagtggctaaaaagagtccagaatgtttcggtcctgtctatatgtgacttcagggaagactggcagacatgggattgtccaaagacccaggagcatatagaagaaagcagaactggatgggctggtggattctttgtttcaacaccagttttcagctatgatgccatttcgtactacaaaatatttagtgacaaggatggctacaaacatattcactatatcaaagacactgtggaaaatgctattcaaattacaagtggcaagtgggaggccataaatatattcagagtaacacaggattcactgttttattctagcaatgaatttgaagaataccctggaagaagaaacatctacagaattagcattggaagctatcctccaagcaagaagtgtgttacttgccatctaaggaaagaaaggtgccaatattacacagcaagtttcagcgactacgccaagtactatgcacttgtctgctacggcccaggcatccccatttccacccttcatgatggacgcactgatcaagaaattaaaatcctggaagaaaacaaggaattggaaaatgctttgaaaaatatccagctgcctaaagaggaaattaagaaacttgaagtagatgaaattactttatggtacaagatgattcttcctcctcaatttgacagatcaaagaagtatcccttgctaattcaagtgtatggtggtccctgcagtcagagtgtaaggtctgtatttgctgttaattggatatcttatcttgcaagtaaggaagggatggtcattgccttggtggatggtcgaggaacagctttccaaggtgacaaactcctctatgcagtgtatcgaaagctgggtgtttatgaagttgaagaccagattacagctgtcagaaaattcatagaaatgggtttcattgatgaaaaaagaatagccatatggggctggtcctatggaggatacgtttcatcactggcccttgcatctggaactggtcttttcaaatgtggtatagcagtggctccagtctccagctgggaatattacgcgtctgtctacacagagagattcatgggtctcccaacaaaggatgataatcttgagcactataagaattcaactgtgatggcaagagcagaatatttcagaaatgtagactatcttctcatccacggaacagcagatgataatgtgcactttcaaaactcagcacagattgctaaagctctggttaatgcacaagtggatttccaggcaatgtggtactctgaccagaaccacggcttatccggcctgtccacgaaccacttatacacccacatgacccacttcctaaagcagtgtttctctttgtcagactaaaaacgatgcagatgcaagcctgtatcagaatctgaaaaccttatataaacccctcagacagtttgcttattttattttttatgttgtaaaatgctagtataaacaaacaaattaatgttgttctaaaggctgttaaaaaaaagatgaggactcagaagttcaagctaaatattgtttacattttctggtactctgtgaaagaagagaaaagggagtcatgcattttgctttggacacagtgttttatcacctgttcatttgaagaaaaataataaagtcagaagttcaaaaaaaaaa

SEQ ID NO: 1252 - DNA, 5275 bp, Homo sapiens
tctcttcccctctccccttctcttccccgaggctatgtccacccggtgcggcgaggcgggcagagccagaggcacgcagccgcacaggggctacagagcccagaatcagccctacaagatgcacttaggacccccgcggctggaagaatgagcttgtccttcctcctcctcctcttcttcagccacctgatcctcagcgcctgggctcacggggagaagcgtctcgcccccaaagggcaacccggacccgctgccactgataggaaccctataggctccagcagcagacagagcagcagtagcgctatgtcttcctcttctgcctcctcctcccccgcagcttctctgggcagccaaggaagtggcttggagcagagcagtttccagtggagcccctcggggcgccggaccggcagcctctactgcagagtgggcatcggtttccatctgcagatctacccggatggcaaagtcaatggatcccacgaagccaatatgttaagtgttttggaaatatttgctgtgtctcaggggattgtaggaatacgaggagttttcagcaacaaatttttagcgatgtcaaaaaaaggaaaactccatgcaagtgccaagttcacagatgactgcaagttcagggagcgttttcaagaaaatagctataatacctatgcctcagcaatacatagaactgaaaaaacagggcgggagtggtatgttgccctgaataaaagaggaaaagccaaacgagggtgcagcccccgggttaaaccccagcatatctctacccattttcttccaagattcaagcagtcggagcagccagaactttctttcacggttactgttcctgaaaagaaaaatccacctagccctatcaagtcaaagattcccctttctgcacctcggaaaaataccaactcagtgaaatacagactcaagtttcgctttggataatattaatcttggccttgtgagaaaccattctttcccctcaggagtttctataggtgtcttcagagttctgaagaaaaattactggacacagcttcagctatacttacactgtattgaagtcacgtcatttgtttcagtgtgactgaaacaaaatgttttttgataggaaggaaactggaattctttgtactaatacagggagcacactccttcagttcagcaagacataaagccttttgctttatgcttgagggatatttagaactttgtattttcggaaagttaaataacagggactacgtatttttctgacttttacagattaacctgaaagaacatacatgatacatttttatttttggtttccaaagaatattttgatgcagataaaatattttgttaacttttgtttttttttgtttgttttcttaaaagtacctctgcattgagcatattttcttacttttattattttaattaatatgacataagcaatcattttatgctgtttatgaattataaatgtgtttatagctcatttgtaatatggaaatcttttacatttttcctattcactgcacttttttattgtttttatttctagccatacctcagataatatgtttagttttacattttaaaatgtttaaattctctttcacagcaccaaaggctcagcttggatttgtgtgtatgtgtatgtcaattcatgacattatgtggaatcctaaacctttggtggctgggatatgatgggttagaagcaaggagaaaatataaggactttttgatggaattaaatgtgggaggtaaggaaaaggatttagaggtaaaagtacactaagtttgcaacatttattgagatctaagtctgtcttgccttcatttctctttttatctcccccttgccctcattcttgaacagctggaggaatacattttattctgtccatgaagcatacactatgaaattcaagtgcttaaaaatacttctatgactctctgctatcccactgtatagatccacagggagcaaacacttagaaatgatagagaactgaaggagatcaatggtttaacagttatccatgccaagtcccattgtcagaaatattcttattactcagtcaaacactctttgagcttcccttcctaaaggtaaccattccagtgaatagatgtgcccttttataaggaaacttctgatgtttattaaaaaaactggccttttgatagaggtaacttaatttgggaatttgttgtgttgaaatggcatttaatttcaacctaaatactgactgctggacataaatcacagaaaatttaacttaagaaaatttacaaaatttattctcaggtaatcattttaataaagttctgcaaaatacacgtttatcttacattcagaaatgtggcaaaaaaggcatagctaaaggctaaacatatggctttagtagtaacaaaagggttcatagaaacttcatggtttgcatttaaacatgtttaaagtgtacttataaactatttttttcttaaagcaaactatgatttattttggtgcacaaatacaaagtggaaacttaccaaaattgaactagctaccatataagcagattgctttaatttgatgggaaaatagtacacacatatatataacaaataatatattaaaaaacccatccatcaactaaaacattatatgtatacatcagtatagtgttttattataaagccaattatctgattaagcattctttccactgaatgcataatgtttaaatagcataaaatgaaatgctacaaaaattgaactaatttatactttaaagtatttctgggttaaatgaaacaatgaaattttttagtatgttcaactctcatccaaatggcatatgaccctgtttacacagcctaaagctaaaaatattactctagtttattctaatctattgttaagtattgtgcactgtataccaagttcttagggcacatgaaaaattttagctgccaaacaggaactagtaaacatatgttcctaataagtgaagggaaagataataatgatggtcaacaataagccacgtcaatgcataagttgtataggctaaatgttgcttgtaggctacattaaactcaaatgtaatagttatcttatactcctggtttgatttgattagcatattaacgtgaaagtaggatagctactaaatatatattatgcaagtcaggaatcattaatttcaaaatttaaagccatgctaaaattaaaaagaaaatattaaattacacaattacacttgtctttactggccatacaaaatgattttttttttttttttgagacagagtcttgctctgtcaccaggctggagtgcagtggcatgatctcggctcactgcaacctccaactccctggtttaagggattctcctgcctcagcctcccaagtagctgggattacagactcatgccaccacgccagctaatttttgtatttttagtagagacggggtttcaccatgttggtcaggatggtctcaatcctggcctcttgatagtcctgacctcatgatctgcccacctcggcctccccaaagtgctgggattacaggtacaatgatgtataattaatgcttagtgaagcataaagttacctacatcaattaattaaatgaacttatgtacagaaaacatgtataaatataagtctatactaatgcttacaactttctaagagggttcttgcttatgtagctttttattattttaagtaactagaaccaccaaatatcaaataaaattatttggttatggttatgttcatctaaacacaacaataacttttatattaatatttaggagtctattttgtctataggtgacaaacatctccagactaacatgtcagttttatcaattatattatgtttaattatttaagatttctttatgtggaacatctatagagataaatagaaattttcaataagatgtagtaacactgtgatttatctttcaagagtctctcttcacttccttctaaagagactaatttgagagtacaggtgcatattaattttcttggttctttcagctgaattatattggtccagaagttcaaaatcatgtgacaataataagggatactgacagaagttatttccaagtttgtgtatatattataaaaattacatatataaaactaaggcttttatttctgttatttttaagcttttatttcttgtagctaaaaataaaacatcataaatcttcttattaaatcaatcttgtaaatagaaaatgtaataactttcttaccattaacatttttttacccttccatagaagggagggaataaatcatgacttatcccattttcaataacaaaacgaactatggcactaaccaaaaacttgcattctggcataatttttacagttgcagagaattgtttctgggctcattaaaaaaagtagtattgcagacattgctgcaatgggaagcagacaataacttcttaaaggaattctacacctcctttaagatttacttaattgctacatctaaattctgataatttaaaatccattttaggtgataaaattttttaaaagttttgaaggaaacctctggataaatggacaaggcctaatttttttttgtagtcaatccaactgtactggccaatttttgaaataagattatatgattaggtattagcagagacaaagagttacctcctccatcttactctgccctatttgaaagtctcaggggagaaaagggaacaagatgctgatccaacctgagtggagtcaggtgaggcatctttacatctaagaatttttttttaaattttattattattatacttcaagttctagggtacatgtccacaatgcacatgtctgtcacacatgcacacatgtgccatgctggtgtgctgcacccaccaacctgtcatccagcattaggtatatctcctaatgctatccctcccctctccacccaccccacagcaggccccggtatgtgatgttccccttcgtgtgtccatgtgttcttattgttcaattcccacctatgagtgagaatatgtggtgtttggtttttggtccttgcaacagtttgctgagaatgatggtttccagcttcatccatgtccctacaaagaacatgaactcatcattttttatggctgcatagtattccatggtgtatatgtgccacattttcttaatccagtctatcattgttggacatttgggttggttccaagtctttgctattgtgaatagtgctgcaataaacatatgtgtg

SEQ ID NO: 1253 - DNA, 4447 bp, Homo sapiens
atgcggcggcgctcgcggatgctgctctgcttcgccttcctgtgggtgctgggcatcgcctactacatgtactcggggggcggctctgcgctggccgggggcgcgggcggcggcgccggcaggaaggaggactggaatgaaattgaccccattaaaaagaaagaccttcatcacagcaatggagaagagaaagcacaaagcatggagaccctccctccagggaaagtacggtggccagactttaaccaggaagcttatgttggagggacgatggtccgctccgggcaggacccttacgcccgcaacaagttcaaccaggtggagagtgataagcttcgaatggacagagccatccctgacacccggcatgaccagtgtcagcggaagcagtggcgggtggatctgccggccaccagcgtggtgatcacgtttcacaatgaagccaggtcggccctactcaggaccgtggtcagcgtgcttaagaaaagcccgccccatctcataaaagaaatcatcttggtggatgactacagcaatgatcctgaggacggggctctcttggggaaaattgagaaagtgcgagttcttagaaatgatcgacgagaaggcctcatgcgctcacgggttcggggggccgatgctgcccaagccaaggtcctgaccttcctggacagtcactgcgagtgtaatgagcactggctggagcccctcctggaaagggtggcggaggacaggactcgggttgtgtcacccatcatcgatgtcattaatatggacaactttcagtatgtgggggcatctgctgacttgaagggcggttttgattggaacttggtattcaagtgggattacatgacgcctgagcagagaaggtcccggcaggggaacccagtcgcccctataaaaacccccatgattgctggtgggctgtttgtgatggataagttctattttgaagaactggggaagtacgacatgatgatggatgtgtggggaggagagaacctagagatctcgttccgcgtgtggcagtgtggtggcagcctggagatcatcccgtgcagccgtgtgggacacgtgttccggaagcagcacccctacacgttcccgggtggcagtggcactgtctttgcccgaaacacccgccgggcagcagaggtctggatggatgaatacaaaaatttctattatgcagcagtgccttctgctagaaacgttccttatggaaatattcagagcagattggagcttaggaagaaactcagctgcaagcctttcaaatggtaccttgaaaatgtctatccagagttaagggttccagaccatcaggatatagcttttggggccttgcagcagggaactaactgcctcgacactttgggacactttgctgatggtgtggttggagtttatgaatgtcacaatgctgggggaaaccaggaatgggccttgacgaaggagaagtcggtgaagcacatggatttgtgccttactgtggtggaccgggcaccgggctctcttataaagctgcagggctgccgagaaaatgacagcagacagaaatgggaacagatcgagggcaactccaagctgaggcacgtgggcagcaacctgtgcctggacagtcgcacggccaagagcgggggcctaagcgtggaggtgtgtggcccggccctttcgcagcagtggaagttcacgctcaacctgcagcagtaggagggtccgggaggccctgccgtcctgtctcctgcaccattgggtggagtctggtgatcgcattattgattatgtttcttaaactttctgcgaaactaatatacctcagtattccatcatggtctgaaagtcaaacttcggcaaggcacggacgactgtgcagacacatcagcggcaagaagcgagaactgccctccccctcctctcggtgcagccagccgggcccccttccccaggccggagcgcccctcttccttccagctttcacttctgccggtccgcaactgagtgacacccagcgacaaccgactggggagtggtagaagcaactgaacggatgcgtgcgagctgaggacagggcgggaggaggggcacacatgccccaggggagcgaggagaactcttgaaatctccattttcaatcccttcgaaatcacgtatggtttccacaaagccgagtcgtgtcacgtggcaggtttacgtcaatagtccctctctctgctcctccattcgcaagtgtcttcctgggccagactcccctccccctcatgtacttgctatattgaggatgaagttttctatggtgggacactaaatataaagctatatagagaaagaatgtacggtcagttccctatggtttctgtagatcatcgtcatcttgtatattccccacaaagccgttcgcagcttccgggagaaggggccagagcccggtatggggcaagttctctaacagagggaggaggtggcctttgtgtcccctggaggcccccggatccagccagttggtgctactgctgtggccagctggggggcttcctccagaccaccggcctcggccccggcatccctgttgggcgtcagcctgagagtccctactgtgcgtcagaatccaccttgcgtgctgtgcgtatctgtgaacctgggagacggttacttattttgacagatatcactttgggtctttttacattaaatttcttttctctaaggaatataagacataccccatagctctgtgtgagccagcaataccgctgccccctggcgacagggcagaccaatgatgccaggcagctgtcacacgctagtattggcttcattgtgatctgagccctgcacgctgggccttcagaattaatggccagcagtgtcagggatgagcccgtcagccagggcacaggcctggctcacagtcctgcacacctgctggcctgggggagctccagccaggcagcgagtcctgccccgcccgcagctccctcccacaccccgcctggccaagatgactgcttcagggggctttggggaaagaattaggaagggtcagaaccaaacaatacctgctcatttacactgaggattcagggcgggagacaggagccttggggtcctgttaaaccacagacagttatgaactgaaagtcataacggggagaggtgcctggcttctacctgggtgctcaggaatgttcctcctcacccctgccactctgtggtcggtgccctgcttcctcctccactcctggccgccttctccagcgccgcacacacagatgctcagtctcagagaggctggcacggcctggcagtctgagaaaatcgtcagttagccactgcaggccctcggtgggacagcggcggccttggattaggagccacctgggagtgtgccggtgccatgctcctccctgtgtcttgtatgaaagggccactgtgtgtcttcctccccggcgggagcccacatgttgcactgtaggacagcggcccgaagtggaagcctggctggaggctgccctataggtctctctccgcctcccctgccatgcaaccagatgtgtgtgaatgggccacgtgcccccacgctggatactccgccacgcttctgtctttcacggtgggcgctcggggggagctgagaaaaccccttagtactgtgcgagctgtggagtgcaggccagagcagggtgtgcgtagcccccagcacccaggttcttctgtcagaccctgtgacctgcgagctgctactactgtaaggagggaaatggatgaatctggctcgttttaaaatcacgttttctgacgaatcctttgccccttcacctttaccccgcccgcacccctaggccctctcagccttcctatcatcccacgtgtctacccagacccttgtgcggcccatgccctgggggcggcgtcctgtccctgagctgggaggcggctttggatggtccgggcgtcaagagcaggggtgggccggggaggggtcctttgcggtgagctatgtttacattgacacagtgtgccaaagtgacttactgcggttgcgttagtttctgtcatcaggacactatctcaccctcccactcctgtttttaaaactcagaattctttcctaagagcccttcgaagcaaagcgtgccgaagttagttgtcttctctgtgctggtcctttcttatgtcctcataaaagctcagatgatggtatctgtgagtatgttttgcaaattcaaaatatagtttggtaattttttttgccagttgatttttaaaaagaactgctgtacagagctagtactttgtccattttatgaatggaaaccatccttgaaaattgtttaacttaaataaagagaagatactttctagataccgctctttgctggccagagtctgtcctggtgtgtgaaggctgggtggggtgggtgtggggactgggattggggtc

SEQ ID NO: 1254 - DNA, 3735 bp, Homo sapiens
gctgtttgaaattgtcattcagaagatggtggaccgctggtcaggctccattgaggctggagtgactgctattcggcctgaagacctggaattccccaacaccatgacagacattgactatgacacatggatgctgagtggtacagccatcatgcaagacggtaacacgatgcgcaacaattatgggtgtgacctggatgcgctgggcacaggtgcacgcattggcatgatgcgaactgccaagggcgacctgcactacttcatcaacggccaggaccaaggcgctgcctgctcgggcctgcctccgggtaaagaggtgtatgcggtagtcgatctctatggccagtgtgtccaagtgtccatcaccaatgccaccggccccatggacaacagcctggcgaccagcaacactgccaccgagaagtccttcccactgcactccccagtggctggcgtggctcaccgattccacagtacttgcggcaagaacgtcactctagaggaggatggcacgagggcagtgcgtgccgctggctatgctcatggccttgtcttcagtaccaaggagctgagggctgaggaagtctttgaggtgaaagtggaagagctagatgagaagtgggcaggttccctgcggctggggctgaccacactagcaccgggggagatgggacccggggcaggcggtggtggcccagggctgcctccttccctgccagagctccggacgaagaccacttggatggtatccagctgtgaagtgaggcgtgatgggcagctccagaggatgaactatggccggaacctagagaggctgggggtggggagccgtgtgggtgttcgtcggggggcagatgacacgatgcacatcctggtggatggagaggatatggggcctgcagccactggcattgccaagaacgtgtgggctgtgttggatctctacgggccagtccgcggtgtgtcaattgtcagttccacgagactggaggagtcagaaggcacccagcctccttcccccagttcagacaccggcagtgagggcgaggaggatgacgagggcgaggagcatggcctgggaggccagaatgaagtgggtattatacccaccaccctcgagttcctggagaaccatgggaagaatcttcccttgtcctgggagtcatcacctgcgcgcctgagaggctcaacttccctgcttctgcctgtgccctcaaacgggcagcctggctgctgcggggccgtggggtcttccacaacggtctcaagatctgcgagaagtttgggcccaatctggacacgtgccctgaaggcaccatcctgggactgcggctggacagctctggggggctgcatcttcatgttaatggggtggaccagggggtagctgtgccagatgtgccccagccctgccatgcgcttgtggacctctatgggcagtgtgagcaggtgacaatcgtgaaccctgagccaggggctgccagtgggaaaagtgctggaacccaaggggacatggagaaagcagacatggtggacggtatcaaagagagtgtgtgctggggtccaccacctgccgctagtcctctaaagagctgcgagtaccatgccctttgctctcgcttccaagaactcctgctgcttcctgaagattatttcatgcctccgccaaagcgaagcctgtgctactgtgagtcttgccggaagctgcgaggagacgaggcccacaggcgcagaggggagcctccccgggaatatgcactgccctttggctggtgcaggttcaacctcagagtgaatccccgcctggaggctgggacactaaccaagaagtggcacatggcatatcacgggagcaatgttgccgctgtacggagagtgctggaccgaggggagctgggagcaggtactgcctccatcctgagctgccgtcctttgaagggagaacctggggtagggttcgaggagcctggcgagaactgtgcacctcctcgggaggagcagccccctcctgtgctgctttccccctcccttcaatatgctggggcggagaccctggcctccaaagtgcaattccgggaccccaaatcccagcggacgcaccaggctcaggtggcgttccagaggagtctctccctgtgcccacatgaagctgctttttccggggccaccgggcgggagtggggaagggtgggcgcacggaagatgggggcctctgtacagttgttactgactctgatttctaaggagccaataaacaccgtctcagagcctccgcctcggcctctctctcgcgcgcccctctccggagcccgcgtcccctggggtgccaccaggtgggcccgcgaaattaaagagagctgaggatgccaaggccagtctgcagccgtcgtcgctcacgttcccggcgacggggtttgtacgccgcgggcacccgtcgcagcgcgcttccgccttctttcacctgtgaggtcggccgccgccgtgactccggaaggactcggccgggccgccggatgtgacgcaggggccagggcgcgtcggagccgctgagaaagcgcagagaaggcgggccccgtctgaggtctggcagtcagagacagccgggcgcccacggcccgagcgcccacggcagcaccatgcccgcactcctggagcgccccaagctttccaacgccatggccagggcgctgcaccggcacattatgatggagcgggagcgcaagcggcaggaggaagaagaggtggataagatgatggaacagaagatgaaggaagaacaggagagaaggaagaaaaaggagatggaagagagaatgtcattagaggagaccaaggaacaaattctgaagttggaggagaagcttttggctctacaggaagagaagcaccagcttttcctgcagctcaagaaagttttacatgaggaagaaaaacggaggcgaaaggaacagagtgacctgaccaccctgacatcagctgcataccagcagagcctgactgttcacacaggaactcatctcctcagcatgcaggggagccctggaggacacaatcgcccaggcaccctcatggcagctgacagagccaaacaaatgtttggaccccaagtgcttacgacccggcactacgtgggctcagcagctgcttttgcagggacaccagagcatggacaattccaaggcagtcctggtggtgcctatgggactgctcagcccccacctcactatgggcccacacagccagcttatagtcctagtcagcagctcagagctccttcggcattccctgcagtgcagtacctatctcagccacagccacagccctatgctgtgcatggccactttcagcccactcagacaggtttcctccagcctggtggtgccctgtccttgcaaaagcagatggaacatgctaaccagcagactggcttctccgactcatcctctctgcgccccatgcacccccaggctctgcatccagcccctggactccttgcttccccccagctccctgtgcagatgcagccagcaggaaagtcgggctttgcagctaccagccaacctggccctcggctccccttcatccaacacagccagaacccgcgattctaccacaagtgaccatcagattatatcttcaacaccacaccccccaccccatcgtgggtgagggtatcccctgtgtgtcccaggccaataaaatctacctgccactgaaaaaaaaaaaaaaaaaaaa

SEQ ID NO: 1255 - DNA, 990 bp, Homo sapiens
cccatcccgtgggtggccggcgacaagatggcagcagcgtgtcggagcgtgaagggcctggtggcggtaataaccggaggagcctcgggcctgggcctggccacggcggagcgacttgtggggcagggagcctctgctgtgcttctggacctgcccaactcgggtggggaggcccaagccaagaagttaggaaacaactgcgttttcgccccagccgacgtgacctctgagaaggatgtgcaaacagctctggctctagcaaaaggaaagtttggccgtgtggatgtagctgtcaactgtgcaggcatcgcggtggctagcaagacgtacaacttaaagaagggccagacccataccttggaagacttccagcgagttcttgatgtgaatctcatgggcaccttcaatgtgatccgcctggtggctggtgagatgggccagaatgaaccagaccagggaggccaacgtggggtcatcatcaacactgccagtgtggctgccttcgagggtcaggttggacaagctgcatactctgcttccaaggggggaatagtgggcatgacactgcccattgctcgggatctggctcccataggtatccgggtgatgaccattgccccaggtctgtttggcaccccactgctgaccagcctcccagagaaagtgtgcaacttcttggccagccaagtgcccttccctagccgactgggtgaccctgctgagtatgctcacctcgtacaggccatcatcgagaacccattcctcaatggagaggtcatccggctggatggggccattcgtatgcagccttgaagggagaaggcagagaaaacacacgctcctctgcccttcctttccctggggtactactctccagcttgggaggaagcccagtagccattttgtaactgcctaccagtcgccctctgtgcctaataaagtctctttttctcacaaaaaaaaaaaaaaaaaaaaaaaaaaaaaaaaaaa

SEQ ID NO: 1256 - DNA, 2376 bp, Homo sapiens
gaggaggagtggggaccgggcggggggtggaggaagaggcctcgcgcagaggagggagcaattgaatttcaaacacaaacaactcgacgagcgcgcacccaccgcgccggagccttgccccgatccgcgcccgccccgtccgtgcggcgcgcgggcggagacgccgtggccgcgccggagctcgggccgggggccaccatcgaggcgggggccgcgcgagggccggagcggagcggcgccgccaccgccgcacgcgcaaacttgggctcgcgcttcccggcccggcgcggagcccggggcgcccggagccccgccatgtcgcgatccaaccggcagaaggagtacaaatgcggggacctggtgttcgccaagatgaagggctacccacactggccggcccggattgacgagatgcctgaggctgccgtgaaatcaacagccaacaaataccaagtcttttttttcgggacccacgagacggcattcctgggccccaaagacctcttcccttacgaggaatccaaggagaagtttggcaagcccaacaagaggaaagggttcagcgaggggctgtgggagatcgagaacaaccctactgtcaaggcttccggctatcagtcctcccagaaaaagagctgtgtggaagagcctgaaccagagcccgaagctgcagagggtgacggtgataagaaggggaatgcagagggcagcagcgacgaggaagggaagctggtcattgatgagccagccaaggagaagaacgagaaaggagcgttgaagaggagagcaggggacttgctggaggactctcctaaacgtcccaaggaggcagaaaaccctgaaggagaggagaaggaggcagccaccttggaggttgagaggccccttcctatggaggtggaaaagaatagcaccccctctgagcccggctctggccgggggcctccccaagaggaagaagaagaggaggatgaagaggaagaggctaccaaggaagatgctgaggccccaggcatcagagatcatgagagcctgtagccaccaatgtttcaagaggagcccccaccctgttcctgctgctgtctgggtgctactggggaaactggccatggcctgcaaactgggaacccctttcccaccccaacctgctctcctcttctactcacttttcccactccaagcccagcccatggagattgacctggatggggcaggccacctggctctcacctctaggtccccatactcctatgatctgagtcagagccatgtcttctccctggaatgagttgaggccactgtgttccttccgcttggagctattttccaggcttctgctggggcctgggacaactgctcccacctcctgacacccttctcccactctcctaggcattctggacctctgggttgggatcaggggtaggaatggaaggatggagcatcaacagcagggtgggcttgtggggcctgggaggggcaatcctcaaatgcggggtgggggcagcacaggagggcggcctccttctgagctcctgtcccctgctacacctattatcccagctgcctagattcagggaaagtgggacagcttgtaggggaggggctcctttccataaatccttgatgattgacaacacccatttttccttttgccgaccccaagagttttgggagttgtagttaatcatcaagagaatttggggcttccaagttgttcgggccaaggacctgagacctgaagggttgactttacccatttgggtgggagtgttgagcatctgtccccctttagatctctgaagccacaaataggatgcttgggaagactcctagctgtcctttttcctctccacacagtgctcaaggccagcttatagtcatatatatcacccagacataaaggaaaagacacattttttaggaaatgtttttaataaaagaaaattacaaaaaaaaattttaaagacccctaaccctttgtgtgctctccattctgctccttccccatcgttgcccccatttctgaggtgcactgggaggctccccttctatttggggcttgatgactttctttttgtagctggggctttgatgttccttccagtgtcatttctcatccacataccctgacctggccccctcagtgttgtcaccagatctgatttgtaacccactgagaggacagagagaaataagtgccctctcccaccctcttcctactggtctctctatgcctctctacagtctcgtctcttttaccctggcccctctcccttgggctctgatgaaaaattgctgactgtagctttggaagtttagctctgagaaccgtagatgatttcagttctaggaaaataaaacccgttgattact

SEQ ID NO: 1257 - DNA, 1732 bp, Homo sapiens
ttttgtgaagagacgaagactgagcggttgtggccgcgttgccgacctccagcagcagtcggcttctctacgcagaacccgggagtaggagactcagaatcgaatctcttctccctccccttcttgtgagatttttttgatcttcagctacattttcggctttgtgagaaaccttaccatcaaacacgatggccagcaacgttaccaacaagacagatcctcgctccatgaactcccgtgtattcattgggaatctcaacactcttgtggtcaagaaatctgatgtggaggcaatcttttcgaagtatggcaaaattgtgggctgctctgttcataagggctttgccttcgttcagtatgttaatgagagaaatgcccgggctgctgtagcaggagaggatggcagaatgattgctggccaggttttagatattaacctggctgcagagccaaaagtgaaccgaggaaaagcaggtgtgaaacgatctgcagcggagatgtacggctcctcttttgacttggactatgactttcaacgggactattatgataggatgtacagttacccagcacgtgtacctcctcctcctcctattgctcgggctgtagtgccctcgaaacgtcagcgtgtatcaggaaacacttcacgaaggggcaaaagtggcttcaattctaagagtggacagcggggatcttccaagtctggaaagttgaaaggagatgaccttcaggccattaagaaggagctgacccagataaaacaaaaagtggattctctcctggaaaacctggaaaaaatggaaaaggaacagagcaaacaagcagtagagatgaagaatgataagtcagaagaggagcagagcagcagctccgtgaagaaagatgagactaatgtgaagatggagtctgaggggggtgcagatgactctgctgaggagggggacctactggatgatgatgataatgaagatcggggggatgaccagctggagttgatcaaggatgatgaaaaagaggctgaggaaggagaggatgacagagacagcgccaatggaggatgactcttaagcacatagtggggtttagaaatcttatcccattatttctttacctaggcgcttgtctaagatcaaatttttcaccagatcctctcccctagtatcttcagcacatgctcactgttctccccatccttgtccttcccatgttcattaattcatattgccccgcgcctagtcccattttcacttcctttgacgctcctagtagttttgttaagtcttaccctgtaatttttgcttttaattttgatacctctttatgacttaacaataaaaaggatgtatggtttttatcaactgtctccaaaataatctcttgttatgcagggagtacagttcttttcattcatacataagttcagtagttgcttccctaactgcaaaggcaatctcatttagttgagtagctcttgaaagcagctttgagttagaagtatgtgtgttacaccctcacattagtgtgctgtgtggggcagttcaacacaaatgtaacaattatttttgtgaatgagagttggcatgtcaaatgcatcctctagaaaaataattagtgttatagtcttaagatttgttttctaaagttgatactgtgggatttttgtgaacagcctgatgtttgggaccttttttcctcaaaataaacaagtccttattaaaccaggaatttggag

SEQ ID NO: 1258 - DNA, 2584 bp, Homo sapiens
tggcggcggcggcggcggttgtcccggctgtgccggttggtgtggcccgtcagcccgcgtaccacagcgcccgggccgcgtcgagcccagtacagccaagccgctgcggccgggtccggcgcgggcggcgcgcgcagacggagggcggcggccgcggccagggcggcccgtgggaccgcgggcccccggcgcagcgctgcccggctcccggccctgccggcctcctcccttggcgccgcggccatggcggccagcgcgaagcggaagcaggaggagaagcacctgaagatgctgcgggacatgaccggcctcccgcgcaaccgaaagtgcttcgactgcgaccagcgcggccccacctacgttaacatgacggtcggctccttcgtgtgtacctcctgctccggcagcctgcgaggattaaatccaccacacagggtgaaatctatctccatgacaacattcacacaacaggaaattgaattcttacaaaaacatggaaatgaagtctgtaaacagatttggctaggattatttgatgatagatcttcagcaattccagacttcagggatccacaaaaagtgaaagagtttctacaagaaaagtatgaaaagaaaagatggtatgtcccgccagaacaagccaaagtcgtggcatcagttcatgcatctatttcagggtcctctgccagtagcacaagcagcacacctgaggtcaaaccactgaaatctcttttaggggattctgcaccaacactgcacttaaataagggcacacctagtcagtccccagttgtaggtcgttctcaagggcagcagcaggagaagaagcaatttgaccttttaagtgatctcggctcagacatctttgctgctccagctcctcagtcaacagctacagccaattttgctaactttgcacatttcaacagtcatgcagctcagaattctgcaaatgcagattttgcaaactttgatgcatttggacagtctagtggttcgagtaattttggaggtttccccacagcaagtcactctccttttcagccccaaactacaggtggaagtgctgcatcagtaaatgctaattttgctcattttgataacttccccaaatcctccagtgctgattttggaaccttcaatacttcccagagtcatcaaacagcatcagctgttagtaaagtttcaacgaacaaagctggtttacagactgcagacaaatatgcagcacttgctaatttagacaatatcttcagtgccgggcaaggtggtgatcagggaagtggctttgggaccacaggtaaagctcctgttggttctgtggtttcagttcccagtcagtcaagtgcatcttcagacaagtatgcagctctggcagaactagacagcgttttcagttctgcagccacctccagtaatgcgtatacttccacaagtaatgctagcagcaatgtttttggaacagtgccagtggttgcttctgcacagacacagcctgcttcatcaagtgtgcctgctccatttggacgtacgccttccacaaatccatttgttgctgctgctggtccttctgtggcatcttctacaaacccatttcagaccaatgccagaggagcaacagcggcaacctttggcactgcatccatgagcatgcccacgggattcggcactcctgctccctacagtcttcccaccagctttagtggcagctttcagcagcctgcctttccagcccaagcagctttccctcaacagacagctttttctcaacagcccaatggtgcaggttttgcagcatttggacaaacaaagccagtagtaaccccttttggtcaagttgcagctgctggagtatctagtaatccttttatgactggtgcaccaacaggacaatttccaacaggaagctcatcaaccaatcctttcttatagccttatatagacaatttactggaacgaacttttatgtggtcacattacatctctccacctcttgcactgttgtcttgtttcactgatcttagctttaaacacaagagaagtctttaaaaagcctgcattgtgtattaaacaccaggtaatatgtgcaaaaccgagggctccagtaacaccttctaacctgtgaattggcagaaaagggtagcggtatcatgtatattaaaattggctaatattaagttattgcagataccacattcattatgctgcagtactgtacatatttttcttagaaattagctatttgtgcatatcagtatttgtaactttaacacattgttatgtgagaaatgttactggggaaatagatcagccacttttaaggtgctgtcatatatcttggaatgaatgacctaaaatcattttaaccattgctactggaaagtaacagagtcaaaattggaaggttttattcattcttgaatttttcctttctaaagagctcttctatttatacatgcctaaattcttttaaaatgtagagggatacctgtctgcataataaagctgatcatgttttgctacagtttgcaggtgaaaaaaaataaatattataaaataaaaaaaaaaaaaaagaaaaaaaaaa

SEQ ID NO: 1259 - DNA, 7878 bp, Homo sapiens
ctaaaaataccattaagtaatagtattagcttttgtattctgagattcaacagcagcagtcacttccctccactcctatgtgtatcccaggaccaccctgggcggggagggctgaggtcagggaggtctgaagctggtcctgggctccgggggtgacagtgatgaggaactgggtgcacacatgagtggggcagccgggcctggccagagaagcaacacacacgtgcacagacatgtttatccacatacacatgtgcacgcatgtgcacaaacacattgcaggcaggcatgttgacgcctcaggcagcggaggaccctgactctgggccctgctgacccgggcaaggcccattgtgatgcgtgccatgacctcagaatgtcactggtgcttagcacctatccgctctccagactgcgtctgtgttctacggcagttacacacacgcagtggtattcacaagcggttttgtggactcaaaggttttctccctgagaggcataacccaggccagctgattcatcagaatcaggtgagtgtgacctgctctcttccctccaggctgacttggggacagtggctatggtatgggcggtgttggcctctgggcagctacagaggagggtcatccctgagcactcaccgggcgcccgttctacactgcccatgtagacgattttctctttcgtcttcatggtggcttcgtagagtgggtgctgttcccaaatgtacccattcgacaggtgagccgtctggggtcagagaggcagtaactggcctgggaatccagacaagaccctgggttttgctctcagccctgctgtgtgccatgctagacttcaggcctcaaccctgagacctccctgctctagatcccaaatctgcccagatttccgatccaatgggcagagcctggccctggcagagacactgggatggatccactgtgggtggggaggagggaagggtcctcagaacacacctggggcctaagctgggtcttgatggtcactgtgggacccactggacacacacagtcccttgtctgggagtggcatggggagccttctgcccttgggcagttgtggaaagtgaaggagccctggagagctggctgaggggagactatcttcccttgtgttcaaaggggtccaggcactggggctctccccaagtatttcttattctgtctggcctcgctttccttttgccctgagtattctcaggagggacggtccatctagatgtcctccaggagcaaggacccactgttcttcatcagtgacccaggaaaatgaagccccctcctgtggggacagctcagaatggtggagtccacagtccctccctgagagacatggtttccatgagcacagtggctgctttggagacagtaatcattttcatccccaaaaccaaacacactcctgctcaaatggtgttattgctaaagcagcttcactggttagactgaagggccatggtagcccaagtgatgagcggggtagaatggagcagtcaggagagatcttgttccccgtaggaaactgggcatctctgtggccctgaacatcccaggaggccgatcgtacagagacctctggtgcctgaccgcagttcacatccacatccctggaatagaccatcacaggctcttcacccttggcaggtggacaccattcaacctgccggggcaggatggacatggtagagaatgcagatagtttgcaggcacaggagcggaaggacatacttatgaagtatgacaagggacaccgagctgggctgccagaggacaaggggcctgagcccgttggaatcaacagcagcattgatcgttttggcattttgcatgagacggagctgcctcctgtgactgcacgggaggcgaagaaaattcggcgggagatgacacgaacgagcaagtggatggaaatgctgggagaatgggagacatataagcacagtagcaaactcatagatcgagtgtacaagggaattcccatgaacatccggggcccggtgtggtcagtcctcctgaacattcaggaaatcaagttgaaaaaccccggaagataccagatcatgaaggagaggggcaagaggtcatctgaacacatccaccacatcgacctggacgtgaggacgactctccggaaccatgtcttctttagggatcgatatggagccaagcagagggaactattctacatcctcctggcctattcggagtataacccggaggtgggctactgcagggacctgagccacatcaccgccttgttcctcctttatctgcctgaggaggacgcattctgggcactggtgcagctgctggccagtgagaggcactccctgccaggattccacagcccaaatggtgggacagtccaggggctccaagaccaacaggagcatgtggtacccaagtcacaacccaagaccatgtggcatcaggacaaggaaggtctatgcgggcagtgtgcctcgttaggctgccttctccggaacctgattgacgggatctctctcgggctcaccctgcgcctgtgggacgtgtatttggtggaaggagaacaggtgttgatgccaataaccagcattgctcttaaggttcagcagaagcgcctcatgaagacatccaggtgtggcctgtgggcacgtctgcggaaccaattcttcgatacctgggccatgaacgatgacaccgtgctcaagcatcttagggcctctacgaagaaactaacaaggaagcaaggggacctgccacccccagccaaacgcgagcaagggtccttggcacccaggcctgtgccggcttcacgtggtgggaagaccctctgcaaggggtataggcaggcccctccaggcccaccagcccagttccagcggcccatttgctcagcttccccgccatgggcatctcgtttttccacgccctgtcctggtggggctgtccgggaagacacgtaccctgtgggcactcagggtgtgcccagcctggccctggctcagggaggacctcagggttcctggagattcctggagtggaagtcaatgccccggctcccaacggacctggatatagggggcccttggttcccccattatgattttgaacggagctgctgggtccgtgccatatcccaggaggaccagctggccacctgctggcaggctgaacactgcggagaggttcacaacaaagatatgagttggcctgaggagatgtcttttacagcaaatagtagtaaaatagatagacaaaaggttcccacagaaaagggagccacaggtctaagcaacctgggaaacacatgcttcatgaactcaagcatccagtgcgttagtaacacacagccactgacacagtattttatctcagggagacatctttatgaactcaacaggacaaatcccattggtatgaaggggcatatggctaaatgctatggtgatttagtgcaggaactctggagtggaactcagaagagtgttgccccattaaagcttcggcggaccatagcaaaatatgctcccaagtttgatgggtttcagcaacaagactcccaagaacttctggcttttctcttggatggtcttcatgaagatctcaaccgagtccatgaaaagccatatgtggaactgaaggacagtgatggccgaccagactgggaagtagctgcagaggcctgggacaaccatctaagaagaaatagatcaattattgtggatttgttccatgggcagctaagatctcaagtcaaatgcaagacatgtgggcatataagtgtccgatttgaccctttcaattttttgtctttgccactaccaatggacagttacatggacttagaaataacagtgattaagttagatggtactacccctgtacggtatggactaagactgaatatggatgaaaagtacacaggtttaaaaaaacagctgagggatctctgtggacttaattcagaacaaatcctactagcagaagtacatgattccaacataaagatttctcctcttcaccatctacaaatggaatgttcaccctaactaccaatggggacctacccaaaccaatattcatccccaatggaatgccaaacactgttgtgccatgtggaactgagaagaacttcacaaatggaatggttaatggtcacatgccatctcttcctgacagcccctttacaggttacatcattgcagtccaccgaaaaatgatgaggacagaactgtatttcctgtcacctcaggagaatcgccccagcctctttggaatgccattgattgttccatgcactgtgcatacccagaagaaagacctatatgatgcggtttggattcaagtatcctggttagcaagaccactcccacctcaggaagctagtattcatgcccaggatcgtgataactgtatgggctatcaatatccattcactctacgagttgtgcagaaagatgggatctcctgtgcttggtgcccacagtatagattttgcagaggctgtaaaattgattgtggggaagacagagctttcattggaaatgcctatattgctgtggattggcaccccacagcccttcaccttcgctatcaaacatcccaggaaagggttgtagataagcatgagagtgtggagcagagtcggcgagcgcaagccgagcccatcaacctggacagctgtctccgtgctttcaccagtgaggaagagctaggggaaagtgagatgtactactgttccaagtgtaagacccactgcttagcaacaaagaagctggatctctggaggcttccacccttcctgattattcaccttaagcgatttcaatttgtaaatgatcagtggataaaatcacagaaaattgtcagatttcttcgggaaagttttgatccgagtgcttttttggtaccacgagacccggccctctgccagcataaaccactcacaccccagggggatgagctctccaagcccaggattctggcaagagaggtgaagaaagtggatgcgcagagttcggctggaaaagaggacatgctcctaagcaaaagcccatcttcactcagcgctaacatcagcagcagcccaaaaggttctccttcttcatcaagaaaaagtggaaccagctgtccctccagcaaaaacagcagccctaatagcagcccacggactttggggaggagcaaagggaggctccggctgccccagattggcagcaaaaataagccgtcaagtagtaagaagaacttggatgccagcaaagagaatggggctgggcagatctgtgagctggctgacgccttgagccgagggcatatgcgggggggcagccaaccagagctggtcactcctcaggaccatgaggtagctttggccaatggattcctttatgagcatgaagcatgtggcaatggctgtggcgatggctacagcaatggtcagcttggaaaccacagtgaagaagacagcactgatgaccaaagagaagacactcatattaagcctatttataatctatatgcaatttcatgccattcaggaattctgagtgggggccattacatcacttatgccaaaaacccaaactgcaagtggtactgttataatgacagcagctgtgaggaacttcaccctgatgaaattgacaccgactctgcctacattcttttctatgagcagcaggggatagactacgcacaatttctgccaaagattgatggcaaaaagatggcagacacaagcagtacggatgaagactctgagtctgattacgaaaagtactctatgttacagtaaagctaccactctggctgctagacagcttggtggcgagggagatgactccttgtagctgatacttggcaaaagtgtcactgaaagacaagctaaatgtagttattttatcctgttagaacaaaaattctaattaaaatagttaacttgaagagtagaaacaattgtattttgaagtctcatacaagctgtctgatagagaactttcaggcagatcccaccattagcctgtaaacaaaaggtgtggcaccagccacctgggaccaaataagaattgaattgtgcttgtccagatatgaacaaatatgtagtgagtatagagtttaccaataatcataacaaatattaaagatttccttggagtcagaggaaaaaacaaacaattataatgttgtctagggacgacatgatacgctacctcctttttcctgaagttttattccattatattgacaagatggagaaagcaagatcatgaaggtgtgcaaatgattcttacggcatggacaaggatttttcaatttattttttaaactgtttccataccctttctttttcttgctttttgtttttgccattgtgtttacgtttgagacacaaccagtcattggtggcaggggcatagagtggtcagtctgaaagggaggctctcttaagagctatgtgccttccaaccagagggagacccagtagaaagaaaaacatcctgggaaatccagctaccagggccctcccagtggaggcatcttacatttaggctacttcaagtatcctcagaaatgtattctgcacccccggccccgcccatgctgagggaaggggagcagttgccaatatttgcaccatcttcacatgcacatgttgcaacaagagcttctgggaaggtaagcggcatcggagctagatcacgtttcacaattagtggttattcttttctgtgtttgttttgcactttaaaaaagagagaacacatgcaaatgaacttgcttgtgtgtatttgatggctctaagggctataaattacaaacaaaacacatcccagacattaggagttcataagtatatttaatgaaattggtggttttaggaagtcaactttagttttgctttgtttgcatgtccactggtttttttattttgatatttgtctttttttaaattttacagtagtcattgaaagttatgtttctttgcttacttcattttttccctctaattatttaagattggaacaaaagtataaatattatttatttgaggtagaatttttttcatgtagtttcttaatatatacttgaaggaaatgtttcaccttatttttggtctttgtttattcatttagaccctgcaagttgattctcattgccagattccattaccctttcttcctcataggtagtaattaccaatgtaactaagcatttgtgttctgatatctgaggccagtaactattaatatctagttctcagagcatttggaaaggttatcttaaatggctacctaaattgaaatccttttcagaaaaaatataattgcaagtaggtaggagtggcctaaattgtctaatgtaataaagtcagacaaaatgcacactttatagtttcaagattttcagtaaataaaatctgtccattcctacctggacatgtcccattaaaaagtggaagattttaaataatttctttacagatgttttatttaaacaggtagcacaatctactaatgttgtgtgatttgtgttatactggttgtaattaatttttttaattcatgaactagcggaaaatttattaaattaactattaactacattcaccttgtaaattactgtataaaacttgttgacaatgcactgactttagaaagatgttaatgtacataaatagagtgtaaataaaatagtgttgatgtactgaaatatgaactgtatcaaaagtattggtaattgtatatggggtgtacctgtttatctgttaactattatccaaacaaattaaatactgtggttgcctctatgtgctgtttttcctcatacaagtaaacacagaaagtcaaaaaaaaaaaaaaaaaaaaaa

SEQ ID NO: 1260 - DNA, 2444 bp, Homo sapiens
gcgttctcgggaagctgctgccgtagctgccgccgccgctaccaccgcgttcgggtgtagaatttggaatccctgcgccgcgttaacaatgaagcagagttcgaacgtgccggctttcctcagcaagctgtggacgcttgtggaggaaacccacactaacgagttcatcacctggagccagaatggccaaagttttctggtcttggatgagcaacgatttgcaaaagaaattcttcccaaatatttcaagcacaataatatggcaagctttgtgaggcaactgaatatgtatggtttccgtaaagtagtacatatcgactctggaattgtaaagcaagaaagagatggtcctgtagaatttcagcatccttacttcaaacaaggacaggatgacttgttggagaacattaaaaggaaggtttcatcttcaaaaccagaagaaaataaaattcgtcaggaagatttaacaaaaattataagtagtgctcagaaggttcagataaaacaggaaactattgagtccaggctttctgaattaaaaagtgagaatgagtccctttggaaggaggtgtcagaattacgagcaaagcatgcacaacagcaacaagttattcgaaagattgtccagtttattgttacattggttcaaaataaccaacttgtgagtttaaaacgtaaaaggcctctacttctaaacactaatggagcccaaaagaagaacctgtttcagcacatagtcaaagaaccaactgataatcatcatcataaagttccacacagtaggactgaaggtttaaagccaagggagaggatttcagatgacatcattatttatgatgttactgatgataatgcagatgaagaaaatatcccagttattccagaaactaatgaggatgttatatctgatccctccaactgtagccagtaccctgatattgtcatcgttgaagatgacaatgaagatgagtatgcacctgtcattcagagtggagagcagaatgaaccagccagagaatccctaagttcaggcagtgatggcagcagccctctcatgtctagtgctgtccagctaaatggctcatccagtctgacctcagaagatccagtgaccatgatggattccattttgaatgataacatcaatcttttgggaaaggttgagctgttggattatcttgacagtattgactgcagtttagaggacttccaggccatgctatcaggaagacaatttagcatagacccagatctcctggttgatcttttcactagttctgtgcagatgaatcccacagattacatcaataatacaaaatctgagaataaaggattagaaactaccaagaacaatgtagttcagccagtttcggaagagggaagaaaatctaaatccaaaccagataagcagcttatccagtataccgcctttccacttcttgcattcctcgatgggaaccctgcttcttctgttgaacaggcgagtacaacagcatcatcagaagttttgtcctctgtagataaacccatagaagttgatgagcttctggatagcagcctagacccagaaccaacccaaagtaagcttgttcgcctggagccattgactgaagctgaagctagtgaagctacactgttttatttatgtgaacttgctcctgcacctctggatagtgatatgccacttttagatagctaaatccccaggaagtggactttacatgtatatattcatcaaaatgatgaactatttattttaaagtatcatttggtactttttttgtaaattgctttgttttgtttaatcagatactgtggaataaaagcaccttttgcttttctcactaaccacacactcttgcagagctttcaggtgttactcagctgcatagttacgcagatgtaatgcacattattggcgtatctttaagttggattcaaatggccatttttctccaattttggtaaattggatatcttttttttacaaatacgaccattaacctcagttaaatttttgtttgttttcctgtttgatgctgtctatttgcattgagtgtaagtcatttgaactaatggtataactcctaaagcttctctgctccagttatttttattaaatatttttcacttggcttatttttaaaactgggaacataaagtgcctgtatcttgtaaaacttcatttgtttcttttggttcagagaagttcatttatgttcaaagacgtttattcatgttcaacaggaaagacaaagtgtacgtgaatgctcgctgtctgatagggttccagctccatatatatagaaagatcgggggtgggatgggatggagtgagccccatccagttagttggactagttttaaataaaggttttccggtttgtgtttttttgaaccatactgtttataaaataaatacaatgaatgttgagtactagtgg

SEQ ID NO: 1261 - DNA, 3059 bp, Homo sapiens
gccccccccccacgcctcctcccctcctcccgcccgcgcgtgctcccgcccctcgccgccgctcgctcgctcgccggccggcctccgctcggccccctccctcagctccggtgcgcggcggccgacgacccgcggcctgggcctcggcgcgccaccggcgcccgcgcggagcggcccgggggccctcacgcaggcccatggcggcggcgcggcgcgctctcgggccgggcaccacgcgggcgcggggccgggggcgcggggccgggggcgggtcccgccgggcgctgggccgtgggccgcctggagggccgcgagttcgagtatctgatgaagaagcgctcggtgaccatcggccgcaactcgtcgcagggctcggtggacgtgagcatgggccactcgagcttcatctcccggcgccacctcgagatcttcacgcccccgggcggcgcggccatggcggggccgctccggagctgccgcccgcgcagcccaggcccgacgccggcggcgacttctacctgcgctgcttgggcaagaacggggtattcgtggacggcgtgttccagaggcgcggggcgccgccgctgcagctgccgcgcgtgtgcacattcaggttcccgagcacaaacatcaagataacgttcactgccctgtccagcgagaagagagagaagcaggaggcgtctgagtctccagtgaaggccgtacagccacacatctcgcccctgaccatcaacattccagacaccatggcccacctcatcagccctctgccctcccccacgggaaccatcagcgctgcaaactcctgcccctccagcccccggggagcggggtcttcagggtacaaggtgggccgagtgatgccatctgacctcaatttaatggctgacaactcacagcctgaaaatgaaaaggaagcttcaggtggagacagcccgaaggatgattcaaagccgccttactcctacgcgcagctgatagttcaggcgattacgatggctcccgacaaacagctcaccctgaacgggatttatacacacatcactaaaaattatccctactacaggactgcggacaagggctggcagaattcaattcgccacaatctctctctgaatcgttatttcatcaaagtgccgcgttcccaggaagaaccaggcaaaggctcgttctggaggatagacccagcctctgaaagcaaattaatagaacaggcttttaggaaacgacggcctaggggcgtgccctgctttagaacccctctgggaccgctctcttctaggagtgccccagcctctcccaatcacgcgggagtgctgtctgctcactctagtggcgcccagacccctgagagcctgtcgagggaaggttcgccggcccccctggagcctgagcctggcgctgcacagcccaaactcgctgtcatccaggaagcccggtttgcccagagcgccccagggtcacctctgtccagtcagccagtcttaatcaccgtccagcggcagctaccacaggccatcaagcctgtcacctacactgtggccaccccagtgaccacctcgacctcccagccacccgtcgtgcagacggttcacgtcgtccaccagatcccagcggtgtcggtcaccagtgtggccggactggccccagcgaacacgtacactgtctctggacaagctgtggtcaccccggcagccgtgctggcccctcctaaggcagaggcccaggagaatggagaccacagggaagtcaaagtgaaagtagagcctattcccgccattggccacgccacgctcggcactgccagccggatcattcagacggcacagaccaccccggtccagacggtgaccatagtacaacaggcacctctaggtcaacaccagctaccaataaaaactgtaacacaaaacggcactcacgtggcatcagtccccactgcggtccacggccaggtgaacaatgccgcggcgagtcctttgcacatgttggcaacacacgcatccgcatcggcctccctgcccacaaagcgccacaacggtgaccagccggagcagccggagctgaagcggatcaagacagaagacggcgagggcatcgtcattgccctgagcgtggacacgccaccggcagccgtaagggaaaagggtgtccagaactagcgaccgggagagcttttctttaacgatatcaactctgtggtgccaaaaggagacgcggcctcccgccagcactcgggggtgcagggccctgtggttggacttcacctctcagcactgaaaacccaaaacccagctggccttaacactccttaaagacagaagtcacacttgaacaaaacccacacacaacaaaacctgatttgggagacggtgtctccactgagcacctgctgggctgagcttctacctacgagtgaaactctgtcctcccgcgaggaccaggcatcgctgtgtgaggacggcacggccagcgcctgctgtgagtgggtctcccaagactaggcctcaggacgcggggggagccatccccgccgccctcacaggacccaccaggcagcggagacatgtggaattagagtattttgaggtgtcctttctttacaaaataatggggtcttgggcatttcacatcactccatttctactgagactttcagaatcacacaggccctttccgtggatttcatttggggcaaagaaacaacatagttttgtttttgttttcagcctatggaatgatttccttttgtctgtcttgttcaagttcagacgaagctactctggcatctgcacatttccgtgttacagcagctgcctgatgaattttatccacctccatttcagcatgtggctcgcgtggacaggtggacggacgctgtggccgcatggaaccttgagaacccagggacgagccagtgccgggaaggaactgccgggactcaccgagctgcacttaactgttctctttctggctattttttgttgtttgtttctttgtgttgactttgtccctggcaaaattttccactctgagtaaaacaagtctcggaattc

SEQ ID NO: 1262 - DNA, 1789 bp, Homo sapiens
gaattcatctgtcgactgctaccacgggagttccccggagaaggatcctgcagcccgagtcccgaggataaagcttggggttcatcctccttccctggatcactccacagtcctcaggcttccccaatccaggggactcggcgccgggacgctgctatggacgacattttcactcagtgccgggagggcaacgcagtcgccgttcgcctgtggctggacaacacggagaacgacctcaaccagggggacgatcatggcttctcccccttgcactgggcctgccgagagggccgctctgctgtggttgagatgttgatcatgcggggggcacggatcaatgtaatgaaccgtggggatgacacccccctgcatctggcagccagtcatggacaccgtgatattgtacagaagctattgcagtacaaggcagacatcaatgcagtgaatgaacacgggaatgtgcccctgcactatgcctgtttttggggccaagatcaagtggcagaggacctggtggcaaatggggcccttgtcagcatctgtaacaagtatggagagatgcctgtggacaaagccaaggcacccctgagagagcttctccgagagcgggcagagaagatgggccagaatctcaaccgtattccatacaaggacacattctggaaggggaccacccgcactcggccccgaaatggaaccctgaacaaacactctggcattgacttcaaacagcttaacttcctgacgaagctcaacgagaatcactctggagagctatggaagggccgctggcagggcaatgacattgtcgtgaaggtgctgaaggttcgagactggagtacaaggaagagcagggacttcaatgaagagtgtccccggctcaggattttctcgcatccaaatgtgctcccagtgctaggtgcctgccagtctccacctgctcctcatcctactctcatcacacactggatgccgtatggatccctctacaatgtactacatgaaggcaccaatttcgtcgtggaccagagccaggctgtgaagtttgctttggacatggcaaggggcatggccttcctacacacactagagcccctcatcccacgacatgcactcaatagccgtagtgtaatgattgatgaggacatgactgcccgaattagcatggctgatgtcaagttctctttccaatgtcctggtcgcatgtatgcacctgcctgggtagcccccgaagctctgcagaagaagcctgaagacacaaacagacgctcagcagacatgtggagttttgcagtgcttctgtgggaactggtgacacgggaggtaccctttgctgacctctccaatatggagattggaatgaaggtggcattggaaggccttcggcctaccatcccaccaggtatttcccctcatgtgtgtaagctcatgaagatctgcatgaatgaagaccctgcaaagcgacccaaatttgacatgattgtgcctatccttgagaagatgcaggacaagtaggactggaaggtccttgcctgaactccagaggtgtcgggacatggttgggggaatgcacctccccaaagcagcaggcctctggttgcctcccccgcctccagtcatggtactaccccagcctggggtccatccccttcccccatccctaccactgtgcgcaagaggggcgggctcagagctttgtcacttgccacatggtgtcttccaacatgggagggatcagccccgcctgtcacaataaagtttattatgaaaaaaaaaaaaaaaaaaaaaa

SEQ ID NO: 1263 - DNA, 3069 bp, Homo sapiens
tgtttccgctgcatccagacttcctcaggcggtggctggaggctgcgcatctggggctttaaacatacaaagggattgccaggacctgcggcggcggcggcggcggcgggggctggggcgcgggggccggaccatgagccgctgagccgggcaaaccccaggccaccgagccagcggaccctcggagcgcagccctgcgccgcggaccaggctccaaccaggcggcgaggcggccacacgcaccgagccagcgacccccgggcgacgcgcggggccagggagcgctacgatggaggcgctaatggcccggggcgcgctcacgggtcccctgagggcgctctgtctcctgggctgcctgctgagccacgccgccgccgcgccgtcgcccatcatcaagttccccggcgatgtcgcccccaaaacggacaaagagttggcagtgcaatacctgaacaccttctatggctgccccaaggagagctgcaacctgtttgtgctgaaggacacactaaagaagatgcagaagttctttggactgccccagacaggtgatcttgaccagaataccatcgagaccatgcggaagccacgctgcggcaacccagatgtggccaactacaacttcttccctcgcaagcccaagtgggacaagaaccagatcacatacaggatcattggctacacacctgatctggacccagagacagtggatgatgcctttgctcgtgccttccaagtctggagcgatgtgaccccactgcggttttctcgaatccatgatggagaggcagacatcatgatcaactttggccgctgggagcatggcgatggatacccctttgacggtaaggacggactcctggctcatgccttcgccccaggcactggtgttgggggagactcccattttgatgacgatgagctatggaccttgggagaaggccaagtggtccgtgtgaagtatggcaacgccgatggggagtactgcaagttccccttcttgttcaatggcaaggagtacaacagctgcactgatactggccgcagcgatggcttcctctggtgctccaccacctacaactttgagaaggatggcaagtacggcttctgtccccatgaagccctgttcaccatgggcggcaacgctgaaggacagccctgcaagtttccattccgcttccagggcacatcctatgacagctgcaccactgagggccgcacggatggctaccgctggtgcggcaccactgaggactacgaccgcgacaagaagtatggcttctgccctgagaccgccatgtccactgttggtgggaactcagaaggtgccccctgtgtcttccccttcactttcctgggcaacaaatatgagagctgcaccagcgccggccgcagtgacggaaagatgtggtgtgcgaccacagccaactacgatgacgaccgcaagtggggcttctgccctgaccaagggtacagcctgttcctcgtggcagcccacgagtttggccacgccatggggctggagcactcccaagaccctggggccctgatggcacccatttacacctacaccaagaacttccgtctgtcccaggatgacatcaagggcattcaggagctctatggggcctctcctgacattgaccttggcaccggccccacccccacactgggccctgtcactcctgagatctgcaaacaggacattgtatttgatggcatcgctcagatccgtggtgagatcttcttcttcaaggaccggttcatttggcggactgtgacgccacgtgacaagcccatggggcccctgctggtggccacattctggcctgagctcccggaaaagattgatgcggtatacgaggccccacaggaggagaaggctgtgttctttgcagggaatgaatactggatctactcagccagcaccctggagcgagggtaccccaagccactgaccagcctgggactgccccctgatgtccagcgagtggatgccgcctttaactggagcaaaaacaagaagacatacatctttgctggagacaaattctggagatacaatgaggtgaagaagaaaatggatcctggctttcccaagctcatcgcagatgcctggaatgccatccccgataacctggatgccgtcgtggacctgcagggcggcggtcacagctacttcttcaagggtgcctattacctgaagctggagaaccaaagtctgaagagcgtgaagtttggaagcatcaaatccgactggctaggctgctgagctggccctggctcccacaggcccttcctctccactgccttcgatacaccgggcctggagaactagagaaggacccggaggggcctggcagccgtgccttcagctctacagctaatcagcattctcactcctacctggtaatttaagattccagagagtggctcctcccggtgcccaagaatagatgctgactgtactcctcccaggcgccccttccccctccaatcccaccaaccctcagagccacccctaaagagatcctttgatattttcaacgcagccctgctttgggctgccctggtgctgccacacttcaggctcttctcctttcacaaccttctgtggctcacagaacccttggagccaatggagactgtctcaagagggcactggtggcccgacagcctggcacagggcagtgggacagggcatggccaggtggccactccagacccctggcttttcactgctggctgccttagaacctttcttacattagcagtttgctttgtatgcactttgtttttttctttgggtcttgttttttttttccacttagaaattgcatttcctgacagaaggactcaggttgtctgaagtcactgcacagtgcatctcagcccacatagtgatggttcccctgttcactctacttagcatgtccctaccgagtctcttctccactggatggaggaaaaccaagccgtggcttcccgctcagccctccctgcccctcccttcaaccattccccatgggaaatgtcaacaagtatgaataaagacacctactgagtggc

SEQ ID NO: 1264 - DNA, 3585 bp, Homo sapiens
ctgctcgcggcgccgcctcctgctcctcccgctgctgctgccgctgccgccctgagtcactgcctgcgcagctccggccgcctggctccccatactagtcgccgatatttggagttcttacaacatggcagacattgacaacaaagaacagtctgaacttgatcaagatttggatgatgttgaagaagtagaagaagaggaaactggtgaagaaacaaaactcaaagcacgtcagctaactgttcagatgatgcaaaatcctcagattcttgcagcccttcaagaaagacttgatggtctggtagaaacaccaacaggatacattgaaagcctgcctagggtagttaaaagacgagtgaatgctctcaaaaacctgcaagttaaatgtgcacagatagaagccaaattctatgaggaagttcacgatcttgaaaggaagtatgctgttctctatcagcctctatttgataagcgatttgaaattattaatgcaatttatgaacctacggaagaagaatgtgaatggaaaccagatgaagaagatgagatttcggaggaattgaaagaaaaggccaagattgaagatgagaaaaaggatgaagaaaaagaagaccccaaaggaattcctgaattttggttaactgtttttaagaatgttgacttgctcagtgatatggttcaggaacacgatgaacctattctgaagcacttgaaagatattaaagtgaagttctcagatgctggccagcctatgagttttgtcttagaatttcactttgaacccaatgaatattttacaaatgaagtgctgacaaagacatacaggatgaggtcagaaccagatgattctgatcccttttcttttgatggaccagaaattatgggttgtacagggtgccagatagattggaaaaaaggaaagaatgtcactttgaaaactattaagaagaagcagaaacacaagggacgtgggacagttcgtactgtgactaaaacagtttccaatgactctttctttaacttttttgcccctcctgaagttcctgagagtggagatctggatgatgatgctgaagctatccttgctgcagacttcgaaattggtcactttttacgtgagcgtataatcccaagatcagtgttatattttactggagaagctattgaagatgatgatgatgattatgatgaagaaggtgaagaagcggatgaggaaggggaagaagaaggagatgaggaaaatgatccagactatgacccaaagaaggatcaaaacccagcagagtgcaagcagcagtgaagcaggatgtatgtggccttgaggataacctgcactgtaatagcctaaacacaactcttatttacttacagccttatgtttttgtattttcttggtagactaggtaatttttttttaaaggacaggaaactgatattttaaagaccaatttgttctacctagcattttaactagtttttctgccagctatgttgaatgcacaaattctgtcacgcatgttcattcattgctacataatttggttcttctggaatatttttatgtagctcttggagtacagctatgaaaattaacaactgttaaaggaaataccttttttttttttttgtaattttttccttgaagaaccaaagtattttttcagctggttgttgaatagggttaagtccgcttggattagctgtgcctttcattactttgttacagaaatgcagtgacttatactaagacaatttattgtttaaaaaaaaaattggcaagacaactatatggttaagaatttccagtatgaccacacccaataactgttattagagtgttaatggattattgtgttttaggtgacatagttaactgtaaagtaacctgactcagtatagttactggtaccacagtgaggtgaataaaacgggattttcagaagttagcctgaatttaactgtatttttaaatttaacctccattaactaagcatcttttctttgtggtagggtctaccttctgcttccctggaaaggatgaatttacatcatttgacaagcctattttcaagttatttgttgtttgtttgcttgtttttgtttttgcagctaaaataaaaatttcaaatacaattttagttcttacaagataatgtcttaattttgtaccaattcaggtagaagtagaggcctaccttgaattaagggttatactcagtttttaacacattgttgaagaaaaggtaccagctttggaacgagatgctatactaataagcaagtgtaaaaaaaaaaaaaaaaagaggaagaaaatcttaagtgattgatgctgttttcttttaaaaaaaaaaaaaaaaaaattcattttctttgggttagagctagagagaaggccccaagcttctatggtttcttctaattcttattgcttaaagtatgagtatgtcacttacccgtgcttctgtttactgtgtaattaaaatgggtagtactgtttacctaactacctcatggatgtgttaaggcatattgagttaaatctcatataatgtttctcaatcttgttaaaagctcaaaattttgggcctatttgtaatgccagtgtgacactaagcattttgttcacaccacgctttgataactaaactggaaaacaaaggtgttaagtacctctgttctggatctgggcagtcagcactctttttagatctttgtgtggctcctatttttatagaagtggagggatgcactatttcacaaggtccaagatttgttttcagatatttttgatgactgtattgtaaatactacagggatagcactatagtattgtagtcatgagacttaaagtggaaataagactatttttgacaaaagatgccattaaatttcagactgtagagccacatttacaatacctcaggctaattactgttaattttggggttgaactttttttgacagtgagggtggattattggattgtcattagaggaaggtctagatttcctgctcttaataaaattacattgaattgatttttagaggtaatgaaaacttcctttctgagaagttagtgttaaggtcttggaatgtgaacacattgtttgtagtgctatccattcctctcctgagattttaacttactactggaaatccttaaccaattataatagctttttttctttattttcaaaatgatttcctttgctttgattagacactatgtgctttttttttttaaccatagttcatcgaaatgcagctttttctgaacttcaaagatagaatcccatttttaatgaactgaagtagcaaaatcatctttttcattctttaggaaatagctattgccaaagtgaaggtgtagataatacctagtcttgttacataaaggggatgtggtttgcagaagaattttctttataaaattgaagttttaagggacgtcagtgtttatgccatttttccagttccaaaatgattccattccattctagaaatttgaagtatgtaacctgaaatccttaataaaatttggatttaattttaaaaaaaaaaaaaaaaaaaaaaaaaaaaaaaaaa

SEQ ID NO: 1265 - DNA, 1474 bp, Homo sapiens
aaaaagaaatcaagaatgcaattttatttacaatagtcacgccggaaatacctagaaataaatttaactgaggatgtaaaagacctctacaaggagagttcaatgcgtagcgggagcggagagctgaccccagagagccctgggcagccccacctccgccgccggcctagttaccatcacaccccggagagcccgcagctgccgcagccggccccagtcaccatcaccgcaaccatgagcagcgaggccgagacccagcagccgcccgccgccccccccgccgcccccgccctcagcgccgccgacaccaagcccggcactaccggagcggcgcagggagcggtggcccgggcggctcacatcggcggcgctggcgcgggcgacaagaaggtcatcgcaacgaaggttttgggaacagtaaaatggttcaatgtaaggaacggatatggtttcatcaacaggaatgacaccaaggaagatgtatttgtacaccagactgccataaagaagaataaccccaggaagtaccttcgcagtgtaggagatggagagactgtggagtttgatgttgttgaaggagaaaagggtgcggaggcagcaaatgttacaggtcctggtggtgttccagttcaaggcagtaaatatgcagcagaccgtaaccattatagacgctatccacgtcgtaggggtcctccacgcaattaccagcaaaattaccagaatagtgagagtggggaaaagaacgagggatcggagagtgctcccgaagccaggcccaacaacgccggccctacgcaggcgaaggttcccaccttactacatgcggagacctatgggcgtcgaccacagtattccaaccctcctgtgcagggagaagtgatggagggtgctgacaaccagggtgcaggagaacaaggtagaccagtgaggcagatatgtatcggggatatagaccacgattccgcaggggccctcctcgccaaaagacagcctagagaggacggcaatgaagaagataaagaaaatcaaggagatgagacccaaggtcagcagccacctcaagctcggtaccgccgcaacttcaattaccgacgcagacgcccagaaaaccctaaaccacaagatggcaaagagacaaaagcagccgatccaccagctgagaattcgtccgctcccgaggctgagcagggcggggctgagtaaatgccggcttaccatctctaccatcatccggtttagtcatccaacaagaagaaatatgaaattccagcaataagaaatgaacaaaagattggagctgaagacctaaagtgcttgctttttgcccgttgaccagataaatagaactatctgcattatctatgcagcatggggtttttattatgttttacctaaagacgtctctttttggtaataacaaaccgtgttttttaaaaaagcctggtttttctcaatacgcctttaaaggaattcc

SEQ ID NO: 1266 - DNA, 4322 bp, Homo sapiens
gggaccgacgacacgcccccctctcctcctttgttccgggggtcggcggccgctctcctgccagagctcgggatctcggccccgggaggcgggcgctcgggcgcagccgcgaagatgccgttggaactgacgcagagccgagtgcagaagatctgggtgcccgtggaccacaggccctcgttgcccagatcctgtgggccaaagctgaccaactcccccaccgtcatcgtcatggtgggcctccccgcccggggcaagacctacatctccaagaagctgactcgctacctcaactggattggcgtccccacaaaagtgttcaacgtcggggagtatcgccgggaggctgtgaagcagtacagctcctacaacttcttccgccccgacaatgaggaagccatgaaagtccggaagcaatgtgccttagctgccttgagagatgtcaaaagctacctggcgaaagaagggggacaaattgcggttttcgatgccaccaatactactagagagaggagacacatgatccttcattttgccaaagaaaatgactttaaagcgtttttcatcgagtcggtgtgcgacgaccctacagttgtggcctccaatatcatggaagttaaaatctccagcccggattacaaagactgcaactcggcagaagccatggacgacttcatgaagaggatcagttgctatgaagccagctaccagcccctcgaccccgacaaatgcgacagggacttgtcgctgatcaaggtgattgacgtgggccggaggttcctggtgaaccgggtgcaggaccacatccagagccgcatcgtgtactacctgatgaacatccacgtgcagccgcgtaccatctacctgtgccggcacggcgagaacgagcacaacctccagggccgcatcgggggcgactcaggcctgtccagccggggcaagaagtttgccagtgctctgagcaagttcgtggaggagcagaacctgaaggacctgcgcgtgtggaccagccagctgaagagcaccatccagacggccgaggcgctgcggctgccctacgagcagtggaaggcgctcaatgagatcgacgcgggcgtctgtgaggagctgacctacgaggagatcagggacacctaccctgaggagtatgcgctgcgggagcaggacaagtactattaccgctaccccaccggggagtcctaccaggacctggtccagcgcttggagccagtgatcatggagctggagcggcaggagaatgtgctggtcatctgccaccaggccgtcctgcgctgcctgcttgcctacttcctggataagagtgcagaggagatgccctacctgaaatgccctcttcacaccgtcctgaaactgacgcctgtcgcttatggctgccgtgtggaatccatctacctgaacgtggagtccgtctgcacacaccgggagaggtcagaggatgcaaagaagggacctaacccgctcatgagacgcaatagtgtcaccccgctagccagccccgaacccaccaaaaagcctcgcatcaacagctttgaggagcatgtggcctccacctcggccgccctgcccagctgcctgcccccggaggtgcccacgcagctgcctggacaaaacatgaaaggctcccggagcagcgctgactcctccaggaaacactgaggcagacgtgtcggttccattccatttccatttctgcagcttagcttgtgtcctgccctccgcccgaggcaaaacgtatcctgaggacttcttccggagagggtggggtggagcagcgggggagccttggccgaagagaaccatgcttggcaccgtctgtgtcccctcggccgctggacaccagaaagccacgtgggtccctggcgcctgcctttagcctgggggcccccacctccactctctgggttcctaggaatgtccagcctcggagaccttcacaaagccttgggagggtgatgagtgctggtcctgacaagaggccgctggggacactgtccgttttgtttcgtttctgtgatctcccggcacgtttggagctgggaagaccacactggtggcagaatcctaaaattaaaggaggcagcctcctagttgctgaaagttaaggaatgtgtaaaacctccacgtgactgtttggtgcatcttgacctgggaagacgcctcatgggaacgaacttggacaggtgttgggttgacccctcttctgcaggaagtccctgagctgagacgcaaagttggctgggtggtggtcggcaccctggctcctgcaggtccacacaccttccaggcctgtggcctgcctccaaagatgtgcaagggcaggctggctgcacggggagagggaagtattttgccgaaatatgagaactggggcctcctgctcccagggagctccagggcccctctctcctcccacctggacttggggggaactgagaaacactttcctggagctgctggcttttgcacttttttgatggcagaagtgtgacctgagagtcccaccttctcttcaggaacgtagatgtcggggtgtcttgccctggggggcttggaacctctgaaggtggggagcggaacacctggcatccttccccagcacttgcattacggtccctgctcttccaaggtggggacagtggcccaagcaaggcctcacacgcagccacttcttcaagagctgcctgcacactgtcttggagcatctgccttgtgcctggcactctgccggtgccttgggaaggtcggtaagagtggactttgtcctgggcttcccttcatggcgtctagacacttttgtggtgatggaaagcatgggacctgtcgtctcagcctgttggtttctcctcattgcctcaaaccctggggtaggtggaacggggggtctcgtgcccagatgaaaccatttggaaactcggcagcagagtttgtccaaatgacccttttcaggatgtctcaaagcttgtgccaaaggtcacttttctttcctgccttctgctgtgagccctgagatcctcctcccagctcaagggacaggtcctgggtgagggtgggagatttagacacctgaaactgggcgtggagagaagagccgttgctgtttgttttttgggaagagcttttaaagaatgcatatttttttacctggttggaattgagtaggaactgaggctgtgcttcaggtatggtacaatcaagtgggggattttcatgctgaacccattcaaagccctccccgtccccgcatttccaggccaccctttggctggcgtctgctggagaggatgtctctgtcgcattcccgtgcagctcagctcgcgcaggttttctctctctccctggatgttgagctctcatcagaatatgtgggtggggggtggacgtgcacgggtgcatgattgtgcttaacttggttgtatttttcgatttgacatggaagcctgttgctttgctctagagaatagtttctcgtgtccccttcgcacgcctcattctttgaacctcatctctgatgtttgatacagatgggggcttgatagctgtggtcccctttcccttctgactacgtgaaaatcaatacctaaatacagaagccttggtctaaacaccgagacttttagtttgcgaaggggcttagatagggagagaggtaacatgaatctggacaggggagggagatactatagaaaggagaacactgcatactttgcaaagccagtgacctccttttgaaggggacattggacgggggccgggggcgggggttcggtttgactaccgtcatgaacttttggcgtatactgattcctccaactctccaccccacaaaataacggggaccaatatttttaactttgcctatttgtttttgggtgagtttcccccctccattattctgtcctgagaccacgggcaaagctcttccattttgagagagaagaaaaactgtttggaaccacaccaatgatatttttctttgtaatacttgaaatttatttttttattattttgatagcagatgtgctatttatttatttaatatatgtataaggagtcctaaacaatagaaagctgtagaagctgtagagataggcttcagttgttaattggtttggagcctcctatgtgtgacttatgactctctgtgttctgtgtatttgtctgaattaatgacctgggatataaagctatgctagctttcaaacaggagatgccttcagaaagctttgtatattttgcagttgccagaccaataaaatacctggttgaaatacatggacgaaaaaaaaaaaaaaaaaaaaaaa

SEQ ID NO: 1267 - DNA, 1465 bp, Homo sapiens
gaattcgggtctcgagcaggaagtaccaagggaggatggagatggtaataatcagggttgggtggagaatatctgaggaaactgcacttgatttgggccttgaagagtaattgactggatttagatttatctagaaaggtcgttcccagcagaagcaacaagaacaacaagcttggaggtctgccatcatggatgttctcgcagaagcaaatggcacctttgccttaaaccttttgaaaacgctgggtaaagacaactcgaagaatgtgtttttctcacccatgagcatgtcctgtgccctggccatggtctacatgggggcaaagggaaacaccgctgcacagatggcccagatactttctttcaataaaagtggcggtggtggagacatccaccagggcttccagtctcttctcaccgaagtgaacaagactggcacgcagtacttgcttagggtggccaacaggctctttggggaaaagtcttgtgatttcctctcatcttttagagattcctgccaaaaattctaccaagcagagatggaggagcttgactttatcagcgccgtagagaagtccagaaaacacataaacacctgggtagctgaaaagacagaaggtaaaattgcggagttgctctctccgggctcagtggatccattgacaaggctggttctggtgaatgctgtctatttcagaggaaactgggatgaacagtttgacaaggagaacaccgaggagagactgtttaaagtcagcaagaatgaggagaaacctgtgcaaatgatgtttaagcaatctacttttaagaagacctatataggagaaatatttacccaaatcttggtgcttccatatgttggcaaggaactgaatatgatcatcatgcttccggacgagaccactgacttgagaacggtggagaaagaactcacttacgagaagttcgtagaatggacgaggctggacatgatggatgaagaggaggtggaagtgtccctcccgcggtttaaactagaggaaagctacgacatggagagtgtcctgcgcaacctgggcatgactgatgccttcgagctgggcaaggcagacttctctggaatgtcccagacagacctgtctctgtccaaggtcgtgcacaagtcttttgtggaggtcaatgaggaaggcacggaggctgcagccgccacagctgccatcatgatgatgcggtgtgccagattcgtcccccgcttctgcgccgaccaccccttccttttcttcatccagcacagcaagaccaacgggattctcttctgcggccgcttttcctctccgtgaggacagggcagtcttggtgtgcagcccctctcctctctgtcccctgacactccacagtgtgcctgcaacccaagtggccttatccgtgcagtggtggcagttcagaaataaagggcccatttgtgggatgccgcattaaaaaaaaa

SEQ ID NO: 1268 - DNA, 1861 bp, Homo sapiens
gccggacggagggtggagggccctgcgcctgcgcggagctggagtccggctgggccgcagccgctgggagaccggcggttgccgtggggaccggtcgggcccctccctcctccggtcccccgccccaggcccttccccaccgagacgcgccggcggaccgcgggcgagtgcagccggtgacccggcgagaggcggcgccgctcccaagatgtcgcagacggccatgtccgaaacctacgattttttgtttaagttcttggttattggaaatgcaggaactggcaaatcttgcttacttcatcagtttattgaaaaaaaattcaaagatgactcaaatcatacaataggagtggaatttggttcaaagataataaatgttggtggtaaatatgtaaagttacaaatatgggatacagcaggacaagaacgattcaggtccgtgacgagaagttattaccgaggcgcggccggggctctcctcgtctatgatatcaccagccgagaaacctacaatgcgcttactaattggttaacagatgcccgaatgctagcgagccagaacattgtgatcatcctttgtggaaacaagaaggacctggatgcagatcgtgaagttaccttcttagaagcctccagatttgctcaagaaaatgagctgatgtttttggaaacaagtgcgctcacaggggagaatgtagaagaggcttttgtacagtgtgcaagaaaaatacttaacaaaatcgaatcaggtgagctggacccagaaagaatgggctcaggtattcagtacggagatgctgccttgagacagctgaggtcaccgcggcgcgcacaggccccgaacgctcaggagtgtggttgttaggagagcacacaggtgttcatacagtggcatttgggacacaatcgttggaacctgaagaatctgaagttttttttaccaccatctttttctactctgtatggaagtagatctttatggggaaaagagaatttggggtgttctgcaagccagtcaaagtggcacagcaaatcatataaatcgaattaaatggacaacaccgttagatgtgtatgtaaaaattttctgtttcatatttttcctttcactttcggtttaaaacatgctatatgtactgtatgtcctgtagcccagtgcggctccacagcatggaatctgatgtatgatatgatagaatgtggcactaaatgcagtttcagattttattttttttaatcatatgaactaaaattgtcaattgtgaggtgtgcttttctcatcatgttggttatattgcacaattggttatatttatgacctgatattcaaagactctggcattgatagccagtgtgttttcttatttaactccgtttactacattctacatggtgtttacgtgatccacacttgaaatactagatcagtagacattcactaatataccaaaataaaatgaaaaattgagtttttccgtgaactttatactgtccagctctgttgattttaaagcctcttcatccaggtcagttcaggaagtatatctggagtacctgctctgtttttggctgtgagactagcactaaggattctggtacctttacccaaacctactgggctactaatacttctctcagcagttgatcaaatacaatagaccatgtaagctggggccgctcatccacttccagtttgctggtctccctgctagaaaacacattgtactgtgctttttctggaattcagtataatggcatcactgcctgtttttcacatcttttgtttcctgttcattttaaggaaacctactaaatccagttaatattaaatggacaccactcaaaaaaaaaaaaaaaaaaa

SEQ ID NO: 1269 - DNA, 2496 bp, Homo sapiens
gttttgaaagttgatggagcgaactgcttttccaaagactcttttgaaaaactttttaagtaggccattctgactttaacatttctctttgtcttaacattagacaaaaagtaaccttcctgaagaggacatgtgattggaagttgtcaattgttgaagcattggtaactccagtctctaacgttttagaaaatcataacaagcggttctctaccctgtaaaggtgaactactgagttcttcattatgtctgatggagattatgattacctcatcaagtttttagctttgggagactctggtgtagggaagaccagtgtactttaccaatatacagatggtaaatttaactccaaatttatcacaacagtgggcattgatttcagggaaaaaagagtggtgtacagagccagtgggccggatggagccactggcagaggccagagaatccacctgcagttatgggacacagcagggcaggagaggtttcgtagcttaacgacagcgttcttcagagatgctatgggttttcttctactttttgatctgacaaatgagcaaagtttcctcaatgtcagaaactggataagccagctacagatgcatgcatattgtgaaaacccagatatagtgctgtgtggaaacaagagtgatctggaggaccagagagtagtgaaagaggaggaagccatagcactcgcagagaaatatggaatcccctactttgaaactagtgctgccaatgggacaaacataagccaagcaattgagatgcttctggacctgataatgaagcgaatggaacggtgtgtggacaagtcctggattcctgaaggagtggtgcgatcaaatggtcatgcctctacggatcagttaagtgaagaaaaggagaaaggggcatgtggctgttgagaagtcaagtaagtgacatagtagttcaggtggcccatgcctgggatcttctctatgattgatacatggcacagtgagagattaatgggcattgtgtacaaattgcttctcaccatccccattagacctacgaataaagcatccggttctaaaattaatttgttgcagctttgtaaatatttctttaagattcagcctgagagttaggagaaatatttcagagccaaaagtgccttatacaaccttagcctattatagtaaatcattcaaggattcagaattttgcagtcacagaagagtgtatttattatgtagaatgaatgagggtactgtcacctgccttaatgtaggtaggcccagagtcttacatttaagatcttacatgcagttataaaaccgccacagtcttcaatccagatttgaagactcatgccataggtgacattctaaaataccattaaagccacttaaatgttaaataagaatatacatgcacatcagctcaatgtctttgagtattaattttatgtaagcattctatttaacatgaatataggacaaatcatggctatatctatagaccttggataaactggattgaccaattatacactcacggtgacttttttattggtgggaaggggattggggtggggcaggctggcttaatgtaatatgagcaaccaaagtgggacttctgtctccccgctatattcccattgctctgaatggttgattgaagggtcagggaactagattttatggctttagttcactgtgattgtacatttatacttggcctatgtgctggccgcacctgaacatagctggtgcttatgccgagttatttgtgatgagtaaatatttagtttctttttcttcatatttataatgttgatctggcatcctcaggctgcagctttattagcttataaattactcatctctgtctttaccagcaggctctgtattgttgatatttgcaacttgttttgcttttccattggtggaattgaaataattagtttttaattacataagatgcctgtttgctatttggtggaagatagatgttcatattgaagcagtcacatttgtactgtagttcaataaaagaaaaatgaagtattctgtagcctatatttttcatagagctcatgagcatttactgtacttgctgggtcttgccaagatcatttattccgctgcattgccaaagtgtcttcataccaaattaaaggtggttttaatatatgtttcatggaagttgtttataaaattcaaaggtatttcatttaggtgaaaagtcttatttattaaagtggtttgaataaagtagatcaaaacttccagagatcttaatggctatataggaagaaatatcactcaccataatttaaataaagaataaaaatacatgtattttatggtggcaaatgtttggtagaactgtaattagaaaaatacaagtatatttgcgtgatggttacactagaagcccagactttacgactacacaatatattcatgtatctaaactgtacttgtaccccctaaatttatttttaaaaaaaaaaaaaaaaaa

SEQ ID NO: 1270 - DNA, 2067 bp, Homo sapiens
  misc_feature (20)..(20): n is a, c, g, or t
  misc_feature (35)..(35): n is a, c, g, or t
gaattccctcgcgctctggnccgggcgaatcgggntataggaagggccacacggatggaagtcctagtccgggtgctcacctcttgtggaacgtgcaaagcctgtcccaggacctctctacactctgggggtctctgcccaggcacgcttgctgcttccggacacagctgtgggcggagctagtaggggcgggctacgtgattgacacttctctcctcagacttcaagggctaccactggacccttcccctgtcttgaaccctgagccggcaccatgcacggacgcctgaaggtgaagacgtcagaagagcaggcggaggccaaaaggctagagcgagagcagaagctgaagctataccagtcagccacccaggccgtattccagaagcgccaggctggtgagctggatgagtccgtgctggaactgacaagccagattctgggagccaaccctgattttgccaccctctggaactgccgacgagaggtgctccagcagctggagactcagaagtctcctgaagagttggctgctctggtgaaggcagaactgggcttcctggagagctgcctgcgggtgaaccccaagtcttatggtacctggcaccaccgatgctggctgctaggccgcctgcctgagcccaactggacccgagagctggagctctgtgcccgtttcctggaggtggatgagcggaactttcactgctgggactatcggcggtttgtggccacacaggcagccgtgccccctgcagaagagctagccttcactgacagcctcatcacccgaaacttctccaactactcttcctggcattaccgctcctgtctcttgccccagttgcacccccagccggattctggaccacaggggcgcctccctgaggatgtgctgctcaaagagctggagctggtgcagaatgccttcttcactgaccccaatgaccagagtgcctggttttatcaccggtggctcctaggtcgagctgacccccaggatgcactgcgctgtctgcatgtgagccgggacgaggcctgtctgactgtctccttctctcggcccctcttagtgggctccaggatggagatcttgctgctcatggttgatgattctcccctgattgtggagtggaggaccccagatggcaggaaccggcccagccatgtctggctctgtgacctgcctgctgcctccctcaacgaccagttgccccaacatacatttcgcgtcatttggacagcaggcgatgtccagaaagaatgcgtgcttttaaaaggccgccaggagggctggtgccgggactccacgacagacgagcagctattcaggtgtgagctgtcagtggagaagtccacagtgctgcagtctgagctggaatcctgtaaggagctgcaggagctggagcctgagaataaatggtgcctgcttaccatcatcctgctgatgcgggcactggaccccctgctgtatgagaaggagaccctgcagtacttccagaccctcaaggccgtggaccccatgcgggcaacgtatctggatgacctgcgcagcaagttcttgctggagaatagcgtgctcaagatggagtatgccgaggtgcgtgtgctgcacctggctcacaaggatctgacagtgctctgccatctggaacagctgctcttggtcacccatcttgacttgtcacacaatcgcctccgaaccctgccacctgcactggctgccctgcgctgccttgaggtgctgcaggccagtgataatgcaatagagtccctggacggcgtcaccaacctaccccggctgcaggagctgctactgtgcaacaaccgcctccagcagcctgcagtgctccagcctcttgcctcctgccccaggctggtcctcctcaacctgcagggtaacccgctgtgccaagcggtgggcatcttggagcaactggctgaactgctgccttcagttagcagcgtcctcacctaagaggccctgccccctacccttgccctttaacttattgggactgaataaagaatggagaggcccctctcaggctaccaaaaaaaaaaaaa

SEQ ID NO: 1271 - DNA, 1374 bp, Homo sapiens
  misc_feature (1211)..(1211): n is a, c, g, or t
  misc_feature (1242)..(1243): n is a, c, g, or t
  misc_feature (1266)..(1267): n is a, c, g, or t
  misc_feature (1276)..(1276): n is a, c, g, or t
  misc_feature (1292)..(1292): n is a, c, g, or t
  misc_feature (1296)..(1296): n is a, c, g, or t
  misc_feature (1312)..(1312): n is a, c, g, or t
  misc_feature (1323)..(1323): n is a, c, g, or t
  misc_feature (1332)..(1332): n is a, c, g, or t
  misc_feature (1336)..(1337): n is a, c, g, or t
  misc_feature (1340)..(1341): n is a, c, g, or t
  misc_feature (1343)..(1344): n is a, c, g, or t
  misc_feature (1346)..(1346): n is a, c, g, or t
  misc_feature (1356)..(1356): n is a, c, g, or t
  misc_feature (1363)..(1363): n is a, c, g, or t
  misc_feature (1367)..(1367): n is a, c, g, or t
  misc_feature (1369)..(1369): n is a, c, g, or t
gacatgggcactccacagaaggatgttattatcaagtcagatgcaccggacactttgttattggagaaacatgcagattatatcgcatcctatggctcaaagaaagatgattatgaatactgtatgtctgagtatttgagaatgagtggcatctattggggtctgacagtaatggatctcatgggacaacttcatcgcatgaatagagaagagattctggcatttattaagtcttgccaacatgaatgtggtggaataagtgctagtatcggacatgatcctcatcttttatacactcttagtgctgtccagattcttacgctgtatgacagtattaatgttattgacgtaaataaagttgtggaatatgttaaaggtctacagaaagaagatggttcttttgctggagatatttggggagaaattgacacaagattctctttttgtgcggtggcaactttggctttgttggggaagcttgatgctattaatgtggaaaaggcaatcgaatttgttttatcctgtatgaactctgacggtggatttggttgcagaccaggttctgaatcccatgctgggcagatctattgttgcacaggatttctggctattacaagtcagttgcatcaagtaacttctgatttacttggctggtggctttgtgaacgacaattaccctcaggcgggctcaatggaaggccggagaagttaccagatgtatgctactcatggtgggtcctggcttccctaaagataattggaagacttcattggattgatagagagaaactgcgtaatttcattttagcatgtcaagatgaagaaacggggggatttgcagacaggccaggagatatggtggatccttttcataccttatttggaattgctggattgtcacttttgggagaagaacagattaaacctgttaatcctgtcttttgcatgcctgaagaagtgcttcagagagtgaatgttcagcctgagctagtgagctagattcattgaattgaaagttgcatagtatagttttgccattttaacatttctgtatttgaagtgcttatcgaatctaaaagtgactactgttaatattttgtatattgtgttaaattaattttaataaattatataattatacatattgtaaaataaagaccctttacaacaacagccacccaagccgattcctaagcagcaaggacctggtngggatccgctccagcaggatggcactcccanntcaatatcttctcaacacccagnnaaaatcaantcacaccctccaggtncagncaagccaattccaggnccccccccagnttcccccanaaannccnntnnanatttgccccntccacgncttncnacccg

SEQ ID NO: 1272 - DNA, 2260 bp, Homo sapiens
atgccgctggcgcagctggcggacccgtggcagaagatggctgtggagagcccgtccgacagcgctgagaatggacagcaaattatggatgaacctatgggagaggaggagattaacccacaaactgaagaagtcagtatcaaagaaattgcaatcacacatcatgtaaaggaaggacatgaaaaggcagatccttcccagtttgaacttttaaaagtattagggcagggatcatttggaaaggttttcttagttaaaaaaatctcaggctctgatgctaggcagctttatgccatgaaggtattgaagaaggccacactgaaagttcgagaccgagttcggacaaaaatggaacgtgatatcttggtagaggttaatcatccttttattgtcaagttgcattatgcttttcaaactgaagggaagttgtatcttattttggattttctcaggggaggagatttgtttacacgcttatccaaagaggtgatgttcacagaagaagatgtcaaattctacttggctgaacttgcacttgctttagaccatctacatagcctgggaataatttatagagacttaaaaccagaaaatatacttcttgatgaagaaggtcacatcaagttaacagatttcggcctaagtaaagagtctattgaccatgaaaagaaggcatattctttttgtggaactgtggagtatatggctccagaagtagttaatcgtcgaggtcatactcagagtgctgactggtggtcttttggtgtgttaatgtttgaaatgcttactggtacactccctttccaaggaaaagatcgaaaagaaacaatgactatgattcttaaagccaaacttggaatgccacagtttttgagtcctgaagcgcagagtcttttacgaatgcttttcaagcgaaatcctgcaaacagattaggtgcaggaccagatggagttgaagaaattaaaagacattcatttttctcaacgatagactggaataaactgtatagaagagaaattcatccgccatttaaacctgcaacgggcaggcctgaagatacattctattttgatcctgagtttactgcaaaaactcccaaagattcacctggcattccacctagtgctaatgcacatcagctttttcgggggtttagttttgttgctattacctcagatgatgaaagccaagctatgcagacagttggtgtacattcaattgttcagcagttacacaggaacagtattcagtttactgatggatatgaagtaaaagaagatattggagttggctcctactctgtttgcaagagatgtatacataaagctacaaacatggagtttgcagtgaagattattgataaaagcaagagagacccaacagaagaaattgaaattcttcttcgttatggacagcatccaaacattatcactctaaaggatgtatatgatgatggaaagtatgtgtatgtagtaacagaacttatgaaaggaggtgaattgctggataaaattcttagacaaaaatttttctctgaacgagaggccagtgctgtcctgttcactataactaaaaccgttgaatatcttcacgcacaaggggtggttcatcgagacttgaaacctagcaacattctttatgtggatgaatctggtaatccggaatctattcgaatttgtgattttggctttgcaaaacagctgagagcggaaaatggtcttctcatgactccttgttacactgcaaattttgttgcaccagaggttttaaaaagacaaggctatgatgctgcttgtgatatatggagtcttggtgtcctactctatacaatgcttaccggttacactccatttgcaaatggtcctgatgatacaccagaggaaatattggcacgaataggtagcggaaaattctcactcagtggtggttactggaattctgtttcagacacagcaaaggacctggtgtcaaagatgcttcatgtagaccctcatcagagactgactgctgctcttgtgctcagacatccttggatcgtccactgggaccaactgccacaataccaactaaacagacaggatgcaccacatctagtaaagggtgccatggcagctacatattctgctttgaaccgtaatcagtcaccagttttggaaccagtaggccgctctactcttgctcagcggagaggtattaaaaaaatcacctcaacagccctgtgaagtgacctcagtgagatatttggatccatggtgtaaa

SEQ ID NO: 1273 - DNA, 3106 bp, Homo sapiens
ggcggcggctcctgccctctcgctttccctctcgcgtctctggctgcaggtgaaaggaaagcaagccaggatggatatttacgacactcaaaccttgggggttgtggtctttggaggattcatggttgtttctgccattggcatcttcctggtgtcgactttctccatgaaggaaacgtcatatgaagaagccctagccaaccagcgcaaggagatggcgaaaactcaccaccagaaagtcgagaagaaaaagaaggagaaaacagtggagaagaaaggaaagaccaagaaaaaggaagagaaacctaatgggaagatacctgatcatgatccagcccccaatgtgactgtcctccttcgagaaccagtgcgggctcctgctgtggctgtggctccaaccccagtgcagccccccattatcgttgctcctgtcgccacagttccagccatgccccaggagaagctggcctcctcccccaaggacaaaaagaagaaggagaaaaaagtggcaaaagtggaaccagctgtcagctctgtagtgaattccatccaggttctcacttcgaaggctgccatcttggaaactgctcccaaggagggcagaaatacagatgtggcccagagcccagaggcaccaaagcaagaggctcctgccaagaagaagtctggttcaaagaaaaaagggcccccagatgccgacggccctctctacctcccctacaagacgctggtctccacggttgggagcatggtgttcaacgagggcgaggcccagcggctcatcgagatcctgtctgagaaggctggcatcattcaggacacctggcacaaggccactcagaagggtgaccctgtggcgattctgaaacgccagctggaagagaaggaaaaactgctggccacagaacaggaagatgcggctgtcgccaagagcaaactgagggagctcaacaaggagatggcagcagaaaaggccaaagcagcagccggggaggccaaagtgaaaaagcagctggtggcccgggagcaggagatcacggctgtgcaggcacgcatgcaggccagctaccgggagcacgtgaaggaggtgcagcagctgcagggcaagatccggactcttcaggagcagctggagaatggccccaacacgcagctggcccgcctgcagcaggagaactccatcctgcgggatgccttgaaccaggccacgagccaggtggagagcaagcagaacgcagagctggccaagcttcggcaggagctcagcaaggtcagcaaagagctggtggagaagtcagaggctgtgcggcaagatgagcagcagcggaaagctctggaagccaaggcagctgccttcgagaagcaggtcctgcagctgcaggcgtcccacagggagagtgaggaggccctgcagaagcgcctggacgaggtcagccgggagctgtgccacacgcagagcagccacgccagcctccgggcggatgccgagaaggcccaggagcaacagcagcagatggccgagctgcacagcaagttacagtcctccgaggcggaggtgcgcagcaaatgcgaggagctgagtggcctccacgggcagctccaggaggccagggcagagaactcccagctcacagagagaatccgttccattgaggccctgctggaggcgggccaggcgcgggatgcccaggacgtccaggccagccaggcggaggctgaccagcagcagactcgcctcaaggagctggagtcccaggtgtcgggtctggagaaggaggccatcgagctcagggaggccgtcgagcagcagaaagtgaagaacaatgacctccgggagaagaactggaaggccatggaggcactggccacggccgagcaggcctgcaaggagaagctgcactccctgacccaggccaaggaggaatcggagaagcagctctgtctgattgaggcgcagaccatggaggccctgctggctctgctcccagaactctctgtcttggcacaacagaattacaccgagtggctgcaggatctcaaagagaaaggccccacgctgctgaagcacccgccagctcccgcggagccctcctcggacctggcctccaagttgagggaggccgaggagacgcagagcacactgcaggccgagtgtgaccagtaccgcagcatcctggcggagacggagggcatgctcagagacctgcagaagagcgtggaggaggaggagcaggtgtggagggccaaggtgggcgccgcagaggaggagctccagaagtcccgggtcacagtgaagcatctcgaagagattgtagagaagctaaaaggagaacttgaaagttcggaccaggtgagggagcacacgtcgcatttggaggcagagctggaaaagcacatggcggccgccagcgccgagtgccagaactacgccaaggaggtggcagggctgaggcaacttctcctagaatctcaatctcagctcgatgccgccaagagcgaagcccagaaacagagcgatgagcttgccctggtcaggcagcagttgagtgaaatgaagagccacgtagaggatggtgacatagctggggccccagcttcctccccagaggcgcccccagccgagcaggaccccgttcagctgaagacgcagctggagtggacagaagccatcctggaggatgagcagacacagcggcagaagctcatggccgagtttgaggaggctcagacctcggcatgtcggttacaagaagaattggagaagctccgcacagccggccccctagagtcttcagaaacagaggaggcctcacagctgaaggagagactagaaaaagagaagaagttaacaagtgacctggggcgcgccgccacgagactgcaggagcttctgaagacgacccaggagcagctggcaagggagaaggacacggtgaagaagctgcaggaacagctggaaaaggcagaggacggcagcagctcaaaggagggcacctctgtctgagtttcctctttggaaaaagaagttactgttcaacttaccaaaatgccttacacattccttacaaataaaccaaccaacctacaaaaaaaaaaaaaaaaaaaa

SEQ ID NO: 1274 - DNA, 4804 bp, Homo sapiens
agcggccagacgctcggcggcggcgtgtggcaggagcgcaggggcgcgagccggcgatcagccttcccggcgaccgtgccgcgggagctcgagcaactcggactaggggacccgggccggcccccaagatgccggcgatcgcggtattggcggcggccgccgcggcgtggtgcttcctccaagtcgagagccggcacctggacgcgctcgccggaggcgcgggccccaaccacggcaatttcctagacaatgaccagtggctgagcaccgtctcccagtacgaccgggacaagtactggaaccgctttcgagacgatgattatttcagaaactggaatcccaacaagccctttgaccaagccctggacccatccaaggacccctgcctgaaggtaaaatgcagccctcacaaagtgtgtgtgacccaggactaccagaccgccctgtgtgtcagccgcaagcacctgctccccaggcaaaagaaggggaacgtggcccagaaacactgggttggaccttcgaatttggtcaagtgcaagccctgtcccgtggcacagtcagccatggtctgcggctcagatggccactcctacacatccaagtgcaaattggagttccatgcttgttctactggcaaaagcctcgccaccctctgtgatgggccctgtccctgtctcccagagcctgagccaccaaagcacaaggcagaaaggagtgcctgcacagacaaggagttgcggaaccttgcctcccggctgaaggattggtttggagctctccacgaggatgcgaacagagtcatcaagcccaccagctccaacacagcccaaggcaggtttgacactagcatcctgcccatctgcaaggactccctgggctggatgttcaacaagttggacatgaactatgacctcctgcttgacccttcagagatcaatgccatctacctggataagtacgagccctgtatcaagcctcttttcaactcgtgtgactccttcaaggatggcaagctttctaacaatgagtggtgctactgcttccagaagcctggaggtctcccttgccagaatgaaatgaacagaattcagaagctgagtaaggggaaaagcctgttgggggccttcatacctcggtgtaatgaggagggctattacaaagccacacagtgccacggcagcacggggcagtgctggtgtgtggacaaatatgggaatgagttggctggctccaggaaacagggtgctgtgagctgtgaagaggagcaggaaacctcaggggattttggcagtggtgggtccgtggtcctgctggatgacctagaatatgaacgggagctgggaccaaaggacaaagaggggaagctgagggtgcacacccgagccgtgacagaggatgatgaggatgaggatgatgacaaagaggatgaggtcgggtacatatggtagtgcccacaagaaagaggacacaagttttgcacaaaattgcaagtcacttcctattcctgcatttgtatctaagactccaaggcaccaaggtctcttctccattgttgctctctatacccgacctaaggtttggaagacaactgcttgttcccagaggattctgattttgcatatgtttgtatgggagaaagggtgttgtgtttttttttttgttgttgtttattttttggatagggaagtcattggcttaattagagcctccttcctttctgtgagatttttccaacaagcatgtgatttacgtggaattctgacagtgcagggagcccccaccctcttaaatgtcaaagaccctttttgattacccacactggtggttattacagcatggttcccagccttacagtgtctaagtgcttctcttgtgtcctgtagatgttgtgaaaaagaaaaaaacaaaaaatacaccacactgtactttttccccctgcccccgctactgccggtgattattattaaaaattagtttttttcacatcattatatctggcttcctataaacaacagccttaattcagtcaagactccctttgggaattcattttattaaaaattggtgtctggatacttccctgtacatgcataaatatgcatgcatgtacaggaagactgtatgtgtgtgccttgcacacacacccatacctctcagaaaaagtgggtatattaaaaactcgaaaaacaatgataaatttctcagcttgtccagacctggaacaaaatttctggaataagaaatttgtattaaagtccttttttgcactaacagttggctcttgtagcctgcaggctgaggaagtctcttctctgtgcatcagcagagttactgaaagcctctgattgagaaaaaacctccgtctgcctaaatcacttttctcgcagaagccatgcgactcccacacgacacgggcagcttcacaagccatctctttcatttctgcttgaagcccccttggctgcagcaatcctgtctgccataggtttcttccttccttacctactcaagggctttttctaaggcatgcacacatatctcctgttctctgagagtaccatggtgttccttaaaagaagaaaatttctaattctgaactcaatgttttgcttttactccctttctactgacaaatcatgataagggcacaaaagctgtacagatttttttttttaaccactcaatcccaaatggaggcctacaaagaacatcgtaataacacatggaagcaaaccctgggtttttaagagcaaattctgtccccccctcactcccccaagtgacaagatactaatgaagaaagttcttcaccatagtgtttgttttaactaaactcattggagtctagttccaaatttggtagggtcatcatctctacattccttaggatttctctccctatcaagctggcccagatacaagtaccaaacagtagtctctgaagttcccccatttccttcagtaccagtctataagctactgtccgccactgattttcatctatcagggtgtcctaatcagaatcagccacccaagcaagcctctctggcccacatatctatctcttgccttcccccatgaacttcagcctgtccacacaaaagccacataaactcaagcaagaaatatgttcagccaaaacatgattatagtggcagctgaccaatcccccatcccaaattgaccatttagatgtaccaactcaccttaaattagcatgttccaatccagtcggcattgcctgaatacagtagcatcatacctatagttggtcttagataagaaatgaactacttgatatagcaaagtcctttggcttcgtaaataaccctgaggttttgtacttactttccccataggaagacagaccataggcaaactctgttttgggatctcaactccatcacctttgtttcaatattttttttctctcttgaacaaaactgagataatttagaaaacaggtgcttaattgcaataaaattactatgaagtatattaaaaatcacgacattgtaaaatctcactttagatcatcaaagaaaaccattgttactatctcctttgagcttaggaaaatgtacaagagaacaaattaaaattgaaaaattgatttcacttagaaaaacttctaggaacagggtgaaccactgattttaatttgcctaattatcttatgacaagtatcaaattaagatgacacttaaagatccttagcattaacttaatgatggagaagagtgctcaacagacagttcccagtaaggtaatgagatgccattttccgagacattctaagaagatattttgattcattaaaacattaaataaaaagccctcctcagattggaacccccaaatcgatggagtcacattaataatacttttcatgcctcactttgacatgacagcattcgatttttttaaagatctttaatactttccatgagtactaaagattgtaatgagttaccttatccttagaagtagaatgtttgctttcttcttcttggaaatagtcctccaaaaagtccacttgtaccagtgacaagaagtcacttgtatagtgaccaagtacacataaaataccgattataaaaatattgtaataaaccacttcctcatttgatactggtattaagctgaatcctcactaattcacttttgaaaagttcttaatgaacagttttattcttataccatgaacagctcttttaatacaatttccttggtatccaacttaaatcccagaattttgttccaccatggttagttatttgccatatgaatgtattcttgtttctaccaatattctaggcatgagaataccttaatactgagttggagattttgtatctgtttctcctcctttacgcccattttcctacccacagcagcaaatgacaacgtgtctgtccaggtctgtccccctgctcatcccaggatgccactcacatttttttcttctttgttacccttgacccacgctgtacaagtaacatccaagagcccattctacaagtgggtggttttggtctttttataactttttctcaaagtcactgatgtttgttcctgttaaatgtatagcattgtaatgagagcccatcaaatcctgagtgtcagtttgttgtccctattgtagatgaaatagtgatgtagcaaaaacctagtaaattctgaatgcttttccacgtagacttatctggaatgtgaacacaactctttggttaatagtaaatgcttaactgtagtcctgagtaggtgcatttctgtctgtctcaataaattttactttgtctgc

SEQ ID NO: 1275 - DNA, 3349 bp, Homo sapiens
acttcctgccgggctgcgggcgcctgagcgctcttcagcgtttgcgcggcggctgcgcgtctctctcggctcccgcttcctttgaccgcctcccccccccggcccggcggcgcccgcctcctccacggccactccgcctcttccctcccttcgtcccttcttcctctcccttttttccttcttccttcccctcctcgccgccaccgcccaggaccgccggccgggggacgagtccggagcagcagccagcagcagccaggtggagttttgctcttgtcgcccaggctggagtgcagtggcgtgatctcggctcactgcaacctccacctcccaggtcagcgattttcccacttcagcctcccgataagctgagattacaggagtttattaaccacttaacctctcagaactgaacaaagacaacattgttcctggaacgccctctttttaaaaaagaaagcataacccctactgtagaactaaatgcactgtgcatgaaacttggaaaaaaaccaatgtataagcctgttgacccttactctcggatgcagtccacctataactacaacatgagaggaggtgcttatcccccgaggtacttttacccatttccagttccacctttactttatcaagtggaactttctgtgggaggacagcaatttaatggcaaaggaaagacaagacaggctgcgaaacacgatgctgctgccaaagcgttgaggatcctgcagaatgagcccctgccagagaggctggaggtgaatggaagagaatccgaagaagaaaatctcaataaatctgaaataagtcaagtgtttgagattgcacttaaacggaacttgcctgtgaatttcgaggtggcccgggagagtggcccaccccacatgaagaactttgtgaccaaggtttcggttggggagtttgtgggggaaggtgaagggaaaagcaagaagatttcaaagaaaaatgccgccatagctgttcttgaggagctgaagaagttaccgcccctgcctgcagttgaacgagtaaagcctagaatcaaaaagaaaacaaaacccatagtcaagccacagacaagcccagaatatggccaggggatcaatccgattagccgactggcccagatccagcaggcaaaaaaggagaaggagccagagtacacgctcctcacagagcgaggcctcccgcgccgcagggagtttgtgatgcaggtgaaggttggaaaccacactgcagaaggaacgggcaccaacaagaaggtggccaagcgcaatgcagccgagaacatgctggagatccttggtttcaaagtcccgcagcggcagcccaccaaacccgcactcaagtcagaggagaagacacccataaagaaaccaggggatggaagaaaagtaaccttttttgaacctggctctggggatgaaaatgggactagtaataaagaggatgagttcaggatgccttatctaagtcatcagcagctgcctgctggaattcttcccatggtgcccgaggtcgcccaggctgtaggagttagtcaaggacatcacaccaaagattttaccagggcagctccgaatcctgccaaggccacggtaactgccatgatagcccgagagttgttgtatgggggcacctcgcccacagccgagaccattttaaagaataacatctcttcaggccacgtaccccatggacctctcacgagaccctctgagcaactggactatctttccagagtccagggattccaggttgaatacaaagacttccccaaaaacaacaagaacgaatttgtatctcttatcaattgctcctctcagccacctctgatcagccatggtatcggcaaggatgtggagtcctgccatgatatggctgcgctgaacatcttaaagttgctgtctgagttggaccaacaaagtacagagatgccaagaacaggaaacggaccaatgtctgtgtgtgggaggtgctgaaccttttctggccatgaaccattataaaatcccaacatatatactgaaaatactgaaactgctttgaaaatttggaatttctgatacctccagtgggccgagagacacggtgggtaaaggatgtgggcagcagcagggaagacaacagaaacacaaggaggcggctgtggccggctggactgtgctggggtttgttgtgatggccactcggtgacctggcggtccctacgcaatagcagctgcctgtggggaagaagggctgcccagccagctggttctcccgggacaccagcagatccacaccctgggcacctccgtgtttggtcttttttttcccctgtgtgaaagaagaaacggcacgaccccttctcaagctggctcactcagacacattgggacaaaccctggacagccatgccagagagaggcctttgaccggccccagagctaaaagcaccagagaaaatcaaatgcttcctactcagcgtgacccaacttttctagtgtgccacggccccaccacctcctgcagtacccacaccatcaccactgctttctcttccaacagtgatctgtattcttagtttcattattttcttttgattgatatgacactatataaaattttcatttgagaatttctcaattgtatctagttaaatagcacagtttggaaacttgtctgagactgactttatcaataatctaaccgacaaagatcatatccatgtgtatgtggttagacatttttatttcattgactaacccaggacagtttcagtgatgcaaattgtgtgccctctggttcagctgaaacagtcctggactttcaaaaaccttgaataagtctcccacagttgtataaattggacaatttaggaattttaaactttagatgatcatttggttccatttttatttcatttttatttttgttaatgcaaacaggacttaaatgaactttgatctctgttttaaagattattaaaaaacattgtgtatctatacatatggctcttgaggacttagctttcactacactacaggatatgatctccatgtagtccatataaacctgcagagtgattttccagagtgctcgatactgttaattacatctccattagggctgaaaagaatgacctacgtttctgtatacagctgtgttgcttttgatgttgtgttactgtacacagaagtgtgtgcactgaggctctgcgtgtggtccgtatggaaaacctggtagccctgcgagttaagtactgcttccattcattgtttacgctggaatttttctccccatggaatgtaagtaaaacttaagtgtttgtcatcaataaatggtaatactaaaaaaaaaaaaa

SEQ ID NO: 1276 - DNA, 3257 bp, Homo sapiens
aacaggcgtgacgccagttctaaacttgaaacaaaacaaaacttcaaagtacaccaaaatagaacctccttaaagcataaatctcacggagggtctcggccgccagtggaaggagccaccgcccccgccccgaccatggccgaggagctggtcttagagaggtgtgatctggagctggagaccaatggccgagaccaccacacggccgacctgtgccgggagaagctggtggtgcgacggggccagcccttctggctgaccctgcactttgagggccgcaactaccaggccagtgtagacagtctcaccttcagtgtcgtgaccggcccagcccctagccaggaggccgggaccaaggcccgttttccactaagagatgctgtggaggagggtgactggacagccaccgtggtggaccagcaagactgcaccctctcgctgcagctcaccaccccggccaacgcccccatcggcctgtatcgcctcagcctggaggcctccactggctaccagggatccagctttgtgctgggccacttcattttgctcttcaacgcctggtgcccagcggatgctgtgtacctggactcggaagaggagcggcaggagtatgtcctcacccagcagggctttatctaccagggctcggccaagttcatcaagaacataccttggaattttgggcagtttcaagatgggatcctagacatctgcctgatccttctagatgtcaaccccaagttcctgaagaacgccggccgtgactgctcccggcgcagcagccccgtctacgtgggccgggtgggtagtggcatggtcaactgcaacgatgaccagggtgtgctgctgggacgctgggacaacaactacggggacggcgtcagccccatgtcctggatcggcagcgtggacatcctgcggcgctggaagaaccacggctgccagcgcgtcaagtatggccagtgctgggtcttcgccgccgtggcctgcacagtgctgaggtgcctaggcatccctacccgcgtcgtgaccaactacaactcggcccatgaccagaacagcaaccttctcatcgagtacttccgcaatgagtttggggagatccagggtgacaagagcgagatgatctggaacttccactgctgggtggagtcgtggatgaccaggccggacctgcagccggggtacgagggctggcaggccctggacccaacgccccaggagaagagcgaaggaacgtactgctgtggcccagttccagttcgtgccatcaaggagggcgacctgagcaccaagtacgatgcgccctttgtctttgcggaggtcaatgccgacgtggtagactggatccagcaggacgatgggtctgtgcacaaatccatcaaccgttccctgatcgttgggctgaagatcagcactaagagcgtgggccgagacgagcgggaggatatcacccacacctacaaatacccagaggggtcctcagaggagagggaggccttcacaagggcgaaccacctgaacaaactggccgagaaggaggagacagggatggccatgcggatccgtgtgggccagagcatgaacatgggcagtgactttgacgtctttgcccacatcaccaacaacaccgctgaggagtacgtctgccgcctcctgctctgtgcccgcaccgtcagctacaatgggatcttggggcccgagtgtggcaccaagtacctgctcaacctaaccctggagcctttctctgagaagagcgttcctctttgcatcctctatgagaaataccgtgactgccttacggagtccaacctcatcaaggtgcgggccctcctcgtggagccagttatcaacagctacctgctggctgagagggacctctacctggagaatccagaaatcaagatccggatccttggggagcccaagcagaaacgcaagctggtggctgaggtgtccctgcagaacccgctccctgtggccctggaaggctgcaccttcactgtggagggggccggcctgactgaggagcagaagacggtggagatcccagaccccgtggaggcaggggaggaagttaaggtgagaatggacctcgtgccgctccacatgggcctccacaagctggtggtgaacttcgagagcgacaagctgaaggctgtgaagggcttccggaatgtcatcattggccccgcctaagggacccctgctcccagcctgctgagagcccccaccttgatcccaatccttatcccaagctagtgagcaaaatatgccccttattgggccccagaccccagggcagggtgggcagcctatgggggctctcggaaatggaatgtgcccctggcccatctcagcctcctgagcctgtgggtccccactcaccccctttgctgtgaggaatgctctgtgccagaaacagtgggagccctgacctgtgctgactggggctggggtgagagaggaaagacctacattccctctcctgcccagatgccctttggaaagccattgaccacccaccatattgtttgatctacttcatagctccttggagcaggcaaaaaagggacagcatgcccttggctggatcaggaatccagctccctagactgcatcccgtacctcttcccatgactgcacccagctccaggggcccttgggacacccagagctgggtggggacagtgataggcccaaggtcccctccacatcccagcagcccaagcttaatagccctccccctcaacctcaccattgtgaagcacctactatgtgctgggtgcctcccacacttgctggggctcacggggcctccaacccatttaatcaccatgggaaactgttgtgggcgctgcttccaggataaggagactgaggcttagagagaggaggcagccccctccacaccagtggcctcgtggttataagcaaggctgggtaatgtgaaggcccaagagcagagtctgggcctctgactctgagtccactgctccatttataaccccagcctgacctgagactgtcgcagaggctgtctggggcctttatcaaaaaaagactcagccaagacaaggaggtagagaggggactgggggactgggagtcagagccctggctgggttcaggtcccacgtctggccagcgactgccttctcctctctgggcctttgtttccttgttggtcagaggagtgattgaacctgctcatctccaaggatcctctccactccatgtttgcaatacacaattcc

SEQ ID NO: 1277 - DNA, 2771 bp, Homo sapiens
ggccacaggccagcgccactctgccaggctcccggccatcgcccgcctggtgcgccgcccgccagctctttgcccgcgcggggccgcccgccgcgggctcagggcagaccatgcgcccgccaagtccgctgcccgcccgctggctatgcgtgctggcaggcgccctcgcctgggcccttgggccggcgggcggccaggcggccaggctgcaggaggagtgtgactatgtgcagatgatcgaggtgcagcacaagcagtgcctggaggaggcccagctggagaatgagacaataggctgcagcaagatgtgggacaacctcacctgctggccagccacccctcggggccaggtagttgtcttggcctgtcccctcatcttcaagctcttctcctccattcaaggccgcaatgtaagccgcagctgcaccgacgaaggctggacgcacctggagcctggcccgtaccccattgcctgtggtttggatgacaaggcagcgagtttggatgagcagcagaccatgttctacggttctgtgaagaccggctacaccattggctacggcctgtccctcgccacccttctggtcgccacagctatcctgagcctgttcaggaagctccactgcacgcggaactacatccacatgcacctcttcatatccttcatcctgagggctgccgctgtcttcatcaaagacttggccctcttcgacagcggggagtcggaccagtgctccgagggctcggtgggctgtaaggcagccatggtctttttccaatattgtgtcatggctaacttcttctggctgctggtggagggcctctacctgtacaccctgcttgccgtctccttcttctctgagcggaagtacttctgggggtacatactcatcggctggggggtacccagcacattcaccatggtgtggaccatcgccaggatccattttgaggattatgggtgctgggacaccatcaactcctcactgtggtggatcataaagggccccatcctcacctccatcttggtaaacttcatcctgtttatttgcatcatccgaatcctgcttcagaaactgcggcccccagatatcaggaagagtgacagcagtccatactcaaggctagccaggtccacactcctgctgatccccctgtttggagtacactacatcatgttcgccttctttccggacaattttaagcctgaagtgaagatggtctttgagctcgtcgtggggtctttccagggttttgtggtggctatcctctactgcttcctcaatggtgaggtgcaggcggagctgaggcggaagtggcggcgctggcacctgcagggcgtcctgggctggaaccccaaataccggcacccgtcgggaggcagcaacggcgccacgtgcagcacgcaggtttccatgctgacccgcgtcagcccaggtgcccgccgctcctccagcttccaagccgaagtctccctggtctgaccaccaggatcccaggggcccaaggcggcccctcccgccccttcccactcaccccggcagacgccggggacagaggcctgcccgggcgcggccagccccggccctgggctcggaggctgcccccggccccctggtctctggtccggacactcctagagaacgcagccctagagcctgcctggagcgtttctagcaagtgagagagatgggagctcctctcctggaggattgcaggtggaactcagtcattagactcctcctccaaaggccccctacgccaatcaagggcaaaaagtctacatactttcatcctgactctgccccctgctggctcttctgcccaattggaggaaagcaaccggtggatcctcaaacaacactggtgtgacctgagggcagaaaggttctgcccggggaaggtcaccagcaccaacaccacggtagtgcctgaaatttcaccattgctgtcaagttcctttgggttaagcattaccactcaggcatttgactgaagatgcagctcactaccctattctctctttacgcttagttatcagctttttaaagtgggttattctggagtttttgtttggagagcacacctatcttagtggttccccaccgaagtggactggcccctgggtcagtctggtgggaggacggtgcaacccaaggactgagggactctgaagcctctgggaaatgagaaggcagccaccagcgaatgctaggtctcggactaagcctacctgctctccaagtctcagtggcttcatctgtcaagtgggatctgtcacaccagccatacttatctctctgtgctgtggaagcaacaggaatcaagagctgccctccttgtccacccacctatgtgccaactgttgtaactaggctcagagatgtgcacccatgggctctgacagaaagcagatacctcaccctgctacacatacaggatttgaactcagatctgtctgataggaatgtgaaagcacggactcttactgctaacttttgtgtatcgtaaccagccagatcctcttggttatttgtttaccacttgtattattaatgccattatcctgaattccccttgccaccccaccctccctggcgtgtggctgaggaggcctccatctcatgtatcatctggataggagcctgctggtcacagcctcctctgtctgcccttcaccccagtggccactcagcttcctacccacacctctgccagaagatcccctcaggactgcaacaggcttgtgcaacaataaatgttggcttgga

SEQ ID NO: 1278 - DNA, 6714 bp, Homo sapiens
ccctaggcccgggtcccggatccccgcgcacccggccaggctctggcacgttttgggggaggtgcctgcaggacccaacatactcaatgagcttccagcgcaatgtccgatcgctcggggccgactgccaagggaaaggatggaaagaagtattcctcgctcaacctgtttgatacgtataagggcaagtccttagagatccagaaacccgctgttgcccctcgccatggcctgcagagtctcgggaaagttgccattgcccggcgtatgccacctccagccaaccttccaagcctgaaagccgagaacaaaggcaatgaccccaatgtctcactagtgccaaaagacggaacaggatgggcaagcaaacaggagcagtccgaccccaagagttccgatgcctcaaccgctcagccgccggaatcgcagccactgccggcttcacagacgcctgcctccaaccagccgaaacgacccccagcagcccccgagaacactcctttggttccaagcggggtaaagtcctgggcacaagccagcgtcacccatggagcacatggagatggtggaagggcatcaagcctactgtcacgattctctcgagaggaatttccgaccctgcaggcggctggcgaccaggacaaggctgccaaggaaagggagtctgccgaacagtcgtctgggcccggaccaagcctccgcccccaaaattctacaacttggagggacggaggtgggcgtggccctgatgagctggagggcccggactccaaacttcatcatggtcatgatccccggggtgggctacagccttcaggcccaccccagttccctccctaccgcggaatgatgccgcctttcatgtatcccccatatctcccgttccctccgccctatggaccccaggggccttaccgataccccactcctgatgggcccagccgttttccccgtgtggcgggcccccgaggctcagggccaccaatgcgcttagtagagcctgtgggtcgtccctctattctcaaagaggataatctcaaagagtttgatcagttggatcaggagaatgatgatggttgggcaggggcccatgaagaggttgactacactgaaaagctcaagttcagcgatgaggaagatgggcgagactctgatgaggagggagctgagggccacagggattcccaatcagcttctggtgaggaacggccccctgaagcagatggcaaaaagggcaactcccccaacagcgaaccgcccactcctaagacggcctgggcagaaacctctcggcctccagagacagagccgggacctcctgccccaaagcctcccctaccccctggggactacccagatcgtgggggtcctccctgcaagcccccagcacctgaagatgaggatgaggcatggcggcagcgacgaaagcagtcgtcatctgagatttccctggcagtggagcgggcccggcgacggcgagaagaagaggagcggcgcatgcaagaagagcgccgggcagcctgtgctgagaagctcaagcgactcgatgaaaagtttggggcacctgacaagcggctcaaagcagagcctgctgccccacctgctgccccttctaccccagctccaccacctgcagtccctaaagaactccctgcacctccagctccacctccagcatcagccccaacaccagagaaagaacctgaagagccagcacaggcccctcctgcccaatctactcctactccaggtgtggctgcggctcccactctggtgagtggtggtggcagtaccagtagcaccagcagtggcagcttcgaagccagcccagtggaaccacaactgccctcaaaagagggtcctgaaccaccagaagaggttcctcctcctaccacacccccagttccaaaggtggaacccaagggtgatgggattggtcccacccgccagccccctagtcagggcttgggctaccccaaatatcagaagtcgttgcctcctcgtttccagcggcagcagcaggagcagctcctgaagcagcagcagcagcaccagtggcagcagcatcaacagggctctgcccctcctaccccagtgcccccatcaccaccacagcctgtgaccctgggggctgtgccagctccacaggctccacccccgccccccaaggccctgtacccaggtgctctgggccggcccccacccatgcccccaatgaactttgatccccgatggatgatgattcctccttatgtggacccccggctcctccagggtcgtccccctctagacttctaccctcctggtgtgcatccctctggcctagttccccgagagcgttcagacagtgggggctcaagctcagagccatttgaccgtcatgcacctgctatgttacgggaacggggcactccaccggtggatccaaagttggcctgggtaggagatgtcttcaccgccacacccgctgaaccccgcccacttacctcacctctgcgccaggctgcggatgaggatgacaaggggatgaggagcgagactcctccagtacctcccccaccaccctatctggccagttatccaggctttcctgagaatggagcccctgggcccccaatctctcgctttcctctggaggaaccagggccccgtccactcccctggcccccaggcagtgatgaagtggccaagatacaaactccaccacccaagaaggagccccctaaggaggagactgcacagctgacggggccagaagcaggccgaaagcctgcccgcggagtcgggagtggaggccagggccccccaccaccacgcagagagagtcgcacagagacccgctggggccctcgtccagggagcagtcgtcgtggaatccctccagaggagccaggggccccaccccgccgggctgggcctataaagaaacctccaccacctacaaaagtagaagagctgcctcccaagcccctcgaacagggggatgaaacccccaaacccccaaagccagacccactcaagataaccaaggggaagctagggggccccaaggagaccccacccaatggaaatctttcccctgccccaaggcttcggagggactattcgtatgaaagagtgggtcctacctcttgccggggtcggggccgaggcgagtattttgccagagggaggggttttcgggggacctatgggggacgagggcggggagcccgaagccgggaattccgcagttaccgagagtttcgaggagatgatgggcgtggaggtgggacagggggaccaaaccaccctcctgctccccgaggccgcactgccagcgagacacggagcgagggttcagagtatgaggaaatccccaagcggcgccggcagcggggctcagaaacaggcagcgagacccatgagagtgatctggctccttcagacaaggaggctcccacacccaaggagggaacactcacccaggtccctctcgctcccccaccaccaggagccccaccttcaccagccccagcccgcttcactgcccggggtgggcgagtcttcactcccagaggggtgccatctcgccggggccgaggaggagggaggccccctcctcaagtttgcccaggctggagccctccagccaagtctctggctcccaagaaacctcccacaggccctttgccaccaagtaaggagcctttgaaagagaagttgatcccagggcctctgtcccctgtggcgcgcggaggcagcaatggaggtagcaatgtgggcatggaagatggggagcgaccccgaaggaggcgacatgggagggctcagcagcaggataaaccgcctcgtttccggaggctgaagcaggaacgggagaatgccgcaagggggtctgagggcaagccctccctaacccttccagcctccgctcctgcacctgaggaggccctcacaacagtcacagtggccccagcacctcgccgggcagctgccaagtctcctgatctgtcaaaccagaactcagaccaagccaatgaggaatgggagactgcatcagagagcagtgacttcaccagtgagcgccgaggggacaaagaggcacccccaccagtactgctgacacccaaggctgtgggaactcctgggggaggtggaggtggagccgtaccaggtatttcagccatgtcccgcggagatctgagccagagagccaaggatttgagtaaacggagcttctcaagtcagcggccaggcatggaacggcagaatcggcgccctggcccagggggcaaggctggcagcagtggcagcagcagtggaggaggcggtgggggtcctggaggaaggaccgggccaggacgaggcgacaagaggagctggccctctcccaagaaccgaagtcgtcctccagaggagcgtcccccggggcttcccctgcctcccccacctcccagcagttctgctgtcttccgcctggaccaagttatccacagcaaccctgctggcatccaacaggctctggcccagcttagtagccgtcaagggagtgtaactgcaccagggggtcatccaaggcacaagcctgggcctccccaagcccctcagggcccctctcctaggcccccaacccgatacgagccccagagggtcaacagcggcctcagttctgacccccactttgaggagccggggccaatggtgagaggggtgggtgggactcctcgggactctgccggggttagtccctttccccctaaacgtcgggagcggcctcccagaaaaccagagctgctacaggaggaatctttgccacctcctcatagctctggattcttgggctctaagcctgagggcccaggccctcaggcagagtccagagatacaggcacagaggccctgacccctcacatctggaaccgtttacatactgccactagccgaaagagttaccggcccagctccatggagccttggatggagcccctgagtccttttgaggatgtggctggcacagaaatgagtcagtctgacagtggggtggacctgagtggggattctcaggtgtcatcaggtccctgcagccagcgaagttcccctgatggaggactcaagggggcagcagagggaccccccaagaggcctggaggctcctcacccctgaatgctgttccttgtgagggtccacctggctctgaacctcctaggagaccaccacctgccccccacgatggggacagaaaggagctgccccgggagcagcctctgccccctggccccattggcacagaacgatcacagcatacagaccgaggcacagagcctggccccattcggccatcccatcgacctggtcccccagtccagtttggcactagtgacaaggactcagacttacgcctagtggtaggagacagcttgaaagcagagaaggagctaacagcatcagtcactgaggccattcctgtatcacgagactgggagctgcttcccagtgctgctgcctctgctgagccacaatccaagaacctggattctgggcactgtgtcccggagcccagctcctcaggccagcgcctgtatcctgaggttttctatggcagtgctgggccttccagttctcagatctctgggggagccatggactctcaattacatccaaacagtggaggcttccgccctgggacaccctcactgcacccttacagatcacagcccctatacctaccccccggcccagcccctccctcagcactgctctctggggtagctctcaagggccagtttctggatttctccacaatgcaagctacagagctggggaagttgccggctggaggagttctctaccctccaccttccttcctctactctccggctttctgccccagtcctttgcctgacacatcgttgcttcaggtacgccaggatctgccatccccttcggatttttattctactcctctgcagcctggtggccaaagtggctttctcccttcaggggctcctgcccagcagatgcttctacccatggtagactcacagctgcctgtggtgaactttggctccctgccgccagcaccacctcctgccccacctcccctttctctgttacctgtgggccctgctctgcagccccccagcctggctgtgcggcccccacctgctcctgctactcgggtgctgccttcacctgccaggcccttccccgctagcttggggcgagcagagctgcatccagtggaactaaagccgttccaggattatcaaaaactgagcagcaaccttgggggacctggatcatcacggactcccccaactggaaggtccttctctggcctcaattcccgtctcaaggccacgccttccacctacagtggagtcttccgcacccagcgcgtcgacctttaccagcaggcctccccaccagatgccctgcgctggatacctaagccttgggagcggacagggctgccacctcgagaagggccctcccgacgggcagaggagcctgggtcccgaggggacaaggagcctgggttgcccccaccccgctgagggagttcctcttgccccctacccccggggcttgtatatagattataaatatataagggggaaaggggtgggcggggaggggttgtggggctggggcctcacttcccctcctcccccttcccctggtcccctgtccctggggctgtttgttaaaaaagagtaataaaaggattt

SEQ ID NO: 1279 - DNA, 3773 bp, Homo sapiens
tagtgcgacgcacgcaggcgtagtacggtcccccgggcgacagcggtggcggctcctcggggtgctcggctccctcccacctaggccggccccggcccgactcgccctcagaaactcactgtttggggctgcggactttctcgtcgtgccccacaaaagtaaagcttggggacctggggggagccggaagtatcgcttcgagatccccaaatactatcggggaaacggaagtggccgtcggtggcaggtttgggggagaccggaagtgacgagacctgtcggccatggagcctaatgatagtaccagtaccgctgtggaggagcctgacagcttggaggtgttggtgaagaccttggactctcaaactcgtacctttattgtgggggcccagatgaatgtaaaagagtttaaggagcacattgctgcctctgtcagcatcccatctgaaaaacaacggctcatttaccagggacgagttctgcaagatgataagaagcttcaggaatacaatgttgggggaaaggttatccacctggtggaacgggctcctcctcagactcacctcccttctggggcatcttctgggacggggtctgcctcagccactcatggtgggggatccccccctggtactcgggggcctggggcctctgttcatgaccggaatgccaacagctatgtcatggttggaaccttcaatcttcctagtgacggctctgctgtggatgttcacatcaacatggaacaggccccgattcagagtgagccccgggtacggctggtgatggctcagcacatgatcagggatatacagaccttactatcccggatggagactctcccctaccttcagtgtcgaggagggccccaaccgcagcacagtcagccgcccccgcagccaccggctgtgaccccggagccagtagccttgagctctcaaacatcagaaccagttgaaagtgaagcacctccccgggagcccatggaggcagaagaagtggaggagcgtgccccagcccagaacccggagctcactcctggcccagccccagcgggcccaacacctgccccggaaacaaatgcacccaaccatccttcccctgcggagtatgtcgaggtgctccaggagctacagcggctggagagtcgcctccagcccttcttgcagcgctactacgaggttctgggtgctgctgccaccacggactacaataacaatcacgagggccgggaggaggatcagcggttgatcaacttggtaggggagagcctgcgactgctgggcaacacctttgttgcactgtctgacctgcgctgcaatctggcctgcacgcccccacgacacctgcatgtggtccggcctatgtctcactacaccacccccatggtgctccagcaggcagccattcccatacagatcaatgtgggaaccactgtgaccatgacaggaaatgggactcggccccccccaactcccaatgcagaggcacctccccctggtcctgggcaggcctcatccgtggctccgtcttctaccaatgtcgagtcctcagctgagggggctcccccgccaggtccagctcccccgccagccaccagccacccgagggtcatccggatttcccaccagagtgtggaacccgtggtcatgatgcacatgaacattcaagattctggcacacagcctggtggtgttccgagtgctcccactggccccctgggaccccctggtcatggccaaaccctgggacagcaggtgccaggcttcccaacagctccaacccgggtggtgattgcccggcccactcctccacaggctcggccttcccatcctggagggcccccagtctctgggacactgcagggcgccggtctgggtaccaatgcctcgttggcccagatggtgagcggccttgtggggcagcttcttatgcagccagtccttgtggctcaggggaccccaggtatggctccaccgccagcccctgccactgcttctgccagtgctggcaccaccaacacagctaccacagctggccccgctcctggggggcctgcccagcctccacccacccctcaaccctccatggctgatcttcagttctctcagcttctggggaacctgctagggcctgcagggccaggggctggagggcctggtgtggcttctcccaccatcactgtggcgatgcctggtgtccctgcctttctccaaggcatgactgacttcttgcaggcaacacagacagcccctccaccacccccacctcctccacccccaccacctgccccagagcagcagaccatgcccccaccaggctccccttctggtggcgcagggagtcctggaggcctgggtcttgagagcctgtcaccggagttttttacctcagtggtgcagggtgtgctcagctccctgctgggctccctgggggctcgggctggcagcagtgaaagtattgctgccttcatacaacgcctcagtggatccagcaacatctttgagcctggagctgatggggcccttggattctttggggccttgctttctcttctgtgccagaacttctctatggtggacgtagtgatgcttctccatgggcatttccagccactacaacggctccagccccagctgcgatccttcttccaccagcactacctgggtggtcaggagcccacacccagtaacatccggatggcaacccacacattgatcacggggctagaagagtatgtgcgggagagtttttccttggtgcaggttcagccaggtgtggacatcatccggacaaacctggaatttctccaagagcagtttaatagcattgctgcgcatgtgctgcattgcacagatagtggatttggggcccggttgctggagttgtgtaaccaaggcctgtttgaatgcctggccctaaacctgcactgcttggggggacagcagatggagcttgctgctgttatcaatggccgaattcgtcgtatgtctcgtggggtgaatccctccttggtgagctggctgaccactatgatgggactgaggcttcaggtggtactggagcacatgcctgtaggccctgatgccattctcagatacgttcgcagggttggtgatcccccccagccacttcctgaggagccaatggaagttcagggagcagaaagagcttcccctgagcctcagcgggagaatgcttccccagcccctggaacaacagcagaagaggccatgtcccgaggtccacctcctgctcctgaggggggctcccgggatgaacaggatggagcttcagctgagacagaaccttgggcagctgcagtccccccagaatgggtccctattatccagcaggacattcagagccagcggaaggtgaaaccgcagccccctctgagtgatgcctacctcagtggtatgcctgccaagagacgcaagacgatgcagggtgagggcccccagctgcttctctcagaggctgtgagccgggcagctaaggcagccggagctcggcccctgacgagccccgagagcctgagccgggacctggaggcaccagaggttcaggagagctacaggcagcagctccggtctgatatacaaaaacgactgcaggaagaccccaactacagtccccagcgcttccccaatgcccagcgggcctttgctgatgatccttagctctttgctctatggcccttcctcatcaggggaccgtttcccccctcttccttcacagtatttaagaaataaaagtcggatttttctggc

SEQ ID NO: 1280 - DNA, 1854 bp, Homo sapiens
acaggcattttccaaaggcaagcctggagcgcacggatctgtataaccgcggaaggccctgtttccggtcccttgcgcctgcgctcttgcagccaagaaggcgggaggctggagtagagggaagcctgcaaccggaagtgaaggcagatttccctccttcgtcgctgttgctgccgccatacgcgctctccctgtttagctcttctgttagaaatagtatctttgttttcctttgctgttcctcaatcccctactcttcaccccttgttttcacctattttgcgagaacccatccagatcccccttcccttcttcccctgccggcccagttatggcagagaacgatgtggacaatgagctcttggactatgaagatgatgaggtggagacagcagctgggggagatggggctgaggcccctgccaagaaggatgtcaagggctcctatgtctccatccacagctctggctttcgtgacttcctgctcaagccagagttgctccgggccattgtcgactgtggctttgagcatccgtcagaagtccagcatgagtgcatccctcaggccattctgggaatggatgtcctgtgccaggccaagtcgggcatgggaaagacagcagtgtttgtcttggccacactgcaacagctggagccagttactgggcaggtgtctgtgctggtgatgtgtcacactcgggagttggcttttcagatcagcaaggaatatgagcgcttctctaaatacatgcccaatgtcaaggttgctgttttttttggtggtctgtctatcaagaaggatgaagaggtgctgaagaagaactgcccgcatatcgtcgtggggactccaggccgtatcctagccctggctcgaaataagagcctcaacctcaaacacattaaacactttattttggatgaatgtgataagatgcttgaacagctcgacatgcgtcgggatgtccaggaaatttttcgcatgaccccccacgagaagcaggtcatgatgttcagtgctaccttgagcaaagagatccgtccagtctgccgcaagttcatgcaagatccaatggagatcttcgtggatgatgagacgaagttgacgctgcatgggttgcagcagtactacgtgaaactgaaggacaacgagaagaaccggaagctctttgaccttctggatgtccttgagttcaaccaggtggtgatctttgtgaagtctgtgcagcggtgcattgccttggcccagctactagtggagcagaacttcccagccattgccatccaccgtgggatgccccaggaggagaggctttctcggtatcagcagtttaaagattttcaacgacgaattcttgtggctaccaacctatttggccgaggcatggacatcgagcgggtgaacattgcttttaattatgacatgcctgaggattctgacacctacctgcatcgggtggccagagcaggccggtttggcaccaagggcttggctatcacatttgtgtccgatgagaatgatgccaagatcctcaatgatgtgcaggatcgctttgaggtcaatattagtgagctgcctgatgagatagacatctcctcctacattgaacagacacggtagaagactcgcccattttggaatgtgaccgtctgtccttcaggagaggacaccagggtgggggtgaaggagacactactgcccccacccctgacagcccccaccccatggcttccatcttttgcatcaccaccactcctgaacccccatttctgatttgtcagaatttttttttaacaaaactaaaaatgaaacacatgtgtctgtggtatctaaaaaaaaaaaaaaaaaaaaaaaaa

SEQ ID NO: 1281 - DNA, 1652 bp, Homo sapiens
tcccgacgagcaacgcgtttgtagaggggtgggtgcgcacgctctgtccctgcgtgaccttccgaccccgctgtcctcaccgcaatggcggctgtgagggccctggtggcctcgaggctcgctgcggcatctgcattcacgtccctgtcccccggcggtcggacgccttcccagcgcgcagcccttcacctctccgtgccgcgccccgcggccagggtcgcgctggtgctgtctggatgcggagtctacgatgggaccgagatccacgaggcctcggcgatcctggtgcacctgagccgtggaggggctgaagtccagatctttgctcctgacgtccctcagatgcacgtgattgaccacaccaaggggcagccgtccgaaggcgagagcaggaatgttttgaccgagtctgcgaggatcgcccgtggcaaaatcacagacctggccaacctcagtgcagccaaccatgatgctgccatctttccaggaggctttggagcggctaaaaacctgagcacgtttgccgtggacgggaaagattgcaaggtgaataaagaagtggagcgtgtcctgaaggagttccaccaggccgggaagcccatcggcttgtgctgcattgcacctgtcctcgcggccaaggtgctcagaggcgtcgaggtgactgtgggccacgagcaggaggaaggtggcaagtggccttatgccgggaccgcagaggccatcaaggccctgggtgccaagcactgcgtgaaggaagtggtcgaagctcacgtggaccagaaaaacaaggtggtcacgaccccagccttcatgtgcgagacggcactccactacatccatgatgggatcggagccatggtgaggaaggtgctggaactcactggaaagtgacgcgcatggacggggcccagctaggcgccaggacttggcctcaccctctggctgaggagctgtcggctgctttccatccagctgggagtctggcaggcccttttttttttttctttgccgaaacctgcaggcgttctctctctaaggaggatgtgctgcagtgcatgggggatgtttcttcctgggtgtggctgggctgctctcacatacagaggccgaggggccaattcgttctctgccacagggacttgcctcactgtgtcccaaaaacaaatcgcagccagcttttccagaaatagaaaattctgccgtctgaggttttatacttcaggttagttagtttttggaaggaagaacatttttaggtttgcaagcctcctgatcaggaaaccagaaataccacatttatggaccatgaaaggttggttcttgactctgaagggacttttgagttaatcagcgtaaggggatttctaaagcaggcaatccctgtagccgcagagaataaacgccttcccaaaatggcaacttcccacagccacatttcagacctgctgagactgctgagtgaggaatggcagtgaggtttcttcaattagtctcagttctcttaattttcaggaagaaagggaaattgcagctcctcagcccccaggattgacctctggggagtgatggtagcgttggtgccaggccgtgggttcaggtgtggcagaagcttgcagatgcgtccgaagggaaataaagtgtgttggcgttag

SEQ ID NO: 1282 - DNA, 1652 bp, Homo sapiens; identical to SEQ ID NO: 1281

SEQ ID NO: 1283 - DNA, 3167 bp, Homo sapiens
gaattccgcttctacagctgctgctgcggcggctatggcggcggcacgggcggtggactgaggatagagagccacagcacgaggagctgccaggcctggacagccagtgcggccagatagaaaacggcgagagtgggcgagaacgtccactgcgggccggcgaaagctggttccttgtggagaagcactggtataagcagtgggaggcatactgcagggaggggaccaggactccagcaccttccctggctgcatcaacaatccacactctttcaagatgagataaactggccctcaaggaggactggtggaaggcgaggattatgtgctgctcccagcacgtgcttggcattacctggtcagctggtatggtctagagcatggccagccacccattgaacgcaaggtcatagagctgcccaacatccagaaggtcgaagtgtacccagtagaactgctgcttgtccggcacaatgatttgggcaaatctcacactgttcagttcagccataccgattctattggcctagtattgcgcacagctcgggagcggtttctggtggagccccaggaagacactcggctttgggccaagaactcagaaggctctttggataggttgtatgacacacacatcacggttctcgatgcggcccttgagactgggcagttgatcatcatggagacccgcaagaaagatggcacttggcccagcgcacagctgcatgtcatgaacaacaacatgtcggaagaggatgaggacttcaagggtcagccaggcatctgtggcctcaccaatctgggcaacacgtgcttcatgaactcggccctgcagtgcctcagcaatgtgccacagctcaccgagtacttcctcaacaactgctacctggaggagctcaacttccgcaacccactgggcatgaagggtgagatcgcagaggcctatgcagacctggtgaagcaggcgtggtctggccaccaccgctccattgtgccacatgtgttcaagaacaaggttggccattttgcatcccaatttctgggctaccagcagcatgactctcaggagctgctgtcattcctcctggacgggctgcatgaggaccttaatcgggtgaagaagaaggagtatgtggagctgtgcgatgctgctgggcgaccggatcaggaggtggcacaggaggcatggcaaaaccacaaacggcggaacgattctgtgatcgtggacactttccacggcctcttcaagtccacgctggtgtgccccgattgtggcaatgtatctgtgaccttcgaccccttctgctacctcagtgttccactgcctatcagccacaagagggtcttggaggtcttctttatccccatggatccgcgccgcaagccagagcagcaccggctcgtggtccccaagaaaggcaagatctcggatctatgtgtggctctgtccaaacacacgggcatctcgccagagaggatgatggtggctgatgtcttcagtcaccgcttctataagctctatcagctagaggagcctctgagcagcatcttggaccgtgatgatatcttcgtctatgaggtgtcaggtcgcattgaggccattgagggctcaagagaggacatcgtggttcctgtctacctgcgggagcgcacccctgcccgtgactacaacaactcctactacggcctgatgctttttggacaccccctcctggtatcagtgccccgggaccgcttcacctgggagggcctgtataacgtcctgatgtaccggctctcacgctacgtgaccaaacccaactcagatgatgaggacgatggggatgagaaagaagatgacgaggaggataaagatgacgtccctgggccctcaactgggggcagcctccgagaccctgagccagagcaggctgggcccagctctggagtcacgaacaggtgcccgttcctcctggacaattgccttggcacatctcagtggcccccaaggcgacgacgcaagcagctgttcaccctgcagacggtgaactccaatgggaccagcgaccgcacaacctcccctgaagaagtccatgcccagccgtacattgctatcgactgggagccagagatgaagaagcgttactatgacgaggtagaggctgagggctacgtgaagcatgactgcgtcgggtacgtgatgaagaaggctcccgtgcggctgcaggagtgcattgagctcttcaccactgtggagaccctggagaaggaaaacccctggtactgcccttcctgcaagcagcaccagctggcaaccaagaagctggacctgtggatgctgccggagattctcatcatccacctgaaacgcttttcctacaccaagttctcccgagagaagctggacaccctcgtggagtttcctatccgggacctggacttctctgagtttgtcatccagccacagaatgagtcgaatccggagctgtacaaatatgacctcatcgcggtttccaaccattatgggggcatgcgtgatggacactacacaacatttgcctgcaacaaggacagcggccagtggcactactttgatgacaacagcgtctcccctgtcaatgagaatcagatcgagtccaaggcagcctatgtcctcttctaccaacgccaggacgtggcgcgacgcctgctgtccccggccggctcatctggcgccccagcctcccctgcctgcagctccccacccagctctgagttcatggatgttaattgagagccctgggtcctgccacagaaaaaaaaaaaaaaaagccctctctgcaatctcgcttctcgtgtccgccccgcttctcttattcgtgttaggtgcccccgccaggcattgcaggcttagtcgtggctactgttctcctgtgccgctgcatcgctctctcccgggaaagaacaggtcgtgtctcctcctagcagtgcgcgccccgcctgtgtttgcccttccagcagtgaccctcccttctagtctttatttatggtcgtgcccttccctctcctcagcccagagtgttctgcgtgggtggtgatgggggttcacctgaacacagagtgtattttcttattgaggccctgtaccttctgctgtgtgtgtgtatatataaagcaccagtctgctccccaaaaaaaaaacggaattc

SEQ ID NO: 1284 - DNA, 8171 bp, Homo sapiens
cttttctcaagacaactacataagcagacaaaattgcaaagatctgccctgtgtcgagtatgacagccacgactcgtggctctccggtcggagggaatgacaaccagggccaggctcctgatggacagtctctgccccccctccaacagaatcagacttcatcgcctgattcttccaatgaaaattccccggcaactcccccagatgagcaaggtcaaggtgatgccccaccacagcttgaagatgaggaacctgcatttccacatactgacttggccaagttggatgacatgatcaacaggcctcgatgggtggttccagttttgccgaaaggggaattagaagtgcttttagaagctgctattgatcttagtaaaaagggccttgatgttaaaagtgaagcatgtcagcgatttttccgtgatgggctaacaatatcattcactaaaattcttacagatgaagcagtgagtggctggaagtttgaaattcataggtgtctggtggagctatgtgtggccaagttgtcccaagactggtttccacttttagaacttcttgccatggccttaaatcctcattgcaaattccatatctacaatggtacacgtccatgtgaatcagtttcctcaagtgttcagttgcctgaagatgaactctttgctcgttctccagatcctcgatcaccaaagggttggctagtggatcttctcaacaaatttggcactttaaatgggttccagattttgcatgatcgttttattaatggatcagcattaaacgttcaaataattgcagcccttattaaaccatttgggcaatgctatgagtttctcactcttcatacagtgaaaaagtactttcttccaataatagaaatggttccacagtttttagaaaacttaactgatgaagaactgaaaaaagaagcaaagaatgaagccaaaaatgatgctctttcaatgattattaaatctttgaagaatttagcttcaagggttccaggacaagaagaaactgttaaaaacttagaaatatttaggttaaaaatgatacttagattattgcaaatttcttctttcaatggaaagatgaatgcactgaatgaagttaataaggtgatatctagtgtatcatactatactcatcgacatggtaatcctgaggaggaagagtggctcacagctgaacgaatggcagaatggatacagcagaacaatatcttatccatagtgttgcgagatagtcttcatcagccacagtatgtagaaaagttagagaagattcttcgttttgtcatcaaagaaaaagctctgaccttacaggatcttgataatatctgggcagcacaggcagggaaacatgaagccattgtgaagaatgtacatgatctcctggcaaaattggcatgggatttttctcctgaacaacttgatcatccttttgattgttttaaggccagtcggacaaatgcgagtaaaaagcaacgtgaaaagctacttgagctgatacgtcgtcttgcagaagatgataaagatggtgtgatggcacacagagtgttgaaccttctgtggaatctggctcacagtgatgatgtgcctgtagatatcatggacctggctctcagtgcccacataaaaatactagattacagttgctcccaggaccgtgatacacaaaagatccaatggatagatcgctttatagaagaacttcgcacaaatgacaaatgggttattcccgcactgaaacaaattagagaaatttgtagtttgtttggtgaagcgcctcaaaatttgagtcaaactcagcgaagtccccatgtgttttatcgccatgacttaatcaatcaacttcaacacaatcatgccctagttactttggtagcagaaaaccttgtaacttacatggaaagcatgagactatatgctagagaccatgaagattatgacccacaaactgtgaggctgggaagtagatatagtcatgttcaagaagttcaagaacggcttaacttccttagatttttattgaaggatggtcagctgtggctatgtgctcctcaggcaaaacaaatatggaaatgcttagctgagaatgcagtttacctttgtgatcgtgaagcctgttttaagtggtattccaagttgatgggggatgaaccagacttagatcctgatattaataaggacttctttgaaagtaatgtgcttcagcttgatccttctctgttaactgaaaatggaatgaagtgttttgagcgattcttcaaagctgtgaattgtcgagaaggaaaactagtagcaaaaaggagagcctatatgatggatgacttggagttaataggattagattacctttggagggtcgtgattcagagtaatgatgatattgccagcagagctatagatctcctcaaagagatatacacgaaccttggtccaagactacaagtcaatcaggtggtgatccatgaagacttcattcagtcttgttttgatcgtctgaaggcttcctatgacacattgtgtgttttggatggtgacaaagacagtgttaattgtgcaagacaggaagctgttcgaatggttcgagtattaactgttttaagggaatatataaatgaatgtgacagtgattatcatgaggaaagaacaattctccctatgtcgagagcattccgcggtaaacacctctcttttgtagttcgatttccaaaccagggcagacaggttgatgacttggaggtatggtctcatacaaatgatacaattggttcagtacgacgatgtattctcaatcgtattaaagccaacgtagcccatacaaaaattgagctctttgtgggcggtgagctgatagatcctgcagatgatagaaagttgattggacaattaaacttaaaagataaatcgcttattacagccaaacttacacagataagttccaatatgccttcaagccctgatagctcttctgattcctccactggatctcctggaaaccatggtaatcattacagtgatggtcccaatccagaagtggaaagctgtttgcctggagtgataatgtcactgcatcccagatacatctcttttctttggcaagttgcagacttaggtagcagcctaaatatgccaccccttagagatggagcaagagtacttatgaaacttatgccgccagatagcacaacgatagaaaaattaagagctatttgtttagaccatgccaaacttggagaaagcagccttagtccatctcttgactcacttttctttggtccttcagcctcacaagtgctatatctaacagaggtagtctatgccttgttaatgcctgctggtgcacctctggctgatgattcctctgattttcagtttcacttcttgaaaagtggtggcctaccccttgtactgagtatgctaaccagaaataacttcctaccgaatgcagatatggaaactcgaaggggtgcctacctcaatgctcttaaaatagccaagcttttgctaactgccattggctatggtcatgttcgagctgtggcagaagcttgtcagccaggtgtagaaggtgtgaatcccatgacacagatcaaccaagttacccatgatcaagcagtggtgctacaaagtgcccttcagagcattcctaatccatcatccgagtgcatgcttagaaatgtgtcagttcgtcttgctcagcagatatctgatgaggcttcaagatatatgcctgatatttgtgtaattagagctatacaaaaaattatctgggcatcaggatgtgggtcgttacagctagtatttagcccaaatgaagaaatcactaaaatttatgagaagaccaatgcaggcaatgagccagacttggaagacgaacaggtttgctgtgaagcattggaagtgatgaccttatgttttgccttgattccaacagccttagatgctcttagtaaagaaaaggcttggcagacattcatcattgacttactattgcactgtcacagcaaaactgttcgtcaggtggcacaggagcagttctttttaatgtgcaccagatgttgcatgggacaccggcctctacttttcttcattactctactctttactgttttggggagcacagcaagagagagagctaaacactcaggcgactactttactcttttaagacaccttcttaattacgcttacaatagtaatattaatgtacccaatgctgaagttcttttcaataatgaaattgattggcttaaaagaattagggatgatgttaaaagaacaggagaaacgggtattgaagagacgatcttagagggccaccttggagtgacaaaggagttactggcctttcaaacttctgagaaaaaatttcatattggttgtgaaaaaggaggtgctaatctcattaaagaattaattgatgatttcatatttcctgcatccaatgtttacctacagtatatgagaaatggagagcttccagctgaacaggctattccggtctgtggttcaccacctacaattaatgctggttttgaattacttgtagcattagctgttggctgtgtgaggaatctcaaacaaatagtagattctttgactgaaatgtattacattggcacagcaataactacttgtgaagcacttactgagtgggaatatctgccacctgttggaccccgcccacccaaaggattcgtggggctgaaaaatgccggtgctacttgttacatgaattctgtgattcagcaactctacatgattccttccattaggaacggtattcttgccattgaaggcacaggtagtgatgtagatgatgatatgtctggggatgagaagcaggacaatgagagcaatgttgatcccagggatgatgtatttggatatcctcaacaatttgaagataaaccagcattaagtaaaactgaagatagaaaagagtacaacattggtgtcctaagacaccttcaggtcatctttggtcatttagctgcttctcgactgcaatactatgtgcccagaggattttggaaacagttcaggctttggggtgagcctgttaatctgcgtgaacaacacgatgctttagaattttttaattcattggtggatagtttagatgaagctttaaaagctttaggacatccagctatgctaagtaaagtcttaggaggttcctttgctgatcagaagatctgccaaggctgcccacataggtacgaatgtgaagaatcttttacgaccctaaacgtagacattagaaatcaccaaaatcttcttgattctttggaacagtatgtcaaaggagatttactagaaggtgcaaatgcatatcattgtgaaaaatgcaataaaaaggttgataccgtaaagcgcttgctgattaaaaaattacctcctgttcttgctatacaactaaagcgatttgactatgactgggaaagagaatgtgcaatcaagttcaatgattattttgaatttcctcgagagctggacatggaaccttacacagttgcaggtgtcgcaaagctggaaggggataatgtaaacccagagagtcagttgatacaacagagtgagcagtctgaaagtgagacagcaggaagcacaaaatacagacttgtgggtgtgctcgtacacagtggtcaagcgagtggggggcattattattcttacatcatccaaaggaatggtggagatggtgagagaaatcgctggtataaatttgatgatggtgatgtaacagaatgtaaaatggatgatgacgaagaaatgaaaaaccagtgttttggtggagagtacatgggagaagtgtttgatcacatgatgaagcgtatgtcatacaggcgccagaaaaggtggtggaatgcttatatacctttttatgaacgaatggacacaatagaccaagatgatgagttgataagatatatatcagagcttgctatcaccaccagacctcatcagattattatgccatcagccattgagagaagtgtacggaaacagaacgtacaattcatgcataaccgaatgcagtacagtatggagtattttcagtttatgaaaaaactgcttacatgtaatggcgtttacttaaaccctcctcccgggcaagatcacctgttgcctgaagcagaagaaatcactatgatcagtattcaacttgctgctaggttcctctttactacaggatttcacacaaagaaagtagtccgtggctctgccagtgattggtatgatgcattgtgtattctccttcgtcacagcaagaatgtacgtttttggtttgctcataacgtcctttttaatgtttcaaatcgcttctccgaataccttctggagtgccctagtgcagaagtgaggggtgcgtttgcaaaacttatagtctttattgcacatttttccttgcaagatgggccatgtccttcaccttttgcctctcctggaccttctagtcaggcttatgacaacttaagcttgagtgatcacttactaagagcagtactaaatctcttgagaagggaagtttcagagcatgggcgtcatttacagcagtatttcaacctgtttgtaatgtatgccaatttaggtgtggcagagaagacacagcttctgaaattgagtgtacctgctacttttatgcttgtgtctttagatgaaggtccaggtcctccaatcaaataccagtatgctgaattaggcaaattatactcagtagtgtcacagctgatccgctgttgcaatgtctcttcaagaatgcagtcttcaatcaatggtaatcctcctcttcccaatccttttggtgatcctaatttatcacaacctataatgccaattcagcagaatgtggcagacattttatttgtgagaacaagttatgtgaagaaaatcattgaagactgcagtaattcagaggaaaccgtcaaattgcttcgtttttgctgctgggagaatcctcagttctcatctactgtcctcagtgaacttctctggcaggttgcatattcctatccctatgaactgcggccctatttggatctgcttttgcaaatcttactgattgaggactcctggcaaactcacagaattcataatgcactgaaaggaattccagatgaccgagatgggctgtttgacacaatccagcgctctaagaatcactatcaaaaaagagcataccagtgtataaaatgtatggtagctctatttagtaactgtcctgttgcttaccaaatcctgcagggcaatggagatcttaaaagaaagtggacctgggcagtggaatggcttggagatgaacttgaaagaagaccatatactggcaatcctcagtacacttacaacaattggtctcccccagtgcaaagcaatgaaacgtccaatggttatttcttggagagatcacatagtgctaggatgacacttgcaaaagcttgtgaactctgtccagaggaggtaaaaaaagccaccagtgtgcagcagatagaaatggaagagagcaaagagccagatgaccaagatgctccagatgaacatgagtcgcctccacctgaagatgccccattgtacccccattcacctggatctcagtatcaacagaataaccatgtgcatggacagccatatacaggcccagcagcacatcacatgaacaaccctcagagaactggccaacgagcacaagaaaattatgaaggcagtgaagaagtatccccacctcaaaccaaggatcaatgaaatgcacataattaactggttccatcaagactgtgcacccaggccttacagtccaacctttttctgtgtctggctaatatttaaaactagaaaaactattcctaatcaacatggagtggagagtttattcactgtcttatctgcagaaatttgctgtcaatatataacccgcctgcagtggaaagtgtatagtgttttgtaataaatggcctgatgctaatgtgtaaatggcaaaggtgtatatagtatattaatgttgactgttaattcttaagcaagaaacttttttcttgatgagactcacagatctacacaaactacaaaagttaattttcttgttacacccactgcactctgcaaccagtgttgcctgcctcatggcagttggatcagctcctttacaaaaaagaaaaaaaaaaa

SEQ ID NO: 1285 - DNA, 9372 bp, Homo sapiens
tgaataattgaactttgtttatttctccatatttttgcagtggtaattccattataaaacctaatgaaacaatgtttttatagatggtgtggaaagacttttctgggctcagaggtgaaactgacccttgtgtatcagcagcatttctgactgactgagagagtgtagtgattaacagagttgtgatgttagttaagaaacttagatttgccattgtagcttttctaccaattagcagattgtttaactcactgaaattgtaaagtggtagacgtggacttagtcattactgggcagcttatgaattgtattcatttactcatgatgtaaaaatggttagtctccacttttaaggctctagttctagtggctaaataggtacttatttatacagtatgataactgctgtattaaaatacatgtctcaaatgtggaatagtagaagaggtgaagaaaatcatagtttgaggtagaatactgtttgctggtcttaaaaactgtggtattttggtgattccataaattaggtcagatacttccactggagggaaacagtttaaaggatatatgtgatactattaatagaatgaggaagacacaccagatatttaggagggaattagcgagcttgaaactaagagctggtttgaatgagactgggtcataagtgatttcaagtaccagattaaggcactgagattttatttttaagcactgaagtcagattttttccttttaaaagaaaggattcatgatgaaatctgctttttgttttgcagagagcttggagataattctggtggctgtgtggagtatgtgttggaggtattaaattttcacagtatatataaggcagcaattgataggcctttcacagattcttctgataactacataaagagacaaaaaaaagaaaaaagagcaaagatctgtgctgtgtcaagtatgacagccatcactcatggctctccagtaggagggaacgacagccagggccaggttcttgatggccagtctcagcatctcttccaacagaaccagacttcatcacctgattcttccaatgagaattccgtagcaactcctcctccagaggaacaagggcaaggtgatgccccaccacagcatgaagatgaagagcctgcatttccacatactgagctggcaaacctggatgacatgatcaacaggcctcgatgggtggttcctgttttgccaaaaggggaattagaagtgcttttagaagctgctattgatcttagtgtaaaaggccttgatgttaaaagtgaagcatgccaacgtttttttcgagatggactaacaatatctttcactaaaattcttatggatgaggctgtgagtggctggaagtttgaaattcatagatgtattattaacaatactcatcgcctagtggagctttgtgtggccaagttgtcccaagattggtttccacttctagaacttctcgccatggccttaaatcctcactgcaagtttcatatctacaatggtacacgtccgtgtgaattaatttcctcaaatgctcagttgcctgaagaagaattatttgctcgttcttcagatcctcgatcaccaaaaggttggctagtggatctcatcaataaatttggcacattaaatgggttccagattttgcatgatcgtttttttaatggatcagcattaaatattcaaataattgcagctcttattaaaccatttggacaatgctatgagtttctcagtcaacatacactgaaaaagtacttcattccagttatagaaatagttccacatttattggaaaacttaactgatgaagaactgaaaaaggaggcaaagaatgaagccaaaaatgatgccctttcaatgattattaaatctttgaagaacttagcttcaagaatttcaggacaagatgagactataaaaaatttggaaatttttaggttaaagatgatactcagattgttgcaaatttcctcttttaatggaaagatgaatgcactgaatgaaataaataaggttatatctagtgtatcatattatactcatcggcatagtaatcctgaggaggaagaatggctgacagctgagcgaatggcagaatggatacagcaaaataatatcttatccatagtcttgcaagacagtcttcatcaaccacaatatgtagaaaagctagagaaaattcttcgttttgtgattaaagaaaaggctcttacattacaggaccttgataatatctgggcagcacaggcaggaaaacatgaagccattgtgaagaatgtacatgatctgctagcaaagttggcttgggatttttctcctggacaacttgatcatctttttgattgctttaaggcaagttggacaaatgcaagtaaaaagcaacgtgaaaagctccttgagttgatacgccgtcttgcagaagatgataaagatggtgtgatggcacacaaagtgttgaaccttctttggaacctggctcagagtgatgatgtgcctgtagacatcatggaccttgctcttagtgcccacataaaaatactagattatagttgttcccaggatcgagatgcacagaagatccagtggatagatcactttatagaagaacttcgcacaaatgacaagtgggtaattcctgctctgaaacaaataagagaaatttgtagtttgtttggtgaagcatctcaaaatttgagtcaaactcagcgaagtccccacatattttatcgccatgatttaatcaaccagcttcaacaaaatcatgctttagttactttggtagcagaaaaccttgcaacctacatgaatagcatcagattgtatgctggagatcatgaagactatgatccacaaacagtgaggcttggaagtcgatacagtcatgttcaagaagttcaagaacgactaaacttccttagatttttactgaaggatggccaactgtggctctgtgctcctcaggcaaaacaaatatggaagtgcttagcagaaaatgcagtttatctttgtgatcgtgaagcctgttttaagtggtattccaagttaatgggggatgaaccagacttggatcctgatattaataaggacttctttgaaagtaatgtacttcagcttgatccttcccttttaactgaaaatggaatgaaatgctttgaaagatttttcaaagctgtcaattgtcgagaaaggaaactaatagcaaaaagaagatcctatatgatggatgatttggaattaattggactagactacctttggagggttgtgattcagagtagtgacgagattgctaacagagctatagatcttcttaaagagatatacacaaaccttggcccaagattaaaagccaatcaggtggttatccatgaagacttcattcagtcttgctttgatcgtttaaaagcatcatatgatacactgtgtgtttttgatggtgacaaaaacagcattaattgtgcaagacaagaagccattcgaatggttagagtattaactgttataaaagagtacattaatgaatgtgacagtgattatcacaaggaaagaatgattttacctatgtcgagagcattttgtggcaaacacctctctcttatagttcggtttccaaaccagggcagacaggttgatgagttggatatatggtttcatacgaatgacacaattggttcagtacggcgatgtattgttaatcgtattaaagccaatgtagcccacaaaaaaattgaactttttgtgggtggtgagctgatagattctgaaaatgacagaaagctaattggacaattaaacttaaaagataaatctctaattacagccaaacttacacaaataaatttcaatatgccatcaagtcctgatagctcttccgattcctcaactgcatctcctggaaaccaccgtaatcattacaatgatggtcccaatctaaaggtggaaagttgtttgcctggggtgataatgtcagtgcatcccaaatacatctctttcctttggcaatttgcaaacttaggtagcaacctgaatatgccacctcttaaaaatggagcaagagtacttatgaaacttatgccaccagatagaacagctgtagaaaaattacgaactgtttgtttggaccatgcaaaccttggagaaggcaaacttagtccaccccttgactcccttttctttggtccttctgcctcccaagttctatacctaacagaggtagtttatgccttgttaatgcctgctggtgtgcctctaactgatgggtcctctgactttcaagttcacttcttgaaaagtggtggcttacctcttgtactgagtatgctaataagaaataacttcttgccaaatacagatatggaaactcgaaggggtgcttatttaaatgctcttaaaatagccaaactgttgttaactgcgattggctatggccatgttcgagctgtagcagaagcttgtcagccagttgtagatggtacagaccccataacacagattaaccaagttactcatgatcaagcagtggtgctacaaagtgcccttcagagcattcctaatccctcatccgagtgcgtacttagaaatgagtccatacttcttgctcaggaaatatctaatgaggcttcaagatatatgcctgatatttgtgtaattagggctatacagaaaattatctgggcatcagcatgtggggcattaggactattttttagcccaaatgaagaaataactaaaatttatcagatgaccaccaatggaagcaataagctggaggtggaagatgaacaagtttgttgtgaagcactggaagtgatgaccttatgttttgctttacttccaacagcgttggatgcacttagtaaagaaaaagcctggcagaccttcatcattgacttattattgcactgtccaagcaaaactgttcgtcagttggcacaggagcagttctttttaatgtgcaccagatgttgcatgggacacaggcctctgcttttcttcattactttactctttaccatactggggagcacagcaagagagaagggtaaatattcaggtgattatttcacacttttacggcaccttctcaattatgcttacaatggcaatattaacatacccaatgctgaagttcttcttgtcagtgaaattgattggctcaaaaggattagggataatgttaaaaacacaggtgaaacaggtgtcgaagagccaatactggaaggccaccttggggtaacaaaagagttattggcctttcaaacttctgagaaaaagtatcactttggttgtgaaaaaggaggtgctaatctcattaaagaattaattgatgatttcatctttcccgcatccaaagtttacctgcagtatttaagaagtggagaactaccagctgagcaggctattccagtctgtagttcacccgttaccatcaatgccggttttgagctacttgtagcattagctattggctgtgtgaggaatctcaaacagatagtagactgtttgactgaaatgtattacatgggcacagcaattactacttgtgaagcacttactgagtgggaatatctgccccctgttggaccccgcccaccaaaaggatttgtgggactcaaaaatgctggtgctacgtgttacatgaactctgtgatccagcagctatacatgattccttctatcaggaacagtattcttgcaattgaaggcacaggtagtgatttacacgatgatatgttcggggatgagaagcaggacagtgagagtaatgttgatccccgagatgatgtatttggatatcctcatcaatttgaagacaagccagcattaagtaagacagaagataggaaagagtataatattggtgtcctaagacaccttcaggtcatctttggtcatttagctgcttcccaactacaatactatgtacccagaggattttggaaacagttcaggctttggggtgaacctgttaatctccgtgaacaacatgatgccttagagttttttaattctttggtggatagtttagatgaagctttaaaagctttaggacacccggctatactaagtaaagtcctaggaggctcctttgctgatcagaagatctgccagggctgcccacataggtttgaatgtgaagaatcttttacaactttgaatgtggatattagaaatcatcaaaatcttcttgactctttggaacagtatatcaaaggagatttattggaaggtgcaaatgcatatcattgtgaaaaatgtgataaaaaggttgacacagtaaagcgcctgctaattaaaaaattgcctcgggttcttgctatccaactcaaacgatttgactatgactgggaaagagaatgtgcaattaaattcaatgattattttgaatttcctcgagagctggatatgggaccttacacagtagcaggtgttgcaaacctggaaagggataatgtaaactcagaaaatgagttgattgaacagaaagagcagtctgacaatgaaactgcaggaggcacaaagtacagacttgtaggagtgcttgtacacagtggtcaagcaagcggtgggcattattattcttacatcattcaaaggaatggtaaagatgatcagacagatcactggtataaatttgatgatggagatgtaacagaatgcaaaatggatgatgatgaagaaatgaaaaatcagtgttttggtggagagtacatgggagaagtatttgatcacatgatgaagcgcatgtcatataggcgacagaagaggtggtggaatgcttacatacctttttatgaacaaatggatatgatagatgaagatgatgagatgataagatacatatcagagctaactattgcaagaccccatcagatcattatgtcaccagccattgagagaagtgtacggaaacaaaatgtgaaatttatgcataaccgattgcaatatagtttagagtattttcagtttgtgaaaaaactgcttacatgtaatggtgtttatttaaaccctgctccagggcaggattatttgttgcctgaagcagaagaaattactatgattagtattcagcttgctgctagattcctctttaccactggatttcacaccaagaaaatagttcgtggtcctgccagtgactggtatgatgcactgtgcgttcttctccgtcacagcaaaaatgtacgtttttggtttactcataatgtcctttttaatgtatcaaatcgcttctctgaatacctcctggagtgccctagtgcagaagtgaggggtgcatttgcaaaacttatagtgtttattgcacacttttccttgcaagatgggtcttgtccttctccttttgcatctccaggaccttctagtcaggcatgtgataacttgagcttgagtgaccacttactaagagccacactaaatctcttgagaagggaagtttcagagcatggacatcatttacagcaatattttaatttgtttgtaatgtatgccaatttaggtgtggcagaaaaaacacagcttctgaaattgaatgtacctgctacctttatgcttgtgtctttagacgagggaccaggtcctccaatcaaatatcagtatgctgaattaggcaagttatattcagtagtgtctcagctgattcgttgttgcaatgtgtcatcaacaatgcagtcttcaatcaatggtaatccccctctccccaatcctttcggtgaccttaatttatcacagcctataatgccaattcagcagaatgtgttagacattttatttgtgagaacaagttatgtgaagaaaattattgaagactgcagtaactcagaggataccatcaaattacttcgcttttgctcttgggagaatcctcagttctcatctactgtcctcagcgaacttctctggcaggttgcatattcatatacctatgaacttcggccatatttagatctacttttccaaattttactgattgaggactcctggcagactcacagaattcataatgcacttaaaggaattccagatgacagagatgggctgttcgatacaatacagcgctcgaagaatcactatcaaaaacgagcatatcagtgcataaaatgtatggtagctctatttagcagttgtcctgttgcttaccagatcttacagggtaacggagatcttaaaagaaaatggacctgggcagtggaatggctaggagatgaacttgaaagaagaccatatactggcaatcctcagtatagttacaacaattggtctcctccagtacaaagcaatgaaacagcaaatggttatttcttagaaagatcacatagtgctaggatgacacttgcaaaagcttgtgaactctgtccagaagaggagccagatgaccaggatgccccagatgagcatgagccctctccatcagaagatgccccattatatcctcattcacctgcctctcagtatcaacagaataatcatgtacatggacagccatatacaggaccagcagcacatcacttgaacaaccctcagaaaacaggccaacgaacacaagaaaattatgaaggcaatgaagaagtatcctcacctcagatgaaggatcagtgaaaagcaataattaactgcttcctttatgactatgcactaaggtcttatagtccaaactttctctgtgtctggctagtattgaaaactagataaactgctccaaaccaacatggagtaaagagcatattcactggtttatttgcagtaatttgcaatttgtcagtgtataagacacatgcagggtgaagtgtacagagttttgtaacaaatgactggtcctaatctgtaaatgagaaaggtatatatactatgttaatgtctgactgttaattcttaagcaagaaactttttttgatgaaaacaagtcagatctacacagtcacacaattattttttgttgtgttcactacattgtgcaattgatattgcctgctttgagcagtttggtcaacttaccaacttccccccaaaaaagggaacataaaagagcccatctttgtcagtttacaccaatagtttcttgttaatccttctttcctggatatataaggctggtggtaacttttgaattatatggttgatgtggaaaattggcagtgtaacatttctagatacttttcattacctttttattctggtatataggctaaccactttaaagctattcttatgctgtaacagttagcatggcttcacactgtttgtgtagccaagaggacagaattacatgaatgacagtgcccagagtgacagctgtatattgctcagagcttttatttcttatacctagaataaatataaaatgggggaaaaaaaaaa

SEQ ID NO: 1286 - DNA, 3599 bp, Homo sapiens
gcccgttgtctgtgtgtgggactgaggggccccgggggcggtgggggctcccggtgggggcagcggtggggagggagggcctggacatggcgctgaggggccgccccgcgggaagatgaataagggctggctggagctggagagcgacccaggcctcttcaccctgctcgtggaagatttcggtgtcaagggggtgcaagtggaggagatctacgaccttcagagcaaatgtcagggccctgtatatggatttatcttcctgttcaaatggatcgaagagcgccggtcccggcgaaaggtctctaccttggtggatgatacgtccgtgattgatgatgatattgtgaataacatgttctttgcccaccagctgatacccaactcttgtgcaactcatgccttgctgagcgtgctcctgaactgcagcagcgtggacctgggacccaccctgagtcgcatgaaggacttcaccaagggtttcagccctgagagcaaaggatatgcgattggcaatgccccggagttggccaaggcccataatagccatgccaggcccgagccacgccacctccctgagaagcagaatggccttagtgcagtgcggaccatggaggcgttccactttgtcagctatgtgcctatcacaggccggctctttgagctggatgggctgaaggtctaccccattgaccatgggccctggggggaggacgaggagtggacagacaaggcccggcgggtcatcatggagcgtatcggcctcgccactgcaggggagccctaccacgacatccgcttcaacctgatggcagtggtgcccgaccgcaggatcaagtatgaggccaggctgcatgtgctgaaggtgaaccgtcagacagtactagaggctctgcagcagctgataagagtaacacagccagagctgattcagacccacaagtctcaagagtcacagctgcctgaggagtccaagtcagccagcaacaagtccccgctggtgctggaagcaaacagggcccctgcagcctctgagggcaaccacacagatggtgcagaggaggcggctggttcatgcgcacaagccccatcccacagccctcccaacaaacccaagctagtggtgaagcctccaggcagcagcctcaatggggttcaccccaaccccactcccattgtccagcggctgccggcctttctagacaatcacaattatgccaagtcccccatgcaggaggaagaagacctggcggcaggtgtgggccgcagccgagttccagtccgcccaccccagcagtactcagatgatgaggatgactatgaggatgacgaggaggatgacgtgcagaacaccaactctgcccttaggtataaggggaagggaacagggaagccaggggcattgagcggttctgctgatgggcaactgtcagtgctgcagcccaacaccatcaacgtcttggctgagaagctcaaagagtcccagaaggacctctcaattcctctgtccatcaagactagcagcggggctgggagtccggctgtggcagtgcccacacactcgcagccctcacccacccccagcaatgagagtacagacacggcctctgagatcggcagtgctttcaactcgccactgcgctcgcctatccgctcagccaacccgacgcggccctccagccctgtcacctcccacatctccaaggtgctttttggagaggatgacagcctgctgcgtgttgactgcatacgctacaaccgtgctgtccgtgatctgggtcctgtcatcagcacaggcctgctgcacctggctgaggatggggtgctgagtcccctggcgctgacagagggtgggaagggttcctcgccctccatcagaccaatccaaggcagccaggggtccagcagcccagtggagaaggaggtcgtggaagccacggacagcagagagaagacggggatggtgaggcctggcgagcccttgagtggggagaaatactcacccaaggagctgctggcactgctgaagtgtgtggaggctgagattgcaaactatgaggcgtgcctcaaggaggaggtagagaagaggaagaagttcaagattgatgaccagagaaggacccacaactacgatgagttcatctgcacctttatctccatgctggctcaggaaggcatgctggccaacctagtggagcagaacatctccgtgcggcggcgccaaggggtcagcatcggccggctccacaagcagcggaagcctgaccggcggaaacgctctcgcccctacaaggccaagcgccagtgaggactgctggccctgactctgcagcccactcttgccgtgtggccctcaccagggtccttccctgccccacttccccttttcccagtattactgaatagtcccagctggagagtccaggccctgggaatgggaggaaccaggccacattccttccatcgtgccctgaggcctgacacggcagatcagccccatagtgctcaggaggcagcatctggagttggggcacagcgaggtactgcagcttcctccacagccggctgtggagcagcaggacctggcccttctgcctgggcagcagaatatatattttacctatcagagacatctatttttctgggctccaacccaacatgccaccatgttgacataagttcctacctgactatgctttctctcctaggagctgtcctggtgggcccaggtccttgtatcatgccacggtcccaactacagggtcctagctgggggcctgggtgggccctgggctctgggccctgctgctctagccccagccaccagcctgtccctgttgtaaggaagccaggtcttctctcttcattcctcttaggagagtgccaaactcagggacccagcactgggctgggttgggagtagggtgtcccagtggggttggggtgagcaggctgctgggatcccatggcctgagcagagcatgtgggaactgttcagtggcctgtgaactgtcttccttgttctagccaggctgttcaagactgctctccatagcaaggttctagggctcttcgccttcagtgttgtggccctagctatgggcctaaattgggctctaggtctctgtccctggcgcttgaggctcagaagagcctctgtccagcccctcagtattaccatgtctccctctcaggggtagcagagacagggttgcttataggaagctggcaccactcagctcttcctgctactccagtttcctcagcctctgcaaggcactcagggtgggggacagcaggatcaagacaacccgttggagcccctgtgttccagaggacctgatgccaaggggtaatgggcccagcagtgcctctggagcccaggccccaacacagccccatggcctctgccagatggctttgaaaaaggtgatccaagcaggcccctttatctgtacatagtgactgagtggggggtgctggcaagtgtggcagctgcctctgggctgagcacagcttgacccctctagcccctgtaaatactggatcaatgaatgaataaaactctcctaagaatctcctgagaaaaaaaaaaaaaaaaa

SEQ ID NO: 1287 - DNA, 1230 bp, Homo sapiens
catagcaagtctgccatgggccgcggggcccgtgtcccctcggaggccccgggggcaggcgtcgagcgccgctggcttggagccgcgctggtcgccctgtgcctcctccccgcgctggtgctgctggcccggctgggggccccggcggtgccggcctggagcgcagcgcagggagacgtcgctgcgctgggcctctcggcggtgccccccacccgggtcccgggcccactggccccccgcagacgccgctacacactgactccagccaggctgcgctgggaccacctcaacctcacctacaggatcctctccttcccgcggaacctgctgagcccgcgggagacgcggcgggccctagctgccgccttccgcatgtggagcgacgtgtcccccttcagcttccgcgaggtggcccccgagcagcccagcgacctccggataggcttctacccgatcaaccacacggactgcctggtctccgcgctgcaccactgcttcgacggccccacgggggagctggcccacgccttcttccccccgcacggcggcatccacttcgacgacagcgagtactgggtcctgggccccacgcgctacagctggaagaaaggcgtgtggctcacggacctggtgcacgtggcggcccacgagatcggccacgcgctgggcctgatgcactcacaacacggccgggcgctcatgcacctgaacgccacgctgcgcggctggaaggcgttgtcccaggacgagctgtgggggctgcaccggctctacggatgcctcgacaggctgttcgtgtgcgcgtcctgggcgcggaggggcttctgcgacgctcgccggcggctcatgaagaggctctgccccagcagctgcgacttctgctacgaattccccttccccacggtggccaccaccccaccgccccccaggaccaaaaccaggctggtgcccgagggcaggaacgtgaccttccgttgcggccagaagatcctccacaagaaagggaaagtgtactggtacaaggaccaggagcccctggagttctcctaccccggctacctggccctgggcgaggcgcacctgagcatcatcgccaacgccgtcaatgagggcacctacacctgcgtggtgcgccgccagcagcgcgtgctgaccacctactcctggcgagtccgtgtgcggggctgagcccggctgataaagcactttctctctgaaaaaaaaaaaaaa

SEQ ID NO: 1288 - DNA, 2474 bp, Homo sapiens
ggcacgagggttgaagctcggcgctcgggttacccctgcagcgacgccccctggtcccacagataccactgctgctcccgccctttcgctcctcggccgcgcaatgggcacccgcgacgacgagtacgactacctctttaaagttgtccttattggagattctggtgttggaaagagtaatctcctgtctcgatttactcgaaatgagtttaatctggaaagcaagagcaccattggagtagagtttgcaacaagaagcatccaggttgatggaaaaacaataaaggcacagatatgggacacagcagggcaagagcgatatcgagctataacatcagcatattatcgtggagctgtaggtgccttattggtttatgacattgctaaacatctcacatatgaaaatgtagagcgatggctgaaagaactgagagatcatgctgatagtaacattgttatcatgcttgtgggcaataagagtgatctacgtcatctcagggcagttcctacagatgaagcaagagcttttgcagaaaagaatggtttgtcattcattgaaacttcggccctagactctacaaatgtagaagctgcttttcagacaattttaacagagatttaccgcattgtttctcagaagcaaatgtcagacagacgcgaaaatgacatgtctccaagcaacaatgtggttcctattcatgttccaccaaccactgaaaacaagccaaaggtgcagtgctgtcagaacatctaaggcatttctcttctcccctagaaggctgtgtatagtccatttcccaggtctgagatttaaatatatttgtaattcttgtgtcacttttgtgttttattacttcatacttatgaatttttccatgtcctaagtcttttgattttagctttataaaatcatccacttgtcccgaatgactgcagctttttttcatgctatggcttcactagccttagtttaataaactgaatgtttggattcctcagttattgtttacttttcatcatggaagcctgtcactgtatgtaggacataatagaacttgatcacttgaagctcagacctattggtcttgatcaaatcaaactaagaagaccttagaaataagctaccattttgccacagagcagcttataggtaatacactcttctctcagtgcagtgtacatttccacaaatctaagaattgccctataaacatagcaggattttgagagcttgaaaattttccattattctggacatgaatttctaaaatgccttaataggtttatgtagttgagtaaattttgttttttaatttttgtaagcatcaaagttgattagagaggggggcactttttctggagaattctcttagtaaacacaaaagattgttacggtttcattagtagtatggttgtggggccataagttaaacagtgctgcctggtaggctgggaactgaagagacttgtggtattccatctcgggtgcctctgttggcaatgatcaggcagcccaaaagatttaaatgatctataataatttccaagcggtagattatgtggcattttattgctcaggcaataattggtttaatgctggtagtgtcaaattttgtcttagaaccttccagtaagtgaaatacaacctagttttatcaccatatccaccagcaggcatggataattattttaacaatgctaatatttgagttttgcagtatattatagaatatagtccagttaaatctttggtttcagtatgtctgaagagtacagtgagaggttaatttctgctcaagtggtaccacttaaaggcatgtattcttttagtatgtaaaatgaaatagtaccttgagtttaaatagaatgcatttaggcattgtagagatctgaaatagttttcttccactacattgttgaaatcaatgaagcaattagtttctcattcagaaatgtgcacactaatatttagttttgctttctcgtggataatattaagcacttactctgcagtttcctggaagttgtgtcaactgcagtgatactattcaggatggtgggaaatccccaaaaatatgtatgtgtgggcttgcttagattactatatttcatagttaatcttttgtctcttgcggtgctcatgatgtgtggggcacacggaaggcattgctgtagtcagtcattttggttttcttctatagccattttattattttagtgtattagttatgaagataatattatctatttgtaaattgctactttgtattttatgcatgctctgtaatttgatttttttttagttattgatttggattatattcacattctaataaacagttatagggggaaaaaaaaaaaaaaaaaaaaaaaaaaaaaaaaaaaaaaaaaaaaaaaaaaaaaaaaaaaaaaaaaaaaaaaaaaaaaaaaaaaaaaaaaaaaaaaaaaaaaaaaaaaaaaaaaaaaaaaaaaaa

SEQ ID NO: 1289 - DNA, 2014 bp, Homo sapiens
ctgctgccgccgccgccgccgccgtccctgcgtccttcggtctctgctcccgggacccggctccgccgcagccagccagcatgtcggggatcaagaagcaaaagacggagaaccagcagaaatccaccaatgtagtctatcaggcccaccatgtgagcaggaataagagagggcaagtggttggaacaaggggtgggttccgaggatgtaccgtgtggctaacaggtctctctggtgctggaaaaacaacgataagttttgccctggaggagtaccttgtctcccatgccatcccttgttactccctggatggggacaatgtccgtcatggccttaacagaaatctcggattctctcctggggacagagaggaaaatatccgccggattgctgaggtggctaagctgtttgctgatgctggtctggtctgcattaccagctttatttctccattcgcaaaggatcgtgagaatgcccgcaaaatacatgaatcagcagggctgccattctttgaaatatttgtagatgcacctctaaatatttgtgaaagcagagacgtaaaaggcctctataaaagggccagagctggggagattaaaggatttacaggtattgattctgattatgagaaacctgaaactcctgagcgtgtgcttaaaaccaatttgtccacagtgagtgactgtgtccaccaggtagtggaacttctgcaagagcagaacattgtaccctatactataatcaaagatatccacgaactctttgtgccggaaaacaaacttgaccacgtccgagctgaggctgaaactctcccttcattatcaattactaagctggatctccagtgggtccaggttttgagcgaaggctgggccactcccctcaaaggtttcatgcgggagaaggagtacttacaggttatgcactttgacaccctgctagatgatggcgtgatcaacatgagcatccccattgtactgcccgtctctgcagaggataagacacggctggaagggtgcagcaagtttgtcctggcacatggtggacggagggtagctatcttacgagacgctgaattctatgaacacagaaaagaggaacgctgttcccgtgtttgggggacaacatgtacaaaacacccccatatcaaaatggtgatggaaagtggggactggctggttggtggagaccttcaggtgctggagaaaataagatggaatgatgggctggaccaataccgtctgacacctctggagctcaaacagaaatgtaaagaaatgaatgctgatgcggtgtttgcattccagttgcgcaatcctgtccacaatggccatgccctgttgatgcaggacacctgccgcaggctcctagagaggggctacaagcacccggtcctcctactacaccctctgggcggctggaccaaggatgacgatgtgcctctagactggcggatgaagcagcacgcggctgtgctcgaggaaggggtcctggatcccaagtcaaccattgttgccatctttccgtctcccatgttatatgctggccccacagaggtccagtggcactgcaggtcccggatgattgcgggtgccaatttctacattgtggggagggaccctgcaggaatgccccatcctgaaaccaagaaggatctgtatgaacccactcatgggggcaaggtcttgagcatggcccctggcctcacctctgtggaaatcattccattccgagtggctgcctacaacaaagccaaaaaagccatggacttctatgatccagcaaggcacaatgagtttgacttcatctcaggaactcgaatgaggaagctcgcccgggaaggagagaatcccccagatggcttcatggcccccaaagcatggaaggtcctgacagattattacaggtccctggagaagaactaagcctttgggtccagagtttctttctgaagtgctctttgattaccttttctatttttatgattagatgctttgtattaaattgcttctca

SEQ ID NO: 1290 - DNA, 3514 bp, Homo sapiens
gaattcgaggatccgggtaccatggggctggagtggggaccgaggccctgctcactcccctggtgggccggcttgcccgcctgctggaggccacacccacagactcttgtggctatttccgggagaccattcggcgggacatccggcaggcgcgggagcggttcagtgggccacagctgcggcaggagctggctcgcctgcagcggagactggacagcgtggagctgctgagccccgacatcatcatgaacttgctgctctcctaccgcgatgtgcaggactactcggccatcattgagctggtggagacgctgcaggccttgcccacctgtgatgtggccgagcagcataatgtctgcttccactacacttttgccctcaaccggaggaacaggcctggggaccgggcgaaggccctgtctgtgctgctgccgctggtacagcttgagggctctgtggcgcccgatctgtactgcatgtgtggccgtatctacaaggacatgttcttcagctcgggtttccaggatgctgggcaccgggagcaggcctatcactggtatcgcaaggcttttgacgtagagcccagccttcactcaggcatcaatgcagctgtgctcctcattgctgccgggcagcactttgaggattccaaagagctccggctaataggcatgaagctgggctgcctgctggcccgcaaaggctgcgtggagaagatgcagtattactgggatgtgggtttctacctgggagcccagatcctcgccaatgaccccacccaggtggtgctggctgcagagcagctgtataagctcaatgcccccatatggtacctggtgtccgtgatggagaccttcctgctctaccagcacttcaggcccacgccagagccccctggagggccaccacgccgtgcccacttctggctccacttcttgctacagtcctgccaaccattcaagacagcctgtgcccagggcgaccagtgcttggtgctggtcctggagatgaacaaggtgctgctgcctgcaaagctcgaggttcggggtactgacccagtaagcacagtgaccctgagcctgctggagcctgagacccaggacattccctccagctggaccttcccagtcgcctccatatgcggagtcagcgcctcaaagcgcgacgagcgctgctgcttcctctatgcactccccccggctcaggacgtccagctgtgcttccccagcgtagggcactgccagtggttctgcggcctgatccaggcctgggtgacgaacccggattccacggcgcccgcggaggaggcggagggcgcgggggagatgttggagtttgattatgagtacacggagacgggcgagcggctggtgctgggcaagggcacgtatggggtggtgtacgcgggccgcgatcgccacacgagggtgcgcatcgccatcaaggagatcccggagcgggacagcaggttctctcagcccctgcatgaagagatcgctcttcacagacgcctgcgccacaagaacatagtgcgctatctgggctcagctagccagggcggctaccttaagatcttcatggaggaagtgcctggaggcagcctgtcctccttgctgcggtcggtgtggggacccctgaaggacaacgagagcaccatcagtttctacacccgccagatcctgcagggacttggctacttgcacgacaaccacatcgtgcacagggacataaaaggggacaatgtgctgatcaacaccttcagtgggctgctcaagatttctgacttcggcacctccaagcggctggcaggcatcacaccttgcactgagaccttcacaggaactctgcagtatatggccccagaaatcattgaccagggcccacgcgggtatgggaaagcagctgacatctggtcactgggctgcactgtcattgagatggccacaggtcgcccccccttccacgagctcgggagcccacaggctgccatgtttcaggtgggtatgtacaaggtccatccgccaatgcccagctctctgtcggccgaggcccaagcctttctcctccgaacttttgagccagacccccgcctccgagccagcgcccagacactgctgggggaccccttcctgcagcctgggaaaaggagccgcagccccagctccccacgacatgctccacggccctcagatgccccttctgccagtcccactccttcagccaactcaaccacccagtctcagacattcccgtgccctcaggcaccctctcagcacccacccagccccccgaagcgctgcctcagttatgggggcaccagccagctccgggtgcccgaggagcctgcggccgaggagcctgcgtctccggaggagagttcggggctgagcctgctgcaccaggagagcaagcgtcgggccatgctggccgcagtattggagcaggagctgccagcgctggcggagaatctgcaccaggagcagaagcaagagcagggggcccgtctgggcagaaaccatgtggaagagctgctgcgctgcctcggggcacacatccacactcccaaccgccggcagctcgcccaggagctgcgggcgctgcaaggacggctgagggcccagggccttgggcctgcgcttctgcacagaccgctgtttgccttcccggatgcggtgaagcagatcctccgcaagcgccagatccgtccacactggatgttcgttctggactcactgctcagccgtgctgtgcgggcagccctgggtgtgctaggaccggaggtggagaaggaggcggtctcaccgaggtcagaggagctgagtaatgaaggggactcccagcagagcccaggccagcagagcccgcttccggtggagcccgagcagggccccgctcctctgatggtgcagctgagcctcttgagggcagagactgatcggctgcgcgaaatcctggcggggaaggaacgggagtaccaggccctggtgcagcgggctctacagcggctgaatgaggaagcccggacctatgtcctggccccagagcctccaactgctctttcaacggaccagggcctggtgcagtggctacaggaactgaatgtggattcaggcaccatccaaatgctgttgaaccatagcttcaccctccacactctgctcacctatgccactcgagatgacctcatctacacccgcatcaggggagggatggtatgccgcatctggagggccatcttggcacagcgagcaggatccacaccagtcacctctggaccctgagagctgaatgagggcatcataggccagacaggcccaaggatggatgaatggagaggacaaaggcagcttctgacacaccagccccaggacctggggcgactggaggaagccaggcgagtggggcccaggactggttccagtgagagaaaccaaccacaggcacccaagcactaccagacaaagcgtattaaacagaacacttttgaaaaaaaaaaaaaaaaaaaaaaaaaaaa

SEQ ID NO: 1291 - DNA, 2645 bp, Homo sapiens
gagcagcagaatttcaactccagtagacttgaatatgcctctgggcaaagaagcagagctaacgaggaaagggatttaaagagtttttcttgggtgtttgtcaaacttttattccctgtctgtgtgcagaggggattcaacttcaatttttctgcagtggctctgagtccagccccttacttaaagatctggaaagcatgaagactgggctttttttcctatgtctcttgggaactgcagctgcaatcccgacaaatgcaagattattatctgatcattccaaaccaactgctgaaacggtagcacccgacaacactgcaatccccagtttaagggctgaagatgaagaaaatgaaaaagaaacagcagtatccacagaagacgattcccaccataaggctgaaaaatcatcagtactaaagtcaaaagaggaaagccatgaacagtcagcagaacagggcaagagttctagccaagagctgggattgaaggatcaagaggacagtgatggtgacttaagtgtgaatttggagtatgcaccatctgaaggtacattggacataaaagaagatatgagtgagcctcaggagaaaaaactctcagagaacactgattttttggctcctggtgttagttccttcacagattctaaccaacaagaaagtatcacaaagagagaggaaaaccaagaacaacctagaaattattcacatcatcagttgaacaggagcagtaaacatagccaaggcctaagggatcaaggaaaccaagagcaggatccaaatatttccaatggagaagaggaagaagaaaaagagccaggtgaagttggtacccacaatgataaccaagaaagaaagacagaattgcccagggagcatgctaacagcaagcaggaggaagacaatacccaatctgatgatattttggaagagtctgatcaaccaactcaagtaagcaagatgcaggaggatgaatttgatcagggtaaccaagaacaagaagataactccaatgcagaaatggaagaggaaaatgcatcgaacgtcaataagcacattcaagaaactgaatggcagagtcaagagggtaaaactggcctagaagctatcagcaaccacaaagagacagaagaaaagactgtttctgaggctctgctcatggaacctactgatgatggtaataccacgcccagaaatcatggagttgatgatgatggcgatgatgatggcgatgatggcggcactgatggccccaggcacagtgcaagtgatgactacttcatcccaagccaggcctttctggaggccgagagagctcaatccattgcctatcacctcaaaattgaggagcaaagagaaaaagtacatgaaaatgaaaatataggtaccactgagcctggagagcaccaagaggccaagaaagcagagaactcatcaaatgaggaggaaacgtcaagtgaaggcaacatgagggtgcatgctgtggattcttgcatgagcttccagtgtaaaagaggccacatctgtaaggcagaccaacagggaaaacctcactgtgtctgccaggatccagtgacttgtcctccaacaaaaccccttgatcaagtttgtggcactgacaatcagacctatgctagttcctgtcatctattcgctactaaatgcagactggaggggaccaaaaaggggcatcaactccagctggattattttggagcctgcaaatctattcctacttgtacggactttgaagtgattcagtttcctctacggatgagagactggctcaagaatatcctcatgcagctttatgaagccaactctgaacacgctggttatctaaatgagaagcagagaaataaagtcaagaaaatttacctggatgaaaagaggcttttggctggggaccatcccattgaccttctcttaagggactttaagaaaaactaccacatgtatgtgtatcctgtgcactggcagtttagtgaacttgaccaacaccctatggatagagtcttgacacattctgaacttgctcctctgcgagcatctctggtgcccatggaacactgcataacccgtttctttgaggagtgtgaccccaacaaggataagcacatcaccctgaaggagtggggccactgctttggaattaaagaagaggacatagatgaaaatctcttgttttgaacgaagattttaaagaactcaactttccagcatcctcctctgttctaaccacttcagaaatatatgcagctgtgatacttgtagatttatatttagcaaaatgttagcatgtatgacaagacaatgagagtaattgcttgacaacaacctatgcaccaggtatttaacattaactttggaaacaaaaatgtacaattaagtaaagtcaacatatgcaaaatactgtacattgtgaacagaagtttaattcatagtaatttcactctctgcattgacttatgagataattaatgattaaactattaatgataaaaataatgcatttgtattgttcataatatcatgtgcacttcaagaaaatggaatgctactcttttgtggtttacgtgtattattttcaatatcttaataccctaataaagagtccataaaaatccaaaaaaaaaaaaaaaa

SEQ ID NO: 1292 - DNA, 1426 bp, Homo sapiens
ggatccgcgtgctaaagaaaaatcgccgttaaagcagttttctttttcactgtctttttcttttcgcggggaacccagctgttcctgcgagggccacctcctcaggaagaccccgcagctctcccgcggcgcttctgcaggaggcagcgacagtttcgagaacccgggccttcccctcccagtgcctccgggggttcgcgtttcaggcgctcgtgttttccgggaagggcaggcgcgctgggccttggggagctgcgctcggcgggcggaccgggggatcatggaagctgataaagatgacacacaacaaattcttaaggagcattcgccagatgaatttataaaagatgaacaaaataagggactaattgatgaaattacaaagaaaaatattcagctaaagaaggagatccaaaagcttgaaacggagttacaagaggctaccaaagaattccagattaaagaggatattcctgaaacaaagatgaaattcttatcagttgaaactcctgagaatgacagccagttgtcaaatatctcctgttcgtttcaagtgagctcgaaagttccttatgagatacaaaaaggacaagcacttatcacctttgaaaaagaagaagttgctcaaaatgtggtaagcatgagtaaacatcatgtacagataaaagatgtaaatctggaggttacggccaagccagttccattaaattcaggagtcagattccaggtttatgtagaagtttctaaaatgaaaatcaatgttactgaaattcctgacacactgcgtgaagatcaaatgagagacaaactagagctgagcttttcaaagttccgaaatggaggcggagaggtggaccgcgtggactatgacagacagtccgggagtgcagtcatcacgtttgtggagattggagtggctgacaagattttgaaaaagaaagaataccctctttatataaatcaaacctgccatagagttactgtttctccatacacagaaatacacttgaaaaagtatcagatattttcaggaacatctaagaggacagtgcttctgacaggaatggaaggcattcaaatggatgaagaaattgtggaggatttaattaacattcactttcaacgggcaaagaatggaggtggagaagtagatgtggtcaagtgttctctaggtcaacctcacatagcatactttgaagaatagacttaacagaatcatgaaaactatagctttttaacccggattactgtaaatgtttgacaagaatgaatatgcttttccttaaaaaatgaaaactttaatttttaccatccatttatgtttagatacaaaacttatttccatgtttctgaatcttctttgtttcaaatggtgctgcatgttttcaactacaataagtgcactgtaataaaaagttttgtttat

SEQ ID NO: 1293 - DNA, 3497 bp, Homo sapiens
cactgctcctccggctcccgggaagccgcgagtttccgcagggaggcggcggcagctgcggcggggccggtctgtagcctttgctgagtcaacactactcacagtgaaagtgatgccttttctccatttgcacaacatgagtgtgacgtggttagccagaccaggagctcaacctcatgtagaatccagtccactgctctgatgccgaaggggaggcagaaagtgccacacttggatgcccccctgggcctgcccacctgcctctggctggaattagccgggctcttcttactggttccctgggtcatgggcctggcagggacaggtgggcctgatggccagggcacaggggggccgagctgggctgtgcacctggaaagcctggaaggtgacggggaggaagagactctggagcagcaggcggatgccttggcccaggcagcagggctggtgaatgctggacgcatcggagagcttcaggggcactacctctttgtccagcctgctgggcacaggccggccctggaggtggaggccatccggcagcaggtggaggctgtgttggctgggcatgaagctgtgcgctggcactcagagcagaggctgctaaggcgggccaagcgcagcgtccacttcaacgaccccaagtacccgcagcaatggcacctgaataaccgacggagcccgggcagggacatcaacgtgacgggtgtgtgggaacgcaatgtgactgggcgaggggtgacggtggtggtagtggatgacggagtggaacacaccatccaggacattgcacccaactatagccctgagggtagctatgacctcaactctaatgaccctgaccccatgccccacccggatgtggagaatggcaaccaccatggcacgcgatgtgcaggagagatcgcggctgtgcccaacaacagcttctgtgccgtgggcgtggcctacgggagccgcatcgcaggtatccgggtactggatggacctctcacagacagcatggaggcagtggcgttcaacaagcactatcagatcaatgacatctacagctgcagctggggaccagatgacgatgggaagacagtggatggcccccatcagcttggaaaggctgccttacaacatggggtgattgctggtcgccagggctttgggagcatctttgtggtagccagtggcaacggaggccaacacaacgacaactgcaactacgatggctacgccaactccatctacaccgtcaccataggagctgtggatgaggagggacgcatgcctttctatgcagaagaatgtgcctccatgctggcagtcaccttcagtggtggggacaagatgcttcggagcattgtgaccactgactgggaccttcagaagggcactggctgcactgagggccacacagggacctcagctgcagcgcctctggcagctggcatgatagccttaatgctgcaggtgcggccctgcctcacgtggcgtgacgtccagcacatcattgtcttcacagccacccggtatgaggatcgccgtgcagagtgggtcaccaacgaggcaggcttcagccatagccaccagcacggtttcggcctcctcaacgcctggaggctcgtgaatgcagccaagatctggacatctgtcccttacttagcatcctacgtcagtcccgtgttaaaagaaaacaaggcgattccgcagtccccccgttccctggaggtcctgtggaatgtcagcaggatggacctggagatgtcagggctgaagaccctggagcatgtggcagtgacagtctccatcactcacccacggcgcggcagcttggagctgaagctgttctgccccagtggcatgatgtccctcatcggcgccccccgcagcatggactcggatcccaacggcttcaatgactggaccttctccactgtgcgatgctggggggagagagcccgagggacctacaggcttgtcatcagggatgtcggggatgagtcattccaggtcggcatcctccggcaatggcagctgaccctatatggctctgtgtggagtgcagtagacatcagggacagacaaaggctgttagagagtgccatgagtggaaaatacctgcacgatgacttcgccctgccctgcccaccggggctgaaaattcctgaggaagatggttacaccatcacccccaacaccctcaagaccctggtgctggtaggctgtttcaccgtcttctggactgtttactacatgctggaagtatatttgagccagaggaatgtggcttccaatcaagtttgtaggagtggaccctgccactggccccatcggagccggaaagccaaggaggaagggacagagctagaatcagtgccactttgcagcagcaaggatccagacgaagtggaaacagagagcaggggccctcccaccacctctgacctccttgccccagacctgctggagcaaggggactggagcctgtcccagaacaagagcgccctggactgccctcatcagcacctagacgtaccgcacgggaaggaggagcagatctgctgacctcagggcctgacagtgtgggacaggctcttctttcccaaaattagggagctcttgacagaaagcagttctgatgcttacatctggaatctgaggcatcctctgactccactcaaagagggtgagggccttcttaagatacaaatggtggaggattgctgccagagaagtctggtcagagccacagggtctgcctccagccaaacgggagcttttggtgagaaggtgttggacaggggattggcgcccccctttggtttggcctccatcctcatctctcttgggccaagccagctgcctaggtcccccaagcatgggggaccccttcccacatataagttgagaaggtgcctgccatagccaggagcgcatctcaatggaaacatcactggggtcacttgggaagaggacttcggggtagaggctgggaggagcccctggacatgcctgtcctgaaagcggctgcctccattatccattcccaagatgcctgatcagaaaccaaccatgaatgaacccctggctccttcaccacccccacgattggtatgatgctgccggcacagctgggatacacacggctcccccaggcctgagctgcttcactagggaatcctgcggcaggactgcagagcagatggcagatgcacatgttggaggagagagccttgggagccactgccactccagtcctgccaccaccctgtcttcctctgcaagtgctcagggaaatggccttcccgccggaggccagctatctgcctgacaggctgtgactcttctctcaaccttggccttctcccctcttctgagctagttggttgaattttttttaatgcttaagatttgtttttctcttttcacagcaacattttcttgaatttttttctgcacagcttttccaaaataaaaaccttccaaacaaaaaaaaaaaaaaa

SEQ ID NO: 1294 - DNA, 1145 bp, Homo sapiens
cttctctggggcggtcgcgttggcagcggatgcgggaagccggactctgggcgtcatgtactacaagtttagtggcttcacgcagaagttggcaggagcatgggcttcggaggcctatagcccgcagggattaaagcctgtggtttccacagaagcaccacctatcatatttgccacaccaactaaactgacctccgattccacagtgtatgattatgctgggaaaaacaaagttccagagctacaaaagtttttccagaaagctgatggtgtgcccgtctacctgaaacgaggcctgcctgaccaaatgctttaccggaccaccatggcgctgactgtgggagggaccatctactgcctgatcgccctctacatggcttcgcagcccaaaaacaaatgagttaggctgcagaggactggtttgttttttggcataaaccctttgaagttcctttttcattgttaaattaaaatttttttttttacttggatggcttaacatttttgcaagaaaaataggaagatatgaagatgatgttttggtttgtttatgaaatgcatatggcttgtcagagctcattcgacagttaaagccattgtttaaagaaatggtgctttgctctgtgtttgtgctcctgatttccctggaggttctggatgaaggctgaacacaggcttgttaatgtcagtctgtgctgaggacctcagggacttgaggttgcatttttgagcatggggtgcaggagcctttctggatttggatgtggctatggaaagaacacagaagccaaggtcatgtgcatgaaatgaggagtttgagttagtcacctcggggattttttccattttgcagtaaaatgttaaattaatgtagcctgcctctatttgttgggcaggtaatttcaaagggttatttgcctcatctcctatctttagtgaaatcttatgtgtaattattccaccgtgggaacagagaatacctgtttagtgttgcactttagactggtgtctgttttgttaatgcagctgtgccacaaattctcctttatcttttaaaaatgttatagctttaaattttgatttattttgactgtggaataaatacatgaatgaaaaaaaaaaaaaaaaaaaaaaaaaaaaaaaaa

SEQ ID NO: 1295 - DNA, 4093 bp, Homo sapiens
gggatcccgggagggagcggagcggacctgggcttggtcgcctccaagccggcgggaccgagtgctttaggccgctcgaaagaaagttgctccgacccgggaaaaggagaagatgaaggaagccaaggatgcccgctataccaatgggcacctcttcaccaccatttcagtttcaggcatgaccatgtgctatgcctgtaacaagagcatcacagccaaggaagccctcatctgcccaacctgcaatgtgactatccacaaccgctgtaaagacaccctcgccaactgtaccaaggtcaagcagaagcaacagaaagcggccctgctgaagaacaacaccgccttgcagtccgtttctcttcgaagtaagacaaccatccgggagcggccaagctcggccatctacccctccgacagcttccggcagtccctcctgggctcccgccgtggccgctcctccttgtctttagccaagagtgtttctaccaccaacattgctggacatttcaatgatgagtctcccctggggctgcgccggatcctctcacagtccacagactccctcaacatgcggaaccgaaccctatccgtggaatccctcattgacgaagaggtaatctacagtgagctgatgagtgactttgagatggatgagaaggactttgcagctgactcttggagtcttgctgtggacagcagcttcctgcagcagcataaaaaggaggtgatgaagcagcaagatgtcatctatgagctaatccagacagagctgcaccatgtgaggacactgaagatcatgacccgcctcttccgcacggggatgctggaagagctacacttggagccaggagtggtccagggcctgttcccctgcgtggacgagctcagtgacatccatacacgcttcctcagccagctattagaacgccgacgccaggccctgtgccctggcagcacccggaactttgtcatccatcgcttgggtgatctgctcatcagccagttctcaggtcctagtgcggagcagatgtgtaagacctactcggagttctgcagccgccacagcaaggccttaaagctctataaggagctgtacgcccgagacaaacgcttccagcaattcatccggaaagtgacccgccccgccgtgctcaagcggcacggggtacaggagtgcatcctgctggtgactcagcgcatcaccaagtacccgttactcatcagccgcatcctgcagcattcccacgggatcgaggaggagcgccaggacctgaccacagcactggggctagtgaaggagctgctgtccaatgtggacgagggtatttatcagctggagaaaggggcccgtctgcaggagatctacaaccgcatggaccctcgggcccaaaccccagtgcctggcaagggcccctttggccgagaggaacttctgaggcgcaaactcatccacgatggctgcctgctctggaagacagcgacggggcgcttcaaagatgtgctagtgctgctgatgacagatgtactggtgtttctccaggaaaaggaccagaagtacatctttcctaccctggacaagccttcagtggtatcgctgcagaatctaatcgtacgagacattgccaaccaggagaaagggatgtttctgatcagcgcagccccacctgagatgtacgaggtgcacacagcatcccgggatgaccggagcacctggatccgggtcattcagcagagcgtgcgcacatgcccatccagggaggacttccccctgattgagacagaggatgaggcttacctgcggcgaattaagatggagttgcagcagaaggaccgggcactggtggagctgctgcgagagaaggtcgggctgtttgctgagatgacccatttccaggccgaagaggatggtggcagtgggatggccctgcccaccctgcccaggggccttttccgctctgagtcccttgagtcccctcgtggcgagcggctgctgcaggatgccatccgtgaggtggagggtctgaaagacctgctggtggggccaggagtggaactgctcttgacaccccgagagccagccctgcccttggaaccagacagcggtggtaacacgagtcctggggtcactgccaatggtgaggccagaaccttcaatggctccattgaactctgcagagctgactcagactctagccagagggatcgaaatggaaatcagctgagatcaccgcaagaggaggcgttacagcgattggtcaatctctatggacttctacatggcctacaggcagctgtggcccagcaggacactctgatggaagcccggttccctgagggccctgagcggcgggagaagctgtgccgagccaactctcgggatggggaggctggcagggctggggctgcccctgtggcccctgaaaagcaggccacggaactggcattactgcagcggcaacatgcgctgctgcaggaggagctacggcgctgccggcggctaggtgaagaacgggcaaccgaagctggcagcctggaggcccggctccgggagagtgagcaggcccgggcactgctggagcgtgaggccgaagaggctcgaaggcagctggccgccctgggccagaccgagccactcccagctgaggccccctgggcccgcagacctgtggatcctcggcggcgcagcctccccgcaggcgatgccctgtacttgagtttcaaccccccacagcccagccgaggcactgaccgcctggatctacctgtcactactcgctctgtccatcgaaactttgaggaccgagagaggcaggaactggggagccccgaagagcggctgcaagacagcagtgaccctgacactggcagcgaggaggaaggtagcagccgtctgtctccgccccacagtccacgagactttaccagaatgcaggacatcccggaggagacggagagccgcgacggggaggctgtagcctccgagagctaagggggcccctcccccctgccccgtgccccactgaagaacattactgagggggctaaccttggggactccaatttgccaatgatgagggaacatttgaaagaactgcaaattgtccttgccagctcttgggatccttggatacctggggccatttaagaagctaggggaattaggccacaacaccccctgggacatccgaaagctacaccacagatgccagtggttcatgccttcttcccgcaactttaggaaaatttatttatttattgtttattagttatggggggagaggggagatttaaaggaccagggacatgggaaccaagccatagggatcagagggccttgtccttgaacactactggggtatattcaggctcatccacgcagctgctgggttcttgccctaacggccctcccctgcaacatccgtcttggaggagaggctgcagccacagcaccctactgccctttaaataaaggagggctgtgggcagggccatgtccctttctcctctcccctcaacctcttactgctgttctccctttctccgtccttcatggaagccctgggagataacctggcttcctggagttgatggaataaaggttggggtggccataatggtttgttgggggtgagggaaaaaacccacagggaccagaatgttttgttgttcttttgttttcttttttgtaccaaagtcaactgcacgtgttttatatttttaagagatcgtaggcaattagagatcgaagcctcctatctccacatctctgaagaagttgaggggtgggggagagaatgacttctgccttcatctgcagtaacggggggacctatactgacctcttccccagccatttagaaacaagttctagggtgggttggaaaatctccaagagccctgacctcatcttccacctcagcaaccatgacctgaaacctcagcgtgaatttgggggatttttcagtggaacccttgcccccaaatgtcgaccagcccccaaatgtcgaagaattttcttcttgccaattttgttgtttaaaaaaaaaattcagggaaaattaaaaacctggaactccaaaaaaaaaaaaaaaaa

SEQ ID NO: 1296 - DNA, 4485 bp, Homo sapiens
cgcgggcggcgcggaagcggcggcggcgcggccggggcagccatgtcgccattgtctgcggcgcgggcggccctgcgggtctacgcggtaggcgccgcggtgatcctggcgcagctgctgcggcgctgccgcgggggcttcctggagccaggtccccacgcatgagcagccgtccagcaggcaggctccggtggagaagcaatggagaataaaagcctggagagctcccagacagacctgaagctggtggcccacccccgcgccaagagcaaggtgtggaagtatttcggcttcgacaccaacgccgagggatgcatcctgcagtggaagaaaatctactgccgcatctgcatggcccagatcgcctactccggaaacacctccaacctgtcctaccacctggagaagaaccaccccgaggaattctgcgagttcgtcaagagcaacacggagcagatgcgtgaagccttcgccaccgccttctccaagctgaagcccgagtcgtcccagcagcccgggcaggacgcgctggccgtcaaggccggccacggctacgacagcaagaagcagcaggagctgacggccgccgtgctgggcctcatctgcgaggggctgtacccagcctccatcgtggacgagcccaccttcaaggtgctgctgaagacggccgacccccggtatgagctgcccagccggaagtacatctctaccaaggccatccctgagaagtacggggccgtccgggaggtgatcctgaaggagctggccgaggccacctggtgtggcatctccaccgacatgtggaggagtgagaatcagaaccgcgcctacgtcacgctggccgcccacttcctgggcctgggcgcccccaactgcctgtccatgggctcccgctgcctgaagaccttcgaggtgcccgaagagaacacggcggagaccatcacgcgagtgctctatgaggtcttcatcgagtggggcatcagcgccaaggtcttcggggccaccaccaactatggcaaggacatcgtgaaggcgtgctccctgctggacgtcgcagtgcacatgccctgcctgggccacaccttcaatgccggcatccagcaggccttccagctcccgaagctgggggcgctgctgtcgcgctgccgcaaactggtggagtacttccagcagtctgccgtggccatgtacatgctctatgagaagcagaagcagcagaacgtggcccactgcatgctggtgagcaaccgcgtctcctggtgggggagcacgctggccatgctgcagcgcctcaaggagcagcagttcgtcatcgccggggtcttggtggaggacagcaacaaccaccacctcatgctggaggccagcgagtgggccaccatcgaggggctggtggagctcctgcagcccttcaagcaggtggccgagatgctgtcggcctccaggtaccccaccatcagcatggtgaagccgctgctgcacatgctcctgaacaccacgctcaacatcaaggagaccgactccaaggagctcagcatggccaaggaggtcatcgccaaggagctttccaagacctaccaggagacgcccgagatcgacatgtttctcaacgtggccaccttcctggacccccgctacaagaggctgcccttcctctccgccttcgagcggcagcaggtggagaatcgcgtggtggaagaggccaagggcctgctggacaaggtcaaagacggcggctaccggccggctgaggacaagatcttcccggtgcccgaggagcctcccgtcaagaagctcatgcggacatccacgccgccgcccgccagcgtcatcaacaacatgctggccgagatcttctgccagacaggcggcgtggaggaccaggaagagtggcatgcccaggtggtggaggagctgagcaacttcaagtcccagaaggtgcttggcctcaacgaagaccccctcaagtggtggtcagaccgcctggccctcttccccctgctgcccaaggtgctgcagaagtactggtgcgtgacggccacgcgcgtcgcccctgagcgtctcttcggatccgccgccaacgtggtcagcgccaagaggaaccggctggctcccgcgcacgtggacgagcaggtgtttctgtatgagaacgcccggagtggggcagaggcggaacccgaggaccaggacgagggggagtggggcctggaccaggagcaggtgttctccttgggggatggcgtcagcggcggtttctttggcattagggacagcagcttcctgtagcgaggaagcgtgttgtcttacaagtcatccccgcagcagcccattggatgctttgctgtaaatacttacccggtcagcttggttttgaacctcagagaccatccactgtctttgacacctagaaggtggaaaaaggaaagagattcgagaagtgagagagggtcgggggcggtggctcctgtctataatcgcagcactttgggaggccgaggtgggcagatcagctgaggtcaggagatcgagaccagcctggccaacatggcgaaaccccgtctctactaaaaatacaaaaattagccaggactgatggcatgtgcctgtaatcccagcttctggaggctgaggccagagaatcgcttgaacctgggaggtggaggttgcagtaagctgagatcgctgcactccagcctgggcgacaagagcgagactctctcaaaaagaaaaaagaagacacaagagaggtggctttgagtgggtttcctttcctcccctattcccggggcccggacgacttctgcttgggaactgccaacgcttctgcttgggaattgcgtgcagcagagcctagaggagctgttccttccttcacagatacttaagacctccaccatgtctgattcgagttctccctgggagggtttagaagaaacgcaggaacattctgggtggcgtcgaaggagcctttcccgatcatcatgtgtgacttctgcgaggtccagatcactgaattcatgtttacattctcgtgcaagcagggacctcttgcttctgagaaatggggaagagaccttttagccaaaatgcccttcttaaaaagagagacctttttttttaatgttcggttaaaaatgtgacagatgagtagaaaaatgcagacacttaacaaaaagcaaacagaaaaaaaagtgtggaatgtgttgtattttcgacaggttgctgccagagagcctgcttcctgctgcctgccgaaatttcactttgcggagttggtccttaaaactgggcggtggccgggcgtggtggctcacgctgaggtcaggagttcgagaccagcctggccaaccaacatggtgaaacctcgtgtctactaaaaatacaagaaactagccagatgcggtggcacccgcctgtaatcccagctactcgggaggctgaggcggaagattcgcttgagcccaggaggtggaggttgcagtgagccaagactacgccactgcactccagcctggaggccagagtgagactccgtctcaaaacaaaacaaaagtgggtggctcactggtccggaggttatgtcttcggtgtctcagccctaaaagtccagttcccccgtgcggccagcttttccacataaggtgtttttgatttgattaccggaaaggactcttgattcttctcttttaaactgaataccataggggaaatgaattttaaaatattgcccccggaggggttttccgtggctggattcctgcgagttgctttcagtcattcagggaaacagaaagacgttttccaacatgtagaactgctttttaactggaggaaaaatacttcaggaggcttagcatattgcttggattctacgtgcagcgggttctctgcctccgtgaagacaagctgggctggggaggacggtgtctaggagggatgaccccactcagctccaggcagtgttctgccgagaccccaagaactcggggtgtcagagggcaaaggaactacctgcctttcacggctgctgacttctcagggctgcaagcagcacagaatgttatccttacgtcctgagccggtttaagtctgtggaaaaggaagcacgggagaaatccacgtaacctttgctttctttttaagggaagcggttccgccgtgaacttggaaccctcagctccgggtgttctcggcagaagggcagctggaagggacacagtggggcaggctttggggttgctccctgttctgccccgaggccggggacgcagggcagcccacgcctccgtgggctccattctgtagcattgccagcgttctcttcacgtctctaacaatcctttgcttttcctcactcacgtggaaatgtgaactgtcccggctctgtcttcatttttatttttaagccatcgttcccctcctgaacggttgccccttatttaatgctgtaaagttggactgttgttcaataaaccagagcaatgc

SEQ ID NO: 1297 - DNA, 3653 bp, Homo sapiens
attgcaacacatgcagctgcctggagagagggagccggtgtcctacgtcagagccgccgccgccgcgagccgccgccggggaggagcagccgctgccgcccaggactgggcccttagggaggaggaggcgagaagatggcggacgaccccagtgctgccgacaggaacgtggagatctggaagatcaagaagctcattaagagcttggaggcggcccgcggcaatggcaccagcatgatatcattgatcattcctcccaaagaccagatttcacgagtggcaaaaatgttagcggatgagtttggaactgcatctaacattaagtcacgagtaaaccgcctttcagtcctgggagccattacatctgtacaacaaagactcaaactttataacaaagtacctccaaatggtctggttgtatactgtggaacaattgtaacagaagaaggaaaggaaaagaaagtcaacattgactttgaacctttcaaaccaattaatacgtcattgtatttgtgtgacaacaaattccatacagaggctcttacagcactactttcagatgatagcaagtttggattcattgtaatagatggtagtggtgcactttttggcacactccaaggaaacacaagagaagtcctgcacaaattcactgtggatctcccaaagaaacacggtagaggaggtcagtcagccttgcgttttgcccgtttaagaatggaaaagcgacataactatgttcggaaagtagcagagactgctgtgcagctgtttatttctggggacaaagtgaatgtggctggtctagttttagctggatccgctgactttaaaactgaactaagtcaatctgatatgtttgatcagaggttacaatcaaaagttttaaaattagttgatatatcctatggtggtgaaaatggattcaaccaagctattgagttatctactgaagtcctctccaacgtgaaattcattcaagagaagaaattaataggacgatactttgatgaaatcagccaggacacgggcaagtactgttttggcgttgaagatacactaaaggctttggaaatgggagctgtagaaattctaatagtctatgaaaatctggatataatgagatatgttcttcattgccaaggcacagaagaggagaaaattctctatctaactccagagcaagaaaaggataaatctcatttcacagacaaagagaccggacaggaacatgagcttatcgagagcatgcccctgttggaatggtttgctaacaactataaaaaatttggagctacgttggaaattgtcacagataaatcacaagaagggtctcagtttgtgaaaggatttggtggaattggaggtatcttgcggtaccgagtagatttccagggaatggaataccaaggaggagacgatgaattttttgaccttgatgactactaggtagtcgacatgggtccggcaaaacgtgcctcaccctccagcatccaacccaaggagcatacccatggtggaatccaaacagatccctgccttacaattggaacatttccagaacttaatccatgagcattggatattgaaaagaaaaccgaaacaaaaccagacccagccctacactttggtttgtcatggtgtcagcgcagcagcctacaactaagttcctaaacgccactttggactaatttaaaaaagaatcccagtttttacttttactggatggtgaaattggttgctcttgtattttatgaaaaaaaatgatttttttaaccttcatacatagaagcaaaaatactttaactgctgtaaaccttcaaaagttaatagaagtgagatcatactggtttgtttcttattttgattggagaaaaattaaattgctgcatttcgcagtgacccatttacatggcattctcagcttagactgcgtaagaagaaatatatgtggtgaaatgttggaaccatttctctcttggtctctgtttaatgttgaaagggtgagctaataggaggcactttcaacttcactccctcacgctaccccgtccccctccagactggcagtttcaaggatgcaaattgcattgcaaaatcaaactgactcatgaagcatttgggccagtgcactgtttacttccatctgtttgcagacacatttgtgcccggcgtttgggagccctttgtatcaatgttctgacaagggtccctataaccttaacctactcgaaaccggtttgggatggatatgatggggcttctgtgctattgctgggattgggagaaataaaacatgcaatttaagtggaagcgaagaaatttaaagaggattttattttgcttgggtcaatccttgttaaaagggaggtggatgtgtttccttgtgttggatggcatgagattatgtgaatgttttgatttattaaaatgaactgcaaggtttttcacaggaacgacagacatgtatgactgcatgtaattataaactcctgacctcctggtggggttggagcatctgtttcaaatgtgggacttacaagcacttctcacatgagaaattaggggcgggtgggaagggatgggacacagcttctggcaccatggatttaagaccatgttggatccaaaagttggcctgaaaccctgaagctgatgcttcacagctgggctgtaagtcagacttgaacccagctgatatgcaaggtcatggcgtgccagggtggtgacagttgaacaaagtgtatagtacgtgcccagtggtagcgatggaaaaaagtataccaaatggactttgaaggaccaaaggttttaaaagtcaattggtatcacctccacactgactagggtagtggggtgcatttggttttcaaattgggtacttttaacactttagtgcctgactgctgttctttactgacttgattcagtcactcgtagctttattggtctgaaccagctccttgttcccaggttacagacctgcctatcgttccaataatcctgtttcacttgaatgaagggagtatgtcttaaatgtaaagtttctggttctcacactgtactctgaggtccaaatactgtctgtcaatgtgtaacctgatgtctcaaccccctgtgagaagagtccattatttggtgttcaccaacgtgggagacttcaccggaacaggcttttttgctttgggctctgctatttgtttgcagaacacccaagagcgagcaaacacgctctcttcacagcagtaccttagggttttgccattgtaaatgggtctgatgtgatatgacaagaccagagaaattggatgtaaatttacatttttgaatatgcttgttgtttcacatgatacatttagggtatgcagctccttttgtagtttttatttttactatttaagtttggaaatgatgccaaatttttgtatttctttaatcaatgtgttctcttcggtgatatatattgcattatatattgatgtgtgtatcaatatatattgatatgtattacacttacacatacaaacacatataagagggggtgaaaaccgtagcctttgcattctctatagcctctgcagagagatactaagcagcaaaatcttggtgttgtgatgtacagaaatggagaagagtattaaaccatatttaag

SEQ ID NO: 1298 - DNA, 3656 bp, Homo sapiens
ggcacgaggccgctccccggcgggctggctcctggccccggaagcgcgagcgttcacttagcggcgagtggctccgtctccgcggacagagcgcgcgccccctggcccggcccgcgaggggctcccggcgcggtccccgagcatttcccgccgggtggagcgggccgagcccggcaggatgaccagccccgcggccgctcaaagccgggagatcgactgtttgagcccggaagcgcagaagctggcggaagcccggctcgctgcaaaacgggcggcccgcgcggaggctcgcgagatccgcatgaaggagctggagcggcagcagaaggaggaagacagtgagcgctactctcgtagatccagaagaaacacatcggcttctgatgaagacgagcgcatgtcagtgggtagtcgtggaagcctgagggtagaagagagaccagaaaaagattttactgagaaggggtctcgtaacatgccgggcctgtctgcagccacgctggcctctctgggtgggacttcctctcggagaggcagcggagacacctccttctccatcgacaccgaggcatccatcagggaaatcaaggactctctagcagaagttgaagagaaatataagaaggctatggtttccaatgctcagctagacaatgaaaagacaaacttcatgtaccaggttgataccctaaaagatatgttgctggagcttgaagaacagctggctgaatctaggcggcagtacgaagagaaaaacaaagaatttgaaagggaaaaacacgcccacagtatactgcaatttcagtttgctgaagtcaaggaggccctgaagcaaagagaggaaatgctcgagaaacatggaataatcctaaattcagaaatagctaccaatggagagacttccgacaccctcaataatgttggataccaaggtcctaccaagatgacaaaagaagagttaaatgccctcaagtctacaggggatgggaccctaggaagagccagtgaagtggaggtgaaaaatgaaatcgtggcgaatgtggggaaaagagaaatcttgcacaatactgagaaagaacaacacacagaggacacagtgaaggactgtgtggacatagaggtattccctgctggtgagaataccgaggaccagaaatcctctgaagacactgccccattcctaggaaccttagcaggtgctacctatgaagaacaggttcaaagccaaattcttgagagcagttctctccctgaaaacacagtacaggttgagtcaaatgaggtcatgggtgcaccagatgacaggaccagaactccccttgagccatccaactgttggagtgacttagatggtgggaaccacacagagaatgtgggagaggcagcagtgactcaggttgaagagcaggcaggcacagtggcctcgtgtcctttagggcatagtgatgacacagtttatcatgatgacaaatgtatggtagaggtcccccaagagttagagacaagcacagggcatagtttagagaaagaattcaccaaccaggaagcagctgagcccaaggaggttccagcgcacagtacagaagtaggtagggatcacaacgaagaagagggtgaagaaacaggattaagggacgagaaaccaatcaagacagaagttcctggttctccagcaggaactgagggcaactgtcaggaagcgacaggtccaagtacagtagacactcaaaatgaacccttagatatgaaagagcccgatgaagaaaagagtgaccaacagggagaggcattggactcatcgcagaagaagacaaagaacaagaaaaagaaaaacaagaagaaaaaatccccagtacccgtagaaacccttaaagatgttaaaaaagagttaacgtatcagaacacagatttaagtgaaattaaggaagaagagcaggtaaagtctactgacagaaagtcagcagtggaagcccaaaacgaggtgactgaaaatccaaaacagaaaattgcagcagaaagcagtgaaaatgttgattgtccggagaatcctaaaattaagttggatggaaaacttgaccaagaaggtgatgatgtacaaacagcagctgaggaggtactagctgatggagacacattagattttgaggatgacaccgttcaatcatcaggcccgagggctggtggtgaagaattagatgaaggtgttgcaaaagataatgctaaaatagatggtgccactcaaagcagtcctgcagaaccaaagagcgaagacgcagatcgctgcaccctgcccgaacatgaaagtccctcacaggacattagtgatgcctgtgaagcagaaagtacagagaggtgtgagatgtcagaacatccaagtcagaccgtcaggaaagctttagacagcaatagcctagagaacgatgacttgtcggcaccaggaagagagccagggcacttcaatccagaaagcagagaagataccagaggagggaatgagaagggcaaaagcaaagaagactgtaccatgtcctaagctgaggcaggcggcaggcgcggtgcacaggaagtctcagtgtgaaggggtcttttctctccactgccaatgtaagtagaatgttctaaattcatagagaggcactgtatgacaattaccaggtgctctactgctttaagttatagactgttacttgtagatttccatgtaatcattgaggttatcacccagattagaaagacatatttgttatcagtgtacgttctaattgagagcattccagtagtatcaaacaataatgtctactgtttatagtccacttaataaaaatagaggcatttactatttgccttaggctgataggaatgtgggttttcttgaccaaatatatcagcatctaattgaaatgaccaaatagcattcttagacttctgtattatgaatataattgatatttaaattaatgtcttgttcacatatgtgtactttcatatttgattttaaaatgtacattataacctgtatggtattttatttaaaggagataaacagccaaatagcaaataggtcactgaatgataagatttgcaccttagaacaataatcattttaaggataacaagtaaatgtctgaaagcatgaggggctttatttgcctttacctcatatgagtctttgatcttgaaccgatacttttggatctcattgttgatatacctgaatttactttgtaagagattttaacttcacttcatgctgatgatgtatcaaattcattttatagaaagatttaaagtttttttctggaagtgatatatgtcaaattacatttcctactgcagtatttgagcagggacagtcattttttaaatgtttttggccgggcgtggtggctcatgcctgtaatctcagtacattgggaggccaaggcaggtggatcacctgaggtcaagagttcgaggccagcctggccaacatggtgaaaccctgtctctactaaaaatacaaaaaattggccgggcgtgatggtgggcgcctgtaatcccagccactccagaggctgaggcaggagaatcgcttgaacctgcgaggcagagattgcagtgagccaagatcaagccattgtactccagcctggacaacaagagcgaaactctgtcta

SEQ ID NO: 1299 - DNA, 4184 bp, Homo sapiens
ggccgcgctcgtctcgccgggctgttcgcgggcaggccctgccctgaagggacgaatcggcttggagcgcgggaggtggagtcggccccggcggtcgctccctggacccaacccgaggctgacccaggcccctgcccatgcggggcgcccctggctcggaagagtcccccgggccgggagcagctccaggcagcggccccggaggaagaggaagaagggacagtgctcagcttgggggacccggaccctcgccgcggcatttggagccgggggcagtcccgaactctgtgcttggcaccgccgctccgagtagggcagcgcctgccgggaccctgacccggaccccctgcgcctcgtaggcggcggcgccgccgcgccaccctgttcttccgtgtctccctctgcctggcggcagtcacggccaagaacctacattaagaaacgcattcagatgcatcagccgtttgtaaagcacctgtcgtgagccagagagtattatgagggaggccgaggacttcatgctccggacagagaaacggcgctgggattagggattgccacttctgagaggatgctgggaatctgcagggggagacggaaattcttggctgcctcgttgagtcttctctgcatcccagccatcacctggatttacctgttttctgggagcttcgaagatggaaagcccgtgtctctgtcaccgctggagtcccaggcacacagccccaggtacacggcctccagccagcgggagcgcgagagcctggaggtgcgcatgcgcgaggtggaggaggagaaccgcgccctccgcaggcagctcagcctggcccagggccgagccccatcccatcgccgaggcaaccactccaagacctactccatggaggagggcactggagacagcgagaaccttcgggctggcatcgtggcaggcaacagctccgagtgtgggcagcagccggtcgtggagaaatgcgagacaatccacgttgctattgtctgcgctggatacaatgccagccgggatgtcgtcaccctggtcaaatccgtcctgttccatagacggaaccctctgcacttccaccttattgctgactccattgcggagcagatcctggccacgctcttccagacctggatggtgcccgctgtgcgtgtggacttctacaatgcagacgagctcaagtctgaagtttcctggatccccaataaacattactctgggatttatggtctgatgaagcttgtcctgaccaagactcttcctgccaacctggagagagtcatcgtccttgacacggatatcacctttgccactgacattgcagagctgtgggctgtgttccacaagttcaaaggtcagcaagtcctgggcttggtggagaaccagagtgactggtaccttggaaacctgtggaaaaatcaccgcccatggccagcccttggaagaggctacaacacaggggtgatcctgttacttctggataagctgcggaagatgaaatgggagcagatgtggaggctgaccgcagagagggagctcatgggcatgctctctacatccttagctgaccaggatattttcaatgccgtcatcaaacaaaaccccttccttgtgtaccagctcccctgcttctggaatgtgcagctgtcagaccacacccgctccgagcagtgctacagagacgtgtctgatctaaaggtcattcactggaactcccccaagaagctccgggtgaagaacaagcatgtggagttttttcgcaacctctacctgaccttcctggagtatgacggcaatcttctgaggcgggaactgtttggctgccccagtgaggctgatgtcaacagtgaaaacctccagaagcagctgtctgagctggacgaggacgacctgtgctatgagttccggcgagagcgcttcactgtccaccgcacccacctgtacttcctgcactacgagtatgagcctgcagcagacagcacggacgtcaccctggtcgctcagctgtccatggacaggctccagatgctggaggccatctgcaagcactgggaggggcccatcagcctggccctctacctgtcagacgccgaggcccagcagttcctccgctacgcacagggctctgaggtgcttatgagccgccacaacgtgggctaccacatcgtgtacaaggagggccagttctaccccgtgaacctgctgcgcaacgtggccatgaagcacatcagcactccctacatgttcctgtctgacattgacttcctgcccatgtatgggctctatgagtacctcaggaagtctgtcatccagctcgatcttgccaacaccaagaaagcaatgattgtccccgcgttcgagacactgcgctaccggctgtccttccccaagtcaaaagcggagttgctgtcaatgctggacatggggaccctcttcacattcaggtaccacgtctggacgaaaggccacgcacccacaaacttcgccaagtggcggaccgccaccacgccttaccgggttgagtgggaggccgattttgagccgtatgttgttgtgagacgtgactgcccggagtacgaccggaggtttgtaggctttggctggaacaaagtggctcatatcatggagctggatgtgcaggagtatgagttcattgtgctgcccaacgcctacatgatccacatgcctcatgcccccagcttcgacattaccaagttccgttccaacaagcaataccgcatctgtctcaaaaccctcaaggaagagtttcagcaggacatgtcccgccgctacggctttgctgccctgaaatatctcacagccgagaacaacagctagcaccaagaagcccaccactagggggagacatgctgtaggggaagtgccactcgctgtttggggcccggccttcaaattcaaaattgagccatgctttttcggtttgtttttatttatctctttggcccagccaagctgccctcactacagagaccttggacaaggatccagccagtccctctctgccccacaaccctgcattcccagaggttagctatgcagcccacctagatgagtctcttcaagaatgggaaatcaaggggtgacagggagtaaaagggttatcatcttactgcaaagccacaagatcagggcagggctttaggatgttctggatgctttttaataattatgcttcccatcataactggggagaaagggaagtcagggttctaggggttattcgtcccaggaaatagaagtgaaattgtctttattaagtgaaaactttcccctttgccctgcaatgtagctgggcattcaaacggagggcaaaccgatgatctaaaccaaccacttggaaaaacccaatggggacattgtaaccagagggtcctggaggtggggttgatgggtttccttatccccaaagtcactcctgttttgttttgtttttctttgggggttttgtttatttttggggctggcaatccaaaatagaaaatctgatcctttgaggctctaaaggaaaatcagctgcctctaccaaccaccctctatcagcagtggcccaggaaggaggtcaagcatcttcggccgatatttaaacatgggcagcttccttcaggatgatcaccgaggctcccgtgactttgaactccctactctccagaatccaggggctatagcgatggggactgcggaattacgagggctggctgttttacaccggtcacattttctattggcagtgactgattcatgggaaagggctttgaaggaactacttcagtgcacacacaaggtacgaacctctcaggcctttcgaagaactttcataattcatgaaagcccagttctgaagattcacgtatccatctggagacctacaggaagaaagtgattgggttcctctggttcttgcctgcttcactgtggatgggaagaggtgacaacctcagtctccctttgggacctgtccaagggtaggcaaccaccttcaccttcacacagattgaggagacactggactttttacccattttctttaatcttcaatattaatattgtgtttacattgatgagaacaagagttaatgccctaccctctgctgggctgtttgtattgagttgcaatgtgaccagcgaaagctgcatttaataaatgaaagtacagactgtt

SEQ ID NO: 1300 - DNA, 2195 bp, Homo sapiens
gcgcgcccacccggtagaggacccccgcccgtgccccgaccggtccccgcctttttgtaaaacttaaagcgggcgcagcattaacgcttcccgccccggtgacctctcaggggtctccccgccaaaggtgctccgccgctaaggaacatggcgaaggtggagcaggtcctgagcctcgagccgcagcacgagctcaaattccgaggtcccttcaccgatgttgtcaccaccaacctaaagcttggcaacccgacagaccgaaatgtgtgttttaaggtgaagactacagcaccacgtaggtactgtgtgaggcccaacagcggaatcatcgatgcaggggcctcaattaatgtatctgtgatgttacagcctttcgattatgatcccaatgagaaaagtaaacacaagtttatggttcagtctatgtttgctccaactgacacttcagatatggaagcagtatggaaggaggcaaaaccggaagaccttatggattcaaaacttagatgtgtgtttgaattgccagcagagaatgataaaccacatgatgtagaaataaataaaattatatccacaactgcatcaaagacagaaacaccaatagtgtctaagtctctgagttcttctttggatgacaccgaagttaagaaggttatggaagaatgtaagaggctgcaaggtgaagttcagaggctacgggaggagaacaagcagttcaaggaagaagatggactgcggatgaggaagacagtgcagagcaacagccccatttcagcattagccccaactgggaaggaagaaggccttagcacccggctcttggctctggtggttttgttctttatcgttggtgtaattattgggaagattgccttgtagaggtagcatgcacaggatggtaaattggattggtggatccaccatatcatgggatttaaatttatcataaccatgtgtaaaaagaaattaatgtatgatgacatctcacaggtcttgcctttaaattacccctccctgcacacacatacacagatacacacacacaaatataatgtaacgatcttttagaaagttaaaaatgtatagtaactgattgagggggaaaagaatgatctttattaatgacaagggaaaccatgagtaatgccacaatggcatattgtaaatgtcattttaaacattggtaggccttggtacatgatgctggattacctctcttaaaatgacacccttcctcgcctgttggtgctggcccttggggagctggagcccagcatgctggggagtgcggtcagctccacacagtagtccccacgtggcccactcccggcccaggctgctttccgtgtcttcagttctgtccaagccatcagctccttgggactgatgaacagagtcagaagcccaaaggaattgcactgtggcagcatcagacgtactcgtcataagtgagaggcgtgtgttgactgattgacccagcgctttggaaataaatggcagtgctttgttcacttaaagggaccaagctaaatttgtattggttcatgtagtgaagtcaaactgttattcagagatgtttaatgcatatttaacttatttaatgtatttcatctcatgttttcttattgtcacaagagtacagttaatgctgcgtgctgctgaactctgttgggtgaactggtattgctgctggagggctgtgggctcctctgtctctggagagtctggtcatgtggaggtggggtttattgggatgctggagaagagctgccaggaagtgttttttctgggtcagtaaataacaactgtcataggcagggaaattctcagtagtgacagtcaactctaggttaccttttttaatgaagagtagtcagtcttctagattgttcttataccacctctcaaccattactcacacttccagcgcccaggtccaagtttgagcctgacctccccttggggacctagcctggagtcaggacaaatggatcgggctgcaaagggttagaagcgagggcaccagcagttgtgggtggggagcaagggaagagagaaactcttcagcgaatccttctagtactagttgagagtttgactgtgaattaattttatgccataaaagaccaacccagttctgtttgactatgtagcatcttgaaaagaaaaattataataaagccccaaaattaaga

SEQ ID NO: 1301 - DNA, 1856 bp, Homo sapiens
gaattcgcaaagatgctaaagagagaactggagagagaacgactagtaactacggctttaaggggggaactccagcagttaagtggtagtcagttacatggcaagtcagattctcccaatgtatatactgaaaaaaaggaaatagcaatcttacgggaaagactcactgagctggaacggaagctaaccttcgaacagcagcgttctgatttgtgggaaagattgtatgttgaggcaaaagatcaaaatggaaaacaaggaacagatggaaaaaagaaagggggcagaggaagccacagggttaaaaataagtcaaagggaacatttttgggttcagttaaggaaacatttgatgccatgaagaattctaccaaggagtttgtaaggcatcataaagagaaaattaagcaggctaaagaagatgtgaaggaaaatctgaaaaaattctcagattcagttaaatccactttcagacactttaaagataccaccaagaatatctttgatgaaaagggtaataaaagatttaatgctacaaaagaagcagctgaaaaaccaagaacagtttttagtgactatttacatccacagtataaggcacctacagaaaaccattcaaggccctactatgcaaaaagatggaaggaagaaaagccagttcactttaaagaattcagaaaaaatacaaattcaaagaaatgcagtcctgggcatgattgtagagaaaattctcattctttcagaaaggcttgttctggtgtatttgattgtgctcaacaagagtccatgagcctttttaacacagtggtgatccctataaggatggatgaatttagacagataattcaaaggtacatgttaaaagaactggatactttttgtcgctggaacgaacttgatcagttcatcaataagtttttcctaaacggtgtctttatacatgatcagaagctcttcactgactttgttaatgatgttaagattatcttaggaaacatgaaggaatatgaagtagataatgatggagtatttgagaagttggatgaatatatatatagacacttctttggtcacactttttcccctccatatggacccaggtcggtttacataaaaccgtgtcattacagtagtttgtaacatttgtagattggatacgatttttatgatttgatgagtttcttgtaaggttaccgtttctaagagttgtgctttatggccactgagagaattcagaataaattgaaagatggagtctaaaaattattagctgttacaaatggaacaatttcattataacgtgatcactttgacttgagcaaatggtttaatttttatcttaaaatcagttaagaatatataaaatcctacctttggccaagtttgtttcttttcattatagtttatatgaaaagatcaccttaagtgaaattattttccttattttcctttaatcttttatgtatttattcacttctggaagctaggaatgagcaacacaaattttactctgaagtcagaagagctcatatatataattctaatgtcccacctatgtccattccatgtaccagcttagttatatactagtcacataattatctttgataaaggtagaggcacaaagaggcaaactaacaagtcaaattctaatgtgtgtacttcataataattttttatccattttcatcttctttatctttatattctgtaacatgaaacttacctaatcttcaaatgttagcttcattttttacctttgaaatacttaatctttctgaataaatataatggtctataaaaaaaaaaaaaaaaaaaaaaaaaaaaccgtcgaaaagcggccgccaccgcgtgga

SEQ ID NO: 1302 - DNA, 1603 bp, Homo sapiens
gaattcggtccgctggcgcatgcggaagctcaagtacaagcacctggccttcctggcagagtcctgtgccaccctctcacaggagcagcactcgcaggagctgctggctgagctgctcacacactggaaaggcgttggacagaaattgaagattcccacacattagtgaccgtcatgatgaaggtgggacacctctcggagccactaatgaaccgcctggaagacaagtgcctggagttggtggagcactttggccccaatgagctgcggaaggtgctggtgatgctggcagctcagagccggcggtccgtgcccttgctgcgggccatctcctaccacctggtgcagaagcccttctctctgacgaaagatgtgctcttggacgtggcctatgcctatggcaaactcagctttcaccagacccaggtgtcccagcgcctggccaccgacctgctatccctcatgcccagcctgacttctggtgaggtggcccactgtgccaagtccttcgccttactcaagtggctcagcctgcccctgtttgaggcctttgcccagcacgtcctgaacagagcgcaggacatcaccctgccccacctgtgcagcgtacttctggcttttgcgcgtctgaacttccatccagaccaagaggatcagttcttcagcctggtacatgagaagctggggtcagagctgccaggcctggagccagccctgcaggtggacctggtgtgggccctgtgtgtgctgcagcaggcacgggaagcagagctgcaagccgtcctccaccctgaatttcacatccaatttctagggggcaagtctcagaaggatcagaacaccttccagaagctgctccacatcaacgccactgccctgctggagtaccccgagtactcgggtccccttctgcctgcctcggctgtgcccctgggccctcagcccttgacaggaaggagacccccctgcaaaaggagctgcaagacgctgaaggggctgctggggagcgccgacaagggcagcctcgaggtggccacgcagtatggctgggtgctggattctgaggtgctgctggacagtgacggcgagtttctgcccgtaagggactttgtggcacctcaccttgcccagccaactgggagccagtcaccacctccagggtctaagaggctagcgttcttgcggtgggagttccccaacttcaacagccgaagaaggacttgctgggtcgctttgttctggcccggcgacacatagtggctgcaggcttcctgatagtggacgtcccattctatgagtggctggaactcaagtctgaatggcagaaaggcgcctacctcaaggacaagatgcgcaaagcggtggctgaggagctggccaagtgacttgtgccagcagcatggactgcgtgcctctccgccggaggtctagctgtgggcggccaagaagggtcacccttgaggacaaacctctgtgcaggaccttggccactctgagggacagaacgtcctcttgtgtataataaacctttaattttggtgttggacccctggggccttcccaggcttggtcaccctctgcactgtcaaaaaaaaaaaaaaaa

SEQ ID NO: 1303 - DNA, 1716 bp, Homo sapiens
cgcccagcgacgtgcgggcggcctggcccgcgccctcccgcgcccggcctgcgtcccgcgccctgcgccaccgccgccgagccgcagcccgccgcgcgcccccggcagcgccggccccatgcccgccggccgccggggccccgccgcccaatccgcgcggcggccgccgccgttgctgcccctgctgctgctgctctgcgtcctcggggcgccgcgagccggatcaggagcccacacagctgtgatcagtccccaggatcccacgcttctcatcggctcctccctgctggccacctgctcagtgcacggagacccaccaggagccaccgccgagggcctctactggaccctcaacgggcgccgcctgccccctgagctctcccgtgtactcaacgcctccaccttggctctggccctggccaacctcaatgggtccaggcagcggtcgggggacaacctcgtgtgccacgcccgtgacggcagcatcctggctggctcctgcctctatgttggcctgcccccagagaaacccgtcaacatcagctgctggtccaagaacatgaaggacttgacctgccgctggacgccaggggcccacggggagaccttcctccacaccaactactccctcaagtacaagcttaggtggtatggccaggacaacacatgtgaggagtaccacacagtggggccccactcctgccacatccccaaggacctggctctctttacgccctatgagatctgggtggaggccaccaaccgcctgggctctgcccgctccgatgtactcacgctggatatcctggatgtggtgaccacggaccccccgcccgacgtgcacgtgagccgcgtcgggggcctggaggaccagctgagcgtgcgctgggtgtcgccacccgccctcaaggatttcctctttcaagccaaataccagatccgctaccgagtggaggacagtgtggactggaaggtggtggacgatgtgagcaaccagacctcctgccgcctggccggcctgaaacccggcaccgtgtacttcgtgcaagtgcgctgcaacccctttggcatctatggctccaagaaagccgggatctggagtgagtggagccaccccacagccgcctccactccccgcagtgagcgcccgggcccgggcggcggggcgtgcgaaccgcggggcggagagccgagctcggggccggtgcggcgcgagctcaagcagttcctgggctggctcaagaagcacgcgtactgctccaacctcagcttccgcctctacgaccagtggcgagcctggatgcagaagtcgcacaagacccgcaaccaggacgaggggatcctgccctcgggcagacggggcacggcgagaggtcctgccagataagctgtaggggctcaggccaccctccctgccacgtggagacgcagaggccgaacccaaactggggccacctctgtaccctcacttcagggcacctgagccaccctcagcaggagctggggtggcccctgagctccaacggccataacagctctgactcccacgtgaggccacctttgggtgcaccccagtgggtgtgtgtgtgtgtgtgagggttggttgagttgcctagaacccctgccagggctgggggtgagaaggggagtcattactccccattacctagggcccctccaaaagagtccttttaaataaatgagctatttaggtgc

SEQ ID NO: 1304 - DNA, 3067 bp, Homo sapiens
ggtgggtttatctcaaggcctgagtagccggtaacaaacgagggttcccgggattggaccgacgcaccatgcctctgcgacttgatatcaaaagaaagctaactgctagatctgatcgagttaagagtgtggatctgcatcctacagagccatggatgttggcaagtctttacaatggcagtgtgtgtgtttggaatcatgaaacacagacactggtgaagacatttgaagtatgtgatcttcctgttcgagctgcaaagtttgttgcaaggaagaattgggttgtgacaggagcggatgacatgcagattagagtgttcaattacaatactctggagagagttcatatgtttgaagcacactcagactacattcgctgtattgctgttcatccaacccagcctttcattctaactagcagtgatgacatgcttattaagctctgggactgggataaaaaatggtcttgctcacaagtgtttgaaggacacacccattatgttatgcagattgtgatcaaccccaaagataacaatcagtttgccagtgcctctttggacaggactatcaaggtgtggcagttgggctcttcgtcaccaaacttcactttggaaggacatgagaaaggcgtgaattgcattgattactacagtggtggggacaagccatacctcatttcaggtgcagatgaccgtcttgttaaaatatgggattatcagaataaaacatgtgtgcagacactggaaggacatgcccaaaatgtgtcttgtgccagctttcatcctgagttgccaatcattatcacaggttcagaagatggaacagtacgtatttggcattcaagcacctaccggcttgagagcacactgaattatggaatggagagggtatggtgcgtggccagtctaagagggtcaaacaatgtcgctttgggctatgatgaagggagcatcattgttaagcttggtcgggaggaacctgccatgtccatggatgccaatggaaagataatttgggccaagcattcagaagtccagcaggccaacctaaaagcaatgggagatgctgaaattaaagatggtgaaagattgccactggcagtaaaggatatgggcagttgtgaaatataccctcagactattcagcacaatcctaatgggcggtttgtggtggtgtgtggtgatggggagtatatcatctacacagcaatggcattgagaaacaagagctttggatctgctcaggagtttgcatgggcccacgattcttcagagtatgcaataagagagagcaacagcattgtaaagatatttaagaactttaaggaaaaaaaatcatttaaaccagattttggagcagaaagtatctacggcggcttcttattgggagtcagatctgtaaatggcttagccttctatgactgggacaatacagaactcatacgaagaattgaaattcagcccaaacatattttctggtctgactctggagagctagtctgtattgctactgaggaatcattttttatccttaagtatctgtcagaaaaagtcttggctgcacaggaaacacatgagggagttactgaagatggcattgaagatgcctttgaggttcttggtgagattcaggaaattgtgaaaacagggctttgggtaggcgattgcttcatttacacaagttctgtgaacagattaaattattatgttggaggagaaatagtcaccattgcccacttggacaggacgatgtatctcctaggctacattcctaaagacaacaggctttatctgggggataaagaattgaacatcattagctattccctgctggtttcagtcctggaataccagacagctgtcatgcggagggactttagcatggctgataaggtccttcctaccattccaaaagaacagaggaccagagttgcacactttttggaaaagcagggcttcaagcagcaagctcttacagtatccacagatcctgagcatcgttttgagcttgctcttcagcttggagagttaaaaattgcataccagttagcagtggaagcagagtcagaacagaagtggaaacaacttgctgaacttgccattagtaaatgtcagtttggcctagcccaggagtgcctgcatcatgcacaggattatgggggcctgctgcttttggccactgcctctggaaatgctaatatggtgaacaagctagcagagggtgcggagagagatggcaaaaataatgtggcattcatgagctactttttacagggcaaggttgatgcctgcctagagctcttaattagaactggacggctgccagaagctgccttcttggcccgaacttacttacccagtcaggtttcaagggtagtgaaactctggagagagaatctctcaaaagtcaatcagaaagcagcagaatcccttgctgacccaacagagtatgaaaacctgttccctggattaaaagaagcctttgttgttgaagaatgggtgaaggaaacacatgctgatctgtggccagccaaacaatacccacttgtcacgccaaatgaagagagaaatgtcatggaagagggaaaagactttcagccctcaagatctacagctcaacaggaacttgatgggaaacctgcttctcctactccggttattgtggcctcccacacagccaacaaagaagaaaagagtttactcgaactagaagtagatttggataatttggaattagaagatattgacacaacagatatcaatctggatgaagatattttggatgattgactgtaatgctttccatttacctgactaaacagatcattattatatataggtattgattgctaccctgaccacagtgctttggactatgagaaacttcttagatttttatatgtaaatgctgtggaccactgggagcacaatgcccacatcatcttaagaagagtttatgtgcagcatttaaatcactgtgttttccttgttaactaaaacagacatgggctttgatttttttcatactattagaccatatctcataaaaccttttgaattaaaaaaaa

SEQ ID NO: 1305 - DNA, 2736 bp, Homo sapiens
gagagaagccttttccgttgccggtgccggcctagcgtcctggaattacttcaatcaacaggagcgagaacccgagcagcgccatgagcaacactaccgtcgtccccagcactgcaggtccgggccccagcggcgggcccggtggcggaggtggtggtggcggcggaggcggcggcaccgaggtaatccaggtgactaatgtctccccgagcgctagctctgagcagatgcggactctcttcggtttcctaggcaagatcgacgaactgcgcctcttcccgccggatgattcgcctttgccagtctcatctcgtgtctgctttgttaagttccatgatccagactcagcagttgtggcacagcatctgacaaacactgtattcgttgacagagctttgatagtcgtaccatatgcagaaggagttattcctgatgaagctaaagctttgtctctgttggcaccagctaatgcagtggcaggtcttctgcctggtggtggactcctgcctactcctaacccacttacccagattggcgctgttccactggctgctttgggggctcctactcttgatcctgcccttgctgcacttgggcttcctggagcaaacttgaactctcagtctcttgctgcagatcagttgctgaagcttatgagtactgttgatcccaagttgaatcatgtagctgctggtctcgtttcaccaagtctgaaatcggatacctctagtaaagaaatagaggaagctatgaaaagagtacgagaagcacagtccctaatttctgctgctatagaaccagataagaaagaagaaaaaagaaggcattcaagatcaagatcacgttctaggaggaggaggactccctcatcttctagacacaggcggtcaagaagcagatcgagacggcggtcacattctaagtctaggagtcggcgacgatccaaaagcccaaggcggagaagatctcattccagagaaagaggtagaaggtcaaggagcacatcaaaaacaagagacaaaaagaaagaagacaaagaaaagaaacgttctaaaacaccaccaaaaagttacagcacagccagacgttctagaagtgcaagcagagagagacgacgacgaagaagcaggagtggcacaagatctcctaaaaagcctcggtctcctaaaagaaaattgtcccgctcaccatcccctaggagacataaaaaggagaagaagaaagataaagacaaagaaagaagtagggatgaaagagaacgatcaacaagcaagaagaagaagagtaaagataaggaaaaggaccgggaaagaaaatcagagagtgataaagatgtaaaacaggttacacgggattatgatgaagaggaacaggggtatgacagtgagaaagagaaaaaagaagagaagaaaccaatagaaacaggttcccctaaaacaaaggaatgttctgtggaaaagggaactggtgattcactaagagaatccaaagtgaatggggatgatcatcatgaagaagacatggatatgagtgactgaatattgcctctgagggagtccaactgtatacctgcatcagtgtcattcctttgtgtgatttcttaatgctgtatttgttcatctcaaacctagatgtatacagctctgagttataaatggttataaagctcctgttactcatattagttatttacatcaaaaagcttttagaaaatggtacgaggtaaccaattcttgtcatggtgaaatctgattgagtaaccaagcagttttactattctggtgctgcttcataacaaaaatgaaaagctgcatgcatctacagcaggcatggattgtttatgtcgtatgatatcctttattaagtaagttcacttatagtatttctataatttgattcattgccgtaatagagccatgtaggaaatgcactgattgcatgttattgtggcaagaatatcctaaatgtcattaaaatcctccaacatgatggatctacttatggtcttgtttgttgacatgacaaattaacattcttatagttacatctggaaatgagcatttgaaatagataatcctttaagccttgtggcaaaatttttgtggcttttgtttaactttgaaaggttattatgcactaaccttttttggtggctaattagggtttaaatacagaaacaagatttcaaataaaactgtctttgggcagtgagtaaatagcatattttgaagtagagttgtatactttttcataagatgtttgggaatttttttcctgaagtaataatttattcccacatctacatcagtgaaagctatctacctatcctgagtctatcttaaaggaaaaaaagaaaaaaaccttatctcttgcccttattttgaattttccactctttcattaatttgttttaagctcctgttggaaaaaaaggggtagtgcattttaaattgaccttcatacgcttttaaaataagacaaatctacttgataatgtacctttatttgatctcaagttgtataaaaccaataaatttgtgttactgcagtagtaatcttatgcacacggtgatttcatgttatatatgcaaagtaggcaactgttttcttagttacagaagtttcaagcttcacttttgtgcagtagaaacaaaagtaggctacagtctgtgccatgttgatgtacagtttctgaaattgttttacaagactttgataataaaacccttaaactta

SEQ ID NO: 1306 - DNA, 1958 bp, Homo sapiens
ctactgtgaggggatgaaggtgctccctgcatctggccttgctgtcttcctcatcatggctttgaagttttccactgcagccccctccctagttgcagcctcccccaggacctggaggaacaactaccgcctcgcacaggcgtatcttgacaaatattacacaaataaagaaggacaccagattggtgagatggttgcaagaggaagcaattccatgataaggaagattaaggagctacaagcgttctttggcctccaagtcaccgggaagttagaccagaccacaatgaacgtgatcaagaagcctcgctgtggagttcctgatgtggccaattatcgcctcttccctggtgaacccaaatggaaaaaaaatactttgacatacagaatatctaaatacacaccttccatgagttctgtcgaggtggacaaagcagtggagatggccttgcaggcctggagtagcgccgtccctctgagctttgtcagaataaactcaggagaagcggatattatgatatcttttgaaaatggagatcacggggattcctatccattcgatgggcctcgggggactctagcccatgcatttgctcctggagaaggcctgggaggagatacacatttcgacaatcctgagaagtggactatgggaacgaatggttttaatttgtttaccgttgctgctcatgaatttggccatgccctgggcctggcccattccacagacccatcagcactgatgtacccaacttataagtacaagaatccctatggattccacctccccaaagatgatgtgaaagggatccaggcattatacggacctcggaaagtattcctggggaagcccactctgccccatgccccccatcacaagccatccatccctgacctctgtgactccagctcatcctttgacgctgtgacaatgctggggaaggagctcctgctcttcaaggaccggattttctggagacggcaggttcacttgcggacaggaattcggcccagcactattaccagctccttcccccagctcatgtccaatgtggatgcagcttacgaagtggctgagaggggcactgcttacttcttcaaaggtccccactactggataacaagaggattccaaatgcaaggtcctcctcggactatttatgactttggatttccaaggcacgtgcagcaaatagatgctgctgtctacctcagggagccacagaagacccttttctttgtgggagatgaatactacagctacgacgaaaggaaaaggaaaatggaaaaagactatccaaagaatactgaagaagaattttcaggagtaaatggccaaatcgatgctgctgtagaattaaatggctacatttacttcttttcaggaccaaaaacatacaagtatgacacagagaaggaagatgtggttagtgtggtgaaatctagttcctggattggttgctaaatagaaaagcctagtcttctcaagcaatgaggatgactacaagcagcctctaactggatcttaaggactaaagcagaatgtaggagagggattcttccaaaggccttcaaatcaaattagaattcactgagaataataatacttccaatttttttcatagttgtataatcagaatttcaatccacattagaaaagtttttatatgggcaactttatgcgaaatccaaatcaacacaatgcactctgcagttagacaccattattttttcttacctaatatactgaagcagattgatccgtttgatttttatttccaggaggaagactagtggtggattccatgacatatattgtaattcttttcataggaaatgtcattacagtatgaattataattatttacaagcaatggcttttgtggccatcatttggccatcatttgttataataaatataaatttcccaatttttacttaaaagacatcacaacaca

SEQ ID NO: 1307 - DNA, 638 bp, Homo sapiens
ctctaaagcgccgcagctgccaaaatgtctacaggtccaactgctgccactggcagtaatcgaagacttcagcagacacaaaatcaagtagatgaggtggtggacataatgcgagttaacgtggacaaggttctggaaagagaccagaagctctctgagttagacgaccgtgcagacgcactgcaggcaggcgcttctcaatttgaaacgagcgcagccaagttgaagaggaaatattggtggaagaattgcaagatgtgggcaatcgggattactgttctggttatcttcatcatcatcatcatcgtgtgggttgtctcttcatgaagaaccagcggaactcaaaactgctgttcaagaaacctcttcaagacttttgacttagaacctgctatattatcaagcttacctactgttatctctaaaattttttttgtgttaatgtaaagttgaatttctaggaaacgtgcctttgttttttaatatgcactccaaattagaaggccggccccgtccacattttgcacagtgcctttacagatttacgtatgggctgatgaagaggccttcttaagttccagagtgctataatctagatgtaatgttgtcactaattaattgccattactcccctttag

SEQ ID NO: 1308 - DNA, 2498 bp, Homo sapiens
accagcaccccgcccagagcagtgccgctgcccaaatcctcgcaggcagctcatcaacgcaattgcaactccggctggagccccggacctgcaagcctgggtgtccgtgggtccgtctgcccagccatctgctggtggcacctctccctcctgccgcctccctcggtgaaccccaccttgcagaagtgcagctcgcccggagcagcccaggagctcagcatgcgtcccccaggcttcaggaacttcttgctgctggcgtcctcccttctctttgctgggttgtcagctgttcctcaaagcttctcgccatctctgaggagctggccgggcgccgcctgcaggctgtcccgggccgagtcggagcgacgctgccgcgcacctgggcagcccccgggggccgcgctgtgccacggccggggccgctgcgactgcggcgtctgcatctgccacgtgactgagccgggcatgttcttcgggcccctgtgtgagtgccatgagtgggtgtgcgagacctacgacgggagcacctgtgcaggccatggtaagtgtgactgtggcaagtgcaagtgtgaccagggatggtatggggatgcttgccagtacccaactaactgtgacttgacaaagaagaaaagtaaccaaatgtgcaagaattcacaagacatcatctgctctaatgcaggtacatgtcactgtggcaggtgtaagtgtgataattcagatggaagtggacttgtgtatggtaaattttgtgagtgtgacgatagagaatgcatagacgatgaaacagaagaaatatgtggaggccatgggaagtgttactgtggaaactgctactgcaaggctggttggcatggagataaatgtgaattccagtgcgatatcaccccctgggaaagcaagcgaagatgcacgtctccagatggcaaaatctgcagtaacagagggacttgtgtatgtggtgaatgtacctgtcacgatgttgatccgactggggactggggagatattcatggggacacctgtgaatgtgatgagagggactgtagagctgtctatgaccgatattctgatgacttctgttcaggtcatggacagtgtaattgcggaagatgtgactgcaaagcaggctggtatgggaagaagtgtgagcacccacagtcctgcacgctgtcagctgaggagagcatcaggaagtgccagggaagctcggatctgccttgctctgggaggggtaaatgtgaatgtggcaaatgcacctgctatcctccaggagatcgccgggtgtatggcaagacttgtgagtgtgatgatcgccgctgtgaagacctcgatggtgtggtctgtggaggccacggcacatgttcctgtggtcgctgtgtttgtgagagaggatggtttggaaagctctgccaacatccgcggaagtgtaacatgacggaagaacaaagcaagaatctgtgtgaatcagcagatggcatattgtgctcggggaagggttcttgtcattgtgggaagtgcatttgttctgctgaagagtggtatatttctggggagttctgtgactgtgatgacagagactgcgacaaacatgatggtctcatttgtacagggaatggaatatgtagctgtggaaactgtgaatgctgggatggatggaatggaaatgcatgtgaaatctggcttggctcagaatatccttaacaattacatgagagaggtctggattcttattttttctgggccattagaacatataaatgcgaaggaaaccatgtatattcaccactaggacaggttaaaaagaccattgtatgtttttctatttctgaattacgaatgaaatccgagtacctattagaaatgagttatgcaaatttagatgcaaataacattagaaaaaaaagattcttccataattaacataagtggttcctaacgagagcaatttttccacccaaaagtcatttggcaacatctacagacaattttgattgtcacactgggtcgggtaggaaggtatgctgcagacatttggtgggtagaggccagggatgctgctgagcatcccgcagtgtacaggacagcccccaaacaaggaattatccagccccaaatgccaatagggctcagactgagaaacattgagttatatggctattagaaatccacattcttacacaagaaagaccatattagaatctaaggaaaacatgcatattcacattaattaatcgatcagatttttccagaattccgtatcagtcaccattttaatatggggacaatgaagacaagcacacaggaggtagaatatcagagtggggctggatcaagggcaaaaactggtcattaagtcatctgacattaaatcatttagccactaagttatttgtgtactctcactttaaactcaccaaagaagattctcttaaagaaattatgaaaaatgtacaatttaacattttaaataaatagtgacagaagttgtttaaaaa

SEQ ID NO: 1309 - DNA, 2695 bp, Homo sapiens
gcgggctttagcgccttttctggcggcggtagatttgaagcgcttcaaaggaccggacccagagaagaggaaaactctaccggtgcaggagcacagggatcagttgtccttgtttttttttggtcttttcttcatttgaagattaagtattggagccatgggaataaaggttcaacgtcctcgatgtttttttgacattgccattaacaatcaacctgctggaagagttgtctttgaattattttctgatgtgtgccccaaaacatgcgagaactttcgttgtctttgtacaggtgaaaaggggaccgggaaatcaactcagaaaccattacattataagagttgtctctttcacagagttgtcaaggattttatggttcaaggtggtgacttcagtgaaggaaatggacgaggaggggaatctatctatggaggattttttgaagacgagagtttcgctgttaaacacaacaaagaatttctcttgtcaatggccaacagagggaaggatacaaatggttcacagttcttcataacaacgaaaccaactcctcatttagatgggcatcatgttgtttttggacaagtaatctctggtcaagaagttgtaagagagattgaaaaccagaaaacagatgcagctagcaaaccgtttgcggaggtacggatactcagttgtggagagctgattcccaaatctaaagttaagaaagaagaaaagaaaaggcataaatcatcatcatcttcctcctcctcatctagtgactcagatagctcaagtgattctcagtcctcttctgattcctctgattccgaaagtgctactgaagagaaatcaaagaaaagaaaaaagaaacatcggaaaaattcccgaaaacacaagaaagaaaagaaaaagcgaaagaaaagcaagaagagtgcatctagtgagagtgaagctgaaaatcttgaagcacaaccccagtctactgtccgtccagaagagatccctcctatacctgaaaatagattcctaatgagaaaaagtcctcctaaagctgatgagaaggaaaggaaaaacagagagagagaaagggaaagagagtgtaatccacctaactcccagcctgcttcataccagagacgacttttagttactagatctggcaggaaaattaaaggaagaggaccaaggcgttatcgaactccttccagatccagatcaagggatcgtttcagacgtagtgagactcctccacattggaggcaagagatgcagagagctcaaagaatgagggtatcaagtggtgaaagatggatcaagggggataagagtgagttgaatgaaataaaagaaaatcagagaagtccagttagagtaaaagagagaaaaataacagatcacaggaatgtatctgagagtccaaacagaaaaaatgaaaaggagaagaaagttaaagaccataaatctaacagcaaagagagagacatcagaagaaattcagaaaaagatgacaagtataaaaacaaagtgaagaaaagggccaaatctaaaagtaggagtaagagcaaagagaaatcaaagagtaaagaaagagattcaaaacataatagaaatgaagaaaagaggatgaggtcaaggagtaaaggaagggatcatgaaaatgttaaagaaaaagaaaagcagtctgattctaaaggaaaagatcaggaaaggagtagaagtaaagagaagtctaaacagttagaatcaaagagtaatgagcatgatcacagtaaaagtaaggaaaaggatagacgcgcacaatccaggagtagagaatgtgatataactaaaggtaaacacagttataatagcagaacaagagaacgaagcagaagtagggacagaagcagaagagtgcgatcaagaacccatgacagagatcgcagcagaagcaaggagtaccatagatacagagaacaggaatacaggagaagaggacggtcacgaagccgagagagaagaacaccaccaggaagatcaagaagtaaagataggaggagaaggaggagagactcacggagctcagagagagaagaaagtcaaagcagaaacaaagacaaatacagaaaccaagagagtaagagctcacacagaaaagaaaattctgagagtgagaaaagaatgtactctaaaagtcgtgatcataatagctcaaataacagcagggaaaaaaaggctgatagagatcaaagtcccttctcaaaaataaaacaaagcagtcaggacgatgaattaaagtcctccatgttgaaaaataaggaggatgagaagatcagatcctcagtggaaaaagaaaaccaaaaatcaaaaggtcaagaaaatgaccatgtacatgaaaaaaataaaaaatttgatcatgaatcaagccctggaacagatgaagacaaaagcggatgagtgagttatataaacttacttccattctgtttcggattttaagtttgagagacttgctaatgaatctcctttatgttgttttccttttcattgtttttggattgttttatgtttgtccttttttttcttaatgtggatttcattgagttgattttttgataatctgcaatctggataatttgtactgctaaagttttaataaactcgacatgagaaaaacaaaaaaaaaaaaaaaaaaaaaaaaaaaaaaaaaaaaaaaaaaaaaaaaaaaaa

SEQ ID NO: 1310 - DNA, 3407 bp, Homo sapiens
ggcgagcactggctacgtgcgactgtggggagcggcgcggtgctgggtgctgcggcggccgatgctggccgccgccggggggcgggttcccactgcagcaggagcgtggttgctccgaggccagcggacctgcgacgcctctcctccttgggcactgtggggccgaggcccggcaattgggggccaatggcgggggttttgggaagcgagcagccgcggcggaggcgcattctcggggggcgaggacgcctccgagggcggcgcggaggaaggagccggcggcgcggggggcagcgcgggcgccggggaaggcccggtcataacggcgctcacgcccatgacgatccccgatgtgtttccgcacctgccgctcatcgccatcacccgcaacccggtgttcccgcgctttatcaagattatcgaggttaaaaataagaagttggttgagctgctgagaaggaaagttcgtctcgcccagccttatgtcggcgtctttctaaagagagatgacagcaatgagtcggatgtggtcgagagcctggatgaaatctaccacacggggacgtttgcccagatccatgagatgcaggaccttggggacaagctgcgcatgatcgtcatgggacacagaagagtccatatcagcagacagctggaggtggagcccgaggagccggaggcggagaacaagcacaagccccgcaggaagtcaaagcggggcaagaaggaggcggaggacgagctgagcgccaggcacccggcggagctggcgatggagcccacccctgagctcccggctgaggtgctcatggtggaggtagagaacgttgtccacgaggacttccaggtcacggaggaggtgaaagccctgactgcagagatcgtgaagaccatccgggacatcattgccttgaaccctctctacagggagtcagtgctgcagatgatgcaggctggccagcgggtggtggacaaccccatctacctgagcgacatgggcgccgcgctcaccggggccgagtcccatgagctgcaggacgtcctggaagagaccaatattcctaagcggctgtacaaggccctctccctgctgaagaaggaatttgaactgagcaagctgcagcagcgcctggggcgggaggtggaggagaagatcaagcagacccaccgtaagtacctgctgcaggagcagctaaagatcatcaagaaggagctgggcctggagaaggacgacaaggatgccatcgaggagaagttccgggagcgcctgaaggagctcgtggtccccaagcacgtcatggatgttgtggacgaggagctgagcaagctgggcctgctggacaaccactcctcggagttcaatgtcacccgcaactacctagactggctcacgtccatcccttggggcaagtacagcaacgagaacctggacctggcgcgggcacaggcagtgctggaggaagaccactacggcatggaggacgtcaagaaacgcatcctggagttcattgccgttagccagctccgcggctccacccagggcaagatcctctgcttctatggcccccctggcgtgggtaagaccagcattgctcgctccatcgcccgcgccctgaaccgagagtacttccgcttcagcgtcgggggcatgactgacgtggctgagatcaagggccacaggcggacctacgtgggcgccatgcccgggaagatcatccagtgtttgaagaagaccaagacggagaaccccctgatcctcatcgacgaggtggacaagatcggccgaggctaccagggggacccgtcgtcggcactgctggagctgctggacccagagcagaatgccaacttcctggaccactacctggacgtgcccgtggacttgtccaaggtgctgttcatctgcacggccaacgtcacggacaccatccccgagccgctgcgagaccgtatggagatgatcaacgtgtcaggctacgtggcccaggagaagctggccattgcggagcgctacctggtgccccaggctcgcgccctgtgtggcttggatgagagcaaggccaagctgtcatcggacgtgctgacgctgctcatcaagcagtactgccgcgagagcggtgtccgcaacctgcagaagcaagtggagaaggtgttacggaaatcggcctacaagattgtcagcggcgaggccgagtccgtggaggtgacgcccgagaacctgcaggacttcgtggggaagcccgtgttcaccgtggagcgcatgtatgacgtgacaccgcccggcgtggtcatggggctggcctggaccgcaatgggaggctccacgctgtttgtggagacatccctgagacggccacaggacaaggatgccaagggtgacaaggatggcagcctggaggtgacaggccagctgggggaggtgatgaaggagagcgcccgcatagcctacaccttcgccagagccttcctcatgcagcacgcccccgccaatgactacctggtgacctcacacatccacctgcatgtgcccgagggcgccacccccaaggacggcccaagcgcaggctgcaccatcgtcacggccctgctgtccctggccatgggcaggcctgtccggcagaatctggccatgactggcgaagtctccctcacgggcaagatcctgcctgttggtggcatcaaggagaagaccattgcggccaagcgcgcaggggtgacgtgcatcatcctgccagccgagaacaagaaggacttctacgacctggcagccttcatcaccgagggcctggaggtgcacttcgtggaacactaccgggagatcttcgacatcgccttcccggacgagcaggcagaggcgctggccgtggaacggtgacggccaccccgggactgcaggcggcggatgtcaggccctgtctgggccagaactgagcgctgtggggagcgcgcccggacctggcagtggagccaccgagcgagcagctcggtccagtgacccagatcccagggacctcagtcggcttaatcagagtgtggcatagaagctatttaatgattaaagtcatttgcagtgggagttagcatcactaacctgacagttgttgccaggaatttgctttgtttactgctagtatattagaaatcctagatctcagaatcacaatagtaataaacaacaggggtcattttttcctaacttactctgtgttcaggtgtggaatttctgtctcccaagaggaaatgtgacttcactttggtgccaatggacagaaaattctacctgtgctacataggagaagtttggaatgcacttaatagctggtttttacaccttgatttcgaggtggaaagaaattgatcatgaatctctaataaatttaaatctcttaaaccaaaaaaaaaaaaaa

SEQ ID NO: 1311 - DNA, 1361 bp, Homo sapiens
acttgagggagtagggggccgggtttgggccctcagttgctaagggctacccgagtgggaagcggttcaagagatggggtgaagggtggttcaccggttcttcaagtcctcagccttctggcccgcggaagttaagcaaccaagaggcgggcctaagaccggaagcaggaaggagggcgcaggaagcagggcgccgcagcctgtcgtacggtccttctgtgggtctgtcggtgccgagggcaggatggagaagctgcggctcctgggcctccgctaccaggagtacgtgactcgtcacccggccgccacggcccagctggagacagcagtgcggggcttcagttacctgctggcaggtcgattcgccgattcgcacgagctgtcagagctggtgtactctgcctctaacctgcttgtgctgctcaatgacgggatcctacggaaggagcttcggaaaaagttgcctgtgtcgctgtcccagcagaagctgctgacatggctgagcgtgctggagtgcgtggaggtgttcatggagatgggagctgccaaggtgtggggtgaagtgggccgctggcttgtcatcgccctcatccagctggccaaggctgtactgcggatgctcctgctgctctggttcaaggctggcctccagacttcaccccctatcgttccactggacagagagacccaggcacagcccccggatggtgaccacagccctggcaaccatgagcagtcctacgtggggaagcggtcaaaccgggtggtgcgaaccctccagaacacgccgtccctgcactccaggcactggggagctccccagcagcgggagggacggcagcagcagcatcacgaggagctgagtgcgacccccacccccctggggctgcaggagaccatcgcagagtttttgtacattgcccggccgctgctgcacttgctcagcctgggcctgtggggtcagaggtcgtggaaaccctggctcttggctggtgttgtggacgtgaccagcctgagcctcctgagtgacagaaagggcctgacccggagggagcggcgggagctgcggcgccggaccatcctgctgctctactacctgctgcgctctcctttctacgaccgcttctccgaggccaggatcctcttcctgctccagttgctggccgaccacgtccctggcgttggcctggtcacaaggccgctcatggattacttgcccacctggcagaaaatctacttctacagttggggctgacagacctcccggaaggagggtgtggggaggggtggggcagggagcccctcttccctaataaaactgactccggcagcgtcaaaaaaaaaaaaaaaaaaaaaaaaaa

SEQ ID NO: 1312 - DNA, 2872 bp, Homo sapiens
cggcgctgggagacaccggacgcccgctcggctgcgctgcggctcaggcccccgctcgggcccgacccgctcggtcaccgccggctcgggcgcgcacctgccggctgcggccccagggccatgcggaggcccacgaggaggccggcggccacgcgcatcccgtagcccaggtggcccaggtctgcaccgcggcggcctcggcgccatggagcccccgtattcgctgacggcgcactacgatgagttccaagaggtcaagtacgtgagccgctgcggcgcggggggcgcgcgcggggcctccctgcccccgggcttcccgttgggcgctgcgcgcagcgccaccggggcccggtccgggctgccgcgctggaaccggcgcgaggtgtgcctgctgtcggggctggtgttcgccgccggcctctgcgccattctggcggctatgctggccctcaagtacctgggcccggtcgcggccggcggcggcgcctgtcccgagggctgccctgagcgcaaggccttcgcgcgcgccgctcgcttcctggccgccaacctggacgccagcatcgacccatgccaggacttctactcgttcgcctgcggcggttggctgcggcgccacgccatccccgacgacaagctcacctatggcaccatcgcggccatcggcgagcaaaacgaggagcgcctacggcgcctgctggcgcggcccgggggtgggcctggcggcgcggcccagcgcaaggtgcgcgccttcttccgctcgtgcctcgacatgcgcgagatcgagcgactgggcccgcgacccatgctagaggtcatcgaggactgcgggggctgggacctgggcggcgcggaggagcgtccgggggtcgcggcgcgatgggacctcaaccggctgctgtacaaggcgcagggcgtgtacagcgccgccgcgctcttctcgctcacggtcagcctggacgacaggaactcctcgcgctacgtcatccgcattgaccaggatgggctcaccctgccagagaggaccctgtacctcgctcaggatgaggacagtgagaaggtcctggcagcatacagggtgttcatggagcgagtgctcagcctcctgggtgcagacgctgtggaacagaaggcccaagagatcctgcaagtggagcagcagctggccaacatcactgtgtcagagtatgacgacctacggcgagatgtcagctccatgtacaacaaggtgacgctggggcagctgcagaagatcaccccccacttgcggtggaagtggctgctagaccagatcttccaggaggacttctcagaggaagaggaggtggtgctgctggcgacagactacatgcagcaggtgtcgcagctcatccgctccacaccccaccgggtcctgcacaactacctggtgtggcgcgtggtggtggtcctgagtgaacacctgtccccgccattccgtgaggcactgcacgagctggcacaggagatggagggcagcgacaagccacaggagctggcccgggtctgcttgggccaggccaatcgccactttggcatggcgcttggcgccctctttgtacatgagcacttctcagctgccagcaaagccaaggtgcagcagctagtggaagacatcaagtacatcctgggccagcgcctggaggagctggactggatggacgccgagaccagggctgctgctcgggccaagctccagtacatgatggtgatggtcggctacccggacttcctgctgaaacccgatgctgtggacaaggagtatgagtttgaggtccatgagaagacctacttcaagaacatcttgaacagcatccgcttcagcatccagctctcagttaagaagattcggcaggaggtggacaagtccacgtggctgctccccccacaggcgctcaatgcctactatctacccaacaagaaccagatggtgttccccgcgggcatcctgcagcccaccctgtacgaccctgacttcccacagtctctcaactacgggggcatcggcaccatcattggacatgagctgacccacggctacgacgactgggggggccagtatgaccgctcagggaacctgctgcactggtggacggaggcctcctacagccgcttcctgcgaaaggctgagtgcatcgtccgtctctatgacaacttcactgtctacaaccagcgggtgaacgggaaacacacgcttggggagaacatcgcagatatgggcggcctcaagctggcctaccacgcctatcagaagtgggtgcgggagcacggcccagagcacccacttccccggctcaagtacacacatgaccagctcttcttcattgcctttgcccagaactggtgcatcaagcggcggtcgcagtccatctacctgcaggtgctgactgacaagcatgcccctgagcactacagggtgctgggcagtgtgtcccagtttgaggagtttggccgggttttacactgtccaaaggtctcacccatgaaccctgcccacaagtgttccgtgtggtgagcctggctgcccgcctgcacgcccccactgcccccgcacgaatcacctcctgctggctaccggggcaggcatgcacccggtgccagccccgctctgggcaccacctgccttccagcccctccaggacccggtccccctgctgcccctcacttcaggaggggcctggagcagggtgaggctggactttggggggctgtgagggaaatatactggggtccccagattctgctctaagggggccagaccctctgccaggctggattgtacgggccccaccttcgctgtgttcttgctgcaaagtctggtcaataaatcactgcactgttaaaaaaaaaaaaa

SEQ ID NO: 1313 - DNA, 4325 bp, Homo sapiens
ggagctccaagcggcgggagaggcaggcgtcagtggctgcgcctccatgcctgcgcgcggggcgggacgctgatggagcgcgccatcagcccggggctgctggtacgggcgctgctgctgctgctgctgctggggctcgcggcaaggacggtggccgcggggcgcgcccgtggcctcccagcgccgacggcggaggcggcgttcggcctcggggcggccgctgctcccacctcagcgacgcgagtaccggcggcgggcgccgtggctgcggccgaggtgactgtggaggacgctgaggcgctgccggcagccgcgggagagcaggagcctcggggtccggaaccagacgatgagacagagttgcgaccgcgcggcaggtcattagtaattatcagcactttagatgggagaattgctgccttggatcctgaaaatcatggtaaaaagcagtgggatttggatgtgggatccggttccttggtgtcatccagccttagcaaaccagaggtatttgggaataagatgatcattccttccctggatggagccctcttccagtgggaccgagaccgtgaaagcatggaaacagttcctttcacagttgaatcacttcttgaatcttcttataaatttggagatgatgttgttttggttggaggaaaatctctgactacatatggactcagtgcatatagtggaaaggtgaggtatatctgttcagctctgggttgtcgccaatgggatagtgacgaaatggaacaagaggaagacatcctgcttctacagcgtacccaaaaaactgttagagctgtcggacctcgcagtggcaatgagaagtggaatttcagtgttggccactttgaacttcggtatattccagacatggaaacgagagccggatttattgaaagcacctttaagcccaatgagaacacagaagagtctaaaattatttcagatgtggaagaacaggaagctgccataatggacatagtgataaaggtttcggttgctgactggaaagttatggcattcagtaagaagggaggacatctggaatgggagtaccagttttgtactccaattgcatctgcctggttacttaaggatgggaaagtcattcccatcagtctttttgatgatacaagttatacatctaatgatgatgttttagaagatgaagaagacattgtagaagctgccagaggagccacagaaaacagtgtttacttgggaatgtatagaggccagctgtatctgcagtcatcagtcagaatttcagaaaagtttccttcaagtcccaaggctttggaatctgtcactaatgaaaacgcaattattcctttaccaacaatcaaatggaaacccttaattcattctccttccagaactcctgtcttggtaggatctgatgaatttgacaaatgtctcagtaatgataagttttctcatgaagaatatagtaatggtgcactttcaatcttgcagtatccatatgataatggttattatctaccatactacaagagggagaggaacaaacgaagcacacagattacagtcagattcctcgacaacccacattacaacaagaatatccgcaaaaaggatcctgttcttcttttacactggtggaaagaaatagttgcaacgattttgttttgtatcatagcaacaacgtttattgtgcgcaggcttttccatcctcatcctcacaggcaaaggaaggagtctgaaactcagtgtcaaactgaaaataaatatgattctgtaagtggtgaagccaatgacagtagctggaatgacataaaaaactctggatatatatcacgatatctaactgattttgagccaattcagtgcctgggacgtggtggctttggagttgtttttgaagctaaaaacaaagtagatgactgcaattatgctatcaagaggatccgtctccccaatagggaattggctcgggaaaaggtaatgcgagaagttaaagccttagccaagcttgaacacccgggcattgttagatatttcaatgcctggctcgaagcaccaccagagaagtggcaagaaaagatggatgaaatttggctgaaagatgaaagcacagactggccactcagctctcctagcccaatggatgcaccatcagttaaaatacgcagaatggatcctttctctacaaaagaacatattgaaatcatagctccttcaccacaaagaagcaggtctttttcagtagggatttcctgtgaccagacaagttcatctgagagccagttctcaccactggaattctcaggaatggaccatgaggacatcagtgagtcagtggatgcagcatacaacctccaggacagttgccttacagactgtgatgtggaagatgggactatggatggcaatgatgaggggcactcctttgaactttgtccttctgaagcttctccttatgtaaggtcaagggagagaacctcctcttcaatagtatttgaagattctggctgtgataatgcttccagtaaagaagagccgaaaactaatcgattgcatattggcaaccattgtgctaataaactaactgctttcaagcccaccagtagcaaatcttcttctgaagctacattgtctatttctcctccaagaccaaccactttaagtttagatctcactaaaaacaccacagaaaaactccagcccagttcaccaaaggtgtatctttacattcaaatgcagctgtgcagaaaagaaaacctcaaagactggatgaatggacgatgtaccatagaggagagagagaggagcgtgtgtctgcacatcttcctgcagatcgcagaggcagtggagtttcttcacagtaaaggactgatgcacagggacctcaagccatccaacatattctttacaatggatgatgtggtcaaggttggagactttgggttagtgactgcaatggaccaggatgaggaagagcagacggttctgaccccaatgccagcttatgccagacacacaggacaagtagggaccaaactgtatatgagcccagagcagattcatggaaacagctattctcataaagtggacatcttttctttaggcctgattctatttgaattgctgtatccattcagcactcagatggagagagtcaggaccttaactgatgtaagaaatctcaaatttccaccattatttactcagaaatatccttgtgagtacgtgatggttcaagacatgctctctccatcccccatggaacgacctgaagctataaacatcattgaaaatgctgtatttgaggacttggactttccaggaaaaacagtgctcagacagaggtctcgctccttgagttcatcgggaacaaaacattcaagacagtccaacaactcccatagccctttgccaagcaattagccttaagttgtgctagcaaccctaataggtgatgcagataatagcctacttcttagaatatgcctgtccaaaattgcagacttgaaaagtttgttcttcgctcaatttttttgtggactactttttttatatcaaatttaagctggatttgggggcataacctaatttgagccaactcctgagttttgctatacttaaggaaagggctatctttgttctttgttagtctcttgaaactggctgctggccaagctttatagccctcaccatttgcctaaggaggtagcagcaatccctaatatatatatatagtgagaactaaaatggatatatttttataatgcagaagaaggaaagtccccctgtgtggtaactgtattgttctagaaatatgctttctagagatatgatgattttgaaactgatttctagaaaaagctgactccatttttgtccctggcgggtaaattaggaatctgcactattttggaggacaagtagcacaaactgtataacggtttatgtccgtagttttatagtcctatttgtagcattcaatagctttattccttagatggttctagggtgggtttacagctttttgtacttttacctccaataaagggaaaatgaagctttttatgtaaattggttgaaaggtctagttttgggaggaaaaaagccgtagtaagaaatggatcatatatattacaactaacttcttcaactatggactttttaagcctaatgaaatcttaagtgtcttatatgtaatcctgtaggttggtacttcccccaaactgattataggtaacagtttaatcatctcacttgctaacatgtttttatttttcactgtaaatatgtttatgttttatttataaaaattctgaaatcaatccatg

SEQ ID NO: 1314 - DNA, 1429 bp, Homo sapiens
  misc_feature (1298)..(1298): n is a, c, g, or t
gcacgagggcgcatgactagttggggccaaaccagtgctcctgccacctctctggctgccccctagagcctgcccatcccagcctgaccaatgtccacagccagggagcagccaatcttcagcacacgggcgcacgtgttccaaattgacccagccaccaagcgaaactggatcccagcgggcaagcacgcactcactgtctcctatttctacgatgccacccgcaatgtgtaccgcatcatcagcatcggaggcgccaaggccatcatcaacagcactgtcactcccaacatgaccttcaccaaaacttcccagaagttcgggcagtgggccgacagtcgcgccaacacagtctacggcctgggctttgcctctgaacagcatctgacacagtttgccgagaagttccaggaagtgaaggaagcagccaggctggccagggagaaatctcaggatggcggggagctcaccagtccagccctggggctcgcctcccaccaggtccccccgagccctctcgtcagtgccaacggccccggcgaggaaaaactgttccgcagccagagcgctgatgcccccggccccacagagcgcgagcggctaaagaagatgttgtctgagggctccgtgggcgaggtacagtgggaggccgagtttttcgcactgcaggacagcaacaacaagctggcaggcgccctgcgagaggccaacgccgccgcagcccagtggaggcagcagctggaggctcagcgtgcagaggccgagcggctgcggcagcgggtggctgagctggaggctcaggcagcttcagaggtgacccccaccggtgagaaggaggggctgggccagggccagtcgctggaacagctggaagctctggtgcaaaccaaggaccaggagattcagaccctgaagagtcagactggggggccccgcgaggccctggaggctgccgagcgtgaggagactcagcagaaggtgcagacccgcaatgcggagttggagcaccagctgcgggcgatggagcgcagcctggaggaggcacgggcagagcgggagcgggcgcgggctgaggtgggccgggcagcgcagctgctggacgtcagcctgtttgagctgagtgagctgcgtgagggcctggcccgcctggctgaggctgcgccctgagccggggctggttttctatgaacgattccggcctgggatgcgggccaggctgcaggcggcatagttgggcccattcgtcctggaaagggactggggggtcccaacttagccctgggtgggccgggccgggntgggctggggtgggccccagtcggctctggttgttggcagctttggggctgtttttgagcttctcattgtgtagaatttctagatcccccgattacatttctaagcgtgaaaaaaaaaaaaaaaaaaaaaa

SEQ ID NO: 1315 - DNA, 2279 bp, Homo sapiens
aggtggagccttttttgctcacggcagcaagttcccttctcctttctctcccccggcggcgtgtgcattggctcttcaagctgcctgtgctgctccgtggagtgaaaaaggcagggtgtgctcgcagactgtgctataaactgcaatttctatttggggtcctcacggagaagaacaccaggaaagacagacaggaccagtgccatgggccagctttgctgctttcctttctcaagagatgaaggaaaaatcagtgaaaagaacggaggggagcccgatgacgctgaactagtaaggctcagtaagaggctggtggagaacgcggtgctcaaggctgtccagcagtatctggaggaaacacagaataaaaacaagccgggggaggggagctctgtgaaaaccgaagcagctgatcagaatggcaatgacaatgagaacaacaggaaatgagcccggaacgcaggcccccatgtctctgtgcaaagcctccctgcttccctctgctgagtctagggactgacttgcagcgtgctgtttaagttaagtttctctggtgcaatctgtgaagattgcctaatacttttcatgatcgatgtgttcgcattgctgaaacacaacagaagaaaaatggagtgctgggactggcagaggaaattaattgatgaaagaagaatggcccaagtttcattcgccctcagccacgcacaagggaaagggaactttgggttatgcctcctggacgcaaattaaaggccgagaaagaggccttgccatcaatggaatactgccatttatattgcttagcagggcatttgactactttatctgaggccagaactctcacacacagctatcaagtgctaagtttaaaataatcactgttggaattgtcatctgtacaattagtccataatgtttcatgtttgtcctaagtgtgctgttgctatgcagtgtgatctttatttatagtaaattatgtttcatgtaaatgatatatttttggtgaaatgcaaccttttctataaaatgtgggcaacattttaaagtttttttaaaatcctattttgataagtcagtatgccatatttaatgaaatgttattatataatttttttttcttaggcaagaaacctattggaattcgagacttaattaatgaagctttgcatcgagaaacgatgggtctgaagtccaaagtgaaacagataaaggaacttttattaaagcctgagactcaggccagaattaggagggagctttttgaaggaagacttattaacaacagtaattcagcaaatgacgttgatttcagcacaactttgacataagctctacattgcgattgtgacaacatagcttatgaaatcttttcagcttattaagtagctctttggtaaacaccaaagaagtttctgatagtgtctgcacaacagcaaaccaacatttggtgaggaattagcaatttcttgccaaagaaaattgattctgcccaattattttttgagctacacttgtgttttagaatatctgtttctgtaatattgagagttattttatagaaatgatttcttaattagctgttgtgagatatttctcgggtccttgcagaaaaaaacatacagactgtgaacaaatcattcacaaacagaataaaacagagccaacaacagtattttaagggtcacttgcctcctgttgacacaattgttgctaaatcaaaagaagcgttgtccaggtgtgtctacatctagtgttacttttaatgagaatttgaatgtttattgaacaatagtacttgaatgaacatttataaatgtaattattgcgatcactggttaagaatgttttatatatccttataatatttttcactgatcaaaatgttgttctgctttttcatttcttaaggaatacatgtttgggatttttattttttacgtgtccgaagataagctccaggtcttatcgtatcccttgccatctgaacttgtttgcactgcttctgtttgaaagagcatcttgaaaaacttccccggtatgatgattgttggtaacaactttttctatagtcattgatggagtagatcatgatggaggggaaatcactggagatcaaatatgtaaaatcatttcaaatataaaatccagtttactcatggattttagctattttttcactgggtaaattatactacatttatttacaaatgagtttatgcattttcatggctcttaataaacatattgttttcccttgaaaaaaaaaaaaaaaaaaaaaa

SEQ ID NO: 1316 - DNA, 2570 bp, Homo sapiens
tcggaggagccagccgaaatcctgccgcctgcccgggacgaggaggaggaggaggaagaggggatggagcaggggctggaggaggaagaagaggtggatccccggatccagggagaactggagaagttaaatcagtccacggatgatatcaacagacgggagactgaacttgaggatgctcgtcagaagttccgctctgttctggttgaagcaacggtgaaactggatgaactggtgaagaaaattggcaaagctgtggaagactccaagccctactgggaggcacggagggtggcgaggcaggctcagctggaagctcagaaagccacgcaggacttccagagggccacagaggtgctccgtgccgccaaggagaccatctccctggccgagcagcggctgctggaggatgacaagcggcagttcgactccgcctggcaggagatgctgaatcacgccactcagagggtcatggaggcggagcagaccaagaccaggagcgagctggtgcataaggagacggcagccaggtacaatgccgccatgggccgcatgcgacagctggagaagaaactcaagagagccatcaacaagtccaagccttattttgaactcaaggcaaagtactatgtgcagctcgagcaactgaaaaagactgtggatgacctgcaggccaaactgaccctggcaaaaggcgagtacaagatggccctgaagaacctggagatgatctcagatgagatccacgagcggcggcgctccagtgccatggggcctcggggatgcggtgttggtgctgagggcagcagcacatctgtggaggatctgccagggagcaaacctgagcctgatgccatttctgtggcctcggaggcctttgaagatgacagctgtagcaactttgtgtctgaagatgactcggaaacccagtccgtgtccagctttagttcaggaccaacaagcccgtctgagatgcctgaccagttccctgcggttgtgaggcctggcagcctggatctgcccagccctgtgtccctgtcagagtttgggatgatgttcccagtgttgggccctcgaagtgaatgcagcggggcctcctcccctgaatgtgaagtagaacgaggagacagggcagaaggggcagagaataaaacaagtgacaaagccaacaacaaccggggcctcagcagtagcagtggcagtggtggcagcagtaagagccaaagcagcacctcccctgagggccaggccttggagaaccggatgaagcagctctccctacagtgctcaaagggaagagatggaattattgctgacataaaaatggtgcagattggctgattcatcctgggccctggccgatgtgcatatcaacatttatacatggaactggagaacattgtgccaataatcatttaatatatgccaaatcttacacgtctactctaaactgctctaatgaagtttcagtgaccttgagggctaaagattgttcttctgggtaagagctcttgggctggtttttcagagcagagttcttgttgtgggtagactgtgactaggttcacagcctttgtggaacattccgtataacggcattgtggaagcaataactagttcctatgaaagaaccagagctgggaagatggctgggaagccaggccaaagtgggggcaacagcttgcttctctttctcttctcaccctcagtttgtatgggaaaatggagatgtcctctccactttatcccacgatatctaaatgaaaaagaaagaaaacccacacacaaagcaaaaactcaagtattaagagcacatatttttgacccagtggaggcttaaaaaaaaaaaaatccaagaacacaattcattttcaccacctctggtgttcagagggggcttttaaaaaagcgtgtatgctgggatacccattaaaaccattttctagaaggctaccatgagctgcactttttggggtgggaaaggtgaatgccagtggggatgcggggggatgagggtaggagggacttatagaaggggatttgtggctgtgggggagaaggttctacagcataagccttatcctgccagccaaggggatttattctaagagaagtgcatgtgaagaatggttgccactgttattagattgacaagatgttaatttctctgtaggttgtaactttaaaaataaatgaaattatttaagggttatgctgcactagtattccttagaggaaacagttctttaaagttaggaaagggagtaggcaggcatgtgttggcaaaggctgttaatagtagttaagtgttaagactgcttttctttaacgttttcatggtaatgcatatttagagcactgtatttttgtcttgttaagaaaatttagcatttctaaaagaaaaaagcaaccctctttcaaactgttaattctgtcacagcctgtatattttagtcatttgtaaatctcttcatacaatagtgacttcttttttgactgatacagtatcttaattacaaggttattttgtacttgtcttaatacactaagtgtaataaaaacggcttgag

SEQ ID NO: 1317 - DNA, 2570 bp, Homo sapiens; identical to SEQ ID NO: 1316

SEQ ID NO: 1318 - DNA, 974 bp, Homo sapiens
gcggcggcgagaggatgaacaacaagttcgacgctttgaaagatgatgacagtggggaccatgatcagaatgaagaaaacagcacacagaaagatggtgagaaggaaaaaacggaacgagacaagaatcagagcagtagcaagagaaaggctgttgtccctggaccggcagagcatcccctgcagtacaactacactttttggtactccaggagaacccccggccgtcccacgagctcacagagctatgaacagaatatcaaacagattggcacctttgcctctgtggagcagttctggaggttttatagccacatggtacgtcctggggacctgacaggccacagtgacttccatctcttcaaagaaggaattaaacccatgtgggaggatgatgcaaataaaaatggtggcaagtggattattcggctgcggaagggcttggcctcccgttgctgggagaatctcattttggccatgctgggggaacagttcatggttggggaggagatctgtggggctgtggtgtctgtccgctttcaggaagacattatttcaatatggaataagactgccagtgaccaagcaaccacagcccgaatccgggacacacttcggcgagtgcttaacctacctcccaacaccattatggaatacaaaactcacaccgacagcatcaaaatgccaggcaggctgggcccccaaaggctcctttttcaaaacctctggaagccgcggttgaatgtgccatgaccctctccctctctggatggcaccatcattgaagctggcgtcatcggagtctgttgttctgttggcgtgctacctggaagatccttctgtggtggacaagaggaattggaagagcattttatgttttaagaacaggctgacacgcagcagctacaacaacagctgagatcacttaataaatggtgctaaactcaaaaaaaaaaaaaaaaaaaaaaaaaaaaa

SEQ ID NO: 1319 - DNA, 3247 bp, Homo sapiens
gtctggacttgtggtgcgctgccagggatccgcagcgttgccggttgtattcgctggataccagagggcggaagtgcagcagggttcagctccgacctccgcgccggtgctttttgcggctgcgcgggcttcctggagtcctgctaccgcgtccccgcaggacagtgtgtcaggcgggcagcttgccccgccgccccaccggagcgcggaatctgggcgtccccaccagtgcggggagccggaaggaggagccatagcttggagtaggtttggctttggttgaaataagaatttagcctgtatgtactgctttaactcctggaagaatgacagatgacaaagatgtgcttcgagatgtgtggtttggacgaattccaacttgtttcacgctatatcaggatgagataactgaaagggaagcagaaccatactatttgcttttgccaagagtaagttatttgacgttggtaactgacaaagtgaaaaagcactttcagaaggttatgagacaagaagacattagtgagatatggtttgaatatgaaggcacaccactgaaatggcattatccaattggtttgctatttgatcttcttgcatcaagttcagctcttccttggaacatcacagtacattttaagagttttccagaaaaagaccttctgcactgtccatctaaggatgcaattgaagctcattttatgtcatgtatgaaagaagctgatgctttaaaacataaaagtcaagtaatcaatgaaatgcagaaaaaagatcacaagcaactctggatgggattgcaaaatgacagatttgaccagttttgggccatcaatcggaaactcatggaatatcctgcagaagaaaatggatttcgttatatcccctttagaatatatcagacaacgactgaaagacctttcattcagaagctgtttcgtcctgtggctgcagatggacagttgcacacactaggagatctcctcaaagaagtttgtccttctgctattgatcctgaagatggggaaaaaaagaatcaagtgatgattcatggaattgagccaatgttggaaacacctctgcagtggctgagtgaacatctgagctacccggataattttcttcatattagtatcatcccacagccaacagattgaaggatcaactatttgcctgaacagaatcatccttaaatgggatttatcagagcatgtcacccttttgcttcaatcaggtttggtggaggcaacctgaccagaaacacttcgctgctgcaagccagacaggaaaaagattccatgtcagataaggcaactgggctggtcttactttgcatcacctctgctttcctccactgccatcattaaacctcagctgtgacatgaaagacttaccggaccactgaaggtcttctgtaaaatataatgaagctgaaacctttggcctaagaagaaaatggaagtatgtgccactcgatttgtatttctgattaacaaataaacaggggtatttcctaaggtgaccatggttgaactttagctcatgaaagtggaaacattggtttaattttcaagagaattaagaaagtaaaagagaaattctgttatcaataacttgcaagtaattttttgtaaaagattgaattacagtaaacccatctttccttaacgaaaatttcctatgtttacagtctgtctattggtatgcaatcttgtaactttgataatgaacagtgagagatttttaaataaagcctctaaatatgttttgtcatttaataacatacagttttgtcacttttcaagtactttctgactcacatacagtagatcactttttactctgtgttaccattttgactggtcgtcattggcatggggtggatatagggcataggattacttgtctcagaagctgtcatagaatttcttgctgccaattaaaaaacctgtgttctttacacactacacgtataaatattgtaactgttcatctttgttgttttatcactgtaagcctgtcaaatcatagtatcctaagcatctgtaaatgctaattttgcatttttggaaaaacccattccttccaagctagtgtttttcattggctccaggtctaatttttcactgtggtccctggcagccagtcttttgaagtttaaagattacctgtctcttgactgcagtaccttttctttaatttttaccaaaaatatccagaggttactggagttcttattcaatataaggaaagtttgctgcactttattaccaagcctctgggattttaccagtcaaacatatttgtgcattacatttcatttcttgtgagctagctggctgtccatattgaatgttgacccatttgagtacgctaaaaggcttacagtatcagacacgatcatggttttagatcccataataaaaatgratgtttttcttataaaaaattatacaaatgctgaagtgagattctactattgttcattgcttccttttctttttccttttgcgattttcactgattaatagcacatttcttcacaaaattagataaagttggtcaaagaccagatattctggaatggaaattgtaaagcttaatcaaaaagaatagccagtacagcatacaatctcagaaacttagaagcaagtagaaaataattggttgatgtaaacgaaagtgccattttagtaaaggcaggaaaaaaatagcaatatttgagttatgtaaggataaaaaatccactgacttgtatttttgcacaagaggctggtctgaatatgattgttcacattaagagtgtttattcgtcggttcattttggggattttcccccttgatgttttgacagattgaagtgagctttagtgagcaaaaggatcagaatgcagggaacactaagctgtgatgaagaaagtgtggtaaaaagccagagtagttttatacagacaaaaccagtgtcaggcctttgcagtaggcttgagtgaacttctgatctagatttgaaagtaaattttatgaagacattgcccatttttacttcctcattcattattgtaccagcatcatagctttattactctaatcccaggtaagtcaagcctacaatgccctagaggaagagtaaaaccagaaattcatgctggcttaaataatctatttttgtttcttttcatttgaatatttaaattttatggtttattaaaaaattaaataaaaaagaaaaaaaaaaaaaaaaaaaactcga

SEQ ID NO: 1320 - DNA, 6409 bp, Homo sapiens
caaggcggccggcggcgaccatggcagcgggccggcggcggccgtagtggcccaggcctgggcttcagcctcccggggccccagagggcggggcggtccgggccgcggcggtggcggcgccacttccctgctcccgcccgaggactcctgcgggcactcgctgaggaccagcggaccggcggcgcgaatctgactgaggggcggggacgccgtctgttccccgccgctcccggcagggccgggccgggccgggctgggccgggctgggccgggcgggcccctgggagcagcccccaggcgggggaccgccttggagacccgaagccggagctagaggcaggcggtgggcccgggtggagtcccggccggagctggtggttcgggggcggtgctaggccccgaggctgcgggacctgagcgcgaggagcctgagtgcgggtccagcggtggcggcatgagccggcccccgccgacggggaaaatgcccggcgcccccgagaccgcgccgggggacggggcaggcgcgagccgccagaggaagctggaggcgctgatccgagaccctcgctcccccatcaacgtggagagcttgctggatggcttaaattccttggtccttgatttagattttcctgctttgaggaaaaacaagaacatagataatttcttaaatagatatgagaaaattgtgaaaaaaatcaaaggtctacagatgaaggcagaagactatgatgttgtaaaagttattggaagaggtgcttttggtgaagtgcagttggttcgtcacaaggcatcgcagaaggtttatgctatgaagcttcttagtaagtttgaaatgataaaaagatcagattctgcctttttttgggaagaaagagatattatggcctttgccaatagcccctgggtggttcagcttttttatgcctttcaagatgataggtatctgtacatggtaatggagtacatgcctggtggagaccttgtaaaccttatgagtaattatgatgtgcctgaaaaatgggccaaattttacactgctgaagttgttcttgctctggatgcaatacactccatgggtttaatacacagagatgtgaagcctgacaacatgctcttggataaacatggacatctaaaattagcagattttggcacgtgtatgaagatggatgaaacaggcatggtacattgtgatacagcagttggaacaccggattatatatcacctgaggttctgaaatcacaagggggtgatggtttctatgggcgagaatgtgattggtggtctgtaggtgttttcctttatgagatgctagtgggggatactccattttatgcggattcacttgtaggaacatatagcaaaattatggatcataagaattcactgtgtttccctgaagatgcagaaatttccaaacatgcaaagaatctcatctgtgctttcttaacagatagggaggtacgacttgggagaaatggggtggaagaaatcagacagcatcctttctttaagaatgatcagtggcattgggataacataagagaaacggcagctcctgtagtacctgaactcagcagtgacatagacagcagcaatttcgatgacattgaagatgacaaaggagatgtagaaaccttcccaattcctaaagcttttgttggaaatcagctgcctttcatcggatttacctactatagagaaaatttattattaagtgactctccatcttgtagagaaaatgattccatacaatcaaggaaaaatgaagaaagtcaagagattcagaaaaaactgtatacattagaagaacatcttagcaatgagatgcaagccaaagaggaactggaacagaagtgcaaatctgttaatactcgcctagaaaaaacagcaaaggagctagaagaggagattaccttacggaaaagtgtggaatcagcattaagacagttagaaagagaaaaggcgcttcttcagcacaaaaatgcagaatatcagaggaaagctgatcatgaagcagacaaaaaacgaaatttggaaaatgatgttaacagcttaaaagatcaacttgaagatttgaaaaaaagaaatcaaaactctcaaatatccactgagaaagtgaatcaactccagagacaactggatgaaaccaatgctttactgcgaacagagtctgatactgcagcccggttaaggaaaacccaggcagaaagttcaaaacagattcagcagctggaatctaacaatagagatctacaagataaaaactgcctgctggagactgccaagttaaaacttgaaaaggaatttatcaatcttcagtcagctctagaatctgaaaggagggatcgaacccatggatcagagataattaatgatttacaaggtagaatatgtggcctagaagaagatttaaagaacggcaaaatcttactagcgaaagtagaactggagaagagacaacttcaggagagatttactgatttggaaaaggaaaaaagcaacatggaaatagatatgacataccaactaaaagttatacagcagagcctagaacaagaagaagctgaacataaggccacaaaggcacgactagcagataaaaataagatctatgagtccatcgaagaagccaaatcagaagccatgaaagaaatggagaagaagctcttggaggaaagaactttaaaacagaaagtggagaacctattgctagaagctgagaaaagatgttctctattagactgtgacctcaaacagtcacagcagaaaataaatgagctccttaaacagaaagatgtgctaaatgaggatgttagaaacctgacattaaaaatagagcaagaaactcagaagcgctgccttacacaaaatgacctgaagatgcaaacacaacaggttaacacactaaaaatgtcagaaaagcagttaaagcaagaaaataaccatctcatggaaatgaaaatgaacttggaaaaacaaaatgctgaacttcgaaaagaacgtcaggatgcagatgggcaaatgaaagagctccaggatcagctcgaagcagaacagtatttctcaaccctttataaaacacaagttagggagcttaaagaagaatgtgaagaaaagaccaaacttggtaaagaattgcagcagaagaaacaggaattacaggatgaacgggactctttggctgcccaactggagatcaccttgaccaaagcagattctgagcaactggctcgttcaattgctgaagaacaatattctgatttggaaaaagagaagatcatgaaagagctggagatcaaagagatgatggctagacacaaacaggaacttacggaaaaagatgctacaattgcttctcttgaggaaactaataggacactaactagtgatgttgccaatcttgcaaatgagaaagaagaattaaataacaaattgaaagatgttcaagagcaactgtcaagattgaaagatgaagaaataagcgcagcagctattaaagcacagtttgagaagcagctattaacagaaagaacactcaaaactcaagctgtgaataagttggctgagatcatgaatcgaaaagaacctgtcaagcgtggtaatgacacagatgtgcggagaaaagagaaggagaatagaaagctacatatggagcttaaatctgaacgtgagaaattgacccagcagatgatcaagtatcagaaagaactgaatgaaatgcaggcacaaatagctgaagagagccagattcgaattgaactgcagatgacattggacagtaaagacagtgacattgagcagctgcggtcacaactccaagccttgcatattggtctggatagttccagtataggcagtggaccaggggatgctgaggcagatgatgggtttccagaatcaagattagaaggatggctttcattgcctgtacgaaacaacactaagaaatttggatgggttaaaaagtatgtgattgtaagcagtaagaagattcttttctatgacagtgaacaagataaagaacaatccaatccttacatggttttagatatagacaagttatttcatgtccgaccagttacacagacagatgtgtatagagcagatgctaaagaaattccaaggatattccagattctgtatgccaatgaaggagaaagtaagaaggaacaagaatttccagtggagccagttggagaaaaatctaattatatttgccacaagggacatgagtttattcctactctttatcatttcccaaccaactgtgaggcttgtatgaagcccctgtggcacatgtttaagcctcctcctgctttggagtgccgccgttgccatattaagtgtcataaagatcatatggacaaaaaggaggagattatagcaccttgcaaagtatattatgatatttcaacggcaaagaatctgttattactagcaaattctacagaagagcagcagaagtgggttagtcggttggtgaaaaagatacctaaaaagcccccagctccagacccttttgcccgatcatctcctagaacttcaatgaagatacagcaaaaccagtctattagacggccaagtcgacagcttgccccaaacaaacctagctaactgccttctatgaaagcagtcattattcaaggtgatcgtattcttccagtgaaaacaagactgaaatatgatgaccaaaatttattaaaaagctatattttcctgagagactgatacatacactcatacatatatgtgttccccttttccctgtaatataaattacaaatctgggctcctttgaagcaacaggttgaaccaacaatgattggttgatagactaaggatatatgcaactcttccagacttttccataaagctctctcggcagtcgctcacactacagtgcacacaaggattgagaagagttaaaggctaaagaaaacatcttttctagcttcaacagagaggtttcaccagcacatttaccagaagaatctgggaatggattccactacagtgatattgactgcatctttaagaagtgaccattatactgtgtatatatatataaacacacacacatatatatatatatatagtactctaatactgcaagaaggttttttaaacttcccactttattttttatacacattaatcagatatcattacttgctgcagttgcaactatgcacttgtataaagccataatgttggagtttatatcactcattcctgtgtacctgatggaagttgcatgttcatgtttaagcagttactgtaacaagaagtttaaagttaattatatcagtttcctaatgcttcatgataggcaactttacccattttgaatgccttaatttaatttttttcaaagtctcagccctgtctgtattaaaaaacaaaaaaagcgtttaccagctcttaggatgtaaactagctttgtggaagataaatcgtgcactatttttacacataaatagttatatcaatgtcagcctattttgattaacaaatgtttttaaagtattattggttatagaaacaataatggatggtgttggaactaatatatccttgatgtctgtctattattcattcaactctttttacagacctcagtattagtctgtgactacaaaatattttatttgctttaaatttgctggctaccctagatgtgtttttattcctggtaaagacatttgtgattacattttcacacttaagattcaaaatttttcccaaatataaagaaaactaagacagactgtagatgcattttaaatatttaaatatgatcctcagacatgcagctgtgtgtggcagtattttagtaccgggttaagaaaactggcaactgggaagaagtggcctcaaaggcacttaatttgatttttattttttaaatgctgtcaaagttacagtttacgcaggacattcttgccgtattctcatgatcccagataagtgtgtgttttatactgcaacaatatgcagcaatggtaagcgtaaagtttttttttgtttttgtttttgtttttttttatattatgaagtcttttaacagtctctctttatataaatacacagagtttggtatgatatttaaatacatcatctggccaggcatggtggcttacgcctgtaatcctagcactttgggaggccaagacgggcggatcacctgaggtgaggagttcaagaccagcctgcccaacatagtgaaactccgtctctaccaatatacaaaaattagccgggcatgatggtggtggcctgtaatcccagctacttgggaggctgagacaggagaatcgcttgaacccaggagacggtggttgcagtgagcgaagatcgagccactgcactccagcctgggcagctgaacaagactccgtctcc

SEQ ID NO: 1321 - DNA, 1438 bp, Homo sapiens
gggaaagaaaatgaggccccaggacacctgggttcacacccaggtccccagcgatgtctccaccaccgctgctgcaacccctgctgctgctgctgcctctgctgaatgtggagccttccggggccacactgatccgcatccctcttcatcgagtccaacctggacgcaggatcctgaacctactgaggggatggagagaaccagcagagctccccaagttgggggccccatcccctggggacaagcccatcttcgtacctctctcgaactacagggatgtgcagtattttggggaaattgggctgggaacgcctccacaaaacttcactgttgcctttgacactggctcctccaatctctgggtcccgtccaggagatgccacttcttcagtgtgccctgctggttacaccaccgatttgatcccaaagcctctagctccttccaggccaatgggaccaagtttgccattcaatatggaactgggcgggtagatggaatcctgagcgaggacaagctgactattggtggaatcaagggtgcatcagtgattttcggggaggctctctgggagcccagcctggtcttcgcttttgcccattttgatgggatattgggcctcggttttcccattctgtctgtggaaggagttcggcccccgatggatgtactggtggagcaggggctattggataagcctgtcttctccttttacctcaacagggaccctgaagagcctgatggaggagagctggtcctggggggctcggacccggcacactacatcccacccctcaccttcgtgccagtcacggtccctgcctactggcagatccacatggagcgtgtgaaggtgggcccagggctgactctctgtgccaagggctgtgctgccatcctggatacgggcacgtccctcatcacaggacccactgaggagatccgggccctgcatgcagccattgggggaatccccttgctggctggggagtacatcatcctgtgctcggaaatcccaaagctccccgcagtctccttccttcttgggggggtctggtttaacctcacggcccatgattacgtcatccagactactcgaaatggcgtccgcctctgcttgtccggtttccaggccctggatgtccctccgcctgcagggcccttctggatcctcggtgacgtcttcttggggacgtatgtggccgtcttcgaccgcggggacatgaagagcagcgcccgggtgggcctggcgcgcgctcgcactcgcggagcggacctcggatggggagagactgcgcaggcgcagttccccgggtgacgcccaagtgaagcgcatgcgcagcgggtggtcgcggaggtcctgctacccagtaaaaatccactatttccattgaaaaaaaaaaaaaaaaaaaaaaaaaaaaaaaaaaaaaaaaaaaaaaa

SEQ ID NO: 1322 - DNA, 6111 bp, Homo sapiens
ccgcccccgacccgagctctttcgtctgcctgccagtttcctgcgtccccggagaggatcctgctgagcccagcctcccccctccccttctcctcctctcccttggagagcccgggcagccactgccccgcagccccagtgacaggaggagaccataacccccgacagcgccatggcccagattctgccaattcgttttcaggagcatctccagctccagaacctgggtatcaacccagcaaacattggcttcagtaccctgactatggagtctgacaaattcatctgcattagagaaaaagtaggagagcaggcccaggtggtaatcattgatatgaatgacccaagtaatccaattcgaagaccaatttcagcagacagcgccatcatgaatccagctagcaaagtaattgcactgaaagctgggaaaactcttcagatttttaacattgaaatgaaaagtaaaatgaaggctcataccatgactgatgatgtcaccttttggaaatggatctctttgaatacggttgctcttgttacggataatgcagtttatcactggagtatggaaggagagtctcagccagtgaaaatgtttgatcgccattctagccttgcagggtgccagattatcaattaccgtacagatgcaaaacaaaagtggttacttctgactggtatatctgcacagcaaaatcgtgtggtgggagctatgcagctatattctgtagataggaaagtgtctcagcccattgaaggacatgcagctagctttgcacagtttaagatggaaggaaatgcagaagaatcaacgttattttgttttgcagttcggggccaagctggagggaagttacatattattgaagttggcacaccacctacagggaaccagccctttccaaagaaggcagtggatgtcttctttcctccagaagcacaaaatgattttcctgttgcaatgcagatcagtgaaaagcatgatgtggtgttcttgataaccaagtatggttatatccacctctatgatcttgagactggtacctgcatctacatgaatagaatcagtggagaaacaatttttgttactgcacctcatgaagccacagctggaataattggagtaaacagaaagggacaagttctgtcagtgtgtgtggaagaagaaaacataattccttacatcaccaatgttctacaaaatcctgatttggctctgagaatggctgtacgtaataacttagccggtgctgaagaactctttgcccggaaatttaatgctctttttgcccagggaaattactcggaggcagcaaaggtggctgctaatgcaccaaagggaattcttcgtactccagacactatccgtcggttccagagtgtcccagcccagccaggtcaaacttctcctctacttcagtactttggtatccttttggaccagggacagctcaacaaatacgaatccttagagctttgtaggcctgtacttcagcaagggcgaaaacagcttttggagaaatggttaaaagaagataagctggaatgttctgaagaactgggtgatcttgtgaaatctgtggaccctacattggcacttagtgtgtacctaagggctaacgtcccaaataaagtcattcagtgctttgcagaaacaggtcaagtccaaaagattgttttatatgctaaaaaagttggatacactccagattggatatttctgctgagaaatgtaatgcgaatcagtccagatcagggacagcagtttgcccaaatgttagttcaagatgaagagcctcttgctgacatcacacagattgtagatgtctttatggaatacaatctaattcagcagtgtactgcattcttgcttgatgctctgaagaataatcgcccatctgaaggtcctttacagacgcggttacttgagatgaaccttatgcatgcgcctcaagttgcagatgctattctaggcaatcagatgttcacacattatgaccgggctcatattgctcaactgtgtgaaaaggctggcctactgcagcgtgcattagaacatttcactgatttatatgatataaaacgtgcagtggttcacacccatcttcttaaccctgagtggttagtcaactactttggttccttatcagtagaagactccctagaatgtctcagagccatgctgtctgccaacatccgtcagaatctgcagatttgtgttcaggtggcttctaaatatcatgaacaactgtcaactcagtctctgattgaactttttgaatctttcaagagttttgaaggtctcttttattttctgggatccattgttaactttagccaggacccagatgtgcactttaaatatattcaggcagcttgcaagactgggcaaatcaaagaagtagaaagaatctgtagagaaagcaactgctacgatcctgagcgagtcaagaattttcttaaggaagcaaaactaacagatcagctaccacttatcattgtgtgtgatcgatttgactttgtccatgatttggtgctctatttatatagaaataatcttcaaaagtatatagagatatatgtacagaaggtgaatccaagtcgacttcctgtagttattggaggattacttgatgttgactgttctgaagatgtcataaaaaacttgattcttgttgtaagaggtcaattctctactgatgagcttgttgctgaggttgaaaaaagaaacagattgaaactgcttctgccttggctagaggccagaattcatgagggctgtgaggagcctgctactcacaatgccttagccaaaatctacatagacagtaataacaacccggagagatttcttcgtgaaaatccctactatgacagtcgcgttgttggaaagtattgtgagaagagagatccacatctggcctgtgttgcttatgaacgtggccaatgtgatctggaacttattaatgtttgcaatgagaattccctcttcaaaagtctttctcgctacctggtacgtcgaaaggatccagaattgtggggcagcgtgctgctggaaagcaatccttacaggagacccctaattgaccaggttgtacaaacagctttgtctgagactcaggaccctgaagaagtgtcagtaactgtaaaggctttcatgactgcagaccttcctaatgaactcattgaactgctggagaaaattgtccttgataactctgtattcagtgaacacaggaatctgcaaaacctccttatcctcactgcaattaaggctgaccgtacacgtgttatggagtatattaaccgcctggataattatgatgccccagatattgccaatatcgccatcagcaatgagctgtttgaagaagcatttgccattttccggaaatttgatgtcaatacttcagcagttcaggtcttaattgagcatattggaaacttggatcgggcatatgagtttgctgaacgttgcaatgaacctgcggtctggagtcaacttgcaaaagcccagttgcagaaaggaatggtgaaagaagccattgattcttatatcaaagcagatgatccttcctcctacatggaagttgttcaggctgccaatactagtggaaactgggaagaactggtgaagtacttgcagatggcccgtaagaaggctcgagagtcctatgtggagacagaactgatattcgcactggctaaaacaaaccgccttgcagagttagaagaatttatcaatggaccaaataatgctcatatccaacaagttggtgaccgttgttatgatgaaaaaatgtatgatgctgctaagttgttgtacaataatgtttccaattttggacgtttggcatctaccctggttcacctgggtgaatatcaggcagctgttgatggggctaggaaagctaacagtactcgaacatggaaagaggtctgcttcgcctgtgtagatgggaaagaattccgtcttgctcagatgtgtggacttcatattgttgtacatgcagatgaattagaagaacttatcaactactatcaggatcgtggctattttgaagagctgatcaccatgttggaagcagcactgggacttgagcgagctcacatgggaatgtttactgaattagctattctatactctaaatttaagcctcagaaaatgagggagcacctggagctgttctggtctagagtgaatattcccaaggtgctaagagctgcagaacaagctcatctttgggcagaactggtgtttttgtatgacaagtatgaagaatatgataatgccataattaccatgatgaatcatccaactgatgcctggaaagaagggcaattcaaagatatcattaccaaggttgccaatgtggaactatactacagagcaatacagttctacttagaattcaagcctctgttgttaaatgatttgctgatggtgctgtctccacggttggatcacactcgtgcagtcaattatttcagcaaggttaaacagctaccactggtgaaaccgtatttgcgttcagttcagaaccataacaacaaatctgtgaatgaatcattgaacaatctttttattacagaagaagattatcaggctctgcgaacatcaatagatgcttatgacaactttgacaatatctcgcttgctcagcgtttggaaaaacatgaactcattgagttcaggagaattgctgcttatctcttcaaaggcaacaatcgctggaaacagagtgtagagctgtgcaagaaagacagcctttacaaggatgcaatgcagtatgcttctgaatctaaagatactgaattggctgaagaactcctgcagtggtttttgcaggaagaaaaaagagagtgctttggagcttgtctgtttacctgttacgatcttttaaggccagatgtcgtcctagaaactgcatggaggcacaatatcatggattttgccatgccctatttcatccaggtcatgaaggagtacttgacaaaggtggataaattagatgcttcagaatcactgagaaaagaagaagaacaagctacagagacacaacccattgtttatggtcagccccagttgatgctgacagcaggacccagtgttgccgtccctccccaggcaccttttggttatggttataccgcaccaccgtatggacagccacagcctggctttgggtacagcatgtgagatgaagcgctgatcctgtagtcacctattttcgtactgaaacatcgtctttacccacttctcagtttataatgggggaaaacaggcaacgtgttcttgtaacctttatttcatgaaggacttctttttgtttctaactataaacttggatcacctatgttaaaaccttatttcacattccacatcattttagaatttattttcgaaggggaatagtttcaatgttttattcacttgggctttttttcttccccctctttctttaaagaactgctcaatattcaatctgttgtgaagaacctgatttgcactctgtagtgtttaaagaaacaaagaaactctaatattgaatctcttaaatttagtgtatgtaaacagcttacaaatacgtattgtctaaatgcatttaaatctgttttattcaaagaaaagctaaagcaaaaacactggcatatgaccatgcaagactgtcagtgccaacaaagacaacactaatcagcacatcgtacactggattgcagtgcttcccagattattgaaaaatgttacagacaacttgcctgatttttaaatgagcgtaaaaggccctctaacctatgcaggtttccccattatgcatatagaaaatgctagtatgttttgctcacttcatatgtaacaggtgcccttatgttgtgctgtatcctgtgctttttctgtgggaccattccattcaggagcaaagagcaccatgattccaatcttgtgtgtgtttactaacccttccctgaggcttgtgtatgttggatattgtggtgttttagatcactgagtgtacagaagagagaaattcaaacaaaatattgctgttcttcagttttgtttgtggaatttgaaattactcaaatttaaaataaattactggactgtgg

SEQ ID NO: 1323 - DNA, 1773 bp, Homo sapiens
gtttctctccctgcccccgcgacttcgcgcaagatccgggaaggacacccgaggcccctgggagaccctggggaggtgaaagtcagagagcgaagcgggccgtggcccctaggcctgacccctccccgcggggtaaggcgggcaccccgcgagcgcaggggtcctcttactgctgatggcacccagctctgggcccagacgccgctcaccgtccaccgccggtgctgggtaaaatgtcggttccaggaccttaccaggcggccactgggccttcctcagcaccatccgcacctccatcctatgaagagacagtggctgttaacagttattaccccacacctccagctcccatgcctgggccaactacggggcttgtgacggggcctgatgggaagggcatgaatcctccttcgtattatacccagccagcgcccatccccaataacaatccaattaccgtgcagacggtctacgtgcagcaccccatcacctttttggaccgccctatccaaatgtgttgtccttcctgcaacaagatgatcgtgagtcagctgtcctataacgccggtgctctgacctggctgtcctgcgggagcctgtgcctgctgggggtgcatagcgggctgctgcttcatccccttctgcgtggatgccctgcaggacgtggaccattactgtcccaactgcagagctctcctgggcacctacaagcgtttgtaggactcagccagacgtggagggagccgggtgccgcaggaagtcctttccacctctcatccagcttcacgcctggtggaggttctgccctggtggtctcacctctccagggggcccaccttcatgtcttcttttggggggaatacgtcgcaaaactaacaaatctccaaaccccagaaattgctgcttggagtcgtgcataggacttgcaaagacattccccttgagtgtcagttccacggtttcctgcctccctgagaccctgagtcctgccatctaactgtgatcattgccctatccgaatatcttcctgtgatctgccatcagtggctcttttttcctgcttccatgggcctttctggtggcagtctcaaactgagaagccacagttgccttatttttgaggctgttctgcccagagctcggctgaaccagcctttagtgcctaccattatcttatccgtctcttcccgtccctgatgacaaagatcttgccttacagactttacaggcttggctttgagattctgtaactgcagacttcattagcacacagattcactttaatttcttaattttttttttaaatacaaggagggggctattaacacccagtacagacatatccacaaggtcgtaaatgcatgctagaaaaatagggctggatcttatcactgccctgtctccccttgtttctctgtgccagatcttcagtgcccctttccatacagggatttttttctcatagagtaattatatgaacagtttttatgacctccttttggtctgaaatacttttgaacagaatttcttttttttaaaaaaaaacagagatggggtcttactatgttgcccaggctggtgtcgaactcctgggctcaagcgatccttctgccttggcctcccgaagtgctgggattgcaggcataagctaccatgctgggcctgaacataatttcaagaggaggatttataaaaccattttctgtaatcaaatgattggtgtcattttcccatttgccaatgtagtctcacttaaaaaaaaaaaaaaaaaaa

SEQ ID NO: 1324 - DNA, 6814 bp, Homo sapiens
ccttggccgagaccggtcctctgcggagagggccccgccctctgtgaaggcccgcccgggaattggcggcggcgctgcagccatttccggtttcggggaggtgggtggggtgcggagcgggacttggagcagccgccgccgctgccaccgcctacagagcctgccttgcgcctggtgctgccaggaagatgcggccggagcccggaggctgctgctgccgccgcacggtgcgggcgaatggctgcgtggcgaacggggaagtacggaacgggtacgtgaggagcagcgctgcagccgcagccgcagccgccgccggccagatccatcatgttacacaaaatggaggactatataaaagaccgtttaatgaagcttttgaagaaacaccaatgctggttgctgtgctcacgtatgtggggtatggcgtactcaccctctttggatatcttcgagatttcttgaggtattggagaattgaaaagtgtcaccatgcaacagaaagagaagaacaaaaggactttgtgtcattgtatcaagattttgaaaacttttatacaaggaatctgtacatgaggataagagacaactggaatcggccaatctgtagtgtgcctggagccagggtggacatcatggagagacagtctcatgattataactggtccttcaagtatacagggaatataataaagggtgttataaacatgggttcctacaactatcttggatttgcacggaatactggatcatgtcaagaagcagccgccaaagtccttgaggagtatggagctggagtgtgcagtactcggcaggaaattggaaacctggacaagcatgaagaactagaggagcttgtagcaaggttcttaggagtagaagctgctatggcgtatggcatgggatttgcaacgaattcaatgaacattcctgctcttgttggcaaaggttgcctgattctgagtgatgaactgaaccatgcatcactggttctgggagccagactgtcaggagcaaccattagaatcttcaaacacaacaatatgcaaagcctagagaagctattgaaagatgccattgtttatggtcagcctcggacacgaaggccctggaagaaaattctcatccttgtggaaggaatatatagcatggagggatctattgttcgtcttcctgaagtgattgccctcaagaagaaatacaaggcatacttgtatctggatgaggctcacagcattggcgccctgggccccacaggccggggtgtggtggagtactttggcctggatcccgaggatgtggatgttatgatgggaacgttcacaaagagttttggtgcttctggaggatatattggaggcaagaaggagctgatagactacctgcgaacacattctcatagtgcagtgtatgccacgtcattgtcacctcctgtagtggagcagatcatcacctccatgaagtgcatcatggggcaggatggcaccagccttggtaaagagtgtgtacaacagttagctgaaaacaccaggtatttcaggagacgcctgaaagagatgggcttcatcatctatggaaatgaagactctccagtagtgcctttgatgctctacatgcctgccaaaattggcgcctttggacgggagatgctgaagcggaacatcggtgtcgttgtggttggatttcctgccaccccaattattgagtccagagccaggttttgcctgtcagcagctcataccaaagaaatacttgatactgctttaaaggagatagatgaagttggggacctattgcagctgaagtattcccgtcatcggttggtacctctactggacaggccctttgacgagacgacgtatgaagaaacagaagactgagcctttttggtgctccctcagaggaactctccctcacccaggacagcctgtggcctttgtgagccagttccaggaaccacacttctgtggccatctcacgtgaaagacattgcctcagctactgaaggtggccacctccactctaaatgacattttgtaaatagtaaaaaactgcttctaatccttcctttgctaaatctcacctttaaaaacgaaggtgactcactttgctttttcagtccattaaaaaaacattttattttgcaaccattctacttgtgaaatcacgctgaccctagcctgtctctggctaaccacacaggccattcccctctcccagcaccttgcagacttgggcccatcaagagctactgctggccctggctccgcagcctggatacttacctggccctcctccctagggagcaagtgccttccacttacttcccatccaggtctcagaggtctcaaggccaaccttggaatccttatttaaccattcaagtaatcaacggaagttttcaccctttaatcttaagtttagccttttaagaaaaacagtaagcgatgactgctgaaaggctcattgtgtaatctcccaagggtttggtcttattccattttcttctggtcaccagatgatttcttcctttaccatcaaatacttcttcataatggtcacagtctgaggatgtgcgcaaattctggttcttcccaagctctaaccgtaacacgtcccaccccctttttaaagcacttactgttttcagagcacccatatcccaccctggtgagaaggccactctcacatctgagtgttgggtacaaagctgctccgtagagtgatgtgcactcctggtgggtgaggggcaggggcagtggcagtgtgcaaagaattgattactccttgcagagcctgtggcttgcatttcctactgctttctacgtttgaaaattatgacagtctctggctaggtctgggtccagattaggatttaaactgataaaggaaactgttggtaaatcctctgctcagaaagcatttatcatgttcctatttaaggattaggtttattaatttaggcctcttagaagctaacccacttaaatattactcttctgaatgctagttctcttttattcttgatgtcctaagtcaattgaatctggcatctggggctagggtctgcctgtctacatattttttatttttttctgagaaattctgaacacatagatctctttcctaaactgacattttctattttgactgttttcatactataaccaggtaaagggacttctttcagagagctttatactgcctgaccaaagaacaaatctgaaaatcaccattttaaagttattttttcagttgaaccaaagtttaagtgaagaggacttttggcatattatacccaggatcagtttgtctttttgtatccatcaagtattacaggagaaggattgggaacagaatggaaaaacagtgtatgaaagtcatgttacaggccgagtgcggtggctcacacctgtaatcctagcactttgggaggctgaggcaggtggctcacttgaggtcaggaattcaagaccagcctggccaacatggtgaaaccccgtctctactaaaaagacaaaaaattagctgggcgtggtggcgggcacctataatcccacctacttggtaggctgaggcaggagaatcgcttgaacccaggaggcggaggttgcagtgagacgagattgtgccactgcactctagcctgggtgacagagcaaaactgtgtctcaaaaaaaaaaaagtcatgttacacatttaagtttttgaaattgctccttttatcggtaaagattctcaatccaaattctcctgggtgtgttgtcatcagctgtgatatgtttgtgcacattacgtatagcagaggatgtaagcaatattattgtttgtgaagttttgtttttaatgtcttgagtatgagttatgtttagtcactgtcagcatctgagaactttaataagcccttgagatattccaaagttttattttacttttttaaagaacagaaaaagatgaatgaaagaaccaaggagagatgcagagactatatttagcatgtataggttaaagtaagaaggaggttgtggtaactaaataggagtcctataaaatcaaatacattgtcaaccttttctgcacatctagtttcctaccatagaatcccactggaataccacatagcttttgcactgcagttactatttactaatgtaaacgtagggtttgtaaaagtcacaaacttataagcaatgaacttacctgctagtctttttattttggcttgcatgaagtcactgcaaattcaaatgtcagtaccggcatttaaaatatatctatatcactttgttggtacaaagttatttcaagataagtgtaattttgttacaagtttattttgaagagacaaatctcctgtgatctatgcaggacctctgtactttctaaagaacaaaatgttatgtagacattatacatggttggttgtctcttcttgaaactgtaatgtaaatctagggtccagtcatatcctaggtatcatcatttatccaagtacttggaggaatacaagtatatataaatacagtcattgagaataagtcgatttgaggcatacaagagtagtttcttacacagtttaacacagcctgattcaagactctgataggattcaaacagataccggttaaccatgactaccaaaactgatcatctgagtcgattgatagaggtgtgactagtccttagcactttttctcattcctctttttattcagcattgctgttacctatttcaggtttataagacctctttcagcagatcacatcagaagccaggaaatgcatagctaggagatgtcaaaagcccatatgaggagtggaccaagcagcagtggcggtttctcctcgcatctttttttttttaagctttaacttagcaggggcatggactttatagcactttttcaactttttgctttgctttggataagaaatccttacctttaaaaaaagcttctagtctccataacccccaaagtactgcttatttgtttgaagaatccagccatcgtagtgctttagtcactatcgtaaacattcatgatagggcaaggattttaaaacaggattcttgcttctgtagtcatcaaggtgaacagaagcatcctacacaaccactaagggctctatgtttgtgtcatgcctcttcaaacaccaaggagttgaacatgcttccagtgatttgtctccgtaatgccttcttcctttatttggcctttctttctttctgtaccttcaagttcttgatttttaaaattccaactctagagaaaaccaatatatggtggtgctgggctttgaagatagcatatcagacgccttggttctgtttgtacacttagccttacatttcaggaggaggcttttcattaggggcttaagctagctcctttggcttttaaaaaaaattttttttcaaatttcttcattacctaagggagcctgcatctaaatttctcaactagttcagcctagctgaattttctagtgtgtaatacactttgcttccttcttattggtgaaaaccagggggatgagtggcttccatggagagatttcctgatttctcagggaggaaaaaagtgatgacatttaccactacttttatgtttttcccctttttccaaattgataaggatttctggttcctagtgatccgggattgggcaacagtgcagaactgccagtcatgccgtaggccgtgaagaaagaatgtgagtaactgttgttttgcaaggatttgtagggttatgggcagttgttgtttgaagcattgctatgacctaattcccaaggtatctttcctctcttggtgttctaggtaagccaatgagctttaatctctacttgctataaccgtgtgcttagaaaaagaggtgagagtagtggttttccttcaaactgtccacattcatgaagattatgaattgttaggacagccagggcaagatagaccctgtctctacaaaaatttttttctaaattaaccgggcatggtggtgcctgcctgtagtcccacctgtgtgggagaatcacttgagcctgggaggtcaaggctgcagtgagccatgattgcacccctgcactccagcctgggtgacagagtgagaccctggctcaataagagggggaaaaaaaattgttaggagctgggtgcggatgcagcctgcaatcccagctacttgagaggctgaggccggaggattgcttaaacccaagaatttgagcgtagcctgggcaacacagcaagaccccatctaagaaaaaaatgttttttaaatcagcttagcccaaaggggttgtgaatggggaggtataaaaagcaaagattattttttggctactaagccaagaacttacagggattttttttttcagtcccagaacctacagataccctgctacttgcttcacgtggatgctcagtgcccagcagccatcttaatacattaaaccagtttaaaaaataccttccatgtggagaaaaacatgtctttttctcgcctcaactttatccacatgaaatgtgtgcccatggctgggcgcagtggctcacctgtaatcccaacactttgggaggctgaagcaggcagattgcttgaggccaggagttcgagaacagtctggccaacatggcgaaacctcatctctactaaaattacaaaaattagccgggcatggtggcacatgcctgtaatcccagctacgtcaggaggctgaggcacaggaattgcttgaacccaagaggcagaggatgcaatgagccaagatcacaccactgcactccagccttggcgacagagggagactctgtctc

SEQ ID NO: 1325 - DNA, 1926 bp, Homo sapiens
ggggcgacgtgagcgcgcaggggggcggcggcctcgcctcgtctctctctctgcgcctgggtcgggtgggtgacgccgagagccagagagatgtcggatttcgacagtaacccgtttgccgacccggatctcaacaatcccttcaaggatccatcagttacacaagtgacaagaaatgttccaccaggacttgatgaatataatccattctcggattctagaacacctccaccaggcggtgtgaagatgcctaatgtacccaatacacaaccagcaataatgaaaccaacagaggaacatccagcttatacacagattgcaaaggaacatgcattggcccaagctgaacttcttaagcgccaggaagaactagaaagaaaagccgcagaattagatcgtcgggaacgagaaatgcaaaacctcagtcaacatggtagaaaaaataattggccacctcttcctagcaattttcctgtcggaccttgtttctatcaggatttttctgtagacattcctgtagaattccaaaagacagtaaagcttatgtactacttgtggatgttccatgcagtaacactgtttctaaatatcttcggatgcttggcttggttttgtgttgattctgcaagagcggttgattttggattgagtatcctgtggttcttgctttttactccttgttcatttgtctgttggtacagaccactttatggagctttcaggagtgacagttcatttagattctttgtattcttcttcgtctatatttgtcagtttgctgtacatgtactccaagctgcaggatttcataactggggcaattgtggttggatttcatcccttactggtctcaaccaaaatattcctgttggaatcatgatgataatcatagcagcacttttcacagcatcagcagtcatctcactagttatgttcaaaaaagtacatggactatatcgcacaacaggtgctagttttgagaaggcccaacaggagtttgcaacaggtgtgatgtccaacaaaactgtccagaccgcagctgcaaatgcagcttcaactgcagcatctagtgcagctcagaatgctttcaagggtaaccagatttaagaatcttcaaacaatacactgttaccttttgactgtacctttttctccagttactgtattctacaaatatttttatgttcaaaacacacagtacagacagcatggatatttcctgttcacttgtgcatgggctaaaaccaggaaaacttccttgtcttattactttacctaatagtttcttaatatttcagtgccccttgcagaaaaaatattacatgctaaataaatattctccatatttttgggggatgacattcagtgaattatttcagtggtgacccactgaaaattaataatggtacttatgattaaaaacgcatttaatactaactgcagtagttctttcaagaatctttagagataaggattgcacattggaaaagtaaaccatgtttcattcctttttccctatttatattgaaagaaataggccagcagagacttagggattttaaattggcttgctttttagctgtttcagtcaccagtgaagagcctatgtgcattttgtagtagataatgtaaaatttgtcatctttttcttttcttttttttagaatagctgatattttgataacaatctctaatttgcatgggcaccacatttcttatattaaaagaattagtgttttggcttctgtactgcttatggttgtaggattcaggggttaatggaatcacagaaatgatattctgcaagaatttcttttaaataaaaagtttgggggtgcaatataagaagtttatataatatgcagtacattatccaaaagagaaggtagttaatgcagtagaaagtagtggtaataattccttttt

SEQ ID NO: 1326 - DNA, 1082 bp, Homo sapiens
gatcccagacctcggcttgcagtagtgttagactgaagataaagtaagtgctgtttgggctaacaggatctcctcttgcagtctgcagcccaggacgctgattccagcagcgccttaccgcgcagcccgaagattcactatggtgaaaatcgccttcaatacccctaccgccgtgcaaaaggaggaggcgcggcaagacgtggaggccctcctgagccgcacggtcagaactcagatactgaccggcaaggagctccgagttgccacccaggaaaaagagggctcctctgggagatgtatgcttactctcttaggcctttcattcatcttggcaggacttattgttggtggagcctgcatttacaagtacttcatgcccaagagcaccatttaccgtggagagatgtgcttttttgattctgaggatcctgcaaattcccttcgtggaggagagcctaacttcctgcctgtgactgaggaggctgacattcgtgaggatgacaacattgcaatcattgatgtgcctgtccccagtttctctgatagtgaccctgcagcaattattcatgactttgaaaagggaatgactgcttacctggacttgttgctggggaactgctatctgatgcccctcaatacttctattgttatgcctccaaaaaatctggtagagctctttggcaaactggcgagtggcagatatctgcctcaaacttatgtggttcgagaagacctagttgctgtggaggaaattcgtgatgttagtaaccttggcatctttatttaccaactttgcaataacagaaagtccttccgccttcgtcgcagagacctcttgctgggtttcaacaaacgtgccattgataaatgctggaagattagacacttccccaacgaatttattgttgagaccaagatctgtcaagagtaagaggcaacagatagagtgtccttggtaataagaagtcagagatttacaatatgactttaacattaaggtttatgggatactcaagatatttactcatgcatttactctattgcttatgccgtaaaaaaaaaaaaaaaaaaaaaaaaaaaaa

SEQ ID NO: 1327 - DNA, 1857 bp, Homo sapiens
ggcacgaggcagcgtaagcgccatggccatagctttcctgaccctgggctacttcttcaaaatcaaggagattaaatccccagaaatggcagaggattggaatacttttctgctacggttcaatgatttggacttgtgtgtatcagagaatgaaaccctcaagcatctcacaaacgacaccacaactccggaaagtacaatgaccagcgggcaggcccgagcttccacccagtccccccaggccctggaggactcgggcccggtgaatatctcagtctcaatcaccctaaccctggacccactgaaacccttcggagggtattcctgcaacgtcacccatctgtactcaaccatcttgagctgctgtgacagaggggaacaagatggcggcgccgaaggggagcctctgggtgaggacccaactggggctcccgccgctgctgctgctgaccatggccttggccggaggttcggggaccgcttcggctgaagcatttgactcggtcttgggtgatacggcgtcttgccaccgggcctgtcagttgacctaccccttgcacacctaccctaaggaagaggagttgtacgcatgtcagagaggttgcaggctgttttcaatttgtcagtttgtggatgatggaattgacttaaatcgaactaaattggaatgtgaatctgcatgtacagaagcatattcccaatctgatgagcaatatgcttgccatcttggttgccagaatcagctgccattcgctgaactgagacaagaacaacttatgtccctgatgccaaaaatgcacctactctttcctctaactctggtgaggtcattctggagtgacatgatggactccgcacagagcttcataacctcttcatggactttttatcttcaagccgatgacggaaaaatagttatattccagtctaagccagaaatccagtacgcaccacatttggagcaggagcctacaaatttgagagaatcatctctaagcaaaatgtcctatctgcaaatgagaaattcacaagcgcacaggaattttcttgaagatggagaaagtgatggctttttaagatgcctctctcttaactctgggtggattttaactacaactcttgtcctctcggtgatggtattgctttggatttgttgtgcaactgttgctacagctgtggagcagtatgttccctctgagaagctgagtatctatggtgacttggagtttatgaatgaacaaaagctaaacagatatccagcttcttctcttgtggttgttagatctaaaactgaagatcatgaagaagcagggcctctacctacaaaagtgaatcttgctcattctgaaatttaagcatttttcttttaaaagacaagtgtaatagacatctaaaattccactcctcatagagcttttaaaatggtttcattggatataggccttaagaaatcactataaaatgcaaataaagttactcaaatctgtgaagactgtatttgctataactttattggtattgtttttgtagtaatttaagaggtggatgtttgggattgtattattattttactaatatctgtagctattttgttttttgctttggttattgtttttttcccttttcttagctatgagctgatcattgctccttctcacctcctgccatgatactgtcagttaccttagttaacaagctgaatatttagtagaaatgatgcttctgctcaggaatggcccacaaatctgtaatttgaaatttagcaggaaatgacctttaatgacactacattttcaggaactgaaatcattaaaattttatttgaataattatgtgctgaaaaaaaaaaaaaaaaaa

SEQ ID NO: 1328 - DNA, 1846 bp, Homo sapiens
tgatcacacccacagttgagctgcgctggccagagatgcctgcccacagcctggtgatgagcagcccggccctcccggccttcctgctctgcagcacgctgctggtcatcaagatgtacgtggtggccatcatcacgggccaagtgaggctgcggaagaaggcctttgccaaccccgaggatgccctgagacacggaggcccccagtattgcaggagcgaccccgacgtggaacgctgcctcagggcccaccggaacgacatggagaccatctaccccttccttttcctgggcttcgtctactcctttctgggtcctaacccttttgtcgcctggatgcacttcctggtcttcctcgtgggccgtgtggcacacaccgtggcctacctggggaagctgcgggcacccatccgctccgtgacctacaccctggcccagctcccctgcgcctccatggctctgcagatcctctgggaagcggcccgccacctgtgaccagcagctgatgcctccttggccaccagaccatgggccaagagccgccgtggctatacctggggacttgatgttccttccagattgtggtgggccctgagtcctggtttcctggcagcctgctgcgcgtgtgggtctctgggcacagtgggcctgtgtgtgtgcccgtgtgtgtgtatgtgtatgtgtgtgtgtatgtttcttagccccttggattcctgcacgaagtggctgatgggaaccatttcaagacagattgtgaagattgatagaaaatccttcagctaaagtaacagagcatcaaaaacatcactccctctccctccctaacagtgaaaagagagaagggagactctatttaagattcccaaacctaatgatcatctgaatcccgggctaagaatgcagacttttcagactgaccccagaaattctggcccagccaatctagaggcaagcctggccatctgtatttttttttttccaagacagagtcttgctctgttgcccaagctggagtgaagtggtacaatctggctcactgcagcctccgcctcccgggttcaagcgattctcccgcctcagcctcctgagtagctgggattacaggcgcgtatcaccatacccagctaatttttgtatttttagtagagacgggttcaccatgttgcccaggagggtctcgaactcctggcctcaagtgatccaccggcctcggcctcccaaagtgctgggatgacaggcatgaatcactgtgctcagccaccatctggagttttaaaaggctcccatgtgagtccctgtgatggccaggccaggggacccctgccagttctctgtggaagcaaggctggggtcttgggttcctgtatggtggaagctgggtgagccaaggacagggctggctcctctgcccccgctgacgcttcccttgccgttggctttggatgtctttgctgcagtcttctctctggctcaggtgtgggtgggaggggcccacaggaagctcagccttctcctcccaaggtttgagtccctccaaagggcagtgggtggaggaccgggagctttgggtgaccagccactcaaaggaactttctggtcccttcagtatcttcaaggtttggaaactgcaaatgtccccttgatggggaatccgtgtgtgtgtgtgtgtgtgtgtgtgtgtgtgtgtgtgtgtgtgttttctcctagacccgtgacctgagatgtgtgatttttagtcattaaatggaagtgtctgccaaaaaaaaaaaaaaaaaaaaaaaaaaaaaaaaaaaaaaaaaaaaaaaaaaaaaaaaaaaaaaaaaaaaaaaaaaaaaaaaaaaaaaaaa

SEQ ID NO: 1329 - DNA, 1110 bp, Homo sapiens
gcaagcgcagattgtgggcggctgtgtcagctgacccaaggggccttcgaggtgccttaggccgcttgccttgctctcagaatcgctgccgccatggctagtcagtctcaggggattcagcagctgctgcaggccgagaagcgggcagccgagaaggtgtccgaggcccgcaaaagaaagaaccggaggctgaagcaggccaaagaagaagctcaggctgaaattgaacagtaccgcctgcagagggagaaagaattcaaggccaaggaagctgcggcattgggatcccgtggcagttgcagcactgaagtggagaaggagacccaggagaagatgaccatcctccagacatacttccggcagaacagggatgaagtcttggacaacctcttggcttttgtctgtgacattcggccagaaatccatgaaaactaccgcataaatggatagaagagagaagcacctgtgctgtggagtggcattttagatgccctcacgaatatgaagcttagcacagctctagttacattcttatgatatggcattaaattatttccatatattatataataggtccttccactttttggagagtagcaaatctagcttttttgtacagacttagaaattatctaaagatttcatctttttacctcatatttcttaggaatttaatggttatatgttgtctttttttcctatgtcttttggctcaagcaacatgtatatcagtgttgactttttctttcttagatctagtttaaaaaaaaaaaaaaccacataacaattctttgaagaaaggaagggattaaataatttttttccctaacactttcttgaaggtcaggggctttatctatgaaaaagtagtaaatagttctttgtaacctgtgtgaagcagcagccagccttaaagtagtccattcttgctaatggttagaacagtgaatactagtggaattgtttgggctgcttttagtttctcttaatcaaaattactagatgatagaattcaagaacttgttacatgtattacttggtgtatcgataatcatttaaaagtaaagactctgtcatgcaaaaaaaaaaaaaaaaaaaaaaaaaaaaaaa

SEQ ID NO: 1330 - DNA, 1027 bp, Homo sapiens
gactcccaagatggcggacctactgggctccatcctgagctccatggagaagccacccagcctcggtgaccaggagactcggcgcaaggcccgagaacaggccgcccgcctgaagaaactacaagagcaagagaaacaacagaaagtggagtttcgtaaaaggatggagaaggaggtgtcagatttcattcaagacagtgggcagatcaagaaaaagtttcagccaatgaacaagatcgagaggagcatactacatgatgtggtggaagtggctggcctgacatccttctcctttggggaagatgatgactgtcgctatgtcatgatcttcaaaaaggagtttgcaccctcagatgaagagctagactcttaccgtcgtggagaggaatgggacccccagaaggctgaggagaagcggaagctgaaggagctggcccagaggcaagaggaggaggcagcccagcaggggcctgtggtggtgagccctgccagcgactacaaggacaagtacagccacctcatcggcaagggagcagccaaagacgcagcccacatgctacaggccaataagacctacggctgtgtgcccgtggccaataagagggacacacgctccattgaagaggctatgaatgagatcagagccaagaagcgtctgcggcagagtggggaagagttgccgccaacctctaggcgccccgcccagctccctttgacccctggggcagggcagggggcagggagagacaaggctgctgctattagagcccatcctggagccccacctctgaaccacctcctaccagctgtccctcaggctgggggaaaacaggtgtttgatttgtcaccgttggagcttggatatgtgcgtggcatgtgtgtgtgtgtgtgagagtgtgaatgcacaggtgggtatttaatctgtattattccccgttcttggaattttcttccccatggggctggggtactttacattcaataaatactgtttaacccaaaaaaaaaaaaaaaaaaaaaaaaaaaa

SEQ ID NO: 1331 - DNA, 1923 bp, Homo sapiens
gactgtctacattagtaattcccaacttgggtccgaaagtgaacttttgctgaagcgaagtagctaaccgcttccatgtgcaaggcaggttccagacttcggggtgaggaggattaactgaaggaccccaggggaaccggtgtgctcactgatccgcctccagggccaccgccatgtcgagccgcggtgggaagaagaagtccaccaagacgtccaggtctgccaaagcaggagtcatctttcccgtggggcggatgctgcggtacatcaagaaaggccaccccaagtacaggattggagtgggggcacccgtgtacatggccgccgtcctggaatacctgacagcggagattctggagctggctggcaatgcagcgagagacaacaagaagggacgggtcacaccccggcacatcctgctggctgtggccaatgatgaagagctgaatcagctgctaaaaggagtcaccatagccagtgggggtgtgttacccaacatccaccccgagttgctagcgaagaagcggggatccaaaggaaagttggaagccatcatcacaccacccccagccaaaaaggccaagtctccatcccagaagaagcctgtatctaaaaaagcaggaggcaagaaaggggcccggaaatccaagaagcagggtgaagtcagtaaggcagccagcgccgacagcacaaccgagggcacacctgccgacggcttcacagtcctctccaccaagagcctcttccttggccagaagctgaaccttattcacagtgaaatcagtaatttagccggctttgaggtggaggccataatcaatcctaccaatgctgacattgaccttaaagatgacctaggaaacacgctggagaagaaaggtggcaaggagtttgtggaagctgtcctggaactccggaaaaagaacgggcccttggaagtagctggagctgctgtcagcgcaggccatggcctgcctgccaagtttgtgatccactgtaatagtccagtttggggtgcagacaagtgtgaagaacttctggaaaagacagtgaaaaactgcttggccctggctgatgataagaagctgaaatccattgcatttccatccatcggcagcggcaggaacggttttccaaagcagacagcagctcagctgattctgaaggccatctccagttacttcgtgtctacaatgtcctcttccatcaaaacggtgtacttcgtgctttttgacagcgagagtataggcatctatgtgcaggaaatggccaagctggacgccaactaggctgagcaatgacagaaccagctgcaccatgtaccccaccttcagtttaaaagaaaaaaaaaatccccttcactcctactgggaggtgggacccctttcattttcagttttgctcatctagggaaaataaggctttggtttccagtttaattgtttttgaccttctaaaatgtttttatgttagcactgatagttggcattactgttgttaagcactgtgttccagaccgtgtctgacttagtgtaacctaggagattttatagttttattttaatgaaaccctgattgacgcacagcagtggggagaacagcgtcttttacctgtcaccgaagccaggaagccccgtttgtaagcgtgtgttgtggtgctttattgtacatcctccagtggcgttctttttactctaatgttcttttggtttcccccctcagaagaatcatgaatttgcaacagacctaatttttggttactttttgtcttattgatggatttgaaaatgaaagatttaataaggcaaagcagaatctgttgtccttaattatatttgcaatttggaatttgtgtgagttgatttagtaaaatgttaaaccgttaaaaaaaaaaaaaaaaaaaaaaaaaaaaaaaaaaaaaaa

SEQ ID NO: 1332 - DNA, 1683 bp, Homo sapiens
gggcgggggtacctgtacccacgtagtcgccggttaccgatcggactaagttccagaagcaagagataaagtaataatgggtactgtggggaaaaacacagaagaacaattcggtaatatagtggtgatttacaagtcaagttaaaatgtccccagaagtggccttgaaccgaatatctccaatgctctcccctttcatatctagcgtggtccggaatggaaaagtgggactggatgctacaaactgtttgaggataactgacttaaaatctggctgcacatcattgactcctgggcccaactgtgaccgatttaaactgcacataccatatgctggagagacattaaagtgggatatcattttcaatgcccaatacccagaactgcctcccgattttatctttggagaagatgctgaattcctgccagacccctcagctttgcagaatcttgcctcctggaatccttcaaatcctgaatgtctcttacttgtggtgaaggaacttgtgcaacaatatcaccaattccaatgtagccgcctccgggagagctcccgcctcatgtttgaataccagacattactggaggagccacagtatggagagaacatggaaatttatgctgggaaaaaaaacaactggactggtgaattttcagctcgtttccttttgaagctgcccgtagatttcagcaatatccccacataccttctcaaggatgtaaatgaagaccctggagaagatgtggccctcctctctgttagttttgaggacactgaagccacccaggtgtaccccaagctgtacttgtcacctcgaattgagcatgcacttggaggctcctcagctcttcatatcccagcttttccaggaggaggatgtctcattgattacgttcctcaagtatgccacctgctcaccaacaaggtgcagtacgtgattcaagggtatcacaaaagaagagagtatattgctgcttttctcagtcactttggcacaggtgtcgtggaatatgatgcagaaggctttacaaaactcactctgctgctgatgtggaaagatttttgttttcttgtacacattgacctgcctctgtttttccctcgagaccagccaactctcacatttcagtccgtttatcactttaccaacagtggacagctttactcccaggcccaaaaaaattatccgtacagccccagatgggatggaaatgaaatggccaaaagagcaaaggcttatttcaaaacctttgtccctcagttccaggaggcagcatttgccaatggaaagctctaggaaacaccagtcttgagaggtggccagccagactgcctgtccacatgcgtgtcagcacatacagccgcttcctggaagccgcctggaatgtcttcacggcagcgttttgctcacacagcagcttttgcacgccccaggcagccccgactgctgaaatccaacttgagctggctggtggtccctggatcctagagcccttcacttcgggttactccctctttcttgcctctatttcttagttggaagaaataaactcacaaattatggtgcagtaattttccggggaaagtaaagcctcaggaatgcccacgcctttcttccaaagcctttgtctctgagacctcttaagttctaagattaaatgcccctcgctgttcttcctctg

SEQ ID NO: 1333 - DNA, 2330 bp, Homo sapiens
gcacgagccggctggccgtgatgctgcccactggtggtcccccgctcccggggtccccggccggccaagcaggagggctctaactccgtgaggaccccagcattatttctataattgtttgtgagaaggactgaatcccagagcattgccttgttgctgacctttcagtatggggaggattggcatctcctgtctttttcctgcttcttggcattttagcatatctccagtagggtgtcctcgaattctgaataccaatttacgccaaattatggtcattagtgtcctggctgctgctgtttcacttttatatttttctgttgtcataatccgaaataagtatgggcgactaaccagagacaagaaatttcaaaggtacctggcacgagttaccgacattgaagctacagacaccaataaccccaatgtgaactatgggatcgtggtggactgtggtagcagtgggtctcgagtatttgtttactgctggccaaggcataatggcaatccacatgatctgttggatatcaggcaaatgagggataaaaaccgaaagccagtggtcatgaaaataaaaccgggcatttcagaatttgctacctctccagagaaagtcagtgattacatttctccacttttgaactttgctgcagagcatgtgccacgggcaaaacacaaagagacacctctctacattctctgcacggctggaatgagaatcctccccgaaagccagcagaaagctattctggaagaccttctgaccgatatccccgtgcactttgactttctgttttctgactctcatgcagaagtaatttctgggaaacaggaaggtgtgtatgcttggattggcattaattttgtccttggacgatttgagcatattgaagatgatgatgaggccgttgtggaagttaacattcctggaagtgaaagcagcgaagccattgtccgtaaaaggacagcgggcattctcgacatgggcggcgtgtcgactcagatagcgtacgaagtccccaaaactgtaagctttgcgtcctcacagcaggaagaagtagctaaaaacttgttagctgaatttaacttgggatgtgatgttcaccaaactgagcatgtgtatcgagtctatgtggccacgtttcttgggtttggtggcaatgctgctcgacagagatacgaagacagaatatttgccaacaccattcaaaagaacaggctcctgggtaaacagactggtctgactcctgatatgccgtacttggacccctgcctacccctagacattaaagatgaaatccagcaaaatggacaaaccatatacctacgagggactggagactttgacctgtgtcgagagactatccagcctttcatgaataaaacaaacgagacccagacttccctcaatggggtctaccagcccccaattcacttccagaacagtgaattctatggcttctccgaattctactactgcaccgaggatgtgttacgaatggggggagactacaatgctgctaaatttactaaagctgcaaaggattattgtgcaacaaagtggtccattttgcgggaacgctttgaccgaggactgtacgcctctcatgctgacctccacaggcttaagtatcagtgcttcaaatcggcctggatgtttgaggtgtttcataggggcttttcgtttcctgtcaactataaaagcttaaagactgccttgcaagtttacgacaaggaggttcagtggacccttggagccatcctctacaggacccgctttctaccgttaagagacatccagcaggaggccttccgagccagtcacacccactggcggggcgtttcctttgtctacaaccactacctgttctctggctgcttcctggtggtgctgctggccatcctgctgtacctgctgcggctgcggcgcatccacaggcgcactccccggagcagctcggccgccgccctctggatggaggagggccttcccgcccagaatgccccggggaccttgtgatccagctcacagctccacgaagactcaaaaggaaaagccatttttgcctcagggtttctcctctttattttcctgtggttttgttttttctttcccttttttgttcctccaaacaaaaacaaaatgcaggccgagcgcggtggctcacgcctgtaatcccagcactttgggaggccgaggcgggcggatcatgaggtcaggagatcgagaccatcctggctaacacggtgaaaccccgtctctactaaaaatacaaaaaattagctgggtgtggtggcgggcgcccgttagtccaactactcaggaaggc

SEQ ID NO: 1334 - DNA, 2595 bp, Homo sapiens
cgggctgggcggttccgcggcctgggcctaggggcttaacagtagcaacagaagcggcggcggcggcagcagcagcagcagcagcagcaatctcttcccgaacacgagcaccacaggcgcccgaaggccggaacaggcgtttagagaaaatggcagacgatattgatattgaagcaatgcttgaggctccttacaagaaggatgagaacaagttgagcagtgccaacggccatgaagaacgtagcaaaaagaggaaaaaaagcaagagcagaagtcgtagtcatgaacgaaagagaagcaaaagtaaggaacggaagcgaagtagagacagagaaaggaaaaagagcaaaagccgtgaaagaaagcgaagtagaagcaaagagaggcgacggagccgctcaagaagtcgagatcgaagatttagaggccgctacagaagtccttactccggaccaaaatttaacagtgccatccgaggaaagattgggttgcctcatagcatcaaattaagcagacgacgttcccgaagcaaaagtccattcagaaaagacaagagccctgtgagagaacctattgataatttaactcctgaggaaagagatgcaaggacagtcttctgtatgcagctggcggcaagaattcgaccaagggatttggaagagtttttctctacagtaggaaaggttcgagatgtgaggatgatttctgacagaaattcaagacgttccaaaggaattgcttatgtggagttcgtcgatgttagctcagtgcctctagcaataggattaactggccaacgagttttaggcgtgccaatcatagtacaggcatcacaggcagaaaaaaacagagctgcagcaatggcaaacaatttacaaaagggaagtgctggacctatgaggctttatgtgggctcattacacttcaacataactgaagatatgcttcgtgggatctttgagccttttggaagaattgaaagtatccagctgatgatggacagtgaaactggtcgatccaagggatatggatttattacattttctgactcagaatgtgccaaaaaggctttggaacaacttaatggatttgaactagcaggaagaccaatgaaagttggtcatgttactgaacgtactgatgcttcgagtgctagttcatttttggacagtgatgaactggaaaggactggaattgatttgggaacaactggtcgtcttcagttaatggcaagacttgcagagggtacaggtttgcagattccgccagcagcacagcaagctctacagatgagtggctctttggcatttggtgctgtggcagatttgcaaacaagactttcccagcagactgaagcttcagctttagctgcagctgcctctgttcagccacttgcaacacaatgtttccaactctctaacatgtttaaccctcaaacagaagaagaagttggatgggataccgagattaaggatgatgtgattgaagaatgtaataaacatggaggagttattcatatttatgttgacaaaaattcagctcagggcaatgtgtatgtgaagtgcccatcaattgctgcagctattgctgctgtcaatgcattgcatggcaggtggtttgctggtaaaatgataacagcagcatatgtacctcttccaacttaccacaacctgtttcctgattctatgacagcaacacagctactggttccaagtagacgatgaaggaagatatagtcccttatgtatatagctttttttctttcttgagaattcatcttgagttatcttttatttagataaaaataaagaggcaaggatctactgtcatttgtatgcaatttcctgttaccttgaaaaaataaaaatgttaacaggaatgcagtgtgctcattctccctaaatagtaaatcccactgtatacaaaactgttctcttgttctgccttttaaaatgttcatgtagaaaattaatgaactataggaatagctctaggagaacaaatgtgctttctgtaaaaaggcagaccagggatgtaatgtttttaatgtttcagaagcctaactttttacacagtggttacatttcacatttcactaatgttgatatttggctgatggttgagcagtttctgaaatacacatttagtgtatggaaatacaagacagctaaagggctgtttggttagcatctcatcttgcattctgatcaattggcaagaaagggagatttcaaaattatatttcttgatggtatcttttcaattaatgtatctgtaaaagtttctttgtaaatactatgtgttctggtgtgtcttaaaattccaaacaaaatgatccctgcatttcctgaagatgtttaaacgtgagagtctggtaggcaaagcagtctgagaaagaaataggaaatgcagaaataggttttgtctggttgcatataatctttgctctttttaagctctgtgagctctgaaatatatttttgggttacttcagtgtgtttgacaagacagcttgatatttctatcaaacaaatgactttcatattgcaacaatctttgtaagaaccactcaaataaaagtctcttaaaaaggcc

SEQ ID NO: 1335 - DNA, 1653 bp, Homo sapiens
cggttgcttgctgtcccagcggcgccccctcatcaccgtcgccatgcccggaggtctgcttctcggggacgtggctcccaactttgaggccaataccaccgtcggccgcatccgtttccacgactttctgggagactcatggggcattctcttctcccaccctcgggactttaccccagtgtgcaccacagagcttggcagagctgcaaagctggcaccagaatttgccaagaggaatgttaagttgattgccctttcaatagacagtgttgaggaccatcttgcctggagcaaggatatcaatgcttacaattgtgaagagcccacagaaaagttaccttttcccatcatcgatgataggaatcgggagcttgccatcctgttgggcatgctggatccagcagagaaggatgaaaagggcatgcctgtgacagctcgtgtggtgtttgtttttggtcctgataagaagctgaagctgtctatcctctacccagctaccactggcaggaactttgatgagattctcagggtagtcatctctctccagctgacagcagaaaaaagggttgccaccccagttgattggaaggatggggatagtgtgatggtccttccaaccatccctgaagaagaagccaaaaaacttttcccgaaaggagtcttcaccaaagagctcccatctggcaagaaatacctccgctacacaccccagccttaagtctcttggagaagttggtgctgtgagccagaggatgtcagctgccaattgtgttttcctgcagcaattccataaacacatcctggtgtcatcacagccaaggtttttaggttgctataccaatggcttattaaatgaaaatggcactaaaagtttcttgagattctttatactctctgccttcagcaatcaattccattcatacatcagcactctgctggttctgtttgaaatatgttctgtatttaaaactcaaatcttgttggatctctgcagggcttgtgaccaatgaagtcatatttgttgatggttgacaaagcttgcttcactccatcagagaatgactatcaatttttttttaactgtcctatcacgtcctctcctgtcacccattttgaagagtggcagaacttgaagttcaacttcctctgtaaatatccaagtataaagcccaggaacttctagaataacccagatgcgctttaattttttttaatatgttttgatcacagaacttctagaataacccagatgctctttcatattcttttaatacatcttgatcacagctgggggaaaaaaagctttttaattctgtaccttcctagtagataagtgaagagcagggaaagagacctttaaatattttgctataaaaaaatttgtgataagtttctatcaaaatggggagattgcagaaaaggcttcccttggctcccaaggaggtgtagcaggtgtgagcaatattagtgccatgtgcctttcacacagggtttgcatttatcagtctgttttccgatgatgtgtacatgaaagagtacaccatgtgaagagaagagagaatgattgaaaatgttttagtatagaactcttcttgcagtgggttgctattttctagattttactttttagggaacaaaataaaatcctttgtt

SEQ ID NO: 1336 - DNA, 2864 bp, Homo sapiens
ccagcggccgccgacgctaggaggccgcgctccgcccccgctaccatgaggccccggaaagccttcctgctcctgctgctcttggggctggtgcagctgctggccgtggcgggtgccgagggcccggacgaggattcttctaacagagaaaatgccattgaggatgaagaggaggaggaggaggaagatgatgatgaggaagaagacgacttggaagttaaggaagaaaatggagtcttggtcctaaatgatgcaaactttgataattttgtggctgacaaagacacagtgctgctggagttttatgctccatggtgtggacattgcaagcagtttgctccggaatatgaaaaaattgccaacatattaaaggataaagatcctcccattcctgttgccaagatcgatgcaacctcagcgtctgtgctggccagcaggtttgatgtgagtggctaccccaccatcaagatccttaagaaggggcaggctgtagactacgagggctccagaacccaggaagaaattgttgccaaggtcagagaagtctcccagcccgactggacgcctccaccagaagtcacgcttgtgttgaccaaagagaactttgatgaagttgtgaatgatgcagatatcattctggtggagttttatgccccatggtgtggacactgcaagaaacttgcccccgagtatgagaaggccgccaaggagctcagcaagcgttctcctccaattcccctggcaaaggtcgacgccaccgcagaaacagacctggccaagaggtttgatgtctctggctatcccaccctgaaaattttccgcaaaggaaggccttatgactacaacggcccacgagaaaaatatggaatcgttgattacatgatcgagcagtccgggcctccctccaaggagattctgaccctgaagcaggtccaggagttcctgaaggatggagacgatgtcatcatcatcggggtctttaagggggagagtgacccagcctaccagcaataccaggatgccgctaacaacctgagagaagattacaaatttcaccacactttcagcacagaaatagcaaagttcttgaaagtctcccaggggcagttggttgtaatgcagcctgagaaattccagtccaagtatgagccccggagccacatgatggacgtccagggctccacccaggactcggccatcaaggacttcgtgctgaagtacgccctgcccctggttggccaccgcaaggtgtcaaacgatgctaagcgctacaccaggcgccccctggtggtcgtctactacagtgtggacttcagctttgattacagagctgcaactcagttttggcggagcaaagtcctagaggtggccaaggacttccctgagtacacctttgccattgcggacgaagaggactatgctggggaggtgaaggacctggggctcagcgagagtggggaggatgtcaatgccgccatcctggacgagagtgggaagaagttcgccatggagccagaggagtttgactctgacaccctccgcgagtttgtcactgctttcaaaaaaggaaaactgaagccagtcatcaaatcccagccagtgcccaagaacaacaagggacccgtcaaggtcgtggtgggaaagacctttgactccattgtgatggaccccaagaaggacgtcctcatcgagttctacgcgccatggtgcgggcactgcaagcagctagagcccgtgtacaacagcctggccaagaagtacaagggccaaaagggcctggtcatcgccaagatggacgccactgccaacgacgtccccagcgaccgctataaggtggagggcttccccaccatctacttcgcccccagtggggacaaaaagaacccagttaaatttgagggtggagacagagatctggagcatttgagcaagtttatagaagaacatgccacaaaactgagcaggaccaaggaagagctttgaaggcctgaggtctgcggaaggtgggaggaggcagacgccctgcgtggcccatggtcggggcgtccaccggaggccggcaacaaacgacagtatctcggattcctttttttttttttttaattttttatactttgttgtttcacttcatgctctgaatactgaataaccatgaatgactgaatagtttagtccagatttttacagaggatacatctatttttatcattatttggggtttgaaaaatttttttttacaccttctaatttctttatttctcaaagcagataattcttctgtgtgaaaatgttttctttttttaatttaaggtttaaaattccttttccaaatcatgttgattttgctctttaaaaaaaaaaaaaaaaaaaaaaaaaaaaaaaaaaaaagaagggctgggaccaaccgggtgagatccacaagtctctggatgtggctgaaggcaaatacacaattgaagtactttctgttttgaagtgctttcccttttgaatctggtttgaaacatgcagcttctgtctctagcccaaggaaagaccaaaacatagggaaataaaagcatttatctttgtcttggaagtaattgttgaagttgtgcagttgatcagtgcacagttagctgcaatgtttatagaaattgattgttaaaccaaatttacactggcatgtgtggtgtagtttctaaaaggcacttcacatttgaaatttttcttaccttagaaagtttctagtgatctaaatgtctagttttgtattcttttgtgtgtgttcactgtttctcagtattaccacttgaataattctctgtacaggggggtttgtgctatacactgggatgtctaattgcagcaataaagcctttctt

SEQ ID NO: 1337 - DNA, 1368 bp, Homo sapiens
atggccacagcaggaaatccctggggctggttcctggggtacctcatccttggtgtcgcaggatcgctcgtctctggtagctgcagccaaatcataaacggcgaggactgcagcccgcactcgcagccctggcaggcggcactggtcatggaaaacgaattgttctgctcgggcgtcctggtgcatccgcagtgggtgctgtcagccgcacactgtttccagaactcctacaccatcgggctgggcctgcacagtcttgaggccgaccaagagccagggagccagatggtggaggccagcctctccgtacggcacccagagtacaacagacccttgctcgctaacgacctcatgctcatcaagttggacgaatccgtgtccgagtctgacaccatccggagcatcagcattgcttcgcagtgccctaccgcggggaactcttgcctcgtttctggctggggtctgctggcgaacggcagaatgcctaccgtgctgcagtgcgtgaacgtgtcggtggtgtctgaggaggtctgcagtaagctctatgacccgctgtaccaccccagcatgttctgcgccggcggagggcacgaccagaaggactcctgcaacggtgactctggggggcccctgatctgcaacgggtacttgcagggccttgtgtctttcggaaaagccccgtgtggccaagttggcgtgccaggtgtctacaccaacctctgcaaattcactgagtggatagagaaaaccgtccaggccagttaactctggggactgggaacccatgaaattgacccccaaatacatcctgcggaaggaattcaggaatatctgttcccagcccctcctccctcaggcccaggagtccaggcccccagcccctcctccctcaaaccaagggtacagatccccagcccctcctccctcagacccaggagtccagaccccccagcccctcctccctcagacccaggagtccagcccctcctccctcagacccaggagtccagaccccccagcccctcctccctcagacccaggagtccagcccctcctccctcagacccaggagtccagaccccccagcccctcctccctcagacccaggggtccaggcccccaacccctcctccctcagactcagaggtccaggcccccaacccctccttccccagacccagaggtccaggtcccagcccctcctccctcagacccagcggtccaatgccacctagactctccctgtacacagtgcccccttgtggcacgttgacccaaccttaccagttggtttttcattttttgtccctttcccctagatccagaaataaatcccctagatccagaaataaagtctaagagaagcgc

SEQ ID NO: 1338 - DNA, 4464 bp, Homo sapiens
agataatctgaatgctggctggggcagaaaattactaagatcctgtggaagtgtgaggattattaaactgatcactgtctgataaggtgagatcaaattgggaatgctttcataatgaacgtcaaccagtcagttccacctgtgccaccatttgggcagccccagcccatctacccagggtatcatcagtccagctatggtgggcaatcagggtccacagcccccgccattccctatggagcctacaatggcccagtaccaggctatcagcaaacacctccccaaggtatgtcaagagccccaccttcctcgggggcacctccagcctcaacagcacaggctccttgtggccaggctgcatatggccagtttggccaaggagatgtacagaatgggccaagctccactgttcagatgcaaaggctgcctgggtctcagccatttgggtccccattggcccctgtgggcaaccagccacctgtgcttcagccctatggccctcccccgacaagtgcacaggtggctacgcagctgtctggaatgcagatcagcggtgctgtggccccagcccctccttcttcagggctgggctttggcccaccaacatcgctggcttcagcctcaggaagtttccctaactctggtctgtatggctcctatcctcagggccaggctcctccccttagccaggcccaaggtcatcctgggatccagactccccagcgatctgccccatcacaggcctccagcttcacacccccagcttcagggggtcctcggctgccttcgatgactggtccactcctgcctggacagagttttggagggccctcagtgagccagcccaaccatgtgtcttcacctcctcaagctctgccccctggcacccagatgactgggcccctgggaccactgccacctatgcactccccgcagcagccaggctatcagccccaacaaaatggttccttcggaccagcccggggccctcagtctaattatggaggcccctacccagcagcacccacctttggcagtcagcctgggcctcctcagccactgcctcctaagcgcctggaccctgatgccatcccaagccctattcaggtcattgaagatgacaggaacaaccggggtacagagccatttgttactggagtacggggccaggtgccacccttagtcactaccaacttcctggtgaaagaccaagggaatgcaagtccccgatacatccgatgtacatcctataatatcccttgcacatctgacatggctaagcaggctcaggtgcccctggcagcagtcatcaaaccgctggcaaggctgcccccagaggaggcttcaccgtatgttgtggaccatggggaatctggccctttgcgctgcaaccgctgcaaagcatacatgtgtcccttcatgcagttcattgaaggagggaggcgtttccagtgctgtttttgcagctgtatcaatgatgttcccccccagtattttcagcacctggatcataccggcaaacgtgtggatgcttatgaccgccctgagctatccctgggctcttatgaattcttggccactgtagattactgcaagaacaataagttccccagccctcctgcctttatcttcatgattgacgtctcctacaatgccatcaggactggtcttgttaggctcctctgtgaggagctcaagtcactgttagactttctacctagggagggtggggcagaagagtcagcaatccgcgttggctttgtcacctacaataaggtgctccacttctataatgtgaagagctcattggcccagccacagatgatggttgtgtctgatgtggctgacatgtttgtgccactgctggatggcttcctggtcaacgtcaatgagtctcgggcagttatcaccagcttattggatcagattccagaaatgtttgcagacacaagggaaacagagacagtatttgtaccagttatccaggctggaatggaggctctgaaggctgctgagtgtgcagggaagctctttctattccatacatccctgcccattgcagaggccccagggaaactgaagaacagagatgacaggaagctgatcaatacagacaaggagaagactctgttccagcctcagacaggtgcctatcagaccctggccaaagagtgtgtggcccaaggctgctgtgtagatctctttctcttccctaaccagtatgtggatgtggccacactctctgttgtgccccagctcactggtggctctgtctacaaatatgcttcctttcaggtggagaacgaccaggagcggttcctgagtgacctgcgtcgtgatgtccagaaggttgttggctttgatgctgtgatgcgggtccggacaagcactggtatccgtgctgtagatttctttggagctttctacatgagcaacacgacagatgtggagctggctgggctagatggggacaaaacagtgactgtggagttcaagcatgacgatcggctcaatgaagagagcggagctctcctgcagtgtgccctgctttacaccagctgtgcagggcagcgtcggctccgcatccataatctggccctgaactgctgcacccagctggctgatctatatcgaaactgtgagactgacacgctcatcaactacatggccaagtttgcatatcggggagtcctgaatagccctgtgaaggctgttcgtgacacgctcatcacccagtgtgcccagatcctggcctgttacagaaagaactgtgctagcccctcctctgcaggacagttgatccttcctgagtgcatgaagctactcccagtttacctgaactgtgtgttgaagagtgatgtcctgcagcctggagctgaagtcactactgatgaccgtgcctatgtccgacagctagttacctccatggatgtgactgagaccaatgtcttcttctaccctcggctcttacctttgacaaagtctcccgttgagagtactaccgaaccaccagcagttcgagcctctgaagagcgtctaagcaatggggatatatatttactggagaatgggctcaacctcttcctctgggtgggagcaagcgtccaacagggtgttgtccagagccttttcagcgtctcctccttcagtcagatcaccagtggtttgagtgttctgccagttctggataatccactgtccaagaaggttcgaggcctcattgatagcttacggggcacagagatcccggtacatgaagcttaccgtggtgaaacaggaagacaagatggagatgctgttcaagcacttcctggtggaagacaagagtctgagtgggggagcatcttatgtggactttctctgtcatatgcacaaggagattcggcagctactgagctaaagcaagtgggtaaatggcatagggcccaggctagcttccagaaagcaccccaggatgtcagagaaattgggacagtaacatatcttatgtaagctgacctcagtctctctggggggagggggagatataaggagacaccttctttctgggctcaagtatcctgccactctgtcatgtcctgctgatggaaggtgcccctgttccctcattctaccctctttttcctgctaatcctgtcataatgaatgtagcttctcagttcactgtatatgattcggtattgggggtttggaggcacccagaccctggcaatattatgtgtccctttggaccagtctcccaagaggagaggggcaggcaggaaagagtggggatcctaaggttactacagggggctcagtgtcatccacaacttcctatattagggataaaacatataggtgcacaagagctggggtatagcccataggtggtggagagaaaagtggtcagtccttcttgggcctggaggttagcagtcaagtttctctgctttcactgctcgctcgctctctcctgcaatgattgatgatcactccgtggatagagaggcacactgtcagaggtgaccggagaactgagttgcaaaatatattaagatctggtagaggtaccagcttcctttccagctggagaggccccaacactggatggttctgtagggagcctagggagcctggtcatcaacttgcaatacctcacagagccagttcacatcccactctgagctcccacgagaaacactgcttctccaggcccggggttgttggggagagaggcagaggcagctggagcgccgttctctcctgctgggacaccgcttgggctttggtattgactgagtggctgacagttatcttccaaccccaactggcttgggggcaggacaagggctaggcttgatggtggccaggcttgcctgctccccacctgggatgcccctgctctggacctctcatttctcttcattggtttatttttcaatgcatctttaatttgtaaagaaataaaataaattaagatgt

SEQ ID NO: 1339 - DNA, 1077 bp, Homo sapiens
atgagtgatcagcagctggactgtgccttggacctaatgaggcgcctgcctccccagcaaatcgagaaaaacctcagcgacctgatcgacctggtccccagtctatgtgaggatctcctgtcttctgttgaccagccactgaaaattgccagagacaaggtggtgggaaaggattaccttttgtgtgactacaacagagatggggactcctataggtcaccatggagtaacaagtatgaccctcccttggaggatggggccatgccgtcagctcggctgagaaagctggaggtggaagccaacaatgcctttgaccagtatcgagacctgtattttgaaggtggcgtctcatctgtctacctctgggatctggatcatggctttgctggagtgatcctcataaagaaggctggagatggatcaaagaagatcaaaggctgctgggattccatccacgtggtagaagtgcaggagaaatccagcggtcgcaccgcccattacaagttgacctccacggtgatgctgtggctgcagaccaacaaatctggctctggcaccatgaacctcggaggcagccttaccagacagatggagaaggatgaaactgtgagtgactgctccccacacatagccaacatcgggcgcctggtagaggacatggaaaataaaatcagaagtacgctgaacgagatctactttggaaaaacaaaggatatcgtcaatgggctgaggtctgtgcagacttttgcagacaaatcaaaacaagaagctctgaagaatgacctggtggaggctttgaagagaaagcagcaatgctaaacctctgtttcatgctaaccagacacgccgtgcactcgttagattcctttcttagaaaactcgttttctgctcccttccctcgtcccttccctccccgacaggtcacataacagctgcatcattgaccgcacagcgccatctctccctgagaataaagccgatagccacctcctccggctccgagcctgcttctgccacacctcgctctcagtctctccacatttccatagagaccgtgtggtttttgttcacccggg

SEQ ID NO: 1340 - DNA, 1411 bp, Homo sapiens
gcgactgtctccgccgagcccccggggccaggtgtcccgggcgcgccacgatgcggccgcggctgtggctcctcctggccgcgcagctgacagttctccatggcaactcagtcctccagcagacccctgcatacataaaggtgcaaaccaacaagatggtgatgctgtcctgcgaggctaaaatctccctcagtaacatgcgcatctactggctgagacagcgccaggcaccgagcagtgacagtcaccacgagttcctggccctctgggattccgcaaaagggactatccacggtgaagaggtggaacaggagaagatagctgtgtttcgggatgcaagccggttcattctcaatctcacaagcgtgaagccggaagacagtggcatctacttctgcatgatcgtcgggagccccgagctgaccttcgggaagggaactcagctgagtgtggttgatttccttcccaccactgcccagcccaccaagaagtccaccctcaagaagagagtgtgccggttacccaggccagagacccagaagggcccactttgtagccccatcacccttggcctgctggtggctggcgtcctggttctgctggtttccctgggagtggccatccacctgtgctgccggcggaggagagcccggcttcgtttcatgaaacaattttacaaataagcagagaatacggttttggtgtcctgctacaaaaagacatcggtcagtaatgagcacgatgtggaaaaatgagagaagggacacattcaaccctggagagttcaatggctgctgaagctgcctgcttttcactgctgcaaggcctttctgtgtgtgatgtgcatgggagcaacttgttcgtgggtcatcgggaatactagggagaaggtttcattgcccccagggcacttcacagagtgtgctggaggactgagtaagaaatgctgcccatgccaccgcttccggctcctgtgctttccctgaactgggacctttagtggtggccatttagccaccatctttgcaggttgctttgccctggtagggcagtaacattgggtcctgggtctttcatggggtgatgctgggctggctccctcttggtcttcccaggctggggctgaccttcctcgcagagaggccaggtgcaggttgggaatgaggcttgctgagaggggctgtccagttcccagaaggcatatcagtctctgagggcttcctttggggccgggaacttgcgggtttgaggataggagttcacttcatcttctcagctcccatttctactcttaagtttctccccatttctactcttaagtttctcagctcccatttctactctcccatggcttcatgcttctttcatttttctgtttgttttatacaaatgtgttagttgtacaaataaa

SEQ ID NO: 1341 - DNA, 2706 bp, Homo sapiens
ctctgtagctgtgaccctgataccgcgtggtgtgctccgaacacatggtgcccagaacgaaggcggcgtccagaagccctaggtcccagaggtccgctcagcggcaggcgcataaggcggggccggcgcgggcctttccttccatcggaaccgttctcccggggctgagtccctgcccggactccgaacgccgaagaccaggggccggaagcgcgcgccgccactgccacgccgtgtcagtcgggagggagggagcgagcaggcgaagccgcggaggacggggtgaagatggcggccttctccgagatgggtgtaatgcctgagattgcacaagctgtggaagagatggattggctcctcccaactgatatccaggctgaatctatcccattgatcttaggaggaggtgatgtacttatggctgcagaaacaggaagtggcaaaactggtgcttttagtattccagttatccagatagtttatgaaactctgaaagaccaacaggaaggcaaaaaaggaaaaacaacaattaaaactggtgcttcagtgctgaacaaatggcagatgaacccatatgacagaggatctgcttttgcaattgggtcagatggtctttgttgtcaaagcagagaagtaaaggaatggcatgggtgtagagctactaaaggattaatgaaagggaaacactactatgaagtatcctgtcatgaccaagggttatgcagggtcgggtggtctaccatgcaggcctctttggacctaggtactgacaagtttggatttggctttggtggaacaggaaagaaatcccataacaaacaatttgataattatggagaggaattcactatgcatgataccattggatgttacctggatatagataagggacatgtcaagttctccaaaaatggaaaagatcttggtctggcatttgaaataccaccacatatgaaaaaccaagccctctttcctgcctgtgttttgaagaatgctgaactgaaatttaacttcggtgaagaggaatttaagtttccaccaaaagatggctttgttgctctttccaaggcaccggatggttacattgtcaaatcacagcactcaggtaatgcacaggtgacacaaacaaagtttctccccaatgctccgaaagctctcattgttgaaccttcccgggagttagctgaacaaactttgaacaacatcaagcagtttaagaaatacattgataatcctaaattaagggagcttctgataattggaggtgttgcagcccgggatcagctctctgttttggaaaatggagtagatatagttgtaggtactccgggaagactagatgacttggtgtcaactggaaagctgaacttatctcaagttagattcctggtcctggatgaagctgatgggcttctttctcaaggttattctgattttataaataggatgcacaatcagattcctcaggttacctctgatggaaaaagacttcaggtgattgtttgctctgccactttgcattctttcgatgtaaagaaactgtccgagaagataatgcattttcctacatgggttgacttaaaaggagaagactctgttccagatactgtacaccatgttgttgtcccagtaaatcccaaaactgacagactctgggaaaggcttggaaagagccacattagaactgatgatgtacatgcaaaagataacacaagacctggtgctaatagtccagagatgtggtctgaagctattaaaatcctgaaaggggagtatgctgtccgggcaatcaaggaacataagatggatcaagcaattatcttctgtagaaccaaaattgactgtgataacttggagcagtactttatacaacaaggaggaggacctgataaaaaaggacaccagttctcatgtgtttgtcttcatggtgacagaaagcctcatgagagaaagcaaaacttggaaagatttaagaaaggagatgtaagattcttgatttgcacagatgtagctgctagaggaattgatatccacggtgttccttatgttataaatgtcactctgcccgatgaaaagcaaaactacgtacatcgaattggcagagtaggaagagctgaaaggatgggtctggcaatttccctggtggcaacagaaaaagaaaaggtttggtaccatgtatgtagcagccgtggaaaagggtgttataacacaagactcaaggaagatggaggctgtaccatatggtacaacgagatgcagttactatctgagatagaagaacacctgaactgtaccatttctcaggttgagccggatataaaggtaccagtggatgaatttgatgggaaagttacctacggtcagaaaagggctgctggtggtggaagctataaaggccatgtggatattttggcacctactgttcaagagttggctgcccttgaaaaggaggcgcagacatctttcctgcatcttggctaccttcctaaccagctgttcagaaccttctgatttttacatttactgaataagatttgagtaatgaaagtctgtagtcttaaaactctaaaacagttgtactgcttccaagcagcagtatttatagtaacgtaagctattaatgctaactcttgcatgtcaagaaacattagtcttaggaattcttcaaaaaatggcatcccaatgaaaataaatttgatgactata

SEQ ID NO: 1342 - DNA, 5018 bp, Homo sapiens
tctagatgggggtcctgggccccagggtgtgcagccactgacttggggactgctggtggggtagggatgagggagggaggggcattgtgatgtacagggctgctctgtgagatcaagggtctcttaagggtgggagctggggcagggactacgagagcagccagatgggctgaaagtggaactcaaggggtttctggcacctacctacctgcttcccgctggggggtggggagttggcccagagtcttaagattggggcagggtggagaggtgggctcttcctgcttcccactcatcttatagctttctttccccagatccgaattcgagatccaaaccaaggaggaaaggatatcacagaggagatcatgtctggggcccgcactgcctccacacccacccctccccagacgggaggcagtctggagcctcaagctaatggggagacgccccaggttgctgtcattgtccggccagatgaccggtcacagggagcaatcattgctgaccggccagggctgcctggcccagagcatagcccttcagaatcccagccttcgtcgccttctccgaccccatcaccatccccagtcttggaaccggggtctgagcctaatctcgcagtcctctctattcctggggacactatgacaactatacaaatgtctgtagaagaatcaacccccatctcccgtgaaactggggagccatatcgcctctctccagaacccactcctctcgccgaacccatactggaagtagaagtgacacttagcaaaccggttccagaatctgagttttcttccagtcctctccaggctcccacccctttggcatctcacacagtggaaattcatgagcctaatggcatggtcccatctgaagatctggaaccagaggtggagtcaagcccagagcttgctcctcccccagcttgcccctccgaatcccctgtgcccattgctccaactgcccaacctgaggaactgctcaacggagccccctcgccaccagctgtggacttaagcccagtcagtgagccagaggagcaggccaaggaggtgacagcatcagtggcgccccccaccatcccctctgctactccagctacggctccttcagctacttccccagctcaggaggaggaaatggaagaagaagaagatgaggaagaaggagaagtaggggaagcaggggaaggtgagagtgagaagagaggagaggaactgctccccccagagagtacccctattccagccaacttgtctcagaatttggaggcagcagcagccactcaagtggcagtatctgtgccaaagaggagacggaaaattaaggagctaaataagaaggaggctgttggagaccttctggatgccttcaaggaggcgaacccggcagtaccagaggtggaaaatcagcctcctgcaggcagcaatccaggcccagagtctgagggcagtggtgtgcccccacgtcctgaggaagcagatgagacctgggactcaaaggaagacaaaattcacaatgctgagaacatccagcccggggaacagaagtatgaatataagtcagatcagtggaagcctccaaacctagaggagaaaaaacgttacgaccgtgagttcctgcttggttttcagttcatcttttgccagatgcagaagccagagggattgccacatatcagtgacgtggtgctggacaaggccaataaaacaccactgcggccactggatcccactagactacaaggcataaattgtggcccagacttcactccatcctttgccaaccttggccggacaacccttagcacccgtgggcccccaaggggtgggccaggtggggagctcgcccgtggcgcgcaggctggcctgggaccccggcgctctcagcagggaccccgaaaagaaccacgcaagatcattgccacagtgttaatgaccgaagatataaaactgaacaaagcagagaaagcctggaaacccagcagcaagcggacagcggctgataaggatcgaggggaagaagatgctgatggcagcaaaacccaggacctattccgcaggtggcgctccatcctgaataaactgacaccccagatgttccagcagctgatgaagcaagtgacgcagctggccatcgacaccgaggacgcctcaaaggggtcattgacctcatttttgagaaggccatttcagagcccaacttctctgtggcctatccaacatgtgccgctgcctcatggcgctgaaagtgcccactacggaaagccaacagtgactgtgaacttccgaaagctgttgttgaatcgatgtcagaaggagtttgagaaagacaaagatgatgatgaggtttttgagaagaagcaaaaagagatggatgaagctgctacggcagaggaacgagaacgcctgaaggaggagctggaagaggctcgggacatagcccggcgctgctctttagggaatatcaagtttattggagagttgttcaaactgaagatgttaacagaggcaataatgcatgactgtgtggtcaaactgcttaagaaccatgatgaagagtcccttgagtgcctttgtcgtctgctcaccaccattggcaaagacctggactttgaaaaagccaagccccgaatggatcagtatttcaaccagatggaaaaaatcattaaagaaaagaagacgtcatcccgcatccgctttatgctgcaggacgtgctggatctgcgagggagcaattgggtgccacgccgaggggatcagggtccaagaccattgaccagatccataaggaggctgagatggaagacatcgagagcacatcaaagtgcagcagctcatgcaagggcagtgacaagcgtcggggcggtcctccaggccctcccatcagccgtggacttccccttgtggatgatggtggctgacacagttcccatcagcaaaggtagccgccccattgacacctcacgactcaccaagatcaccaagcctggctccatcgattctaacaaccagctctttgcacctggagggcgactgagctggggcaagggcagcagcggagggtcaggagcccagccctcagacgcagcatcagaagctgctcgcccagctactagtactttgattcgcttctcagcccttcaacaagcggtacccacagaaagcacagataatagacgtgtggtgcagaggagtagcttgagccgagaacgaggcgagaaagctggagaccgaggagaccgcctagagcgagtgaacggggaggggaccgtggggaccggcttgatcgtgtcgcggacacctgctaccaagcggacgttcagcaaggaagtggaggagcggagtagagaacggccctcccagcctgaggggctgcgcaaggcagctagcctcacggaggatcgggaccgtgggcgggatgccgtgaagcgagaagctgccctacccccagtgagccccctgaaggcggctctctctgaggaggagttagagaagaaatccaaggctatcattgaggaatatctccatctcaatgacatgaaagaggcagtccagtgcgtgcaggagctggcctcaccctccttgctcttcatctttgtacggcatggtgtcgagtctacgctggagcgcagtgccattgctcgtgagcatatggggcagctgctgcaccagctgctctgtgctgggcatctgtctactgctcagtactaccaagggttgtatgaaatcttggaattggctgaggacatggaaattgacatcccccacgtgtggctctacctagcggaactggtaacacccattctgcaggaaggtggggtgcccatgggggagctgttcagggagattacaaagcctctgagaccgttgggcaaagctgcttccctgttgctggagatcctgggcctcctgtgcaaaagcatgggtcctaaaaaggtggggacgctgtggcgagaagccgggcttagctggaaggaatttctacctgaaggccaggacattggtgcattcgtcgctgaacagaaggtggagtataccctgggagaggagtcggaagcccctggccagagggcactcccctccgaggagctgaacaggcagctggagaagctgctgaaggagggcagcagtaaccagcgggtgttcgactggatagaggccaacctgagtgagcagatagtatccaacacgttagttcgagccctcatgacggctgtctgctattctgcaattatttttgagactcccctccgagtggacgttgcagtgctgaaaggcgacatagtgctgcagaaatacctgtgtgacgaagcagaaggagctacaggcgctctacgcctccaggcccttgtagtgaccttagaacagcctcccaacctgctgcggatgttctttgacgcactgtatgacgaggacgtggtgaaggaggatgccttctacagttgggagagtagcaaggaccccgctgagcagcagggcaagggtgtggcccttaaatctgtcacagccttcttcaagtggctccgtgaagtcagaggaggagtctgaccacaactgagggctggtggggccggggacctggagccccatggacacacagatggctccggctagccgcctggactgcaggggggcggcagcagcggcggtggcagtgggtgcctgtagtgtgatgtgtctgaactaataaagtggctgaagaggcaggatggcttggggctgcctgggcccccctccaggatgccgccaggtgtccctctcctcccctggggcacagagatatattatatataaagtcttgaaaattttgaaatttggtgtgtcttggggtggggaggggcaccaacgcctgcccctggggtccttttttttattttctgaaaatcactctcggactgccgtcctcgctgctgggcatatgccccagcccctgtaccacccctgctgttgcctgggcagggggaagggggggcacggtgcctgtaattattaaacatgaattcaatt

SEQ ID NO: 1343 - DNA, 2162 bp, Homo sapiens
gggctgcgctgtccagctgtggctatggccccagccccgagatgaggagggagagaactaggggcccgcaggcctgggaatttccgtcccccaccaagtccggatgctcactccaaagtctcagcaggcccctgagggagggagctgtcagccagggaaaaccgagaacaccatcaccatgacaaccagtcaccagcctcaggacagatacaaagctgtctggcttatcttcttcatgctgggtctgggaacgctgctcccgtggaattttttcatgacggccactcagtatttcacaaaccgcctggacatgtcccagaatgtgtccttggtcactgctgaactgagcaaggacgcccaggcgtcagccgcccctgcagcacccttgcctgagcggaactctctcagtgccatcttcaacaatgtcatgaccctatgtgccatgctgcccctgctgttattcacctacctcaactccttcctgcatcagaggatcccccagtccgtacggatcctgggcagcctggtggccatcctgctggtgtttctgatcactgccatcctggtgaaggtgcagctggatgctctgcccttctttgtcatcaccatgatcaagatcgtgctcattaattcatttggtgccatcctgcagggcagcctgtttggtctggctggccttctgcctgccagctacacggcccccatcatgagtggccagggcctagcaggcttctttgcctccgtggccatgatctgcgctattgccagtggctcggaactatcagaaagtgccttcggctactttatcacagcctgtgctgttatcattttgaccatcatctgttacctgggcctgccccgcctggaattctaccgctactaccagcagctcaagcttgaaggacccggggagcaggagaccaagttggacctcattagcaaaggagaggagccaagagcaggcaaagaggaatctggagtttcagtctccaactctcagcccaccaatgaaagccactctatcaaagccatcctgaaaaatatctcagtcctggctttctctgtctgcttcatcttcactatcaccattgggatgtttccagccgtgactgttgaggtcaagtccagcatcgcaggcagcagcacctgggaacgttacttcattcctgtgtcctgtttcttgactttcaatatctttgactggttgggccggagcctcacagctgtattcatgtggcctgggaaggacagccgctggctgccaagcctggtgctggcccggctggtgtttgtgccactgctgctgctgtgcaacattaagccccgccgctacctgactgtggtcttcgagcacgatgcctggttcatcttcttcatggctgcctttgccttctccaacggctacctcgccagcctctgcatgtgcttcgggcccaagaaagtgaagccagctgaggcagagaccgcaggagccatcatggccttcttcctgtgtctgggtctggcactgggggctgttttctccttcctgttccgggcaattgtgtgacaaaggatggacagaaggactgcctgcctccctccctgtctgcctcctgccccttccttctgccaggggtgatcctgagtggtctggcggttttttcttctaactgacttctgctttccacggcgtgtgctgggcccggatctccaggccctggggagggagcctctggacggacagtggggacattgtgggtttggggctcagagtcgagggacggggtgtagcctcggcatttgcttgagtttctccactcttggctctgactgatccctgcttgtgcaggccagtggaggctcttgggcttggagaacacgtgtgtctctgtgtatgtgtctgtgtgtctgcgtccgtgtctgtcagactgtctgcctgtcctggggtggctaggagctgggtctgaccgttgtatggtttgacctgatatactccattctcccctgcgcctcctcctctgtgttttttccatgtccccctcccaactccccatgcccagtttttacccatcatgcaccctgtacagttgccacgttactgccttttttaaaaatatatttgacagaaaccaggtgccttcagaggctctctgatttaaataaacctttcttgttttttt

SEQ ID NO: 1344 - DNA, 3168 bp, Homo sapiens
gccagagcgtgagccgcgacctccgcgcaggtggtcgcgccggtctccgcggaaatgttgtccaaagttcttccagtcctcctaggcatcttattgatcctccagtcgagggtcgagggacctcagactgaatcaaagaatgaagcctcttcccgtgatgttgtctatggcccccagccccagcctctggaaaatcagctcctctctgaggaaacaaagtcaactgagactgagactgggagcagagttggcaaactgccagaagcctctcgcatcctgaacactatcctgagtaattatgaccacaaactgcgccctggcattggagagaagcccactgtggtcactgttgagatcgccgtcaacagccttggtcctctctctatcctagacatggaatacaccattgacatcatcttctcccagacctggtacgacgaacgcctctgttacaacgacacctttgagtctcttgttctgaatggcaatgtggtgagccagctatggatcccggacaccttttttaggaattctaagaggacccacgagcatgagatcaccatgcccaaccagatggtccgcatctacaaggatggcaaggtgttgtacacaattaggatgaccattgatgccggatgctcactccacatgctcagatttccaatggattctcactcttgccctctatctttctctagcttttcctatcctgagaatgagatgatctacaagtgggaaaatttcaagcttgaaatcaatgagaagaactcctggaagctcttccagtttgattttacaggagtgagcaacaaaactgaaataatcacaaccccagttggtgacttcatggtcatgacgattttcttcaatgtgagcaggcggtttggctatgttgcctttcaaaactatgtcccttcttccgtgaccacgatgctctcctgggtttccttttggatcaagacagagtctgctccagcccggacctctctagggatcacctctgttctgaccatgaccacgttgggcaccttttctcgtaagaatttcccgcgtgtctcctatatcacagccttggatttctatatcgccatctgcttcgtcttctgcttctgcgctctgttggagtttgctgtgctcaacttcctgatctacaaccagacaaaagcccatgcttctcctaaactccgccatcctcgtatcaatagccgtgcccatgcccgtacccgtgcacgttcccgagcctgtgcccgccaacatcaggaagcttttgtgtgccagattgtcaccactgagggaagtgatggagaggagcgcccgtcttgctcagcccagcagccccctagcccaggtagccctgagggtccccgcagcctctgctccaagctggcctgctgtgagtggtgcaagcgttttaagaagtacttctgcatggtccccgattgtgagggcagtacctggcagcagggccgcctctgcatccatgtctaccgcctggataactactcgagagttgttttcccagtgactttcttcttcttcaatgtgctctactggcttgtttgccttaacttgtaggtaccagctggtaccctgtggggcaacctctccagttccccaggaggtccaagccccttgccaagggagttgggggaaagcagcagcagcagcaggagcgactagagtttttcctgccccattccccaaacagaagcttgcagagggtttgtctttgctgcccctctcccctacctggcccattcactgagtcttctcagcagaccatttcaaattattaataaatgggccacctccctcttcttcaaggagcatccgtgatgctcagtgttcaaaaccacagccacttagtgatcagctccctaaaaccatgcctaagtacaggcggattagctatcttccaacaatgctgaccaccagacaattactgcatttttccagaagcccactattgcctttgtagtgctttcggcccagttctggcctcagcctcaaagtgcaccgactagttgcttgcctatacctggcacctcattaagatgctgggcagcagtataacaggaggaagagatccctctcctttggtcagattattatgttctcagttctctctccctgctacccctttctctgcagatagatagacactggcattatccctttaggaagaggggggggcagcaagagagcctatttgggacagcattcctctctctctgctgctgtgacatctccctctccttgctggctccatctttcgtctgcactaccaattcaatgcccttcatccaatgggtatctatttttgtgtgtgattatagtaactactccctgctttatatgccaccctcttccttctctttgacccctgtgactctttctgtaactttcccagtgacttcccctagccctgacccaggcactaggccttggtgacttcctggggccaagaaactaaggaaactcggctttgcaacaggcattactcgccattgattggtgcccacccagggcacactgtcggagttctatcacttgcttgacccctggacccataaaccagtccactgttatacccggggcactctaaccatcacaatcaatcaatcaaattcccttaaatttgtatggcactggaactttggcaaagcacttttgacaagttgtgtctgattggagcttcatgatagccttgtgacatctttagggcaggattcttatccccattttgcagatgaaaaccctgagtcacagatttctgtgggactgtggatctcactggaagctatccaagagcccactgtcaccttctagaccacatgatagggctagacagctcagttcaccatgattctcttctgtcacctctgctggcacaccagtggcaaggcccagaatggcgacctctctttagctcaatttctgggcctgaggtgctcagactgcccccaagatcaaatctctcctggctgtagtaacccagtggaatgaatttggacatgccccaatgcttctatatgctaagtgaaatctgtgtctgtaatttgttggggggtggatagggtggggtctccatctactttttgtcaccatcatctgaaatggggaaatatgtaaataaatatatcagcaaagcaaaaagaaaaaaaaaaa

SEQ ID NO: 1345 - DNA, 3168 bp, Homo sapiens; identical to SEQ ID NO: 1344

SEQ ID NO: 1346 - DNA, 2674 bp, Homo sapiens
cacacacgggcgcacgcacacggcagccgggccagggacgaccctgtcagctgcagccccagaggtccggggcgcgcagccgggtcccctcgagggcgcagccggccgccccgccccgcccctcgaagcagccgggccgggcgcgcagtgggctacaaactttcgcagcgcgagtccgccaaggcagcgcgccgactcgggctcggctcggctctgcgctgctccggacggctgtgaccgctggccgggggctcgggccgccggtacccacggaccgcgcgcccgggtgcctgctccgctaagcccctcgccccgcgcggacctcggtatccagcgccctgctgcccgggctctccccgcgcgccctactgccgcgaggtcagtccgcagcctccggtgcgccagcgctcgccttcctcctcctggacttcggccctttgccgccctcaccacgccatggctcatgtccccgctcggaccagcccgggacccgggccccagctgctgctgctgctgctgccgttgtttctgctgttgctccgggatgtggccggcagccacagggcccccgcctggtccgcactgcccgcggccgccgacggcctgcagggggacagggatctccagcggcaccctggggacgcggccgccacgttgggccccagcgcccaggacatggtcgctgtccacatgcacaggctctatgagaagtacagccggcagggcgcgcggccgggagggggcaacacggtccgcagcttcagggccaggctggaagtggtcgaccagaaggccgtgtatttcttcaacctgacttccatgcaagactcggaaatgatccttacggccactttccacttctactcagagccgcctcggtggcctcgagcgctcgaggtgctatgcaagccgcgggccaagaacgcttcaggccgcccgctgcccctgggcccgcccacacgccagcacctgctcttccgcagcctctcgcagaacacggccacacaggggctactccgcggggccatggccctggcgcccccaccgcgcggcctgtggcaggccaaggacatctcccccatcgtcaaggcggcccgccgggatggcgagctgctcctctccgcccagctggattctgaggagagggacccgggggtgccccggcccagcccctatgcgccctacatcctagtctatgccaacgatctggccatctcggagcccaacagcgtggcagtgacgctgcagagatacgaccccttccctgccggagaccccgagccccgcgcagcccccaacaactcagcggacccccgcgtgcgccgagccgcgcaggccactgggcccctccaggacaacgagctgccggggctggatgagaggccgccgcgcgcccacgcacagcacttccacaagcaccagctgtggcccagccccttccgggcgctgaaaccccggccagggcgcaaagaccgcaggaagaagggccaggaggtgttcatggccgcctcgcaggtgctggactttgacgagaagacgatgcagaaagcccggaggaagcagtgggatgagccgagggtgtgctcccggaggtacctgaaggtggacttcgcagacatcggctggaatgaatggataatctcaccgaaatcttttgatgcctactactgcgcgggagcatgtgagttccccatgcctaagatcgttcgtccatccaaccatgccaccatccagagcattgtcagggctgtgggcatcatccctggcatcccagagccctgctgtgttcccgataagatgaactcccttggggtcctcttcctggatgagaatcggaatgtggttctgaaggtgtaccccaacatgtccgtggacacctgtgcctgccggtgagaccactccagggtggaaagaagccacgcccagcagagctgccttctcggagccttctgcaaccaggacttgtggtgcagctgcagacacagagcacagctcatgggcaacatcactggggcccagagagagctgtccgccagtgcatcattagggggtctttcattgctagtgactagccccttaaatgccagcctgagtacctgaaggaatctgggaattagccctggcctgaaagtggcccatcattcatacccactgttctgaaggcttgaaaacaaaacatatccacaacattggcttgatgtgatcatcatctcataactgagcaagaagactatgcaaatcttagggcgctcgctccctgcacacggaaagaactctgtttaaatgctcagttcagaacactttgggccacatagtgattttggaaaacaggataatcgtggtgtaaatgagtgtttcctttcaaagtccactgcagagcttttatccatatggtatgcacatgtagccaatattggtttctttttcttaatatatatattttattttaaaacaacaaaaagggagggcgttgacaccattccccacagagatagtcatgctgagtgtgggttgtttaaacatgcatattgaaataacacatatagtaacgtgggaatactaaaaaataaccaagattttatatttttgtaaattatactttctatactgtagattgtgtatgttatgtgtttttatggaaagctaataaattaaaggtacagtggtatcttga

SEQ ID NO: 1347 - DNA, 1240 bp, Homo sapiens
gaattcgggtctcagcagctcgggcggcgggaggagtggcagcggcaaggcagcccagtttcgcgaaggctgtcggcgcgccgcggcccgcaggcacccggcacgcgccttccccgcaggcacccggcacgcgccttccccgccgccacgatgcccaagaggaaggtcagctccgccgaaggcgccgccaaggaagagcccaagaggagatcggcgcggttgtcagctaaacctcctgcaaaagtggaagcgaagccgaaaaaggcagcagcgaaggataaatcttcagacaaaaaagtgcaaacaaaagggaaaaggggagcaaagggaaaacaggccgaagtggctaaccaagaaactaaagaagacttacctgcggaaaacggggaaacgaagactgaggagagtccagcctctgatgaagcaggagagaaagaagccaagtctgattaataaccatataccatgtcttatcagtggtccctgtctcccttcttgtacaatccagaggaatatttttatcaactattttgtaatgcaagttttttagtagctctagaaacatttttaagaaggagggaatcccacctcatcccattttttaagtgtaaatgctttttttaagaggtgaaatcatttgctggttgtttattttttggtacaaccagaaaatagtgtgggatattgaattatgggaggctctgactgtctcgggtgtcagcttaacattccacagatggggggttagtttttatatcctataatacaaagcatattaaatggcaatatggagtcagtcctgcatttaatgtcttgaacattttaaattacttctattaccatgttgttttttagtagaattgtttcctaaagaaaaccactctttgatcatggctctctctgccagaattgtgtgcactctgtaacatctttggttgtggtagtcctgttttcctaataactttgttactgtgctgtgaaagattacagatttgaacatgtagtgtacgtgctattgagttgtgaactggtgggccgtatgtaacagctgaccaacgtgaagatactggtacttgatagcctcttaaggaaaatttgcttccaaattttaagctggaaagtcactggaataactttaaaaaagaattacaatacatggctttttagaatttcgttacgtatgttaagatttgtgtacaaattgaaatgtctgtactgatcctcaaccaataaaatctca

SEQ ID NO: 1348 - DNA, 1108 bp, Homo sapiens
gagtgagtgagagggcagaggaaatactcaatctgtgccactcactgccttgagcctgcttcctcactccaggactgccagaggctcactcccttgagcctgcttcctcactccaggactgccagaggaagcaatcaccaaaatgaagactgctttaattttgctcagcattttgggaatggcctgtgctttctcaatgaaaaatttgcatcgaagagtcaaaatagaggattctgaagaaaatggggtctttaagtacaggccacgatattatctttacaagcatgcctacttttatcctcatttaaaacgatttccagttcagggcagtagtgactcatccgaagaaaatggagatgacagttcagaagaggaggaggaagaagaggagacttcaaatgaaggagaaaacaatgaagaatcgaatgaagatgaagactctgaggctgagaataccacactttctgctacaacactgggctatggagaggacgccacgcctggcacagggtatacagggttagctgcaatccagcttcccaagaaggctggggatataacaaacaaagctacaaaagagaaggaaagtgatgaagaagaagaggaggaagaggaaggaaatgaaaacgaagaaagcgaagcagaagtggatgaaaacgaacaaggcataaacggcaccagtaccaacagcacagaggcagaaaacggcaacggcagcagcggaggagacaatggagaagaaggggaagaagaaagtgtcactggagccaatgcagaaggcaccacagagaccggagggcagggcaagggcacctcgaagacaacaacctctccaaatggtgggtttgaacctacaaccccaccacaagtctatagaaccacttccccaccttttgggaaaaccaccaccgttgaatacgagggggagtacgaatacacgggcgtcaatgaatacgacaatggatatgaaatctatgaaagtgagaacggggaacctcgtggggacaattaccgagcctatgaagatgagtacagctactttaaaggacaaggctacgatggctatgatggtcagaattactaccaccaccagtgaagctccagcctg

SEQ ID NO: 1349 - DNA, 3279 bp, Homo sapiens
ccggctcgaagcgcaacgaggaagcgtttgcggtgatcccggcgactgcgctggctaatgcggtaccggctagcgtggcttctgcaccccgcactgcccagcaccttccgctcagtcctcggcgcccgcctgccgcctccggagcgcctgtgtggtttccaaaaaaagacttacagcaaaatgaataatccagccatcaagagaataggaaatcacattaccaagtctcctgaagacaagcgagaatatcgagggctagagctggccaatggtatcaaagtacttcttatgagtgatcccaccacggataagtcatcagcagcacttgatgtgcacataggttcattgtcggatcctccaaatattgctggcttaagtcatttttgtgaacatatgctttttttgggaacaaagaaataccctaaagaaaatgaatacagccagtttctcagtgagcatgcaggaagttcaaatgcctttactagtggagagcataccaattactattttgatgtttctcatgaacacctagaaggtgccctagacaggtttgcacagttttttctgtgccccttgttcgatgaaagttgcaaagacagagaggtgaatgcagttgattcagaacatgagaagaatgtgatgaatgatgcctggagactctttcaattggaaaaagctacagggaatcctaaacaccccttcagtaaatttgggacaggtaacaaatatactctggagactagaccaaaccaagaaggcattgatgtaagacaagagctactgaaattccattctgcttactattcatccaacttaatggctgtttgtgttttaggtcgagaatctttagatgacttgactaatctggtggtaaagttattttctgaagtagagaacaaaaatgttccattgccagaatttcctgaacaccctttccaagaagaacatcttaaacaactttacaaaatagtacccattaaagatattaggaatctctatgtgacatttcccatacctgaccttcagaaatactacaaatcaaatcctggtcattatcttggtcatctcattgggcatgaaggtcctggaagtctgttatcagaacttaagtcaaagggctgggttaatactcttgttggtgggcagaaggaaggagcccgaggttttatgttttttatcattaatgtggacttgaccgaggaaggattattacatgttgaagatataattttgcacatgtttcaatacattcagaagttacgtgcagaaggacctcaagaatgggttttccaagagtgcaaggacttgaatgctgttgcttttaggtttaaagacaaagagaggccacggggctatacatctaagattgcaggaatattgcattattatcccctagaagaggtgctcacagcggaatatttactggaagaatttagacctgacttaatagagatggttctcgataaactcagaccagaaaatgtccgggttgccatagtttctaaatcttttgaaggaaaaactgatcgcacagaagagtggtatggaacccagtacaaacaagaagctataccggatgaagtcatcaagaaatggcaaaatgctgacctgaatgggaaatttaaacttcctacaaagaatgaatttattcctacgaattttgagattttaccgttagaaaaagaggcgacaccataccctgctcttattaaggatacagtcatgagcaaactttggttcaaacaagatgataagaaaaaaaagccgaaggcttgtctcaactttgaatttttcagcccatttgcttatgtggaccccttgcactgtaacatggcctatttgtaccttgagctcctcaaagactcactcaacgagtatgcatatgcagcagagctagcaggcttgagctatgatctccaaaataccatctatgggatgtatctttcagtgaaaggttacaatgacaagcagccaattttactaaagaagattattgagaaaatggctacctttgagattgatgaaaaaagatttgaaattatcaaagaagcatatatgcgatctcttaacaatttccgggctgaacagcctcaccagcatgccatgtactacctccgcttgctgatgactgaagtggcctggactaaagatgagttaaaagaagctctggatgatgtaacccttcctcgccttaaggccttcatacctcagctcctgtcacggctgcacattgaagcccttctccatggaaacataacaaagcaggctgcattaggaattatgcagatggttgaagacaccctcattgaacatgctcataccaaacctctccttccaagtcagctggttcggtatagagaagttcagctccctgacagaggatggtttgtttatcagcagagaaatgaagttcacaataactgtggcatcgagatatactaccaaacagacatgcaaagcacctcagagaatatgtttctggagctcttctgtcagattatctcggaaccttgcttcaacaccctgcgcaccaaggagcagttgggctatatcgtcttcagcgggccacgtcgagctaatggcatacagagcttgagattcatcatccagtcagaaaagccacctcactacctagaaagcagagtggaagctttcttaattaccatggaaaagtccatagaggacatgacagaagaggccttccaaaaacacattcaggcattagcaattcgtcgactagacaaaccaaagaagctatctgctgagtgtgctaaatactggggagaaatcatctcccagcaatataattttgacagagataacactgaggttgcatatttaaagacacttaccaaggaagatatcatcaaattctacaaggaaatgttggcagtagatgctccaaggagacataaggtatccgtccatgttcttgccagggaaatggattcttgtcctgttgttggagagttcccatgtcaaaatgacataaatttgtcacaagcaccagccttgccacaacctgaagtgattcagaacatgaccgaattcaagcgtggtctgccactgtttccccttgtgaaaccacatattaacttcatggctgcaaaactctgaagattccccatgcatgggaaagtgcaagtggatgcattcctgagtcttccagagcctaagaaaatcatcttggccactttaatagtttctgattcactattagagaaacaaacaaaaaattgtcaaatgtcattatgtagaaatattataaatccaaagtaa

SEQ ID NO: 1350 - DNA, 5097 bp, Homo sapiens
ctgcaggaaggagagaggaagaggagcagaagggggcagcagcggacgccgctaacggcctccctcggcgctgacaggctgggccggcgcccggctcgcttgggtgttcgcgtcgccacttcggcttctcggccggtcgggcccctcggcccgggcttgcggcgcgcgtcggggctgagggctgctgcggcgcagggagaggcctggtcctcgctgccgagggatgtgagtgggagctgagcccacactggagggcccccgagggcccagcctggaggtcgttcagagccgtgcccgccccggggcttcgcagaccttgacccgccgggtaggagccgcccctgcgggctcgagggcgcgctctggtcgcccgatctgtgtagccggtttcagaagcaggcaacaggaacaagatgtgaactgtttctcttctgcagaaaaagaggctcttcctcctcctcccgcgacggcaaatgttctgaaaaagactctgcatgggaatggcctgccttacgatgacagaaatggagggaacatccacctcttctatatatcagaatggtgatatttctggaaatgccaattctatgaagcaaatagatccagttcttcaggtgtatctttaccattcccttgggaaatctgaggcagattatctgacctttccatctggggagtatgttgcagaagaaatctgtattgctgcttctaaagcttgtggtatcacacctgtgtatcataatatgtttgctttaatgagtgaaacagaaaggatctggtatccacccaaccatgtcttccatatagatgagtcaaccaggcataatgtactctacagaataagattttactttcctcgttggtattgcagtggcagcaacagagcctatcggcatggaatatctcgaggtgctgaagctcctcttcttgatgactttgtcatgtcttacctctttgctcagtggcggcatgattttgtgcacggatggataaaagtacctgtgactcatgaaacacaggaagaatgtcttgggatggcagtgttagatatgatgagaatagccaaagaaaacgatcaaaccccactggccatctataactctatcagctacaagacattcttaccaaaatgtattcgagcaaagatccaagactatcatattttgacaaggaagcgaataaggtacagatttcgcagatttattcagcaattcagccaatgcaaagccactgccagaaacttgaaacttaagtatcttataaatctggaaactctgcagtctgccttctacacagagaaatttgaagtaaaagaacctggaagtggtccttcaggtgaggagatttttgcaaccattataataactggaaacggtggaattcagtggtcaagagggaaacataaagaaagtgagacactgacagaacaggatttacagttatattgcgattttcctaatattattgatgtcagtattaagcaagcaaaccaagagggttcaaatgaaagccgagttgtaactatccataagcaagatggtaaaaatctggaaattgaacttagctcattaagggaagctttgtctttcgtgtcattaattgatggatattatagattaactgcagatgcacatcattacctctgtaaagaagtagcacctccagccgtgcttgaaaatatacaaagcaactgtcatggcccaatttcgatggattttgccattagtaaactgaagaaagcaggtaatcagactggactgtatgtacttcgatgcagtcctaaggactttaataaatattttttgacttttgctgtcgagcgagaaaatgtcattgaatataaacactgtttgattacaaaaaatgagaatgaagagtacaacctcagtgggacaaagaagaacttcagcagtcttaaagatcttttgaattgttaccagatggaaactgttcgctcagacaatataattttccagtttactaaatgctgtcccccaaagccaaaagataaatcaaaccttctagtcttcagaacgaatggtgtttctgatgtaccaacctcaccaacattacagaggcctactcatatgaaccaaatggtgtttcacaaaatcagaaatgaagatttgatatttaatgaaagccttggccaaggcacttttacaaagatttttaaaggcgtacgaagagaagtaggagactacggtcaactgcatgaaacagaagttcttttaaaagttctggataaagcacacagaaactattcagagtctttctttgaagcagcaagtatgatgagcaagctttctcacaagcatttggttttaaattatggagtatgtgtctgtggagacgagaatattctggttcaggagtttgtaaaatttggatcactagatacatatctgaaaaagaataaaaattgtataaatatattatggaaacttgaagttgctaaacagttggcatgggccatgcattttctagaagaaaacacccttattcatgggaatgtatgtgccaaaaatattctgcttatcagagaagaagacaggaagacaggaaatcctcctttcatcaaacttagtgatcctggcattagtattacagttttgccaaaggacattcttcaggagagaataccatgggtaccacctgaatgcattgaaaatcctaaaaatttaaatttggcaacagacaaatggagttttggtaccactttgtgggaaatctgcagtggaggagataaacctctaagtgctctggattctcaaagaaagctacaattttatgaagataggcatcagcttcctgcaccaaagtgggcagaattagcaaaccttataaataattgtatggattatgaaccagatttcaggccttctttcagagccatcatacgagatcttaacagtttgtttactccagattatgaactattaacagaaaatgacatgttaccaaatatgaggataggtgccctagggttttctggtgcctttgaagaccgggatcctacacagtttgaagagagacatttgaaatttctacagcaacttggcaagggtaattttgggagtgtggagatgtgccggtatgaccctctacaggacaacactggggaggtggtcgctgtaaaaaagcttcagcatagtactgaagagcacctaagagactttgaaagggaaattgaaatcctgaaatccctacagcatgacaacattgtaaagtacaagggagtgtgctacagtgctggtcggcgtaatctaaaattaattatggaatatttaccatatggaagtttacgagactatcttcaaaaacataaagaacggatagatcacataaaacttctgcagtacacatctcagatatgcaagggtatggagtatcttggtacaaaaaggtatatccacagggatctggcaacgagaaatatattggtggagaacgagaacagagttaaaattggagattttgggttaaccaaagtcttgccacaagacaaagaatactataaagtaaaagaacctggtgaaagtcccatattctggtatgctccagaatcactgacagagagcaagttttctgtggcctcagatgtttggagctttggagtggttctgtatgaacttttcacatacattgagaagagtaaaagtccaccagcggaatttatgcgtatgattggcaatgacaaacaaggacagatgatcgtgttccatttgatagaacttttgaagaataatggaagattaccaagaccagatggatgcccagatgagatctatatgatcatgacagaatgctggaacaataatgtaaatcaacgcccctcctttagggatctagctcttcgagtggatcaaataagggataacatggctggatgaaagaaatgaccttcattctgagaccaaagtagatttacagaacaaagttttatatttcacattgctgtggactattattacatatatcattattatataaatcatgatgctagccagcaaagatgtgaaaatatctgctcaaaactttcaaagtttagtaagtttttcttcatgaggccaccagtaaaagacattaatgagaattccttagcaaggattttgtaagaagtttcttaaacattgtctgttaacatcactcttgtctggcaaaagaaaaaaaatagactttttcaactcagctttttgagacctgaaaaaattattatgtaaattttgcaatgttaaagatgcacagaatatgtatgtatagtttttaccacagtggatgtataataccttggcatcttgtgtgatgttttacacacatgagggctggtgttcattaatactgttttctaatttttccatagttaatctataattaattacttcactatacaaacaaattaagatgttcagataattgaataagtacctttgtgtccttgttcatttatatcgctggccagcattataagcaggtgtatacttttagcttgtagttccatgtactgtaaatatttttcacataaagggaacaaatgtctagttttatttgtataggaaatttccctgaccctaaataatacattttgaaatgaaacaagcttacaaagatataatctattttattatggtttcccttgtatctatttgtggtgaatgtgttttttaaatggaactatctccaaatttttctaagactactatgaacagttttcttttaaaattttgagattaagaatgccaggaatattgtcatcctttgagctgctgactgccaataacattcttcgatctctgggatttatgctcatgaactaaatttaagcttaagccataaaatagattagattgttttttaaaaatggatagctcattaagaagtgcagcaggttaagaattttttcctaaagactgtatatttgaggggtttcagaattttgcattgcagtcatagaagagatttatttcctttttagaggggaaatgaggtaaataagtaaaaaagtatgcttgttaattttattcaagaatgccagtagaaaattcataacgtgtatctttaagaaaaatgagcatacatcttaaatcttttcaatta

SEQ ID NO: 1351 - DNA, 4457 bp, Homo sapiens
gacctgagcgactgcggccgcgtcttcccggtctcctttcccggccgcacagggttttataggatcacattgacaaaagtaccatggagttttatgagtcagcatattttattgttcttattcctccaatagttattacagtaattttcctcttcttctggcttttcatgaaagaaacattatatgatgaagttcttgcaaaacagaaaagagaacaaaagcttattcctaccaaaacagataaaaagaaagcagaaaagaaaaagaataaaaagaaagaaatccagaatggaaacctccatgaatccgactctgagagtgtacctcgagactttaaattatcagatgctttggcagtagaagatgatcaagttgcacctgttccattgaatgtcgttgaaacttcaagtagtgttagggaaagaaaaaagaaggaaaagaaacaaaagcctgtgcttgaagagcaggtcatcaaagaaagtgacgcatcaaagattcctggcaaaaaagtagaacctgtcccagttactaaacagcccacccctccctctgaagcagctgcctcgaagaagaaaccagggcagaagaagtctaaaaatggaagcgatgaccaggataaaaaggtggaaactctcatggtaccatcaaaaaggcaagaagcattgcccctccaccaagagactaaacaagaaagtggatcagggaagaagaaagcttcatcaaagaaacaaaagacagaaaatgtcttcgtagatgaaccccttattcatgcaactacttatattcctttgatggataatgctgactcaagtcctgtggtagataagagagaggttattgatttgcttaaacctgaccaagtagaagggatccagaaatctgggactaaaaaactgaagaccgaaactgacaaagaaaatgctgaagtgaagtttaaagattttcttctgtccttgaagactatgatgttttctgaagatgaggctctttgtgttgtagacttgctaaaggagaagtctggtgtaatacaagatgctttaaagaagtcaagtaagggagaattgactacgcttatacatcagcttcaagaaaaggacaagttactcgctgctgtgaaggaagatgctgctgctacaaaggatcggtgtaagcagttaacccaggaaatgatgacagagaaagaaagaagcaatgtggttataacaaggatgaaagatcgaattggaacattagaaaaggaacataatgtatttcaaaacaaaatacatgtcagttatcaagagactcaacagatgcagatgaagtttcagcaagttcgtgagcagatggaggcagagatagctcacttgaagcaggaaaatggtatactgagagatgcagtcagcaacactacaaatcaactggaaagcaagcagtctgcagaactaaataaactacgccaggattatgctaggttggtgaatgagctgactgagaaaacaggaaagctacagcaagaggaagtccaaaagaagaatgctgagcaagcagctactcagttgaaggttcaactacaagaagctgagagaaggtgggaagaagttcagagctacatcaggaagagaacagcggaacatgaggcagcacagcaagatttacagagtaaatttgtggccaaagaaaatgaagtacagagtctgcatagtaagcttacagataccttggtatcaaaacaacagttggagcaaagactaatgcagttaatggaatcagagcagaaaagggtgaacaaagaagagtctctacaaatgcaggttcaggatattttggagcagaatgaggctttgaaagctcaaattcagcagttccattcccagatagcagcccagacctccgcttcagttctagcagaagaattacataaagtgattgcagaaaaggataagcagataaaacagactgaagattctttagcaagtgaacgtgatcgtttaacaagtaaagaagaggaacttaaggatatacagaatatgaatttcttattaaaagctgaagtgcagaaattacaggccctggcaaatgagcaggctgctgctgcacatgaattggagaagatgcaacaaagtgtttatgttaaagatgataaaataagattgctggaagagcaactacaacatgaaatttcaaacaaaatggaagaatttaagattctaaatgaccaaaacaaagcattaaaatcagaagttcagaagctacagactcttgtttctgaacagcctaataaggatgttgtggaacaaatggaaaaatgcattcaagaaaaagatgagaagttaaagactgtggaagaattacttgaaactggacttattcaggtggcaactaaagaagaggagctgaatgcaataagaacagaaaattcatctctgacaaaagaagttcaagacttaaaagctaagcaaaatgatcaggtttcttttgcctctctagttgaagaacttaagaaagtgatccatgagaaagatggaaagatcaagtctgtagaagagcttctggaggcagaacttctcaaagttgctaacaaggagaaaactgttcaggatttgaaacaggaaataaaggctctaaaagaagaaataggaaatgtccagcttgaaaaggctcaacagttatctatcacttccaaagttcaggagcttcagaacttattaaaaggaaaagaggaacagatgaataccatgaaggctgttttggaagagaaagagaaagacctagccaatacagggaagtggttacaggatcttcaagaagaaaatgaatctttaaaagcacatgttcaggaagtagcacaacataacttgaaagaggcctcttctgcatcacagtttgaagaacttgagattgtgttgaaagaaaaggaaaatgaattgaagaggttagaagccatgctaaaagagagggagagtgatctttctagcaaaacacagctgttacaggatgtacaagatgaaaacaaattgtttaagtcccaaattgagcagcttaaacaacaaaactaccaacaggcatcttcttttccccctcatgaagaattattaaaagtaatttcagaaagagagaaagaaataagtggtctctggaatgagttagattctttgaaggatgcagttgaacaccagaggaagaaaaacaatgaaaggcagcaacaggtggaagctgttgagttggaggctaaagaagttctcaaaaaattatttccaaaggtgtctgtcccttctaatttgagttatggtgaatggttgcatggatttgaaaaaaaggcaaaagaatgtatggctggaacttcagggtcagaggaggttaaggttctagagcacaagttgaaagaagctgatgaaatgcacacattgttacagctagagtgtgaaaaatacaaatccgtccttgcagaaacagaaggaattttacagaagctacagagaagtgttgagcaagaagaaaataaatggaaagttaaggtcgatgaatcacacaagactattaaacagatgcagtcatcatttacatcttcagaacaagagctagagcgattaagaagcgaaaataaggatattgaaaatctgagaagagaacgagaacatttggaaatggaactagaaaaggcagagatggaacgatctacctatgttacagaagtcagagagttgaaggcacagttaaatgaaacactcacaaaacttagaactgaacaaaatgaaagacagaaggtagctggtgatttgcataaggctcaacagtcactggagcttatccagtcaaaaatagtaaaagctgctggagacactactgttattgaaaatagtgatgtttccccagaaacggagtcttctgagaaggagacaatgtctgtaagtctaaatcagactgtaacacagttacagcagttgcttcaggcggtaaaccaacagctcacaaaggagaaagagcactaccaggtgttagagtgaagtaattgggaaactgttcatttgaggataaaaaaggcattgtattatattttgccaaattaaagccttatttatgttttcaccctttctactttgtcagaaacactgaacagagttttgtcttttctaatccttgttagactactgatttaaagaaggaaaaaaaaagccaactctgtagacaccttcagagtttagttttataataaaaactgtttgaataattagacctttacattcctgaagataaacatgtaatcttttatcttattttgctcaataaaattgttcagaagatcaaagtggtaaagacaatgtaaaatttaacattttaatactgatgttgtacactgttttacttaacattttgggaagtaactgcctctgacttcaactcaagaaaacacttttttgttgctaatgtaatcggtttttgtaatggcgtcacaaataaaaggatgcttattattc

SEQ ID NO: 1352 - DNA, 2334 bp, Homo sapiens
agacacctctgccctcaccatgagcctctggcagcccctggtcctggtgctcctggtgctgggctgctgctttgctgcccccagacagcgccagtccacccttgtgctcttccctggagacctgagaaccaatctcaccgacaggcagctggcagaggaatacctgtaccgctatggttacactcgggtggcagagatgcgtggagagtcgaaatctctggggcctgcgctgctgcttctccagaagcaactgtccctgcccgagaccggtgagctggatagcgccacgctgaaggccatgcgaaccccacggtgcggggtcccagacctgggcagattccaaacctttgagggcgacctcaagtggcaccaccacaacatcacctattggatccaaaactactcggaagacttgccgcgggcggtgattgacgacgcctttgcccgcgccttcgcactgtggagcgcggtgacgccgctcaccttcactcgcgtgtacagccgggacgcagacatcgtcatccagtttggtgtcgcggagcacggagacgggtatcccttcgacgggaaggacgggctcctggcacacgcctttcctcctggccccggcattcagggagacgcccatttcgacgatgacgagttgtggtccctgggcaagggcgtcgtggttccaactcggtttggaaacgcagatggcgcggcctgccacttccccttcatcttcgagggccgctcctactctgcctgcaccaccgacggtcgctccgacggcttgccctggtgcagtaccacggccaactacgacaccgacgaccggtttggcttctgccccagcgagagactctacacccgggacggcaatgctgatgggaaaccctgccagtttccattcatcttccaaggccaatcctactccgcctgcaccacggacggtcgctccgacggctaccgctggtgcgccaccaccgccaactacgaccgggacaagctcttcggcttctgcccgacccgagctgactcgacggtgatggggggcaactcggcgggggagctgtgcgtcttccccttcactttcctgggtaaggagtactcgacctgtaccagcgagggccgcggagatgggcgcctctggtgcgctaccacctcgaactttgacagcgacaagaagtggggcttctgcccggaccaaggatacagtttgttcctcgtggcggcgcatgagttcggccacgcgctgggcttagatcattcctcagtgccggaggcgctcatgtaccctatgtaccgcttcactgaggggccccccttgcataaggacgacgtgaatggcatccggcacctctatggtcctcgccctgaacctgagccacggcctccaaccaccaccacaccgcagcccacggctcccccgacggtctgccccaccggaccccccactgtccacccctcagagcgccccacagctggccccacaggtcccccctcagctggccccacaggtccccccactgctggcccttctacggccactactgtgcctttgagtccggtggacgatgcctgcaacgtgaacatcttcgacgccatcgcggagattgggaaccagctgtatttgttcaaggatgggaagtactggcgattctctgagggcagggggagccggccgcagggccccttccttatcgccgacaagtggcccgcgctgccccgcaagctggactcggtctttgaggagccgctctccaagaagcttttcttcttctctgggcgccaggtgtgggtgtacacaggcgcgtcggtgctgggcccgaggcgtctggacaagctgggcctgggagccgacgtggcccaggtgaccggggccctccggagtggcagggggaagatgctgctgttcagcgggcggcgcctctggaggttcgacgtgaaggcgcagatggtggatccccggagcgccagcgaggtggaccggatgttccccggggtgcctttggacacgcacgacgtcttccagtaccgagagaaagcctatttctgccaggaccgcttctactggcgcgtgagttcccggagtgagttgaaccaggtggaccaagtgggctacgtgacctatgacatcctgcagtgccctgaggactagggctcccgtcctgctttgcagtgccatgtaaatccccactgggaccaaccctggggaaggagccagtttgccggatacaaactggtattctgttctggaggaaagggaggagtggaggtgggctgggccctctcttctcacctttgttttttgttggagtgtttctaataaacttggattctctaaccttt

SEQ ID NO: 1353 - DNA, 3558 bp, Homo sapiens
cagaccccagttcgccgactaagcagaagaaagatcaaaaaccggaaaagaggagaagagcaaacaggcactttgaggaacaatcccctttaactccaagccgacagcggtctaggaattcaagttcagtgcctaccgaagacaaaggcgccccgagggagtggcggtgcgaccccagggcgtgggcccggccgcggagcccacactgcccggctgacccggtggtctcggaccatgtctcccgccccaagacccccccgttgtctcctgctccccctgctcacgctcggcaccgcgctcgcctccctcggctcggcccaaagcagcagcttcagccccgaagcctggctacagcaatatggctacctgcctcccggggacctacgtacccacacacagcgctcaccccagtcactctcagcggccatcgctgccatgcagaagttttacggcttgcaagtaacaggcaaagctgatgcagacaccatgaaggccatgaggcgcccccgatgtggtgttccagacaagtttggggctgagatcaaggccaatgttcgaaggaagcgctacgccatccagggtctcaaatggcaacataatgaaatcactttctgcatccagaattacacccccaaggtgggcgagtatgccacatacgaggccattcgcaaggcgttccgcgtgtgggagagtgccacaccactgcgcttccgcgaggtgccctatgcctacatccgtgagggccatgagaagcaggccgacatcatgatcttctttgccgagggcttccatggcgacagcacgcccttcgatggtgagggcggcttcctggcccatgcctacttcccaggccccaacattggaggagacacccactttgactctgccgagccttggactgtcaggaatgaggatctgaatggaaatgacatcttcctggtggctgtgcacgagctgggccatgccctggggctcgagcattccagtgacccctcggccatcatggcacccttttaccagtggatggacacggagaattttgtgctgcccgatgatgaccgccggggcatccagcaactttatgggggtgagtcagggttccccaccaagatgccccctcaacccaggactacctcccggccttctgttcctgataaacccaaaaaccccacctatgggcccaacatctgtgacgggaactttgacaccgtggccatgctccgaggggagatgtttgtcttcaaggagcgctggttctggcgggtgaggaataaccaagtgatggatggatacccaatgcccattggccagttctggcggggcctgcctgcgtccatcaacactgcctacgagaggaaggatggcaaattcgtcttcttcaaaggagacaagcattgggtgtttgatgaggcgtccctggaacctggctaccccaagcacattaaggagctgggccgagggctgcctaccgacaagattgatgctgctctcttctggatgcccaatggaaagacctacttcttccgtggaaacaagtactaccgtttcaacgaagagctcagggcagtggatagcgagtaccccaagaacatcaaagtctgggaagggatccctgagtctcccagagggtcattcatgggcagcgatgaagtcttcacttacttctacaaggggaacaaatactggaaattcaacaaccagaagctgaaggtagaaccgggctaccccaagtcagccctgagggactggatgggctgcccatcgggaggccggccggatgaggggactgaggaggagacggaggtgatcatcattgaggtggacgaggagggcggcggggcggtgagcgcggctgccgtggtgctgcccgtgctgctgctgctcctggtgctggcggtgggccttgcagtcttcttcttcagacgccatgggacccccaggcgactgctctactgccagcgttccctgctggacaaggtctgacgcccaccgccggcccgcccactcctaccacaaggactttgcctctgaaggccagtggcagcaggtggtggtgggtgggctgctcccatcgtcccgagccccctccccgcagcctccttgcttctctctgtcccctggctggcctccttcaccctgaccgcctccctccctcctgccccggcattgcatcttccctagataggtcccctgagggctgagtgggagggcggccctttccagcctctgcccctcaggggaaccctgtagctttgtgtctgtccagccccatctgaatgtgttgggggctctgcacttgaaggcaggaccctcagacctcgctggtaaaggtcaaatggggtcatctgctccttttccatcccctgacataccttaacctctgaactctgacctcaggaggctctgggcactccagccctgaaagccccaggtgtacccaattggcagcctctcactactctttctggctaaaaggaatctaatcttgttgagggtagagaccctgagacagtgtgagggggtggggactgccaagccaccctaagaccttgggaggaaaactcagagagggtcttcgttgctcagtcagtcaagttcctcggagatctgcctctgcctcacctaccccagggaacttccaaggaaggagcctgagccactggggactaagtgggcagaagaaacccttggcagccctgtgcctctcgaatgttagccttggatggggctttcacagttagaagagctgaaaccaggggtgcagctgtcaggtagggtggggccggtgggagaggcccgggtcagagccctgggggtgagcctgaaggccacagagaaagaaccttgcccaaactcaggcagctggggctgaggcccaaaggcagaacagccagagggggcaggaggggaccaaaaaggaaaatgaggacgtgcagcagcattggaaggctggggccgggcaggccaggccaagccaagcagggggccacagggtgggctgtggagctctcaggaagggccctgaggaaggcacacttgctcctgttggtccctgtccttgctgcccaggcagcgtggaggggaagggtagggcagccagagaaaggagcagagaaggcacacaaacgaggaatgaggggcttcacgagaggccacagggcctggctggccacgctgtcccggcctgctcaccatctcagtgaggggcaggagctggggctcgcttaggctgggtccacgcttccctggtgccagcacccctcaagcctgtctcaccagtggcctgccctctcgctcccccacccagcccacccattgaagtctccttgggccaccaaaggtggtggccatggtaccggggacttgggagagtgagacccagtggagggagcaagaggagagggatgtcgggggggtggggcacggggtaggggaaatggggtgaacggtgctggcagttcggctagatttctgtcttgtttgtttttttgttttgtttaatgtatatttttattataattattatatatgaattccaaaaaaaaaaaaaaaaaaaaa

SEQ ID NO: 1354 - DNA, 4666 bp, Homo sapiens
cgagactcagccagaggagtacggattaaggggccgaagaaagaggagtgaggcaggggagcgaggcggacgctccgagcgcatcggactcacctgggccggcggcgagcggcgagtacgagtggactcttgccctccgcagcatgcgccccgcctgctaagtcgccgccgtctcgccctcacctagcaccgccaatcccgcctggatggagtcccctctagggttcccattggctcctgtgagtgcttgggtgttcgggagcctgtttttggcggaggggaaccaacttttgaagttcgcccagaagactgcgttccagccccagttccccggcagcgggacccggcgaagacgcgaccgcggcgcgagtcaccatgggaagcaaaggtgtctaccagtaccactggcaaagccacaatgtcaagcacagtggtgtggacgacatggtgctactgtccaagatcacagagaactccatcgtggagaatctgaagaagagatacatggatgactacatttttacatatataggatctgtattaatctcagtcaaccctttcaagcagatgccatattttggggaaaaggaaattgaaatgtaccaaggagcggcacagtatgaaaacccaccacatatctatgcccttgcagataatatgtacagaaacatgatcattgacagagagaaccagtgcgtcattatcagtggtgaaagtggtgctggaaaaacagtggctgccaaatatatcatgagctacatctccagagtgtctggaggagggaccaaagtccagcacgtgaaggacattatcctgcagtccaacccgctgctggaggccttcgggaacgccaagaccgtccggaacaacaactccagccgatttggaaaatactttgaaatccagttcagtccaggtggggaaccagatggtggaaagatctccaacttccttctggaaaaatctagggtggtgatgaggaacccaggagagcggagttttcacatattttaccagctcatcgagggcgcctctgcagagcagaaacacagccttggcatcaccagcatggactattattactacctgagcctctcgggctcatacaaggttgatgacattgacgacaggcgggagtttcaggaaactctgcacgccatgaatgtgattgggatctttgcagaagagcaaacgctggtgttgcagatagtggcgggtattctccacctgggaaacatcagcttcaaagaagttggcaactacgcggctgtggagagtgaagagtttttagcttttcctgcatatctgctagggataaaccaggaccggttgaaagaaaagctaacaagccggcagatggatagcaagtggggaggcaaatccgaatccatccacgtgaccctcaacgtagagcaggcctgttacacccgggatgcgctcgccaaggccctgcacgcccgggtctttgatttcttggtagattccatcaataaagccatggagaaagaccatgaagaatacaacattggcgtcctagacatctatggctttgaaatattccagaaaaatggctttgaacagttttgtatcaattttgttaatgaaaaactgcagcagatttttattgaactgacattaaaggcagaacaggaagaatatgttcaagagggaataagatggacacccattgagtactttaataataaaatcgtatgtgacctcatagagaacaaagtgaaccctcctggcatcatgagcatcctggatgacgtgtgcgccacgatgcatgcggtgggtgagggggcagatcagacgctgctccagaaacttcagatgcagattgggagtcatgagcacttcaacagttggaaccaaggcttcatcattcatcattatgctgggaaggtatcctatgacatggatggcttttgtgaaaggaaccgggatgtgctttttatggatctcatcgagcttatgcagagcagcgagctgcctttcataaagtctttatttccggaaaatctgcaggctgacaagaaagggcgcccaactactgccggaagcaaaataaagaaacaagccaatgaccttgtgagcaccctgatgaaatgtacgccccactacattcgctgcatcaagccaaacgaaaccaagaagcccagagactgggaggaaagcagggtaaagcatcaagtcgaatatttgggtctgaaagagaacattcgagtgagaagagctggctatgcctatcggcgcatcttccaaaaattcctacagaggtatgccattctgaccaaagccacctggccttcttggcagggagaggagaagcaaggcgtcctgcacctgctgcagtcggtcaacatggacagcgaccagttccagctggggaggagtaaagtgttcatcaaagcccccgagtctctatttcttttagaagagatgagagagagaaagtatgatgggtatgctcgagtgatacagaaatcatggaggaaattcgtggcccggaagaaatacgttcaaatgagagaagaagcctcagacctcttattgaacaagaaggagagaaggagaaacagtattaacaggaactttataggggattatattgggatggaagagcacccagaactccagcagttcgtgggcaagagggagaagattgatttcgcagacacagtcaccaagtatgacaggaggttcaagggtgtaaagcgagacctgctccttaccccaaagtgcttgtacttaatcggacgagaaaaagtcaaacagggcccagacaagggcctggtgaaagaagtcctgaagcggaaaatcgagatagaacggatcttgtctgtgtccctcagtactatgcaggatgacatttttattctccatgagcaagagtatgacagtttgcttgaatctgtcttcaaaactgaattcctaagcctcttagcaaagcgttacgaggagaagacccagaagcaactacctctgaaattcagcaatacgcttgaactgaagttgaaaaaggaaaactggggccctggagtgcagggtgcgggctcccggcaagtgcagttccaccaagggtttggggacctggctgtcctcaagcccagtaacaaagtgctgcaggtcagcatcggacctggactgcccaagaactcccgtcctaccagaaggaacactacccaaaatacaggttattccagtgggactcaaaatgccaactacccagtgagagctgcccctcctcccccaggataccatcagaacggagtcatcagaaaccagtatgtgccatatccccatgctcctggaagccagaggtccattcagaaaagcctgtacacctccatggcccgcccgcccttgcctcggcagcagtctaccagttcagaccgagtgtcacagacgccagagagcctggatttcctcaaggtcccggaccagggagctgcaggggtcaggagacaaacaaccagtcggcctcccccagctgggggcagacccaagccccagcccaagcccaagcctcaggttccacagtgcaaggctttgtatgcctatgacgctcaggacacagacgaactcagctttaatgccaatgacattattgatattatcaaagaagatccttctggctggtggacgggtcgactacgaggcaagccagggctgttccccaacaactatgtgaccaagatctgaggtgcccgtgactctgacacatggggcagaggagctccaggcacagaccaggtgaggggatatttaggtgctccccttacaatccacaatgagcaattgcttctccaaggcctggagctattctggtaccttccccatggaggacactgaaaaggctgggttggggacagggagtatcactccataagtgatcctaaaaggtagcctcttcataggaaccaggaggacaaaaccaccatgcattaagatttatttattgtatttaaacctggtgagaggacaagtgaggtctgctcagaccttgtaggcttctatcaaaacagcaccctgcttgctcaccaggcctagagaatggctgtaggtggcggctgagaagtgcctttagttgaagagcacatttctttcatctctcttgtctatacctgatagacacattcctctctgccaccttccttcagggaggacccgccctctgcagactgggcttagcgtgagcaggcacttcccatgtacgtgccaagggtaagctggcctgctgagcccagggcgacagaggggcactggtttacactttgccgggaccatcagggccgccaagcaggtcaggggctgggggctggtcctgctggctttgatttctctgggtcttcaattagaatgtggctgggcccatattggtttgtgttaaatgctgtacttactacaagaatcttttttcaagcatgtacatttataaaaacaggatcatatactgtatatataaaaatcttgagatggtagaaacatgtatgaatgtactaagtagtattccactgtactcattcataaggtaggttttcttacaaaactcacaccaggtacttaaagatgtgctctgcttttttccaactacggagtgtcactgctttctaggtcagtccctgcagactcttctcaactctttccctataggaaacttact

SEQ ID NO: 1355 - DNA, 1550 bp, Homo sapiens
tggagctaagctgtttccagggtgacagagtggcgacctcggtggtcgattgagcaggtctgagaattgttcccaaagggttgtgcgtcaccgagtcgttggcgctgtcatggcgggtgtgctgaagaagaccactggccttgtgggattggctgtgtgcaatactcctcacgagaggctaagaatattgtacacaaagattcttgatgttcttgaggaaatccctaaaaatgcagcatatagaaagtatacagaacagattacaaatgagaagctggctatggttaaagcggaaccagatgttaaaaaattagaagaccaacttcaaggcggtcaattagaagaggtgattcttcaggctgaacatgaactaaatctggcaagaaaaatgagggaatggaaactatgggagccattagtggaagagcctcctgccgatcagtggaaatggccaatataattattaagtgactttggtgtgttcatgggaaactgatgtaattaaatattctgttatattaagagcgtgttcttattactgacattttgtaatcaagaaaagtgatatagaaaatatgtaggagactgttaaaattggtgattatggtaatatggtcatgtgaatcaatttttgatttataaagtactcacacaagttgtttcaaagatgatatttctgtgaacagagaggccatgggaagatttgaaaattattaaagaaaaattcctacagattttcaatgcagagaccataatcaaaaagtaaactttctttagtagtatgttcaatacatcatttaattttttaagttatcctgaagaaggaaaggtccttaattattatagtctaaacaaatttatagattactgtttgaagtaaataatacgagtgaatattttcaaatgtgataaaatagcacaagtggctggtgataaaatttgaaattatggttaacctcagctgtgatcttatgtatgtaaagtgaaatttaaatagataattataggttgattacaaaatccatagtgtcattttattttagtcattattgaattataccatttactctgttttcttatagtcttaattttattatattttgttgttactgtattatatttgaaaaccttcaaattagaatacattgtacagttaaagaaattgacttggtacttaaaagaaagatttcccattgcatacaggttattggagaaattttccttttgttgcatttgtggaagttagttttctggcccgtggcctttaattttcttaatcaacctaattacatcaggatagaggtagagtttctgtaaaagaagagacattaagagttcctgaaatttatatctggcataccgataggcttatattcaaaacatcttagtcatacgaccataaattaaaagtggagtcactaaatagtttgcagtacgtttctaatataagtgtaggtgggtatcaaaacaagacaaatgctgttcagggaaagaagttggcaagcttaaggttaaacaaaaataaaattacatgtgttttcgccttccta

SEQ ID NO: 1356 - DNA, 1343 bp, Homo sapiens
ggcacgagggtgggaaaagatggcggctgccgcacaatcccgggttgtccgggtcctgtcaatgtcacgttctgccattactgcaatagccacatctgtgtgtcacggcccaccctgtcgccagcttcatcatgccctcatgcctcatgggaaaggtggacgttcctcagtcagtgggattgtggccactgtgtttggagcaacaggattcctggggcgatatgttgtcaaccaccttggacgcatggggtcacaggtaatcataccctatcggtgtgataaatatgacatcatgcaccttcgtcccatgggtgacctgggccagcttctgtttctggaatgggacgcgagagataaagattctatccgacgagtagtacaacacagcaatgtggtcatcaatcttattggacgagactgggaaaccaaaaactttgattttgaggatgtttttgtgaagattccccaagcaattgctcaactgtccaaggaagctggagttgaaaaattcattcatgtttcacatctgaatgcgaatattaaaagctcttctagatatttgagaaataaggctgttggagagaaagtagtgagagatgcatttccggaagccattatcgtaaagccgtcggacatctttggaagagaggatagattccttaattcttttgcaagtatgcatcggtttggtcctataccccttggttccttgggctggaagacagttaaacaaccagtatatgtcgtagatgtatccaaaggaattgttaatgcagttaaggatcctgatgccaatgggaaatcctttgctttcgttggtcccagtcggtacctccttttccacctggtgaagtacatctttgctgtggctcacagattgttcctcccattccccttgccgctttttgcctatcgatgggtagcaagagtctttgaaataagcccatttgagccctggataacaagggataaagtggagcggatgcacatcacagacatgaaattgcctcacctgcctggcttagaagaccttggtattcaggcaacaccactggaactcaaggccattgaggtgctgcggcgtcatcgcacttaccgctggctgtctgctgaaattgaggatgtgaagccggccaagaccgtcaacatttagtgcctcctgagcagctcttggttttggcgtcttttgggtcggcccatgtggtttgagcacccagccaggcggtctctttagaggatcctgtacacagttccactattaaaacatttcaggttgaaaaaaaaaaaaaaaaaaaaaaaaaaaaaaaaaaaaaaaaaaaaaaaaaaaaaaaaaaaaaaaaaaa

SEQ ID NO: 1357 - DNA, 2263 bp, Homo sapiens
gcacgagaagaatttaggaatttctgattcatttaaaggatttacaaattcatcaacccctgaaaactaaagcaaattgaacaggaaaaaaaaaaagaagatgggttttttaagtccaatatatgttattttcttcttttttggagtcaaagtacattgccaatatgaaacttatcagtgggatgaagactatgaccaagagccagatgatgattaccaaacaggattcccatttcgtcaaaatgtagactacggagttccttttcatcagtatactttaggctgtgtcagtgaatgcttctgtccaactaactttccatcatcaatgtactgtgataatcgcaaactcaagactatcccaaatattccgatgcacattcagcaactctaccttcagttcaatgaaattgaggctgtgactgcaaattcattcatcaatgcaactcatcttaaagaaattaacctcagccacaacaaaattaaatctcaaaagattgattatggtgtgtttgctaagcttccaaatctactacaacttcatctagagcataataatttagaagaatttccatttcctcttcctaaatctctggaaagactccttcttggttacaatgaaatctccaaactgcagacaaatgctatggatgggctagtaaacttgaccatgcttgatctctgttataattatcttcatgattctctgctaaaagacaaaatctttgccaaaatggaaaaactaatgcagctcaacctctgcagtaacagattagaatcaatgcctcctggtttgccttcttcacttatgtatctgtctttagaaaataattcaatttcttctatacccgaaaaatacttcgacaaacttccaaaacttcatactctaagaatgtcacacaacaaactacaagacatcccatataatatttttaatcttcccaacattgtagaactcagtgttggacacaacaaattgaagcaagcattctatattccaagaaatttggaacacctatacctacaaaataatgaaatagaaaagatgaatcttacagtgatgtgtccttctattgacccactacattaccaccatttaacatacattcgtgtggaccaaaataaactaaaagaaccaataagctcatacatcttcttctgcttccctcatatacacactatttattatggtgaacaacgaagcactaatggtcaaacaatacaactaaagacacaagttttcaggagatttccagatgatgatgatgaaagtgaagatcacgatgatcctgacaatgctcatgagagcccagaacaagaaggagcagaagggcactttgaccttcattattatgaaaatcaagaatagcaagaaactatataggtatacacttacgacttcacaaaacctatacttaatatagtaaatctaagtaaacatgtattactcaaagtaatatatttagaattatgtattagtataagatcagaattgaatttaagttgttggtgacatctgcatcatttcataggattagaacttactcaaaataatgtaaatctttaaaaatataaattagaatgacaagtgggaatcataaattaaacgttaatggtttcttatgctctttttaaatatagaaatatcatgttaaagaaagtgagtgtatcatttctattaacagtaatttttctaaaaatgaggaaggaagtagcattagcagtaaagacccacaggccacgaccctcctgatcactctgaggacaatatttaaatgacaggaaggtatattaatgtaacaagcattcatttaaggaatagaccattttctctgacctcttcttcaggaaagctttcacactggtatttgtgatctcaccattatgacatccatccccctagctcaccacatagcacatagaatgatatttttgatttgtaagaggccatccaggtactaaggacccaaggcatacagattcacaaaattaactaatctttttgcctcagaataccaaaacaacaaaattataaagctgttatttggacaactaaaaaacaccaaactatctcattgcaatttgtattttagcagatttcagcaactatcctaaacaatgttattgtgttccattttaactgggataaatgtttttgtaaaaatacaaccatagaaaggcctctttgttacaaaatgatttgcaaagaaataactgctttgtttgcaagattaaattagtgttggcaaaataaagttctaaagat

SEQ ID NO: 1358 - DNA, 1362 bp, Homo sapiens
ctcgcgcctgcagtttttggctttcacccccaaccagtgaccaaagacttgaccactcaaagtccagctccccagaacactgctcgacatggacaccggtgtgattgaaggtggattaaatgtcactctcaccatccggctacttatgcatggaaaggaagttggcagtatcatcggaaagaaaggagaatcagttaagaagatgcgcgaggagagtggtgcacgtatcaacatctcagaagggaattgtcctgagagaattatcactttggctggacccactaatgccatcttcaaagcctttgctatgatcattgacaaactggaagaggacataagcagctctatgaccaatagcacagctgccagtagacccccggtcaccctgaggctggtggtccctgctagtcagtgtggctctctcattggaaaaggtggatgcaagatcaaggaaatacgagagagtacaggggctcaggtccaggtggcaggggatatgctacccaactcaactgagcgggccatcactattgctggcattccacaatccatcattgagtgtgtcaaacagatctgcgtggtcatgttggagactctctcccagtcccccccgaagggcgtgaccatcccgtaccggcccaagccgtccagctctccggtcatctttgcaggtggtcaggacaggtacagcacaggcagcgacagtgcgagctttccccacaccaccccgtccatgtgcctcaaccctgacctggagggaccacctctagaggcctataccattcaaggacagtatgccattccacagccagatttgaccaagctgcaccagttggcaatgcaacagtctcattttcccatgacgcatggcaacaccggattcagtggcattgaatccagctctccagaggtgaaaggctattgggcaggtttggatgcatctgctcagactacttctcatgaactcaccattccaaacgatttgattggctgcataatcgggcgtcaaggcgccaaaatcaatgagatccgtcagatgtctggggcgcagatcaaaattgcgaacccagtggaaggatctactgataggcaggttaccatcactggatctgctgccagcattagcctggctcaatatctaatcaatgtcaggctttcctcggagacgggtggcatggggagcagctagaacaatgcagattcatccataatccctttctgctgttcaccaccacccatgatccatctgtgtagtttctgaacagtcagcgattccaggttttaaatagtttgtaaattttcagtttctacacactttatcatccactcgtgattttttaattaaagcgttttaattccttt

SEQ ID NO: 1359 - DNA, 847 bp, Homo sapiens
acagcgagcggagccgcggtccggacggcagcgcgtgccccgagctctccgcctccccccgcccgccagccgaggcagctcgagcccagtccgcggccccagcagcagcgccgagagcagccccagtagcagcgccatggccgggtggaacgcctacatcgacaacctcatggcggacgggacctgtcaggacgcggccatcgtgggctacaaggactcgccctccgtctgggccgccgtccccgggaaaacgttcgtcaacatcacgccagctgaggtgggtgtcctggttggcaaagaccggtcaagtttttacgtgaatgggctgacacttgggggccagaaatgttcggtgatccgggactcactgctgcaggatggggaatttagcatggatcttcgtaccaagagcaccggtggggcccccaccttcaatgtcactgtcaccaagactgacaagacgctagtcctgctgatgggcaaagaaggtgtccacggtggtttgatcaacaagaaatgttatgaaatggcctcccaccttcggcgttcccagtactgacctcgtctgtcccttccccttcaccgctccccacagctttgcacccctttcctccccatacacacacaaaccattttattttttgggccattaccccataccccttattgctgccaaaaccacatgggctgggggccagggctggatggacagacacctccccctacccatatccctcccgtgtgtggttggaaaacttttgttttttggggttttttttttctgaataaaaaagattctactaacaaaaaaaaaaaaaaaaaaaaaaaaaaaaaaaaaaaaaaaaaa

SEQ ID NO: 1360 - DNA, 1194 bp, Homo sapiens
atggactctctagcaacatcaatcaaccagtttgccctggagttgagcaaaaagctagctgaatctgctcagggtaaaaatatcttcttttcttcctggagcatctcaacttccttgaccatagtgtatttgggcgccaaaggtaccactgcagcccaaatggcccaggtgcttcaatttaacagagaccagggagtcaaatgtgaccctgaaagtgaaaaaaaaaggaaaatggaattcaacttgagcaactcggaagaaatacactctgatttccaaacacttatctcagaaatcctcaagcccaacgatgactacttacttaaaacagccaatgcgatatatggagagaaaacgtatgcatttcacaataaatatttagaagacatgaaaacatattttggtgcagaacctcagcctgttaactttgtggaagcttctgatcaaatcagaaaggacatcaactcttgggttgaaagacagaccgagggtaaaatccagaatctcctgcctgatgactctgtggattccacaaccaggatgattctggtgaacgccctatactttaaaggaatctgggaacatcaattcttagtgcaaaacaccacagaaaagccttttagaataaacgagactacaagcaaaccagtgcaaatgatgtttatgaagaaaaagcttcacatttttcacatagaaaagccaaaagcagtgggccttcaactctactacaaaagccgtgacctcagcctgcttatactactgccagaagacattaatgggctggaacagctggaaaaggccatcacctatgagaagctgaatgagtggaccagtgcagacatgatggagttgtatgaagtgcagctacaccttcccaagttcaagctggaagacagttatgatctcaagtcaaccctgagcagtatggggatgagtgatgccttcagccaaagcaaagctgatttctcaggaatgtcttcagcaagaaacctatttttgtccaatgttttccataaggcttttgtggaaataaatgaacaaggtactgaagctgcagctggcagtgggagtgagatagatatacgaattagagtcccatccattgaattcaatgcaaatcacccattcctcttcttcatcaggcacaataaaaccaacaccattcttttttatggaagattatgctccccctaa

SEQ ID NO: 1361 - DNA, 1559 bp, Homo sapiens
gcggagcacagtccgccgagcacaagctccagcatcccgtcaggggttgcaggtgtgtgggaggcttgaaactgttacaatatggctttccttggactcttctctttgctggttctgcaaagtatggctacaggggccactttccctgaggaagccattgctgacttgtcagtgaatatgtataatcgtcttagagccactggtgaagatgaaaatattctcttctctccattgagtattgctcttgcaatgggaatgatggaacttggggcccaaggatctacccagaaagaaatccgccactcaatgggatatgacagcctaaaaaatggtgaagaattttctttcttgaaggagttttcaaacatggtaactgctaaagagagccaatatgtgatgaaaattgccaattccttgtttgtgcaaaatggatttcatgtcaatgaggagtttttgcaaatgatgaaaaaatattttaatgcagcagtaaatcatgtggacttcagtcaaaatgtagccgtggccaactacatcaataagtgggtggagaataacacaaacaatctggtgaaagatttggtatccccaagggattttgatgctgccacttatctggccctcattaatgctgtctatttcaaggggaactggaagtcgcagtttaggcctgaaaatactagaaccttttctttcactaaagatgatgaaagtgaagtccaaattccaatgatgtatcagcaaggagaattttattatggggaatttagtgatggctccaatgaagctggtggtatctaccaagtcctagaaataccatatgaaggagatgaaataagcatgatgctggtgctgtccagacaggaagttcctcttgctactctggagccattagtcaaagcacagctggttgaagaatgggcaaactctgtgaagaagcaaaaagtagaagtatacctgcccaggttcacagtggaacaggaaattgatttaaaagatgttttgaaggctcttggaataactgaaattttcatcaaagatgcaaatttgacaggcctctctgataataaggagatttttctttccaaagcaattcacaagtccttcctagaggttaatgaagaaggctcagaagctgctgctgtctcaggaatgattgcaattagtaggatggctgtgctgtatcctcaagttattgtcgaccatccatttttctttcttatcagaaacaggagaactggtacaattctattcatgggacgagtcatgcatcctgaaacaatgaacacaagtggacatgatttcgaagaactttaagttactttatttgaataacaaggaaaacagtaactaagcacattatgtttgcaactggtatatatttaggatttgtgttttacagtatatcttaagataatatttaaaatagttccagataaaaacaatatatgtaaattataagtaacttgtcaaggaatgttatcagtattaagctaatggtcctgttatgtcattgtgtttgtgtgctgttgtttaaaataaaagtacctattgaacatgtg

SEQ ID NO: 1362 - DNA, 540 bp, Homo sapiens
cctggactagccgggttgtatttggaaacgcggagtgagtttttccgtgctgtgtaggggctaacaatggacacccagaaggacgttcaacctccaaagcagcaaccaatgatatatatctgtggagagtgtcacacagaaaatgaaataaaatctagggatccaatcagatgcagagaatgtggatacagaataatgtacaagaaaaggactaaaagattggtcgtttttgatgctcgatgaatgctgggaattcagaggaatgtcttcacttatacttggatttgctctcttcccatttctgattgttgtatagctttcgattttgcttacagtagttcccccttatcttcgggagatacattccaaggcccccagtgaactcctgaaacctcaaacagtaccaaacctttatacactgttttttccatatatatatacctatgataaagtataatgtataaattaagcatagcaagagattaataataatgtaatagaacaatgataacatactataataaaagttatgtgaatgtg

SEQ ID NO: 1363 - DNA, 2060 bp, Homo sapiens
cacccgcactgcagtctccagcctgagccatgggccgccgagccctcctgctcctgcttctgtcttttctggcgccctgggccaccatagccctccggccggccttaagggccctcggcagcctacacttgccaaccaaccccacatccctcccggctgtagccaagaactattcggttctctacttccaacagaaggttgatcattttggatttaatactgtgaaaacttttaatcagcggtacctagtagctgataaatactggaagaaaaatggtggatcaatacttttctacactggtaatgaaggggacattatctggttttgtaataacacggggttcatgtgggatgtggctgaggaactgaaagctatgttggtgtttgctgaacatcgatactatggagagtctctcccctttggtgacaactcattcaaggattccagacacttgaatttcctgacatcagaacaagctctggctgattttgcagagttaatcaaacacttgaaaagaacaatcccaggagctgaaaatcaacctgtcattgccataggaggctcctatggtggcatgcttgccgcctggtttaggatgaaatatcctcatatggtagttggagctcttgcagcttctgcccctatctggcagtttgaggatttagtaccttgtggtgtatttatgaagatcgtaactacagattttaggaaaagcggtccacattgttcagagagcatccacaggtcctgggatgccattaatcgactctcaaatactggcagtggtttgcagtggcttactggagcccttcacttatgcagcccattaacttctcaggacatccaacatttgaaagactggatctctgaaacctgggtgaatctggcaatggtggactatccttatgcctctaactttttacagcctttgcctgcttggcctatcaaggtagtgtgccagtatttgaaaaatcccaacgtatctgattcactgctgctgcagaatattttccaagctctgaatgtatattacaattattcgggccaggtgaaatgcctgaatatttcagagacagcaactagcagtctgggaacactgggttggagctatcaggcctgcacagaagtagtcatgcccttttgtactaatggtgtcgatgacatgtttgaacctcactcatggaacttaaaggaactttctgatgactgttttcaacagtggggtgtgagaccaaggccctcctggatcactactatgtatggaggcaaaaacattagttcacacacaaacattgttttcagcaatggtgaactagacccctggtcaggaggtggagtaactaaggatatcacagacactctggttgcagtcaccatctcagagggggcccaccacttagatctccgcaccaagaatgccttggatcctatgtctgtgctgttagcccgctccttggaagttagacatatgaagaattggatcagagatttctatgacagtgcaggaaagcagcactgagaaacttttgattgttttcaatttcttcttttatgttcacaccaccacattcccattcactttgattttctacatgtaattaccttcttttgtttatcattagatttgatggggccaaagttgagatagaatagagggtgatgacggtaagagcaagtgtcccatgaatgtgatttcctgggttctcactgtctttgcaccacgtctaggaagaatcttcttgatagctctcccacaccatcagtggccctcataactggagtagagttcctggttgcttttcataagagggagagttactttctttgtatctctgcaagcagagatttctctttggttttgaggttgaagtgtctttggcccatttgtaagtccccatccctaccctacacaaagtaaaagcagaagatagataaaaaatgatgtaattgcagctggtaggatgtctggtgcccaatcccaggaagtgagagccatttcttttgtactggatttaatgactttgaactgtgctgtaaataaataatacagctggacctt

SEQ ID NO: 1364 - DNA, 969 bp, Homo sapiens
ggatttccgggctccatggcaagatcccttctcctgcccctgcagatcctactgctatccttagccttggaaactgcaggagaagaagcccagggtgacaagattattgatggcgccccatgtgcaagaggctcccacccatggcaggtggccctgctcagtggcaatcagctccactgcggaggcgtcctggtcaatgagcgctgggtgctcactgccgcccactgcaagatgaatgagtacaccgtgcacctgggcagtgatacgctgggcgacaggagagctcagaggatcaaggcctcgaagtcattccgccaccccggctactccacacagacccatgttaatgacctcatgctcgtgaagctcaatagccaggccaggctgtcatccatggtgaagaaagtcaggctgccctcccgctgcgaaccccctggaaccacctgtactgtctccggctggggcactaccacgagcccagatgtgacctttccctctgacctcatgtgcgtggatgtcaagctcatctccccccaggactgcacgaaggtttacaaggacttactggaaaattccatgctgtgcgctggcatccccgactccaagaaaaacgcctgcaatggtgactcagggggaccgttggtgtgcagaggtaccctgcaaggtctggtgtcctggggaactttcccttgcggccaacccaatgacccaggagtctacactcaagtgtgcaagttcaccaagtggataaatgacaccatgaaaaagcatcgctaacgccacactgagttaattaactgtgtgcttccaacagaaaatgcacaggagtgaggacgccgatgacctatgaagtcaaatttgactttacctttcctcaaagatatatttaaacctcatgccctgttgataaaccaatcaaattggtaaagacctaaaaccaaaacaaataaagaaacacaaaaccctcaa

SEQ ID NO: 1365 - DNA, 1821 bp, Homo sapiens
cccctgggccctgctccctgccctcctgggcagccagggcagccaggacggcaccaagggagctgccccatggacagggccccacagagacagcaccgagcctcacgggagctgctggctgcaaagaagacccacacctcacaaattgaagtgatcccttgcaaaatctgtggggacaagtcgtctgggatccactacggggttatcacctgtgaggggtgcaagggcttcttccgccggagccagcgctgtaacgcggcctactcctgcacccgtcagcagaactgccccatcgaccgcaccagccgaaaccgatgccagcactgccgcctgcagaaatgcctggcgctgggcatgtcccgagatgctgtcaagttcggccgcatgtccaagaagcagagggacagcctgcatgcagaagtgcagaaacagctgcagcagcggcaacagcagcaacaggaaccagtggtcaagacccctccagcaggggcccaaggagcagataccctcacctacaccttggggctcccagacgggcagctgcccctgggctcctcgcctgacctgcctgaggcttctgcctgtccccctggcctcctgaaagcctcaggctctgggccctcatattccaacaacttggccaaggcagggctcaatggggcctcatgccaccttgaatacagccctgagcggggcaaggctgagggcagagagagcttctatagcacaggcagccagctgacccctgaccgatgtggacttcgttttgaggaacacaggcatcctgggcttggggaactgggacagggcccagacagctacggcagccccagtttccgcagcacaccggaggcaccctatgcctccctgacagagatagagcacctggtgcagagcgtctgcaagtcctacagggagacatgccagctgcggctggaggacctgctgcggcagcgctccaacatcttctcccgggaggaagtgactggctaccagaggaagtccatgtgggagatgtgggaacggtgtgcccaccacctcaccgaggccattcagtacgtggtggagttcgccaagaggctctcaggctttatggagctctgccagaatgaccagattgtgcttctcaaagcaggagcaatggaagtggtgctggttaggatgtgccgggcctacaatgctgacaaccgcacggtcttttttgaaggcaaatacggtggcatggagctgttccgagccttgggctgcagcgagctcatcagctccatctttgacttctcccactccctaagtgccttgcacttttccgaggatgagattgccctctacacagcccttgttctcatcaatgcccatcggccagggctccaagagaaaaggaaagtagaacagctgcagtacaatctggagctggcctttcatcatcatctctgcaagactcatcgccaaagcatcctggcaaagctgccacccaaggggaagcttcggagcctgtgtagccagcatgtggaaaggctgcagatcttccagcacctccaccccatcgtggtccaagccgctttccctccactctacaaggagctcttcagcactgaaaccgagtcacctgtggggctgtccaagtgacctggaagagggactccttgcctctccctatggcctgctggcccacctccctggaccccgttccaccctcacccttttcctttcccatgaaccctggagggtggtccccaccagctctttggaagtgagcagatgctgcggctggctttctgtcagcaggccggcctggcagtgggacaatcgccagagggtggg

SEQ ID NO: 1366 - DNA, 3071 bp, Homo sapiens
ccgccattttgtgagaagcaaggtggcctccacgtttcctgagcgtcttcttcgcttttgcctcgaccgccccttgaccacagacatgtctcgggatcggttccggagtcgtggcggtggcggtggtggcttccacaggcgtggaggaggcggcggccgcggcggcctccacgacttccgttctccgccgcccggcatgggcctcaatcagaatcgcggccccatgggtcctggcccgggccagagcggccctaagcctccgatcccgccaccgcctccacaccaacagcagcaacagccaccaccgcagcagccaccgccgcagcagccgccaccgcatcagccgccgccgcatccacagccgcatcagcagcagcagccgccgccaccgccgcaggactcttccaagcccgtcgttgctcagggacccggccccgctcccggagtaggcagcgcaccaccagcctccagctcggccccgcccgccactccaccaacctcgggggccccgccagggtccgggccaggcccgactccgaccccgccgcctgcagtcacctcggcccctcccggggcgccgccacccaccccgccaagcagcggggtccctaccacacctcctcaggccggaggcccgccgcctccgcccgcggcagtcccgggcccgggtccagggcctaagcagggcccaggtccgggtggtcccaaaggcggcaaaatgcctggcgggccgaagccaggtggcggcccgggcctaagtacgcctggcggccaccccaagccgccgcatcgaggcggcggggagccccgcgggggccgccagcaccacccgccctaccaccagcagcatcaccaggggcccccgcccggcgggcccggcggccgcagcgaggagaagatctcggactcggaggggtttaaagccaatttgtctctcttgaggaggcctggagagaaaacttacacacagcgatgtcggttgtttgttgggaatctacctgctgatatcacggaggatgaattcaaaagactatttgctaaatatggagaaccaggagaagtttttatcaacaaaggcaaaggattcggatttattaagcttgaatctagagctttggctgaaattgccaaagccgaactggatgatacacccatgagaggtagacagcttcgagttcgctttgccacacatgctgctgccctttctgttcgtaatctttcaccttatgtttccaatgaactgttggaagaagcctttagccaatttggtcctattgaaagggctgttgtaatagtggatgatcgtggaagatctacagggaaaggcattgttgaatttgcttctaagccagcagcaagaaaggcatttgaacgatgcagtgaaggtgttttcttactgacgacaactcctcgtccagtcattgtggaaccacttgaacaactagatgatgaagatggtcttcctgaaaaacttgcccagaagaatccaatgtatcaaaaggagagagaaacccctcctcgttttgcccagcatggcacgtttgagtacgaatattctcagcgatggaagtctttggatgaaatggaaaaacagcaaagggaacaagttgaaaaaaacatgaaagatgcaaaagacaaattggaaagtgaaatggaagatgcctatcatgaacatcaggcaaatcttttgcgccaagatctgatgagacgacaggaagaattaagacgcatggaagaacttcacaatcaagaaatgcagaaacgtaaagaaatgcaattgaggcaagaggaggaacgacgtagaagagaggaagagatgatgattcgtcaacgtgagatggaagaacaaatgaggcgccaaagagaggaaagttacagccgaatgggctacatggatccacgggaaagagacatgcgaatgggtggcggaggagcaatgaacatgggagatccctatggttcaggaggccagaaatttccacctctaggaggtggtggtggcataggttatgaagctaatcctggcgttccaccagcaaccatgagtggttccatgatgggaagtgacatgcgtactgagcgctttgggcagggaggtgcggggcctgtgggtggacagggtcctagaggaatggggcctggaactccagcaggatatggtagagggagagaagagtacgaaggcccaaacaaaaaaccccgattttagatgtgatatttaggctttcattccagtttgttttgtttttttgtttagataccaatcttttaaattcttgcattttagtaagaaagctatctttttatggatgttagcagtttattgacctaatatttgtaaatggtctgtttgggcaggtaaaattatgtaatgcagtgtttggaacaggagaatttttttttcctttttatttctttattttttcttttttactgtataatgtccctcaagtttatggcagtgtaccttgtgccactgaatttccaaagtgtaccaatttttttttttttactgtgcttcaaataaatagaaaaatagttataatattggatcttcaactttgccattcatgcttctatgcatattaggctacgtattccacattgaaagcatgagagtgtctaggcctttgaatggcatatgccatttctgggaaatgcatctggaggctaagtattgctttctacaaataattgccccctttgttttaaaaagaagaaatgcatattgaagtagtttgatgatttgtttggcatataggaagcacgctggtgctaagtattttttaaatggttatgtaagcaaagctgaactgtaaatcttcaggaatatgtattaagattgtggaatgggtgtaagacaattggtagggggtgaaagtgggtttgattaaatggatcttttatggccctatgatctatcctttacttgaaagcttttgaaaagtggaaaggtcattttgttgcatttccccatttcttgtttttaaaagaccaacaaatctcaagccctataaatggcttgtattgaacttttacatttgaattaaagatgttaaacatgaaaaaaa

SEQ ID NO: 1367 - DNA, 2240 bp, Homo sapiens
ccccgcgggctgcagcgagccaggcatgctcactggcgcaggcccggcccgcagcccgagcaggaagcgccggcgtaggcggccccctgcgctgccagctggagccgggcggagccagcgccccggcgcagggtggctctgccagtccccgcgcgcctgggcggccgcacacgtgtccaggcgtcacgtccgcgcgcgcccccggggcttgcgtcagcggctgttccagaagcgggtgggccagggctctgcgcaccgctggggttcggggcccgggacgccgccgggaggagggcaccgcgcggggtccgacgcggaggcgtgctcggaacgccgggggctgcggagtgcatcagcgcggtccagccctccgcctgccgggcgccgagcgtctccgccgcccggacctgggctgggcgccgtggcgttgcctcggagctcgctgcccgcggggcgcgcaccgccttgacccgggcggccccgcggcaggcaggcgcccgcagttccatggttggttcggagcgcgatgagccgcccgtcctccaccggccccagcgctaataaaccctgcagcaagcagccgccgccgcagccccagcacactccgtccccggctgcgcccccggccgccgccaccatctcggctgcgggccccggctcgtccgcggtgcccgccgcggcggcggtgatctcgggccccggcggcggcggcggggccggcccggtgtccccgcagcaccacgagctgacctcgctcttcgagtgtccggtctgctttgactatgtcctgcctcctattctgcagtgccaggccgggcacctggtgtgtaaccaatgccgccagaagttgagctgctgcccgacgtgcaggggcgccctgacgcccagcatcaggaacctggctatggagaaggtggcctcggcagtcctgtttccctgtaagtatgccaccacgggctgttccctgaccctgcaccatacggagaaaccagaacatgaagacatatgtgaataccgcccctactcctgcccatgtcctggtgcttcctgcaagtggcaggggtccctggaagctgtgatgtcccatctcatgcacgcccacaagagcattaccacccttcaggaagaagacatcgtctttctagctacagacattaacttgccaggggctgtcgactgggtgatgatgcagtcatgttttggccatcacttcatgctggtgctggagaaacaagagaagtacgaaggccaccagcagttttttgccatcgtcctgctcattggcacccgcaagcaagccgagaactttgcctacagactggagttgaatgggaaccggcggagattgacctgggaggccacgccccgctcgattcatgacggtgtggctgcggccatcatgaacagcgactgccttgttttcgacacagccatagcacatctttttgcagataatgggaaccttggaatcaatgttactatttctacatgttgtccatgatgtgacttccgtaaaccttcaaaattatttgggcatactgctctatgtttaataaaggtttttatagatgttttattccatatgtcttcacaagtcaggacccacaattacccgtgttttgtttgaacagcagtgtcccatctggcttcgacccaacaaagttcattaacctgggatgaatggggttggcctgttggtgatttggatgctgttctgtgatctaaaacaactcttattgaattgtatttactccctaaacaacacttgacaggctgttgcacagggcttctatagatcagtgtgttaggaatgggaggccccttcctgcctgccttcccatattggtcccttgacattgacaaaagcacagtgactgtcagcagattcctttacttttgtttgtgggaggtaggaattgttttaatgcattttaaacagtgtttctgaaattggatggctggctaatagacactgaatcacccggagtgcttatcttaaaattgcagatttagggagcctgccaatttaacagtctcatcagtgatctttcaacagtaatgtttgagaattactgggttaaattgtggaaagggtccagattttaaaggtgctttaaggttgccctctgccgatactgtttgtctttctactgtttcatcccctaacttcccccaaccctcaaattaaaactagaactatagatccacatgaacgcacgcctgagatttggccactcacc

SEQ ID NO: 1368 - DNA, 3247 bp, Homo sapiens
gaggagctctgcgcggcgcggcgggcgatccgagccgggacgggctgcaggcgggggtgctgcagaggacacgaggcggcgggctggagacatggaccgcggcgagcaaggtctgctgagaacagacccagtccctgaggaaggagaagatgttgctgccacgatcagtgccacagagaccctctcggaagaggagcaggaagagctaagaagagaacttgcaaaggtagaagaagaaatccagactctgtctcaagtgttagcagcaaaagagaagcatctagcagagatcaagcggaaacttggaatcaattctctacaggaactaaaacagaacattgccaaagggtggcaagacgtgacagcaacatctgcttacaagaagacatctgaaaccttatcccaggctggacagaaggcctcagctgctttttcgtctgttggctcagtcatcaccaaaaagctggaagatgtaaaaaactccccaacttttaaatcatttgaagaaaaggtcgaaaacttaaagtctaaagtagggggaaccaagcctgctggtggtgattttggagaagtcttgaattcggctgcaaatgctagtgccaccaccacggagcctcttccagaaaagacacaggagagcctgtgagattcctacctttgttctgctacccactgccagatgctgcaagcgaggtccaagcacatcttgtcaacatgcattgccatgaatttctaccagatgtgcttttatttagctttacatattcctttgaccaaatagtttgtgggttaaacaaaatgaaaatatcttcacctctattcttgggaaacaccctttagtgtacatttatgttcctttatttaggaaacaccattataaaaacacttatagtaaatggggacattcactataatgatctaagaagctacagattgtcatagttgttttcctgctttacaaaattgctccagatctggaatgccagtttgacctttgtcttctataatatttcctttttttcccctctttgaatctctgtatatttgattcttaactaaaattgttctcttaaatattctgaatcctggtaattaaaagtttgggtgtattttctttacctccaaggaaagaactactagctacaaaaaatattttggaataagcattgttttggtataaggtacatattttggttgaagacaccagactgaagtaaacagctgtgcatccaatttattatagttttgtaagtaacaatatgtaatcaaacttctaggtgacttgagagtggaacctcctatatcattatttagcaccgtttgtgacagtaaccatttcagtgtattgtttattataccacttatatcaacttatttttcaccaggttaaaattttaatttctacaaaataacattctgaatcaagcacactgtatgttcagtaggttgaactatgaacactgtcatcaatgttcagttcaaaagcctgaaagtttagatctagaagctggtaaaaatgacaatatcaatcacattaggggaaccattgttgtcttcacttaatccatttagcactatttaaaataagcacaccaagttatatgactaatataacttgaaaattttttatactgaggggttggtgataactcttgaggatgtaatgcattaataaaaatcaactcatcattttctacttgttttcaatgtgttggaaactgtaaaatgatactgtagaacctgtctcctactttgaaaactgaatgtcagggctgagtgaatcaaagtgtctagacatatttgcatagaggccaaggtattctattctaataactgcttactcaacactaccaccttttccttatactgtatatgattatggcctacaatgttgtatttgttatttattaaattgtgattgttttattattgtttatgccaaatgttaactgccaagcttggagtgacctaaagcattttttaaaagcatggctagatttacttcagtataaattatcttatgaaaaccaaattttaaaagccacaggtgttgattgttataaaataacatgctgccattcttgattgctagagtttttgttagtactttggatgcaattaaaactatgtgctatcacatgtgaaaagcttaataaattccatctatcagtagtataggtctcaatatttattatgagaccagtggtctggaaacagcttgttgtaccgaatcaactggagtctatgcttaaaaaaaaaaatttttttttaaccatccttaaattattgcttaatggtatcatattaacatattctaaataagggctttaaggcacaggctgttgaagcattttctcagaggagtggatctgtagaagtctgtctttctatagaaatattgtgcttactcaagtgttaaattattttttctatgaactagtctacttcttaaaattcaaacatattcttttgatcacattgtttcttgagcatcctgccctgctactaacttttcaacaaggcaaaatggagtaaagtggcaatttctttagatgagtgaaataccctcaagtctcttttctgcccaaaaagggaaaagtgatagaaatgggggtggcaagtggggtgagtggatgaaggtgggtattgggggtggctgtgaaagaaaataatggagaatcacttttctagacatctacctatacttaatctaagaaacaaagtaatctactgtaaagtactctgccccttgaaagaagtattaaaaagagtgaggatggatttagaaaaaaacatgaatttagaaatattcaaaatggtttttgtggcagattcaatattatgaattcacagatatttaaagaatgagaaacatagtaattagtagaaatgccagaaacagttcctggttcctcttgtgtttgacactaagaaaatagcaagagtgtgaaatctcagatacttatgaaatctcacagatgtaaggactcaagtgtagaagaaaatatccccttcttacaaaaagaaatgtcaatttatggagtttgtgggaaatagggcaagaattcttatgcttatgagagccaagtagtcagtggaagagagtagagctcaaaactggattatcaccttagcaacttagaatagtttgaaatagaaaaaaagtatttaatttggatctggatctgttaagatatgcacagtctattttttgtatagtattggaaaataaaaatgctataatttg

SEQ ID NO: 1369 - DNA, 1836 bp, Homo sapiens
ggcgctgggcggctgcggcgcgcggtgcgcggtgcgtagtctggagctatggtggtggtggcagccgcgccgaacccggccgacgggacccctaaagttctgcttctgtcggggcagcccgcctccgccgccggagccccggccggccaggccctgccgctcatggtgccagcccagagaggggccagcccggaggcagcgagcggggggctgccccaggcgcgcaagcgacagcgcctcacgcacctgagccccgaggagaaggcgctgaggaggaaactgaaaaacagagtagcagctcagactgccagagatcgaaagaaggctcgaatgagtgagctggaacagcaagtggtagatttagaagaagagaaccaaaaacttttgctagaaaatcagcttttacgagagaaaactcatggccttgtagttgagaaccaggagttaagacagcgcttggggatggatgccctggttgctgaagaggaggcggaagccaaggggaatgaagtgaggccagtggccgggtctgctgagtccgcagcactcagactacgtgcacctctgcagcaggtgcaggcccagttgtcacccctccagaacatctccccatggattctggcggtattgactcttcagattcagagtctgatatcctgttgggcattctggacaacttggacccagtcatgttcttcaaatgcccttccccagagcctgccagcctggaggagctcccagaggtctacccagaaggacccagttccttaccagcctccctttctctgtcagtggggacgtcatcagccaagctggaagccattaatgaactaattcgttttgaccacatatataccaagcccctagtcttagagataccctctgagacagagagccaagctaatgtggtagtgaaaatcgaggaagcacctctcagcccctcagagaatgatcaccctgaattcattgtctcagtgaaggaagaacctgtagaagatgacctcgttccggagctgggtatctcaaatctgctttcatccagccactgcccaaagccatcttcctgcctactggatgcttacagtgactgtggatacgggggttccctttccccattcagtgacatgtcctctctgcttggtgtaaaccattcttgggaggacacttttgccaatgaactctttccccagctgattagtgtctaaggaatgatccaatactgttgcccttttccttgactattacactgcctggaggatagcagagaagcctgtctgtacttcattcaaaaagccaaaatagagagtatacagtcctagagaattcctctatttgttcagatctcatagatgacccccaggtattgtcttttgacatccagcagtccaaggtattgagacatattactggaagtaagaaatattactataattgagaactacagcttttaagattgtacttttatcttaaaagggtggtagttttccctaaaatacttattatgtaagggtcattagacaaatgtcttgaagtagacatggaatttatgaatggttctttatcatttctcttccccctttttggcatcctggcttgcctccagttttaggtcctttagtttgcttctgtaagcaacgggaacacctgctgagggggctctttccctcatgtatacttcaagtaagatcaagaatcttttgtgaaattatagaaatttactatgtaaatgcttgatggaattttttcctgctagtgtagcttctgaaaggtgctttctccatttatttaaaactacccatgcaattaaaaggtacaatgcaaaaaaaaaaaaaaaaa

SEQ ID NO: 1370 - DNA, 5878 bp, Homo sapiens
caaaacatagagtaccccggcagccggcaagaggaagagagagtggcttccacatccccaatatcctagaggcggctgagccggaggcggtcgcacaaagcgggccccgggggccgttccagccgcggccgaccatagagatgcggctcccgccggctctgggtctggagataggaaagctgaggcccagagaagcgaagcgactgtgtctgtccaagaccacgcgccctcctgcccggaagataagcgtatttcttctctggtgcccacctgtctcctacctcaccctgccctcccgcaggtgaaggttcttaatcttgacggctcagcgtcctccttggctccccccggaggccatgtatggtcaagcttgaagattccccagaacaacgctaatattcacatttaagaagccaaaacacacaagtcggtggtgatgacagacccccttttggactcacagccagccagtagcaccggggagatggatggactgtgccctgagctattgctgatccccccgcctctctctaaccgtggaatcctggggcctgtccagagcccctgtccttcccgggaccctgcacctatacctactgagccaggctgcctgctggtagaggccacagcaactgaagagggaccagggaacatggagatcattgtggagacagtagctggaaccctgaccccaggtgctcctggagagaccccagctcccaaactgcctccaggagagagagaaccttcacaggaagcaggtacacccttgcctgggcaggagacagctgaagaggagaatgtagagaaagaagagaagagtgacacccagaaggactcccaaaaggctgtggataaaggccaaggggctcagcggctggaaggggatgtggtctctggcaccgagtccctcttcaagacccatatgtgtccagagtgtaagcgctgctttaagaagcggactcatctggtggagcacctgcatctccacttcccagaccccagcctccagtgccctaactgccagaagttcttcaccagtaagagcaagctcaagacccatctgctgcgggagctgggtgaaaaggcccaccactgcccactgtgccactacagtgcggtggagaggaatgcactcaaccgccacatggccagcatgcatgaagatatttccaacttctactcagacacctatgcctgtcctgtctgccgtgaggaattccgcctcagccaggccctaaaggagcacctcaagagccacacggcagcagccgcagcagagccattaccccttcgctgctttcaggagggctgcagctatgcagcacccgaccgcaaggccttcattaagcacctgaaggagacccatggggtgcgggctgtggagtgccgccatcactcatgtcccatgctctttgccacagccgaagccatggaggcccaccacaagagtcactacgccttccactgcccccactgtgattttgcttgttccaataagcacctattccgtaaacacaagaagcagggccaccctggcagtgaagagctgcgctgcaccttctgcccctttgccaccttcaacccagtggcttaccaggatcatgtaggcaagatgcatgctcatgaaaagatccaccagtgtcctgagtgcaactttgccactgcccacaagagggtgctcatccgacacatgcttctacatacgggtgagaagccccacaagtgtgagctgtgtgacttcacatgccgagacgtgagctacctatccaagcacatgctgacccactccaacaccaaggattacatgtgcactgaatgtggctatgtcaccaagtggaagcactacctccgtgtgcacatgcgaaaacatgcaggggacctcaggtatcagtgcaaccagtgctcctatcgctgtcaccgggctgatcagctgagcagccacaagctgcggcatcagggcaagtctctgatgtgtgaggtgtgtgccttcgcctgcaagcggaagtatgagctgcagaagcacatggcttcccagcaccaccctggcacaccgtccccactctacccttgccactactgcagttaccagagccgccacaagcaggctgtgctgagccatgagaactgcaagcatacccgcctccgtgagttccactgtgccctctgtgactaccgcaccttcagcaacaccacactcttgttccataaacgcaaggcccatggctatgtacctggagaccaggcctggcagctccgctatgcaagccaggagccagaaggggccatgcagggcccaacacccccaccagattcagagccctcaaaccagctgtcagcccgacctgaggggccaggtcacgaacctgggactgtggtggaccccagcttggaccaggccctgccagagatgagtgaggaggtcaacactggaagacaggagggcagtgaggctccccatgggggtgacctgggtggcagtcccagcccagcagaggtggaggagggcagctgcacactacacctagaggccctgggagtagagctggagtctgtgactgagccaccccttgaggaggtcactgaaacagcccctatggagttcaggcccctgggactggaagggccagatggactggaaggaccagagctatctagctttgaaggtattgggacttctgacttgggtgctgaagaaaatccccttctggaaaagccagtgtctgagccctccacaaatcctccatccttagaggaggctcctaacaactgggtaggaaccttcaagacaactccacctgctgagacagcacccttgcccccattacctgagtcagagtcattactcaaggccctaaggagacaggacaaagaacaagcagaggcattggtgctagaggggcgggtgcagatggtagtgatccagggagaggggcgagccttccgctgcccacactgcccttttatcactcgccgggagaaggccctgaatctgcactccaggactgggtgccaaggccgccgagagcccctgctgtgccccgagtgtggggctagcttcaagcaacaacgcggcctcagcacccacctgctgaagaagtgccctgttctactcagaaagaacaagggcttgcccagaccagattcacccatccctctgcaacctgtgctcccaggtacccaggcctcagaggacacagaaagtgggaagcccccacctgcatcacaagaagcagagctactgcttccaaaagatgctcctttggagcttcccagggagccagaagaaacagaagagcctcttgccacagtctctggttccccagtccctcctgcaggaaactccttgcccacagaggcccctaagaagcactgctttgacccagtccctcctgcaggaaactcctcacccacggaggcccctaagaagcaccaccttgacccagtccctcctgcaggaaactcctcacccacagaggccctgaagaagcaccgctttgagcagggcaagtttcactgcaactcctgcccattcctttgttcccggctctcctctattacctctcacgtggctgaaggctgcagggggggacgtggcgggggaggaaaacgagggaccccccagacccagcctgatgtgtccccgttgagcaatggggactctgctcccccgaagaatgggagtacagagtccagctctggtgatggggatacagttctggttcaaaagcagaagggggctcgcttctcctgccctacatgtccctttagctgccagcaggaacgggctctgaggactcaccagatccggggctgccccctcgaggagtctggagagctgcactgcagcctctgcccattcactgctcctgctgccactgccttaaggctccaccagaagcggaggcaccccactgcagccccagcccgtgggccccggccccatctacagtgtggggactgtggcttcacctgtaaacagagccgttgcatgcagcagcaccggcggctcaagcacgagggggtgaagccccatcagtgccccttctgtgacttttcgaccaccagacggtaccggttagaggctcaccagtcccgacacacaggcattggccgcatcccctgcagctcttgcccccagacgtttggtaccaactcgaaactgcgcttgcaccggttaagggtacatgacaaaacacctacccacttctgtccactttgtgactatagtggctaccttcgccatgacatcactcgtcatgtcaacagctgccaccaaggcaccccagcctttgcctgctcccagtgtgaagcccagttcagctcagagacagcacttaagcagcatgctctgcgccgacaccccgagcctgcacagcctgcccctggctctcctgcagagaccactgagggccccctgcactgttcccgctgtgggttgctgtgccccagccctgccagcttacgaggacacacccgtaaacagcacccacggcttgagtgtggggcctgccaggaggccttccctagccgactggctctggatgagcaccggaggcagcagcatttcagccaccgctgtcagctctgtgactttgctgcccgggagcgggtgggcctggtaaagcactacctggaacagcatgaggagacttcagcagccgtggcagcctcagatggggatggggatgctggccagcccccgctacactgccccttttgtgacttcacatgccgccatcagctggtactagatcaccatgtgaaagggcatgggggcactcgtctctacaagtgcaccgattgtgcttacagcaccaagaaccgacagaagatcacctggcacagccgcatccacactggggaaaagccttaccactgtcacctctgcccctatgcctgtgctgatccctctcgtctcaagtaccacatgcggatccacaaggaggaacggaagtacctgtgccctgagtgtggctacaagtgcaagtgggtcaaccagctgaaataccacatgaccaagcatacaggactgaagccataccagtgtcccgagtgtgagtactgcaccaaccgggctgatgcactgcgtgtgcaccaggagacccggcatcgagaagcacgggctttcatgtgtgagcagtgtggcaaggccttcaagacgcgcttcctgctgcgcacccaccttcgcaagcacagtgaggccaaaccctatgtgtgcaatgtgtgccaccgtgctttccgctgggctgctggcctgcgccatcatgccctcacccacaccgaccgccaccccttcttttgccgcctctgcaactacaaggccaagcaaaagttccaggtggtcaagcacgtacgcaggcaccaccctgaccaagccgacccaaaccagggtgtgggcaaagaccccaccacccccacagtgcacctgcatgatgtgcagctggaggatcccagccctcctgctcctgccgctccccacactggacctgagggctgaaagcctgccccacctcctgtataggaagagggtatggtctgagatgtgcagactgggaccagcgctagcctgaggagctcagagcctaaggaaagactggcttttggggtacaagggtgactagaaccttcctgggactctggctatagtactttgaaattatcacccatataaaagagggacatggactataacgttgatttcttattgctgtacattgcgtttttaacctgcaagttctcagtttcttcaccatcactccatcaaagtccctggctataagatctggattttacccactccatcttctctttccttcttactgtgtcaattcctattttctttcagaatcttctaaaaacagttgtatctaaccgc

SEQ ID NO: 1371 - DNA, 2707 bp, Homo sapiens
ggcaggccgagccagccgtgcgccgcgctccagggcccagggcgccgcacacgcacccacccacccacccagcctcgcagcgccatgggcaagaacaagcagccacgcggccagcagaggcaggggggcccgccggccgcggacgccgctgggcccgacgacatggagccgaagaagggcacgggggcccccaaggagtgcggggaggaggagccccggacctgctgcggctgccggttcccgctgctgctcgccctgctgcagctggccctgggcatcgccgtgaccgtggtgggcttcctcatggcgagcatcagctcctccctgctagtcagggacactccattttgggctgggatcattgtctgcttagtggcctatcttggcttgtttatgctttgtgtctcatatcaggttgacgaacggacatgtattcaattttctatgaaactgttatactttctgctgagtgccctgggcctgacggtctgtgtgctggccgtggcctttgccgcccaccactattcgcagctcacacagtttacctgtgagaccacactcgactcttgccagtgcaaactgccctcctcggagccgctcagcaggacctttgtttaccgggatgtgacggactgtaccagcgtcactggcactttcaaactgttcttactcatccagatgattcttaatttggtctgcggccttgtgtgcttgttggcctgctttgtgatgtggaaacataggtaccaggtcttctatgtgggtgtcaggatatgctccctcacggcttccgaaggcccccagcaaaagatctaacattcttgctcaaagttgcgagagaaagtagcacatggagtagctgaggttaaacaaacaaaaaaaaattttaaacaaagaaaggaaaaaaattgacaataaaagtcactcttctaattgaatatttttatatttttatgaaacaaaagagcatttcttcaggtttctattgtattttttttaacattcttgcagagaaagcaagatccaaattgattttgggatattaaaagttaacagaacactgaacaaggaaagaatggcatagatctatctttacagtctggagttaattcctgttaactcattttatccattccttacataatcttctttcctgttagtccagtttgatggtgtgaatggtgaatttcaggcccagttgctaaattttgtggcatcttcctctagtccttcccacctccagtcatcagccccactctgtcttggagacaggcaggaggtgggggaagagctgaatctctttattttccctggtagagacatcttcaaggcatgaaatagcttaaagagcagagtagaaatggaagaggctttgcaaaaggctagataactaacaacacctgggttggggcggcggcctcttctcttcagctcccttagcttggctccgtaagtggatcacttgccaaatgctttagatgattgcctctcaataattgaaaggtggtggtagttgtattctaaatgatgtagaaggtttaaaaataattacattatgcttctattctatcatctaaaacaaatcattaaaactaatttctagctaattgttaattataattatgctcagaagtctatttaatgagctctgactgtacttacgctgcactgtcggtgttaagagaaattactctcacaagagcagaggcctgaagattctttcttctgaaagccaagcaccacaaggaaaaaaaaattattaatagctcaggttaaaaacacccatttaaacaaaaacaagagcatttgtaataggaagtgtttatacaaacagcacatttgtgatatgttgaaaagcatctctcttggcaaccaatctatgtttgaggaagattgggtaatgctgatgtgttccattcatgaaactgtatttgatacataatcctattattaattcgtatgcttagtcaacctaggaaatcaaaataatgttttgaagttcttatttgagcaatatggccttgacttggagggtagttttagttgttttgtttttaagtgactgtggtttaaagcacaaatgccccaaggtggggagacttctctctgtgattattgttgctattaaattctgaactgtatccatattttaaggaaggagctaaaaatggaaattcatgaaacataaatggtatcaagaactttatcagtatgctttgttgaaagcagaaattaagataataattgagttcaattcgcctctccgcattgcctattgatacactttactaatcatgaaattctaacctaaaaggaaaacattttcctgcttgtcttagaagaaagtggaataattccactgattgtgataatggtttcaatttctacacaatataaatatccagtataaaggaaagcgttaagtcggtaagctagaggattgtaaatatcttttatgtcctctagataaaacacccgattaacagatgttaaaccttttaatgttttgatttgctttaaaaatggccttcctacacattagctccagctaaaaagacacattggagagcttagaggataagtctctggagcagaatttatcacacacaaaagttacaccaacagaataccaagcagaatgatgaggacctgtaaaataccttgtgccctattaaaaaaaaaaaaaaaaaaaaaaaaaaaaaaaaaa

SEQ ID NO: 1372 - DNA, 2132 bp, Homo sapiens
tgcggttccaacatggcggacgtgacggtggaggttcgcggctctaacggggctttctacaagggatttatcaaagatgttcatgaagactcccttacagttgtttttgaaaataattggcaaccagaacgccaggttccatttaatgaagttagattaccaccaccacctgatataaaaaaagaaattagtgaaggagatgaagtagaggtatattcaagagcaaatgaccaagagccatgtgggtggtggttggctaaagttcggatgatgaaaggagaattttatgtcattgaatatgctgcttgtgacgctacttacaatgaaatagtcacatttgaacgacttcggcctgtcaatcaaaataaaactgtcaaaaaaaataccttctttaaatgcacagtggatgttcctgaggatttgagagaggcgtgtgctaatgaaaatgcacataaagattttaagaaagcagtaggagcatgcagaattttttaccatccagaaacaacacagctaatgatactgtctgccagtgaagcaactgtgaagagagtaaacatcttaagtgacatgcatttgcgaagtattcgtacgaagttgatgcttatgtccagaaatgaagaggccactaagcatttagaatgcacaaaacaacttgcagcagcttttcatgaggaatttgttgtgagagaagatttaatgggcctggcaataggaacacatggtagtaacatccagcaagctaggaaggttcctggagttaccgccattgagctagatgaagatactggaacattcagaatctacggagagagtgctgatgctgtaaaaaaggctagaggtttcttggaatttgtggaggattttattcaggttcctaggaatctcgttggaaaagtaattggaaaaaatggcaaagttattcaagaaatagtggacaaatctggtgtggttcgagtgagaattgaaggggacaatgaaaataaattacccagagaagacggtatggttccatttgtatttgttggcactaaagaaagcattggaaatgtgcaggttcttctagagtatcatattgcctatctaaaggaagtagaacagctaagaatggaacgcctacagattgatgaacagctgcgacagattggttctaggtcttatagcggaagaggcagaggtcgtcggggacctaattacacctccggttatggtacaaattctgagctgtctaacccctctgaaacggaatctgagcgtaaagacgagctgagtgattggtcattggcaggagaagataatcgagacagccgacatcagcgtgacagcaggagacgcccaggaggaagaggcagaagtgtttcagggggtcgaggtcgtggtggaccacgtggtggcaaatcctccatcagttctgtgctcaaagatccagacagcaatccatacagcttacttgataatacagaatcagatcagactgcagacactgatgccagcgaatctcatcacagtactaaccgtcgtaggcggtctcgtagacgaaggactgatgaagatgctgttctgatggatggaatgactgaatctgatacagcttcagttaatgaaaatgggctagtcacagttgcagattatatttctagagctgagtctcagagcagacaaagaaacctcccaagggaaactttggctaaaaacaagaaagaaatggcaaaagatgtgattgaagagcatggtccttcagaaaaggcaataaacggcccaactagtgcttctggcgatgacatttctaagctacagcgtactccaggagaagaaaagattaataccttaaaagaagaaaacactcaagaagcagcagtcctgaatggtgtttcataaactgaagaagttcctagtttacagttcttttacattacatttacaatagtgcttgtacaagcttgccaaagatagaatatggatcgccagtctttacatcgcactttcagttcctccatttggaattcaaaaaggggagggatcctgaagaaatcatatgttaaacatactttgacacctactgtgttataaaatatatcatcagatgtgccttgagaatagtatatgtaacattaaaaaaaagttgctggcta

SEQ ID NO: 1373 - DNA, 4307 bp, Homo sapiens
cacagacacatatgcacgagagagacagaggaggaaagagacagagacaaaggcacagcggaagaaggcagagacagggcaggcacagaagcggcccagacagagtcctacagagggagaggccagagaagctgcagaagacacaggcagggagagacaaagatccaggaaaggagggctcaggaggagagtttggagaagccagacccctgggcacctctcccaagcccaaggactaagttttctccatttcctttaacggtcctcagcccttctgaaaactttgcctctgaccttggcaggagtccaagcccccaggctacagagaggagctttccaaagctagggtgtggaggacttggtgccctagacggcctcagtccctcccagctgcagtaccagtgccatgtcccagacaggctcgcatcccgggaggggcttggcagggcgctggctgtggggagcccaaccctgcctcctgctccccattgtgccgctctcctggctggtgtggctgcttctgctactgctggcctctctcctgccctcagcccggctggccagccccctcccccgggaggaggagatcgtgtttccagagaagctcaacggcagcgtcctgcctggctcgggcacccctgccaggctgttgtgccgcttgcaggcctttggggagacgctgctactagagctggagcaggactccggtgtgcaggtcgaggggctgacagtgcagtacctgggccaggcgcctgagctgctgggtggagcagagcctggcacctacctgactggcaccatcaatggagatccggagtcggtggcatctctgcactgggatgggggagccctgttaggcgtgttacaatatcggggggctgaactccacctccagcccctggagggaggcacccctaactctgctgggggacctggggctcacatcctacgccggaagagtcctgccagcggtcaaggtcccatgtgcaacgtcaaggctcctcttggaagccccagccccagaccccgaagagccaagcgctttgcttcactgagtagatttgtggagacactggtggtggcagatgacaagatggccgcattccacggtgcggggctaaagcgctacctgctaacagtgatggcagcagcagccaaggccttcaagcacccaagcatccgcaatcctgtcagcttggtggtgactcggctagtgatcctggggtcaggcgaggaggggccccaagtggggcccagtgctgcccagaccctgcgcagcttctgtgcctggcagcggggcctcaacacccctgaggactcggaccctgaccactttgacacagccattctgtttacccgtcaggacctgtgtggagtctccacttgcgacacgctgggtatggctgatgtgggcaccgtctgtgacccggctcggagctgtgccattgtggaggatgatgggctccagtcagccttcactgctgctcatgaactgggtcatgtcttcaacatgctccatgacaactccaagccatgcatcagtttgaatgggcctttgagcacctctcgccatgtcatggcccctgtgatggctcatgtggatcctgaggagccctggtccccctgcagtgcccgcttcatcactgacttcctggacaatggctatgggcactgtctcttagacaaaccagaggctccattgcatctgcctgtgactttccctggcaaggactatgatgctgaccgccagtgccagctgaccttcgggcccgactcacgccattgtccacagctgccgccgccctgtgctgccctctggtgctctggccacctcaatggccatgccatgtgccagaccaaacactcgccctgggccgatggcacaccctgcgggcccgcacaggcctgcatgggtggtcgctgcctccacatggaccagctccaggacttcaatattccacaggctggtggctggggtccttggggaccatggggtgactgctctcggacctgtgggggtggtgtccagttctcctcccgagactgcacgaggcctgtcccccggaatggtggcaagtactgtgagggccgccgtacccgcttccgctcctgcaacactgaggactgcccaactggctcagccctgaccttccgcgaggagcagtgtgctgcctacaaccaccgcaccgacctcttcaagagcttcccagggcccatggactgggttcctcgctacacaggcgtggccccccaggaccagtgcaaactcacctgccaggcccgggcactgggctactactatgtgctggagccacgggtggtagatgggaccccctgttccccggacagctcctcggtctgtgtccagggccgatgcatccatgctggctgtgatcgcatcattggctccaagaagaagtttgacaagtgcatggtgtgcggaggggacggttctggttgcagcaagcagtcaggctccttcaggaaattcaggtacggatacaacaatgtggtcactatccccgcgggggccacccacattcttgtccggcagcagggaaaccctggccaccggagcatctacttggccctgaagctgccagatggctcctatgccctcaatggtgaatacacgctgatgccctcccccacagatgtggtactgcctggggcagtcagcttgcgctacagcggggccactgcagcctcagagacactgtcaggccatgggccactggcccagcctttgacactgcaagtcctagtggctggcaacccccaggacacacgcctccgatacagcttcttcgtgccccggccgaccccttcaacgccacgccccactccccaggactggctgcaccgaagagcacagattctggagatccttcggcggcgcccctgggcgggcaggaaataacctcactatcccggctgccctttctgggcaccggggcctcggacttagctgggagaaagagagagcttctgttgctgcctcatgctaagactcagtggggaggggctgtgggcgtgagacctgcccctcctctctgccctaatgcgcaggctggccctgccctggtttcctgccctgggaggcagtgatgggttagtggatggaaggggctgacagacagccctccatctaaactgccccctctgccctgcgggtcacaggagggagggggaaggcagggagggcctgggccccagttgtatttatttagtatttattcacttttatttagcaccagggaaggggacaaggactagggtcctggggaacctgacccctgacccctcatagccctcaccctggggctaggaaatccagggtggtggtgataggtataagtggtgtgtgtatgcgtgtgtgtgtgtgtgtgaaaatgtgtgtgtgcttatgtatgaggtacaacctgttctgctttcctcttcctgaattttattttttgggaaaagaaaagtcaagggtagggtgggccttcagggagtgagggattatctttttttttttttctttctttctttcttttttttttttgagacagaatctcgctctgtcgcccaggctggagtgcaatggcacaatctcggctcactgcatcctccgcctcccgggttcaagtgattctcatgcctcagcctcctgagtagctgggattacaggctcctgccaccacgcccagctaatttttgttttgttttgtttggagacagagtctcgctattgtcaccagggctggaatgatttcagctcactgcaaccttcgccacctgggttccagcaattctcctgcctcagcctcccgagtagctgagattataggcacctaccaccacgcccggctaatttttgtatttttagtagagacggggtttcaccatgttggccaggctggtctcgaactcctgaccttaggtgatccactcgccttcatctcccaaagtgctgggattacaggcgtgagccaccgtgcctggccacgcccaactaatttttgtatttttagtagagacagggtttcaccatgttggccaggctgctcttgaactcctgacctcaggtaatcgacctgcctcggcctcccaaagtgctgggattacaggtgtgagccaccacgcccggtacatattttttaaattgaattctactatttatgtgatccttttggagtcagacagatgtggttgcatcctaactccatgtctctgagcattagatttctcatttgccaataataatacctcccttagaagtttgttgtgaggattaaataatgtaaataaagaactagcataac

SEQ ID NO: 1374 - DNA, 4693 bp, Homo sapiens
ggactgcgggataggaagctggggatatggacaagcagcagcgttatagcgctctgggtttcgggacataggcctgggccatgcggcccccttggccccttggcgcgacccccaggaacgttcggaaagctggtcctcgtggctgggggaaaggcggggggtgggggggaagcgggcacgtgaccccggtcagccaatctgggtgctgctgacgtggccgcgcggccccgatgctctccccacccccccagcccgttccggaagggaggggctgggggctacgccccctcccccagcacggcttcgttttctgggggggggttgacaccccggattacataccccgtaccaagccgagggcaactttggaggccccctggaaggctttaggatccagattcttcgctgctgctgccttaccgccgagaaccaccacccgccaggcgtcttgcggccacacccctggcgggttcaggcaggctacgcccacgcgacccctcccgtttccctgctttggccaatggaggagctacgaatggcacgacctgctcgagcttggcagtctccagttgggctgtgcatggaagcttgggaagactttgttggaaggggaggcggggagagagtgctggaggctctggggcgatggcttccgcacctcttccaaccaccctctttccctggagtcggcggaccacagctcagccaattggcttggagatgtggcgggttgccacttccctgtgggtctctgcggcactcttctgcctggtgactgacaccttggaaatgaagtttatgacgtcatcgctgcggctggccaatagaaaaagctcccgcggagaggtgttccttccccttcgactcagcttcttcacccgcgtgagcgagcgcgcgcgcgcggagggggtggggaaaatctcaagcagggtggcgcgcatgagcggcgaagctcctcctccccgcctatatataaagggctggcgcggggctcggcggcgccatttcgtgctggagtggagcagcctctagaacgagctggaggattctgcctaccgatacagagccttcgagtcgtccggggccgccattacaatccacctccatccgcttggaaatggccttcgtcccggcctatgactggtcccagcgggcagtacagaccccctagaagcccctggagctcccctttttcgggccccgcccaatcctcggagtctgtccaccccctctactccgccctcaagaggatttcaaagatggaggcggcggctccctaaaccacttttcgtgttcatccgcctccatccgagatcgaaacgggacctcgtcggccccgtaggggcccgacaagaagagggaatccctgcagaccaacagcgggctatattgacgacggtgtctgagatcggggaccgtcttttgaagagtcagtccctccttagttgcccgcctcagctgaggccgccgccattttcttgctgtccgccgtctgcagagcgcgccaagctgcccggagctctccgagaggccccaaagagactgctttcgtgccggccaggcagggggtttgtcgcctggaggcccaagaggaacggcctccccccaacttagcgggttatgctggaccgggcggtgagggaaaccgaggccacccggactttccgcggctgagggcagcgccggttccttgcggtcaagatgctgcaaaacgtgactccccacaataagctccctggggaagggaatgcagggttgctggggctgggcccagaagcagcagcaccagggaaaaggattcgaaaaccctctctcttgtatgagggctttgagagccccacaatggcttcggtgcctgctttgcaacttacccctgccaacccaccacccccggaggtgtccaatcccaaaaagccaggacgagttaccaaccagctgcaatacctacacaaggtagtgatgaaggctctgtggaaacatcagttcgcatggccattccggcagcctgtggatgctgtcaaactgggtctaccggattatcacaaaattataaaacagcctatggacatgggtactattaagaggagacttgaaaacaattattattgggctgcttcagagtgtatgcaagattttaataccatgttcaccaactgttacatttacaacaagcccactgatgatattgtcctaatggcacaaacgctggaaaagatattcctacagaaggttgcatcaatgccacaagaagaacaagagctggtagtgaccatccctaagaacagccacaagaagggggccaagttggcagcgctccagggcagtgttaccagtgcccatcaggtgcctgccgtctcttctgtgtcacacacagccctgtatactcctccacctgagatacctaccactgtcctcaacattccccacccatcagtcatttcctctccacttctcaagtccttgcactctgctggacccccgctccttgctgttactgcagctcctccagcccagccccttgccaagaaaaaaggcgtaaagcggaaagcagatactaccacccctacacctacagccatcttggctcctggttctccagctagccctcctgggagtcttgagcctaaggcagcacggcttccccctatgcgtagagagagtggtcgccccatcaagcccccacgcaaagacttgcctgactctcagcaacaacaccagagctctaagaaaggaaagctttcagaacagttaaaacattgcaatggcattttgaaggagttactctctaagaagcatgctgcctatgcttggcctttctataaaccagtggatgcttctgcacttggcctgcatgactaccatgacatcattaagcaccccatggacctcagcactgtcaagcggaagatggagaaccgtgattaccgggatgcacaggagtttgctgctgatgtacggcttatgttctccaactgctataagtacaatcccccagatcacgatgttgtggcaatggcacgaaagctacaggatgtatttgagttccgttatgccaagatgccagatgaaccactagaaccagggcctttaccagtctctactgccatgccccctggcttggccaaatcgtcttcagagtcctccagtgaggaaagtagcagtgagagctcctctgaggaagaggaggaggaagatgaggaggacgaggaggaagaagagagtgaaagctcagactcagaggaagaaagggctcatcgcttagcagaactacaggaacagcttcgggcagtacatgaacaactggctgctctgtcccagggtccaatatccaagcccaagaggaaaagagagaaaaaagagaaaaagaagaaacggaaggcagagaagcatcgaggccgagctggggccgatgaagatgacaaggggcctagggcaccccgcccacctcaacctaagaagtccaagaaagcaagtggcagtgggggtggcagtgctgctttaggcccttctggctttggaccttctggaggaagtggcaccaagctccccaaaaaggccacaaagacagccccacctgccctgcctacaggttatgattcagaggaggaggaagagagcaggcccatgagttacgatgagaagcggcagctgagcctggacatcaacaaattacctggggagaagctgggccgagttgtgcatataatccaagccagggagccctctttacgtgattcaaacccagaagagattgagattgattttgaaacactcaagccatccacacttagagagcttgagcgctatgtcctttcctgcctacgtaagaaaccccggaagccctacaccattaagaagcctgtgggaaagacaaaggaggaactggctttggagaaaaagcgggaattagaaaagcggttacaagatgtcagcggacagctcaattctactaaaaagccccccaagaaagcgaatgagaaaacagagtcatcctctgcacagcaagtagcagtgtcacgccttagcgcttccagctccagctcagattccagctcctcctcttcctcgtcgtcgtcttcagacaccagtgattcagactcaggctaaggggtcaggccagatggggcaggaaggctccgcaggaccggacccctagaccaccctgccccacctgccccttccccctttgctgtgacacttcttcatctcacccccccccgcccccctctaggagagctggctctgcagtgggggagggatgcagggacatttactgaaggagggacatggacaaaacaacattgaattcccagccccattggggagtgatctcttggacacagagcccccattcaaaatggggcagggcaagggtgggagtgtgcaaagccctgatctggagttacctgaggccatagctgccctattcacttctaagggccctgttttgagattgtttgttctaatttattttaagctaggtaaggctggggggagggtggggccgtggtcccctcagcctccatggggagggaagaagggggagctctttttttacgttgatttttttttttctactctgttttccctttttccttccgctccatttggggccctgggggtttcagtcatctccccatttggtcccctggactgtctttgttgattctaacttgtaaataaagaaaatatt

SEQ ID NO: 1375 - DNA, 3014 bp, Homo sapiens
gcggagcccacggagcccacggaggagcccacggaggagccccagcgtccgaacgggcagaccccctcgagccgcgaaggagcccgagaagcagccacgatgtgcggaatctttgcctacatgaactacagagtcccccggacgaggaaggagatcttcgaaaccctcatcaagggcctgcagcggctggagtacagaggctacgactcggcaggtgtggcgatcgatgggaataatcacgaagtcaaagaaagacacattcagctggtcaagaaaagggggaaagtcaaggctctcgatgaagaactttacaaacaagacagcatggacttaaaagtggagtttgagacacacttcggcattgcccacacgcgctgggccacccacggggtccccagtgctgtcaacagccaccctcagcgctcagacaaaggcaacgaatttgttgtcatccacaatgggatcatcacaaattacaaagatctgaggaaatttctggaaagcaaaggctacgagtttgagtcagaaacagatacagagaccatcgccaagctgattaaatatgtgttcgacaacagagaaactgaggacattacgttttcaacgttggtcgagagagtcattcagcagttggaaggtgcattcgcgctggttttcaagagtgtccactacccaggagaagccgttgccacacggagaggcagccccctgctcatcggagtccggagcaaatacaagctctccacagaacagatccctatcttatacaggacgtgcactctggagaatgtgaagaatatctgtaagacacggatgaagaggctggacagctccgcctgcctgcatgctgtgggcgacaaggccgtggaattcttctttgcttctgatgcaagcgctatcatagagcacaccaaccgggtcatcttcctggaggacgatgacatcgccgcagtggctgatgggaaactctccattcaccgggtcaagcgctcggccagtgatgacccatctcgagccatccagaccttgcagatggaactgcagcaaatcatgaaaggtaacttcagtgcgtttatgcagaaggagatcttcgaacagccagaatcagttttcaatactatgagaggtcgggtgaattttgaaaccaacacagtgctcctgggtggcttgaaggaccacttgaaggagattcgacgatgccgacggctcatcgtgattggctgtggaaccagctaccacgctgccgtggctacgcggcaagttttggaggaactgactgagcttcctgtgatggttgaacttgctagtgattttctggacaggaacacacctgtgttcagggatgacgtttgctttttcatcagccagtcaggcgagaccgcggacaccctcctggcgctgcgctactgtaaggaccgcggcgctctcaccgtgggcgtcaccaacaccgtgggcagctccatctctcgcgagaccgactgcggcgtccacatcaacgcagggccggagatcggcgtggccagcaccaaggcttataccagtcagttcatctctctggtgatgtttggtttgatgatgtctgaagaccgaatttcactacaaaacaggaggcaagagatcatccgtggcttgagatctttacctgagctgatcaaggaagtgctgtctctggaggagaagatccacgacttggccctggagctctacacgcagagatcgctgctggtgatggggcggggctacaactatgccacctgcctggaaggagccctgaaaattaaagagataacctacatgcactcagaaggcatcctggctggggagctgaagcacgggcccctggcactgattgacaagcagatgcccgtcatcatggtcattatgaaggatccttgcttcgccaaatgccagaacgccctgcagcaagtcacggcccgccagggtcgccccattatactgtgctccaaggacgatactgaaagttccaagtttgcgtataagacaattgagctgccccacactgtggactgcctccagggcatcctgagcgtgattccgctgcagctgctgtccttccacctggctgttctccgaggatatgacgttgacttccccagaaatctggccaagtctgtaactgtggaatgaggctgagaccgtgacaagaccatcaccacctttcatctgattccagacctgtcccaacagcagggatgctacatgggaagagaagtggacatcccacatgttctgcgtgctcctgtagagcttgacagcttccacgtgccttctacccaagtgcttttgcttacagcagatactgtttctctgtgtcctgaagtcgccagaggagaagggaatcattgtttacacatggggatcagagcagacttctccactactgtgcaatagagatacagctctcttcagagtaactgtgaaccttttataaccaacactagagttagttttaaaagacaagatatttataatgacgactgtatagcttttaagttatttttctagtatgtggctttctgtagccgtggtaacggccaaactgttcatcctagctacccatgctctgtgtccaggcttgctcctggcaggtggcattcatctcagatgtgagcacaaggcattggccctctggactcctttctccttttctttcctctctaggctgctcctgaatcctgttctctgacatccgtggagcccctcctgcatccacctatgcctcctataagtccagttgaaatctcagcctccttcaacattttcttctcgtgtgtggcccacatccctccacttctccaacttctgtttaatctgatcacggctctttttaagccctggcagcattttggtccctgctccttgcccatagtaaaacagcttgaaatatcccatgcaagagagtagtttcaagtgggcgactctgctctctatttaaaagcgtgcacaatcaaaagtactatgcaattttaggacaataaagaacatacagttcc

SEQ ID NO: 1376 - DNA, 1485 bp, Homo sapiens
tccctgggactgcgtcactggtgcgcgccgcgggtcagggcgcaatggcggcgctgggcggggatgggctgcgactgctgtcggtgtcgcggccggagcggccgcccgagtcggcggcgctgggcggcctgggccccgggctgtgctgctgggtgtcagtgttctcctgcctcagcctcgcctgctcctacgtgggcagcctctacgtctggaagagcgaactgcccagggaccatcccgcggtcatcaagcgacgcttcaccagcgtcctggtggtgtccagtctctcacccctgtgcgtgctgctctggagggaactcacaggcatccagccaggcacatccctgctcaccctgatgggcttcaggctggagggcattttcccagcggcgctgctgcccctgttgctgaccatgattcttttcctgggcccactgatgcagctctctatggattgcccttgtgacctggcagatgggctgaaggttgtcctggccccccgctcctgggcccgctgcctcacagacatgcgttggctgcggaaccaagtgatcgccccgctgacagaggagctggtgttccgggcctgtatgctgcccatgttagcaccgtgcatgggcctgggccctgctgtgttcacctgcccgctcttttttggagttgcccattttcaccatattattgagcagctgcgtttccgccagagcagcgtggggaacatcttcttgtctgctgcgttccagttctcctacacagctgtcttcggtgcctacactgctttcctcttcatccgcacaggacacctgattgggccggttctctgccattccttctgcaattacatgggtttcccagctgtttgcgcggccttggagcacccacagaggcggcccctgctggcaggctatgccctgggtgtgggactcttcctgcttctgctccagcccctcacggaccccaagctctacggcagccttcccctttgtgtgcttttggagcgggcaggggactcagaggctcccctgtgctcctgacctatgctcctgggatacgctatgaactctcaccggctccccaagccctccccaccaaggggtactgcaggggaagggctggctggggtccccgaagatctcaggaatttttgtagggattgaagccagagctagttgcgtcccagggaccaagagaaagaagcagatatccaaagggtgcagccccttttgaaaggggtgtttacgagcagctgtgagtgaggggacaaggggcaggtcccaggagccacacactcccttcctcactttggactgctgcttctcttagctcctctgcctctgaaaagctgctcggggttttttatttataaaacctctccccaccccccaccccccaacttcctgggttttctcattgtctttttgcatcagtactttgtatgggatattaaagagatttaacttgggtaacatggcttgggcctttggg

SEQ ID NO: 1377 - DNA, 931 bp, Homo sapiens
gcagagcccagggagctggaggtcggcgcttcctctcgtgcttggtccactgacgcgcggccccgccgcgaggagcatcagatccatgctgctgctgactcggagccccacagcttggcacaggctctctcagctcaagcctccggtcctccctgggaccctgggaggccaggccctgcatctgaggtcctggcttttgtcaaggcagggccctgcagagacaggtgggcagggccagccccagggccctgggcttcgaacccggctgctgatcacaggcctgttcggggctggactcggtggggcctggctggccctgagggctgagaaggagaggctgcagcagcaaaagcgaacagaagccctgcgccaggcagctgtgggccagggcgacttccacctgctggatcacagaggccgggctcgctgcaaggctgacttccggggccagtgggtgctgatgtactttggcttcactcactgccctgacatctgcccagacgagctggagaagctggtgcaggtggtgcggcagctggaagcagagcctggtttgcctccagtgcagcctgtcttcatcactgtggaccccgagcgggacgacgttgaagccatggcccgctacgtccaggacttccacccaagactgttgggtctgaccggctccaccaaacaggttgcccaggctagtcacagttaccgcgtgtactacaatgccggccccaaggatgaggaccaggactacatcgtggaccactccattgccatctacctgctcaaccctgacggcctcttcacggattactacggccggagcagatcggctgagcagatctcagacagtgtgcggcggcacatggcggctttccgcagtgtcctgtcttgagccactgcagtctgggccccatcattaaacgggctgcgtttaaaa

SEQ ID NO: 1378 - DNA, 1412 bp, Homo sapiens
ctcttccagaggcaagaccaaccaagatgagtgccttgggagctgtcattgccctcctgctctggggacagctttttgcagtggactcaggcaatgatgtcacggatatcgcagatgacggctgcccgaagccccccgagattgcacatggctatgtggagcactcggttcgctaccagtgtaagaactactacaaactgcgcacagaaggagatggagtatacaccttaaatgataagaagcagtggataaataaggctgttggagataaacttcctgaatgtgaagcagatgacggctgcccgaagccccccgagattgcacatggctatgtggagcactcggttcgctaccagtgtaagaactactacaaactgcgcacagaaggagatggagtgtacaccttaaacaatgagaagcagtggataaataaggctgttggagataaacttcctgaatgtgaagcagtatgtgggaagcccaagaatccggcaaacccagtgcagcggatcctgggtggacacctggatgccaaaggcagctttccctggcaggctaagatggtttcccaccataatctcaccacaggtgccacgctgatcaatgaacaatggctgctgaccacggctaaaaatctcttcctgaaccattcagaaaatgcaacagcgaaagacattgcccccactttaacactctatgtggggaaaaagcagcttgtagagattgagaaggttgttctacaccctaactactcccaagtagatattgggctcatcaaactcaaacagaaggtgtctgttaatgagagagtgatgcccatctgcctaccatccaaggattatgcagaagtagggcgtgtgggttatgtttctggctgggggcgaaatgccaattttaaatttactgaccatctgaagtatgtcatgctgcctgtggctgaccaagaccaatgcataaggcattatgaaggcagcacagtccccgaaaagaagacaccgaagagccctgtaggggtgcagcccatactgaatgaacacaccttctgtgctggcatgtctaagtaccaagaagacacctgctatggcgatgcgggcagtgcctttgccgttcacgacctggaggaggacacctggtatgcgactgggatcttaagctttgataagagctgtgctgtggctgagtatggtgtgtatgtgaaggtgacttccatccaggactgggttcagaagaccatagctgagaactaatgcaaggctggccggaagcccttgcctgaaagcaagatttcagcctggaagagggcaaagtggacgggagtggacaggagtggatgcgataagatgtggtttgaagctgatgggtgccagccctgcattgctgagtcaatcaataaagagctttcttttgaccca

SEQ ID NO: 1379 - DNA, 859 bp, Homo sapiens
ggtgtacagcaagctgtgattcttgggaaaactaaaaaagttttctgggacaacggggccccagagtgatggcagacaatgtcagccactaacaacatagcccaggcccggaagctggtggaacagctacgcatagaagccgggattgagcgcatcaaggtctccaaagcggcgtctgacctcatgagctactgtgagcaacatgctcggaacgaccccctgctggtcggagtccctgcctcggagaacccctttaaggacaagaaaccttgtattattttataactgtgttctcatatgttctctctctctctctttctttctctctctctctctgtctctgtctctgtctcaggcagggcatcattcagtaattagctcaaacaaaacatctcaagtccccaaaacctttaattccaaaagaaatcccccctctaccccgccaaaaaaggcgttcccaccgcccggatggggtagaatggaccttgtaggtggagatgaattttcaggtccgaccccatggccttctcagtttgggccaaaagggatggaggctttacggccacttcccgttcggaataactgaaatccccagcgatggggtaacaattttttaaaactctcgattgccgtttcaattgtggaccggcgccgagggggaaagggaggtgacttcgcccggtggcaatagttccgggagaattggccattggtaaaaagacttcatagggtcactggaatgctttgtgttgtttttaagtagaggtaaaattgagatggggggcgggaggtgacatcatgaagttttttggaaatatctctttatttaaaaaattgttactccatacggctaaaaaag

SEQ ID NO: 1380 - DNA, 2966 bp, Homo sapiens
gtttgaatgagactcgtcgcaccgaagccgccgccaccaccgcgcctccgcctcggccgccgccgcagctgctcctggtccccgtccctttgccgccctcgtcaggcccagctctcctgcgccgccgcctcccgccgcgccccgccatgccgctctactccgttactgtaaaatggggaaaggagaaatttgaaggtgtagaattgaatacagatgaacctccaatggtattcaaggctcagctgtttgcgttgactggagtccagcctgccagacagaaagttatggtgaaaggaggaacgctaaaggatgatgattggggaaacatcaaaataaaaaatggaatgactctactaatgatggggtcagcagatgctcttccagaagaaccctcagccaaaactgtcttcgtagaagacatgacagaagaacagttagcatctgctatggagttaccatgtggattgacaaaccttggtaacacttgttacatgaatgccacagttcagtgtattcgttctgtgcctgaactcaaagatgcccttaaaaggtatgcaggtgccttgagagcttcaggggaaatggcttcagcgcagtatattactgcagcccttagagatttgtttgattccatggataaaacttcttccagtattccacctattattctactgcagtttttgcacatggctttcccacagtttgccgagaaaggtgaacaaggacagtatcttcaacaggatgctaatgaatgttggatacaaatgatgcgagtattgcaacagaaattggaagcaatagaggatgattctgttaaagagacagactcctcatctgcatcggcagcgacaccttctaaaaagaaaagtttaatcgatcagttcttcggtgttgagtttgaaactaccatgaaatgtacagaatctgaagaagaagaagtcaccaaaggaaaggaaaatcaacttcagcttagctgttttatcaatcaggaagtcaagtatctttttacaggacttaaattgcgacttcaggaagaaatcaccaaacagtctccaacgttgcaaagaaatgccttgtatatcaaatcttccaagatcagccggctgcctgcttacttgaccattcagatggttcgatttttttataaagagaaggaatctgtgaatgccaaagttcttaaggatgttaaatttcctcttatgttggatatgtatgaactgtgtacaccagaacttcaagagaaaatggtgtcttttcgatccaaattcaaggatctagaagataaaaaagtgaatcagcagccaaatacaagtgacaaaaagagtagtccccagaaagaagttaagtatgaacccttttcttttgctgatgatattggctccaataattgtggatactatgacttacaagcagtactaacacaccagggaaggtctagttcttcaggtcattatgtatcatgggtgaaaaggaaacaagatgaatggattaagtttgatgatgacaaagtcagcatcgtaacaccagaagatatcttacggctttctggtggtggagactggcatatcgcttacgttctactctatgggcctcgcagagttgaaataatggaagaggaaagtgaacagtaatcttcattttagtatttatgcttagatgtgaaaataaatgttatttgttgatcatttctataatccagagctttagaggaagacacataggtgggtttatgtttcacctcatttggaacaaaagaggacagaagcagaccactctgtgcaccaacctaaaaaattacagagaagagaaaattatctttggattgtgctgccctatataaaggtggcagaaagacatttttaaaaagcttattatttcttgcattattttaaaaagttcagagttgaaatgcctttcaaccatttccttctgtggtcatttttcttgctgcctttttcacccaagattcagcagtcagatgtttactgcacacctattacctattatttgctgttcttgcatggttcaaaccaccattctgtagccacccatcctttgccttatctaacaaacatttttccaggaaggtggaaaaggaagtgttgctctcattgtgtgactcagtgctgctgtccatcccatggaaacatgggcacaatcaagtatttgtccagcctattgcaggcttttcctgactttaaaataaattgtgatcaataatagtacctttgattatacatttattattgtgtctctctctgatgtactgtggattgtacatttaactttggaatggctttgtaataatcagtcttaagaaaatgttgacaagctctggttgcttatttttagaaaatgaggacatttaataataataaaaaaaaagggattaatagcttttgacctcaagtcttttgtcttctgagtgttggagcttggctgaagacatgtttaatactgtacaatttctgaagatggttattaacactgtgctgttaagcatccatttaaaaatatttgttatcttctttgcctgcctgtattttaaaaagaaatacaaagttgtaaaagtaatggatttctttggatgctgaatgcagtgatgttatcagtcagattctttccttggctcagttgtgtttgtatttcctttcttaattccccaaatcttggctgggcacggtggctcacgcctgtaatcccagcactttgggaggctgaggcaggtggttcactggaggttgagttcgagaccagcctggccacatggtgaaaccctgtctctactaaagatataaaaattagctggatgtggtggtgcacacctgtgatcccagctacttgggaggctgaggtgggagaattgcttgaacctggaaggcagaagttgcagtgagctgagatcacaccactgcactccagcctgggtgacagagagactctgtctcaaaaaaaaaaaaaaaaaa

SEQ ID NO: 1381 - DNA, 4359 bp, Homo sapiens
gtgagctgggctggcttccgtcctggtagccaaggctaattctccctcgagttcttgggagatgggcatttggcgagaaggctggcgttagtgaagcgcgcccggcgtcacggtgagtgcgggtcttgggccctagcacctgttctctgggaagtcgtccgctgtgaacgatgaacgcctttccttccaccagctgctggttaccccggagacaagctctgtccgcggagaggagtgggacaactcctaaaggaaagaagcacttgtaaggaaatatagcatccattgtgaaagtggaaaagtaaagataattcatcatgcctgctgtggcttcagttcctaaagaactctacctcagttcttcactaaaagaccttaataagaagacagaagttaaaccagagaaaataagcactaagagttatgtgcacagtgccctgaagatctttaagacagcagaagaatgcagattagatcgtgatgaggaaagggcctatgtactatatatgaaatacgtgactgtttataatcttatcaaaaaaagacctgatttcaagcaacagcaggattatttccattcaatacttggacctggaaacatcaaaaaagctgtcgaagaagctgaaagactctctgaaagccttaaattaagatatgaagaagctgaagtccggaaaaaacttgaggaaaaagacaggcaggaggaagcacagcggctacaacaaaaaaggcaggaaacaggaagagaggatggtggcacattggctaaaggctctttggagaatgttttggattccaaagacaaaacccaaaagagcaatggtgaaaagaatgaaaaatgtgagaccaaagagaaaggagcaatcacagcaaaggaactatacacaatgatgacggataaaaacatcagcttgattataatggatgctcgaagaatgcaggattatcaggattcctgtattttacattctctcagtgttcctgaagaagccatcagtccaggagtcactgctagttggattgaagcacacctgccagatgattctaaagacacatggaagaagagggggaatgtggagtatgtggtacttcttgactggtttagttctgccaaagatttacagattggaacaactctccggagtctgaaagatgcacttttcaagtgggaaagtaaaactgtcctgcgcaatgagcctttggttttagagggaggctatgaaaactggctcctttgttatccccagtatacaacaaatgctaaggtcactccacccccacgacgccagaatgaagaggtgtctatctcattggattttacttatccctcattggaagaatcaattccttctaaacctgctgcccagacgccacctgcatctatagaagtagatgaaaatatagaattgataagtggtcaaaatgagagaatgggaccactgaatatatcaactccagttgaaccagttgctgcttctaaatctgatgtttcacccataattcagccagtgcctagtataaagaatgttccacagattgatcgtactaaaaaaccagcagtcaaattgcctgaagagcatagaataaaatctgaaagtacaaaccatgagcaacaatctcctcagagtggaaaagttattcctgatcgttccaccaagccagtagttttttctccaactctcatgttaacagatgaagaaaaggctcgtattcatgcagaaactgctcttctaatggaaaaaaacaaacaagaaaaagaacttcgggaaaggcagcaagaggaacagaaagagaaactgaggaaggaagaacaagaacaaaaagccaaaaagaaacaagaagctgaagaaaatgaaattacagagaagcaacaaaaagcaaaagaagaaatggagaagaaagaaagtgaacaggccaagaaagaagataaagaaacctcagcaaagaggggcaaagaaataacaggagtaaaaagacaaagtaaaagtgaacatgaaacttctgatgccaagaaatctgtagaagatagggggaaaaggtgtccaaccccagaaatacagaaaaagtcaacaggagatgtgccccatacatctgtgacaggggattcaggttcaggcaagccatttaagattaaaggacaaccagaaagtggaattctaaggacaggaacttttagagaggatacagacgataccgaaagaaataaagctcaacgagaacctttgacaagagcacgaagtgaagaaatggggaggatcgtaccaggactgccttcaggctgggccaagtttcttgacccaatcactggaacctttcgttattatcattcacccaccaacactgttcatatgtacccaccggaaatggctccttcatctgcacctccttccacccctccaactcataaagccaagccacagattcctgctgagcgggatagggaaccttccaaactgaagcgctcctactcctccccagatataacccaggctattcaagaggaagagaagaggaagccaacagtaactccaacagttaatcgggaaaacaagccaacatgttatcctaaagctgagatctcaaggctttctgcttctcagattcggaacctcaatcctgtttttggaggttctggaccagctcttactggacttcgtaacttaggaaatacttgttatatgaactcaatattgcagtgcctatgtaacgctccacatttggctgattatttcaaccgaaactgttatcaggatgatattaacaggtcaaatttgttggggcataaaggtgaagtggcagaagaatttggtataatcatgaaagccctgtggacaggacagtatagatatatcagtccaaaggactttaaaatcaccattgggaagatcaatgaccagtttgcaggatacagtcagcaagattcacaagaattgcttctgttcctaatggatggtctccatgaagatctaaataaagctgataatcggaagagatataaagaagaaaataatgatcatctcgatgactttaaagctgcagaacatgcctggcagaaacacaagcagctcaatgagtctattattgttgcactttttcagggtcaattcaaatctacagtacagtgcctcacatgtcacaaaaagtctaggacatttgaggccttcatgtatttgtctctaccactagcatccacaagtaaatgtacattacaggattgccttagattattttccaaagaagaaaaactcacagataacaacagattttactgcagtcattgcagagctcgacgggattctctaaaaaagatagaaatctggaagttaccacctgtgcttttagtgcatctgaaacgtttttcctacgatggcaggtggaaacaaaaattacagacatctgtggacttcccgttagaaaatcttgacttgtcacagtatgttattggtccaaagaacaatttgaagaaatataatttgttttctgtttcaaatcactacggtgggctggatggaggccactacacagcctattgtaaaaatgcagcaagacaacggtggtttaagtttgatgatcatgaagtttctgatatctccgtttcttctgtgaaatcttcagcagcttatatcctcttttatacttcattgggaccacgagtaactgatgtagccacataaggagacataggttataaactagttatcttttaaaaggctcagcaacacaactcttgaaatgcttatcaggataatggtagctatagctggccatttagaggaattctaggacagtgggagctgtgttactagcactatataattccggtcagtgctgacaaataacatttaacaagtattgcagtaatcatcacttacaggtaccatttatttcaaaacaacttttttagtctgctccaaagttaaaataattaactagctaagcattattattcaactggtctaaaaactattgttatctttttttttccttttcactgttatggccttttcacatttctaaatcccatcttgatatactatgaatactctagaatgatgtaaagcagataggaatgtatgtgtacatatttattgcatacttgcacatcaaatcgatgtacatagtttaacacgtggtccttttgtgaaacctagaactcagaggattgctttttttctttcagcctattttgagttaacttcagtcctttcttagggaaatgacagggcaaagcaatttttctgttggctttgggctgtatttgtgcactaaatctttattctaaaaaaaaaaatggaaactttaatttttttaaaacgggaatttcatttacagctacattaaaatcttaatgagaaaaat

SEQ ID NO: 1382 - DNA, 2610 bp, Homo sapiens
atcctgggacagggcacagggccatctgtcaccaggggcttagggaaggccgagccagcctgggtcaaagaagtcaaaggggctgcctggaggaggcagcctgtcagctggtgcatcagaggctgtggccaggccagctgggctcggggagcgccagcctgagaggagcgcgtgagcgtcgcgggagcctcgggcaccatgagcgacgtggctattgtgaaggagggttggctgcacaaacgaggggagtacatcaagacctggcggccacgctacttcctcctcaagaatgatggcaccttcattggctacaaggagcggccgcaggatgtggaccaacgtgaggctcccctcaacaacttctctgtggcgcagtgccagctgatgaagacggagcggccccggcccaacaccttcatcatccgctgcctgcagtggaccactgtcatcgaacgcaccttccatgtggagactcctgaggagcgggaggagtggacaaccgccatccagactgtggctgacggcctcaagaagcaggaggaggaggagatggacttccggtcgggctcacccagtgacaactcaggggctgaagagatggaggtgtccctggccaagcccaagcaccgcgtgaccatgaacgagtttgagtacctgaagctgctgggcaagggcactttcggcaaggtgatcctggtgaaggagaaggccacaggccgctactacgccatgaagatcctcaagaaggaagtcatcgtggccaaggacgaggtggcccacacactcaccgagaaccgcgtcctgcagaactccaggcaccccttcctcacagccctgaagtactctttccagacccacgaccgcctctgctttgtcatggagtacgccaacgggggcgagctgttcttccacctgtcccgggaacgtgtgttctccgaggaccgggcccgcttctatggcgctgagattgtgtcagccctggactacctgcactcggagaagaacgtggtgtaccgggacctcaagctggagaacctcatgctggacaaggacgggcacattaagatcacagacttcgggctgtgcaaggaggggatcaaggacggtgccaccatgaagaccttttgcggcacacctgagtacctggcccccgaggtgctggaggacaatgactacggccgtgcagtggactggtgggggctgggcgtggtcatgtacgagatgatgtgcggtcgcctgcccttctacaaccaggaccatgagaagctttttgagctcatcctcatggaggagatccgcttcccgcgcacgcttggtcccgaggccaagtccttgctttcagggctgctcaagaaggaccccaagcagaggcttggcgggggctccgaggacgccaaggagatcatgcagcatcgcttctttgccggtatcgtgtggcagcacgtgtacgagaagaagctcagcccacccttcaagccccaggtcacgtcggagactgacaccaggtattttgatgaggagttcacggcccagatgatcaccatcacaccacctgaccaagatgacagcatggagtgtgtggacagcgagcgcaggccccacttcccccagttctcctactcggccagcagcacggcctgaggcggcggtggactgcgctggacgatagcttggagggatggagaggcggcctcgtgccatgatctgtatttaatggtttttatttctcgggtgcatttgagagaagccacgctgtcctctcgagcccagatggaaagacgtttttgtgctgtgggcagcaccctcccccgcagcggggtagggaagaaaactatcctgcgggttttaatttatttcatccagtttgttctccgggtgtggcctcagccctcagaacaatccgattcacgtagggaaatgttaaggacttctacagctatgcgcaatgtggcattggggggccgggcaggtcctgcccatgtgtcccctcactctgtcagccagccgccctgggctgtctgtcaccagctatctgtcatctctctggggccctgggcctcagttcaacctggtggcaccagatgcaacctcactatggtatgctggccagcaccctctcctgggggtggcaggcacacagcagccccccagcactaaggccgtgtctctgaggacgtcatcggaggctgggcccctgggatgggaccagggatgggggatgggccagggtttacccagtgggacagaggagcaaggtttaaatttgttattgtgtattatgttgttcaaatgcattttgggggtttttaatctttgtgacaggaaagccctcccccttccccttctgtgtcacagttcttggtgactgtcccaccggagcctccccctcagatgatctctccacggtagcacttgaccttttcgacgcttaacctttccgctgtcgccccaggccctccctgactccctgtgggggtggccatccctgggcccctccacgcctcctggccagacgctgccgctgccgctgcaccacggcgtttttttacaacattcaactttagtatttttactattataatataatatggaaccttccctccaaattct

SEQ ID NO: 1383 - DNA, 1582 bp, Homo sapiens
ccgagctgtgcttgtggctgcggctgctaactggctgcgcacagggagctgtcaccatgcctcactcgtacccagccctttctgctgagcagaagaaggagttgtctgacattgccctgcggattgtagccccgggcaaaggcattctggctgcggatgagtctgtaggcagcatggccaagcggctgagccaaattggggtggaaaacacagaggagaaccgccggctgtaccgccaggtcctgttcagtgctgatgaccgtgtgaaaaagtgcattggaggcgtcattttcttccatgagaccctctaccagaaagatgataatggtgttcccttcgtccgaaccatccaggataagggcatcgtcgtgggcatcaaggttgacaagggtgtggtgcctctagctgggactgatggagaaaccaccactcaagggctggatgggctctcagaacgctgtgcccaatacaagaaggatggtgctgactttgccaagtggcgctgtgtgctgaaaatcagtgagcgtacaccctctgcacttgccattctggagaacgccaacgtgctggcccgttatgccagtatctgccagcagaatggcattgtgcctattgtggaacctgaaatattgcctgatggagaccacgacctcaaacgttgtcagtatgttacagagaaggtcttggctgctgtgtacaaggccctgagtgaccatcatgtatacctggaggggaccctgctcaagcccaacatggtgaccccgggccatgcctgtcccatcaagtataccccagaggagattgccatggcaactgtcactgccctgcgtcgcactgtgcccccagctgtcccaggagtgaccttcctgtctgggggtcagagcgaagaagaggcatcattcaacctcaatgccatcaaccgctgcccccttccccgaccctgggcgcttaccttctcctatgggcgtgccctgcaagcctctgcactcaatgcctggcgagggcaacgggacaatgctggggctgccactgaggagttcatcaagcgggctgaggtgaatgggcttgcagcccagggcaagtatgaaggcagtggagaagatggtggagcagcagcacagtcactctacattgccaaccatgcctactgagtatccactccataccacagcccttggcccagccatctgcacccacttttgcttgtagtcatggccagggccaaatagctatgcagagcagagatgccttcacctggcaccaacttgtcttcctttctctcttcccttcccctctctcattgctgcacctgggaccataggatgggaggatagggagcccctcatgactgagggcagaagaaattgctagaagtcagaacaggatggctgggtctccccctacctcttccagctcccacaattttcccatgatgaggtagcttctccctgggctctccttcttgcctgccctgtctcctgggatcagagggtagtacagaagccctgactcatgccttgagtacataccatacagcaaataaatggtagcaaaacaaaaaaaaaaaaaaaaaaaaaaaaaa

SEQ ID NO: 1384 - DNA, 1058 bp, Homo sapiens
gccttgacttcatctcagctccagagcccgccctctcttcctgcagcctgggaacttcagccggctggagcccaccatggctgcaatccgaaagaagctggtgatcgttggggatggtgcctgtgggaagacctgcctcctcatcgtcttcagcaaggatcagtttccggaggtctacgtccctactgtctttgagaactatattgcggacattgaggtggacggcaagcaggtggagctggctctgtgggacacagcagggcaggaagactatgatcgactgcggcctctctcctacccggacactgatgtcatcctcatgtgcttctccatcgacagccctgacagcctggaaaacattcctgagaagtggaccccagaggtgaagcacttctgccccaacgtgcccatcatcctggtggggaataagaaggacctgaggcaagacgagcacaccaggagagagctggccaagatgaagcaggagcccgttcggtctgaggaaggccgggacatggcgaaccggatcagtgcctttggctaccttgagtgctcagccaagaccaaggagggagtgcgggaggtgtttgagatggccactcgggctggcctccaggtccgcaagaacaagcgtcggaggggctgtcccattctctgagatccccccaaagggcccttttcctacatgccccctcccttcacaggggtacagaaattatccccctacaaccccagcctcctgagggctccatactgaaggctccattttcagttccctcctgcccaggactgcattgttttctagccccgaggtgtggcacgggccctccctcccagcgctctgggagccacgcctatgccctgcccttcctcatgggcccctggggatcttgcccctttgaccttccccaaaggatggtcacacaccagcactttatacacttctggctcacaggaaagtgtctgcagtagggacccagagtcccaggcccctggagttgtttctgcaggggccttgtctctcactgcatttggtcaggggggcatgaataaaggct

SEQ ID NO: 1385 - DNA, 1078 bp, Homo sapiens
ctgaccgaccttcagcagggctgtggctaccatgttctctcgcgcgggtgtcgctgggctgtcggcctggaccttgcagccgcaatggattcaagttcgaaatatggcaactttgaaagatatcaccaggagactaaagtccatcaaaaacatccagaaaattaccaagtctatgaaaatggtagcggcagcaaaatatgcccgagctgagagagagctgaaaccagctcgaatatatggattgggatctttagctctgtatgaaaaagctgatatcaaggggcctgaagacaagaagaaacacctccttattggtgtgtcctcagatcgaggactgtgtggtgctattcattcctccattgctaaacagatgaaaagcgaggttgctacactaacagcagctgggaaagaagttatgcttgttggaattggtgacaaaatcagaggcatactttataggactcattctgaccagtttctggtggcattcaaagaagtgggaagaaagccccccacttttggagatgcgtcagtcattgcccttgaattactaaattctggatatgaatttgatgaaggctccatcatctttaataaattcaggtctgtcatctcctataagacagaagaaaagcccatcttttcccttaataccgttgcaagtgctgacagcatgagtatctatgacgatattgatgctgacgtgctgcaaaattaccaagaatacaatctggccaacatcatctactactctctgaaggagtccaccactagtgagcagagtgccaggatgacagccatggacaatgccagcaagaatgcttctgagatgattgacaaattgacattgacattcaaccgtacccgccaagctgtcatcacaaaagagttgattgaaattatctctggtgctgcagctctgtaaagaaggaaaattcagccagttgattttgtttttagcttactgctgcctttgtccgaagaaactgttcctccattatttgaattactgaagacagcaagatatttgtaaattatcttaaaataaacaacttaaaataaaatcattgtttttctt

SEQ ID NO: 1386 - DNA, 3203 bp, Homo sapiens
gagaggcagagatcggggcgagacaatggggatgtgggcgcgggagccccgttccggcttagcagcacctcccagccccgcagaataaaaccgatcgcgccccctccgcgcgcgccctcccccgagtgcggagcgggaggaggcggcggcggccgaggaggaggaggaggaggccccggaggaggaggcgttggaggtcgaggcggaggcggaggaggaggaggccgaggcgccggaggaggccgaggcgccggagcaggaggaggccggccggaggcggcatgagacgagcgtggcggccgcggctgctcggggccgcgctggttgcccattgacagcggcgtctgcagctcgcttcaagatggccgcttggctcgcattcattttctgctgaacgacttttaactttcattgtcttttccgcccgcttcgatcgcctcgcgccggctgctctttccgggattttttatcaagcagaaatgcatcgaacaacgagaatcaagatcactgagctaaatccccacctgatgtgtgtgctttgtggagggtacttcattgatgccacaaccataatagaatgtctacattccttctgtaaaacttgtattgttcgttacctggagaccagcaagtattgtcctatttgtgatgtccaagttcacaagaccagaccactactgaatataaggtcagataaaactctccaagatattgtatacaaattagttccagggcttttcaaaaatgaaatgaagagaagaagggatttttatgcagctcatccttctgctgatgctgccaatggctctaatgaagatagaggagaggttgcagatgaagataagagaattataactgatgatgagataataagcttatccattgaattctttgaccagaacagattggatcggaaagtaaacaaagacaaagagaaatctaaggaggaggtgaatgataaaagatacttacgatgcccagcagcaatgactgtgatgcacttaagaaagtttctcagaagtaaaatggacatacctaatactttccagattgatgtcatgtatgaggaggaacctttaaaggattattatacactaatggatattgcctacatttatacctggagaaggaatggtccacttccattgaaatacagagttcgacctacttgtaaaagaatgaagatcagtcaccagagagatggactgacaaatgctggagaactggaaagtgactctgggagtgacaaggccaacagcccagcaggaggagttccctccacctcttcttgtttgcctagccccagtactccagtgcagtctcctcatccacagtttcctcacatttccagtactatgaatggaaccagcaacagccccagcggtaaccaccaatcttcttttgccaatagacctcgaaaatcatcagtaaatgggtcatcagcaacttcttctggttgatacctgagactgttaaggaaaaaaattttaaacccctgatttatatagatatcttcagccattacgactttctagagctaatacatgtgactatcgtccaatttgctttcttttgtagtgacattaaatttggctataaaagatggactacatgtgatactcctgtccgtcttggttcaaaagaaagattgttgttataaagaattggtttcttggaaagcaggcaagactttttctctgtgttaggaaagatgggaaatggtttctgtaaccattgtttggatttggaagtactctgcagtggacataagcattgggccatagtttgttaatctcaactaacgcctacattacattctccttgatcgttcttgttattacgctgttttgtgaacctgtagaaaaacaagtgctttttatcttgaaattcaaccaacggaaagaatatgcatagaataatgcattctatgatgccatgtcactgtgaataacgatttcttgcagctatttagccattttgattgctgtttgatttatacttctctgttgctacgcaaaaccgatcaaagaaaagtgaacttcagttttacaatctgtatgcctaaaagcgggtactaccgtttattttactgacttgtttaaatgattcgcttttgtaagaatcagatggcattatgcttgttgtacaatgccatattggtatatgacataacaggaaacagtattgtatgatatatctataaatgctataaagaaatattgtgtttcatgcattcagaaatgattgttaaaattctcccaactggttcgacctttgcagatacccataacctatgttgagccttgcttaccagcaaagaatatttttaatgtggatatctaattctaaagtctgttccattagaagcaattggcacatctttctatactttatatacttttctccagtaatacatgtttactttaaaaattgttgcagtgaagaaaaacctttaactgagaaatatggaaaccgtcttaattttccattggctatgatggaattaatattgtattttaaaaatgcatattgatcactataattctaaaacaattttttaaataaaccagcaggttgctaaaagaaggcattttatctaaagttattttaataggtggtatagcagtaattttaaatttaagagttgcttttacagttaacaatggaatatgccttctctgctatgtctgaaaatagaagctatttattatgagcttctacaggtatttttaaatagagcaagcatgttgaatttaaaatatgaataaccccacccaacaattttcagtttattttttgctttggtcgaacttggtgtgtgttcatcagttatttgtgagggtgtttattctatatgaatattgtttcatgtttgtagggaaattgtagctaaacatttcattgtccccagtctgcaaaagaagcacaattctattgctttgtcttgcttatagtcattaaatcattacttttacatatattgctgttacttctgctttctttaaaaatatagtaaaggatgttttatgaagtcacaagatacatatatttttattttgacctaaatttgtacagtcccattgtaagtgttgtttctaattatagatgtaaaatgaaatttcatttgtaattggaaaaaatccaataaaaaggatattcatttagaaaatagctaagatctttaataaaaatttgatatgaaa

SEQ ID NO: 1387 - DNA, 3007 bp, Homo sapiens
aaggagagagggagggcggagggcggaggggcggcgggaggagggcggggaggagcgctcttcctggttgggccctgccctgagctgccaccgggaagccagcctcagggactgcagcgacccccaaacacccctcccccaggatgtcggaggagatcatcacgccggtgtactgcactggggtgtcagcccaagtgcagaagcagcgggccagggagctgggcctgggccgccatgagaatgccatcaagtacctgggccaggattatgagcagctgcgggtgcgatgcctgcagagtgggaccctcttccgtgatgaggccttccccccggtaccccagagcctgggttacaaggacctgggtcccaattcctccaagacctatggcatcaagtggaagcgtcccacggaactgctgtcaaacccccagttcattgtggatggagctacccgcacagacatctgccagggagcactgggggactgctggctcttggcggccattgcctccctcactctcaacgacaccctcctgcaccgagtggttccgcacggccagagcttccagaatggctatgccggcatcttccatttccagctgtggcaatttggggagtgggtggacgtggtcgtggatgacctgctgcccatcaaggacgggaagctagtgttcgtgcactctgccgaaggcaacgagttctggagcgccctgcttgagaaggcctatgccaaggtaaatggcagctacgaggccctgtcagggggcagcacctcagagggctttgaggacttcacaggcggggttaccgagtggtacgagttgcgcaaggctcccagtgacctctaccagatcatcctcaaggcgctggagcggggctccctgctgggctgctccatagacatctccagcgttctagacatggaggccatcactttcaagaagttggtgaagggccatgcctactctgtgaccggggccaagcaggtgaactaccgaggccaggtggtgagcctgatccggatgcggaacccctggggcgaggtggagtggacgggagcctggagcgacagctcctcagagtggaacaacgtggacccatatgaacgggaccagctccgggtcaagatggaggacggggagttctggatgtcattccgagacttcatgcgggagttcacccgcctggagatctgcaacctcacacccgacgccctcaagagccggaccatccgcaaatggaacaccacactctacgaaggcacctggcggcgggggagcaccgcggggggctgccgaaactacccagccaccttctgggtgaaccctcagttcaagatccggctggatgagacggatgacccggacgactacggggaccgcgagtcaggctgcagcttcgtgctcgcccttatgcagaagcaccgtcgccgcgagcgccgcttcggccgcgacatggagactattggcttcgcggtctacgaggtccctccggagctggtgggccagccggccgtacacttgaagcgtgacttcttcctggccaatgcgtctcgggcgcgctcagagcagttcatcaacctgcgagaggtcagcacccgcttccgcctgccacccggggagtatgtggtggtgccctccaccttcgagcccaacaaggagggcgacttcgtgctgcgcttcttctcagagaagagtgctgggactgtggagctggatgaccagatccaggccaatctccccgatgagcaagtgctctcagaagaggagattgacgagaacttcaaggccctcttcaggcagctggcaggggaggacatggagatcagcgtgaaggagttgcggacaatcctcaataggatcatcagcaaacacaaagacctgcggaccaagggcttcagcctagagtcgtgccgcagcatggtgaacctcatggatcgtgatggcaatgggaagctgggcctggtggagttcaacatcctgtggaaccgcatccggaattacctgtccatcttccggaagtttgacctggacaagtcgggcagcatgagtgcctacgagatgcggatggccattgagtcggcaggcttcaagctcaacaagaagctgtacgagctcatcatcacccgctactcggagcccgacctggcggtcgactttgacaatttcgtttgctgcctggtgcggctagagaccatgttccgatttttcaaaactctggacacagatctggatggagttgtgacctttgacttgtttaagtggttgcagctgaccatgtttgcatgaggcagggactcggtcccccttgccgtgctcccctccctcctcgtctgccaagcctcgcctcctaccacaccacaccaggccaccccagctgcaagtgccttccttggagcagagaggcagcctcgtcctcctgtcccctctcctcccagccaccatcgttcatctgctccgggcagaactgtgtggcccctgcctgtgccagccatgggctcgggatggactccctgggccccacccattgccaagccaggaaggcagctttcgcttgttcctgcctcgggacagccccgggtttccccagcatcctgatgtgtcccctctccccacttcagaggccacccactcagcaccaccggcctggccttgcctgcagactataaactataaccactagctcgacacagtctgcagtccaggcgtgtggagccgcctcccggctcggggaggccccggggctgggaacgcctgtgccttcctgcgccgaagccaacgccccctctgtccttccctggccctgctgccgaccaggagctgcccagcctgtgggcggtcggccttccctccttcgctccttttttatattagtgattttaaaggggactcttcagggacttgtgtactggttatgggggtgccagaggcactaggcttggggtggggaggtcccgtgttccatatagaggaaccccaaataataaaaggccccacatctgtctgtg

SEQ ID NO: 1388 - DNA, 1248 bp, Homo sapiens
gacagcctcgcttggacgcagagcccggcccgacgccgccatgagcgccgcgctcttcagcctggacggcccggcgcgcggcgcgccctggcctgcggagcctgcgcccttctacgaaccgggccgggcgggcaagccgggccgcggggccgagccaggggccctaggcgagccaggcgccgccgcccccgccatgtacgacgacgagagcgccatcgacttcagcgcctacatcgactccatggccgccgtgcccaccctggagctgtgccacgacgagctcttcgccgacctcttcaacagcaatcacaaggcgggcggcgcggggcccctggagcttcttcccggcggccccgcgcgccccttgggcccgggccctgccgctccccgcctgctcaagcgcgagcccgactggggcgacggcgacgcgcccggctcgctgttgcccgcgcaggtgggcccgtgcgcacagaccgtggtgagcttggcggccgcagggcagcccaccccgcccacgtcgccggagccgccgcgcagcagccccaggcagacccccgcgcccggccccgcccgggagaagagcgccggcaagaggggcccggaccgcggcagccccgagtaccggcagcggcgcgagcgcaacaacatcgccgtgcgcaagagccgcgacaaggccaagcggcgcaaccaggagatgcagcagaagttggtggagctgtcggctgagaacgagaagctgcaccagcgcgtggagcagctcacgcgggacctggccggcctccggcagttcttcaagcagctgcccagcccgcccttcctgccggccgccgggacagcagactgccggtaacgcgcggccggggcgggagagactcagcaacgacccatacctcagacccgacggcccggagcggagcgcgccctgccctggcgcagccagagccgccgggtgcccgctgcagtttcttgggacataggagcgcaaagaagctacagcctggacttaccaccactaaactgcgagagaagctaaacgtgtttattttcccttaaattatttttgtaatggtagctttttctacatcttactcctgttgatgcagctaaggtacatttgtaaaaagaaaaaaaaccagacttttcagacaaaccctttgtattgtagataagaggaaaagactgagcatgctcacttttttatattaatttttacagtatttgtaagaataaagcagcatttgaaatcgc

SEQ ID NO: 1389 - DNA, 1383 bp, Homo sapiens
gaattccgaagctgaaaccggagccggtccgctgggcggcgggcgccgggggccggaggggcgcgcgcggcggcggcaccccagcgtttaggcgcggaggcagccatggcgggcaacttcgactcggaggagcggagtagctggtactgggggcggttgagtcggcaggaggcggtggcgctgctgcagggccagcggcacggggtgttcctggtgcgggactcgagcaccagccccggggactatgtgctcagcgtctcagagaactcgcgcgtctcccactacatcatcaacagcagcggcccgcgcccgccggtgccaccgtcgcccgcccagcctccgcccggggtgagcccctccagactccgaataggagatcaagagtttgattcattgcctgctttactggaattctacaaaatacactattgggacactacaacgttgatagaaccagtttccagatccaggcagggtagtggagtgattctcaggcaggaggaggcggagtatgtgcgagccctctttgactttaatgggaatgatgaggaagatcttccctttaagaaaggagacatcttgagaatccgggacaagcctgaagagcagtggtggaatgcggaggacagcgaaggcaagagagggatgattccagtcccttacgtcgagaagtatagacctgcctccgcctcagtatcggctctgattggaggtcggtgagctggtaaaggttacgaagattaatgtgagtggtcagtgggaaggggggtgtaatggcaaacgaggtcacttcccattcacacatgtccgtctgctggatcaacagaatcccgatgaggacttcagctgagtatagttcaacagttttgctgacagatgggaacaatcttttttttttttttttccaactgccatctatacaattttcttacagatgtcaaaagcagtctagtttatataagcattctgttacctgtgatattttttagactgaactgctccattcctagtcttaattaccatattcagggtacgaactggagggcttgtgtgttagcttctgaattggcaattggaggcggtagtggtcgtgcctgtgtgtatcagaagggataggtatcttgcctcctttctctcaggcagtgcaaatcaccctgtggaaaaccgatggacaggaaggagtgttacacactgcttaccctgatttattcagtggttttgttttcattctggaaccatactatcaaatggcgacagactgttccgttccacccccgtgaagagtaatcatgcaccgtgtgaatagtatcaagcaggattgctttcattgtatggagcgtgaccagggtatgactcattctgacattcagatcctaagaattc

SEQ ID NO: 1390 - DNA, 451 bp, Homo sapiens
acttccctgttcactttggttccagcatcctgtccagcaaagaagcaatcagccaaaatgatacctggaggcttatctgaggccaaacccgccactccagaaatccaggagattgttgataaggttaaaccacagcttgaagaaaaaacaaatgagacttatggaaaattggaagctgtgcagtataaaactcaagttgttgctggaacaaattactacattaaggtacgagcaggtgataataaatatatgcacttgaaagtattcaaaagtcttcccggacaaaatgaggacttggtacttactggataccaggttgacaaaaacaaggatgacgagctgacgggcttttagcagcatgtacccaaagtgttctgattccttcaactggctactgagtcatgatccttgctgataaatataaccatcaataaagaagcattcttttcca

SEQ ID NO: 1391 - DNA, 2045 bp, Homo sapiens
ggcacgaggcacttccgggtagtgctccacgggcacgagccgcgattgggctaccgtagatggggtacttccggtgtgcaggtgctgggtccttcggcaggaggaggaagatggagcccagcaccgcggcccgggcttgggccctcttttggttgctgctgcccttgcttggcgcggtttgcgccagcggaccccgcaccttagtgctgctggacaacctcaacgtgcgggagactcattcgcttttcttccggagcctgaaggaccggggctttgagctcacattcaagaccgctgatgaccccagcctgtctctcataaagtatggggaattcctctatgacaatctcatcattttctccccttcggtagaagattttggaggcaacatcaacgtggagaccatcagtgcctttattgacggtggaggcagtgtgctggtagctgccagctccgacattggtgaccctcttcgagagctgggcagtgagtgcgggattgagtttgacgaggagaaaacggctgtcattgaccatcacaactatgacatctcagaccttggccagcatacgctcatcgtggctgacactgagaacctgctgaaggccccaaccatcgttgggaaatcatctctaaatcccatcctctttcgaggtgttgggatggtggccgatcctgataaccctttggtgctggacatcctgacgggctcttccacctcttactccttcttcccggacaagcctatcacccagtatccacatgcggtggggaagaacaccctcctcattgctgggctccaggccaggaacaatgcccgcgtcatcttcagcggctccctcgacttcttcagcgactccttcttcaactcagcagtgcagaaggcggcgcccggctcccagaggtattcccagacaggcaactatgaactagctgtggccctctcccgctgggtgttcaaggaggagggtgtcctccgtgtggggcctgtgtcccatcatcgggtgggtgagacagccccacccaatgcctacactgtcactgacctagtggagtatagcatcgtgatccagcagctctcaaatggcaaatgggtcccctttgatggcgatgacattcagctggagtttgtccgcattgatccttttgtgaggaccttcctgaagaagaaaggtggcaaatacagtgttcagttcaagttgcccgacgtgtatggtgtattccagtttaaagtggattacaaccggctaggctacacacacctgtactcttccactcaggtatccgtgcggccactccagcacacgcagtatgagcgcttcatcccctcggcctacccctactacgccagcgccttctccatgatgctggggctcttcatcttcagcatcgtcttcttgcacatgaaggagaaggagaagtccgactgaggggctagagccctctccgcacagcgtggagacggggcagggaggggggttattaggattggtggttttgttttgctttgtttaaagccgtgggaaaatggcacaactttacctctgtgggagatgcaacactgagagccaaggggtgggagttgggataatttttatataaaagaagtttttccactttgaattgctaaaagtggcatttttcctatgtgcagtcactcctctcatttctaaaatagggacgtggccaggcacggtggctcatgcctgtaatcccagcactttgggaggccgaggcaggcggctcacgaggtcaggagatcgagactatcctggctaacacggtaaaaccctgtctctactaaaagtacaaaaaattagctgggcgtggtggtgggcacctgtagtcccagctactcgggaggctgaggcaggagaaaggcatgaatccaggaggcagagcttgcagtgagctgagatcacgccattgcactccagcctgggcaacagtgttaagactctgtctcaaatataaataaataaataaataaataaaaataaagcgagatgttgccctcaaaaaaaaaaaaaaaaaaaaaaaaaaaa

SEQ ID NO: 1392 - DNA, 870 bp, Homo sapiens
atgacaggagtgtttgacagaagggtccccagcatccgatccggcgacttccaagctccgttccagacgtccgcagctatgcaccatccgtctcaggaatcgccaactttgcccgagtcttcagctaccgattctgactactacagccctacggggggagccccgcacggctactgctctcctacctcggcttcctatggcaaagctctcaacccctaccagtatcagtatcacggcgtgaacggctccgccgggagctacccagccaaagcttatgccgactatagctacgctagctcctaccaccagtacggcggcgcctacaaccgcgtcccaagcgccaccaaccagccagagaaagaagtgaccgagcccgaggtgagaatggtgaatggcaaaccaaagaaagttcgtaaacccaggactatttattccagctttcagctggccgcattacagagaaggtttcagaagactcagtacctcgccttgccggaacgcgccgagctggccgcctcgctgggattgacacaaacacaggtgaaaatctggtttcagaacaaaagatccaagatcaagaagatcatgaaaaacggggagatgcccccggagcacagtcccagctccagcgacccaatggcgtgtaactcgccgcagtctccagcggtgtgggagccccagggctcgtcccgctcgctcagccaccaccctcatgcccaccctccgacctccaaccagtccccagcgtccagctacctggagaactctgcatcctggtacacaagtgcagccagctcaatcaattcccacctgccgccgccgggctccttacagcacccgctggcgctggcctccgggacactctattag

SEQ ID NO: 1393 - DNA, 5532 bp, Homo sapiens
gccgcgctgcgccggagtcccgagctagccccggcgccgccgccgcccagaccggacgacaggccacctcgtcggcgtccgcccgagtccccgcctcgccgccaacgccacaaccaccgcgcacggccccctgactccgtccagtattgatcgggagagccggagcgagctcttcggggagcagcgatgcgaccctccgggacggccggggcagcgctcctggcgctgctggctgcgctctgcccggcgagtcgggctctggaggaaaagaaagtttgccaaggcacgagtaacaagctcacgcagttgggcacttttgaagatcattttctcagcctccagaggatgttcaataactgtgaggtggtccttgggaatttggaaattacctatgtgcagaggaattatgatctttccttcttaaagaccatccaggaggtggctggttatgtcctcattgccctcaacacagtggagcgaattcctttggaaaacctgcagatcatcagaggaaatatgtactacgaaaattcctatgccttagcagtcttatctaactatgatgcaaataaaaccggactgaaggagctgcccatgagaaatttacaggaaatcctgcatggcgccgtgcggttcagcaacaaccctgccctgtgcaacgtggagagcatccagtggcgggacatagtcagcagtgactttctcagcaacatgtcgatggacttccagaaccacctgggcagctgccaaaagtgtgatccaagctgtcccaatgggagctgctggggtgcaggagaggagaactgccagaaactgaccaaaatcatctgtgcccagcagtgctccgggcgctgccgtggcaagtcccccagtgactgctgccacaaccagtgtgctgcaggctgcacaggcccccgggagagcgactgcctggtctgccgcaaattccgagacgaagccacgtgcaaggacacctgccccccactcatgctctacaaccccaccacgtaccagatggatgtgaaccccgagggcaaatacagctttggtgccacctgcgtgaagaagtgtccccgtaattatgtggtgacagatcacggctcgtgcgtccgagcctgtggggccgacagctatgagatggaggaagacggcgtccgcaagtgtaagaagtgcgaagggccttgccgcaaagtgtgtaacggaataggtattggtgaatttaaagactcactctccataaatgctacgaatattaaacacttcaaaaactgcacctccatcagtggcgatctccacatcctgccggtggcatttaggggtgactccttcacacatactcctcctctggatccacaggaactggatattctgaaaaccgtaaaggaaatcacagggtttttgctgattcaggcttggcctgaaaacaggacggacctccatgcctttgagaacctagaaatcatacgcggcaggaccaagcaacatggtcagttttctcttgcagtcgtcagcctgaacataacatccttgggattacgctccctcaaggagataagtgatggagatgtgataatttcaggaaacaaaaatttgtgctatgcaaatacaataaactggaaaaaactgtttgggacctccggtcagaaaaccaaaattataagcaacagaggtgaaaacagctgcaaggccacaggccaggtctgccatgccttgtgctcccccgagggctgctggggcccggagcccagggactgcgtctcttgccggaatgtcagccgaggcagggaatgcgtggacaagtgcaagcttctggagggtgagccaagggagtttgtggagaactctgagtgcatacagtgccacccagagtgcctgcctcaggccatgaacatcacctgcacaggacggggaccagacaactgtatccagtgtgcccactacattgacggcccccactgcgtcaagacctgcccggcaggagtcatgggagaaaacaacaccctggtctggaagtacgcagacgccggccatgtgtgccacctgtgccatccaaactgcacctacggatgcactgggccaggtcttgaaggctgtccaacgaatgggcctaagatcccgtccatcgccactgggatggtgggggccctcctcttgctgctggtggtggccctggggatcggcctcttcatgcgaaggcgccacatcgttcggaagcgcacgctgcggaggctgctgcaggagagggagcttgtggagcctcttacacccagtggagaagctcccaaccaagctctcttgaggatcttgaaggaaactgaattcaaaaagatcaaagtgctgggctccggtgcgttcggcacggtgtataagggactctggatcccagaaggtgagaaagttaaaattcccgtcgctatcaaggaattaagagaagcaacatctccgaaagccaacaaggaaatcctcgatgaagcctacgtgatggccagcgtggacaacccccacgtgtgccgcctgctgggcatctgcctcacctccaccgtgcaactcatcacgcagctcatgcccttcggctgcctcctggactatgtccgggaacacaaagacaatattggctcccagtacctgctcaactggtgtgtgcagatcgcaaagggcatgaactacttggaggaccgtcgcttggtgcaccgcgacctggcagccaggaacgtactggtgaaaacaccgcagcatgtcaagatcacagattttgggctggccaaactgctgggtgcggaagagaaagaataccatgcagaaggaggcaaagtgcctatcaagtggatggcattggaatcaattttacacagaatctatacccaccagagtgatgtctggagctacggggtgaccgtttgggagttgatgacctttggatccaagccatatgacggaatccctgccagcgagatctcctccatcctggagaaaggagaacgcctccctcagccacccatatgtaccatcgatgtctacatgatcatggtcaagtgctggatgatagacgcagatagtcgcccaaagttccgtgagttgatcatcgaattctccaaaatggcccgagacccccagcgctaccttgtcattcagggggatgaaagaatgcatttgccaagtcctacagactccaacttctaccgtgccctgatggatgaagaagacatggacgacgtggtggatgccgacgagtacctcatcccacagcagggcttcttcagcagcccctccacgtcacggactcccctcctgagctctctgagtgcaaccagcaacaattccaccgtggcttgcattgatagaaatgggctgcaaagctgtcccatcaaggaagacagcttcttgcagcgatacagctcagaccccacaggcgccttgactgaggacagcatagacgacaccttcctcccagtgcctgaatacataaaccagtccgttcccaaaaggcccgctggctctgtgcagaatcctgtctatcacaatcagcctctgaaccccgcgcccagcagagacccacactaccaggacccccacagcactgcagtgggcaaccccgagtatctcaacactgtccagcccacctgtgtcaacagcacattcgacagccctgcccactgggcccagaaaggcagccaccaaattagcctggacaaccctgactaccagcaggacttctttcccaaggaagccaagccaaatggcatctttaagggctccacagctgaaaatgcagaatacctaagggtcgcgccacaaagcagtgaatttattggagcatgaccacggaggatagtatgagccctaaaaatccagactctttcgatacccaggaccaagccacagcaggtcctccatcccaacagccatgcccgcattagctcttagacccacagactggttttgcaacgtttacaccgactagccaggaagtacttccacctcgggcacattttgggaagttgcattcctttgtcttcaaactgtgaagcatttacagaaacgcatccagcaagaatattgtccctttgagcagaaatttatctttcaaagaggtatatttgaaaaaaaaaaaaaaagtatatgtgaggatttttattgattggggatcttggagtttttcattgtcgctattgatttttacttcaatgggctcttccaacaaggaagaagcttgctggtagcacttgctaccctgagttcatccaggcccaactgtgagcaaggagcacaagccacaagtcttccagaggatgcttgattccagtggttctgcttcaaggcttccactgcaaaacactaaagatccaagaaggccttcatggccccagcaggccggatcggtactgtatcaagtcatggcaggtacagtaggataagccactctgtcccttcctgggcaaagaagaaacggaggggatgaattcttccttagacttacttttgtaaaaatgtccccacggtacttactccccactgatggaccagtggtttccagtcatgagcgttagactgacttgtttgtcttccattccattgttttgaaactcagtatgccgcccctgtcttgctgtcatgaaatcagcaagagaggatgacacatcaaataataactcggattccagcccacattggattcatcagcatttggaccaatagcccacagctgagaatgtggaatacctaaggataacaccgcttttgttctcgcaaaaacgtatctcctaatttgaggctcagatgaaatgcatcaggtcctttggggcatagatcagaagactacaaaaatgaagctgctctgaaatctcctttagccatcaccccaaccccccaaaattagtttgtgttacttatggaagatagttttctccttttacttcacttcaaaagctttttactcaaagagtatatgttccctccaggtcagctgcccccaaaccccctccttacgctttgtcacacaaaaagtgtctctgccttgagtcatctattcaagcacttacagctctggccacaacagggcattttacaggtgcgaatgacagtagcattatgagtagtgtgaattcaggtagtaaatatgaaactagggtttgaaattgataatgctttcacaacatttgcagatgttttagaaggaaaaaagttccttcctaaaataatttctctacaattggaagattggaagattcagctagttaggagcccattttttcctaatctgtgtgtgccctgtaacctgactggttaacagcagtcctttgtaaacagtgttttaaactctcctagtcaatatccaccccatccaatttatcaaggaagaaatggttcagaaaatattttcagcctacagttatgttcagtcacacacacatacaaaatgttccttttgcttttaaagtaatttttgactcccagatcagtcagagcccctacagcattgttaagaaagtatttgatttttgtctcaatgaaaataaaactatattcatttcc

SEQ ID NO: 1394 - DNA, 1600 bp, Homo sapiens
gggcggaaaagcctgtttacacagactgcacaccgcctggggaataatgcagtaaaggaagtgagccggctcggcctgactgctccaacttcctgctctcacacacaccagaggggaaaaaaaaagaggagcgagagaaagaaaaaaagggggaaaaatcaggatctcattacaagagccacagaccgtctgcagacgcctgtcagcatggaaagtcgggggctttcgcccgggtcctcctagaaattccccccgaagaagactcccccacatctgggtatggagagtgcaatcacgctgtggcagttcctgttgcagttgctgctggatcagaaacatgagcatttgatctgctggacctcgaacgatggtgaattcaagctcctcaaagcagaagaagtggccaagctgtggggactccgaaaaaacaaaacaaatatgaactatgataagctgagcagagccctgcgatactattatgacaagaacatcatcaagaaggtgatcgggcagaagtttgtgtacaagtttgtctctttcccggagatcctgaagatggatcctcacgcggtggagatcagccgggagagccttctgctgcaggacagcgactgcaaggtgtctccggagggccgcgaggcccacaaacacggcctggccgtcctcagaagcacgagccgcaacgaatacatccactcaggcctgtactcgtccttcaccattaattccctggagaacccaccagacgccttcaaggccatcaagagggagaagctggaggagccgcccgaagacagcccccccgtggaagaagtcaggactgtgatcaggtttgtgaccaataaaaccgacaagcacgtcaccaggccggtggtgtccctgccttccacgtcagaggctgcggcggcgtccgccttcctggcctcgtccgtctcggccaagatctcctctttaatgttgccaaacgctgccagtatttcatccgcctcacccttctcatctcggtccccgtccctgtcccccaagtcacccctcccttctgaacacagaagcctcttcctggaggccgcctgccatgactccgattccctggagcccttgaacctgtcatcgggctccaagaccaagtctccatctcttcccccaaaggccaaaaaacccaaaggcttggaaatctcagcgcccccgctggtgctctccggcaccgacatcggctccatcgccctcaacagcccagccctcccctcgggatccctcaccccagccttcttcaccgcacagacaccaaatggattgcttctgactccgagtccactgctctccagcatacatttctggagcagccttagtccagttgctccgctgagtcctgccaggctgcaagggccaagcacgctgttccagttccccacactgcttaatggccacatgccagtgccaatccccagtctggacagagctgcttctccagtactgctttcttcaaactctcagaaatcctgatgacgtctggccacaattaaggactcattaactgatgaaacaaatttgtccccacgggctagtttacctgtgtcgtgagaaggacattgtgaaactc

SEQ ID NO: 1395 - DNA, 2500 bp, Homo sapiens
gtgtcgctccagctcagagctcccggagccgcccggccagcgtccggcctccctgatcgtctctggccggcgccctcgccctcgcccggcgcgcaccgagcagccgcgggcgccgagcagccaccgtcccgaccaagcgccggccctgcccgcagcggcaggatgaatgatttcggaatcaagaatatggaccaggtagcccctgtggctaacagttacagagggacactcaagcgccagccagcctttgacacctttgatgggtccctgtttgctgtttttccttctctaaatgaagagcaaacactgcaagaagtgccaacaggcttggattccatttctcatgactccgccaactgtgaattgcctttgttaaccccgtgcagcaaggctgtgatgagtcaagccttaaaagctaccttcagtggcttcaaaaaggaacagcggcgcctgggcattccaaagaacccctggctgtggagtgagcaacaggtatgccagtggcttctctgggccaccaatgagttcagtctggtgaacgtgaatctgcagaggttcggcatgaatggccagatgctgtgtaaccttggcaaggaacgctttctggagctggcacctgactttgtgggtgacattctctgggaacatctggagcaaatgatcaaagaaaaccaagaaaagacagaagatcaatatgaagaaaattcacacctcacctccgttcctcattggattaacagcaatacattaggttttggcacagagcaggcgccctatggaatgcagacacagaattaccccaaaggcggcctcctggacagcatgtgtccggcctccacacccagcgtactcagctctgagcaggagtttcagatgttccccaagtctcggctcagctccgtcagcgtcacctactgctctgtcagtcaggacttcccaggcagcaacttgaatttgctcaccaacaattctgggacgcccaaagaccacgactcccctgagaacggtgcggacagcttcgagagctcagactccctcctccagtcctggaacagccagtcgtccttgctggatgtgcaacgggttccttccttcgagagcttcgaagatgactgcagccagtctctctgcctcaataagccaaccatgtctttcaaggattacatccaagagaggagtgacccggtggagcaaggcaaaccagttatacctgcagctgtgctggccggcttcacaggaagtggacctattcagctgtggcagtttctcctggagctgctatcagacaaatcctgccagtcattcatcagctggactggagacggatgggagtttaagctcgccgaccccgatgaggtggcccgccggtggggaaagaggaaaaataagcccaagatgaactacgagaagctgagccggggcttacgctactattacgacaagaacatcatccacaagacgtcggggaagcgctacgtgtaccgcttcgtgtgcgacctccagaacttgctggggttcacgcccgaggaactgcacgccatcctgggcgtccagcccgacacggaggactgaggtcgccgggaccaccctgagccggccccaggctcgtggactgagtgggaagcccatcctgaccagctgctccgaggacccaggaaaggcaggattgaaaatgtccaggaaagtggccaagaagcagtggccttattgcatcccaaaccacgcctcttgaccaggctgcctcccttgtggcagcaacggcacagctaattctactcacagtgcttttaagtgaaaatggtcgagaaagaggcaccaggaagccgtcctggcgcctggcagtccgtgggacgggatggttctggctgtttgagattctcaaaggagcgagcatgtcgtggacacacacagactatttttagattttcttttgccttttgcaaccaggaacagcaaatgcaaaaactctttgagagggtaggagggtgggaaggaaacaaccatgtcatttcagaagttagtttgtatatattattataatcttataattgttctcagaatcccttaacagttgtatttaacagaaattgtatattgtaatttaaaataattatataactgtatttgaaataagaattcagacatctgaggttttatttcatttttcaatagcacatatggaattttgcaaagatttaatctgccaagggccgactaagagaagttgtaaagtatgtattatttacatttaatagacttacagggataaggcctgtggggggtaatccctgctttttgtgtttttttgtttgtttgtttgtttgtttttggggggttttcttgccttggttgtctggcaaggactttgtacatttgggagtttttatgagaaacttaaatgttattatctgggcttatatctggcctctgctttctcctttaattgtaaagtaaaagctataaagcagtatttttcttgacaaaaaaaaaaaaaaaaaaa

SEQ ID NO: 1396 - DNA, 1451 bp, Homo sapiens
cggcccgccctggggaggcgcgcagcagaggctccgattcggggcaggtgagaggctgactttctctcggtgcgtccagtggagctctgagtttcgaatcggtggcggcggattccccgcgcgcccggcgtcggggcttccaggaggatgcggagccccagcgcggcgtggctgctgggggccgccatcctgctagcagcctctctctcctgcagtggcaccatccaaggaaccaatagatcctctaaaggaagaagccttattggtaaggttgatggcacatcccacgtcactggaaaaggagttacagttgaaacagtcttttctgtggatgagttttctgcatctgtcctcactggaaaactgaccacggtcttccttccaattgtctacacaattgtgtttgtggtgggtttgccaagtaacggcatggccctgtgggtctttcttttccgaactaagaagaagcaccctgctgtgatttacatggccaatctggccttggctgacctcctctctgtcatctggttccccttgaagattgcctatcacatacatgccaacaactggatttatggggaagctctttgtaatgtgcttattggctttttctatggcaacatgtactgttccattctcttcatgacctgcctcagtgtgcagaggtattgggtcatcgtgaaccccatggggcactccaggaagaaggcaaacattgccattggcatctccctggcaatatggctgctgattctgctggtcaccatccctttgtatgtcgtgaagcagaccatcttcattcctgccctgaacatcacgacctgtcatgatgttttgcctgagcagctcttggtgggagacatgttcaattacttcctctctctggccattggggtctttctgttcccagccttcctcacagcctctgcctatgtgctgatgatcagaatgctgcgatcttctgccatggatgaaaactcagagaagaaaaggaagagggccatcaaactcattgtcactgtcctggccatgtacctgatctgcttcactcctagtaaccttctgcttgtggtgcattattttctgattaagagccagggccagagccatgtctatgccctgtacattgtagccctctgcctctctacccttaacagctgcatcgacccctttgtctattactttgtttcacatgatttcagggatcatgcaaagaacgctctcctttgccgaagtgtccgcactgtaaagcagatgcaagtatccctcacctcaaagaaacactccaggaaatccagctcttactcttcaagttcaaccactgttaagacctcctattgagttttccaggtcctcagatgggaattgcacagtaggatgtggaacctgtttaatgttatgaggacgtgtctgttatttcctaatcaaaaaggtctcaccacataccaccg

SEQ ID NO: 1397 - DNA, 2390 bp, Homo sapiens
agagggagacggacgttgagagaacgaggaggaaggagagaaaatggcgtccacggattacagtacctatagccaagctgcagcgcagcagggctacagtgcttacaccgcccagcccactcaaggatatgcacagaccacccaggcatatgggcaacaaagctatggaacctatggacagcccactgatgtcagctatacccaggctcagaccactgcaacctatgggcagaccgcctatgcaacttcttatggacagcctcccactggttatactactccaactgccccccaggcatacagccagcctgtccaggggtatggcactggtgcttatgataccaccactgctacagtcaccaccacccaggcctcctatgcagctcagtctgcatatggcactcagcctgcttatccagcctatgggcagcagccagcagccactgcacctacaagaccgcaggatggaaacaagcccactgagactagtcaacctcaatctagcacagggggttacaaccagcccagcctaggatatggacagagtaactacagttatccccaggtacctgggagctaccccatgcagccagtcactgcacctccatcctaccctcctaccagctattcctctacacagccgactagttatgatcagagcagttactctcagcagaacacctatgggcaaccgagcagctatggacagcagagtagctatggtcaacaaagcagctatgggcagcagcctcccactagttacccaccccaaactggatcctacagccaagctccaagtcaatatagccaacagagcagcagctacgggcagcagagttcattccgacaggaccaccccagtagcatgggtgtttatgggcaggagtctggaggattttccggaccaggagagaaccggagcatgagtggccctgataaccggggcaggggaagagggggatttgatcgtggaggcatgagcagaggtgggcggggaggaggacgcggtggaatgggcagcgctggagagcgaggtggcttcaataagcctggtggacccatggatgaaggaccagatcttgatctaggccctcctgtagatccagatgaagactctgacaacagtgcaatttatgtacaaggattaaatgacagtgtgactctagatgatctggcagacttctttaagcagtgtggggttgttaagatgaacaagagaactgggcaacccatgatccacatctacctggacaaggaaacaggaaagcccaaaggcgatgccacagtgtcctatgaagacccacccactgccaaggctgccgtggaatggtttgatgggaaagattttcaagggagcaaacttaaagtctcccttgctcggaagaagcctccaatgaacagtatgcggggtggtctgccaccccgtgagggcagaggcatgccaccaccactccgtggaggtccaggaggcccaggaggtcctgggggacccatgggtcgcatgggaggccgtggaggagatagaggaggcttccctccaagaggaccccggggttcccgagggaacccctctggaggaggaaacgtccagcaccgagctggagactggcagtgtcccaatccgggttgtggaaaccagaacttcgcctggagaacagagtgcaaccagtgtaaggccccaaagcctgaaggcttcctcccgccaccctttccgcccccgggtggtgatcgtggcagaggtggccctggtggcatgcggggaggaagaggtggcctcatggatcgtggtggtcccggtggaatgttcagaggtggccgtggtggagacagaggtggcttccgtggtggccggggcatggaccgaggtggctttggtggaggaagacgaggtggccctggggggccccctggacctttgatggaacagatgggaggaagaagaggaggacgtggaggacctggaaaaatggataaaggcgagcaccgtcaggagcgcagagatcggccctactagatgcagagaccccgcagagctgcattgactaccagatttattttttaaaccagaaaatgttttaaatttataattccatatttataatgttggccacaacattatgattattccttgtctgtactttagtatttttcaccatttgtgaagaaacattaaaacaagttaaatggtagtgtgcggagtttttttttcttccttcttttaaaaatggttgtttaagactttaacaatgggaaccccttgtgagcatgctcagtatcattgtggagaaccaagagggcctcttaactgtaacaatgttcatggttgtgatgttttttttttttttttaaaataaaattccaaatgtttaataaaaaaaaaaaaaaaaaaa

SEQ ID NO: 1398 - DNA, 2084 bp, Homo sapiens
aaccgcatctgcagcgagcaactgagaagccaagactgagccggcggccgcggcgcagcgaacgagcagtgaccgtgctcctacccagctctgcttcacagcgcccacctgtctccgcccctcggcccctcgcccggctttgcctaaccgccacgatgatgttctcgggcttcaacgcagactacgaggcgtcatcctcccgctgcagcagcgcgtccccggccggggatagcctctcttactaccactcacccgcagactccttctccagcatgggctcgcctgtcaacgcgcaggacttctgcacggacctggccgtctccagtgccaacttcattcccacggtcactgccatctcgaccagtccggacctgcagtggctggtgcagcccgccctcgtctcctctgtggccccatcgcagaccagagcccctcaccctttcggagtccccgccccctccgctggggcttactccagggctggcgttgtgaagaccatgacaggaggccgagcgcagagcattggcaggaggggcaaggtggaacagttatctccagaagaagaagagaaaaggagaatccgaagggaaaggaataagatggctgcagccaaatgccgcaaccggaggagggagctgactgatacactccaagcggagacagaccaactagaagatgagaagtctgctttgcagaccgagattgccaacctgctgaaggagaaggaaaaactagagttcatcctggcagctcaccgacctgcctgcaagatccctgatgacctgggcttcccagaagagatgtctgtggcttcccttgatctgactgggggcctgccagaggttgccaccccggagtctgaggaggccttcaccctgcctctcctcaatgaccctgagcccaagccctcagtggaacctgtcaagagcatcagcagcatggagctgaagaccgagccctttgatgacttcctgttcccagcatcatccaggcccagtggctctgagacagcccgctccgtgccagacatggacctatctgggtccttctatgcagcagactgggagcctctgcacagtggctccctggggatggggcccatggccacagagctggagcccctgtgcactccggtggtcacctgtactcccagctgcactgcttacacgtcttccttcgtcttcacctaccccgaggctgactccttccccagctgtgcagctgcccaccgcaagggcagcagcagcaatgagccttcctctgactcgctcagctcacccacgctgctggccctgtgagggggcagggaaggggaggcagccggcacccacaagtgccactgcccgagctggtgcattacagagaggagaaacacatcttccctagagggttcctgtagacctagggaggaccttatctgtgcgtgaaacacaccaggctgtgggcctcaaggacttgaaagcatccatgtgtggactcaagtccttacctcttccggagatgtagcaaaacgcatggagtgtgtattgttcccagtgacacttcagagagctggtagttagtagcatgttgagccaggcctgggtctgtgtctcttttctctttctccttagtcttctcatagcattaactaatctattgggttcattattggaattaacctggtgctggatattttcaaattgtatctagtgcagctgattttaacaataactactgtgttcctggcaatagtgtgttctgattagaaatgaccaatattatactaagaaaagatacgactttattttctggtagatagaaataaatagctatatccatgtactgtagtttttcttcaacatcaatgttcattgtaatgttactgatcatgcattgttgaggtggtctgaatgttctgacattaacagttttccatgaaaacgttttattgtgtttttaatttatttattaagatggattctcagatatttatatttttattttatttttttctaccttgaggtcttttgacatgtggaaagtgaatttgaatgaaaaatttaagcattgtttgcttattgttccaagacattgtcaataaa

SEQ ID NO: 1399 - DNA, 1666 bp, Homo sapiens
gatccctccgctctggggaggcagcgctggcggcggggctggggccactgaggaaatccatccgcgccgccgccgccgccgccgccgccgccgccgcctccgccgcggaggaagacagcgccgcccgcgcaccgccagcgacccccgccgcagagtcccaccgccacaggcctcgggccagcggccaggagctgcctcccccagcccccgtcccgcggcccccagccgcccccaaccctgccccacgggcccggcgccatgagtgagctggagcaactgagacaggaggccgagcagctccggaaccagatccgggatgcccgaaaagcatgtggggactcaacactgacccagatcacagctgggctggacccagtggggagaatccagatgaggacccggaggaccctccgtgggcacctggcaaagatctatgccatgcactgggggaccgactcaaggctgctggtcagcgcctcccaggatgggaagctcatcatctgggacagctacaccaccaacaaggtccacgccatcccgctgcgctcctcctgggtaatgacctgtgcctacgcgccctcagggaactttgtggcctgtggggggttggacaacatctgctccatctacagcctcaagacccgcgagggcaacgtcagggtcagccgggagctgcctggccacactgggtacctgtcgtgttgccgcttcctggatgacaaccaaatcatcaccagctctggggataccacctgtgccctgtgggacattgagacaggccagcagacagtgggttttgctggacacagtggggatgtgatgtccctgtccctggcccccgatggccgcacgtttgtgtcaggcgcctgtgatgcctctatcaagctgtgggacgtgcgggattccatgtgccgacagaccttcatcggccatgaatccgacatcaatgcagtggctttcttccccaacggctacgccttcaccaccggctctgacgacgccacgtgccgcctcttcgacctgcgggccgatcaggagctcctcatgtactcccatgacaacatcatctgtggcatcacctctgttgccttctcgcgcagcggacggctgctgctcgctggctacgacgacttcaactgcaacatctgggatgccatgaagggcgaccgtgcaggagtcctcgctggccacgacaaccgcgtgagctgcctcggggtcaccgacgatggcatggctgtggccacgggctcctgggactccttcctcaagatctggaactaatggccccacccccactgggcccaggccaggaggggccctgcccatgcccacactacaggccagggctgcggggctggcgcaatcccagcccccttccccgggccacggggccttgggtccctgccctcccacccaggtttggttcctcccggggcccccactgtggagataagaaggggatggaatgggggaagaggaggagcaggaggccctcatccttctgctgccctggggttggggcctcacccctctggagggccggaggcaggaggtggaaaccccaggggctggcttttttaaaactggttttattttaatttttattatattttcagtttttccataaaggagccaattccaactctgtaaaaaaaaaaaaaaaaaa

SEQ ID NO: 1400 - DNA, 1741 bp, Homo sapiens
ggcacgagcccacctcgccgccatgcgcctccgccgcctagcgctgttcccgggtgtggcgctgcttcttgccgcgggccgtctcgtcgctgcctccgacgtgctagaactcacggacgacaacttcgagagtcgcatctccgacacgggctctgcgggcctcatgctcgtcgagttcttcgccccctggtgtggacactgcaagagacttgcacctgagtatgaagctgcagctaccagattaaaaggaatagtcccattagcaaaggttgattgcactgccaacactaacacctgtaataaatatggagtcagtggatatccaaccctgaagatatttagagatggtgaagaagcaggtgcttatgatggacctaggactgctgatggaattgtcagccacttgaagaagcaggcaggaccagcttcagtgcctctcaggactgaggaagaatttaagaaattcattagtgataaagatgcctctatagtaggttttttcgatgattcattcagtgaggctcactccgagttcctaaaagcagccagcaacttgagggataactaccgatttgcacatacgaatgttgagtctctggtgaacgagtatgatgataatggagagggtatcatcttatttcgtccttcacatctcactaacaagtttgaggacaagactgtggcatatacagagcaaaaaatgaccagtggcaaaattaaaaagtttatccaggaaaacatttttggtatctgccctcacatgacagaagacaataaagatttgatacagggcaaggacttacttattgcttactatgatgtggactatgaaaagaacgctaaaggttccaactactggagaaacagggtaatgatggtggcaaagaaattcctggatgctgggcacaaactcaactttgctgtagctagccgcaaaacctttagccatgaactttctgattttggcttggagagcactgctggagagattcctgttgttgctatcagaactgctaaaggagagaagtttgtcatgcaggaggagttctcgcgtgatgggaaggctctggagaggttcctgcaggattactttgatggcaatctgaagagatacctgaagtctgaacctatcccagagagcaatgatgggcctgtgaaggtagtggtagcagagaattttgatgaaatagtgaataatgaaaataaagatgtgctgattgaattttatgccccttggtgtggtcactgtaagaacctggagcccaagtataaagaacttggcgagaagctcagcaaagacccaaatatcgtcatagccaagatggatgccacagccaatgatgtgccttctccatatgaagtcagaggttttcctaccatatacttctctccagccaacaagaagctaaatccaaagaaatatgaaggtggccgtgaattaagtgattttattagctatctacaaagagaagctacaaacccccctgtaattcaagaagaaaaacccaagaagaagaagaaggcacaggaggatctctaaagcagtagccaaacaccactttgtaaaaggactcttccatcagagatgggaaaaccattggggaggactaggacccatatgggaattattacctctcagggccgagaggacagaatggatataatctgaatcctgttaaattttctctaaactgtttcttagctgcactgtttatggaaataccaggaccagtttatgttt

SEQ ID NO: 1401 - DNA, 2989 bp, Homo sapiens
gaccccctagtaacagaggcggtggctactgctgcggccactgggtttcggcctcttcccagcagcggctctaagaagcgcagcggaactcgaccggatccaacccagttagttacttcctgtctagagttgtagcttccacctgcaccttctagccaccatggcaacctcatctgaagaagttttgctgattgtaaagaaagtgcgtcaaaagaagcaggatggagctctgtacctcatggcagaaagaattgcttgggcacctgaaggcaaagatagatttacaatcagccatatgtatgcagatattaaatgccagaaaattagtccagaaggaaaagctaaaattcagcttcagctggtcctacatgcaggggacacaactaacttccatttttccaatgaaagcacagcagtgaaagagcgagatgcagtaaaagaccttcttcagcagctgctgcccaaattcaagaggaaagcaaataaagaactggaagagaagaacagaatgctgcaagaagatcctgttttgtttcagctttataaagaccttgttgtgagtcaagtgatcagtgctgaggaattctgggccaatcgtttaaatgtgaatgcaacagatagttcttccacatccaatcataagcaggatgttggcatttctgctgcatttctggctgatgtccggccccaaactgatggctgtaacggtctaagatataatttaacttctgatatcattgagtccatatttaggacctatccagcagtaaaaatgaaatatgcagaaaatgttccccacaacatgacagagaaggaattctggacacgttttttccagtcccattattttcacagggatcggctgaatacagggtcaaaggatctctttgcagaatgtgccaaaatagatgaaaaaggcctaaaaacaatggtttcattaggagtgaaaaacccactactagatttaacagctttggaagataaaccattagatgagggctatggcatttcctctgtgccatctgcttccaattctaaatccataaaagagaatagtaatgctgccatcatcaagagatttaaccatcacagtgccatggtcctggcagctggactcagaaaacaagaagcacaaaatgaacaaactagtgagcccagcaacatggatggaaattccggagatgcagactgctttcagccagcagtcaaaagggcgaaattacaagagtccattgaatatgaagacttggggaaaaataattctgtaaaaacgattgcactaaacctcaagaagtcagataggtattatcatggtccaactccaatccagtcactacagtatgcaacaagtcaggacattattaattcttttcaaagtattagacaagaaatggaagcttatacacccaagttaactcaggttctctcaagtagtgctgccagtagtaccatcacagcactgtcacctggaggggcacttatgcagggaggaacacagcaagccataaaccagatggtgccaaatgatattcaatctgaattgaaacacttatatgtagctgttggagaacttctacgacatttctggtcctgctttcctgttaatacgccattcctagaagaaaaggtagtgaaaatgaaaagtaatttggaacgattccaagttacgaagctctgtccattccaagaaaagattcggagacagtatttaagcacaaatttggtaagtcacatagaagagatgctccagacagcctacaacaagctccacacatggcagtcacggcgtctgatgaagaaaacgtgaggtggccatgatgcttacaggttttgtgagattgagagaactatgacctgcagcaactctggaaacctggcctgacagacaagcagatgacctcacaggagtgataagaaacatctgctccacgccaactcccagagctgatgctattgtacttgcacattggagactgaaaggaaagaagggactaaatgctggggaggtaaattaagacagaaccaaatgagctaagttgcaaatatatatatatacacacacacacatatatgtacatgtgtatgtacatatatattttaaaagactgtttactgcagttgctcaggaactgcttttgattcacattaagctgctttcagaaattaaaaaaacactttttaaagggtgcattgataaaatctgaggttttttggttgtcgtttttttctgtgtacatttttttcctaagtttatggcacagggtagaccttaagtattcctcctccatccttcattcttcaccctccattggatcctcaagttttaatgaattccaattataccttacatcagcaagttaaaaaaagtactttaaaataaagcaaagggagactgttgctcaaccatcaggaaacagttgtcagaagacatcattggttctgtgtttcctacggaaataagaaacgataaatattgcactgaatgtttgtggtttggagtccctgaataataaagagggaatatatttgcagaaagtcgcatagggttttttaatgcagaattttgtcagaagacaatggcgctgcatgtttttctttgagtgcaaatgtacattgctaagatttttttaagatggcatgtgctttgaaaagaagatattgcatttttaagagtttaaaaatcttatgagtgagaaatattaaaaaaatcttattttcacctctttagaagaaataaaagatgtttctcctatctccttttctctagtatttgactgttactgtccttggcgaatcgataatcattgcatagtgactgaaaagcctaagtgcaaaaaaaaaaaaaaaaagatgttcttgtttctgaacttcgtgccatattttgttcctgatgggatcaacttaatgtttaagactttagatgtcttgtattaaaaattacacaaaaaaagtaaaactttttatacttaaaaaaaaaaaaaaaaaaaaa

SEQ ID NO: 1402 - DNA, 947 bp, Homo sapiens
ggctcggggccggggccagcacccacactgggtctccacagcggcatggaggcctgcgtgtcttcactgctggtgctggccctgggggccctgtcagtaggcagctcctttgggacccagatcatcgggggccgggaggtgatcccccactcgcgcccgtacatggcctcactgcagagaaatggctcccacctgtgcgggggtgtcctggtgcacccaaagtgggtgctgacggctgcccactgcctggcccagcggatggcccagctgaggctggtgctggggctccacaccctggacagccccggtctcaccttccacatcaaggcagccatccagcaccctcgctacaagcccgtccctgccctggagaacgacctcgcgctgcttcagctggacgggaaagtgaagcccagccggaccatccggccgttggccctgcccagtaagcgccaggtggtggcagcagggactcggtgcagcatggccggctgggggctgacccaccagggcgggcgcctgtcccgggtgctgcgggagctggacctccaagtgctggacacccgcatgtgtaacaacagccgcttctggaacggcagcctctcccccagcatggtctgcctggcggccgactccaaggaccaggctccctgcaagggtgactcgggcgggcccctggtgtgtggcaaaggccgggtgttggccggagtcctgtccttcagctccagggtctgcactgacatcttcaagcctcccgtggccaccgctgtggcgccttacgtgtcctggatcaggaaggtcaccggccgatcggcctgatgccctggggtgatggggaccccctcgctgtctccacaggacccttcccctccaggggtgcagtggggtgggtgaggacgggtgggagggacagggagggaccaataaatcataatgaagaaacgctc

SEQ ID NO: 1403 - DNA, 411 bp, Homo sapiens
atggcccgaaccaagcagactgctcgtaagtccaccggtgggaaagccccccgcaaacagctggccacgaaagccgccaggaaaagcgctccctctaccggcggggtgaagaagcctcatcgctacaggcccgggaccgtggcgcttcgagagattcgtcgttatcagaagtcgaccgagctgctcatccggaagctgcccttccagaggttggtgagggagatcgcgcaggatttcaaaaccgacctgaggtttcagagcgcagccatcggtgcgctgcaggaggctagcgaagcgtacctggtgggtctgttcgaagataccaacctgtgtgccatccacgctaagagagtcaccatcatgcccaaagacatccagttggctcgccggatacggggagagagagcttaa

SEQ ID NO: 1404 - DNA, 1968 bp, Homo sapiens
aattccgccgggcgcttagaacagaggcttgcacaggtggagatgtggaagtctgtagtgggccatgatgtgtctgtttccgtggagacccagggtgatgattgggacacagatcctgactttgtgaatgacatctctgaaaaggagcaacgatggggagccaagaccatcgaggggtctggacgcacagaacacatcaacatccaccagctgaggaacaaagtatcagaggagcatgatgttctcaggaagaaagagatggagtcagggcccaaagcatcccatggctatggaggtcggtttggagtagaaagagaccgaatggacaagagtgcagtgggccatgagtatgttgccgaggtggagaagcactcttctcagacggatgctgccaaaggctttgggggcaagtacggagttgagagggacagggcagacaagtcagcagtcggctttgattataaaggagaagtggagaagcatacatctcagaaagattactctcgtggctttggtggccggtacggggtggagaaggataaatgggacaaagcagctctgggatatgactacaagggagagacggagaaacacgagtcccagagagattatgccaagggctttggtggccagtatggaatccagaaggaccgagtggataagagcgctgtcggcttcaatgaaatggaggccccgaccacagcttataagaagacgacgcccatagaagccgcttctagtggtgcccgtgggctgaaggcgaaatttgagtccatggctgaggagaagaggaagcgagaggaagaggagaaggcacagcaggtggccaggaggcaacaggagcgaaaggctgtgacaaagaggagccctgaggctccacagccagtgatagctatggaagagccagcagtaccggccccactgcccaagaaaatctcctcagaggcctggcctccagttgggactcctccatcatcagagtctgagcctgtgagaaccagcagggaacacccagtgcccttgctgcccattaggcagactctcccggaggacaatgaggagcccccagctctgccccctaggactctggaaggcctccaggtggaggaagagccagtgtacgaagcagagcctgagcctgagcccgagcctgagcccgagcctgagaatgactatgaggacgttgaggagatggacaggcatgagcaggaggatgaaccagagggggactatgaggaggtgctcgagcctgaagattcttctttttcttctgctctggctggatcatcaggctgcccggctggggctggggctggggctgtggctctggggatctcagctgtggctctatatgattaccaaggagagggaagtgatgagctttcctttgatccggacgacgtaatcactgacattgagatggtggacgagggctggtggcggggacgttgccatggccactttggactcttccctgcaaattatgtcaagcttctggagtgactagagctcactgtctactgcaactgtgatttcccatgtccaaagtggctctgctccaccccctccctattcctgatgcaaatgtctaaccagatgagtttctggacagacttccctctcctgcttcattaagggcttggggcagagacagcatggggaaggaggtccccttccccaagagtcctctctatcctggatgagctcatgaacatttctcttgtgttcctgactccttcccaatgaacacctctctgccaccccaagctctgctctcctcctctgtgagctctgggcttcccagtttgtttacccgggaaagtacgtctagattgtgtggtttgcctcattgtgctatttgcccactttccttccctgaagaaatatctgtgaaccttctttctgttcagtcctaaaattcgaaataaagtgagactatggttcacctgtaaaaaaaaaaaaggaatt

SEQ ID NO: 1405 - DNA, 2259 bp, Homo sapiens
cagttgcttcagcgtcccggtgtggctgtgccgttggtcctgtgcggtcacttagccaagatgcctgaggaaacccagacccaagaccaaccgatggaggaggaggaggttgagacgttcgcctttcaggcagaaattgcccagttgatgtcattgatcatcaatactttctactcgaacaaagagatctttctgagagagctcatttcaaattcatcagatgcattggacaaaatccggtatgaaagcttgacagatcccagtaaattagactctgggaaagagctgcatattaaccttataccgaacaaacaagatcgaactctcactattgtggatactggaattggaatgaccaaggctgacttgatcaataaccttggtactatcgccaagtctgggaccaaagcgttcatggaagctttgcaggctggtgcagatatctctatgattggccagttcggtgttggtttttattctgcttatttggttgctgagaaagtaactgtgatcaccaaacataacgatgatgagcagtacgcttgggagtcctcagcagggggatcattcacagtgaggacagacacaggtgaacctatgggtcgtggaacaaaagttatcctacacctgaaagaagaccaaactgagtacttggaggaacgaagaataaaggagattgtgaagaaacattctcagtttattggatatcccattactctttttgtggagaaggaacgtgataaagaagtaagcgatgatgaggctgaagaaaaggaagacaaagaagaagaaaaagaaaaagaagagaaagagtcggaagacaaacctgaaattgaagatgttggttctgatgaggaagaagaaaagaaggatggtgacaagaagaagaagaagaagattaaggaaaagtacatcgatcaagaagagctcaacaaaacaaagcccatctggaccagaaatcccgacgatattactaatgaggagtacggagaattctataagagcttgaccaatgactgggaagatcacttggcagtgaagcatttttcagttgaaggacagttggaattcagagcccttctatttgtcccacgacgtgctccttttgatctgtttgaaaacagaaagaaaaagaacaacatcaaattgtatgtacgcagagttttcatcatggataactgtgaggagctaatccctgaatatctgaacttcattagaggggtggtagactcggaggatctccctctaaacatatcccgtgagatgttgcaacaaagcaaaattttgaaagttatcaggaagaatttggtcaaaaaatgcttagaactctttactgaactggcggaagataaagagaactacaagaaattctatgagcagttctctaaaaacataaagcttggaatacacgaagactctcaaaatcggaagaagctttcagagctgttaaggtactacacatctgcctctggtgatgagatggtttctctcaaggactactgcaccagaatgaaggagaaccagaaacatatctattatatcacaggtgagaccaaggaccaggtagctaactcagcctttgtggaacgtcttcggaaacatggcttagaagtgatctatatgattgagcccattgatgagtactgtgtccaacagctgaaggaatttgaggggaagactttagtgtcagtcaccaaagaaggcctggaacttccagaggatgaagaagagaaaaagaagcaggaagagaaaaaaacaaagtttgagaacctctgcaaaatcatgaaagacatattggagaaaaaagttgaaaaggtggttgtgtcaaaccgattggtgacatctccatgctgtattgtcacaagcacatatggctggacagcaaacatggagagaatcatgaaagctcaagccctaagagacaactcaacaatgggttacatggcagcaaagaaacacctggagataaaccctgaccattccattattgagaccttaaggcaaaaggcagaggctgataagaacgacaagtctgtgaaggatctggtcatcttgctttatgaaactgcgctcctgtcttctggcttcagtctggaagatccccagacacatgctaacaggatctacaggatgatcaaacttggtctgggtattgatgaagatgaccctactgctgatgataccagtgctgctgtaactgaagaaatgccaccccttgaaggagatgacgacacatcacgcatggaagaagtagactaa

SEQ ID NO: 1406 - DNA, 1891 bp, Homo sapiens
ccgaggctataagagggcgcacaagtggcgcggcgcaggagccgccgccagtggagggccgggcgctgcggccgcggccggggcgggcgcagggccgagcggacgggggggcgcgggccccccgggaggccgcggccactcccccccgggccggcgcggcgggggaggcggaggatggaaacacccttctacggcgatgaggcgctgagcggcctgggcggcggcgccagtggcagcggcggcacgttcgcgtccccgggccgcttgttccccggggcgcccccgacggccgcggccggcagcatgatgaagaaggacgcgctgacgctgagcctgagtgagcaggtggcggcagcgctcaagcctgcgcccgcgcccgcctcctacccccctgccgccgacggcgcccccagcgcggcaccccccgacggcctgctcgcctctcccgacctggggctgctgaagctggcctcccccgagctcgagcgcctcatcatccagtccaacgggctggtcaccaccacgccgacgagctcacagttcctctaccccaaggtggcggccagcgaggagcaggagttcgccgagggcttcgtcaaggccctggaggatttacacaagcagaaccagctcggcgcgggccgggccgctgccgccgccgccgccgccgccggggggccctcgggcacggccacgggctccgcgccccccggcgagctggccccggcggcggccgcgcccgaagcgcctgtctacgcgaacctgagcagctacgcgggcggcgccgggggcgcggggggcgccgcgacggtcgccttcgctgccgaacctgtgcccttcccgccgccgccacccccaggcgcgttggggccgccgcgcctggctgcgctcaaggacgagccacagacggtgcccgacgtgccgagcttcggcgagagcccgccgttgtcgcccatcgacatggacacgcaggagcgcatcaaggcggagcgcaagcggctgcgcaaccgcatcgccgcctccaagtgccgcaagcgcaagctggagcgcatctcgcgcctggaagagaaagtgaagaccctcaagagtcagaacacggagctggcgtccacggcgagcctgctgcgcgagcaggtggcgcagctcaagcagaaagtcctcagccacgtcaacagcggctgccagctgctgccccagcaccaggtcccggcgtactgagtcgggcatggcggccacctccaaggggcgggctcgcgggggggtgtcgtgggcgccccggacttggagagggtgcggccctccacccccccctccccgagtgtgcccaggaactcagagaggcgcggccccggggattcccccccgaggtgcccaggactcggaaggggcgccccggactcgacaagctggaccccctgctcccgggggcgagcgcatgacccccccgccctcgcgctgcctctttcccccgcgcggccgccccgtgttgcacaaacccgcgcgtctcggctgcccctttgtacaccgcgccgcaagggggctccgagggggcgcacgtcaaaccctgcctttcctttacttttactttttttttttctttggaagagagaagaacagagtgttcgattctgccctatttatgtttctactcggggaacaaacgttggttgtgtgtgtgtgtgttttcttgtgttggttttttaaagaaatgggaagaagaaaaaaaaattctccgcccctttcctcgatctcgctcccccttcggtctttcgaccgtccccccctcccctttttttgttctgttttgttttgttttgctacgagtccacattcctgtttgtaatccttggttcgcccggttttctgttttcagtaaagtctcgttacgcca

SEQ ID NO: 1407 - DNA, 6705 bp, Homo sapiens
  misc_feature (5874)..(5874): n is a, c, g, or t
  misc_feature (6198)..(6198): n is a, c, g, or t
  misc_feature (6201)..(6201): n is a, c, g, or t
  misc_feature (6271)..(6271): n is a, c, g, or t
gcggcggcgacggtttcgtgggggccgcgcgctgctctgtgagcggcgggtggcagcaggggactcctgacacttccccttccccaccgaaccgcgctttctgaaacaaagactcattttgaagatgtttaacaaatcatttggaacaccctttgggggtggcacaggtggctttggcacaacttcaacatttggacagaatactggctttggcactactagtggaggggcatttggaacatctgcatttggttctagcaacaatactggaggcctctttggaaattcacagactaaaccaggaggattgtttggaaccagttcatttagccagccagctacctccacaagcactggctttgggtttggtacgtcaacaggaacagcaaataccttgtttggaactgcaagcacagggaccagtctcttctcatcccaaaacaatgcctttgcacaaaataaaccaactggctttggcaattttggaaccagtactagcagtggaggactctttggaaccacaaataccacctctaatccttttggcagcacatctggctccctctttgggccaagtagttttacagctgctcctactgggactactattaaatttaaccctccaactggtacagatactatggtcaaagctggagttagcactaacataagtaccaagcaccagtgtattactgctatgaaagaatatgaaagcaagtcactagaggaacttcgtttagaggattatcaggctaacaggaagggcccacagaaccaggtgggagcaggtaccacaactggcttgtttgggtcttctccagccacttccagcgcaacaggactcttcagctcctccaccactaattcaggctttgcatatggtcagaacaaaactgcctttggaactagtacaactggatttggaacaaatccaggtggtctctttggccaacagaatcagcagactaccagcctcttcagcaaaccatttggccaggctacaaccacccagaacactggcttttcctttggtaataccagcaccataggacagccaagcaccaacaccatgggattatttggagtaacccaagcctcacagcctggaggtctttttgggacagctacaaacaccagcactgggacagcatttggaacaggaacaggtctctttgggcagaccaatactggatttggtgctgttggttcgaccctgtttggcaataacaagcttactacatttggaagcagcacaaccagtgcaccttcatttggtacaaccagtggcgggctctttggttttggcacaaataccagtgggaatagtatttttggaagtaaaccagcacctgggactcttggaactgggcttggtgcaggatttggaacagctcttggtgctggacaggcatctttgtttgggaacaaccaacctaagattggagggcctcttggtacaggagcctttggggcccctggatttaatactacgacagccactttgggctttggagccccccaggccccagtagctttgacagatccaaatgcttctgctgcccagcaggctgttctccagcagcacatcaatagtctaacatactcaccttttggagactctcctctcttccggaatccgatgtcagaccctaagaagaaggaagagagattgaaaccaacaaatccagcagcccagaaggctcttactacacctactcattataaactgacaccccgccctgccactagagtccggccaaaggctttacaaacaacaggcacagccaagtcacatctctttgatgggctggatgacgatgaaccatccctagccaatggagcattcatgcccaagaagagcattaagaagttggttttgaagaaccttaataatagcaatctcttttctcctgttaatcgtgattcagaaaatctagcttcaccatctgaatatccagaaaatggagagagatttagtttcctaagcaaacctgttgatgagaatcaccagcaggatggagatgaagattcccttgtttcacatttttatactaaccctattgccaaacctattcctcaaaccccagaaagtgctggaaataaacacagcaacagcaacagtgtggatgataccattgttgcattaaacatgcgtgctgctttgcgaaatgggctggaaggaagcagtgaagaaacgtcttttcatgatgagtcacttcaggatgaccgagaagaaatagaaaataattcttaccatatgcacccagcaggtattattctcactaaggttggttactatactattccatctatggatgaccttgctaaaattaccaatgtttttggagagtgcattgtctctgatttcactattggtcggaaaggttatggttcaatctattttgaaggagatgtgaatttgacaaatctaaatttggatgatattgtgcatatccggaggaaagaagtagttgtctacttagatgataaccaaaaaccacctgtgggtgaagggctaaataggaaggctgaagttacattggatggagtttggccaacagataaaacatctcgttgtttaataaagagcccagatcgccttgctgatatcaactatgaaggaagattggaagcagtttcaaggaaacagggagctcaattcaaagaataccggcctgaaactggttcttgggtgtttaaggtctcccatttttctaagtatggccttcaggattctgatgaagaggaggaggagcatccgtctaaaactagtacaaagaagttgaagactgctcctttgcctcctgcaagccagactacgcccttgcagatggctcttaatggcaaacctgcacctccacctcagagccagagcccagaggtggagcagttagggagggttgtggaactggacagtgacatggtagatatcacccaggagccagttttggataccatgttagaagagagcatgcctgaggatcaggaacctgtgtctgcctcaacacatattgcatcttcactgggaattaatccacatgtcttacagatcatgaaagcatcattgcttactgatgaagaagatgtagatatggcactggatcaacgcttcagtcgcctgccttccaaagcagatacttctcaagaaatctgttctcccagactccccatttcagcatcccactcgtcgaaaactcgttcactagttggtgggttactacaatcaaaatttacaagtggagcttttctttcaccaagtgtctctgtgcaagaatgtcgtactcccagagcagcatctttaatgaatatcccatccacatcctcttggtctgtccctccacccctgacttctgtgttcacaatgcccagcccagcccctgaggttccgttgaaaacagtgggtacacgtaggcaactaggcctagtccctcgtgaaaagtctgtcacctatggcaagggaaaactcttgatggacatggccctattcatgggacgctcatttcgtgttggttggggccccaactggactcttgctaatagtggagaacagctgaatggctctcatgaactagaaaatcatcagattgccgattccatggagtttggattcctgcccaatccagtagctgttaaacccctaactgagtccccattcaaagttcacttagaaaaactcagtttgagacaaagaaagccagatgaagacatgaaattatatcagacacctctggagctcaaattaaaacacagcactgtccatgtggatgaactgtgtcctctcattgtccccaatctgggagttgctgtcattcatgactatgcagattgggttaaagaagcatcaggagacttaccagaagcacaaattgtgaagcactggagcctgacatggacactatgtgaagccctatgggcccacctgaaggagcttgacagccagctaaatgaaccccgtgaatacattcaaattctggagcgaagaagagctttctcccgctggctatcctgtactgccacacctcagattgaagaggaagtctccttaacccaaaaaaacagccctgtggaggctgtattcagctacctcacaggcaaaaggatcagtgaggcctgctctctggcccagcagtcaggggatcatcgtcttgctcttcttttatctcagtttgtgggtagccagtcagtccgggagctgctcaccatgcagttggtggactggcatcagctccaagcagactccttcatccaggatgagagactgcgcatctttgctctgttggctggaaaaccggtgtggcagctctcagaaaagaagcaaataaacgtgtgctcccagttggattggaaacgctccctggctatccatctttggtatttgcttccaccaacagcctccatttctagggcgctcagcatgtatgaagaagcatttcagaatacctctgacagtgacagatatgcctgctccccacttccttcgtatctggagggttctggctgtgtgatagcggaggagcaaaactcacagacaccacttcgagatgtctgctttcaccttctaaaactctacagtgacagacattatgatctcaaccagctgctggagcctcgaagcataacagcagatcctttggactaccgcctaagctggcacttgtgggaagtgctgagggatcttaaatacacccatctatcagcgcagtgtgaaggtgtgctacaggccagttacgctggccagcttgaaagtgaggggctctgggagtgggccatctttgtcctcctgcacattgacaactcaggcatacgtgagaaggctgttcgagagctgcttacccggcactgccagctgttggagacccctgaatcttgggctaaagagactttccttacccagaagctccgtgtacctgccaaatggatccacgaggccaaagctgtgcgagcacacatggaatctgacaagcacttagaggccctttgcttatttaaggctgagcactggaaccgctgccacaagctcatcatccgacacttagcttctgatgccatcattaatgagaactatgactacctgaaggggttcttggaagacctggcacctccagagcgcagcagcctaattcaggattgggaaacatctgggcttgtttacctggactatattagagtcattgaaatgctccgccatatacagcaggtggagcatttcaatgactctaatatagtccaggtaatgacctggagcagttacacatcaaagtgacttcactgtgcagtcggatagagcagattcagtgttacagtgctaaagatcgcctggctcagtcagacatggccaaacgtgtagccaacctgctgcgcgtggtgctgagtctgcatcatcctcctgatagaacctccgactcaacaccagaccctcagcgagtccctttgcgcctcttggctccccacattggccggcttcccatgcctgaggactatgccatggacgaactgcgcagccttacccagtcctatctgcgagaactggctgttgggagcctgtgagccccaggcactttgcatcacagtcacatgcccattcacaccacacagaggttccctgccttgtttggattggcactgtttgccattctctgggttggctgtggcatctaccctcccgtcccctgctgccagaagcagcatcctccacttgttcagggcttttcttaatactgaacgtagcataagggcttctggaacccagaagaggagacagtttaccatcctcaagatcattcagtgtttttcctttaaaaaaatggtcaataaagctcctttggcagaatcccccaaagaaccagggtattctttttccatccttagccattntggatcttgtgaccttccatgccaaccagtttccttattcttaccatggccgttttatattaggactccttaggaggagtgagacaggtgataatggatccttaacagatgaactatccacagaaggaagagggatccgtctcttaagtaattggttagttaacactgaattttggaggcaaaggagggttggcctgagttaggaaacaaaatgggatctttctgacacacttagggcagaagtgaatgcctgtcacggagggattgatcttcagggctgtttttgttcctgcctttagagttccatgaacaccatacctttgntantactatgtgcaggaacccttggtcacatgtgacatgtctgtgggaagctcccagagtttggtttggtccntggttttcagtcttgctgagactctgtctggatttgcctgcagagtttggataaaaaataacaggttggtaaccttccaagttcatcccatgttagctccaaagcatttcccaccctccatctaccccttccagaaggcaaaacaaaccatgactgaggcaggcatggagttgggcgttaggggcaggcagagggcctttgctacactgctgacagctatagggagccccaggtaatggcatgagatagctggtgttagggctatctcaggcaatatggccagcacctgggtctttatgcatgaagataatgtaaaggtttttattaaaaaatatatatatgtataaataaatgatctagatattttcctctttttctgaagctactttcttaaaaaataaataaaatgtttatagcattcctattaaaaaaaa

SEQ ID NO: 1408 - DNA, 1170 bp, Homo sapiens
atggcgcaaccaaagcaagagagggtggcgcgtgccagacaccaacggtcggaaaccgccagacaccaacggtcggaaaccgccaagacaccaacgctcggaaaccgccagacaccaacgctcggaaaccgccagacaccaaggctcggaatccacgccaggccacgacggagggcgactacctcccttctgaccctgctgctggcgttcggaaaaaacgcagtccggtgtgctctgattggtccaggctctttgacgtcacggactcgacctttgacagagccactaggcgaaaaggagagacgggaagtattttttccgccccgcccggaaagggtggagcacaacgtcgaaagcagccgttgggagcccaggaggcggggcgcctgtgggagccgtggagggaactttcccagtccccgaggcggatccggtgttgcatccttggagcgagctgagaactcgagtacagaacctgctaaggccatcaaacctattgatcggaagtcagtccatcagatttgctctgggccggtggtaccgagtctaaggccgaatgcggtgaaggagttagtagaaaacagtctggatgctggtgccactaatgttgatctaaagcttaaggactatggagtggatctcattgaagtttcaggcaatggatgtggggtagaagaagaaaacttcgaaggctttactctgaaacatcacacatgtaagattcaagagtttgccgacctaactcaggtggaaacttttggctttcggggggaagctctgagctcactttgtgcactgagtgatgtcaccatttctacctgccgtgtatcagcgaaggttgggactcgactggtgtttgatcactatgggaaaatcatccagaaaaccccctacccccgccccagagggatgacagtcagcgtgaagcagttattttctacgctacctgtgcaccataaagaatttcaaaggaatattaagaagaaacgtgcctgcttccccttcgccttctgccgtgattgtcagtttcctgaggcctccccagccatgcttcctgtacagcctgtagaactgactcctagaagtaccccaccccacccctgctccttggaggacaacgtgatcactgtattcagctctgtcaagaatggtccaggttcttctagatga

SEQ ID NO: 1409 - DNA, 795 bp, Homo sapiens
atgtgtccttggcggcctagactaggccgtcgctgtatggtgagccccagggaggcggatctgggcccccagaaggacacccgcctggatttgccccgtagcccggcccgggcccctcgggagcagaacagccttggtgaggtggacaggaggggacctcgcgagcagacgcgcgcgccagcgacagcagccccgccccggcctctcgggagccggggggcagaggctgcggagccccaggagggtctatcagccacagtctctgcatgtttccaagagcaacaggaaatgaacacattgcaggggccagtgtcattcaaagatgtggctgtggatttcacccaggaggagtggcggcaactggaccctgatgagaagatagcatacggggatgtgatgttggagaactacagccatctagtttctgtggggtatgattatcaccaagccaaacatcatcatggagtggaggtgaaggaagtggagcagggagaggagccgtggataatggaaggtgaatttccatgtcaacatagtccagaacctgctaaggccatcaaacctattgatcggaagtcagtccatcagatttgctctgggccagtggtactgagtctaagcactgcagtgaaggagttagtagaaaacagtctggatgctggtgccactaatattgatctaaagcttaaggactatggagtggatctcattgaagtttcagacaatggatgtggggtagaagaagaaaactttgaaggcttaatctctttcagctctgaaacatcacacatgtaa

SEQ ID NO: 1410 - DNA, 1158 bp, Homo sapiens
cacgaggccgcgggggcaaggcctggagctgtggttcgaatttgtgcaggcagcgggtgctggcttttagggtccgccgcctctctgcctaatgagctgcaccagaatgatccaggttttagatccacgtcctttgacaagttcggtcatgcccgtggatgtggccatgaggctttgcttggcacattcaccacctgtgaagagtttcctgggcccgtacgatgaatttcaacgacgacattttgtgaataaattaaagcccctgaaatcatgtctcaatataaaacacaaagccaaatcacagaatgactggaagtgctcacacaaccaagccaagaagcgcgttgtgtttgctgactccaagggcctctctctcactgcgatccatgtcttctccgacctcccagaagaaccagcgtgggatctgcagtttgatctcttggaccttaatgatatctcctctgccttaaaacaccacgaggagaaaaacttgattttagatttccctcaaccttcaaccgattacttaagtttccggagccactttcagaagaactttgtctgtctggagaactgctcattgcaagagcgaacagtgacagggactgttaaagtcaaaaatgtgagttttgagaagaaagttcagatccgtatcactttcgattcttggaaaaactacactgacgtagactgtgtctatatgaaaaatgtgtatggtggcacagatagtgataccttctcatttgccattgacttaccccctgtcattccaactgagcagaaaattgagttctgcatttcttaccatgctaatgggcaagtcttttgggacaacaatgatggtcagaattatagaattgttcatgttcaatggaagcctgatggggtgcagacacagatggcaccccaggactgtgcattccaccagacgtctcctaagacagagttagagtcaacaatctttggcagtccgaggctggctagtgggctcttcccagagtggcagagctgggggagaatggagaacttggcctcttatcgatgaattaagcaacaatgtaactggtcttgacttgtcatattcccccatgcaatcctaggtctgtattgctcaattttaggaagcctttgctactccatcagtaggtttagatttga

SEQ ID NO: 1411 - DNA, 3571 bp, Homo sapiens
ggcacgaggttccgagttgcgatgctgtacttctctttgttttgggcggctcggcctctgcagagatgtgggcagctggtcaggatggccattcgggctcagcacagcaacgcagcccagactcagactggggaagcaaacaggggctggacaggccaggagagcctgtcggacagtgatcctgagatgtgggagttgctgcagagggagaaggacaggcagtgtcgtggcctggagctcattgcctcagagaacttctgcagccgagctgcgctggaggccctggggtcctgtctgaacaacaagtactcggagggttatcctggcaagagatactatgggggagcagaggtggtggatgaaattgagctgctgtgccagcgccgggccttggaagcctttgacctggatcctgcacagtggggagtcaatgtccagccctactccgggtccccagccaacctggccgtctacacagcccttctgcaacctcacgaccggatcatggggctggacctgcccgatgggggccatctcacccacggctacatgtctgacgtcaagcggatatcagccacgtccatcttcttcgagtctatgccctataagctcaaccccaaaactggcctcattgactacaaccagctggcactgactgctcgacttttccggccacggctcatcatagctggcaccagcgcctatgctcgcctcattgactacgcccgcatgagagaggtgtgtgatgaagtcaaagcacacctgctggcagacatggcccacatcagtggcctggtggctgccaaggtgattccctcgcctttcaagcacgcggacatcgtcaccaccactactcacaagactcttcgaggggccaggtcagggctcatcttctaccggaaaggggtgaaggctgtggaccccaagactggccgggagatcccttacacatttgaggaccgaatcaactttgccgtgttcccatccctgcaggggggcccccacaatcatgccattgctgcagtagctgtggccctaaagcaggcctgcacccccatgttccgggagtactccctgcaggttctgaagaatgctcgggccatggcagatgccctgctagagcgaggctactcactggtatcaggtggtactgacaaccacctggtgctggtggacctgcggcccaagggcctggatggagctcgggctgagcgggtgctagagcttgtatccatcactgccaacaagaacacctgtcctggagaccgaagtgccatcacaccgggcggcctgcggcttggggccccagccttaacttctcgacagttccgtgaggatgacttccggagagttgtggactttatagatgaaggggtcaacattggcttagaggtgaagagcaagactgccaagctccaggatttcaaatccttcctgcttaaggactcagaaacaagtcagcgtctggccaacctcaggcaacgggtggagcagtttgccagggccttccccatgcctggttttgatgagcattgaaggcacctgggaaatgaggcccacagactcaaagttactctccttccccctacctgggccagtgaaatagaaagcctttctattttttggtgcgggagggaagacctctcacttagggcaagagccaggtatagtctcccttcccagaatttgtaactgagaagatcttttctttttcctttttttggtaacaagacttagaaggagggcccaggcactttctgtttgaacccctgtcatgatcacagtgtcagagacgcgtcctctttcttggggaagttgaggagtgcccttcagagccagtagcaggcaggggtgggtaggcaccctccttcctgtttttatctaataaaatgctaacctgcaaaaaaaaaaaaaaaaaaaaaaaaaatcagactaggtggactctgcctgcctacctggtctgggaagatgttctaccatatctccctagagcacgaaatcctgctgcacccgcgctacttcggccccaacttgctcaacacggtgaagcagaagctcttcaccgaggtggaggggacctgcacagggaagtgagtgtcgagctcaccgcaccgccagatcgttcgatgcgcacacggggcgctatacctgcaacccctccccaactcctactcgtcctgccacccactctggggacccctctcctctctcaggcagccagttgcttcctgctttgggttcccagggcgccctctgcaatgctggacaataagacttccttctctcagctgagatgggtcattcattgactcctcaaacattttaaaaacccttggtgtgtgccaggacccgtgttgggctcagaacaaggtagaatgggaacaagatagaatgaggacagcccctgtggagctcacagtgtaatcattgttcctgtgtctgctctccctctgtcattctgctggttttctcttatcccctgtgcccagggaccacacaccatgggcctctatatatcttctgaatgaatgaccagaaaaagcagatcgagagtttgggggaggaaggaagtagcctgggatttgaccatctctgggctttgcacagaggggcctctctgatattaatgagctgggacccagctcagggcagtggagtacttgggcctccagcatcagaaaaacctgcaggaacatgcagattcctgagcctccttattccctacagaatcaagactgtctggggcagacctgagaatctgcattttaagaagatgattctcaggcatcccgaagattgagatctgttgcctcaaggactccagccttcttggacatttattgtgaaattaccagaacagcatttggtcttacacatactgatctctgttctgtcttcttttggtcattaagctctctgggagcagaggtgctatctacttgtccttttgctctccccgaccctacccccaagagctcagcgacttttattgcagatgtctttagaggctcttggacacacagtgtcttcctgtttctcatcctccttgcaggttggactcttcacagaaattgggcccatgtcttgcttcatctctcgacattccatcccttcagagatggagtttgatcctaactccaacccaccatgttacaagacaatggatgaggatattgtgattcagcaggacgatgagatccgcttaaagattgtggggacccgtgtggacaagaatgacatttttgctattggctccctgatggacgattacttggggcttgtaagctgagcctggtggcctcctacccttggtcctactctaggaagtgtgattgtcacacttatcatgttgtccagaggtccagtctggctgctgttgtggaggcaaggaaggcaactcatcccagaaggcatctggtgcttcttgtagcttaactactgcctcctcatttttcagtatgtgttctaagtataaaaagtccttggttctcaaaaaaaaaaaaaaaaaaaaaaaaaaaaaaaaaaaaaaaaaaaaaaaaaaaaaaaaaaaaaaaaaaaaaaaaaaaaaaaa

SEQ ID NO: 1412 - DNA, 4517 bp, Homo sapiens
gcggagccaaggcacacgggtctgacccttgggccggcccggagcaagtgacacggaccggtcgcctatcctgaccacagcaaagcggcccggagcccgcggaggggacctgacgggggcgtaggcgccggaaggctgggggccccggagccgggccggcgtggcccgagttccggtgagcggacggcggcgcgcgcagatttgataatgggctgcattaaaagtaaagaaaacaaaagtccagccattaaatacagacctgaaaatactccagagcctgtcagtacaagtgtgagccattatggagcagaacccactacagtgtcaccatgtccgtcatcttcagcaaagggaacagcagttaatttcagcagtctttccatgacaccatttggaggatcctcaggggtaacgccttttggaggtgcatcttcctcattttcagtggtgccaagttcatatcctgctggtttaacaggtggtgttactatatttgtggccttatatgattatgaagctagaactacagaagacctttcatttaagaagggtgaaagatttcaaataattaacaatacggaaggagattggtgggaagcaagatcaatcgctacaggaaagaatggttatatcccgagcaattatgtagcgcctgcagattccattcaggcagaagaatggtattttggcaaaatggggagaaaagatgctgaaagattacttttgaatcctggaaatcaacgaggtattttcttagtaagagagagtgaaacaactaaaggtgcttattccctttctattcgtgattgggatgagataaggggtgacaatgtgaaacactacaaaattaggaaacttgacaatggtggatactatatcacaaccagagcacaatttgatactctgcagaaattggtgaaacactacacagaacatgctgatggtttatgccacaagttgacaactgtgtgtccaactgtgaaacctcagactcaaggtctagcaaaagatgcttgggaaatccctcgagaatctttgcgactagaggttaaactaggacaaggatgtttcggcgaagtgtggatgggaacatggaatggaaccacgaaagtagcaatcaaaacactaaaaccaggtacaatgatgccagaagctttccttcaagaagctcagataatgaaaaaattaagacatgataaacttgttccactatatgctgttgtttctgaagaaccaatttacattgtcactgaatttatgtcaaaaggaagcttattagatttccttaaggaaggagatggaaagtatttgaagcttccacagctggttgatatggctgctcagattgctgatggtatggcatatattgaaagaatgaactatattcaccgagatcttcgggctgctaatattcttgtaggagaaaatcttgtgtgcaaaatagcagactttggtttagcaaggttaattgaagacaatgaatacacagcaagacaaggtgcaaaatttccaatcaaatggacagctcctgaagctgcactgtatggtcggtttacaataaagtctgatgtctggtcatttggaattctgcaaacagaactagtaacaaagggccgagtgccatatccaggtatggtgaaccgtgaagtactagaacaagtggagcgaggatacaggatgccgtgccctcagggctgtccagaatccctccatgaattgatgaatctgtgttggaagaaggaccctgatgaaagaccaacatttgaatatattcagtccttcttggaagactacttcactgctacagagccacagtaccagccaggagaaaatttataattcaagtagcctattttatatgcacaaatctgccaaaatataaagaacttgtgtagattttctacaggaatcaaaagaagaaaatcttctttactctgcatgtttttaatggtaaactggaatcccagatatggttgcacaaaaccacttttttttccccaagtattaaactctaatgtaccaatgatgaatttatcagcgtatttcagggtccaaacaaaatagagctaagatactgatgacagtgtgggtgacagcatggtaatgaaggacagtgaggctcctgcttatttataaatcatttcctttctttttttccccaaagtcagaattgctcaaagaaaattatttattgttacagataaaacttgagagataaaaagctataccataataaaatctaaaattaaggaatatcatgggaccaaataattccattccagttttttaaagtttcttgcatttattattctcaaaagttttttctaagttaaacagtcagtatgcaatcttaatatatgctttcttttgcatggacatgggccaggtttttcaaaaggaatataaacaggatctcaaacttgattaaatgttagaccacagaagtggaatttgaaagtataatgcagtacattaatattcatgttcatggaactgaaagaataagaactttttcacttcagtccttttctgaagagtttgacttagaataatgaaggtaactagaaagtgagttaatcttgtatgaggttgcattgattttttaaggcaatatataattgaaactactgtccaatcaaaggggaaatgttttgatctttagatagcatgcaaagtaagacccagcattttaaaagcccttttttaaaaactagacttcgtactgtgagtattgcttatatgtccttatggggatgggtgccacaaatagaaaatatgaccagatcagggacttgaatgcacttttgctcatggtgaatatagatgaacagagaggaaaatgtatttaaaagaaatacgagaaaagaaaatgtgaaagttttacaagttagagggatggaaggtaatgtttaatgttgatgtcatggagtgacagaatggctttgctggcactcagagctcctcacttagctatattctgagactttgaagagttataaagtataactataaaactaatttttcttacacactaaatgggtatttgttcaaaataatgaagttatggcttcacattcattgcagtgggatatggtttttatgtaaaacatttttagaactccagttttcaaatcatgtttgaatctacattcacttttttttgttttcttttttgagacggagtctcgctctgccgcccaggctggagtgcagtggcgcgatctcggctcactgcaagctctgcctcccaggttcacaccattctcctgcctcagcctcccgagtagctgggactacaggtgcccaccaccacgcctggctagttttttgtatttttagtagagacgcagtttcaccgtgttagccaggatggtctcgatctcctgaccttgtgatctgcccgcctcggcctcccaaagtgctgggattacaggtgtgagccaccgcgcccagcctacattcacttctaaagtctatgtaatggtggtcattttttcccttttagaatacattaaatggttgatttggggaggaaaacttattctgaatattaacggtggtgaaaaggggacagtttttaccctaaagtgcaaaagtgaaacatacaaaataagactaatttttaagagtaactcagtaatttcaaaatacagatttgaatagcagcattagtggtttgagtgtctagcaaaggaaaaattgatgaataaaatgaaggtctggtgtatatgttttaaaatactctcatatagtcacactttaaattaagccttatattaggcccctctattttcaggatataattcttaactatcattatttacctgattttaatcatcagattcgaaattctgtgccatggcgtatatgttcaaattcaaaccatttttaaaatgtgaagatggacttcatgcaagttggcagtggttctggtactaaaaattgtggttgttttttctgtttacgtaacctgcttagtattgacactctctaccaagagggtcttcctaagaagagtgctgtcattatttcctcttatcaacaacttgtgacatgagattttttaagggctttatgtgaactatgatattgtaatttttctaagcatattcaaaagggtgacaaaattacgtttatgtactaaatctaatcaggaaagtaaggcaggaaaagttgatggtattcattaggttttaactgaatggagcagttccttatataataacaattgtatagtagggataaaacactaacaatgtgtattcattttaaattgttctgtatttttaaattgccaagaaaaacaactttgtaaatttggagatattttccaacagcttttcgtcttcagtgtcttaatgtggaagttaacccttaccaaaaaaggaagttggcaaaaacagccttctagcacacttttttaaatgaataatggtagcctaaacttaatatttttataaagtattgtaatattgttttgtggataattgaaataaaaagttctcattgaatgcacc

SEQ ID NO: 1413 - DNA, 954 bp, Homo sapiens
agccgtgtaccccgcagagccgccagccccgggcatgttccgagacttcggggaacccggcccgagctccgggaacggcggcgggtacggcggccccgcgcagcccccggccgcagcgcaggcagcccagcagaagttccacctggtgccaagcatcaacaccatgagtggcagtcaggagctgcagtggatggtacagcctcatttcctggggcccagcagttaccccaggcctctgacctaccctcagtacagccccccacaaccccggccaggagtcatccgggccctggggccgcctccaggggtacgtcgaaggccttgtgaacagatcagcccggaggaagaggagcgccgccgagtaaggcgcgagcggaacaagctggctgcggccaagtgcaggaaccggaggaaggaactgaccgacttcctgcaggcggagactgacaaactggaagatgagaaatctgggctgcagcgagagattgaggagctgcagaagcagaaggagcgcctagagctggtgctggaagcccaccgacccatctgcaaaatcccggaaggagccaaggagggggacacaggcagtaccagtggcaccagcagcccaccagccccctgccgccctgtaccttgtatctccctttccccagggcctgtgcttgaacctgaggcactgcacacccccacactcatgaccacaccctccctaactcctttcacccccagcctggtcttcacctaccccagcactcctgagccttgtgcctcagctcatcgcaagagtagcagcagcagcggagacccatcctctgacccccttggctctccaaccctcctcgctttgtgaggcgcctgagccctactccctgcagatgccaccctagccaatgtctcctccccttcccccaccggtccagctggcctggacagtatcccacatccaactccagc

SEQ ID NO: 1414 - DNA, 1545 bp, Homo sapiens
gccgaggggggcgtacggaggtggcagctgtgggaggaggcggcgtggaaggccgaggagctcaagcccggaccaatccccacgttccgggccgcgaccctgaccctgcagcgtaccgggaagcgaaaccggccggatgggccgctgagcccgaatcgggcactgtgtggagccccctggagctgagatcaggatgttccgcttcatgagggacgtggagcctgaggatcccatgttcctgatggatccctttgctattcaccgtcagcatatgagccgtatgttgtcaggtggctttggatatagccccttcctcagcatcacagatggcaacatgccagggaccaggcctgccagccgccggatgcagcaggctggagctgtctccccctttgggatgctgggaatgtcgggtggtttcatggacatgtttgggatgatgaatgacatgattggaaacatggaacacatgacagctggaggcaattgccagaccttctcatcttccactgtcatctcctactccaatacgggtgatggtgcccccaaggtctaccaagagacatcagagatgcgctcggcaccaggcgggatccgggagacacggaggactgttcgggattcagacagtggactggagcagatgtccattgggcatcacatccgggacagggctcacatcctccagcgctcccgaaaccatcgcacgggggaccaggaggagcggcaggactatatcaacctggatgagagtgaggccgcagcgtttgatgacgagtggcggcgggagacctcccgattccggcagcagcgtcccctggagtttcggcggcttgagtcctcaggggctgggggacgaagggcggaggggcctccccgcctggccatccagggacctgaggactccccttcccgacagtcccgccgctatgactggtgaggccccgggccctcagcctctcttgtacaggctgagaggctgagaaatcatcccctgaataactttttcctctcgattcccatccccaatttaatattaaattaacaggcaagccggcccccacctctccctgggggtctcagggagaacctttcacggcaccctttccctaccttttccttctttaatctcctggtttaccattgatgacttcgcctctgcatctactgacttgatttttcattctgccactccatcttcaaaccccctcacctttcccatcctactcctgccatgcattgaagggtcaatgcattttggggtgagctctgggtttaggggccccctccatccctcagctaccctggatctttgcccacctcttcctcagagcccccactgaggggccgtagccctatctagggctgtggaaggagcagactggttcctaactctctccctcctcctgcccacacacatcaaaagaatcttccctacacccttctctgcctttattttttgatttgtgcaacttgtaactaggtgtttatggaataaaggagaatggaaaaaagaaaaaaaaaaaaaaaaaaaaaaaaaaaaaa

SEQ ID NO: 1415 - DNA, 3071 bp, Homo sapiens
cgcttggctcggcgcgctccggccggccgcaaagtttcccgggcggcagcggcggctgcgcctcgcttcagcgatggccgcggagctgagcatggggccagagctgcccaccagcccgctggccatggagtatgtcaacgacttcgacctgctcaagttcgacgtgaagaaggagccactggggcgcgcggagcgtccgggcaggccctgcacacgcctgcagccagtcggctcggtgtcctccacaccgctcagcactccgtgtagctccgtgccctcgtcgcccagcttcagcccgaccgaacagaagacacacctcgaggatctgtactggatggcgagcaactaccagcagatgaaccccgaggcgctcaacctgacgcccgaggacgcggtggaagcgctcatcggctcgcacccagtgccacagccgctgcaaagcttcgacagctttcgcggcgctcaccaccaccaccatcaccaccaccctcacccgcaccacgcgtacccgggcgccggcgtggcccacgacgagctgggcccgcacgctcacccgcaccatcaccatcatcaccaagcgtcgccgccgccgtccagcgccgctagcccggcgcaacagctgcccactagccaccccgggcccgggccgcacgcgacggcctcggcgacggcggcgggcggcaacggcagcgtggaggaccgcttctccgacgaccagctcgtgtccatgtccgtgcgcgagctgaaccgccacctgcggggcttcaccaaggacgaggtgatccgcctgaagcacaagcggcggaccctgaagaaccggggctacgcccagtcttgcaggtataaacgcgtccagcagaagcaccacctggagaatgagaagacgcagctcattcagcaggtggagcagcttaagcaggaggtgtcccggctggcccgcgagagagacgcctacaaggtcaagtgcgagaaactcgccaactccggcttcagggaggcgggctccaccagcgacagcccctcctctcccgagttctttctgtgagtcgtggccggtcctggcccccgcccttgccccggcccggactccctgtcccacgtccctagtcccagactaccccggaccctgtccctgccgcggccccagccttgacctgtttgacttgagcgagagggaggaagggcgcgcgggccgcgggcgacgggcgggtgcgcgggcgggcaggggaccttggctaaggcgagagtagcgcacgccagcgccgcctcctagactcgagcagagccggagagagagacgagagggtgggaggtcccggagtaacttctctccaggctgaagggcggcgaggcatactcccgataagtcaccaaggccatctggagactcctggctttctgaactttgcgcgttaagccgggacagctgctttgctgcccggagagtagtccgcgccaggaagagagcaacgaggaaaggagagggactctggcgtcccggcaggcgagaggcgaggctgagcgaaagaaggaaggaccagacggaccctgtctgtcagagttcggagaaacactggctcctcagccctgagacacaggccctcagttagggacgctcggggcacgaggctcatcagttttattgcctgctcgattatatagaaaaatacaaaaaatctgcattaaaaatattaatcctgcatgctggacatgtatggtaataatttctattttgtaccattttcttgtttaactttagcatgttgttgatcatggatcatactccccttgtttctttgggtgagaagggatcgcagtttggaaactccggcggctgcgtgcggggtttcagtcccagctgtaggcttgtaaatacccgccccgccaaaccgcatagagaacgtggcagcaagctgagggtctttgtttgggtttattattacggtatttttgtttgtaagttaaaaagaaaaaaaaaaagaaaaagttccgggcattttgcatcagaaaacaactttgtcttggggcacacttggaagttgcatgttttctttccttcccttatccccattcggtcctctttttcctctctcgctttagttttcaaccttgttggtgctgagagagagaaccgagaggtcccagtacaagggcagggcagggcagggaagctgccaagctccgcaccccagaggagtgttctggactacagccttgtcttatggtcaaattgatacccttaataagaaaggaaaggaaaggaaaacagatcctcccctctgctttttattgtaaccagaatcaccctgaggtcccttctgaaccctctgggcctgcgctaattgtaggagccacagcgctcctagggtgagaggcttagccatccctgaccctggcagtgcactggtaagcagacactgcactgaaccaactgctatgctcagaatgtaccagaaacccaaacattggcaagtaattttgcaactttcaagtgcgttctttagaccaatgcattgcgtttctttccctgcttttgagatagtaggaagagttcttggtggtgtccccccccttcaattcttcagttgtatagtagttatagggaagatatgggtgtttttctttattattacttttttttttctgcaggtcagtaaaaggatttaagttgcactgacaaaaataccaaaataaaagtgtatttttaagttcccatttgaaattgctggcgctgctggccggatgcatttttgagtttgtattagttgataaattaacagtaataacaagattgtatgaaccgcatggtgcttgcagttttaaatattgtggatatttgtcctgcatcagaaacgagctttggtttttacagattcaactgtgttgaaatcaaacctgccgcaacagaaattgtttttatttcatgtaaaataagggatcaatttcaaaccctgcttatgatatgaaaatattaaaacctagtctattgtagttttattcagactggtttctgttttttggttattaaaatggtttcctattttgcttattaaaaaaaaaaaaaaaaaaaa

SEQ ID NO: 1416 - DNA, 3514 bp, Homo sapiens
gtcatctggccagcccccgcccctcctcccggcgtcagcccgccagaggccgcgcggggcccgggcttcggccgatcagcccgggaggccccgccgcgcccccttggcccgcgcgcccgtggtcacagtggaagaggcgcccgcgctgcgctgcccggaggagccgtcgcgcgcccgcttcctgttcggctggttcctgccagctcgaggacaaaacacgcgtgcgcgcggcgggcgagcgcgctcgccgcctcagtcgccagcgccgggcgcagtccgcctttttccggagcagactggccgcggtgctagtcggtagcagcggccgccgcagcggctccgcactggcgaaccgagggcagaaaaaggcggggttgacggctttttggtaggagtgggctggaccggacgccagagacaaaggctcccaaggcaagagggactgtggccctgcgtcggctctgctcggaactgctgaccccaggaatttacgccccttcgtttttctcttctgattcttctcttctcccaagcccgcgtcccctcacgcgtggcctctctccttgccgggagggccgcgatggaggtcccgcccaggctttcccatgtgccgccgccattgttcccctccgctcccgctactttagcctcccgcagcctctcccattggcggccgcggccgccgcggcagctagccccgctcctcccttcgctcgctcccagctccgcccggcagggggcgcgccgggcccagcgccacgtcaccgcccagcagccctcccgattggcgggcggggcggctataaagggagggcgcaggcggcgcccggatctcttccgccgccattttaaatccagctccatacaacgctccgccgccgctgctgccgcgacccggactgcgcgccagcacccccctgccgacagctccgtcactatggaggatatgaacgagtacagcaatatagaggaattcgcagagggatccaagatcaacgcgagcaagaatcagcaggatgacggtaaaatgtttattggaggcttgagctgggatacaagcaaaaaagatctgacagagtacttgtctcgatttggggaagttgtagactgcacaattaaaacagatccagtcactgggagatcaagaggatttggatttgtgcttttcaaagatgctgctagtgttgataaggttttggaactgaaagaacacaaactggatggcaaattgatagatcccaaaagggccaaagctttaaaagggaaagaacctcccaaaaaggtttttgtgggtggattgagcccggatacttctgaagaacaaattaaagaatattttggagcctttggagagattgaaaatattgaacttcccatggatacaaaaacaaatgaaagaagaggattttgttttatcacatatactgatgaagagccagtaaaaaaattgttagaaagcagataccatcaaattggttctgggaagtgtgaaatcaaagttgcacaacccaaagaggtatataggcagcaacagcaacaacaaaaaggtggaagaggtgctgcagctggtggacgaggtggtacgaggggtcgtggccgaggtcagggccaaaactggaaccaaggatttaataactattatgatcaaggatatggaaattacaatagtgcctatggtggtgatcaaaactatagtggctatggcggatatgattatactgggtataactatgggaactatggatatggacagggatatgcagactacagtggccaacagagcacttatggcaaggcatctcgagggggtggcaatcaccaaaacaattaccagccatactaaaggagaacattggagaaaacagcgggaacttcattgcaggccgtgtgtcaccctgaccacgtctatctctgggggtcgcacgttgcgggcagagcgcaaggcatacaccagaaaacgctgtcctgtggaggagatgttaaagtaacccatcttgcaggacgacattgaagattggtcttctgttgatctaagatgattattttgtaaaagactttctagtgtacaagacaccattgtgtccaactgtatatagctgccaattagttttctttgtttttactttgtcctttgctatctgtgttatgactcaatgtggatttgtttatacacattttatttgtatcatttcatgttaaacctcaaataaatgcttccttatgtgattgcttttctgcgtcaggtactacatagctctgtaaaaaatgtaatttaaaataagcaataattaaggcacagttgattttgtagagtattggtccatacagagaaactgtggtcctttataaatagccagccagcgtcaccctcttctccaatttgtaggtgtattttatgctcttaaggcttcatcttctccctgtaactgagatttctaccacacctttgaacaatgttctttcccttctggttatctgaagactgtcctgaaaggaagacataagtgttgtgattagtagaagctttgtaatcataacacaatgagtaattcttgtataaaagttcagatacaaaaggagcactgtaaaactggtaggagctatggtttaagagcattggaagtagttacaactcaaggattttggtagaaaggtatgagtttggtcgaaaaattaaaatagtggcaaaataagatttagttgtgttttctcagagccgccacaagattgaacaaaatgttttctgtttgggcatcctgaggaagttgtattagctgttaatgctctgtgagtttagagaaaagtcttgatagtaaatctagtttttgacacagtgcatgaactaagtagttaaatatttacatattcagaaaggaatagtggaaaaggtatcttggttatgacaaagtcattacaaatgtgactaagtcattacaaatgtgactgagtcattacagtggaccctctgggtgcattgaaaagaatccgttttatatccaggtttcagaggacctggaataataataagctttggattttgcattcagtgtagttggattttgggaccttggcctcagtgttatttactgggattggcatacgtgttcacaggcagagtagttgatctcacacaacgggtgatctcacaaaactggtaagtttcttatgctcatgagccctccctttttttttttaatttggtgcctgcaactttcttaacaatgattctacttcctgggctatcacattataatgctcttggcctcttttttgctgctgttttgctattcttaaacttaggccaagtaccaatgttggctgttagaagggattctgttcattcaacatgcaactttagggaatggaagtaagttcatttttaagttgtgtggtcagtaggtgcggtgtctagggtagtgaatcctgtaagttcaaatttatgattaggtgacgagttgacattgagattgtccttttcccctgatcaaaaaaatgaataaagcctttttaaacg

SEQ ID NO: 1417 - DNA, 3133 bp, Homo sapiens
gctcgcgaatgtagcaggcgccccaagctcggtcctcaagaagccatggcggaatccaggggccgtctgtacctttggatgtgcttggctgctgcgctggcatctttcctgatgggatttatggtgggctggtttattaagcctctcaaagaaacaaccacttctgtgcgctatcatcaaagtatacggtggaaactggtatccgaaatgaaagctgaaaacatcaaatcatttcttcgttcttttacaaagcttcctcatctggcaggaacagaacaaaatttcttgcttgccaagaaaatccaaacccagtggaagaaatttggactagattcagccaagttggttcattatgatgtcctcttatcttaccccaatgagacaaatgccaactatatatcgattgtggatgaacatgaaactgagattttcaaaacatcataccttgaaccaccaccagatggctatgagaatgttacaaatattgtgccaccatataatgctttctcagcccaaggcatgccagagggagatcttgtatatgtgaactatgctcgcactgaagactttttcaaactagaaagagagatgggcatcaactgtactgggaagattgttattgcaagatatggaaaaatcttcagaggaaataaagttaaaaatgccatgttagcaggagccataggaatcatcttgtactcagatccagctgactactttgctcctgaggtacagccatatcccaaaggatggaatcttcctggaactgcagcccagagaggaaatgtgttaaatttgaatggtgctggtgacccactcactccaggctatccagcaaaagaatacactttcagacttgatgttgaagaaggagtgggaatcccccgaatacctgtacatcccattggatataatgatgcagaaatattattacgctacttgggaggaattgctccaccagataagagttggaagggagcccttaatgtgagttatagtatcggacctggctttacagggagtgattctttcaggaaggttagaatgcatgtttataacatcaataaaattacaaggatttacaatgtagttggaactatcagaggatctgtggaacctgacaggtatgttattctgggaggtcaccgggactcctgggtatttggagctattgacccaaccagtggggttgctgttttgcaagaaattgcccggagttttggaaaactgatgagtaaaggctggagacctagaagaactatcatttttgccagctgggatgcagaagaatttggacttctgggttccacagaatgggctgaggagaatgtcaaaatactccaggagagaagcattgcttatatcaactcggattcatctatagaaggcaattatactctcagagttgactgtactccccttctttaccaattagtgtataaactgacaaaagagatccccagccctgatgatgggtttgagagtaaatcactgtatgaaagctggttggaaaaagacccttcacctgaaaataaaaatttgcctagaatcaataagctgggatctggaagtgactttgaagcttattttcagagacttggaattgcttcaggcagagcccgttacactaagaataagaaaacagataagtacagcagctacccagtgtaccacacaatttatgagacatttgaattggtagagaaattttatgaccccacatttaaaaaacaactttctgtggctcaattacgaggagcactggtatatgagcttgtggattctaaaatcattccttttaatattcaagactatgcagaagctttgaaaaactatgcagcaagtatctataatctatctaagaaacatgatcaacaattaacagaccatggagtatcatttgactccttattttctgctgtgaaaaacttctcagaggctgcttcagattttcataaacgacttatacaagttgatcttaacaatcccattgcagtgagaatgatgaatgaccaactgatgctcctggaaagagcattcatcgatcctcttggtttaccaggaaagctgttctataggcacatcatatttgctccaagtagccacaacaaatatgctggagaatcatttcctggaatctatgatgctatctttgatattgaaaataaagccaactctcgtttggcctggaaagaagtaaagaaacatatttctattgcagcttttacaattcaagcagcagcaggaactctgaaagaagtattatagaaggtctcaagtggctagccattaaaggtgttgctaaaagtctgaggataaaattcacctttctgataacttatgaagccagggtgttctaaactcttttcatgtcatgttttgattataggctttggtcttttcatctgcaaagccttttttttttttgctctttaaaagttaataattatattagcaaagtgttaatctaatgaagtaaaaaactcctgtgtggcagaaagtaaaagaaaattccctaaattatagcaaggaacatgaattctcagacattgtgagtgtgggaatgtaaaatggtaaaatcacttttgaaaacagtttggcagtttcctataaagttaaacatacacttttactttaggactccagaattccacttctagttatttattcaagagaaggaaaaacaatgatcacagcaatacttgtatgcatgttcattgcaacttaaaagcgtaaaaaccccaaatgtccatccacagacgaatgtataaactgtggtatccattacacaatagactacttactactcagcaataaaaatgaagtaactttcaataaatgcaatattattggcagacattgttgaaggaaaaaagccagacaaacaactacataaaatatgtttctatttagatgaagtggcaaactaatctgtagtgttaaaaattagattagtgattgcctgggccaagtggcaggttggggaggatggctgcaaagaagtatgaggaaactttctccaatagatgagaattttccgtatcttgatctgagtggcaaattgtaaacttaaaatatatataaaatttattgaaagaaaattaagcctcaataaacgtgattataaaaaaaa

SEQ ID NO: 1418 - DNA, 1157 bp, Homo sapiens
gtcaggttctgtgtatgtctccgcgtcttccgcggagcgggtgtgcagggcctgcagcattgaactagatgtcgtccccgcaggccccagaagatgggcagggctgtggcgaccgcggcgatccccctggggacctccgtagcgtcttggtcacgaccgtgctcaacctcgagccgctggacgaggatctcttcagaggaaggcattactgggtaccggccaagaggctgtttggtggtcagatcgtgggccaggccctggtggctgcagccaagtctgtgagtgaagacgtccacgtgcactccctgcactgctactttgttcgggcaggggacccgaagctgccagtactgtaccaagtggagcggacacgaacagggtcgagcttctcggtgcgctctgtgaaggccgtgcaacatgggaagcccatcttcatctgccaggcctccttccagcaggcccagcccagccccatgcagcaccagttctccatgcccactgtgccaccaccagaagagctgcttgactgtgagaccctcattgaccagtatttaagggaccctaacctccaaaagaggtacccattggcgctcaaccgaattgctgctcaggaggtccccattgagatcaagccagtaaacccatcccccctgagccagctgcagagaatggagcccaaacagatgttctgggtgcgagcccggggctatattggcgagggcgacatgaagatgcactgctgcgtggccgcctatatctccgactatgccttcttgggcactgcactgctgcctcaccagtggcagcacaaggtgcacttcatggtctcactggaccattccatgtggttccacgcccccttccgagctgaccactggatgctctatgaatgcgagagcccctgggccggtggctctcgggggctggtccatgggcgggtgtggagtcaggatggagtcctagctgtgacctgtgcccaggagggcgtgatccgagtgaagccccaggtctcagagagcaagcggtagccagaggtaccagcttcgcctggggcttcaagaacctcccatctatccccattcctgagacaggagttacagtcccttttggccctcacatccaataaagagactgataccaaaaaaaaaaaaaaaaaa

SEQ ID NO: 1419 - DNA, 2394 bp, Homo sapiens
gaattccgggctcggagcctcggcggaccttgctgcctctgtctctttaacgcgagaggaagcgatgcagaggggtggaaaatggcagagctgcagatgttactagaggaggagatcccgtctggcaagagggcgctgatcgagagttaccagaacctgactcgggtggcagactactgtgaaaacaactacatacaggctacagacaagagaaaagctttagaggagaccaaagcctatacaacccaatctctagctagtgttgcttatcaaataaatgcattggccaacaatgtactccagttgctggatatccaagcctctcagcttcggagaatggagtcttccatcaatcatatctcacagactgtggatattcataaggagaaagtggcacgaagagagattggtattttgacaacaaataagaatacatcaagaactcacaaaataatagcacctgcgaatatggagcgccctgtaaggtatattcggaaacctatcgattacacagttctggatgatgtgggccatggtgtcaagtggctaaaagccaagcatggaaataaccagcctgcaagaactggcacactgtcgagaacaaatcctcttactcagaaaccgccaagtcctcccatgtcaggccggggaacactgggacggaatactccttataaaaccctggaacctgttaaacccccaacagttcctaatgactatatgaccagtcctgctaggcttggaagtcagcatagtccaggcaggacagcatctttaaatcagagaccaaggacacacagtggaagtagtggaggaagtggaagtcgagaaaacagtggtagcagtagtattggcattcccattgctgtgcctacaccttcgccacccactattggaccagaaaacatttctgtccctcctccttctggagctccaccagcaccacctctggcaccacttctcccagtgagcactgtgatagcagccccgggctcagctcctggttcccagtatggcacaatgaccaggcagatatctcgacacaactctactacttcttcgacatcttctggtggatacagacgaactccctctgtgactgctcaattttctgctcagcctcatgttaatggaggtccactttattctcaaaattcaatttctattgctccaccccctccccctatgcctcagttgactccacagatacctctcacaggcttcgtggccagggtgcaggaaaacattgctgatagtccaactccaccgccaccacctccaccagatgacattcccatgtttgatgactttccacctcccccaccaccaccaccagtggattatgaagatgaggaggctgcagtagttcagtataatgatccatatgcagatggggatcctgcttgggcccccaagaattatattgagaaagttgttgcaatatatgattatacaaaagacaaggatgatgagctgtcatttatggagggtgcaatcatttatgttataaagaagaatgatgatggctggtatgaaggagtctgcaatcgagtgactggtctgttccctgggaactatgttgaatcaatcatgcactatactgattaatttttttttttcttttgaagtagattcttattactcagtcatactgtgggactattatggttaacagaactgtcttaatatgttttaaaatgtgcccatattttcagaacatgctgttttattggtaaattgaatgtctacctgtaagcataaatctttgaggcagtttatgtattgctgaatagcaatttatacaagaagctgtccataactgattatgcttatgtacttacttacacatttttaactttatgaccagcctaaatattctggggggagtggggtataatatttaacgaatcatgattcaggttgtaccattacatgtttcagtgcagcatggttactaacgctatgtcagactaatattaaaatcagaaaatttaaatgctggtgctggtcagactttttttgttagattctctcatttaaaaaaaatactgtttgtttaaagcatgcataaaaatttatgtattgaaatatacttaaaaattcaagatgcttcccatttgtgtaatatttacctggaggactccgtacttaggtgtcttaacgtggattgggtttcccaggtttccatgtggaacaagccaaaagaggattatttgtaatgttgtaatttgtacctaagttttttaatgagtggaatttgcattataaactttttccatttataaaaacataagtggacccaaggtttttgtcctttccttcactgatttgcttttaaaaaaataaaagataatgatttattggaaaaaaaaaaaaaaaaaaaaaaaaaaaaaa

SEQ ID NO: 1420 - DNA, 2239 bp, Homo sapiens
cgtccgtgacaagatgaagctcatcatcctggagcactattctcaggcgagcgagtgggcggctaaatacatcaggaaccgtatcatccagtttaacccagggccagagaagtacttcaccctggggctccccactgggagtaccccacttggctgctacaagaagctgattgaatactataagaatggggacctgtcctttaaatatgtgaagaccttcaacatggatgagtacgtgggccttcctcgagaccacccggagagttaccactccttcatgtggaacaacttcttcaagcacattgacatccacccagaaaacacccacattctggatgggaatgcagtcgacctacaggcagaatgtgatgcctttgaagagaagatcaaggctgcaggtgggatcgagctatttgttggaggcatcggccctgatggacacattgccttcaacgagccaggctccagtctggtgtccaggacccgtgtgaagacgctggccatggataccatcctggccaatgctaggttcttcgatggagaactcaccaaggtgcccaccatggccttgacggtgggggtgggcactgtcatggatgctagagaggtgatgatccttatcacaggtgctcacaaggcatttgctctgtacaaggccatcgaggagggagtgaaccacatgtggaccgtgtctgccttccagcagcatccccgcaccgtgtttgtgtgtgacgaggatgccaccttggagctgaaagtgaagactgtcaagtatttcaaaggtttaatgcttgttcataacaagttggtggaccccttgtacagtatcaaagagaaagaaactgagaaaagccaatcttcgaagaaaccatacagcgattagcctgtgctgggacctagtgtcaagtacccatagggaaaggcaggtctttctggaaattgtctttagaagaaagaattgtatttctttaatctagtatggttactccagataagtgggtgaacttattgttcttggccatgaggctgggagcctagtcacggagtttagctatagggagaatgtttgtaacttaatcagaaaaaaaatatctgcaaaatgtactccatcattttgatgtctgccaaacccaggttgggagttttaaactttttgttctgcttcagccatggttcacacatatgacacactcccgtcaggaatttctctccttacacgcactgattttcaagtgggagggaattaggggcttatgtatattggataccacctcttgagagtccttcttgcacaggcctgccccttggttgagaaccattgttccaagtgaaggcacaaactctcaatatctaaaataagtgcaaggaagcagtctctttggtcagtaacaagtgcaatggaaagaaaacgatcccttccttcttccactttcacagcttttctctgaactaggagaacctgggggtggatttgggtgggtggggccaaagaggaggcttctattgataaatccagagcctcaaggggcccagccacgtcaaacttctctccctcagggactctccagcaccaaaaggcagaaggtggaagccgtttttcccccagagccctgtgtttttgtgaaaggcctcactgtggctcctctgttttacatactcattagtaagtgggaggtccactggggcaacagacactgccacaatttcagtgttgtgttcagccaaggggacggtctggacaggcagcttaagtgtgagtttagtcacaactcctgagtgtcccgctctcctgcttacctaggaggtgagtgccaggaaaatacaccaaatgcttctagtattgtttccccacttaaaatagtcctgcttaaattcacatggtgtggtctgatgttctgagagcatcaggaaatacaacccttttgcccatttacccttctccccggatcccaaggtggtctgttgctctggcttcctttcattgtcttaggccttcatggagtggatgctgcctcctcctggctgtttttgtgcctgtttgaagctactgctgcctccatttctgggaaagacctttgagagcctagcccaggcctaagggctatgtttggtaccagtgttttgtctttagcttttctatgtgattgtgccgtcattctgttttaagctcatggatcaatggatttgtttacaatgtgatattttctattaaatccagtattttcaaaaaaaaaaaaaa

SEQ ID NO: 1421 - DNA, 2634 bp, Homo sapiens
atgtgtgatttgcggcggccagcggcaggtgggatgatggacttggcctacgtctgtgagtgggagaaatggtccaagagcacccactgcccatcggtgcccctggcctgcgcctggtcctgccgaaatctcatcaccttcaccatggacctgcgcagcgatgaccaggacctgacccgcatgatccacatcctggacacggagcacccctgggacctgcactcgatcccctcagagcaccacgaggccatcacctgcctggagtgggaccagtcaggctcccggctcctgtcagcagatgccgacgggcagatcaagtgctggagcatggcggaccacctggctaatagctgggagagctcagtgggcagcctagtggagggggaccccattgtggccctgtcctggctgcacaatggtgtgaaactggccctgcacgtggagaagtcgggcgcctccagcttcggggagaagttctcccgagtcaagttctcaccgtcgctcacgctgttcggcggcaagcccatggagggctggatcgcggtgacggtcagcggcctggtcaccgtgtccctgctgaagcccagcgggcaggtgctgacgtccaccgagagcctgtgccggctgcgcggccgcgtggccctggccgacatcgccttcaccggcggcggcaacatcgtggtggccacggcggacggcagcagcgcgtcgcccgtgcagttctacaaggtgtgcgtgagcgtggtgagcgagaagtgccgtatcgacacggagatcctgccctccctgttcatgcgctgcaccaccgacctcaaccgcaaggacaagttccccgccatcacccacctcaagttcctggcccgggacatgtcggagcaggtgcttttgtgcgcgtccagccagaccagcagcatcgtggagtgctggtccctgcgcaaggagggactccccgtgaacaacatcttccagcagatctcccccgtggttggcgacaaacagcccacaattctcaaatggcggatcctatcggccaccaacgatctggaccgtgtgtcggccgtggcgctgcccaagctgcccatctcgctcaccaacaccgacctcaaggtggccagcgacacacagttctaccctggcctcgggctggccctggccttccacgacggcagcgtccacatcgtgcaccggctctcactgcagaccatggccgtcttctacagctccgcggccccgaagcctgtggatgagccggccatgaagcgcccccgcaccgcgggccccgccgtccacttaaaggctatgcagctatcgtggacgtcactggccctggtggggattgacagccacgggaagctgagcgtgctccgcctctcaccttccatgggccacccgctggaagtggggctggcgctgcggcacctgctcttcctgctggagtactgcatggtgaccggctacgactggtgggacatcctgctgcacgtgcagcccagtatggtacagagcctggtggagaagctgcacgaggagtacacgcgccagaccgctgccctgcagcaggtcctctccacccggatcctggccatgaaggcctcgctctgcaagctgtcgccctgcacggtgacccgcgtgtgcgactaccacaccaagctcttcctcatcgccatcagctccaccctgaagtcgctgctgcgcccccactttctcaacacgcctgacaagagccccggcgaccggctgaccgagatctgcaccaagatcaccgacgtcgacattgacaaggtcatgatcaacctcaagacggaggaatttgtgctggacatgaacacactgcaggcgctgcagcagctcttgcagtgggtgggcgacttcgtgctgtacctgctggccagcctacccaaccagggttccctgctgaggccgggccacagctttctgcgggacggcacctcgctgggcatgcttcgggaattgatggtggtcatccgcatctggggccttctgaagcccagctgcctgcccgtgtatacggccacctcggatacccaggacagcatgtccctgctcttccgcctgctcaccaagctctggatctgctgtcgcgatgagggcccagcgagcgagccggacgaggcgctggtggatgaatgctgcctgctgcccagccagctgcttatccccagcctggactggctgccagccagcgacggcctggtcagccgcctgcagcccaagcagccccttcgtctgcagtttggccgggcgcccacgctgcctggcagtgctgccaccctgcagctcgacggcctcgccagggccccaggccagcccaagatcgaccacctgcggaggctgcaccttggcgcttgccccacggaggaatgcaaggcctgcaccaggtgcggctgtgtcaccatgctcaagtcgcccaacagaaccacggcggtgaagcagtgggagcagcgctggatcaagaattgcctggctgttgaaggccgtgggccggacgcctgcgtgaccagcagagcttctgaggaagcccctgcctttgtccagctgggcccgcagtccacacaccactctcccaggacccccagatccctggaccatctgcatccagaggaccgtccgtga

SEQ ID NO: 1422 - DNA, 2310 bp, Homo sapiens
ggtggcgctggcggttgctgtcagctgattcccggggttggtggcagcggcggtagcagcaatggactttctcctggggaacccgttcagctctccagtgggacagcgcatcgagaaagccacagatggctccctgcagagcgaggactgggccctcaacatggagatctgcgacatcatcaacgagacggaggaaggtcccaaagatgccctccgagcagtaaagaagagaatcgtggggaataagaacttccacgaggtgatgctggctctcacagtcttagaaacctgtgtcaagaactgcgggcaccgcttccacgtgctggtggccagccaggacttcgtggagagtgtgctggtgaggaccatcctgcccaagaacaacccacccaccatcgtgcatgacaaagtgctcaacctcatccagtcctgggctgacgcgttccgcagctcgcccgatctgacaggtgtggtcaccatctatgaggacctgcggaggaaaggcctggagttccccatgactgacctggacatgctgtcacccatccacacaccccagaggaccgtgttcaactcagagacacaatcaggacaggattctgtgggcactgactccagccagcaagaggactctggccagcatgctgcccctctgcccgccccgcccatactctccggtgacacgcccatagcaccaaccccggaacagattgggaagctgcgcagtgagctggagatggtgagtgggaacgtgagggtgatgtcggagatgctgacggagctggtgcccacccaggccgagcccgcagacctggagctgctgcaggagctcaaccgcacgtgccgagccatgcagcagcgggtcctggagctcatccctcagatcgccaatgagcagctgacagaggagctgctcatcgtcaatgacaatctcaacaatgtgttcctgcgccatgaacggtttgaacggttccgaacaggccagaccaccaaggccccaagtgaggccgagccggcagctgacctgatcgacatgggccctgacccagcagccaccggcaacctctcatcccagctggcaggaatgaacctgggctccagcagtgtgagagctggcctgcagtctctggaggcctctggtcgactggaagatgagtttgacatgtttgcgctgacacggggcagctcactggctgaccaacggaaagaggtaaaatacgaagccccccaagcaacagacggcctggctggagccctggacgcccggcagcagagcactggcgcgatcccagtcacccaggcctgcctcatggaggacatcgagcagtggctgtccactgacgtgggtaatgatgcggaagagcctaagggggtcaccagcgaagaatttgacaaattcctggaagaacgggccaaagccgcggaccgattgcccaacctctccagcccctcagctgaggggcccccgggtcccccatctggcccagcgccccggaagaagacccaggagaaagatgatgacatgctgtttgccttatgagtgtggggtctggcaccctgcagcccaggtccccactgctctcacacccttaggctgggacctccctccctcctctggtgttaaggctgctttgggggtggcttgttacccccttttcctcctctttgaagacggagctgccccagctgtggctgggggtgtggaggcagtgggatgaactgggggacaggtctgcgctgcagtgggatctggctgctctgcctcctttcccaccccagctgaccatgagactttgctgagaagtggaggccccaggacaggctggctggctggctggctgcttgacccagtgtgactctccttcactgagtgataccctgctccgggcccatgccccaaggagcccttcagagcccacactgccagtcgaggcctggctggaggctggccacagtggaaattctgccgagcctcttgtcccttccctgctctgctgcatggggccccatggctttggctggccactgagggtagggtgtggaggtgtggaggccccctgaggagctgcggcggcccaggtacgaagctgcaactctgcgcgcagtgggcgagatctcatcagccccaggctgcaggtgaggcttcaggggatgctgggccccactgcccctccgctgccttgccctccatccttcctctgttccttctggccgggcaccacagcactggggctcacctcttggttgatcctcttgtactgggagaggtgccttttgtatccccaattaaaggtagaaaaccaccctgct

SEQ ID NO: 1423 - DNA, 1155 bp, Homo sapiens
atggattgcagtaacggatcggcagagtgtaccggagaaggaggatcaaaagaggtggtggggacttttaaggctaaagacctaatagtcacaccagctaccattttaaaggaaaaaccagaccccaataatctggtttttggaactgtgttcacggatcatatgctgacggtggagtggtcctcagagtttggatgggagaaacctcatatcaagcctcttcagaacctgtcattgcaccctggctcatcagctttgcactatgcagtggaattatttgaaggattgaaggcatttcgaggagtagataataaaattcgactgtttcagccaaacctcaacatggatagaatgtatcgctctgctgtgagggcaactctgccggtatttgacaaagaagagctcttagagtgtattcaacagcttgtgaaattggatcaagaatgggtcccatattcaacatctgctagtctgtatattcgtcctgcattcattggaactgagccttctcttggagtcaagaagcctaccaaagccctgctctttgtactcttgagcccagtgggaccttatttttcaagtggaacctttaatccagtgtccctgtgggccaatcccaagtatgtaagagcctggaaaggtggaactggggactgcaagatgggagggaattacggctcatctctttttgcccaatgtgaagacgtagataatgggtgtcagcaggtcctgtggctctatggcagagaccatcagatcactgaagtgggaactatgaatctttttctttactggataaatgaagatggagaagaagaactggcaactcctccactagatggcatcattcttccaggagtgacaaggcggtgcattctggacctggcacatcagtggggtgaatttaaggtgtcagagagatacctcaccatggatgacttgacaacagccctggaggggaacagagtgagagagatgtttagctctggtacagcctgtgttgtttgcccagtttctgatatactgtacaaaggcgagacaatacacattccaactatggagaatggtcctaagctggcaagccgcatcttgagcaaattaactgatatccagtatggaagagaagagagcgactggacaattgtgctatcctga

SEQ ID NO: 1424 - DNA, 2566 bp, Homo sapiens
cgtcgccgtccccgtctcctgccaggcgcggagccctgcgagccgcgggtgggccccaggcgcgcagacatgggctgctccgccaaagcgcgctgggctgccggggcgctgggcgtcgcggggctactgtgcgctgtgctgggcgctgtcatgatcgtgatggtgccgtcgctcatcaagcagcaggtccttaagaacgtgcgcatcgaccccagtagcctgtccttcaacatgtggaaggagatccctatccccttctatctctccgtctacttctttgacgtcatgaaccccagcgagatcctgaagggcgagaagccgcaggtgcgggagcgcgggccctacgtgtacagggagtccaggcacaaaagcaacatcaccttcaacaacaacgacaccgtgtccttcctcgagtaccgcaccttccagttccagccctccaagtcccacggctcggagagcgactacatcgtcatgcccaacatcctggtcttgggtgcggcggtgatgatggagaataagcccatgaccctgaagctcatcatgaccttggcattcaccaccctcggcgaacgtgccttcatgaaccgcactgtgggtgagatcatgtggggctacaaggacccccttgtgaatctcatcaacaagtactttccaggcatgttccccttcaaggacaagttcggattatttgctgagctcaacaactccgactctgggctcttcacggtgttcacgggggtccagaacatcagcaggatccacctcgtggacaagtggaacgggctgagcaaggttgacttctggcattccgatcagtgcaacatgatcaatggaacttctgggcaaatgtggccgcccttcatgactcctgagtcctcgctggagttctacagcccggaggcctgccgatccatgaagctaatgtacaaggagtcaggggtgtttgaaggcatccccacctatcgcttcgtggctcccaaaaccctgtttgccaacgggtccatctacccacccaacgaaggcttctgcccgtgcctggagtctggaattcagaacgtcagcacctgcaggttcagtgcccccttgtttctctcccatcctcacttcctcaacgccgacccggttctggcagaagcggtgactggcctgcaccctaaccaggaggcacactccttgttcctggacatccacccggtcacgggaatccccatgaactgctctgtgaaactgcagctgagcctctacatgaaatctgtcgcaggcattggacaaactgggaagattgagcctgtggtcctgccgctgctctggtttgcagagagcggggccatggagggggagactcttcacacattctacactcagctggtgttgatgcccaaggtgatgcactatgcccagtacgtcctcctggcgctgggctgcgtcctgctgctggtccctgtcatctgccaaatccggagccaagagaaatgctatttattttggagtagtagtaaaaagggctcaaaggataaggaggccattcaggcctattctgaatccctgatgacatcagctcccaagggctctgtgctgcaggaagcaaaactgtagggtcctgaggacaccgtgagccagccaggcctggccgctgggcctgaccggccccccagcccctacaccccgcttctcccggactctcccagcagacagccccccagccccacagcctgagcctcccagctgccatgtgcctgttgcacacctgcacacacgccctggcacacatacacacatgcgtgcaggcttgtgcagacactcagggatggagctgctgctgaagggacttgtagggagaggctcgtcaacaagcactgttctggaaccttctctccacgtggcccacaggctgaccacaggggctgtgggtcctgcgtccccttcctcgggtgagcctggcctgtcccgttcagccgttgggccaggcttcctcccctccaaggtgaaacactgcagtcccggtgtggtggctccccatgcaggacgggccaggctgggagtgccgccttcctgtgccaaattcagtggggactcagtgcccaggccctggcacgagctttggccttggtctacctgccaggccaggcaaagcgcctttacacaggcctcggaaaacaatggagtgagcacaagatgccctgtgcagctgcccgagggtctccgcccaccccggccggactttgatccccccgaagtcttcacaggcactgcatcgggttgtctggcgcccttttcctccagcctaaactgacatcatcctatggactgagccggccactctctggccgaagtggcgcaggctgtgcccccgagctgcccccaccccctcacagggtccctcagattataggtgcccaggctgaggtgaagaggcctgggggccctgccttccgggcgctcctggaccctggggcaaacctgtgacccttttctactggaatagaaatgagttttatcatctttgaaaaataattcactcttgaagtaataaacgtttaaaaaaatggaaaaaaaaaaaaaa

SEQ ID NO: 1425 - DNA, 1059 bp, Homo sapiens
gctctcgtcttctgcggctctcggtgccctctccttttcgtttccggaaacatggcctccggtgtggctgtctctgatggtgtcatcaaggtgttcaacgacatgaaggtgcgtaagtcttcaacgccagaggaggtgaagaagcgcaagaaggcggtgctcttctgcctgagtgaggacaagaagaacatcatcctggaggagggcaaggagatcctggtgggcgatgtgggccagactgtcgacgatccctacgccacctttgtcaagatgctgccagataaggactgccgctatgccctctatgatgcaacctatgagaccaaggagagcaagaaggaggatctggtgtttatcttctgggcccccgagtctgcgccccttaagagcaaaatgatttatgccagctccaaggacgccatcaagaagaagctgacagggatcaagcatgaattgcaagcaaactgctacgaggaggtcaaggaccgctgcaccctggcagagaagctggggggcagtgcggtcatctccctggagggcaagcctttgtgagccccttctggccccctgcctggagcatctggcagccccacacctgcccttgggggttgcaggctgcccccttcctgccagaccggaggggctggggggatcccagcagggggaggcaatcccttcaccccagttgccaaacagaccccccaccccctggattttccttctccctccatcccttgacggttctggccttcccaaactgcttttgatcttttgattcctcttgggctgaagcagaccaagttccccccaggcaccccagttgtgggggagcctgtattttttttaacaacatccccattccccacctggtcctcccccttcccatgctgccaacttctaaccgcaatagtgactctgtgcttgtctgtttagttctgtgtataaatggaatgttgtggagatgacccctccctgtgccggctggttcctctcccttttcccctggtcacggctactcatggaagcaggaccagtaagggaccttcgattaaaaaaaaa

SEQ ID NO: 1426 - DNA, 4163 bp, Homo sapiens
ttgatttggtatagtgggaacatttgctttggagacagatgaactggattctgatcgtgaccctgctattttctccttgtgtgactttggagccatgagaccccagatcctgctgctcctggccctgctgaccctaggcctggctgcacaacaccaagacaaagtgccctgtaagatggtggacaagaaggtctcgtgccaggttctgggcctgctccaggtcccctcggtgctcccgccagacactgagacccttgatctatctgggaaccagctgcggagtatcctggcctcacccctgggcttctacacggcacttcgtcacctggacctgagcaccaatgagatcagcttcctccagccaggagccttccaggccctgacccacctggagcacctcagcctggctcacaaccggctggcgatggccactgcgctgagtgctggtggcctgggccccctgccacgcgtgacctccctggacctgtctgggaacagcctgtacagcggcctgctggagcggctgctgggggaggcacccagcctgcataccctctcactggcggagaacagtctgactcgcctcacccgccacaccttccgggacatgcctgcgctggagcagcttgacctgcatagcaacgtgctgatggacatcgaggatggcgccttcgagggcctgccccgcctgacccatctcaacctctccaggaattccctcacctgcatctccgacttcagcctccagcagctgcgggtgctagacctgagctgcaacagcatcgaggcctttcagacggcctcccagccccaggctgagttccagctcacctggcttgacctgcgggagaacaaactgctccatttccccgacctggccgcgctcccgagactcatctacctgaacttgtccaacaacctcatccggctccccacagggccaccccaggacagcaagggcatccacgcaccttccgagggctggtcagccctgcccctctcagcccccagcgggaatgccagcggccgccccctttcccagctcttgaatctggatttgagctacaatgagattgagctcatccccgacagctttcttgagcacctgacctccctgtgcttcctgaacctcagcagaaactgcttgcggacctttgaggcccggcgcttaggctccctgccctgcctgatgctccttgacttaagccacaatgccctggagacactggaactgggcgccagagccctggggtctctgcggacgctgctcctacagggcaatgccctgcgggacctgcccccatacacctttgccaatctggccagcctgcagcggctcaacctgcaggggaaccgagtcagcccctgtggggggccagatgagcctggcccctccggctgtgtggccttctccggcatcacctccctccgcagcctgagcctggtggataatgagatagagctgctcagggcaggggccttcctccacaccccactgactgagctggacctttcttccaatcctgggctggaggtggccacgggggccttgggaggcctggaggcctccttggaggtcctggcactgcagggcaacgggctgatggtcctgcaggtggacctgccctgcttcatctgcctcaagcggctcaatcttgccgagaaccgcctgagccaccttcccgcctggacacaggctgtgtcactggaggtgctggacctgcgaaacaacagcttcagcctcctgccaggcagtgccatgggtggcctggagaccagcctccggcgcctctacctgcaggggaatccactcagctgctgcggcaatggctggctggcagcccagctgcaccagggccgtgtggacgtggacgccacccaggacctgatctgccgcttcagctcccaggaggaggtgtccctgagccacgtgcgtcccgaggactgtgagaaggggggactgaagaacatcaacctcatcatcatcctcaccttcatactggtctctgccatcctcctcaccacgctggccgcctgctgctgcgtccgccggcagaagtttaaccaacagtataaagcctaaagaagccgggagacactctaggtcagtgggggagcctgaggtacagagaagagtgaggactgactcaaggtcacacagtgatccggatcccagaactctggtctccaaattacagcccaggacacctttctctgccgcctgctgcatcagtgggtgacccccttcccgggctgcactttgggtccagctgtggaagccagaagttgggcggtttcagggacagccgagaataatgttgacctgtcagatcaacaaatcttcactgagcatgtattttgtgccacaccctgctctgggcactgggaatgctgggaaatgagatacattcccgccctcaagaatctcccagtctggtaggagagagtgctgcagagccacgtggccgccacgcagtgtgcttagggcctgaggtgtgaaagcccagggctccagagctcggcaggccccgctggtttggtgcggtgagtcctgccccggctgtgcagggtgagggagggccaagccaggaggatttgtctgagacatttccaagcagactgtttgtcacgtcttctgagaatgactttcagtctctctgaaaatgaaaagcttaggaccggaagagagaattggagctgtacgagtgtgtctcggatctggtattgttaggtgggccacggcggctccagcagggtctggttaaggggtccagcccagcactggaccattccgtctcctgctctggacttgccctctcccttcctggcactctcatgttgcataccctgaccccagtgctgctctaagcaccgtccctgcccagccccacttctccatcgcagccccaccttggctgctgagccaggagctaaaaccttagatatctggttctgttttgcacccagcttggcagatgtggatttgaatccaagccttgtgtctgcccctatgtgacagctctatattttatccccgttttataaaagaggaaactgaagttctgaaaatctccttccagggccccagctaactaatgccataggtgagattcaaaccttcatccttctgtctccagggcctgatctttaccactgcaggggctgcaggccgttaagtggacaggaagtggccccacatagcccgagcagggtctggaagcatcctgtgctgtgcacacctgctctctcctctctcccaggcaggcagctgcaggcgctctcctccttctctgcctgtttccctcctcccttcctttccaccctggtgtgggttctcctgttctctctgtgctcttgcattctctcattcccttttcctctatggagcagagcctggagtttgagactatggaatccaacctccccattgcacagatggggaaactgaggcttaggaagagaatgaaacttgtggagagcttatacagaacctctgggggaaaaaagagcccttatttgtggggtgagattgggggttggaccagagtgatgtcctctctcagctatcacatcacaagataatgctggctccaaacttcctttctgtgcctcatcatgcaaggatcttttttccctcttacaaaaacaggtaaaaagcctcacccagatgacccccatccctcataccatggagtcatgagctgtctgggaagaatggacgtgctgggaccaactcaagaccttgttttgctgtcttcatcatcttacctgtgcttggcccacagtctggctcatgatgtgggctcagtaatgtgcgagaaagtgaaaatgccactctctccaccccattttacagaggagaacaccaaggcccagaggaagttaagggagagtcaatgggcagagccagggctaggccctggtggtgtgtggagcacccaggcagacccagtcctggttgggatcacacccacgggtgctactgcacgtaacactcctccttaggcctggaggccaaggtgtgggtccccacgcctgatctttgaaaacactacacagggctgctgtcacttcccagggcccaggcctcagcccaggcctcgggaccaactctttgtataacctacctgaatgtattaaaaactaattttggaaaaaaaaaa

SEQ ID NO: 1427 - DNA, 1664 bp, Homo sapiens
gggatcatggtagatggaaccctccttttactctcctcggaggccctggcccttacccagacctgggcgggctcccactccttgaagtatttccacacttccgtgtcccggcccggccgcggggagccccgcttcatctctgtgggctacgtggacgacacccagttcgtgcgcttcgacaacgacgccgcgagtccgaggatggtgccgcgggcgccgtggatggagcaggaggggtcagagtattgggaccgggagacacggagcgccagggacaccgcacagattttccgagtgaacctgcggacgctgcgcggctactacaatcagagcgaggccgggtctcacaccctgcagtggatgcatggctgcgagctggggcccgacaggcgcttcctccgcgggtatgaacagttcgcctacgacggcaaggattatctcaccctgaatgaggacctgcgctcctggaccgcggtggacacggcggctcagatctccgagcaaaagtcaaatgatgcctctgaggcggagcaccagagagcctacctggaagacacatgcgtggagtggctccacaaatacctggagaaggggaaggagacgctgcttcacctggagcccccaaagacacacgtgactcaccaccccatctctgaccatgaggccaccctgaggtgctgggccctgggcttctaccctgcggagatcacactgacctggcagcaggatggggagggccatacccaggacacggagctcgtggagaccaggcctgcaggggatggaaccttccagaagtgggcagctgtggtggtgccttctggagaggagcagagatacacgtgccatgtgcagcatgaggggctacccgagcccgtcaccctgagatggaagccggcttcccagcccaccatccccatcgtgggcatcattgctggcctggttctccttggatctgtggtctctggagctgtggttgctgctgtgatatggaggaagaagagctcaggtggaaaaggagggagctactctaaggctgagtggagcgacagtgcccaggggtctgagtctcacagcttgtaaagcctgagacagctgccttgtgtgcgactgagatgcacagctgccttgtgtgcgactgagatgcaggatttcctcacgcctcccctatgtgtcttaggggactctggcttctctttttgcaagggcctctgaatctgtctgtgtccctgttagcacaatgtgaggaggtagagaaacagtccacctctgtgtctaccatgacccccttcctcacactgacctgtgttccttccctgttctcttttctattaaaaataagaacctgggcagagtgcggcagctcatgcctgtaatcccagcacttagggaggccgaggagggcagatcacgaggtcaggagatcgaaaccatcctggctaacacggtgaaaccccgtctctactaaaaaatacaaaaaattagctgggcgcagaggcacgggcctgtagtcccagctactcaggaggcggaggcatggagaatggcgtcaacccgggaggcggaggttgcagtgagccaggattgtgcgactgcactccagcctgggtgacagggtgaaacgccatctcaaaaaataaaaattaaaaaataaaaaaagaacc

SEQ ID NO: 1428 - DNA, 1198 bp, Homo sapiens
gagcagtgtgaagaagaggcgagaacgacccccggaccgaccaaagcccgcgcgccgctgcatcccgcgtccagcacctacgtcccgctgccgtcgccgccgccaccatgcccaagagaaaggctgaaggggatgctaagggagataaagcaaaggtgaaggacgaaccacagagaagatccgcgaggttgtctgctaaacctgctcctccaaagccagagcccaagcctaaaaaggcccctgcaaagaagggagagaaggtacccaaagggaaaaagggaaaagctgatgctggcaaggaggggaataaccctgcagaaaatggagatgccaaaacagaccaggcacagaaagctgaaggtgctggagatgccaagtgaagtgtgtgcatttttgataactgtgtacttctggtgactgtacagtttgaaatactattttttatcaagttttataaaaatgcagaattttgttttactttttttttttttttaaaagctatgttgttagcacacagaacacttcattgttgtttttgggggaaggggcatatgtcactaatagaatgtctccaaagctggattgatgtggagaaaacacctttcccttctagttttgagagacttcctcttggctcccaggaggagggattccctgactttgacacacatggccaccttggcacaaaagccttgtggtatagaaaaacaaatttgtttttatgtcctcttctccctttccatctttcagcatagacttaactcccttaagcccagacatctgttgagacctgacccctagtcattggttaccagtgtgtcaggcaatctggactttccagtgatgccactgagatggcacctgtcaaaagagcagtggttccatttctagattgtggatcttcagataaattctgccattttcatttcacttcctgaaagtcagggtcggcttgtgaaaagttgttaaacaacatgctaaatgtgaaatgtcaaccctcactctaaactttccctgttcagagcatcagatgaagacttcattgggttttatagtggctttctgatttttggtagtccattgaagaagggagtttgaaagttgttgtatactgttaacgattgtctgcccatgtcctgcctgaaataccatgattgtttatggaaagtatctttaataaagctggatacagtttggc

SEQ ID NO: 1429 - DNA, 942 bp, Homo sapiens
atggattttgatgagcgtggtccctgctcctctaacatgtatttgccaagttgtacttactacgtctcgggtccagatttctccagcctcccttcttttctgccccagaccccgtcttcgcgcccaatgacatactcctactcctccaacctgccccaggtccaacccgtgcgcgaagtgaccttcagagagtacgccattgagcccgccactaaatggcacccccgcggcaatctggcccactgctactccgcggaggagctcgtgcacagagactgcctgcaggcgcccagcgcggccggcgtgcctggcgacgtgctggccaagagctcggccaacgtctaccaccaccccacccccgcagtctcgtccaatttctatagcaccgtgggcaggaacggcgtcctgccacaggctttcgaccagtttttcgagacagcctacggcaccccggaaaacctcgcctcctccgactaccccggggacaagagcgccgagaaggggcccccggcggccacggcgacctccgcggcggcggcggcggctgcaacgggcgcgccggcaacttcaagttcggacagcggcggcggcggcggctgccgggagacggcggcggcagcagaggagaaagagcggcggcggcgccccgagagcagcagcagccccgagtcgtcttccggccacactgaggacaaggccggcggctccagtggccaacgcacccgcaaaaagcgctgcccctataccaagtaccagatccgagagctggaacgggagttcttcttcagcgtctacattaacaaagagaagcgcctgcaactgtcccgcatgctcaacctcactgatcgtcaagtcaaaatctggtttcagaacaggagaatgaaggaaaaaaaaattaacagagaccgtttacagtactactcagcaaatccactcctctaa

SEQ ID NO: 1430 - DNA, 2587 bp, Homo sapiens
aggcgctgcggccgtcccgggccgtgactcctcctttcccccgccccgcctccgttcggagagccggcgggcgggcgcctctcggccaggtacgcggccggctgggataggggtcgcgggcgggctttggtcgcgcagcagccggtcctccccggaggtaggcgggcgcgggccctgttgggtctttgggacgcgggtcccgctggggccggggatgctcctctctgtgagcgcggtcccgtccccccctgtccccgggcgggcgcacgggggtctaaccttggggggcggcgctcccgcctgtcccgggtgccggggttcgcgtcccgcggggccttcctcgctctttgtctcttctgagtgaacttgatgacccccttcttccaggaagcgcctcttggacgcgtgtgaccgatgcccagattgcacgaccacttctggagctgctcctgtgcgcacagcgcgaggcgccgaggccccccgcgagccagcaccgcggggctgccgcccaaggttggggagatgatcaacgtttccgtgtccgggccctccctgctggcggcccacggtgccccggacgctgaccccgcgcccaggggccgcagtgctgcgatgagcggccccgagcccggcagcccctaccccaacacctggcatcatcgcctgttgcagaggagcctcgtgctcttctcggttggggtggtcctaaccctggtgctcaacctgctgcagatccagaggaatgtcactctcttccccgaggaggtgatcgccaccatcttttcctccgcctggtgggtccctccctgctgcgggacagcagctgctgttgttggcctactgtacccctgtatcgacagtcacctcggagaaccccacaaatttaagagagaatgggccagtgtcatgcgctgcatagcaggttttggtggcattaaccacgccagtgctaaattggattttgccaataatgtccagctgtccttgactttagcagccctatctttgggcctttggtggacatttgatcgttccagaagtggccttgggctggggatcaccatagcttttctagctacgctgatcacgcagtttctcgtgtataatggtgtctatcagtatacgtccccagatttcctctatattcgttcttggctcccttgtatatttttctcaggaggcgtcacggtggggaacataggacgacagttagctatgggtgttcctgaaaagccccatagtgattgagtcttcaaaaccaccgattctgagagcaaggaagattttggaagaaaatctgactgtggattatgacaaagattatcttttttcttaagtaatctatttagatcgggctgactgtacaaatgactcctggaaaaaactcgtcacctatctagaaaagtcaagaatagggaggtggagaatgatgacttaccctgaagtcttcccttgctacccacactggcgcctgtctgtgccctggagcattctgcccagcctacgtgggttcagtcaggtgccaccttcccaagtattcgatttcattcatgtgattaaaacaagttgccatatttcaaagccttgagctaagactcaattaccaacccgcagttttgtgtcagtgcccaaaggagggaggttgatggtgcttaacaaacatgaagtatggtgtaataggaataatatttatccaaaagatttttaaaaatagggctgtgtttaaagaaggaatcaaaacaagaaaagcagcagtgattatagagaggtcacactctaagtggggtcgcggcgtggccacgcttcacggtcacgctcgtccgtcctgcagtggcgtgtttacatggtcacacgtgtgtgtatcaccagtgggtcaactgcttgtcattcctcccgcggcagtgttgtgtagacaatcttactgagcaaaaggcaatgaaaagtcttgggctcccacactgcgatatattggaattcccacctcagtttatgaagtttatttcgaaatccatagtcatctaagaatgaatacctgtctgccatgtatttcaatcttagtgagccaaaattgtttgtttgttactacagaatagagatgactgttttttggcacagccctatggaatttgcaatctgtgattgccttgtaaaaaggagagtgcatatggcactgcattaaacgtgtggtgtttctagtcaatgatattggtgagcacaatgtattcatttaatggcatagaccataccagacctaatttgcaagtattgggtcttcaaacttcaagtgcaatgtattatgaaaaccaatctgagccttgtatctcttaaatatttattccttctaacgtgtgagatgtcccgagagaagggttctccattcatttcagtgctgcctggaggaaactcggcaatgatttcttcagttgtgaagttcctttcgggttacaacctccactggaaccctcaaccttcgaaatactccagttttgggggttggggccatttacttataaatttaccgccgggtttttggaatctacatgtcttgggggcgggctcaaattcttcgaaagtggttggattaaaa

SEQ ID NO: 1431 - DNA, 2110 bp, Homo sapiens
caggccgaggcagggagaactctccactcggaggaggagctggggtcctcttccatcccgtcttcatcctgcctggctgcgtgacctcgggaggcaccatgcaggagctgcatctgctctggtgggcgcttctcctgggcctggctcaggcctgccctgagccctgcgactgtggggaaaagtatggcttccagatcgccgactgtgcctaccgcgacctagaatccgtgccgcctggcttcccggccaatgtgactacactgagcctgtcagccaaccggctgccaggcttgccggagggtgccttcagggaggtgcccctgctgcagtcgctgtggctggcacacaatgagatccgcacggtggccgccggagccctggcctctctgagccatctcaagagcctggacctcagccacaatctcatctctgactttgcctggagcgacctgcacaacctcagtgccctccaattgctcaagatggacagcaacgagctgaccttcatcccccgcgacgccttccgcagcctccgtgctctgcgctcgctgcaactcaaccacaaccgcttgcacacattggccgagggcaccttcaccccgctcaccgcgctgtcccacctgcagatcaacgagaaccccttcgactgcacctgcggcatcgtgtggctcaagacatgggccctgaccacggccgtgtccatcccggagcaggacaacatcgcctgcacctcaccccatgtgctcaagggtacgccgctgagccgcctgccgccactgccatgctcggcgccctcagtgcagctcagctaccaacccagccaggatggtgccgagctgcggcctggttttgtgctggcactgcactgtgatgtggacgggcagccggcccctcagcttcactggcacatccagatacccagtggcattgtggagatcaccagccccaacgtgggcactgatgggcgtgccctgcctggcacccctgtggccagctcccagccgcgcttccaggcctttgccaatggcagcctgcttatccccgactttggcaagctggaggaaggcacctacagctgcctggccaccaatgagctgggcagtgctgagagctcagtggacgtggcactggccacgcccggtgagggtggtgaggacacactggggcgcaggttccatggcaaagcggttgagggaaagggctgctatacggttgacaacgaggtgcagccatcagggccggaggacaatgtggtcatcatctacctcagccgtgctgggaaccctgaggctgcagtcgcagaaggggtccctgggcagctgcccccaggcctgctcctgctgggccaaagcctcctcctcttcttcttcctcacctccttctagccccacccagggcttccctaactcctccccttgcccctaccaatgcccctttaagtgctgcaggggtctggggttggcaactcctgaggcctgcatgggtgacttcacattttcctacctctccttctaatctcttctagagcacctgctatccccaacttctagacctgctccaaactagtgactaggatagaatttgatcccctaactcactgtctgcggtgctcattgctgctaacagcattgcctgtgctctcctctcaggggcagcatgctaacggggcgacgtcctaatccaactgggagaagcctcagtggtggaattccaggcactgtgactgtcaagctggcaagggccaggattgggggaatggagctggggcttagctgggaggtggtctgaagcagacagggaatgggagaggaggatgggaagtagacagtggctggtatggctctgaggctccctggggcctgctcaagctcctcctgctccttgctgttttctgatgatttgggggcttgggagtccctttgtcctcatctgagactgaaatgtggggatccaggatggcttccttcctcttacccttcctccctcagcctgcaacctctatcctggaacctgtcctccctttctccccaactatgcatctgttgtctgctcctctgcaaaggccagccagcttgggagcagcagagaaataaacagcatttctgatgcc

SEQ ID NO: 1432 - DNA, 1997 bp, Homo sapiens
gtactatcctccttacttttgggtcgggccctccgggaagatggcggccgtgcaggcggccgaggtgaaagtggatggcagcgagccgaaactgagcaagaatgagctgaagagacgcctgaaagctgagaagaaagtagcagagaaggaggccaaacagaaagagctcagtgagaaacagctaagccaagccactgctgctgccaccaaccacaccactgataatggtgtgggtcctgaggaagagagcgtggacccaaatcaatactacaaaatccgcagtcaagcaattcatcagctgaaggtcaatggggaagacccatacccacacaagttccatgtagacatctcactcactgacttcatccaaaaatatagtcacctgcagcctggggatcacctgactgacatcaccttaaaggtggcaggtaggatccatgccaaaagagcttctgggggaaagctcatcttctatgatcttcgaggagagggggtgaagttgcaagtcatggccaattccagaaattataaatcagaagaagaatttattcatattaataacaaactgcgtcggggagacataattggagttcaggggaatcctggtaaaaccaagaagggtgagctgagcatcattccgtatgagatcacactgctgtctccctgtttgcatatgttacctcatcttcactttgggctcaaagacaaggaaacaaggtatcgccagagatacttggacttgatcctgaatgactttgtgaggcagaaatttatcatccgctctaagatcatcacatatataagaagtttcttagatgagctgggattcctagagattgaaactcccatgatgaacatcatcccagggggagccgtggccaagcctttcatcacttatcacaacgagctggacatgaacttatatatgagaattgctccagaactctatcataagatgcttgtggttggtggcatcgaccgggtttatgaaattggacgccagttccggaatgaggggattgatttgacgcacaatcctgagttcaccacctgtgagttctacatggcctatgcagactatcacgatctcatggaaatcacggagaagatggtttcagggatggtgaagcatattacaggcagttacaaggtcacctaccacccagatggcccagagggccaagcctacgatgttgacttcaccccacccttccggcgaatcaacatggtagaagagcttgagaaagccctggggatgaagctgccagaaacgaacctctttgaaactgaagaaactcgcaaaattcttgatgatatctgtgtggcaaaagctgttgaatgccctccacctcggaccacagccaggctccttgacaagcttgttggggagttcctggaagtgacttgcatcaatcctacattcatctgtgatcacccacagataatgagccctttggctaaatggcaccgctctaaagagggtctgactgagcgctttgagctgtttgtcatgaagaaagagatatgcaatgcgtatactgagctgaatgatcccatgcggcagcggcagctttttgaagaacaggccaaggccaaggctgcaggtgatgatgaggccatgttcatagatgaaaacttctgtactgccctggaatatgggctgccccccacagctggctggggcatgggcattgatcgagtcgccatgtttctcacggactccaacaacatcaaggaagtacttctgtttcctgccatgaaacccgaagacaagaaggagaatgtagcaaccactgatacactggaaagcacaacagttggcacttctgtctagaaaataataattgcaagttgtataactcaggcgtctttgcatttctgcgaaagatcaaggtctgcaagggaattcttgtgtgctgctttccatttgacaccgcagttctgttcagccatcagaagagagacaaggaattaaaaatttctttttaatcctgtta

SEQ ID NO: 1433 - DNA, 901 bp, Homo sapiens
agccccaaactcaccacctggccgtggacacctgtgtcagcatgtgggacctggttctctccatcgccttgtctgtggggtgcactggtgccgtgcccctcatccagtctcggattgtgggaggctgggagtgtgagaagcattcccaaccctggcaggtggctgtgtacagtcatggatgggcacactgtgggggtgtcctggtgcacccccagtgggtgctcacagctgcccattgcctaaagaagaatagccaggtctggctgggtcggcacaacctgtttgagcctgaagacacaggccagagggtccctgtcagccacagcttcccacacccgctctacaatatgagccttctgaagcatcaaagccttagaccagatgaagactccagccatgacctcatgctgcttcgcctgtcagagcctgccaagatcacagatgttgtgaaggtcctgggcctgcccacccaggagccagcactggggaccacctgctacgcctcaggctggggcagcatcgaaccagaggagttcttgcgccccaggagtcttcagtgtgtgagcctccatctcctgtccaatgacatgtgtgctagagcttactctgagaaggtgacagagttcatgttgtgtgctgggctctggacaggtggtaaagacacttgtgggggtgattctgggggtccacttgtctgtaatggtgtgcttcaaggtatcacatcatggggccctgagccatgtgccctgcctgaaaagcctgctgtgtacaccaaggtggtgcattaccggaagtggatcaaggacaccatcgcagccaacccctgagtgcccctgtcccacccctacctctagtaaatttaagtccacctcaaaaaaaaaaaaaaaaaaaaaaaaaaaaa

SEQ ID NO: 1434 - DNA, 597 bp, Homo sapiens
atgcccctaggtctcctgtggctgggcctagccctgttgggggctctgcatgcccaggcccaggactccacctcagacctgatcccagccccacctctgagcaaggtccctctgcagcagaacttccaggacaaccaattccaggggaagtggtatgtggtaggcctggcagggaatgcaattctcagagaagacaaagacccgcaaaagatgtatgccaccatctatgagctgaaagaagacaagagctacaatgtcacctccgtcctgtttaggaaaaagaagtgtgactactggatcaggacttttgttccaggttgccagcccggcgagttcacgctgggcaacattaagagttaccctggattaacgagttacctcgtccgagtggtgagcaccaactacaaccagcatgctatggtgttcttcaagaaagtttctcaaaacagggagtacttcaagatcaccctctacgggagaaccaaggagctgacttcggaactaaaggagaacttcatccgcttctccaaatatctgggcctccctgaaaaccacatcgtcttccctgtcccaatcgaccagtgtatcgacggctga

SEQ ID NO: 1435 - DNA, 1661 bp, Homo sapiens
tgctgcagccgctgccgccgattccggatctcattgccacgcgcccccgacgaccgcccgacgtgcattcccgattccttttggttccaagtccaatatggcaactctaaaggatcagctgatttataatcttctaaaggaagaacagaccccccagaataagattacagttgttggggttggtgctgttggcatggcctgtgccatcagtatcttaatgaaggacttggcagatgaacttgctcttgttgatgtcatcgaagacaaattgaagggagagatgatggatctccaacatggcagccttttccttagaacaccaaagattgtctctggcaaagactataatgtaactgcaaactccaagctggtcattatcacggctggggcacgtcagcaagagggagaaagccgtcttaatttggtccagcgtaacgtgaacatatttaaattcatcattcctaatgttgtaaaatacagcccgaactgcaagttgcttattgtttcaaatccagtggatatcttgacctacgtggcttggaagataagtggttttcccaaaaaccgtgttattggaagtggttgcaatctggattcagcccgattccgttacctgatgggggaaaggctgggagttcacccattaagctgtcatgggtgggtccttggggaacatggagattccagtgtgcctgtatggagtggaatgaatgttgctggtgtctctctgaagactctgcacccagatttagggactgataaagataaggaacagtggaaagaggttcacaagcaggtggttgagagtgcttatgaggtgatcaaactcaaaggctacacatcctgggctattggactctctgtagcagatttggcagagagtataatgaagaatcttaggcgggtgcacccagtttccaccatgattaagggtctttacggaataaaggatgatgtcttccttagtgttccttgcattttgggacagaatggaatctcagaccttgtgaaggtgactctgacttctgaggaagaggcccgtttgaagaagagtgcagatacactttgggggatccaaaaggagctgcaattttaaagtcttctgatgtcatatcatttcactgtctaggctacaacaggattctaggtggaggttgtgcatgttgtcctttttatctgatctgtgattaaagcagtaatattttaagatggactgggaaaaacatcaactcctgaagttagaaataagaatggtttgtaaaatccacagctatatcctgatgctggatggtattaatcttgtgtagtcttcaactggttagtgtgaaatagttctgccacctctgacgcaccactgccaatgctgtacgtactgcatttgccccttgagccaggtggatgtttaccgtgtgttatataacttcctggctccttcactgaacatgcctagtccaacattttttcccagtgagtcacatcctgggatccagtgtataaatccaatatcatgtcttgtgcataattcttccaaaggatcttattttgtgaactatatcagtagtgtacattaccatataatgtaaaaagatctacatacaaacaatgcaaccaactatccaagtgttataccaactaaaacccccaataaaccttgaacagtg

SEQ ID NO: 1436 - DNA, 2029 bp, Homo sapiens
actcagtgttcgcgggagccgcacctacaccagccaacccagatcccgaggtccgacagcgcccggcccagatccccacgcctgccaggagcaagccgagagccagccggccggcgcactccgactccgagcagtctctgtccttcgacccgagccccgcgccctttccgggacccctgccccgcgggcagcgctgccaacctgccggccatggagaccccgtcccagcggcgcgccacccgcagcggggcgcaggccagctccactccgctgtcgcccacccgcatcacccggctgcaggagaaggaggacctgcaggagctcaatgatcgcttggcggtctacatcgaccgtgtgcgctcgctggaaacggagaacgcagggctgcgccttcgcatcaccgagtctgaagaggtggtcagccgcgaggtgtccggcatcaaggccgcctacgaggccgagctcggggatgcccgcaagacccttgactcagtagccaaggagcgcgcccgcctgcagctggagctgagcaaagtgcgtgaggagtttaaggagctgaaagcgcgcaataccaagaaggagggtgacctgatagctgctcaggctcggctgaaggacctggaggctctgctgaactccaaggaggccgcactgagcactgctctcagtgagaagcgcacgctggagggcgagctgcatgatctgcggggccaggtggccaagcttgaggcagccctaggtgaggccaagaagcaacttcaggatgagatgctgcggcgggtggatgctgagaacaggctgcagaccatgaaggaggaactggacttccagaagaacatctacagtgaggagctgcgtgagaccaagcgccgtcatgagacccgactggtggagattgacaatgggaagcagcgtgagtttgagagccggctggcggatgcgctgcaggaactgcgggcccagcatgaggaccaggtggagcagtataagaaggagctggagaagacttattctgccaagctggacaatgccaggcagtctgctgagaggaacagcaacctggtgggggctgcccacgaggagctgcagcagtcgcgcatccgcatcgacagcctctctgcccagctcagccagctccagaagcagctggcagccaaggaggcgaagcttcgagacctggaggactcactggcccgtgagcgggacaccagccggcggctgctggcggaaaaggagcgggagatggccgagatgcgggcaaggatgcagcagcagctggacgagtaccaggagcttctggacatcaagctggccctggacatggagatccacgcctaccgcaagctcttggagggcgaggaggagaggctacgcctgtcccccagccctacctcgcagcgcagccgtggccgtgcttcctctcactcatcccagacacagggtgggggcagcgtcaccaaaaagcgcaaactggagtccactgagagccgcagcagcttctcacagcacgcacgcactagcgggcgcgtggccgtggaggaggtggatgaggagggcaagtttgtccggctgcgcaacaagtccaatgaggaccagtccatgggcaattggcagatcaagcgccagaatggagatgatcccttgctgacttaccggttcccaccaaagttcaccctgaaggctgggcaggtggtgacgatctgggctgcaggagctggggccacccacagcccccctaccgacctggtgtggaaggcacagaacacctggggctgcgggaacagcctgcgtacggctctcatcaactccactggggaagaagtggccatgcgcaagctggtgcgctcagtgactgtggttgaggacgacgaggatgaggatggagatgacctgctccatcaccaccatgtgagtggtagccgccgctgaggccgagcctgcactggggccacccagccaggcctgggggcagcctctccccagcctccccgtgccaaaaatcttttcattaaagaatgtttggaacttt

SEQ ID NO: 1437 - DNA, 3642 bp, Homo sapiens
ctcagctctcggagtaggaagctcgggcgctccggctgtaaggagccgcggcagggggaaaatggagcccttcaccaatgatcggcttcagctccccaggaatatgattgaaaacagcatgtttgaggaagaaccagatgtggtggatttagccaaagagccttgtttacatcctctagagcctgatgaggtggaatatgagccccggggttcccgactgctggtgcggggtcttggtgagcatgagatggaggaggatgaagaggattatgagtcatcagcaaagctgctgggcatgtccttcatgaatagaagctcaggccttcggaacagtgcaactggttacaggcagagcccagatggggcttgttcagtaccctctgcaaggaccatggtggtctgtgcttttgtcatcgtggttgctgtttctgtaatcatggtgatttacttactgcccagatgtacctttaccaaagaaggctgccataaaaaaaaccagtcaattggactaattcagccatttgcaacaaatgggaaattgtttccatgggcacagatcaggcttcccactgccgttgtgccactacgctatgaactcagcctacacccgaacctaacctcgatgacattcaggggttctgtgacaatttcagttcaggctcttcaggtcacatggaatatcattcttcatagcacaggtcataatatttcaagagtgacctttatgtcagcagtttcaagccaagaaaaacaagctgagatcctggaatatgcatatcatggacagatcgccattgttgcccccgaagcccttctagcagggcacaattatacgttgaagatagagtactcggcaaatatatctagttcttattatgggttttatggcttctcctacacagatgaaagtaatgagaaaaagtactttgcagcaactcagtttgaacccctggcagcaagatctgcttttccttgttttgatgaaccagcatttaaagccacttttatcatcaagatcataagggatgagcaatacaccgctttatcaaatatgcctaagaagtcatcagtcgttctagatgatggacttgttcaggatgagttttctgagagtgtgaagatgagcacttacttggttgctttcattgtgggagagatgaagaacctgagtcaggacgtaaatggaaccctggtttctatatatgctgtaccagaaaatattggtcaagttcattatgccttggaaacaactgtgaagcttcttgagttttttcaaaactactttgaaattcagtacccacttaagaaattggatttggtggctattcctgactttgaagcaggagcaatggaaaattggggtttgctcaccttccgagaggagacacttctgtatgacagtaacacttcttcaatggcggatagaaagctggtgactaaaatcattgctcatgagctggcccaccagtggtttggcaatctggtaacaatgaagtggtggaatgacctatggctaaatgaaggttttgccactttcatggagtatttctctttggaaaaaatattcaaagagctttctagttatgaagatttcttagatgctcgatttaaaaccatgaagaaagattccttaaattcatctcatccaatatcatcatctgttcagtcttcagaacaaattgaagaaatgtttgattctctttcctattttaagggatcttctctcttgttgatgttgaaaacttaccttagtgaagatgtgtttcaacatgctgttgtcctttacctgcataatcacagctatgcatctattcaaagtgatgatctgtgggatagttttaatgaggtcacaaaccaaacactagatgtaaagagaatgatgaaaacctggaccctgcagaaaggatttcctttagtgactgttcaaaagaaaggaaaggaactttttatacaacaagagagattctttttaaatatgaagcctgaaattcagccttcagatacaagctacctgtggcatattccactatcctatgtcactgaaggaagaaattattcaaaatatcaatcggtatcattactggataagaaatcaggtgtcatcaatcttacagaagaagtgctgtgggtcaaagtgaatataaacatgaatggttattatattgtacactatgcagatgatgattgggaagcactaatccatcagttgaaaataaatccttatgttctgagtgacaaagaccgagccaaccttatcaacaacatctttgaacttgcaggcctaggcaaggtacctctcaagagggcctttgatttgattaattatcttggaaatgagaaccatactgcacccatcaccgaagccctgtttcagacagacctcatctataacctccttgaaaaactgggatacatggatctggcctcaagactggtgactagggtatttaaattacttcaaaaccaaattcaacaacaaacttggactgatgagggcactccatctatgcgagagcttcggtcagccctgctagagtttgcttgcacccacaacctggggaactgctctactactgccatgaaactgtttgatgactggatggcatccaatggaactcaaagcctacctactgatgtcatgacaactgtgttcaaagttggagcaaaaactgacaaaggctggtcattccttttgggcaaatacatttctataggctctgaagcagagaagaacaaaatactagaagcacttgccagctcagaggatgtgcggaagctttactggttaatgaaaagtagcctgaatggagataacttccgaacacagaagctgtcttttatcattagaacagtgggtcgacattttcctggacacttactggcatgggattttgtcaaagagaactggaataagcttgtacagaagttccctctggggtcctataccatacaaaatattgttgctggatcaacttacctgttttcaacaaagacacatttatctgaggttcaggcattctttgaaaatcagtcagaggcaaccttccggcttcgttgtgtccaggaggctttggaagtcattcagttgaatatccagtggatggagaagaacctcaaaagtctcacatggtggctgtagcatgcacaaccgcacctcattttgttgcccattcagagagcttgtaagcttgggctctgccgcttttgcaaaagccaaggtaaagccaggatcgctgccaagttgtttgcactctttggagttctagttagctcagggcctgactgtatttttcatccatcttttctgaagtgtctttgggcagtatgtagttatttattacaaaattatattcacgtaaatgccaaccatctacaaaaacaatgagtaatttttctactttgaagatacacagatggggacaaaaaccctgttttggaattctgttctattcctcagtatccagaaagttactgacacagtaaaacaaggaaagttctaccctaagagccgccatcacttcaggccgctggtttgtcagccatctgctgcttcttattgatagatggcattggaatgtggtacaaagttagctctgaagaatatggtaacgaagacaataaagcatgcactgtaagaactga

SEQ ID NO: 1438 - DNA, 13938 bp, Homo sapiens
ctgggattgggacacactttctggacactgctggccagtcccaaaatggaacataaggaagtggttcttctacttcttttatttctgaaatcagcagcacctgagcaaagccatgtggtccaggattgctaccatggtgatggacagagttatcgaggcacgtactccaccactgtcacaggaaggacctgccaagcttggtcatctatgacaccacatcaacataataggaccacagaaaactacccaaatgctggcttgatcatgaactactgcaggaatccagatgctgtggcagctccttattgttatacgagggatcccggtgtcaggtgggagtactgcaacctgacgcaatgctcagacgcagaagggactgccgtcgcgcctccgactgttaccccggttccaagcctagaggctccttccgaacaagcaccgactgagcaaaggcctggggtgcaggagtgctaccatggtaatggacagagttatcgaggcacatactccaccactgtcacaggaagaacctgccaagcttggtcatctatgacaccacactcgcatagtcggaccccagaatactacccaaatgctggcttgatcatgaactactgcaggaatccagatgctgtggcagctccttattgttatacgagggatcccggtgtcaggtgggagtactgcaacctgacgcaatgctcagacgcagaagggactgccgtcgcgcctccgactgttaccccggttccaagcctagaggctccttccgaacaagcaccgactgagcaaaggcctggggtgcaggagtgctaccatggtaatggacagagttatcgaggcacatactccaccactgtcacaggaagaacctgccaagcttggtcatctatgacaccacactcgcatagtcggaccccagaatactacccaaatgctggcttgatcatgaactactgcaggaatccagatgctgtggcagctccttattgttatacgagggatcccggtgtcaggtgggagtactgcaacctgacgcaatgctcagacgcagaagggactgccgtcgcgcctccgactgttaccccggttccaagcctagaggctccttccgaacaagcaccgactgagcaaaggcctggggtgcaggagtgctaccatggtaatggacagagttatcgaggcacatactccaccactgtcacaggaagaacctgccaagcttggtcatctatgacaccacactcgcatagtcggaccccagaatactacccaaatgctggcttgatcatgaactactgcaggaatccagatgctgtggcagctccttattgttatacgagggatcccggtgtcaggtgggagtactgcaacctgacgcaatgctcagacgcagaagggactgccgtcgcgcctccgactgttaccccggttccaagcctagaggctccttccgaacaagcaccgactgagcaaaggcctggggtgcaggagtgctaccatggtaatggacagagttatcgaggcacatactccaccactgtcacaggaagaacctgccaagcttggtcatctatgacaccacactcgcatagtcggaccccagaatactacccaaatgctggcttgatcatgaactactgcaggaatccagatgctgtggcagctccttattgttatacgagggatcccggtgtcaggtgggagtactgcaacctgacgcaatgctcagacgcagaagggactgccgtcgcgcctccgactgttaccccggttccaagcctagaggctccttccgaacaagcaccgactgagcaaaggcctggggtgcaggagtgctaccatggtaatggacagagttatcgaggcacatactccaccactgtcacaggaagaacctgccaagcttggtcatctatgacaccacactcgcatagtcggaccccagaatactacccaaatgctggcttgatcatgaactactgcaggaatccagatgctgtggcagctccttattgttatacgagggatcccggtgtcaggtgggagtactgcaacctgacgcaatgctcagacgcagaagggactgccgtcgcgcctccgactgttaccccggttccaagcctagaggctccttccgaacaagcaccgactgagcaaaggcctggggtgcaggagtgctaccatggtaatggacagagttatcgaggcacatactccaccactgtcacaggaagaacctgccaagcttggtcatctatgacaccacactcgcatagtcggaccccagaatactacccaaatgctggcttgatcatgaactactgcaggaatccagatgctgtggcagctccttattgttatacgagggatcccggtgtcaggtgggagtactgcaacctgacgcaatgctcagacgcagaagggactgccgtcgcgcctccgactgttaccccggttccaagcctagaggctccttccgaacaagcaccgactgagcaaaggcctggggtgcaggagtgctaccatggtaatggacagagttatcgaggcacatactccaccactgtcacaggaagaacctgccaagcttggtcatctatgacaccacactcgcatagtcggaccccagaatactacccaaatgctggcttgatcatgaactactgcaggaatccagatgctgtggcagctccttattgttatacgagggatcccggtgtcaggtgggagtactgcaacctgacgcaatgctcagacgcagaagggactgccgtcgcgcctccgactgttaccccggttccaagcctagaggctccttccgaacaagcaccgactgagcaaaggcctggggtgcaggagtgctaccatggtaatggacagagttatcgaggcacatactccaccactgtcacaggaagaacctgccaagcttggtcatctatgacaccacactcgcatagtcggaccccagaatactacccaaatgctggcttgatcatgaactactgcaggaatccagatgctgtggcagctccttattgttatacgagggatcccggtgtcaggtgggagtactgcaacctgacgcaatgctcagacgcagaagggactgccgtcgcgcctccgactgttaccccggttccaagcctagaggctccttccgaacaagcaccgactgagcaaaggcctggggtgcaggagtgctaccatggtaatggacagagttatcgaggcacatactccaccactgtcacaggaagaacctgccaagcttggtcatctatgacaccacactcgcatagtcggaccccagaatactacccaaatgctggcttgatcatgaactactgcaggaatccagatgctgtggcagctccttattgttatacgagggatcccggtgtcaggtgggagtactgcaacctgacgcaatgctcagacgcagaagggactgccgtcgcgcctccgactgttaccccggttccaagcctagaggctccttccgaacaagcaccgactgagcaaaggcctggggtgcaggagtgctaccatggtaatggacagagttatcgaggcacatactccaccactgtcacaggaagaacctgccaagcttggtcatctatgacaccacactcgcatagtcggaccccagaatactacccaaatgctggcttgatcatgaactactgcaggaatccagatgctgtggcagctccttattgttatacgagggatcccggtgtcaggtgggagtactgcaacctgacgcaatgctcagacgcagaagggactgccgtcgcgcctccgactgttaccccggttccaagcctagaggctccttccgaacaagcaccgactgagcaaaggcctggggtgcaggagtgctaccatggtaatggacagagttatcgaggcacatactccaccactgtcacaggaagaacctgccaagcttggtcatctatgacaccacactcgcatagtcggaccccagaatactacccaaatgctggcttgatcatgaactactgcaggaatccagatgctgtggcagctccttattgttatacgagggatcccggtgtcaggtgggagtactgcaacctgacgcaatgctcagacgcagaagggactgccgtcgcgcctccgactgttaccccggttccaagcctagaggctccttccgaacaagcaccgactgagcaaaggcctggggtgcaggagtgctaccatggtaatggacagagttatcgaggcacatactccaccactgtcacaggaagaacctgccaagcttggtcatctatgacaccacactcgcatagtcggaccccagaatactacccaaatgctggcttgatcatgaactactgcaggaatccagatgctgtggcagctccttattgttatacgagggatcccggtgtcaggtgggagtactgcaacctgacgcaatgctcagacgcagaagggactgccgtcgcgcctccgactgttaccccggttccaagcctagaggctccttccgaacaagcaccgactgagcaaaggcctggggtgcaggagtgctaccatggtaatggacagagttatcgaggcacatactccaccactgtcacaggaagaacctgccaagcttggtcatctatgacaccacactcgcatagtcggaccccagaatactacccaaatgctggcttgatcatgaactactgcaggaatccagatgctgtggcagctccttattgttatacgagggatcccggtgtcaggtgggagtactgcaacctgacgcaatgctcagacgcagaagggactgccgtcgcgcctccgactgttaccccggttccaagcctagaggctccttccgaacaagcaccgactgagcaaaggcctggggtgcaggagtgctaccatggtaatggacagagttatcgaggcacatactccaccactgtcacaggaagaacctgccaagcttggtcatctatgacaccacactcgcatagtcggaccccagaatactacccaaatgctggcttgatcatgaactactgcaggaatccagatgctgtggcagctccttattgttatacgagggatcccggtgtcaggtgggagtactgcaacctgacgcaatgctcagacgcagaagggactgccgtcgcgcctccgactgttaccccggttccaagcctagaggctccttccgaacaagcaccgactgagcaaaggcctggggtgcaggagtgctaccatggtaatggacagagttatcgaggcacatactccaccactgtcacaggaagaacctgccaagcttggtcatctatgacaccacactcgcatagtcggaccccagaatactacccaaatgctggcttgatcatgaactactgcaggaatccagatgctgtggcagctccttattgttatacgagggatcccggtgtcaggtgggagtactgcaacctgacgcaatgctcagacgcagaagggactgccgtcgcgcctccgactgttaccccggttccaagcctagaggctccttccgaacaagcaccgactgagcaaaggcctggggtgcaggagtgctaccatggtaatggacagagttatcgaggcacatactccaccactgtcacaggaagaacctgccaagcttggtcatctatgacaccacactcgcatagtcggaccccagaatactacccaaatgctggcttgatcatgaactactgcaggaatccagatgctgtggcagctccttattgttatacgagggatcccggtgtcaggtgggagtactgcaacctgacgcaatgctcagacgcagaagggactgccgtcgcgcctccgactgttaccccggttccaagcctagaggctccttccgaacaagcaccgactgagcaaaggcctggggtgcaggagtgctaccatggtaatggacagagttatcgaggcacatactccaccactgtcacaggaagaacctgccaagcttggtcatctatgacaccacactcgcatagtcggaccccagaatactacccaaatgctggcttgatcatgaactactgcaggaatccagatgctgtggcagctccttattgttatacgagggatcccggtgtcaggtgggagtactgcaacctgacgcaatgctcagacgcagaagggactgccgtcgcgcctccgactgttaccccggttccaagcctagaggctccttccgaacaagcaccgactgagcaaaggcctggggtgcaggagtgctaccatggtaatggacagagttatcgaggcacatactccaccactgtcacaggaagaacctgccaagcttggtcatctatgacaccacactcgcatagtcggaccccagaatactacccaaatgctggcttgatcatgaactactgcaggaatccagatgctgtggcagctccttattgttatacgagggatcccggtgtcaggtgggagtactgcaacctgacgcaatgctcagacgcagaagggactgccgtcgcgcctccgactgttaccccggttccaagcctagaggctccttccgaacaagcaccgactgagcaaaggcctggggtgcaggagtgctaccatggtaatggacagagttatcgaggcacatactccaccactgtcacaggaagaacctgccaagcttggtcatctatgacaccacactcgcatagtcggaccccagaatactacccaaatgctggcttgatcatgaactactgcaggaatccagatgctgtggcagctccttattgttatacgagggatcccggtgtcaggtgggagtactgcaacctgacgcaatgctcagacgcagaagggactgccgtcgcgcctccgactgttaccccggttccaagcctagaggctccttccgaacaagcaccgactgagcaaaggcctggggtgcaggagtgctaccatggtaatggacagagttatcgaggcacatactccaccactgtcacaggaagaacctgccaagcttggtcatctatgacaccacactcgcatagtcggaccccagaatactacccaaatgctggcttgatcatgaactactgcaggaatccagatgctgtggcagctccttattgttatacgagggatcccggtgtcaggtgggagtactgcaacctgacgcaatgctcagacgcagaagggactgccgtcgcgcctccgactgttaccccggttccaagcctagaggctccttccgaacaagcaccgactgagcaaaggcctggggtgcaggagtgctaccatggtaatggacagagttatcgaggcacatactccaccactgtcacaggaagaacctgccaagcttggtcatctatgacaccacactcgcatagtcggaccccagaatactacccaaatgctggcttgatcatgaactactgcaggaatccagatgctgtggcagctccttattgttatacgagggatcccggtgtcaggtgggagtactgcaacctgacgcaatgctcagacgcagaagggactgccgtcgcgcctccgactgttaccccggttccaagcctagaggctccttccgaacaagcaccgactgagcaaaggcctggggtgcaggagtgctaccatggtaatggacagagttatcgaggcacatactccaccactgtcacaggaagaacctgccaagcttggtcatctatgacaccacactcgcatagtcggaccccagaatactacccaaatgctggcttgatcatgaactactgcaggaatccagatgctgtggcagctccttattgttatacgagggatcccggtgtcaggtgggagtactgcaacctgacgcaatgctcagacgcagaagggactgccgtcgcgcctccgactgttaccccggttccaagcctagaggctccttccgaacaagcaccgactgagcagaggcctggggtgcaggagtgctaccacggtaatggacagagttatcgaggcacatactccaccactgtcactggaagaacctgccaagcttggtcatctatgacaccacactcgcatagtcggaccccagaatactacccaaatgctggcttgatcatgaactactgcaggaatccagatgctgtggcagctccttattgttatacgagggatcccggtgtcaggtgggagtactgcaacctgacgcaatgctcagacgcagaagggactgccgtcgcgcctccgactgttaccccggttccaagcctagaggctccttccgaacaagcaccgactgagcaaaggcctggggtgcaggagtgctaccatggtaatggacagagttatcgaggcacatactccaccactgtcacaggaagaacctgccaagcttggtcatctatgacaccacactcgcatagtcggaccccagaatactacccaaatgctggcttgatcatgaactactgcaggaatccagatgctgtggcagctccttattgttatacgagggatcccggtgtcaggtgggagtactgcaacctgacgcaatgctcagacgcagaagggactgccgtcgcgcctccgactgttaccccggttccaagcctagaggctccttccgaacaagcaccgactgagcaaaggcctggggtgcaggagtgctaccatggtaatggacagagttatcgaggcacatactccaccactgtcacaggaagaacctgccaagcttggtcatctatgacaccacactcgcatagtcggaccccagaatactacccaaatgctggcttgatcatgaactactgcaggaatccagatgctgtggcagctccttattgttatacgagggatcccggtgtcaggtgggagtactgcaacctgacgcaatgctcagacgcagaagggactgccgtcgcgcctccgactgttaccccggttccaagcctagaggctccttccgaacaagcaccgactgagcagaggcctggggtgcaggagtgctaccacggtaatggacagagttatcgaggcacatactccaccactgtcactggaagaacctgccaagcttggtcatctatgacaccacactcgcatagtcggaccccagaatactacccaaatgctggcttgatcatgaactactgcaggaatccagatgctgtggcagctccttattgttatacgagggatcccggtgtcaggtgggagtactgcaacctgacgcaatgctcagacgcagaagggactgccgtcgcgcctccgactgttaccccggttccaagcctagaggctccttccgaacaagcaccgactgagcagaggcctggggtgcaggagtgctaccacggtaatggacagagttatcgaggcacatactccaccactgtcactggaagaacctgccaagcttggtcatctatgacaccacactcgcatagtcggaccccagaatactacccaaatgctggcttgatcatgaactactgcaggaatccagatgctgtggcagctccttattgttatacgagggatcccggtgtcaggtgggagtactgcaacctgacgcaatgctcagacgcagaagggactgccgtcgcgcctccgactgttaccccggttccaagcctagaggctccttccgaacaagcaccgactgagcagaggcctggggtgcaggagtgctaccacggtaatggacagagttatcgaggcacatactccaccactgtcactggaagaacctgccaagcttggtcatctatgacaccacactcgcatagtcggaccccagaatactacccaaatgctggcttgatcatgaactactgcaggaatccagatgctgtggcagctccttattgttatacgagggatcccggtgtcaggtgggagtactgcaacctgacgcaatgctcagacgcagaagggactgccgtcgcgcctccgactgttaccccggttccaagcctagaggctccttccgaacaagcaccgactgagcagaggcctggggtgcaggagtgctaccacggtaatggacagagttatcgaggcacatactccaccactgtcactggaagaacctgccaagcttggtcatctatgacaccacactcgcatagtcggaccccagaatactacccaaatgctggcttgatcatgaactactgcaggaatccagatcctgtggcagccccttattgttatacgagggatcccagtgtcaggtgggagtactgcaacctgacacaatgctcagacgcagaagggactgccgtcgcgcctccaactattaccccgattccaagcctagaggctccttctgaacaagcaccaactgagcaaaggcctggggtgcaggagtgctaccacggaaatggacagagttatcaaggcacatacttcattactgtcacaggaagaacctgccaagcttggtcatctatgacaccacactcgcatagtcggaccccagcatactacccaaatgctggcttgatcaagaactactgccgaaatccagatcctgtggcagccccttggtgttatacaacagatcccagtgtcaggtgggagtactgcaacctgacacgatgctcagatgcagaatggactgccttcgtccctccgaatgttattctggctccaagcctagaggctttttttgaacaagcactgactgaggaaacccccggggtacaggactgctactaccattatggacagagttaccgaggcacatactccaccactgtcacaggaagaacttgccaagcttggtcatctatgacaccacaccagcatagtcggaccccagaaaactacccaaatgctggcctgaccaggaactactgcaggaatccagatgctgagattcgcccttggtgttacaccatggatcccagtgtcaggtgggagtactgcaacctgacacaatgcctggtgacagaatcaagtgtccttgcaactctcacggtggtcccagatccaagcacagaggcttcttctgaagaagcaccaacggagcaaagccccggggtccaggattgctaccatggtgatggacagagttatcgaggctcattctctaccactgtcacaggaaggacatgtcagtcttggtcctctatgacaccacactggcatcagaggacaacagaatattatccaaatggtggcctgaccaggaactactgcaggaatccagatgctgagattagtccttggtgttataccatggatcccaatgtcagatgggagtactgcaacctgacacaatgtccagtgacagaatcaagtgtccttgcgacgtccacggctgtttctgaacaagcaccaacggagcaaagccccacagtccaggactgctaccatggtgatggacagagttatcgaggctcattctccaccactgttacaggaaggacatgtcagtcttggtcctctatgacaccacactggcatcagagaaccacagaatactacccaaatggtggcctgaccaggaactactgcaggaatccagatgctgagattcgcccttggtgttataccatggatcccagtgtcagatgggagtactgcaacctgacgcaatgtccagtgatggaatcaactctcctcacaactcccacggtggtcccagttccaagcacagagcttccttctgaagaagcaccaactgaaaacagcactggggtccaggactgctaccgaggtgatggacagagttatcgaggcacactctccaccactatcacaggaagaacatgtcagtcttggtcgtctatgacaccacattggcatcggaggatcccattatactatccaaatgctggcctgaccaggaactactgcaggaatccagatgctgagattcgcccttggtgttacaccatggatcccagtgtcaggtgggagtactgcaacctgacacgatgtccagtgacagaatcgagtgtcctcacaactcccacagtggccccggttccaagcacagaggctccttctgaacaagcaccacctgagaaaagccctgtggtccaggattgctaccatggtgatggacggagttatcgaggcatatcctccaccactgtcacaggaaggacctgtcaatcttggtcatctatgataccacactggcatcagaggaccccagaaaactacccaaatgctggcctgaccgagaactactgcaggaatccagattctgggaaacaaccctggtgttacacaaccgatccgtgtgtgaggtgggagtactgcaatctgacacaatgctcagaaacagaatcaggtgtcctagagactcccactgttgttccagttccaagcatggaggctcattctgaagcagcaccaactgagcaaacccctgtggtccggcagtgctaccatggtaatggccagagttatcgaggcacattctccaccactgtcacaggaaggacatgtcaatcttggtcatccatgacaccacaccggcatcagaggaccccagaaaactacccaaatgatggcctgacaatgaactactgcaggaatccagatgccgatacaggcccttggtgttttaccatggaccccagcatcaggtgggagtactgcaacctgacgcgatgctcagacacagaagggactgtggtcgctcctccgactgtcatccaggttccaagcctagggcctccttctgaacaagactgtatgtttgggaatgggaaaggataccggggcaagaaggcaaccactgttactgggacgccatgccaggaatgggctgcccaggagccccatagacacagcacgttcattccagggacaaataaatgggcaggtctggaaaaaaattactgccgtaaccctgatggtgacatcaatggtccctggtgctacacaatgaatccaagaaaactttttgactactgtgatatccctctctgtgcatcctcttcatttgattgtgggaagcctcaagtggagccgaagaaatgtcctggaagcattgtaggggggtgtgtggcccacccacattcctggccctggcaagtcagtctcagaacaaggtttggaaagcacttctgtggaggcaccttaatatccccagagtgggtgctgactgctgctcactgcttgaagaagtcctcaaggccttcatcctacaaggtcatcctgggtgcacaccaagaagtgaacctcgaatctcatgttcaggaaatagaagtgtctaggctgttcttggagcccacacaagcagatattgccttgctaaagctaagcaggcctgccgtcatcactgacaaagtaatgccagcttgtctgccatccccagactacatggtcaccgccaggactgaatgttacatcactggctggggagaaacccaaggtacctttgggactggccttctcaaggaagcccagctccttgttattgagaatgaagtgtgcaatcactataagtatatttgtgctgagcatttggccagaggcactgacagttgccagggtgacagtggagggcctctggtttgcttcgagaaggacaaatacattttacaaggagtcacttcttggggtcttggctgtgcacgccccaataagcctggtgtctatgctcgtgtttcaaggtttgttacttggattgagggaatgatgagaaataattaattggacgggagacagagtgaagcatcaacctacttagaagctgaaacgtgggtaaggatttagcatgctggaaataatagacagcaatcaaacgaagacactgttcccagctaccagctatgccaaaccttggcatttttggtatttttgtgtataagcttttaaggtctgactgacaaattctgtattaaggtgtcatagctatgacatttgttaaaaataaactctgcacttattttgatttga

SEQ ID NO: 1439 - DNA, 5656 bp, Homo sapiens
  misc_feature (4528)..(4528): n is a, c, g, or t
gtcacttttatttgggggtgtggacagctgctttcccaggggagtacttcttacagtgggatttcaagacaagatcggcctgaagaaaaattatatttgtatattttttaaaaagtgggaactttgaggctcagagacagagcagaagacagaacctggtcttctgattccctgtgttctgcttttttcattgttccactggacgctcatcagagggaagatctttttcctcaattgattccaacaatgtctcacccatcttggctgccacccaaaagcactggtgagcccctcggccatgtgcctgcacggatggagaccacccattcctttgggaaccccagcatttcagtgtctacacaacagccacccaaaaagtttgccccggtagttgctccaaaacctaagtacaacccatacaaacaacctggaggtgagggtgattttcttccacccccacctccacctctagatgattccagtgcccttccatctatctctggaaactttcctcctccaccacctcttgatgaagaggctttcaaagtacaggggaatcccggaggcaagacacttgaggagaggcgctccagcctggacgctgagattgactccttgaccagcatcttggctgaccttgagtgcagctccccctataagcctcggcctccacagagctccactggttcaacagcctctcctccagtttcgaccccagtcacaggacacaagagaatggtcatcccgaaccaaccccctctaacagcaaccaagaagtctacattgaaaccacagcctgcaccccaggctggacccatccctgtggctccaatcggaacactcaaaccccagcctcagccagtcccagcctcctacaccacggcctccacttcttcaaggcctacctttaatgtgcaggtgaagtcagcccagcccagccctcattatatggctgccccttcatcaggacaaatttatggctcagggccccagggctataacactcagccagttcctgtctctgggcagtgtccacctccttcaacacggggaggcatggattatgcctacattccaccaccaggacttcagccggagcctgggtatgggtatgcccccaaccagggacgctattatgaaggctactatgcagcagggccaggctatgggggcagaaatgactctgaccctacctatggtcaacaaggtcacccaaatacctggaaacgggaaccagggtacactcctcctggagcagggaaccagaaccctcctgggatgtatccagtcactggtcccaagaagacctatatcacagatcctgtttcagccccctgtgcgccaccattgcagccaaagggtggccattcagggcaactggggccttcgtcagttgccccttcattccgcccagaggatgagcttgagcacctgaccaaaaagatgctgtatgacatggaaaatccacctgctgacgaatactttggccgctgtgctcgctgtggagaaaacgtagttggggaaggtacaggatgcactgccatggatcaggtcttccacgtggattgttttacctgcatcatctgcaacaacaagctccgagggcagccattctatgctgtggaaaagaaagcatactgcgagccctgctacattaatactctggagcagtgcaatgtgtgttccaagcccatcatggagcggattctccgagccaccgggaaggcctatcatcctcactgtttcacctgcgtgatgtgccaccgcagcctggatgggatcccattcactgtggatgctggcgggctcattcactgcattgaggacttccacaagaaatttgccccgcggtgttctgtgtgcaaggagcctattatgccagccccgggccaggaggagactgtccgtattgtggctttggatcgagatttccatgttcactgctaccgatgcgaggattgcggtggtctcctgtctgaaggagataaccaaggctgctaccccttggatgggcacatcctctgcaagacctgcaactctgcccgcatcagggtgttgaccgccaaggcgagcactgacctttagattcagtcacctgttcagccggcactgagaagaacgaacacaagaaaaagataagaaatactagagtaaaggccatcaaactacgcgatagtctctgttcttcatctgctattaaccttgccttagaaacacataaattatgagatttttttttaaaagttgttaccaaatacacatttcacattgaatcatgtaggatcttgatgggcctttgttcccaaggacttccacatttttgcacagattatgctccatcccttcacttctgcattcctgtaacttttaatccctatgtttgtctcacttttcatctggttgaatggcttttcttagtgtggtatttgctgtcacatagttttttcctgggtgagtctgccaactcacaggtgcttttaggcttgaaatctccatcctatcatttccgttttgcctgtgactgtaaagagtagccattcttttcccatgtattgaagaggatattcttctcttgctttatactactcacgtccttggggagggaaatgcacaatttttttttgttaggctgtaaagaatttaagctgtaaattacataagttagaacaagcccaaatttaatttgcaaccatcagaattcagaatctatagtgaccagtgatcaaggctaattggaaaagagttatcggcccatagctaataagtagtgacagacaaccaagcttcaatatttttctaaagaaattacaggtgggatatgctagaaaaggcattttggggttatgtttaaaaaaacattattgtcccacaatattaccttaagatttttcttttccgcactacctgaacattgtaatacagacaaacttgatttcttctagaagataacattttcaatactgtcccacttctcatcttaaaaatattgtcatgtttattctaatatccaacgcaactatcaaaattgcctttttctctagaggatgaaggctgtgaaaaaaccgttcaaattctcttctttttcttttttattaccaggtccattttgcctgacaattgcaaatcagagcatacaaaataaaactgtgcagttttgtttggtttactttcaaaagagtagaaagcttgaaaagattctgaaaccacagtttcattattctcataatccttctgcaactgaaattacatattgcaggagacattttcatatcatcaatgtgacatttacaccacactttcaaagacaatcactgaaacaaaaattgtctttatgagctaaaaatatgcagaatctctgcctagaatctttattcaaacttttattagccagtgaaacacttgcttgccaactgccaagccatacttattaagttcgaacatgtttcacttaaggagagacacctagcttagtcatggcaagttgccattttgtaaactaaggattttggactgagatttcttaaatctttcttcaaatctcccacaagtatatacttttaaattatggagtattttaagtctacaaaaaggtataaataataatataatgaattcctatatacctaatacccagtttaagacaccaaatataacaagtataattacatcctccaatgtaccgtttccttattccacagatatctttttcattattgtgaagtgatgttcagatttctagtttttttttctagtttttaattttaacatcagaactgaaataaaaaattatggatacgtgttttgaattgcaaactattcctcaggaattccaattaaatttattttacttgaataggaatgatcataaaagtgattctttttttgtgactagaaattcttaagccgatggtcactatagctcatccttaatgtatggctcatttgcttttgtcactaaacggttttgtgttagaaccaccaaaattatagcttttaagagcttcctttgaccactgtctttttcttaccctacttctcttatctttgatcgtatatttctcataatgtgaaatatgatgagattcacttaggggcagcatgttagttttgggaggcaatgtcaactgtgtctctgaattcctgtcttccaaattgaagccagaccatgctgatgacctcaagtagcactgactatttgacaatagggctgataatgtaatcggcttgaattttgacttagtaactttttatgtaatactttcggagaaattctctttaggacaaagcagagagtccaatttattgagggatagattgtatctcttaaagtggtcatattattattaattttgcaaaaagaagaagaatttattgaatatttatactataaaatgcagtaacattctacttgcttattacatttaaacccttgtgtaaccgaatgtttacatgtcaagaggaaaagctgtaagaaaatgctgtcacagacccatccctgtggcatcgtcagcaggatactgcttgcttncccctttattatgcattcttataacataacctcagagtatctttaccaaaggtttttaaagtaaatctctttttaagatagacttattcttttataataatgaatgtgcactcatacatatgtagaaacatttagatttagagttttttttttctttcacaaggtataataaggaaaggatcctacaatattttattctagggtttcttaaatatatgatttatattactgtcttttctattaatcatttgatttaaacaatgccaagtcactcttttttagttgcatgaaattttgcctgcaacagagagaaaaagattgtattactttaatgattataatcatactgtctgctgatataatatcataattgttgtggtttaaatacataaatagtagaaaaatcagagtctataacagaaagtttgtaaaaatatactgattttgaaaagtatcaggaatataaatatttggtaattctgtgtaacaagagagacatggaaaaggaaaaaaatccactatatcatgggctctgcagaacatatcaaaataggatttcttaaatttttcaacccccagaccatactgactcaacatggagtctcactggccaagaaaattgcctttaaaactcgaaaataaggccaggtgtggtgactcacacttgtaatcccagcaatttgggaggctgagacaggaggattgcctgaggccaggagtttgacaccagcctgggcaacatagtgagaccttgtctctacaaaaaataaaataaaataaaaaaccaaattagccagacatggtggcatgcgcttgtttaaaaaaacaaataaataaataatcgactcaaaaataagtcatgtgtcccagcataaggcatcaggttgttagatgctggcatctctgcagctcaaagatgtgggttctttttcttgtcattaacacattgttatttctgtaggaccaacttctctgatcaaaattacttttctgggtatgtgctgattaagggggtggacttatcaacactataattgttccctatgaaagattccacagagatgtttatggtgaggtttaaaggatatgaaactctacatttaaaacaagtattttatatttgggcac

SEQ ID NO: 1440 - DNA, 1558 bp, Homo sapiens
cagcgagtgagaggggaaggggcgccaggcgagcacccgggagccagcgggacctgggcaggggcgcccggagcaggcgcgcatggcgggccccgcgcggggatccggctggaagagagcgtagcacggctcgcacgagtccggggccgatgtaccaggtgagcggccagcgcccctctggctgcgacgcgccctatggagcccccagcgcagccccgggcccagcccagaccctatccctccttcctgggctggaggtagtaacaggatccactcaccctgcggaggcagcaccagaggagggctccctggaggaggcggcaacccccatgccccaaggcaatggccctggcatcccccagggcctggacagcactgacctcgacgtccccacagaagctgttacatgccagcctcaggggaaccccttgggctgcaccccacttctgccgaatgactctggccacccctcagagctgggcggcaccagacgggcggggaatggtgccctgggtggccccaaggcccaccggaagttgcagacacacccatctctcgccagccagggcagcaagaagagtaagagcagcagcaaatccaccacctcccagatccccctccaggcacaggaagactgctgtgtccactgcatcctgtcctgcctgttctgcgagttcctgacgctgtgcaacatcgtcctggactgcgccacctgtggctcctgcagctcggaggactcgtgcctctgctgctgctgctgtggctctggcgagtgtgccgactgcgacctgccctgcgacctggactgcggcatcctggatgcctgctgcgagtccgcggactgcctggagatctgcatggagtgctgtgggctctgcttctcctcctgagcctctgtcgggggctaagccagcctggcgcccctgcagattccagcagggtccctctgagtggggccaggcccaggactgtcacacaaggcttgagaagccccctctccctggtcctctcctacccacccatgtcctctcagaaccccagccttgaaaatagtggggggcactcagaggggccacctcctcagccgtgggtggtgggcccatggcagagaagcctgaactctttactgggttaccaggttcatacattgctgaggacctgacaggacaacctaggggcagggctggggtgggggccgcagagggcagccagggctggggaacactgtgaaagttacttggggagggtgggccggtggggccgtagctctctacctctccctgctcctggtgcctgcctctctcctccaccccaggcttagaggacagaaaaatgtgaagagacgccccacccaccctcagccagccctctccagtctcctttcctaggcttttttgggggcctaacccacgcagtcaccccagagggcagggctaggcgagagcctggggtggggcgggagggggaacagtatggaaaagactggaaggggaaaggaagggaagggagggaggtctgttctatctgttgctgtaaataaagatatttgtccatctct

SEQ ID NO: 1441 - DNA, 2920 bp, Homo sapiens
cttgcagcaatggcttggattagatccacttgcattctcttttttaccttgctttttgcccacatagcagctgtaccgattaagcatcttcctgaagaaaatgtacatgatgcagattttggtgaacagaaggatatttcagaaatcaatttagctgcaggcttggacctctttcaaggggacatcctcttgcagaaatccagaaatggcctgagagacccaaacaccaggtggacgttccccattccttacatcttggctgataatttggggctgaatgctaaaggagccattctgtatgcctttgagatgttccgtctcaagtcctgtgtggatttcaagccctatgaaggagagagctcatatatcatatttcaacagtttgatgggtgctggtctgaggttggtgaccaacatgtgggacagaacatttccattggccaaggatgtgcctataaggccatcatagaacacgagatcctgcatgctttgggattttaccacgagcagtcaaggacggaccgggatgattatgtgaacatctggtgggaccaaattctttcaggttaccagcacaactttgacacctatgatgatagcttaatcacagacctcaatacaccctatgattatgagtctttgatgcactaccagcctttctcatttaacaagaatgcaagtgttcccaccatcacagccaagatccctgagtttaactccattatcggacaacgcctggatttcagtgccattgatttagagaggctgaaccgaatgtacaattgcaccacaactcacactcttttggaccactgtacttttgagaaggcaaacatctgtggaatgattcagggcaccagagatgacactgactgggcccatcaggacagtgctcaggctggagaagtggatcacaccttgttgggacaatgcacaggtgccggctacttcatgcagttcagcaccagctcggggtccgcggaagaggcagccctactggagtctcggattctttacccaaagaggaagcagcagtgcctgcaatttttctataaaatgacgggaagtccttcagacagactcgttgtctgggtcaggagggatgacagcacaggcaatgttcgcaagttggtgaaggtgcagacttttcaaggagatgatgaccacaattggaaaattgcccatgtggtgctcaaagaggaacagaagtttcgctaccttttccagggcacaaaaggcgaccctcagaactcaactgggggaatttacctagatgacatcactctgacagaaaccccctgccccacaggggtctggacagtccggaatttctcccaagtccttgagaacaccagcaaaggggacaagcttcagagccctcgattctacaattcggagggatatggttttggggtaactttatacccaaatagcagagaaagctctggttacttgagacttgcttttcatgtgtgcagtggggagaacgatgctatcctggagtggccggtagaaaacagacaggtgataattaccatccttgaccaggagcctgatgtccggaacaggatgtcctcaagcatggtgttcactacctcgaagtcgcacacatctccagcgataaatgacactgtcatctgggacaggccgtccagggtgggaacctatcatacagactgtaattgttttagaagcatcgacttgggctggagtggtttcatttcccaccaaatgctgaaaaggaggagtttcctgaaaaatgatgacctcatcatatttgtggactttgaagatatcacccacctcagccagactgaagttccctctaaaggcaaaagactgagcccccaaggcctcattctccaaggccaggagcagcaggtctccgaagaaggttcgggaaaggccatgttagaggaagccctacctgtcagcctgagccaggggcagcccagccgacagaagcggtcggtggagaacacaggccccctggaggaccataactggccacagtacttcagagacccatgtgacccaaacccttgccaaaatgacggcatctgtgtgaacgtgaaggggatggcgagctgcaggtgcatctctggacatgctttcttctacacgggggagcgctgtcagtcggccgaggtgcacggcagtgtcctgggcatggtgatcggaggcacggctggcgtgatcttcttgaccttctccatcatcgccatcctttcccaaaggccaaggaagtgacctgcctgctggcattggccagaccacagcagcacctcctccatgcaggccttaactttcccatgttcaatgcagtttggggcagcttttttatcagccttgctttggataggacctccaaggactaagcctccagccccatgtgtgacccttgtcatctctctgccccacataattatgttactttgctatgtgctcctaatgtatctagtgtgtcctgtgacaacactcatcacacttcattgtaaatcacttgttttattgactgtctttcctatagactgtaagctccatgagggcaggcacatgttgttctcattgaccgtgctggccccagtgcctagatgcatggctggcacattgttggcactcaacaatggttgaatgaataaaacaataaatgaatgaataactaagatatagaaactctcatttatattgcagattgaatatatatgatgaaattcttatgttgaatatgttagaatcaaatactcatttttcattagatacagtagtgtcatcactcttttaagatcttgttaaagatttcaaataaaggtacttctggcgagccaggctgcacagcatttgctttcctctgagattctaagagaaggcctttaataaatttaataaatattgagttagcaaaaaaaaaaaaaaaaaa

SEQ ID NO: 1442 - DNA, 1780 bp, Homo sapiens
gcagtagaggcgcggggtgcggagctagggaggccgagagccatggcggcgctattggcggcggcggcagtgcgagcccggatcctgcaggtttcttccaaggtgaaatccagtcccacctggtattcagcatcttccttctcttcttcagtgccaactgtaaagctcttcattggtgggaaattcgttgaatccaaaagtgacaaatggatcgatatccacaacccagccaccaatgaggtcattggtcgggtccctcaggccaccaaggcagaaatggatgcagccattgcttcctgcaaacgtgcttttcctgcatgggcagacacttcagtattaagccgccagcaggtcttgctccgctatcaacaacttattaaagaaaacttgaaagaaattgccaagttaatcacattggaacaagggaagaccctagctgatgctgaaggagatgtatttcgaggccttcaggtggttgagcatgcctgtagtgtgacatccctcatgatgggagagaccatgccatccatcaccaaagacatggacctttattcctaccgtctgcctctgggagtgtgtgcaggcattgctccattcaattttcctgccatgatccccctttggatgtttcccatggccatggtgtgtggaaataccttcctaatgaaaccatctgagcgagtccctggagcaactatgcttcttgctaagttgctccaggattctggtgcccctgatggaacattaaacatcatccatggacagcatgaagctgtaaattttatttgcgatcatccggacatcaaagcaatcagctttgtgggatccaacaaggcaggagagtatatcttcgagagaggatcaagacatggcaagagggttcaagccaatatgggagccaagaaccatggggtagtcatgccagatgccaataaggaaaataccctgaaccagctggttggggcagcatttggagctgctggtcagcgctgcatggctctttcaacagcagtccttgtgggagaagccaagaagtggctgccagagctggtggagcatgccaaaaacctgagagtcaatgcaggagatcagcctggagctgatcttggccctctgatcactccccaggccaaagagcgagtctgtaatctgattgatagtggaacaaaggagggagcttccatccttcttgatggacgaaaaattaaagtgaaaggctatgaaaatggcaactttgttggaccaaccatcatctcgaatgtcaagccaaatatgacctgttacaaagaggagatttttggtccagttcttgtggttctggagacagaaacattggatgaagccatccagattgtaaataacaacccatatggaaatggaactgccatcttcaccaccaatggagccactgctcggaaatatgcccacttggtggatgttggacaggtgggagtgaatgtccccattccagtgcctttgccaatgttctcattcaccggctctcgatcctccttcaggggagacaccaatttctatggcaaacagggcatccaattctacactcagttaaagaccattacttctcagtggaaagaagaagatgctactctttcctcacctgctgttgtcatgcctaccatgggccgttagaaacaagtttgtttaagactgactccatcctgagtaatctccctttatttttgaccagcttcatttgtcagctttgctcagatcagatcgatgggattggaatacattgtaactaaaatcttaaaaaaaa

SEQ ID NO: 1443 - DNA, 2979 bp, Homo sapiens
actgaacccagccactgcccctgggcgtgaggacagggacccaggggcagtggctgggttcagtgttctcacgctcagaggaagaaaaggcagtggctgggttcagtgttctcacgctcagaggaagaaaaggcagtggtgaacacccgcctgactgccttaccctgatctaaacgacaccatctcctcccccaaggaagacacagccctggatgtgaacctaggagggtgggaatggcttatgtcactcggtctttgaggcagagcttgggctggggttgcaggggcatcagccaatctgctctcaaggagcaaaacttgggcgtaaaaggaacgggcagtggggctagccggctgtctggaggtctgggtgacctggcagcacggctgcttctcccccgccaccccgccccactccttgacacttccaggtgattttatctttataaataagatgaaaatccaagcagcattaatttaggggaacaaaagatggaaaaaaaagggggggaggcagaaggagctgatgagcatccaggagaggaggaagtaggaagagcagtgtccactgtgtgccccagggcagtggagtgtctctgtggctgcaaggcccttccttctggctccctggcagacggccagacagcagagggaactctgtattgactgggacaagccctggagccctgtctggctgttgacatggggagtgcctggatttgccccaatcaacctcccaccttcaccattgcccaagtgaagcagcttttaactctcttgcccaaagtcctctgagaatttcttcactttcaggaggtcgtctgcattcaccgtgggccgggtggtggccagagaccgcagcatgtccgacatgcaaaccacaggctctaagagtttgtccccagggacatccatccaagtcatctccatggctcctgggtcccctggtgagcatggagtcaggaggtcatcaatcatcatgctggggttggtgcgaggcgagccgccgcgagttctcacggtcccgccggcgccaccaccgcggtcactcaccgccgccgccgccaccactgccaccacggtcgcctgccacaggtgtctgcaattgaactccaaggtgcagaatggtttggaaagtagctgtattcctcagtgtggccctgggcattggtgccgttcctatagatgatcctgaagatggaggcaagcactgggtggtgatcgtggcaggttcaaatggctggtataattataggcaccaggcagacgcgtgccatgcctaccagatcattcaccgcaatgggattcctgacgaacagatcgttgtgatgatgtacgatgacattgcttactctgaagacaatcccactccaggaattgtgatcaacaggcccaatggcacagatgtctatcagggagtcccgaaggactacactggagaggatgttaccccacaaaatttccttgctgtgttgagaggcgatgcagaagcagtgaagggcataggatccggcaaagtcctgaagagtggcccccaggatcacgtgttcatttacttcactgaccatggatctactggaatactggtttttcccaatgaagatcttcatgtaaaggacctgaatgagaccatccattacatgtacaaacacaaaatgtaccgaaagatggtgttctacattgaagcctgtgagtctgggtccatgatgaaccacctgccggataacatcaatgtttatgcaactactgctgccaaccccagagagtcgtcctacgcctgttactatgatgagaagaggtccacgtacctgggggactggtacagcgtcaactggatggaagactcggacgtggaagatctgactaaagagaccctgcacaagcagtaccacctggtaaaatcgcacaccaacaccagccacgtcatgcagtatggaaacaaaacaatctccaccatgaaagtgatgcagtttcagggtatgaaacgcaaagccagttctcccgtccccctacctccagtcacacaccttgacctcacccccagccctgatgtgcctctcaccatcatgaaaaggaaactgatgaacaccaatgatctggaggagtccaggcagctcacggaggagatccagcggcatctggatgccaggcacctcattgagaagtcagtgcgtaagatcgtctccttgctggcagcgtccgaggctgaggtggagcagctcctgtccgagagagccccgctcacggggcacagctgctacccagaggccctgctgcacttccggacccactgcttcaactggcactcccccacgtacgagtatgcgttgagacatttgtacgtgctggtcaacctttgtgagaagccgtatccacttcacaggataaaattgtccatggaccacgtgtgccttggtcactactgaagagctgcctcctggaagcttttccaagtgtgagcgccccaccgactgtgtgctgatcagagactggagaggtggagtgagaagtctccgctgctcgggccctcctggggagcccccgctccagggctcgctccaggaccttcttcacaagatgacttgctcgctgttacctgcttccccagtcttttctgaaaaactacaaattagggtgggaaaagctctgtattgagaagggtcatatttgctttctaggaggtttgttgttttgcctgttagttttgaggagcaggaagctcatgggggcttctgtagcccctctcaaaaggagtctttattctgagaatttgaagctgaaacctctttaaatcttcagaatgattttattgaagagggccgcaagccccaaatggaaaactgtttttagaaaatatgatgatttttgattgcttttgtatttaattctgcaggtgttcaagtcttaaaaaataaagatttataacagaacccaaaaaaaaaaaaaaaaaaaaaaaaaaaaaaaaaaaaaaaaaaaaac

(The sequence listing continues in the following parts.)
